United States Patent Application Publication US 2007/0277267 A1 - sequence listing, part 3

SEQ ID NO: 13354 - DNA, 371 bp, Glycine max
  unsure at all n locations
agcttgcctcanagagatccaggaaagacaaggcggttgaaggaaccagttccactcccaaatatgacagccatcattttaggagcgctgagcaccaacagcgcttcgaggccatcaaaggatggtcattcctccgggagagacgtgtccagctcagggacgacgagtatactgacttccaggaagagatagttcgccggcggtgggcatcgctggttacccccatggccaagttcgacctagacgtagtcctcgagttttatgccaatgcttggcctacagaggagggtgtgcgagatatgcgatcttgggtgaggggtcagtggatccctttcgatgcggatgccctcagccagttcttgggataccct

SEQ ID NO: 13355 - DNA, 400 bp, Glycine max
  unsure at all n locations
agcttctatataagctgaaccattttatcaataaacacaagttgagttttattcagaaaattagagtttatctcttttatcttagtgagagtgattctcctaaattcttgagtgattcaagaacaccctggctgtatcaaaggactttcacaacctttgtgtgttgccctcgctggaaagagtgattctttccttcctttcatcttcaaccttgttctttcaaaccacaattccagaaaatccacttatgcccagaattatctcgtggccataactcccgttttacgcactcaaattaagtgattcttgagcctaaattgaatttcaagacgagacatnttcacctcgtttggaatcacctcatttggagccctgtagcttggagttttgccatttctat

SEQ ID NO: 13356 - DNA, 402 bp, Glycine max
  unsure at all n locations
agctntaatttcaaagtattttttttttaatttctcatttcagttactctctattcatatttaatttattctttatgtgataattagattgatggtattaaaaaaatgaagatgacaattttaaatcatcataaaatgtaatgacattagcatgtccttaatgccctcattntatttcagatgccaagatcaaattaaattaattttaaaaattaaaagacttaattgaacataaaaaataaattataagacaaaaacctaataacttattttttgtaatatttcattnttttcatattactaaactctcctaagaaaatgtaggttaaagtaacgttntaaattttctaatccttaatttaattatgggttcaagaattgtagataccaatttaatggtat

SEQ ID NO: 13357 - DNA, 411 bp, Glycine max
  unsure at all n locations
agctnttccttaagcttcaagatttagccttaggttgttcactatgtttctcatgttgctccccttatctctaacacatggaactaagggcgacctctagccttagtttcatattcagactgaaactgacgagaacctctccatgaatttgtggagtgactcatcttcgtcctgctgaatgtttgtgagtgcaactataggcaagtggtgtgctttactcatcatgtactgngctccaaaatgcacaataagtgtcatgaaagaatctatcgagttccttggcaaacgaatgtaccagtggagtgttgaaccccttaggttcatcangaatacttggcacattatgacatcatcattcgtgaatagattcatttgtgtaaccgatgcatctatatgctcctctggatccga

SEQ ID NO: 13358 - DNA, 325 bp, Glycine max
agcttgattgaagttgtcaaattgacttgtttcaaaagcttgagctcaacttaattagttcgcttataacttgttgttttcttttcctacatctaattttccttgaagtagttttttgtttattaatttactatttagttgattacatatcattatgctaggaaaaggatagtaatattactcttctaaagtatggttattgaaatagtactagtatacagcatgaaaccaattaaatcaattagactgcactactaagtaatagcatgacataaagtatcattagtattattattattattattattgtgaatacattgtctta

SEQ ID NO: 13359 - DNA, 410 bp, Glycine max
agcttcgttgcaagccagtggttggaggagaaggctggatgatgaagttgatttgtggagtgcataatcatgaattggccaactcattagttggacatccatatgtagggcgattgactgaagctgaaaaaacaattattactgatatgacgaagtccatggggaaaccaagaaatattctgctaactctgaaggaaaacaatgctaatagttgtacgatcattaaacagatatacaatgcaataaatgcatttcgttcttccataagatgaagcgatattgaaatgaaacatttgatgaagcttcttgaacgtgatcaatatattcattggcacagaataaaggatgaagatgtggttcgtgatatcttttggtgtcaccctgatgcagtgaagttagtcaacgcatat

SEQ ID NO: 13360 - DNA, 411 bp, Glycine max
agcttcattgcctaataggtcagcttacaaaagcaatctccaagagactcagcataaggatgcacaggctaaagttgagtatgtgaaaagattgcatgaccaagtgaaggcacaaattgcaaagaagaatgaaagctatgccaagaaagctaacaagaacaggaaggaaatgatacttgaaccaggtgattgggtttgggtacacatgaggagggagaggttccctaaacaaaggaagtccaaacttcaacctagagaagacagacctttccaagtccaatcatgttttcttattaattagtgaattatttaacactaatagggcttacaaattaagctctgtgtagttctcatgtgtgttataagcttatagcctttaggaatctgagaacacaacttgaaatgatatat

SEQ ID NO: 13361 - DNA, 410 bp, Glycine max
  unsure at all n locations
agctntaacaagtaagttgtcctttntttttttattaaccacctatcaagaaaaagttgatgcatttctttctttaaactgttttcttgcattcttccttgttttctctgccaaagcatcagctactctctctaaccaccgcactgtcaaagcacaccaaaactgtgtgcaatttaattatgcaacaatgactctcctccctttcctcactttcaatatttgtcatcaattntagaatttccttctgtttggccatgctgttgcgaaacggtggcaaaaaaactctcattcgcagcgttagaaaactctcctttgaggttctcacctaaagcccctccgctgaagatgaatcggatcccgttgattctgtcaacccgcattctgcaagaaggtgagtgaagcgaatgtat

SEQ ID NO: 13362 - DNA, 357 bp, Glycine max
aaaaatgattgatgttaaaacttcagactaaaagtctaaagaataaatttttcacatttaagacacaaaatatgagaaaatattatcactgttagcagtttacgtacaaagtaatcaagcctgccatgttccccagaaaaggaaagtcctggctaggactttctatatcactgattcttctgtacaaagatgtgctaccatgagccagaataaaaatatgatagacaataatgaagtacaaaatatatcataacaagtaggactacaaagaaagatatacgtacagctggtctaagttattcaagagagagatatttgatggaatgggtccctctaatccacttccatgcatttctc

SEQ ID NO: 13363 - DNA, 446 bp, Glycine max
  unsure at all n locations
ntctaaagttttctggttttccaaaccttgaaaataaaagtttgttattcatctttntcattcccttctccctttgccaaaaagaattcgccaaggactaaccgcctggattctttttgtgtctctcttctcccttttccaaaagaactaaggactaaccgcctgaattcttttgtgtctcccttctcccttgtcaaagaattcaaaatgacacagtctgagaactcttttgattcttccctttcccataaacaaaagatttcaaaggactaaccgcctaagaattcttttgtttcccccttcacaaagtttcgaaggactaaccgcctgagaactttgtcttaacacattggagggtacatcctttgtggtacaagtagagggtacatctatttgggttattgtgactgagaacaagagagggtacatctcttatggatcagttc

SEQ ID NO: 13364 - DNA, 396 bp, Glycine max
  unsure at all n locations
tttaagacaatttttcctgaaatttgggggagttggtttgatggataattntaaaggtaagaaacaacaacacacacaacaaattaataaaatgttttatgtgttaaaaaaaaaggagagaagttcaaataaagtgtgtgtgctgttagaacaaagtcaagtgaaagactagtgagtaagctaagtggattgaaaagacaaattgggtaagtctaggatttgtgctctcttagaattcaagcttttgcatcctagaaaaaccaatattnttttgtagcccagcctcactacaagctaataaaagtccttctgattcaatttgtgcatttcaaactntatggcatgagatgaagtacaaagattggacctcttgttagttattattgctaaatagct

SEQ ID NO: 13365 - DNA, 215 bp, Glycine max
acattctattgccgggtcgatgactcactgaatcgaacatattctccacgtttgctatggagtgtaagctccacttgaaacgaactgactgaattatgggagcgattgatctaatccctattatgtatgaaagctgcgactgtgggcatcaaggactccttgtaatgcctgacatcgtctgataatcgactacacttatactgactcgctatgat

SEQ ID NO: 13366 - DNA, 432 bp, Glycine max
  unsure at all n locations
tccacaacatccaggtaattccacatgcaatcatcatggtctcactttaccaagcaaaacagggcaaaggcagaaaactctgcccaaaacacaactcaaaatcacagcttttcacatacaaataccccagtaacgtttccttcgttccaattcgttaaccgttggatcgactcgaaaattttactggcagtctctagtacataagtctacattttgaccgttgggatctgctagcaaatgttcagaacccgatatgtactacccttttcacaaccagccatacacaagcatttttctgcacttatacaaaattctgttgcacatttcaacagcanaattctgcataaagtgcagatttcgaaaactactcttgccttcatccaattttgcccaaattgaatcctacaagtcccaaatcatgtaccaatcatg

SEQ ID NO: 13367 - DNA, 438 bp, Glycine max
  unsure at all n locations
nggataagattatacggagattatggagggactnnngactactttctacaatnatgcataaaaaaaggtgtctgtcattcatctcaaactactgtttatgtatttttatgcatgcaagcactcacgtgcacatatataagtngttgactagttattaattttaattaaaacataaccatatactataatttcaattatttattgtaaaactaaaataaaattatatatttaaaaatatttatttattataattataaatatataaaaactgtctatcaacttgtggaatgtataaactacaagttagtatattaataaagagaaaatatacatataatatataatctgagacatgatattttgtcaatgaaaactaataatataaaagtatgtgattttttattggaataaaatatatagtttttaataaaattatat

SEQ ID NO: 13368 - DNA, 331 bp, Glycine max
acagagcggacctagagagatgttgcggtggtcaagagaccctgcggatgtcaagtggggtgctattgcccaaaaccaagcttgaccaatcccgacccagcccgggcatagtcagtcagtgagaacctgtgatgtacctaaacaggcgagctcctgacagtcaacagataaaaggaacatagaccacaaagcaaagacgctggtgtggtggctggccagctgtgaatcttgtgtgatatatgggttatggcctctggtaatcgattaccaagggtgggtcatcgatcacaatgcttaggaatgaagacaggagactaagatggtctctggt

SEQ ID NO: 13369 - DNA, 415 bp, Glycine max
  unsure at all n locations
tccaggaatgacaaggcggccgaatgattatttccgctccggagtatgatagtcaccgctttatgagcgctgtacaccaccagcgcttcgaggccatcaagggatggtcgtttctccgggagcgacgcgtccagcttatggatgacgagtatacagatttccaggaggaaatagggcgccgacggtggacatcactggttactcccatggccaagttcgatcaagaaatagtccttgagttttatgccaatgcttggccaacagaggagggcgtgcgtgacatgagatcctgngtaaggggtcagtggatcccgtttgatgccgacgctatcggccagctcctgggatatccgttggtgttggaagagggccaggaatgtgagtatggccagaggaggaaccggtcggatgggtt

SEQ ID NO: 13370 - DNA, 428 bp, Glycine max
  unsure at all n locations
tctacattcaatttcgagcttttcgatatattacggtatttttatcggacatccgagtaaaaagtgattgtggtttgaatttgctcacggcttcggtattccatttcgagcgtctcgatatattacgggactcaatcggacatccgagtaaaaagttattgttgtttgaatttgctcagagcttcggcattccatttcgagcatctcgatatattacgggactcaatcagacatccgagtaaaaagctattgtagtttgaatttgctcagggctccagcattccatttcgagcgtctcgatgtattacgggactcaatcagacatccgagtaaaaagttatagtcgtttgaatttgctcagagcttcgacattcaatntcgagcgtttcgatatattacgggactcactcagacatccgactaaaaag

SEQ ID NO: 13371 - DNA, 435 bp, Glycine max
  unsure at all n locations
ccctcgttaatttgtatatttttattcaatgacaaattttatttatggtaaagccgnnaatcatgataataattactttctttaaaaaaaaactttgataataattatcttaaaaatcatataaataattatatgtaactaattgatagtgtaaaagctattaacctaacaatacatgcttattaactcttaaaaattggtaaaactcgctagaaaacccaatcataatggttgaaaaaagacgaagaactaatattgaataattggccggcttcaatggtttcttttcatttgtttttatcttttatgatatttaactcaataaaaaatactttgtaactagaaaaaggttaaatgtcaagttacaaaaggctgtgtctgagaattacgtataaaatattatcatttaccatattattattacgtagttatcat

SEQ ID NO: 13372 - DNA, 314 bp, Glycine max
  unsure at all n locations
tgaggtccttcaacggtgattttcagccatggagtnngtgnngtaagataaaggaaaagacgtgagatgagactgatcgangccgtacccgaatcatataaacatgagaatgcagtaactaggaagtgatcctaggtcgtttcccaacgagcagtgacaaaccaaatgttcataatatacttgcagtaacagtaacgattggggggggggtgtttggactccctccttatgccgattatcccctgcnntaagactatgaagaagatgcccgtttatgccctttactgcccctcaaggatccggcccctcatgaa

SEQ ID NO: 13373 - DNA, 393 bp, Glycine max
  unsure at all n locations
gcatgcacaagagnctggccggggcttgaagctgttgcatgtctacgaagttctagagagagaaaggcccaagttccaaagagttctgagagattttgctgtgtgaagatctgcagagacgagagctcgaagtggaagccattctgaaagcttgagaagagtttatgagtgattgtgagatcctagaggtgaaggagacatcctcaccacttgtattttcgcaatctttcattntgctcttctttgtgttgtaaaggacgtttccagactatggaaagttaaatcctctattggatcttccctgtaggtacgtgatgtaaatatatttctatctatgtaatgatgttctgtgtgttctctgcgctatctccttatcattcatgtatgccttta

SEQ ID NO: 13374 - DNA, 388 bp, Glycine max
  unsure at all n locations
atcttggaagctagacttcattgcatgttgtgttgatgttcaaaatttcatagctactgccttggctagaactatgtgatatgttgtttttcttgaagttttatgtttaaaaatgagttcttaggatgtcaaaactttgagttagccttaaatttcacttaaatcgaagttttctagcaaaagtgaaaaaacaaaaacaatttaagcatattttgtaggattaaatttgtcacaaaattaaaatggtcataatggttgtatggactaaatttcttaaatatttgacttcaaaaatgagtttgttaggtgtgaaaatcanggtactatcagaccctaattctatcaggacaagtttctcaagaaaacaaaacaaaacanaaaataatga

SEQ ID NO: 13375 - DNA, 356 bp, Glycine max
atcaatacagagcaggcacttgataagaagattgatgcacaaaacactacagtattcagaagaatcaccagaagacatcctactgaagaacaatctttaaaagataacccattaccagctcaagaagatatcatgaggcaaccactaagacaagataacaagcattaacaactatatttcaaattcaaattttgcaagctgtatagtagaaaatagtggaaaaatgtagcacccgaaggtgagaagctggagaagttggaggataaacaattgacatacagatagatgaaagggaagctcatgcagccgtgaatgtgttcgaaaatccctctaacatccatatgttggaacaaaat

SEQ ID NO: 13376 - DNA, 396 bp, Glycine max
  unsure at all n locations
tctgatcatcctgcattgatgaatacgaaaattgcggcacatgaaaaggatgagaatgagggagaaacctttgctatgactgccattcctacacggtcaaatttcctgtcagcccaacaatgtcattactcagccaataacagttcctctcacccaataatccacaaaggccatccccaatcatccacaaagcctgcccgctgcacatccagtgccaaaacaccaaccaaaaaggaattttgtagcaaaaagcctgtaggattcaccccaaattctagtgtcatatgccaacttgctcttatatctacttgataatgcaatggaagccataacccctgccagggttcctcaacctccattnttccgaggatacgactcgaacgcaacatgtgcata

SEQ ID NO: 13377 - DNA, 396 bp, Glycine max
actatagaggataatgccatggcgactgcctctaatatttctagggaagtggaaccggcgctgcaacccgcaataaacttaggccgatatagaaacacgacggtgttcggtcggaggtatagtcctcaagcttaaccttatggcttgcctccagacttcactccccgtaccgctccagacgatttgaaccaagcccctaccttcgaggggcaactccctccttatgccgattatcccctgcaagaagacgatgaagaagatgcccgtctaggccctctactgcccctcaaggatccggccccccatgaattgccccaaccaaacatagtccgccatgtcccatctccacccgcacccgttaaagaatctgttccctttgcataagatacggaaaga

SEQ ID NO: 13378 - DNA, 231 bp, Glycine max
catggctcgttctgcattgactagtggatactgtcggtacaaaaacttggattgttttgtgatcctcggccataatggaccgtgtttgagtattactcttcctttatacaaaagtataaattctatgctaggttgtaatctcttccctgaggaaaacccttaggccggagctaatttgcctcggttgcagatggtcagctgggttgactggacaaagatttctaggttctt

SEQ ID NO: 13379 - DNA, 245 bp, Glycine max
  unsure at all n locations
gggggggggggaccacagcggcggcttgaaggaanaccaaangcccagaccgccagcaggggctnanancccaaaccatacttaccacgatatcctcgtgtattgatcaagctacttatatcgacggactatgtgcctaaacccatacaaggttcataacaggcccccatcataactctggccataaataccacagcatcggacagacaacgctgcccatagatggactccactgctgaaatgct

SEQ ID NO: 13380 - DNA, 438 bp, Glycine max
  unsure at all n locations
aagagaggattcacaacttgccagaatnctaactcttgttcttgcatctgatactngcccttgacaaggaactcagtcactagatttgctacgaagttaaacacctctactgcacaaccaccacacagcgatagtggtgctcctacgtagaaactggcttcataaaaataaccaatcaatcctcttcattttagtattttctggataataaccaccgataactaagaagtacaaatgcaggaaatgatgcaactaatttatataattatgttacctaagaacgcacgtgtgaaccttcaccatttcaaataaccagaaacattgaaattattttagattgcacatcaacaagtaataaccgtacttcaaatctttctaggactagtcatgcatatataacatttagttcacatgtgagaaaataaatagaactagtaa

SEQ ID NO: 13381 - DNA, 457 bp, Glycine max
gaacttagaaactcagcttgaatctctcctttgggtggacatgattctctatgttttcatgggcgacaagcatacaacaattacagtgagattatctgatgtatttaggcgcaatgcttccttgactagctctccggcacattgctgtgggtcatcatgccttcttaatcctcggcgaacaagactaactgcaacttggctagacattacatcccaaatcccatcacacccaatgatcaagaactcatcaccctcagtcaatgtaaccagccgaacatctggctcagcaataagaggggatgcagcaccaagtggaaatttcaagtcccaatccccaagggctcgagttactgaaagataaccattgagatatccatcatcaatgaacccacctaactcctccaccctcctcttctctggtagataacttggcctgtgatcattagacatctcaaca

SEQ ID NO: 13382 - DNA, 400 bp, Glycine max
tctacttatgtggcagggcgggcttgcttcactatcttgttttcaacgcgagttttgaccactgtgcttccttcccgcgatgcttcttttcatgtccgcctgagtgggcttatagcctaaaccatacttcccacgatttccttgggtatttatcaggctagttatgccgccgttgtctttgcctaaacccatcccgggttcataaccgttccccaacataactcgggccatcattaccgctgcatcggacagacaaggctgcccaaagagggagtccacggaggaaatgctgaccacctcaaaagactggaaagtagtttctaacgattcttctacggcttccacataatgcatggaggatgggcagcttaccaagatgtcttccttgcctgacacgatg

SEQ ID NO: 13383 - DNA, 434 bp, Glycine max
  unsure at all n locations
cccaccattntctcatagtagaacactggttatgtgcctactatcattggtatcatctgcctctccatcattggcggcgctacttgagttgtcatatccctccatctttgggcgtatcttttaaaaaattcgtgctcctgttctgtagctgcattctatctggagtcatatcagaattgtactaatactgcctaacaaaggcaaccattaagtctttccgagaatggatttgggaaggttccaaattagtatatcagatgacggctaccctagtaagactttcctggaagaaatgcatcaacaatttttcatctcttgtgtatgctccaattntcctgcaatacaccttcaggtgattcttggggcaagttttccccttgtacttattgaagtctgacaccttgaacttcggaggaatgaccacgttgggtact

SEQ ID NO: 13384 - DNA, 222 bp, Glycine max
atcaattcttcatttaaatcgtgttgatagatatcaatttcttatatgcaaattaatttattttaaatgagaaattacattaaatttataaaacaaccatctatttaaaataataaaaaatttttaatttaataattaaaatataaaataatatttaactaggatttgctgaccacaacaggattttaatacataccaggtattttcgcactcaataatttt

SEQ ID NO: 13385 - DNA, 268 bp, Glycine max
tcctcacggaacacgttacggaagcgtttcggaagcgcctcggcttagattttattcacggagacaatttttccaagcatattcgaaagagagagatttgcctaacgggctggaccccttccttcttcaattcctcccctattgatagcaaaatacgggaggtggttgccgcccagctcgcccaagcgagctcatctcgcccaagcgagcacggttgcttactgcagaaacaaccgccttctggaggaattttctggatggcccaaat

SEQ ID NO: 13386 - DNA, 383 bp, Glycine max
  unsure at all n locations
tcttcgtagagcgtggcattacggagatttcnttcgtaagcttttacggaataactggttctgtaacaagtgttttacggctacggaagaagttctttcgtaaaaaatttactgaagaataacttcttccatatgtaacagatctacacaaaaaaacggtaaaatgcgtacctccggcgaaataaaaacaacaataacaacagcaaccgccaatatttaaccttcaccgaatgactacctcgaaaaaacttgtaaaaaccacccagaatggcacaaactagacgacagtgaaagaaagaaagtgtaaaactgtaaaaaattacacaggcgtcgtatatttaaagaataacgagacagaggaaaaactggcattttataaaaat

SEQ ID NO: 13387 - DNA, 177 bp, Glycine max
  unsure at all n locations
ataacccacctcccctgtgccactccaatgactcacgtactgccacgtacccatatccgcgtactataacaccggggcgcatagacctncaaggtttcccaacatccaataatacgacattcaaacagcacagattatcacagcctacaaaacttggcaaggagaaaacctttcaaa

SEQ ID NO: 13388 - DNA, 440 bp, Glycine max
gatcgaccactttcaagctgaactgcaaacatatttagcagtgtcaataaccatggaatggaacagtttatgcatttgaacaattggaggcgtaattgagagactgtaggtattataatcagataaagagttggctgtcatggacatctcattgggggctgttatcacctaaacttctaacgtggtaaaaataataatggaaattccacaagacactagtataaagcagaatattttgattctgtggagttggtttcagagatacaaagaaatattaaaatctaccaaattgcacaaattgtgaagtagtgactcctagtaatatgcactcttaagacactagacctcaatggatatatgaagtttgttctggttactgatttacaagtcagtggaaggcggaacaaacactacacttcaaggaccattgatatttgaca

SEQ ID NO: 13389 - DNA, 452 bp, Glycine max
cttgatgatatggtcttcaccgacgaaaggatcaaagtgagttcttataaaaggcaaatctgatcatcatactttgataaatgccaaaaaaactagggcaaataaagagggtgaggatgaaggagaagcctgtgctgtgactgccattcctatacatccaagtttcccaccaacccaacaatgtcattactcagccaataaccaaccttctccttacccatcccccagttatccacaaaggccatctttaaaacaaccacaaagtcttccgcacttccaatgacgaacatcacctttagcacaaacaaagagcaccaaccaagaaatgaattttgcagcgagaaagcctgtagaattcaccccaattccagtatcctatgctgacttgctcccatatctacttgataattcaatggtagccataaccccaaccaaggttcatcaacctccat

SEQ ID NO: 13390 - DNA, 429 bp, Glycine max
  unsure at all n locations
tgtacattcaatttcgagcgttccgatatattacgggacttcttcggacatccgagtaaaaagtaattgttgtttgaatttgttcagagcttcaacattcaatttcgagcttttcgatatattacgggactcaatcagacatccgagtaaaaagttattctcgtttgaatttgctcagggcttctgtattcaatttcgagcgtctcgatatattacgggactcaatcagacatccgagtaaaaatttattggtgtttgaatttgctcagagcttcaacattcaatttcaagcgttccgatatattacgggactcaatcagacatccgagtaaaaagttattgtcgtttgaatntgctcagagcttctacattcaatttcgagcttttcgatatattacgggactcaatcagacatccgagtaaaaagta

SEQ ID NO: 13391 - DNA, 321 bp, Glycine max
  unsure at all n locations
agctgtcatgcttatatgggcatcnggacggagtctttttgttcgcacaagnctatcgcagggggttgtaacattgtgggttatgacatatgtcacttagttgaagccaatggccatgcgagaggtattcgagttccgggggagaaaatatagggacttttgtatcactaatgttcattttttctcccacgccctcactgatcatatctctacgaatcctcagtcttggatccgcacgactatgtaagacaatgctcgcacgcttatatgttgcctgatgggatgctatcgaccatatcaaacagtctatagatctttcct

SEQ ID NO: 13392 - DNA, 407 bp, Glycine max
  unsure at all n locations
acctaggctgatgaagacnnctantattcaaaatgctgctggtttgcagcttctccccaaaagcctttggcagtcctgcacttagaacatgcacctcactctttcaaaatggtcctattcattctttctgccaaaccattctgttgtggagtgtgagggactgttttgtgccttttgatgcctattttcctgcaaaactcattgaactgctctgaaacaaactccaggccattgttagttcttaaaacttttaattttgtaccaagtcgatttccaacaagagtatgtcattctctgaatttttgaaaagcttccgacttatttttcaaaacatacagccatactcttcttgagaaatcatctatgatggtgagaaagtatgagcttccaccatgagtattcactct

SEQ ID NO: 13393 - DNA, 441 bp, Glycine max
tcaacatcagaccacttccagggtgctggaatacttccatggacttgatggggcctatgcaagttgaaagccttagaggaaagaggtatgcctatgttgttgtggatgattactccagatttacctgtgtcaactttatcagagaaaaatcagacacctttgaagtattcaaggagttgagtctaagacttcaaagagaaaaagactgtgtcatcaagagaatcaggagtgaccatggcagagagtttgaaaacagcaggttcactgaattctgcacatctgaaggcatcactcatgagttctctgcagccattacaccacaacagaatggcatagttgagaggaaaaacaggactttgcaagatgctgctatggtcatgcttcatgccaaagaacttccctataatctctgggctgaagccatgaacacagcatgctaca

SEQ ID NO: 13394 - DNA, 433 bp, Glycine max
tctacttatgtggcagggcgggcttccttcactttcttgttttcaacgcgagttttgaccactgttcttccttcccgcgatgcttcttttcatgtccgcctgagtgggcttatagcctaaaccatacttcccacgatttccttgggtatttatcaggctagttatgccgccgttgtctttgcctaaacccatcccgggttcataaccgttccccaacataactcgggccatcattaccgctgcatcggacagacaaggctgcccaaagagggagtccacggaggaaatgctgaccacctcaaaagactggaaagtagtttctaacgattcttctacggcttccacataaggcatggaggatgggcagcttaccaagatgtcttccttgcctgacacgatgaccaggtgcccctccactacgaatttcagcttt

SEQ ID NO: 13395 - DNA, 353 bp, Glycine max
cacatagcttcatttcattgatttgcaccacacacacttaaacacttttatttatacttacagtttttttataacgaaaacaatgtgtatatactgctctgttttgaccattttatttcttacccagtctcccccaaatttgggacaaatttgctttaacatataactcccccaaattttggacaaatttgtcttgaaccaagcttttctgtggatgatgctctcctacaagctaagacaaggtagcacgagataaaactgtatatgctcaaagttcaatcaatcaatcaatcattcaactcaaaactgggtgcaagggataaatcattcaagcacgtggtgagctttttggc

SEQ ID NO: 13396 - DNA, 323 bp, Glycine max
cgtgttctttgaaagatccgtccccctttttgcaaatgttctatagttgcatcctatccggaaccatatcaaaattgtactgatactgcctaacaaaggcaaccattatgtccttccaagaatggactcgggaagattccaagttagtgtaccaggtaacagctaccccagtaagactttcttggaaggaatgtattagcaattcctcatcttttgcgtattcccccatcttctgacaatacatctttagatggttcttgggacaagtagtccccttgtacttgtcaaggtccagcaccttgaacttgggaggggtgatgata

SEQ ID NO: 13397 - DNA, 314 bp, Glycine max
atcctttcacataaaagctgtgtgtaatcgattacacttatttggtaaccaattaccatggatagcctctgaacaaaatcaaaagatgtaactgttccaatagttttcaagctcttgtgaaagacatatcttttccaaatggctttcaaggttttgtcacaaggttataactcttctaatagttttcttcactagacttgagagtctataaaagcaaggctttgatctgcaaacaaaaactttgtctaacaattctttagacaacaaacttttgccaatctgatctctaaatctctttgaacttgttcttcttc

SEQ ID NO: 13398 - DNA, 348 bp, Glycine max
agggagagaagttgaactttgatgcgcatctcacaagtttcacattcatcaaagttacaacaagtgttacacatgcttctatttatagcctaggtagcttccttcataaacttccttgagaagcttccttcagaagctagagcttagctacacacatccttctaatagctaagctcacttccttcatatgagaagctagagcttagctacacatacaccctataatagctaagctcaccctcatgctaaaatacatgaaaatataaaaaagtccctactacaaagactattcaaaataccctaaaatacaaggctaaaaccctacactactagaatggccaaaataca

SEQ ID NO: 13399 - DNA, 383 bp, Glycine max
gagttatcatgatatttgaattctctacaacgacatgcaaactggtccttctgggttgggattaagagatgttattacatgcatgctcaggtaagggtcaacaaccaacatcaagcattagatttttccaaaattaaaaagtattctgtcacatagaatagaatgatagaaattatgatgttagccggttttcttttaattgacgaagaaagcaaatcaaagagaaattatatatgtatgtcacctcaaaggaagcatcctgatgttcaccccgctcattgaaagcttttgaagcctataatgcatgtttatcacaacaattaattaaccaaaaagatgaaaatctgtttgaaaatatattgagaaacccactggtcactcac

SEQ ID NO: 13400 - DNA, 399 bp, Glycine max
  unsure at all n locations
gtccataccaggcactaagtctagggagaactcaacctctctctcacgtggtaatccggacaccttaaacacctttggaaactccctcaccaaaggtatatcactcagaggggttttgcctcaacactcatactagctaagatcatgtatacttgtgcatcctccctcaaagatgcctcaacctggttagcagacaaaaacatatcactttcactcacaccaaaagacaacagatttctcaaaatagtttaataaggcgtggttggaagataaccagtccataccaagaataacatcaatctgactcanaggtaaaacaaccaaatcaaacaaaaactatctatcagaaattaagataggacattgcaagcacacatcagatgttaaaacagacccact

SEQ ID NO: 13401 - DNA, 446 bp, Glycine max
  unsure at all n locations
tgatgataaaagtgagaagtacgtgtgtgtgggttacgtctcaatatccagngggtacaagctctatagtccaaattgtagaaagatcgtcataagtcgcgacgtggagttcgacgaagaagattgttgggattggagtgttcaagaagataagtatgattttcttccttattttgaagaagatgatgaaattgaacaaccaatcatagaggaacatattacaccacctgcctcaccgacaccaaggctggatgaaacaagttcaagtgagaggacaccgcgactaatgagcattaaagagatttatgaggtaaccaaaaacctaaacgacattaacctcttttgtcttttggtgattgtgagcctctatgctatcaagaagcgacgggaaacataaagtggaagacgccatggacgaagacatcaagtcaatcacgaagaatgat

SEQ ID NO: 13402 - DNA, 416 bp, Glycine max
  unsure at all n locations
tgacttgggtttagacatgactgatacatgattngggactttgttgaattgatttgggcaagattggatgagaggaagtgtgaatttcgaaatctgcactttgtgcagatttttgctgtgaaattgtgcagcaggattttgcacacgtgcagaaaaatgctatgttttcgctggttgtggaaagagtagtgcagaatgagttctagatgtttgctagtagatcccaacggtcacaatgtaggcttatgtactatagacttccagtaaaattttggagtcgatccaacggttaacaaattggatcgaaggaattgttactggggtctttgagtgagaaaagctgtgattatggttggtgtgttgagcagagttttctgcctttgccctggtttgcttggctgtgatagcttgtgctg

SEQ ID NO: 13403 - DNA, 316 bp, Glycine max
  unsure at all n locations
tatcctggtctccttggtggtgagctgctacanactcttctttccttgaatggcattatctctgtgttccttctccattctactaccattcatcttccaagaagcaaatgaatccataggtgaagaagatccaacgcctacaatctccacatgggactacgtcaattccactatctaattgcgcttctatatgttgacacaccaaaattgcctctgatgtatggaaacttgagagaagatattgatacataaggattgcccaatgacatgacgtgtctatatcagtctcttggctgggggtatatgcatcaatcag

SEQ ID NO: 13404 - DNA, 332 bp, Glycine max
ccttgtacgtcacaagtcatttctgcctgcgtctatcttatttttcacacaagcatacaaaacaaggaaagaaaataaaaaatagcgaccgaaatgaaataccaataccacacatccaattagaaaaaataaaaaccgcccctaatttaatttcctgatttctcaatatttattatttaagcggtgggaccctttatatacagtttaattcggccgccagctttgtcgtctctttcgtctgcgtccatccccggcgttactttgcgtttgactctcattctctatctctctctacacctctctctctctgtctctcaatgtctataaggtca

SEQ ID NO: 13405 - DNA, 440 bp, Glycine max
gcttgatgtcttcaaacacactatgtagacctaaaggtagattatcattcattgtttatttattggtattcattatgcgatataattcgttgtaacccgtcactaaccaattaatattatcaactactcgtttggttaagcaaggaaattgttggtccaacaaaaatcatttacgcgtacagcatacatcattgtcataattgacaacacataatgacattcatagtttacctgtaagaaaattggcacgtaaatggaaatggttcttcatctatttcgtagaaagagctccaacccataagtggctgagactccatgatcatgctccagacacgaagatatataaagacgtcgaagtattgaagaaggattataagtcccttccttgctgaaacagtagtagaacgtggggaatatgaaaggaagttggcaatttatat

SEQ ID NO: 13406 - DNA, 387 bp, Glycine max
  unsure at all n locations
caccttctccttccccaacgcgggcgatcatcttagcgccgaggtcgtaaaccgtttccatctcggtcgtcttgagcgtcagcttcccggtcttcgcagcggcgccagacaccgcagggcggtcgatctggacctcgaccacttccccttcaatgacttcggcttcttccttgatgcggacgccgatggccttgcggaaggcctgngtgagggcttccggtttggacatttccaatgagaagatttcgctggcagcgatcatggcaaaaggggtttcgaggccganggacttggccatgcccatggcgatggcggtcttgccggtgccgggctggcctgctaggaagaccgcgcggacggcgatcttgccatctttaatcatctgga

SEQ ID NO: 13407 - DNA, 312 bp, Glycine max
tacttataacactacaaaataaccataaattggaagagtttgatacaatttacacaagttttatacacaaaagttagtcgtatgcaccgactaacacactgacatcctttgaattttgcaatgcaaggttattatcttcaagaagtctatataagagtcttatagcacggaaattgtgcgcttcctcaaattccatcacaatgtgcttctgatacttgaattcaagcaagcactattgtgttggctcctattttattataaattggtcacctaacagttgaggatactgtgagcgttagtaagcctaatggt

SEQ ID NO: 13408 - DNA, 435 bp, Glycine max
  unsure at all n locations
gaaagaggaagtgtagaaggtgaaactgcgtgctnnntttcgttgaccacagaggggacttggagagtgtcgcggaggtcangagaccttggggatgtcaggtggggtgctattacccaaaaccaagcttgaccaatcccgacccaacccgggcatagtcagtcagtgagaacctgcgatgtacctaagcaggcgagctcctggcagtcaacagataaaaagaactaagaccacaaagcaaggaggcttgtgtggtggctggccagctgtgaatcttgtgtgatatatgggttatggcctctggtaatcgattaccaagggtgggtaatcgattacaaggcttaaaaatgaagacaggaggctaagatggtctttggtaatcgattaccaaggggtgtaatcgattaccacgcttgaaaacgaggtctggaagct

SEQ ID NO: 13409 - DNA, 354 bp, Glycine max
gatcattttcccctgccattcattgatcaaatgcttgagcgcttggcaagtatgtctcattacaatttttttatggtttttctggttatttacaaattcatattgctcctgaggatcaagaaaacaccacattcacctatccctttggcatttttgcctataggaggatgccctttggcctatgcaacgcctctggtaccttccaacggtgtatgcttagcattttcaatgattttttagagagttgcatagatgtgtttatggatgattttactgtttatggatcctcttttgatgcatgtttggatagtctaaatagagttcttaatagatgcattgaaactaaccctgtgc

SEQ ID NO: 13410 - DNA, 376 bp, Glycine max
ttgcatcaatattacatctctgagggtaactaacagtgaaagtcacaacgtactttggctttgatgttaaatcctgcaagcagcaacttaatcaaatactctgtatatagatgatataccgcaataaaaacatcagaggcctctccactccaaaaatttacagactggcctcatatacaaacagaaaataaaaatcaagctcgaataaaaaatgcacgtggcaagcaacataaattatctatgtcactatacttgtcccaattatatcaatcgtagattaggggtgggatatttagtgtacttcatcgaaacaaacaaagaatctggtgaaagcatgtaaggcttcttaacaagttcataacaacagtagcaggac

SEQ ID NO: 13411 - DNA, 574 bp, Glycine max
  unsure at all n locations
cccacacccaccaacccacaacgaaagtgtaggcaaagcaacactcnaactttanatntaatcaaaanttcacaaaaaaaacnanaagaggagcgagctgagcctcgcaggccnaacaacnaaannaaanaacncnaccnnaagcccaaacaagaaacaagagagaaggaccagtttccctataacgaacccaaacgagcacacggcaggcgggcggtgaacccaacccacacgggacagaacccgagttagcaagaaaacagaaaacaagctacgcacgccgctgaacccatatcgaaacacagcgaacagcaaccgcgggcagcccatgcgaagaactacgaacaggcctatccatgatacccacatcatcggaagagacaaaacatcacggcagcgggggccaccaggctactgcaacccctcagcatggagctaggacatcgcgaccgacgatactccaacgaaaagcataaacaaaactggccggcgaacacaggcgacactcccgaacgcacaaagccaagccccaccgaaacctcgaaagaaaccaagacacgggccctgaccaccg

SEQ ID NO: 13412 - DNA, 260 bp, Glycine max
  unsure at all n locations
cacactgcancancagggcgggcgttccatggcatcagaacgcacaaccncaatnctctcacttgttattctctcatctgtctgtaaaacgtatgtggtcaatggtatctagcacaaaactaagcttatagtcattgtgttactgtccataacgaaacagtacatgaaagtcagatgccccatctgacataagcttccgttgtctactttctctctatctcaatcggcatcctactcaattagaacnaagcagtttatgc

SEQ ID NO: 13413 - DNA, 340 bp, Glycine max
atcaatatgacaagacgacggtgtgtagagtgatccaagacgtacaaatggacctccactgaacttattaatatacagatcgagatatcttaatgatgaagagcttccaaatgatttacgaagagcaccacccattcatttgtgggagaaccctatccgctcaatgtatatagatgccccaacatgatctgtcggattgactgaaagtcgagaactctgagctgcaagatcagtgagttcacgggatatacacggagctagaattgctaacagtacattatcctgtgggtggagtgggacatatgacaagtatatcaccctccagtagcagacattaccc

SEQ ID NO: 13414 - DNA, 441 bp, Glycine max
  unsure at all n locations
ntgattgcccatatgcacgccactactggtaacggttcatattatataatcaaatatatattgcgagatatttttcatctccagagacactataggaatcatgtctgcatatgattaattctaatttctacatacgctatattgttcacataagtctaccagacaataactatatccaagtgcatcaaattctaaatcatattagcgggtttttgcatgataccttctacaagtgacagaccacaaatgtgtgcaaagcaagttagtaatgtgacatagggacacaagaaatgaataaacaaacttgagattgaaaataatatatgtttttggttctttaataattgaacgcataacattgagctgaattcccaattgcaataaaattgaatctccagaataatatgtcttcagggtacattaccttgattcgtcattaat

SEQ ID NO: 13415 - DNA, 364 bp, Glycine max
atattgaaatgatgaatagtttgtgatgtttgtaactggtgtctagatatggactagtacactgcagcgaacaattttgacagcaggtccaattgttgggtttccaaaggttagtgccatccttaagtcaggaaatatggattgacaaaagtatacattattagtgctcctgcacttactatctatatgttagatacaatggcgcgcacttgatgagataaatgccggtgtgtgtgatgggaagacatatgaagaaatcaagaagaacatgccagaggagtacgagtatgtcacaaacttgtaatttgtcttatttccagttgaatgctactggtacatcagataaaaaaaaccagtgcgtggt

SEQ ID NO: 13416 - DNA, 383 bp, Glycine max
ttcttgggcaacatacacacttgctcaaactcatgaaaggaaacacaaactcaatcacagtcatgcattcaattcaaaaccaaatcatacaccaattttcacacaaagataaaagtgttttattgccatatcatcaaaatcaagtcaaactgttccatatacttcagaataagcaaaccaactacccataaataaaactagcagtgtatacaaacataaaagaaatactgtactgaaaccgtaatcataataataataatccaaaaagcaaaaagcatcatcaggaatcaacaatgtcaagagtgtataaattagggaataagtgagagcaacaacttctccagatgacgaataagaaagatcgataattcctccaactgggg

SEQ ID NO: 13417 - DNA, 413 bp, Glycine max
  unsure at all n locations
acgatgaagaacgaacgaagaacaacgaagacggtgaataactttcatggaattgatcacaaaagcattacggaagcgtctcgactntgattntttccttctttcatcttctcctcactaattttatgtgatgtctgagctatcaaggtactgaacccctcaaactcagccccttcacaccattttataaggaaaggggggaggtggttgccgcccaactcgcccaggcgagctgggttgcttccacctgaagcaatcccctttctggaatattctagatgggcctagatgggcccagatgctaggtacacccccaatttgattagtgcacccctattttgtgtttttagctaatttctatcggaaacatcatgaaactttatggattatacggcgacaagtgtcaagcatct

SEQ ID NO: 13418 - DNA, 389 bp, Glycine max
  unsure at all n locations
agttctgagagattntgctatgtgaggatctacagagaagcgagtttgaagcgaaagccattctgatagcttgagatgagtttgtgagtgattgtgagatcctagaggtgaaggagacatcctcaccacttgtgtttttgtagtctttcatcttgttcttctctttgttgtaaaggaggtttccgaactatggaaagctaaatcctttgttggatcttccctgtaggtacctgatgtaaatatatttctatttatgtaatgatgctttgtgtgttctctgtgctatctgcttttcattccagtgtgcttttaccttgatcacgtagatgcatgctttgttagggtcattcaacagtgggaactggtctgattttaagtcctggatagta

SEQ ID NO: 13419 - DNA, 329 bp, Glycine max
  unsure at all n locations
tcctgagtatgacagncaccgctctatgagcgctgtacaccaccagcgcttcgaggccatcaatggatggtcatttctccgggagcgacgcgtccagctcagggacgacgagtatactgatttccaggaggagatatgccgccggcggtgggcatcactggttacccccatggccaagttcgatccaaaagtagtccttgagttttatgccaatgcttgcccaacagaggaaggcgtgcgtgacatgaggtcctgggtgaggggtcagtggatcccatttgatgcagatgctatcggccagctcctgagatatccgttggtgctggaag

SEQ ID NO: 13420 - DNA, 446 bp, Glycine max
  unsure at all n locations
tatatgcaatgtggtaccatgtcagtgaanaacctcgtcgtgctctctangaatacatgacaagacaaaccgcacaataataagtcaagtcactctcactaggtaatatcatagggagaccagtcagggtcacagtgttttgcgagaatgctccaaccatatgggatcaacataggcttaaaggagcactcaaaccgtgtgacccccaaggcctacactccgaagagtccgtcagggcctctccctcctgattcaggtccaacccagaaaacattttagcacacagactctatctatgaactgtacaaaacacacgactcctcaattgttctcaaaataattttaacccgtcgccctttaagggtcttatcattaactcgtcgcccttaaagggacttagcattaactcgtcgtccttgaagggacttatgatcgtgtgattgtac

SEQ ID NO: 13421 - DNA, 450 bp, Glycine max
aacgctaaaggctacataaatggaagataaagctgcgataaaagatttgctggaagacgaggaaaacccatatgagaatactgtaagttttaatatatctgatatttgttattgtttagtttcttgcaagcttttaaattgtggttgcaatcaaaattcttttaaaacataaattctgaaaaaaaattaagaaaaaatatgtgaccgatgcaactataattgcggttgaccttggtctctccttgcttaattcgatttatttttcatatatactttatgtttatatccataaatttctagataaatcaaacatatagatgtgtgtatgtatgagcagattttctcacaatataacataattttgagttattaaatgatttttgctaactaattacggacaaataaaacttgcagatgggatctactcttctaagcttgagcctgaataac

SEQ ID NO: 13422 - DNA, 276 bp, Glycine max
aaggagacatcctcaccactcgtggttttgtagactctcatcttggccttctctctgctgcaaaggaggtttccgaactatggaaagctaaatcctttgttggatcttccctgtacgtacctgatgtaaatatatttctatttatgcaatgacgctttgcgtgttctctgtgctatctgctccccattccagagtgcttttaccttgatcacgtagatgcatgcttagttaggggcattcaaccgtgggaactgtgctcgatttaaagtcctggat

SEQ ID NO: 13423 - DNA, 251 bp, Glycine max
tatcctgcccatggatagttatgatcgagccttgggcaaatggtccccaaattgggaatgaccgttcaaaataattcagatctattcgaatggtgcttatgaatcacatgaattaacccctcagaagcgtactttgagtataaatggtgaatatttgaaaagatatagaccaacatatgctcgaagataatatcaccctctaataggaagacattatggaaacataaaaatggacgatacacagtcttatt

SEQ ID NO: 13424 - DNA, 440 bp, Glycine max
  unsure at all n locations
ctataaatactcagctgccgcccatctcgcccaggcccagtgggcctgtttgtttttgcccccctttttactcaatgcaccccccttctatttttttgtaattctttttccgtaacgttacgaaactttgcgaattttgtaacgatacttattttccttccgcaaggttacgaatccttacggattatgtatttacttttttttagctttcgaagaagttacgaaaactcatggattgcgcaaaaacacctctttttgacttccaccacattacggaatttcacagatcgcgcaagcctgcttccttttgatttctgagacgtctcgggacttcatttattgtgcaacaaaggacgccaagtatctcaaagcggctaaccaaaggttgcatgtcatcaagtaataatccccggatgaaattanggtatgacaggctttta

SEQ ID NO: 13425 - DNA, 438 bp, Glycine max
  unsure at all n locations
tttgctctatttgaacaaatctttctgccatgtcactcattactgtctgngatcttatttctgtgcccatgaatgaaaagattctggtctagtggccgtagacagccagctctgaataccaactgttataggatttaggtgggaaagagaaagaaacagaatgacagagaaagaaagaggcaaagagagaagaaaaggatagagaggatagaagggaagagaaacaaagagctcaaggaaatatgctctgcactatgtgattatcatttggtctctctaaaatacgacagacctgccttattatagacagctacccaataacctaacagccaagagacaacagtagctgactaaaactaacaaactgacatcccttttctttttatttacatattatatacaatgaaagattaatatcagattagtcagccttaacaa

SEQ ID NO: 13426 - DNA, 333 bp, Glycine max
  unsure at all n locations
tagtcaaaatcaatcattgattaacctccaagcaaagattgaagctntagctaggaattttagtttccataggtcctgaagcgctccatccagatttgcctccactaaactttcttgcagcaagttataggccctccttgtagagtaatatccgttaggctcagatttccacatccaacaatctgttgtatgttgctggattgcaatctgtgagatgtcttccataaaacctacagccgatgcgatttcattatcaaacaaaggccttctccatcaaaggttccattcccatgctgagtcattgaaacttcccacttgctggatgagtttatg

SEQ ID NO: 13427 - DNA, 396 bp, Glycine max
  unsure at all n locations
gaagaacgtcgaagaacgggggaaacctttgcgaaattcttcacggaaaacgttacggaaacgtttcggaagcgcctcggcttagattttcttcacggaaacgatttttccaagcaaattcgaaagagagagaagtgccaaaggggctgaacccttttcttcttcacttcctcccctatttatagcaaaataggggaggtggttgccgcccagctcgcccaggcgagccaggttgcttcctccagaagcaacagccttctggaggaatattctggagggcccaagtgggccttgggtgctattgcacccccatttttactaagtacacccgcctctgcttttttggtgatttctttttcgtanagttacgganacttacgaattccgtaacgatac

SEQ ID NO: 13428 - DNA, 325 bp, Glycine max
cccctgtcgcccctattctttaggcgttcacaccagtggaagaaacgtagaccaactgtcctctcttcaatacaacctcgattctttccccggcaaacaccaaatccgcgaagctggacggcatgcaacccactagcttctcatattacaacactggcagagtagctaccatcatggtgatcatctctatctcaaccatgggaggagctacttgtgccatcaaattccttcatcactgcgcatagtctataaaggatccaccctctatcttaaacatattctgcagacgagcacggtcaagagccatatcataatagtactgata

SEQ ID NO: 13429 - DNA, 376 bp, Glycine max
ataggggagatattaaaattaaattaaaagaaattaatatattaatattggacgataaatactttcaatgcattttttgtttaattatttattaattctttttagttgaaaataatatagttttatttaacatatacatgttttgtgccatgcaaatattaatatcgtgtgatgtttatatgattcatgaggtgtgagaacatgttgcgttgggattataatattgtgattgagattgagtataagtgtttggttaatacttgatgtgatattatttgtgttgtgaattgtgaattatacaataactcgactggagtgtaccttgagataagtgtttatgcgcgaggattacctaagataaggattacctaaatta

SEQ ID NO: 13430 - DNA, 445 bp, Glycine max
  unsure at all n locations
taggacaatgtccagtctatttcaattgttacccaaacaatancttgagtttaatggatagaatcattcgtaactctctgttcctaaacatccactttcatggacatgacatgaaagaaggatcaatcccaacagcattgatatataagattcagtacaaggtcatgaacacttgtgcataaagagtccttctaaaaccacaatgaggagagacaactttgtttatcactgacatgacaaaggccaatgtttctctcccaagagccataaaatgggatgaggtaactcttcctgaaaaataggtcatggacaaggccactccgtcagtccctggatccgctccaacatagaacaaattaagcaagacaactccggtaaggtagaaataaccttccatacgagaaattatctttcatcaagactagaagcctcaagattcgacaac

SEQ ID NO: 13431 - DNA, 440 bp, Glycine max
ctaagctcttctatttttttggctggaaagccaaaggggtttattctttcagggaacagcttgaagacttgggaagaggttgtagagaaatttctgaagaagtactttctagagtccaagacaactgaaggcaaggcaactatctcctcattccattaattcccaaatgaatccctgagtgaagcgcttgagagattccgtagcttgttgtgaaaaacaccaactcatggattctccgagccgattcaattgaacattttcatagatggtttgagatcgcagttcaagcagttattggatgcttctgttggaggaaaaattatattgaagacccatgaagaagcaatgaaacttattgaaatatggcagctagtgatcatgcgaatttgcgtgataggactcatgtacccacaaagagaagcctactggagctttcttca

SEQ ID NO: 13432 - DNA, 440 bp, Glycine max
  unsure at all n locations
tgaaggtatgaaagaatgcttcgttcaaaagtnagnaacttcaatttttcaactcttctagtatttataggtttcacaagtgtttgttgtctctaaacaatcttcaaatgcgtctaatgtagtatatggagaaggtgtgtgttgggagcactaaatgcatgtcctttccatactaataaactattatgtttatcttccttgacctacactcctactatagtttttagtggtcaaatcaacttcaaatgtagaacaagtatgctaataagaatgacatgtctttttacgtgaagaaactatttaaacttgattgttatcttattctattcattctagacaagtcataggaagaatgtttaaacattctttatacaaaagatcaagagatcataatattaacttagtcttttaataacatttaatgtttgttggttttcatc

SEQ ID NO: 13433 - DNA, 359 bp, Glycine max
  unsure at all n locations
tgctanagaactgaggagaaatgacaatgcggccgattgattttgttatactaacgagcacatcttaagcgcttactgcgcacaacggaggcctctcgcgaatgaggcggctatgcctgcttctgatgacgcatggacacttatccctgacccgactacaattcttgcgaaaggtcggacgaaatcagccacgatcagaggtgatatggattgggtcccaccatctgagcaccgcacaaaatgtatcatatgtggaagccaaaggcataaccagcgtaggtgggcaatgcaatcttaacatgataggtgatcgaatcgttgattcatgtatgttaccccactgatgtgcatttgcttac

SEQ ID NO: 13434 - DNA, 443 bp, Glycine max
tgccaaagctatcactgatgaagatcgaggtatgtatagttttgggattaccaaaaaagatacaaaggattatggttgagcaatagaagaaaaaaaatacaaggaagcaatcacagaagaaggaagaagaggaggagctatttgcatgggagcacaggacaatgaagagacatgaacaatgtaatgcgttcaccagttgaaacatcagtaccacaaaggctgaagaacctgagtaagactaatgaaaatgacgaggggtttgtacaaacagctttccaaaagagaaaggttgtagccctagttgcccctgccccagaatgagctaagaccgtccaacatgcttcagaaactcaaagaacctatcattctttctgtcatacccagacacattgtaacaagggctacaaatgccaatgccaagattggtgaaaatgaatggatag

SEQ ID NO: 13435 - DNA, 310 bp, Glycine max
  unsure at all n locations
ataatcatcancaatcagcgggcgtatgttgttcaaaaataaaatctcaacatcatctattatacaaatttacataatatataataacaagctagttcataaaccaatcgagtcaaattatacataattcaaatgaaacttatatatgcaatcagtgaaaatagtaacgtaattagttcagaacattaagctgatgaataagttcaaggagtgaatcatcggactcaagaccgaatgactaaatgcctatatagtttagtgtaggtgttatccgtatcaatagaatcgtaggactatccggcagagaatc

SEQ ID NO: 13436 - DNA, 429 bp, Glycine max
tataagctgaaccattttatcaataaacacatgttgttttttattcagaaaattagagtttatctcttttatcttagtgagagtgattctcctaaattcttgagtgattcaagaacaccctggctgtatcaaaggactttcacaacctttgtgtgttgtcctcgctggaaagagtgattctttccttccaatcatctccacccttgttctttcaaaccacaattccagaaaatccacctctgcccaaaattatctcgtgaccataactcccattttacacactcacattaagtgattcttgagcctaaattgaatttcaaaacgagacctttcacctcgttttggaatcacctcatttggagccctgtagcttccgttattgccatttctatatttctgtccagccaccacttaacctatcgtttacca

SEQ ID NO: 13437 - DNA, 445 bp, Glycine max
  unsure at all n locations
ntgacttgagtcatcaagagattataaatatgtgaccatgtgtctgtgtntaaataatcatcatcaatcatctttgaatcatctatctttcaatctttttcaacatcatctctcaaacatctttcaatcaatctttcaatatctttctacataattttctgattcatttctcttcatatttctaaaagttttttatcaacactttctcttccaagaaaagttctttgttcaaaaacttatgctattcatctttttcgttctcttctccctttgccaaaagaacgaaggactaattgccttaattcttttgtgtctctcttctcccttacaaaagattcaaaggactaaccgcctgagaattctttcgattcttctcttccccttaagcaaaatatttcaaaggactaaccgcctgagaattctttngattcttctcttcccctta

SEQ ID NO: 13438 - DNA, 302 bp, Glycine max
acgacaataactttggactcggatgtgtgattgtttcccgtaatatatccgaacgctcgaagttgaatgttgaagctctgagcatatgcaaacgacaataacctttttactcagatgtcggatggagtcccgaattatatggagacgctcgaaatgtaatcccgaagcatggatcaaattcaaacgacaataacttttgagtcggatgtccgattgagtcccgcaatatatcggaacgctcgaaatggaatgtagaagcgctgagcaattctaaacgaccataacctgttactcggatgtcg

SEQ ID NO: 13439 - DNA, 391 bp, Glycine max
  unsure at all n locations
agatcaacttgatgttctatgcttcttgaaagtgtcagtccatgaggaatctccttgggaaagacatctttaaattcctgcaataagggttgaacactaggagaaacataaatagttaactgattagaattatcactctctctctcttgtgtatcactcttttcctcaggtgtatcactcttctttttcgtattccattgtggtgcctcactattttctttctcttgttcaatttcgagcgtctcgatatattatccgcctgaatctgacgtccgtgtgaaaagttatgaccatttgaatttctagagagctttcgttgttcaatttcgagcgtctcgatatattatgcgcttgaatcggacctncgagtgaaaatctatgaccatttgaa

SEQ ID NO: 13440 - DNA, 442 bp, Glycine max
  unsure at all n locations
cattgataatagaagctatgagcaaattcaaacgacatttactttttactccgatgtccgattgtgtgccgtagtatatcgagactcccgtaattgaaaacagaagctcgtagcaaattcaaacgacaataatattctactcagatgtccgattatgtcccgtagtatatccatacgctcgtaattgaaaacagaagctcgtagaaaattcaaacgacaacaactttcaactcagatgtccgattgagtgctctaatatatcgagacgcttgaaattgaaagcagaagctcttagcatattctaaggactataacttatatctcggatgtccgattgggtaccataatatatcgagatgctcgaaattgacaatggaagctcgtagcaaatactaacgaccataacattntactcggatgtccgattgtgacccgtaatata

SEQ ID NO: 13441 - DNA, 445 bp, Glycine max
  unsure at all n locations
ntgcggatttggtcttcgccagtgaaaggatcgaagtggttctgataagaggcaaatttaatcatcctgcttggacgaatgagaaaactggggcaaataaagagggtgaggatgagggagaaacccatgttgtgactgccatccctgtacggccaagtttcccaccaacccaacaatgtcattactcagccaataacaaacctcctccttacccaccacccagttatccacaaaggccatccctaaatcaaccacaaagcctgtctaccgcacttccaatgacgaagaccacctttagcacaaaccaaaaaacaccaaccaagaaatgaattttgcagcgagaaagcctgtagaattcaccccaattccagtgtcctatgctgacttgctcccatatctacttgataattcaatggtagccataaccctagccaaggttcatcaa

SEQ ID NO: 13442 - DNA, 297 bp, Glycine max
ggcgacgcaatccggaacggtccacaaggaatacccgggtcccccactttatttgagaaaactggaaaccaaaaatgcgactacaactttagtgaaagttgggagtgttttacccgagaagattacacccccactcgtccgggacgagcttatcaatgtgcaactgattgatttatgtccttttatgtttatcctttataccctttatattttttttgggcgacagggttccttgtctatattctattggagagaatcaactactgtcttttataggattttttacttaaggacttt

SEQ ID NO: 13443 - DNA, 348 bp, Glycine max
tccggagtatgatagtcaccgctttatgagcgctgtacaccagcagcgcttctaggccatcaagggatggtcgtttctccgggagcgacgcgtccagcttatggatgacgagtatacagatttccaggaggaaatatggcgccgacggtggacatcactggttactcccatggccaagttcgatcaagaaataatccttgagttttatgccaatgcttggccaacagaggagggcgtgcgtgacatgagatcctgggtaaggggtcagtggatcccgtttgatgccgacgctatcggccagctcctgagatatccgttggtgttggaagagggccaggaatgtgagta

SEQ ID NO: 13444 - DNA, 408 bp, Glycine max
  unsure at all n locations
atttagtagatgaagatgaatccatggtcttctcttggactcctctaagaacaataacatcattgcttacactgaattgttgggagttggaagccatcttctcaatcaaattcctagcttcagcaggggtcatatcaccaagagctccaccactggcagcatcaatcatactcctctccatgttgctaagaccctcatagaaatattgaagaaggagttgctcanaaatctggtggtgaggacagcatgcacacaatttcttgaatctttcccagtactcatacaggctttctccactaagttgattgatacctgaaatgtcttttctgatggcagtggtcctagatgcaaggaagaatttctccaagaacaccctcttaaggtcatcccagctgaaaatggacctgg

SEQ ID NO: 13445 - DNA, 439 bp, Glycine max
  unsure at all n locations
taactnttctttntctttggcttgtacctcactgttttcattgatctaaacaccttataaaaaagatgagtttctcctacttctttctttataccaacacatgtaacattagagagagaaatagataggataataagaagtatacatacaataatcaataagtaatatgatttaataaaaagatggagagacagagagaaatatatagctagtcaatatggtccttaaagtgtattgatgtttcaagttaatcgctaaatgttaataaactaatttgtttttttgaaaagtagtgccatatttcacattcgtgtttcatcttagatagatagatcatgtaatcattaaaaagtaattaagttcttgcgcgcatataaagactaaattgtatnttaatgagaataaatatggacatatctgacacaaactatgaatgtga

SEQ ID NO: 13446 - DNA, 381 bp, Glycine max
  unsure at all n locations
actcaaccttctggaggaagcctcttaatgaagcttctagagatttctatgngtatagcttcctcggtaaaaatgctatgcagcctttgttaaccgttggatcttcgcgaaatttgttctgcaatttcaaaagacaattttccatgatctgaccgttcggatctttgagaagatgtctgtagtgtgctagaagcctcttaatgaagcttctagaggaagcctcttaatgaagcttctagaggaagcctcttaatgaagcttctagagaaaactacatgaagctgcctcggtaaaaatgctgcccagcctacgttaaccgttgaatctttntgaaatttggtttgcaacttcacaagacacttttccatgatctgaccgtgc

SEQ ID NO: 13447 - DNA, 370 bp, Glycine max
  unsure at all n locations
aggagatatccccttgacagccatntcaaaatataaatcataggcctccggaacaagtntatctttgcaaaggctattaatgattgtgttgttgtaagttacaccgctcttacatctctctcaacaacttcaaggcagctcttgtttctccaactttgcataacacattgatcaaatcanagtcctgtaactaacttgatccagttgaaatccttcggttgccacattgtcatgaaagtgtagtgctttcttgacctcaacagtgagacataaaccattcatgagtgtgtgaaagatatgatgtctgcgataacccatcttgagaaagggcaatgttatttgaggaggatgatcatagtaacattgctat

SEQ ID NO: 13448 - DNA, 356 bp, Glycine max
gatgaccaagagctcatgagagtcaaagaacatccatctcaagagaatctagaacaagtcaaagagttcaagaatcaagaagaattcaagactcaagaagaaagcctacaaacaagaatcaagattcacgatctcaagaatcaagatcaagattcaagactcaagattcaagaatgaagaaaagactcaatcaagataagtattaaaaagtttttcaaaactttgaatagcacatgagtttttgacaaaacctttaccaaagagtttttactctctggtaatcgattaccatattgttgtaatcgattaccagtagcaaaatgagtttgaaaatgttttcaaactgaatttacaac

SEQ ID NO: 13449 - DNA, 403 bp, Glycine max
  unsure at all n locations
agcaaaatcctgactccctataccttgaccagggttttaatgtctatccttactctcggaagcgagaagaatagaacggatatntccaatcaaagataaggaaagaacgaagatttccaatcaaagagaaagcacaatagataagaacgacaattccccaatcaaagagtgggagaaagcaaaaagaaaagaatgaaaattcccaatctaagaatgggagacagtaaaaaaggaagaatatgatggaaagatagctcctgatcagggatcgaacgaaaacatatgatatgtgcagataggtctttggaccggacaatatctgaacaatacagaattttcaccaaatgaacaaaaagaagaaaggaaaccacgacctataatggtcttatccctttgattacca

SEQ ID NO: 13450 - DNA, 458 bp, Glycine max
  unsure at all n locations
aactaagctattcaactcttaaatactaccattacatagacaatgattcctcattttgttgacactntttaacatggaacttgaaaaagtgggtctaaagctcaacgagactctattattctatggtgccaggcatttttttcaatgagtcacaaactatatacccataacttattagaatcttctgaaggaatgttgagtttgtcaataagaagacgatagcatccaaggttctaggagtcaaagttgtattgtccaacaatactcgccaaggcaatagggtgccttcgtgaaggcaatacctaccaagagagatgggagaagaactatgactcccatgtaacaagggcactctatagggaaaatgctgagaatatatgtgatcaaaagactatagtaaacggcattatgtgcgagaaggctaagaattgggccaacactctgaataagagtgttct

SEQ ID NO: 13451 - DNA, 424 bp, Glycine max
  unsure at all n locations
agcttnctttcatacccacttcatcaaatgtcatgttacaacccctcaccgnccattaaacactgttgctcaatctccaccgaaaggtggcatgccttaccaaaaaccaccctatagggagaaatccccaaaggtgtccggtaagcggtcctatgggcctatagagcatccttaagtagcttgctccaatcctttntgttgggctgcactagcttctgcaacacttgttttatctctctattaaaaacctccgcttgtccattagtttatggatgataagctgcaacaattgtatgaacaaccccatacttttggagcaaggatgccaatgacttgttatagaagtggctcccttggtcactgataatggctctaggctgactacaacctgcaaaaagttagatctcacataatccacaacaac

SEQ ID NO: 13452 - DNA, 197 bp, Glycine max
agcttaaatatgtgggtaggattgtgctcacacgcttaacacaaatataaatctattagtgcgcataagtgaatattggcttagcgcgctaatatcatttaacagatgaactgaaacggtgcacttgatgaactccagaggtgcgctctgacagataatcttcttctggatattttcttgcgcttagccactgagtg

SEQ ID NO: 13453 - DNA, 268 bp, Glycine max
atattatgcgctcgaatcgaacatccgtgtgaaaagtgatgaccatttgagtttctcgagagcttccgtggttcaattccgagcgtctatacatattatgtgcccgaatctgaccttcgtgtgaaaagatatgaccatttgaatttctcgagagcttccgacgttagatttctagcgtcgcgatatattgaattcctgaatcggagctccgtgtgaaaagctttgaccatatgattttctcgaaagctatcgtggtcaatttcgagcg

SEQ ID NO: 13454 - DNA, 465 bp, Glycine max
  unsure at all n locations
acacatagaaactcaagcttcttaggaatcttcttaagaagcttctcagtgttgtgagtttanttatgaaaggggtgtgtgtagctaagctctagcttctcaaggaagttttctcaaagaagcttctcaaggaagttttctcaagatagcttctcaaggaagctacctagtctataaatagaagcatctgtaacacgtgttgtaactttgatgaatgagagtcttgtgagacacaactcanagttcaacttctcttcctttttcttccttcaatttcgtgctcccccctctctctttctctccctctttcttttcctccattgaagcatcctctccaagcttcttatccaaggctcatcttggtggtgaagctccttcttccatggcttattccctagtggatggcgccacctcttacctctcctcctttatcttccgctgcatctccatggtggaaaatcacca

SEQ ID NO: 13455 - DNA, 465 bp, Glycine max
  unsure at all n locations
tagaaactcaagcttcttcnttgtttgctaagagacggacccaagatgtctctcctttctctgngcatgaacggaggctgtctagcgggcaagcatgcctcacctctcggcgaacaacgtgtgaaaccaaccatacataaagagccggagtacaacaaacaatcctcgtactgctcttctcacatcttcggtcgagagtgtcatatatgtcagctagcatagcgacaaccgagctttccttgtggtcatgataagcaagaaaagcgacgatcgctgctgcgtccaccaacccatccacatgtggaaagaggactcctccgaagctcaacagtgcgagaatgtctatgaacggtgcccattcgcctctacctgccaagatacttgcctatgcctataagcattttctcagtattccaaccaccccatctttgacttgctctctgtggtctaattcctgcgccgaga

SEQ ID NO: 13456 - DNA, 356 bp, Glycine max
  unsure at all n locations
tacaaactcaagcttgcctcnagaggtccaggaaggacaaggctgcttgaatgaactatttccgctccggagtacgacagtcaccgctttatgagcgctgtacaccagcagcgcttctaagccatcaagggatggtcgtttctccgggagcgacgcgtccagctcatggacgacgagtatactgattttcaggaggaaatatggcgccggcggtgggcaccactggttactcctatggccaagtttgtccagaaatagtccttgaatttatgccaatcttggtcacatatgtggcgtgcgtgaatgagatctggttactgtcatggatccgttcatgccgcgctatcaccacttct

SEQ ID NO: 13457 - DNA, 444 bp, Glycine max
tgtatgagtactgagaaaggttcattatattgtgtgcaagctgttctcaccaccagatttctgagcaactccttcttcaatatttctatgagggacttagaaacatggaaaggagtatgattgatgctgccagtggtggagctcttggtgatatgacccctgctgaggctaggaatttgattgagaagatggcttccaactcccaacaattcagtacaagaaatgatgctattgttcttagaggagtccatgaggtggccacagattcatcttcatttactgaaaatgaaaagcttgaaggaaaacttgatgccttggtcaacctagtaactcagcttgccatgaatcagaaatctacacctgttgcaagagtctgtggtctatgttcttttgcatatcaccgtacagatctatgtccttctttgcagtaatctagagtcaatg

SEQ ID NO: 13458 - DNA, 369 bp, Glycine max
  unsure at all n locations
aagctcactacaagccttanatgaaaaanaccatgatatcaccatatccttaaggaattttggagctttggaattgttttgggaataagtgtggcgggtttttgtttcattggataacttgttttgggccatacttgatgtacattgtatattggttaaatgttggacatgctgaatgaaatgttgtttctcaaaggctataaataaaaaaaattcgaaaaaagaaaaagaaaaacaataaagttgagtgaataagatcttaaatggcacaagaatgatgaaactcttggttctactctttatgtttaaatnntatctttacttctttttattttcttattttttcttaatatgcacttattccccatt

SEQ ID NO: 13459 - DNA, 369 bp, Glycine max
  unsure at all n locations
aatatatactcccagtataaacatgctttaaaaatatttgttttagtatgataatatactttaaatttgtttgtttttaattaaatttaaattttgtttttgtttgttttagtatgaatatccttagaaacatatacccgcataccaacatatatatatatatataatataataatataagaatntataaattgtaaatttaaaatcgatgtaaaacatgtgttattatattaataaataaatatcaacggcttgcattatgatttgttatgtgatccccgcattgctcgcttatttgttttccgttgtctcttcttttttctcaacgattgtcttttatttttctccgagttttcctcttatgctaca

SEQ ID NO: 13460 - DNA, 437 bp, Glycine max
acactactcttgatttctaggttgaaatctctggtgctgtcagcttgaacatacgagcttgtataaattactgggaattggtcactacgtgtgttgagctgaatttttttactggattttctagacatctggaacaaaaatatgaaaaaagaaccaagcaattcggattaaaggaaaaaataagaaaaatcacacaaattggcagaaaaatcagtgtccaagaaaaaaaaagtgaaagggaagtgtgcttgttgttttagctgaaaatttgttctataattggtgcctattttataccaatcctagttctgaaatttcaattgaaaattattatgaaaacaagtgccaaaactagaggtttcttgagtctttattttttttatgagttttctactctactctagagccattctaggtttcactttgagtcctagctt

SEQ ID NO: 13461 - DNA, 364 bp, Glycine max
  unsure at all n locations
cctgactcaccatagacattgacccagggtgttaatgtctantcttaccctcggaagcgagaagaatagaatggaaattcccaatctaagaagagaaaagatggaaaattccccaatcaaagagtgggagaaagcaaaaagaacagatagacaattcccaatcaaagaatgggagaaagtaaaaaggaagaataataatgaaagatagctcctgatcatggatcgaatgagaacagataaaatgtgcataaatgtctttggaccggacaatatctgaacaatacagaattgtcaccaaatgaacaataagagagaaaggataccacgacctataatggtcttctccctttgattaccaaccaaa

SEQ ID NO: 13462 - DNA, 372 bp, Glycine max
cttattaactgtcttggcttttggccactctacattgtctttcgaacctactgtacgttgatgtgaccaatgttgttatgggaatgttgcgacaatccttcagaaccttgttgatacattctgagaggttggttgtcatgtggccatatcgacgtccttctctatcataagtcatcgtccatttttcctttgaaatgcgatcaatccatgttgctatggctggactcaattcacaaaagttttctatattgtgatcaaaaatgtgcttgctaggagtgtaggttgtataaaattagttatgaataacatggatgagtatatacgaaaggtgaatgaacgggaccatcaaatatgaaatcttacccagtttct

SEQ ID NO: 13463 - DNA, 442 bp, Glycine max
  unsure at all n locations
tctacttatgtggcagggcgggcttccttcaccttcttgtcttcaacgcgaactttgaccattggtcttccttcccgcgatgcttcttttcatgtccgcctgagtgggcttatagcctaaaccatatgtcccacgatttccttgggtatttatcaagctagttatgccgccattcttttttcctaaacccatcccgggttcataaccgttccccaacataactcgggccatcattaccgctgcatcggacagacaaggctgcccaaagagggagtccacggaggaaatgctgaccacctcaaaagactggatagcagtttctaacgattcttctgcggcttccacataaggcatggaggatgggcaacttaccaagatatcttcctcgcctgacacgatgaccaagtgcccctncactacgaatttcagctnttggtggagt

SEQ ID NO: 13464 - DNA, 446 bp, Glycine max
  unsure at all n locations
aacaagtgtcttcacagatagtcatcacactgtagaaactatcaaatctacccatcatatgtcccaagggcccatacccacaaaaatcaaaggagaaagaagtccacccaaacctgaattttcgaagtcccactcgtagccacgcacttcacgaccccgaaaatgccctcctttcgcgatttggggcagaaatgatggccaaagggtgaagctatgcttggagcttcaatggagaatgaagaagaagaaaatggcaacgtgagggagagagagagctgtcttgaaagtgtggtggctgagtgaagagagagaaaagctttttgggtttaaataagaaggggtttctctttgtctattattgtattcaagctctgccacatgtccctattagagtggagcctaaagagcncactttccctttttactgtgacccacactcagccaca

SEQ ID NO: 13465 - DNA, 330 bp, Glycine max
  unsure at all n locations
aacaatgcactaggagtgtaattagagctgtgttattacatgtatngtgccaaatatgtggaacttttgagcactactacaagcaacctctgcatcaacacactttttaaaaaccactcttgctcggctgcttactgtatcaacttctgtctctgcttcctttagaggtccaaaacgcctaaacattttattaaggtttgtttctgagggaacagaacccaactcagcaaagttcataacaatgtcagcaggggcattctcatctatataaccaggagggtntgcacgagcctcaatgtgattggttgtagaatactgtttcctggaata

SEQ ID NO: 13466 - DNA, 444 bp, Glycine max
  unsure at all n locations
ttggctacaacctnnagctgcccctgtggcaacttcaaaaattcaaagaactcggagatcttcacagttataacaatggagtaccaagatataagtatcagagtattaaatacaataagccaaactcataatcaagaaataatcaaaccagaattcaaataacataaaatgtcaacaaccacaaaatatccaagactgaaatttaaaaacacaagataaataagcaaagtacttagcataataatgtaaattctaagaaactaaaagccaaaatacacggcttataaaagataaatattcagaatctaaaatctaagaagacggaggaggtggtggaagatcgaaactctgacgaatgtatccgacatcctcttcaagctgtgtaagacgaatgtccataccggcaaagcgtgaatctaacgagtcaaagcggtcaccaacata

SEQ ID NO: 13467 - DNA, 425 bp, Glycine max
  unsure at all n locations
cttatattgctggccgatttttgtgttgttaaaaacttgctttatctccgcattcttttatggagtgtcactgtattttttttcccttttttctcttaccattatcttctggttagttcttgaaataattctaaggaacaaacatttgtttgtatttgagtgagtgtttntaaaagaattgatgtgatctaggtttgaatattttcattctgaaagtatgtcattagtaaagctctataaaaaaaattattcaacacaattaaatttgcttccactcaaaatcaattcctttacatgaaattaaacatgtaaatatttatataaaattatgtttgcggtatttcgatgtgatttgtgaatccaaacacgctatttgagtatttaaagttgagacttgagacttgtagttttaatcgtctatgatg

SEQ ID NO: 13468 - DNA, 437 bp, Glycine max
  unsure at all n locations
tgcttgatggcacgtgatccatggaaaggataatttcttgttgatgttgtttctttattggtaaagatagagcctatgttacagagatactaaacggctgtggactacatgctgatattgggatacctgttcttatagagcgtagcctcgtaaaaattgaaaagaacaacaaacttggaatgcatcctttacttcaacaaatgggaagagagataattcgtggaagttcaataaaggaacttgggaagcgaagtcgattgtggtttcatgaggatgtacttgatgtattgattgtcggttttgtagaggaaattattaaaaacagaggagagaagagagacaatacgtatgtggaggaaatagaattattttattctaattcaaattggtctcagtagcgatacaataaatagcanaagataaactaattagataac

SEQ ID NO: 13469 - DNA, 445 bp, Glycine max
  unsure at all n locations
gtaatacaacattcaacagtacagattatcacagccttcaaaacatggcaaaggcagagaactctgcccataacaccaaccataatcacaacttttctcacttatagaccccagtaacaattccttcgttccaattcgttaaccgttggattaactcaaaattnttactggaagtctctagtacttaagcctacattgtgaccgttgggatctactagccaacatccagaactcattctgtactactctntccacagcccaccacacacaagcatttttctgcacaaagccaaaattctgctgcacctatttgacagcaaaattctgcataagtgcagatttcgaaaatcacactttctctcatncaatcttacccaaatcaaatcctacaagtcccaaatcatgtatcaatcatgtctaaaccanagtcaagctntaaagcaca

SEQ ID NO: 13470 - DNA, 374 bp, Glycine max
atggcgccttctctaaccttgtctccttaatcttctgctgcaactccatggttgaaaatcaccattgaatgacctcattgaagctcaaatatccaacctccatagaagcttctcaagcaagtttccatcaagtggtaattagagcacaagagcttcaagtaggtgctctgtacacctccattaacctccattggtgtttcttcatttttctccatgtatttactcacatatcttgtgctgaatgttgttaacatgattttttagaatttccaccaattaaacttgctatagaagctagatttgatcttctatggatcaaatatcttgaaccatgaattgggttgagtaaagttcctttgaattttgcttgctat

SEQ ID NO: 13471 - DNA, 438 bp, Glycine max
  unsure at all n locations
tcaatcatttgcaaatatgcatgtgtattacgactcatcanctttgaatcaagccaaggctattgtgcaagcgatcaatggggcaaaacacaccaaatgattatgatgatggatggctcacattctcacaaaggtgaactcatcactttcaaattaagctttcaaaactatcatgacatgtagaggagaatcaaggatgtcaagtcacaaaatgtcaaaaacttttattttcaaaacaattacccatttcttgaacatatcctataattcaaagaagaacatgcaaagtcgtacatgcacacaaaattgacccaaaatgttaaactaacaatccgacgaaactaacaacattaacaaattaacaaaaccatgataactagcataaccaaagaacactccccccctacttaaacaacacattgtcctcaatgtagcaca

SEQ ID NO: 13472 - DNA, 452 bp, Glycine max
actcagcttgaggattatgggacccatcacatgtggttctatgtggttgtcgggcgatggtgcacaacaagttttccacatccacaatgcgcgcataaacccaccatcccctgttgcccacctccatctgagctcacgtactcccacgtagcccatatcctcgtttctctcaacaccgggtccccatcaatcctctcaagcttccacaacatccaagcaaaacaacattcaaacagcacaagctatcacagccaaacaaaacagggcaaaggcagaaaactctgccaaaacaccaaccaaatcacagcttttctcacttaaagaccccagtaacaattctttcgatccaattcgttaaccgttggatcgactccaaaattctactggaggtctatagtacattatcctacattgtgaccgttgggatctactagcaaacatccagaacgcat

SEQ ID NO: 13473 - DNA, 433 bp, Glycine max
  unsure at all n locations
tgtagatcaaatgtccaatgtcaaggataaattttccaatcctttgtccattgtaagattttgataaattcgaacctaaagtctaacccaatagataagtttaaggtttttttttttcaccataattttggtatgaaatatccatcaagatttattgataactaatttttattagaaaatctaactaattacctttaattggatctccttttttaacaatattttttccatctaaaaaaaattataatttgtgaccttatttatggagactgattccagttatacttggacacgactagagctatagggttgacctaatagtcaaaagagaagagaaggaatatgaggttatatagttgaattcttcctgctaataaaaactaacacatgataacanatatttgtctaataaaaaaaacttttagtatgttta

SEQ ID NO: 13474 - DNA, 509 bp, Glycine max
  unsure at all n locations
cttatccaagaaacactctgattggtgggtgagagcttttttccttccatgnnngcttattctttaagtgggaatgacacnnctcgctctcacnctctntnnctcctttaaatcttccgcnntgcaactccatgnnngctgaaaatcanccattaaaggggaccttanngtgaagctcannagaatccaacctccatttagaagcttctcgaagccaagccttccattcaanngtggtatgagaagccacaagagnncttcaagtagggtggttcccttaaaacacccnncattaattttcatgttttaccccttctcctccattattggtttcttcattttttttccatgtatctccttacatgtcttgtgatgaatgttgttaacatgattnttttagaatttccaccgattatacttgctatagaagctaaatttgattntctatggttcaaatttcttgttcttgttcttgaaccatgaatcgtgttgagtttaagttcctttga

SEQ ID NO: 13475 - DNA, 448 bp, Glycine max
  unsure at all n locations
ctaagcttgatgcaacattggagaggtaatgaaacactagatgattattaacatgtnttctcatgcaacgactatgatgaggaccaaaatgtgaagcttgctgccacggagtatttcgactatgctcttgtgtggtggaacaagctacaaaaggagagagcaagatatgaagagccaatggttgatacgtggacagagatgaaaaagatcatgaggaagcggtatgtgccggctagttactcaagggacttgaaattcaagctccataaactaacaccaggcaacaagggggttgaggagtattcaaggaaatggatgtgctcatgattcaagcaaagattgtagaagatgacgagggaactatggctcgatttcttaatggtttgactaatgatattcgtgatattgtcgagctgcaagagtttgttgaatggatgatttgctcaca

SEQ ID NO: 13476 - DNA, 274 bp, Glycine max
  unsure at all n locations
gcgagctataantactcaagcttcagagcacaacattntattgtctaacggaagagatctctttagcgtgaaggcgacgcgtatcgaaaagttgttcttgcgactgacacacacacgatgacatattggactgaacatgtacttcatcatcattatcttgtggctgggttggtagggttgatgttgtcgaggatactactaatagactaaatgtgctatacaatggagaacagcacatggagacactgggacaccacagtaggtgtaaaattga

SEQ ID NO: 13477 - DNA, 443 bp, Glycine max
  unsure at all n locations
tacacaaaattggtacctattattgttgatacatattcagtagtgtgatctattatttattttttctctatatctatccttgcattgttcacctaagaaaggtgatagagatacatgtcaatcaaatcattaagagaatttctatttgttgaacgtgtggaagtattacaaaaataatgagcatgagctcttagctatagaggtatcccctcgtctaagactatgaatggtaacgagacagacatgagtaattaaaaataaaacataaaaagaattaaaaaaattattttttgagctccagagacatatagacattgcanatatcaatatgaatgtataaacttaaagagttgtaaaagataatcactctgacaatttattagttattctatcaatcttttaaacaacatattttattcaaatcatatgtatggaaaagtaaa

SEQ ID NO: 13478 - DNA, 457 bp, Glycine max
  unsure at all n locations
tgcccgccgcacatccggtgcctaaacaccacctttagcgtataccaaaaagtgaatttgcagcaaaaagcctgtaggattcagcccaaattccggggtcatatgctaacttgctcccatatctaattgataatgcaatggtagccataacccctgccagggttcctcaacctccatttttccgaggatacgactcaaacacaacatgtgcatatcatggaggagatccgggacattccattgagcactgtatgaccttgaagcgtaaggtgaaaagtctaattgatgtgggctggctgaaatttgaggagaatcacttgtgaatcctaacattgacaagcggcaccacacatggggcaatttgaaggttgttgtttgatgtctctaatgactcattangattttcaagtttatgcaattattgagaaccacaattacaatgctaaataatatggat

SEQ ID NO: 13479 - DNA, 366 bp, Glycine max
aagactcaaagggcaggaacactggatgataacatagatgatgatctcaaaaatcaagattcaaggttcaacctttcgagaatcaagatcatgattcaagactcatgattcaataatcaagagaagacttaatcaagatccgtctgaaaaagttctttcataaaagaatttgccaaggactaatcgcctgaattcttttcgtgtctctcttctccctgttccacaagaacaacggactaacagcctgaattcttttgtgtctcccttctcccttgtcaaagaattataatgacacagtctgagaattcttttgattcttcctttcccatatcgaagattccaagactacctgctgagaatctttgt

SEQ ID NO: 13480 - DNA, 472 bp, Glycine max
  unsure at all n locations
actaagcttgtttgaactcatcataatgcttgctcatatatgttttgtttaagcaaagtatcatgatgaatcaagaacgattcanagatgttttgatgataacaaaggtgatgacaaanagctcanaggtcaatcanagaatgagttcaagatgttcaagatagaatcaagaacacttcaagattcaaggatcaagctttcaagaatcaagatcaagagaagacttaatcaagattcaagatccaagaatcaagagaaaacttaatcaagataagtatgaaaaggttttttcaaaaactgagtagtacatggatttttctcaaaacatgtttaccaaagagtttttactctctgataatcgattaccagattgttgtaatcgattaccagtagcaaaatgaatttgaaaaagttttcatatgaaattacaacgttccaattgatttcanaaaagttgtaatcgattacaatg

SEQ ID NO: 13481 - DNA, 451 bp, Glycine max
  unsure at all n locations
actaagctaggtaatgagctccttcttcaccttagacttgatcatcttcattctttnttccagtttctctaataatttgaaactgtcattttgttttactcatgaagggaaactntgaaaaaactcaatattcttcattctctntcaagatttcgcgagttcatcaagagataggggggtctctcaaactcttgaaccatgtgcttgctattgaacttccatgaacatgttgttgctttgacattttcgagcttgttgtcatgtcctgaaactgtgtgctgagctattttacttgagtttttggtgccaaaaatgagttctttgcatgttaaaacgtatatttagccttaaatttcatttaaattgaagtttccaagcaaaatttacaaacaaaacangtttaaggacctttagtaaaatgaaaaagttgtcacgaatttggactgagtta

SEQ ID NO: 13482 - DNA, 416 bp, Glycine max
  unsure at all n locations
tgggctcttgcctcactcaccgcctttgtggtttcatttctatctatcttatacttatcccaggtgtgagattgtctacacctagaccactccttgaaacactccttttttactctaactttgctctgaacattttcattacaccagcacgagtctctacccctacgtccataacctgtagattctcccaacgtctctgtacccactttaatagtctctcgggacatcttgttgcacatatcattaacacttacttgtgagtgtacacaccaacccttccatatcttttgatggaagatgacatgnttctgacccttcaagtgccagcatgcgatccttggcgctgccagatgacttcgtctctttgccctatctctaatgcttacatacgaaaccaaaactctatgttgggtagt

SEQ ID NO: 13483 - DNA, 452 bp, Glycine max
  unsure at all n locations
ngaagagaggattcacaacttgccagaattctaactctgtttcttgcatctgattcttgcccttgacaatgaactcagtcactagatttgctaggaagttaaacacctctactgcacaaccaccacacagcgatagtggtgctcctacgtagaaactggcttcagaaaaataaccaatcaatcctcttcattntagtattttctggataataaccagtgataactaagaagtacaaatgcaggaaatgatgcaactaatttatataattatgttacctaagaacgcaggtgtgaaccttcaccatttcaaataaccagaaacattgaaattattttagattgcacatcaacaagtaataaccgtacttcatatctttctaggactagtcatgcatatataacatttagttcacatgtgagaaaataaatagaactacgtattcacaatttca

SEQ ID NO: 13484 - DNA, 352 bp, Glycine max
ctaagcttgaatcggacacccgtgtgaaaagtgatgacaatttgaatcttactagaacttccgttgatcattttcgagtgtcactatgtgtgatgcgccaaaagaggacattcaagctatatattatgaccatttgaagctcaaaagagctatcgtagatcaattctgagcgcgtagtaatgggattatgcctgaatctgacgttgatatgaaatgctatgaccatgtgaagccgtaaccaccttggagagcacagtatagggcctaactagcatatatgcgcccaaatcggacattcgcctgtggaaaatgacgctaagaatgtattgaaagctttcaatgtgggatttct

SEQ ID NO: 13485 - DNA, 446 bp, Glycine max
  unsure at all n locations
tcaagaaaaagatggcctcagcaaattccttatttccaaaatgtaattctatcttagacctccaatctttaatggagagggttaccactactggaaaacccgaatgcaaatttttattgaggcaatagatctaaatatttgggaagccatagaaatagggccttatatacccaccacagtggaaagagtttcaatagatggtagttcatcaagtgaaagcataactatagaaaaacctaaagatagatggtctgaagaggatagaaaacgagtacaatacaacttataagccaaaaatataataacatctgccctgngaatggatgaatatttcanggtttcaaattgtaagagtgctaaggaaatgtgggacactcttcgattaacacatgaaggaactacggatgttaaaagatctangataaatgcactaactcatgagtatg

SEQ ID NO: 13486 - DNA, 181 bp, Glycine max
  unsure at all n locations
ttagtcaaacaaaataatccgaatatgtcaaatatttgagtgttgaanaagcataacaagactttgtgtgattggtttaaagatacaatctttgcagatgagaatgcttcagaaacattaagaaatctagcagatgggcctaaaagaaatgttataacctggcaaggatacgacatataca

SEQ ID NO: 13487 - DNA, 448 bp, Glycine max
  unsure at all n locations
ttagaatctcagcttccattattctatgtacccgtggtggtccacatttggtttatgtatttttattctcgtttcattcactttttatacccccttttgacgtgcttaagccattntatttaagtcatttctcgcttaacctagaaataaaataaatttccactgatcgtttgaattgtattatccgttaactttggttgaaatgaattccgaccgatcggtcgtgccgcaaccacgttggaaaccaaaaaagaggtaaataataatataataataaaaaataaaaaagatacccctttggtaaaataaagcgaaaaatcaattggacgttttctctttgggatttctcattcttaatcgaattgactaataactaaagtgaaactaaggctaaaatcaactcgcctagtcaagctcatccacaanaatatggtttgaaagtttatta

SEQ ID NO: 13488 - DNA, 448 bp, Glycine max
  unsure at all n locations
tgggcattgtggaatgactacgatcgtcatggtgtggactatggtcatgatgagtntaccatagttgtcgtcgaaagctgacattgttcanaagggatgtcatcattntgccatggccgtgctacttaccacgatagtggtcaagtgacaaagttgttcaaatcttcataaagcatgcactttccaactctttcactccattgagcggctatacttttccaagacaaaatgagtgtctaagcatgagttttgccaagataatgcatgataatgacacaaaactcacacaaaatgtcacccaaaaagtggtttatcaacctccccacacttgagcattgcttgtcctcaagcaatttttctagttatcttaatcaaaatanattctcccaagccagaactcaagtatcanaacccccaatttattcaaaagtaaaaactcacacgttgg

SEQ ID NO: 13489 - DNA, 217 bp, Glycine max
gactatggcatcattacgggcgcttaactgctgacagttggacgccatcttctcaattaaatttctggctccagcaggagtcatgtctccaacggctccaccactggcagcatatatcatacttctctggatattacctgattcttcataaaaatattggacaagaagctgctttgtaatctgatggtggggcaactggcacatattatcttaaatc

SEQ ID NO: 13490 - DNA, 431 bp, Glycine max
  unsure at all n locations
gtcgaccaaaaggttcanaaggaagagagaagaggattgtgttggttggttatcaagttgtaggtgagatgcacgacctaagaagcatggcaggccgaacggttcaaaaattaaaatgaagaatgttgttgatgttggtaatgaagttgatggggctggtgagattacaggacctaatatacatgatcaaccaaaaggttccccaaagatgaagaagaatgctttgaaagttcataatgaagttgttggtgttggtgatatcacaggacttaagaaacgtggtcgaccaaaatgttcaataaagaaacagggtactgttgtgtacgctttcaataatgaagtgccatgtgagattgcatacaagatctggaaaatataaatgctgacaatctgtgtcaaaagtttagatgatttgcaagcctaatactaat

SEQ ID NO: 13491 - DNA, 502 bp, Glycine max
  unsure at all n locations
aggggnnnnaagcttgagttacgtgctcngtatcancngcanantcgagnnanatacananaagnngccntgtananaaacaacggaggagaggttttatngatttatatcattccataacgcggggctcaggaggatcgtacaacactctagaaccccacatatacattttagcatgatgaataatacgagatcaatgggtgctcccaataaatgaaaaatataatatctttttgtatgtaagatgtgggaatcgctgaacgtgaagttgaacaacggatatgctttggtgtccgataatgggtgtggagttgtttgaagacccatggtctcgtgtgtgtgccatcaacataattcattgtgcatacatgttattgttctattacctgctactcttatcttacctccatgagttctgttagtgttcaagatgaccacaacattaatgtgtcatgtcaacaacttggttatggttcgagatgctcctccgatcactaattcg

SEQ ID NO: 13492 - DNA, 409 bp, Glycine max
  unsure at all n locations
ngtttgttattgctctgaacaccttttttctctctcagattttactggcaccagaagtattaaaatttaataaaacttttctttgtaagtttatgttaatgttaatattgactgggtccatttctgaaatttcctagttagcaactccgctcttccctttattttatttttcttttggttgatgaagtgttatttgtgtccactaatttatgcattgngtgtaatttttataaggcaatggaaatggaggttataaggttgattcgaatgttgaagctgaggaagttgcagcagatgacgacgatgatgacgatgtcgactgggaggaaggctgatgaaaaatatctgatcagtataatgtaatggtctattctgatttgcaatggccaatgctcattaataataccgc

SEQ ID NO: 13493 - DNA, 258 bp, Glycine max
accaggcaccataggtagaggtgaaaactctaacccataactgatgctgatcagatgcacaagcccatatccatatacacaacaaagctaagttgaatttggagatatactttatccccagacccccatcagacttatgcagacaaatatcatgccatctcacccaagggatttcattatgaacaatgtctacatcccacagaatataccactgaagggatatcacacttgacggatatcccaaggggctgcattcct

SEQ ID NO: 13494 - DNA, 311 bp, Glycine max
  unsure at all n locations
gatgggcctagatgggcccaaggctgattatctcccctctaaactgttcagtncacccggagattgagtggaaggctgatctacttccgaaacattgcgaaatcttacggatcgcgtggcaattggctctattcaactcgacatgaccagcaaaaacccgtatgtcgacaaacaattgaacctggacgaaattacggtatgacaataataatgggaataaagtcttaatacttctaaaaggggatgggtgagacattatattctcttagactatgatatggattcgtatcatttgatcatctactcatcat

SEQ ID NO: 13495 - DNA, 113 bp, Glycine max
acgttagctctatcaatcatctttaaatcatctatctttcaatcttctctcacatcgtgcaatacctttgaactctgtctacagagataactcttcatctgtctaaaagggtt

SEQ ID NO: 13496 - DNA, 421 bp, Glycine max
  unsure at all n locations
tcaggctgctcaattgctccaggttgttgcatgttttggcttatgtctatatggnggtcagcagaggagcacagaccacaaacccttgcgacaggtacagatttctgattcaaggccagctaggttaccaagttgaccaacgcatccagttttccttcaagcttcttattttcagatgatgcagatgggtttgtagctacctcatgcactcctctaatgactatggcatcttttctggcgctaaactgctgggagtttgaggccatcttctcaattaaatttctggcttcagcaggagtcatgtcttcaagggctccaccactggcagcatctatcatacttctctccatattactgagtccttcataaaaatatatgaaaataaactgttctgatatctgatggtggggctactggcaca

SEQ ID NO: 13497 - DNA, 387 bp, Glycine max
  unsure at all n locations
tttgtcaaaaatattgctcanaacttttcagcttccgaccttcatgacctcaacatcattcagggtaataattaaggaaagacaaatatttgtcattaatattttataacttgacttcgatcatgagnttgtgctagcttattgcttcccgcgagtttggttaatattttccggcaaaattcggcttttttgctggttttctggcaatgaagtactagtatatatctatcagtatctatctggcacgtaccagaaatcctgtgttggcacaaaatgtcacacacacgctgaaaatatattttatactatgtttaatttggatgtgataaaagaaaataaagaagaaagaaaatatatatagaaagaaaaaattattgtttttttcta

SEQ ID NO: 13498 - DNA, 389 bp, Glycine max
  unsure at all n locations
agccttaggtgcccattgttgagacatggcgctactgtatgantctttcatttgagggcctaactcctacgcatacatattgccccgtgcttatatgaaggactaacctgtaagaagttgaaagtgaacaattatggacgtatgatcttacacttatcttaaaagcataagatgaatctttcattcagacttgttattgcacaacaaacacaaccatggtgtatgctttttttttcaataatggaacaagaacttcatccaccttctaacagggtaaatgatcattagtcattgtcatctcacatatatatataaaagcaactcttgatctagtctaatatttgagctttggtcattgtgtgaggcaaaaataatataaatattataac

SEQ ID NO: 13499 - DNA, 518 bp, Glycine max
  unsure at all n locations
agannannaagggtagtgctgatccttgtatnccctganacattgagtaanangccccgaaaccanatgctcaccactactagaggagaagccacattttgnncacttaaacctcctcctctaaacaccattaagaaaagttgttttcacatccatttgttgcaactcaaggtcaaaatgagcaactaatgccaagataataccaagagaatctttcttaggtactggagaanaagtatctatgtagtcgattccttctttttaagtaaatcccttagtaacaagtcttgccttgtatctctcaatgttgcctaatgaatcccttttggtcttaaagacccatttacatccaatggcctttaccccattaggcaactctacaaggttccaaactctgttactctgcatggaattcatctcatccttaatggcatcataccatanatttgactctttacaactcatggctngatcaaaagtgtcgagattattntcagctccaatattaaagtcagatn

SEQ ID NO: 13500 - DNA, 339 bp, Glycine max
  unsure at all n locations
atattatctactcanaaagtacacttctctatatttgcatagagggtgttcttcctaaggactgatagaacttgcctgagatgtcctaagtgatcatctaggctcctactgtacactaaaatatcatcaaaataaacaactaagaatctacctatgaaatcccttaagacatgatgcataagcctcatanaggtgtttggtgcattagtgagcccaataggcatcactagccattcatacaaaccaaacttggtcttgaaagcggttatccactcatcaccctttttcattctgatttggtgatacccaactttaagatcaattcttgaaaacatattg

SEQ ID NO: 13501 - DNA, 339 bp, Glycine max
  unsure at all n locations
tacacaacctgcgtgagcaatagtaatattatccccagcgttgcgttagggataaaattgctctggcacgaattagccaactctttcatcactctcctaagtctcgtcgtaataatctttgtaattatcttataggatacattataaagactaatatgacaaaaatgtttcatagacgtaaccggctacacctttgaaataagagctacaagacgttcactgatcatcttcacttttagtggctcatcaaaaatatcttttatgagatcgcaaagagaatctcccacaatggtccactggatcggatcttgtaaaaaattgactgtcagcntctgcact

SEQ ID NO: 13502 - DNA, 391 bp, Glycine max
  unsure at all n locations
acaggttcaggtgcaggtgctgctactggtttatgcactttattttgctngccagacctcagggggatagcgctcacatttttcggattatgcacagtttgtgaaggcaatttgtcagaattttgggattgagctcggttcatctgagtagccatctgccccatctaatttgtcagactctgaatgaaggctcttgtctctagctgaaattgcatattctggatggtcatttgcctcactaactcctctaatgaaggttgagacggggccatagtttctcgtagtctttgttgttgttgctgcattggaggatgatcatatggcctgcttggaccaacagcattctggataagagggataagttgttgttgttgctgttgtggttgtggag

SEQ ID NO: 13503 - DNA, 459 bp, Glycine max
  unsure at all n locations
actaagcttccttgagaagattcccgaaaaactagagcttatctacacacacctctctaataactaagctcacctctttaagatgagaagctagagcttagctacacacctcctataatagctaagctcacccccatgccaaaatacatgaaaatacaaaaaaagtccctactacatagactactcaaaatgccctgaaatacaaggctaaaaccctatattactagaatggccaaaatacaagcccaaaaaagaaggaaaaacctattctaatatttacaaaaaagagtggacccaaccttggcccatgggctcaaaaaatctacccttaggttcatgataaccctaggatcttctttagcaactntaacccaatcctcttagagtcttctatccaataccctgggggggtaggattgcatcataatgttagcctgttgaggctttctttccatttct

SEQ ID NO: 13504 - DNA, 449 bp, Glycine max
  unsure at all n locations
cacccagctcgcccaggcgagctcagctctttctgcgtttcttgttgctncctccagaaggcaccgtcttctggataacttcctggaaggcccaagtgggcctggttgctatttgcaccccctgtttactaaatacaccccctgccttttttgttgattctttntccgtaacattatggaactttacgaattttgtaacgatacttgttttctttccgtaatgtcacggaaccttacggattatccaataatgcttcctttcgaatttcggcatgtcacggaacttcatggattgcctaatgatgggtgccaagtacctcgaagtggtcaaacgagggtcgcatcccaacaaacggatggtccccggacgaaagtatggtatgacaagtagcatgtcttctataaccatttcttgacaacattattnagtatatctcaaaagaggtaac

SEQ ID NO: 13505 - DNA, 450 bp, Glycine max
  unsure at all n locations
ggganaccctatcagagcaaacagaggaaaagtgttgangaattttangaatctactagagatgctactatcactgacggactacacacatgagcccgcttagaggtaagagatgagtttatcacaattggggttagaatgaacatgtgtagggatccttaggggaccaaattgggatttattttgggatgtttattgaattataatttttcctttatgattataaatacaatattgttgtgtttgacagaccaattgatgtcctgatgcaaattggttgataaaattgagtgttcttggtgttttcgtgtttttaacctatgatttcgattcattgattttggtatgattgtgtgaaattgtttgaggggttttacttcccatgttgtgagaaacatttttgtatanattatntgtactttggacaagatattctagattgacatgata

SEQ ID NO: 13506 - DNA, 265 bp, Glycine max
tgaaacacagaaaggtgcgacgggctcggagtaagatctgagctgaaatggggaacgagagtgatgacccgcggaagcggcggctgtggaatctcgtgattttggacgcgttatgtgcggacttgctatatgctctcctgacattggaggtccaaaaggacattgtgatatgggttcaagcaatttataagctactttttaaccattggtgatgttttgctcggaactccttttaatccattttttgtggatggatcatcaatga

SEQ ID NO: 13507 - DNA, 396 bp, Glycine max
  unsure at all n locations
ngagatgaggaagtgttgaagggttataacttccttcttttattgttgaccacagagtggtacctggagatatgtcgcggnggtcaggagaccttggggacgtcaggtggggtgctattgcccaaaaccaagcttgaccaatcccgacccaacccgggcatagtcggtcagtgagaacctgtgatgtacctaagcaggcgagctcctggcagtcaacagataaaaggaaaacaagaccacaaagtaaggaggcttgtggtggctggccagctgtgaaatttgtgtaatatgtggatggtggcctctggtaatcgattactaagggtgggtaatcgattacaaggcttataaatgaagacaggaggctaagatggtctctggtaatcgattaccacg

SEQ ID NO: 13508 - DNA, 434 bp, Glycine max
  unsure at all n locations
caaactttattatctagaaatattgtctgaaggattatatattctaggaggaaaacagagatcactcccanaccacctcnatatttaaaaacctttgcttctagagttgagaaacanaccattntcaagcataaaagaaagattnttaacaacaagctctatacaaggggcccattcacgatggtatgaagtaatacttcatataacaggaagaatggcatgagaagatgagaaaacccctcccataccttgggtaattntaaaaatggttcgaatgtgattataaatntcattaccttgtagctcaaggtctcctctacaacatacttgaatttgaggaagaaaaacatctttcttgaacataaaagtntaaagagaagttagggaaatttagagaaaatgatgtagagcactctaggagagagagaaaaatg

SEQ ID NO: 13509 - DNA, 433 bp, Glycine max
  unsure at all n locations
tcctacggcctgcctccagacttcaccccccgtgccacttcggaagattttaaccaagcccttacttttgaggggcaactcccaccttatgaagactttcccgggcaagacgatggggaaggagatacccatcttggccccctgctccacctcaaagatccatccccgcatgaactaccctagccgaacatagtccgccatatcccggcctcacccacacccgtaaaagaatctgttccctttgcagaaggtaagggaaagattgaagcgcttgaagagaggttaagaacagtcgaaggcctcggcaattacccattctcggatttggcagatttatgtcttgtgcccaacatcgtcattcctcccaagttcaaagtaccagactctgataagtacaaatggacgacatgtccaaaggagcatctncggatgt

SEQ ID NO: 13510 - DNA, 349 bp, Glycine max
  unsure at all n locations
ctttcaaatggattcccactgaanttattattagacagattgagatatcttaatgatgaaagttttccaaatgatctangaagagcaccaccaattgagttgttggaaaaatctagcagcacaatatttttaaatgccccaatatgatctgtcagattgcctganagttgtgaactctgaactgcaagtcttgtgagtccatgggaaatacaaggagcaagaatttctaaaagttcattaacctgttggttgagtttgagatatgatanacctatcacccttaagttgcagacattacccaaagaagttggaatgtttccttcaagttgactatatgacanatcaagtc

SEQ ID NO: 13511 - DNA, 427 bp, Glycine max
  unsure at all n locations
cacatggttacaagccaacacaccattttctatttttangccanacttcttcttctagtgctccattaattangagtttgattcctganaggtgcagacacacctgcaggctacccctgcaagccacctgctaatagaacattgatgactntgtgtacactangttatagctgaagctgcaaatgtcataaacataatgaatgatgttgtgaccccagcttttgtggctagatcccatgtcttaattatttttttttgaactgcaaaaataatttatattaaaagataaagagtaccaggggtactatataaacacacaggagtaaagatctcctgaaaatgataacaaaaatacaacaacccaacaaatacagccacaaacccaaatctacaaacccactctaattaaaagctatagacatagctg

SEQ ID NO: 13512 - DNA, 451 bp, Glycine max
  unsure at all n locations
ttgagagtcgagaatacttgattattatttgttaagtnttttatgatgtagaagaaaatgaatgtgagcctttttcccttttgaaagacttgttaaaaaaatgttttaaaattacttttaattaatatttgaatttttttattccttattagtatatatgtgaggggtagagggtgtcacacttagcatattttgaaatttcaaaatcaaattaattcttaacaataggttcaggtcatgtagatctctacattgtttccttttgttattttcttttggttattttgttgttgtctttaatttatacttccataaagcttttgtggacatttctgactttcgccaataattggtgtaaattaggatccaaaagcctcggtcaagactcattcatgtctgttcctaatgaggaaaacttgtgtcacattcccaggtgtgctcttcaattctg

SEQ ID NO: 13513 - DNA, 336 bp, Glycine max
gagcacagaccacatacccttgcaacaggcacagattactgatgcgagtgcaactgggttaccaagttaaccaatgcatccagttagtcttccaacttcttagcttcacatgatgcagctgagtttgtatctacctcatgcactcctctaatgactatagcatcattcctggcgctaagctgcggaatgatggaggccatcttctaaatgaaattactggcttcaggaggagtcatgtctccaatggctgcaccactggcagcatctatcgtacctatctccatattactgacgacttcataataatatagcataagaagttgatctgaactctga

SEQ ID NO: 13514 - DNA, 449 bp, Glycine max
  unsure at all n locations
cacgacaaccaaatgagaanatgcatgtcaaagtttatcatcatatnactnttattggctttgataataaccaaatcagaacgacatctaaagtggctattgctaaactgttattaaatttttgttcctttcagattgtaaaattatttatttttttattttaatgtttatctctttaaatattttattttcttcatattttaaattttcttttaattttaaaatgcttttgcaacaattaaaccaaaagtgcatccgcgaagtaattgctgtggaccttttatagcttctataataactaaattagaagtgcatccaaagtagtgactactgaagcttcattntattaaagttattattaaaaatgttattattattaatattatcaatgttattntatatttctaagttatgatgaacatatgtatacaatntaagttcatatgact

SEQ ID NO: 13515 - DNA, 292 bp, Glycine max
taacccatattccggaggaagggtgtacaaaatgaagtgcaccaagaaggactcacacatataaacctccaatatcataatttgagctaaaagatctcgcatttgcattatgtactaatgcacaccttacacactggtgagctccagagaggagaacttcatgaccagggtgctttacttgctaaagccctatctgaagtgatgaactagatatcaatagccttacgcaggtctcatactttctcatgttggtcaacaaaaccacatatcctatccgagagttcagccttac

SEQ ID NO: 13516 - DNA, 387 bp, Glycine max
  unsure at all n locations
ctcaagctntgagcaaattcaaacgacaataactattgactctgatgtcctattgtgttccgtaatatatcgagacgctcgtaagtgagaacagaagctctgagccaattcaaacgacaataacttttaactcgggtgtccgattgtgtctcgtagtatatggagacgcttgaaattgaaaattgaagctctgagaaactcaaacgaacataacttttgactccgatggtcgaatgtgtccccgagtatatcgagacgctcgtaattgaaaacgaaagctctgaacaatttctaacgacaataacttttgactcggatgtccgattgtgtcccgtagtatatcgagacgctcgttattggaaatagaagctcttgaaaaaatcaaac

SEQ ID NO: 13517 - DNA, 217 bp, Glycine max
ccttgagatgaggaagtgttgaagggtgaagcttcctgcttttattgttgaccacagagtggtacctggagatatgtcgcgggggtcaggagaccttgtggacgtcaggtggggtgctattgcccaaaaccaagcttgaccaatcccgacccaacccgggcatagtcggtcagtgagaacctgtgatgtacctaagcaggcgagctcctggcagtct

SEQ ID NO: 13518 - DNA, 422 bp, Glycine max
ttcgaggtacttacccgttgtatatcgaagatcgatgattatcgaatgaagaacgtcgaagaacggttgagatctttgcgaaattcctcacggaaaacgttacggaaacgtttcggaagcgcctcggcttagattttcttcacggaaacaatttttccaagcaaattcgaaagagagagaagtgcctaaggggctaaaccccttttccttctcacttcctcccctatttatagcaaaataggggaggtggttgccgcccagctcgcccaggcgagctcagctcgcccaggcgagctcagctcgcccaggcgagcagggttgcttcctccagaagcaaccgccttctggaggaatattccggagggcccaagtgggcctgggtgctatttgcacccccatttttactaagtacacccccctct

SEQ ID NO: 13519 - DNA, 449 bp, Glycine max
  unsure at all n locations
tgtaggattatggngtacccatcacatgtggtactangtggttgtcgggcgatggtgcacaacaagtgttccacatccacaaagcgcgcataaacccaccatcccctgttgcccacctccaactgagctcacgtactcccacgtagcccatatcctcgtttctctcaacaccgggtccccatcaatcctcccaagctttcccaacatccaagtaatacaacattcaaacagcacaaattatcacagccaagcaaaatagggcaaaggcagaaaaactctgcccaaaacaccaaccaaaatcacagcttttctcacttaaagaccccagtaacaattccttcgttccaattcgttaaccgttggatcgactcgaaaattttactggaagtctatagtacttaagcctacattgtgaccgttgggatctactagcaaacatctagaactca

SEQ ID NO: 13520 - DNA, 401 bp, Glycine max
  unsure at all n locations
tctgcaagggtcatgactactgtaggagacatgtttntcttttcttaatncttttaatattngccttctttcttcttcccttatttgttccctctcaccttgatttatcctacctctctttcccttttctttctttctagttntcctttccataacttgagggaactcaactcatctaagattctagagagagaaagtccttatgactagtaccctcaccattaacactagatgaaagatgactcctattggttcctaagttgtggttctttcttgctgggggtttgcaaaaggtaaaagctagggtttaaaagaactcaagataagcgtgataatcaagaagaaagtattatgtaataacaagataaactaggtgtgactattaaagaaaatatgctatg

SEQ ID NO: 13521 - DNA, 323 bp, Glycine max
ttggcacctaatggtggggctgtcaaagaaccctacaaaaaaattaagcacaacggtgggatggcttctcattagaaacacaatttatgttgaaataaatattgaggatatattatatctaaatttcaacattcaaagaaataaatagagacacatatatccctgaaacataccaacatatcaggtttaatgcctgtaccatcaacatctccctcttcaacatgccacccagagggaatatctacagagactataactgatcttttttggccaatttgattattattattatgtaaagagacaagtctctggatcaaatcatc

SEQ ID NO: 13522 - DNA, 316 bp, Glycine max
  unsure at all n locations
tatgtcgcgggggtcaggagaccttggggccgtcaggtggggtgctattgcccaaaaccaagcttgaccaatcccgacccaacccgggcatagtcagtcagtgagaacctgtgatgtacctaaacaggcgagctcctgacagtcaacaaataaaagaacaaagaccacaaagcaaggaggcttgtgtggtggctggccagctgtgaactttgagtgttatatgggatatggcctctggtaatcgattaccaagggtgggtaatcaattacaaggcttanaagtgaagacaggaagctaagatggcctctgataatc

SEQ ID NO: 13523 - DNA, 351 bp, Glycine max
  unsure at all n locations
ctctatntgctatgcctaacttctagtcatcacaacctttttttgtttcagtgtctttcatgttctgcagctcgaattctctgtccaagtagagtacttgcatgtcgttggttctttcacagccttgatattctgatttgagataatccctctggcgaacttgatgttcataattcttgtaaaaatgatttttaacatagcgaagaaaagacaatttttagcctaaaccttttttgtcttcctttctttgtgattcttcatttgagccgtcgttgaatttaaagatagttcagggacatcatagttttcttctagtgccttccaaagatccaatgcttcaagatgagtagt

SEQ ID NO: 13524 - DNA, 444 bp, Glycine max
  unsure at all n locations
ggaagaagccncaaggacaattgtatgtatctnggattattaagaataagaagaaaatggactcctctccctcccttgaagaactcatgaacaacaatggagaatgaaggttccaagtttgatatttttggaggagtgaagagataaggctttaaggcttggtccaaatgaaacttggttaggcttaatgttgataagatcaaattgacaaaatgaatgaccatttgatagccatggtggaagtgctaaatgcggccatatatgggtattttgccttttgaatttttaaccagaaatggctaaagtagacttaagcaaaaatggtaaagtaaaaattatttttgctaaaactggtaaatcttatcctaatcttctatattagtgtgctaacttcctagattagtgtgctgacctcccttgggatatgtgtctttagagtgaacc

SEQ ID NO: 13525 - DNA, 347 bp, Glycine max
  unsure at all n locations
gatgcagcagtaatgatgtacgagttatgtagttgaacggnnacnaacccgggatgggtttgggcaaatacaacagtgacataactagcctgataaatgccaaaggaaatcgtgggaagtatgggttaggctataagcccactcaggcagatataaagagaagcatcgtgggaaggaagagcggtagtcaaaactcgcggttgagacaagaaggtgaacgaagcccaccctgccacataagtaggagctttataagcgcgggtctggtggacgaaggtcaagtggtcgcgatatacgaagatggtgttctgagtacattggatttggtacgaccatgccctcctgat

SEQ ID NO: 13526 - DNA, 548 bp, Glycine max
  unsure at all n locations
cggataacaaaaanaggggnnnaggggcagttaagcctgagaccatgtatnntcgttgtancnactncganaanatnaacagaaanaacannnagannagcggaacgagaggaagaagaaactcttggagtgttttanagttataangagnagggagcnctggggtcttagagagagtgatactcctaaatgcttgagtgattcaagaacacactgtgtgtatcaaaggactttcacagcctttgtgtgttgccctcactggaaagagtgactctatccttcctatcatgttcgcccttgttctttcgaaccacaatcacagagaaatgacgtctgcgcagaagcttctcacgagcgtaacttccatgttacacactacaaggaagtgagtcttgagcctaaattgaagtgtcaaacaagaccttgctccttagtgaggaatcacctcatagagaggccctgatcttcctgtacagcgatttgtatatttctgacagccaccactcagactatgatataccatacgattcatgcatattattgccaag

SEQ ID NO: 13527 - DNA, 355 bp, Glycine max
taccttgtgcatgattgatttattccttgcacccattttgatctgaaagtatgattgtttgattgaaccttgatcctgtacagtttatctccttctaccttgtcttaggttgtaggagagcctcattcataaaaggagattttggttcaaagcaaatttgcccaaatttggaggaattatggggtaaaagcttgtaatggtaagaacagagcaacacacacaatcatctaataagcagcaagtattaaaaaaaactgtaagtataaaagaaaagtgtgtgtgtttctatttaagaaaaataaaaggtaagtgcggaaagcaagtaatatagatgaataaaaagaaaaaggtgatc

SEQ ID NO: 13528 - DNA, 465 bp, Glycine max
  unsure at all n locations
acacttagcaactcaagcttgtgcattcaatatgctgataagggtgttccatatgttctctttactggactaataaatttgctgcccaagtttcatggtcttgcagatgaagatcctcataagcatcttaaggagttccatattgtctattcctccatgaaaccccctgatgttcaggaagatcatatctttctaaaggcttttcctcattctctggagggagtggcaaaagattggttntattaccttgctcccaggtccattaccagctgggatgaccttaagagggtgttcttggaaaaaagtttccctacatctangaccactaccatcacgaaagacattntcaggcatcagacaacttagtggagagagcttgtatgagtactgngaaagattcaagaaattgtgttcaaggtgtcctcaccaccagatttctgagcaactccttctacaatatttcta

SEQ ID NO: 13529 - DNA, 214 bp, Glycine max
atgctcacgagagaacatgtgatagtatgctcacctgaaaaatgaacaattatgagaggtgttgcacagagcacacatagaacttttcatcaatatggtttatacaaacaattcttcttacatgacagtgcattcaagacatttagcttgttagctcttgggccacatctcattgttccaacttgtaagggatatgatatcaatccctattctt

SEQ ID NO: 13530 - DNA, 290 bp, Glycine max
  unsure at all n locations
naagctatatatatgtntacatatggcaacataattcagcgaaattcatcattggtgaaaaggggaaaatgttacgaacatcataacaaaaaatttgtcacaaaataaaattaaacttatttggaatttttcaactcgttcaaatcaagggaaaattatacaatagaaggaatagagagctcactccccttattattattattattattattaatttaattaaaacaagcaacacaaaatattttataacaaataatatatatttaaaatttaaatggggatgttacatg

SEQ ID NO: 13531 - DNA, 405 bp, Glycine max
  unsure at all n locations
agcttgcgtgttgtgttgcatcggggaacaatttcactgtaaaagtgggtcccaattggattcctaattttcaacttacctatttggaagtgacatcatggcagttaggtcccagctttccattgtggattcagtcacaaaaccaacttcattatgttggactatctaacacggngattntcgattctattcccacacagatgtgggaagcactntctcaggttttgtatttaaacctctctcgtaatcatatccatggtgagattgggactacattaaagaatccaatatctatcccaactattgatctaagctcanatcacttgtgtggtaaattaccctatctttcaagtggtgtgttcggttagatctttcaagcaattcattctttgaatccatgaatga

SEQ ID NO: 13532 - DNA, 407 bp, Glycine max
  unsure at all n locations
agctgcttatccaaggctttctcttgttgatgaagctcctccttccatggcttattccctagtggatggcgcctcctctcacctcttctccttcatcttccactgcatctccatggttganaatcaccattgaagaacctaattgaaactcatagatccagcctccatagaagcttctcaagcaagcttcaatcaagtggtaatcatagcacatgagcttcaagtaggtgctccgtaaacctttattaattttcagcattaccttttcctacatggttgtgtcttcattattctccatgtatctactcacatgtcttgtgctgaatgttgtgaagatgattttttagactatccaccgattaaacttgctatagaagctagatttgactttctatggttcaaatctc

SEQ ID NO: 13533 - DNA, 505 bp, Glycine max
  unsure at all n locations
agccnnnccnccggcagcaacgtagtccgatgcatntgcgattcgcaanaccncncaagcnnnatacanactgcgaggatgacccccagggagtgaggctggttttggtttttctgactaggttacggaaattaaaatctcatattatcacttagctcaacacacttcctcatacttaacatgcacattcagaaattcacacatgactaactcaagtcatccctcnanatattcaagtcagccatatagtcaaattacaagatanataccacttaaatatcaattgataactataaatatgtaagaggtggtacaactctccacccttgtagaaattcgtgcccgaatttacctgactcaaacaaagatggataggctggtcgcatctgactctctactcccaatggaatctcttccctctatgtgtttggcacctatcctcacctcaagacaaggttatatgcaagtctcttactgacgtctccaatcgaccctgagatgtcag

SEQ ID NO: 13534 - DNA, 369 bp, Glycine max
  unsure at all n locations
tggaccctcanaaanggcagacttggagattcttatcgagtatattaatggaaaacaaatgatcaaaatgaatttatgtgccgaaagagctaaagatgtcttataaataattcatacatatatttacgatcctttccctatggattcaatgaatggataaatgtatttcattatgttcaaagatgagtactttatctttaatagatgagaagtcatggtctttaaatgttctcaagcctttcaaagctgaatttgaacttcaattaaataagaaaattatcgttgtcacatctgactgagatggtgaatgatagcgttactatgacatacattgtgaacaacgtctacaactcttcacatttttctctt

SEQ ID NO: 13535 - DNA, 319 bp, Glycine max
atgaaccctaccctaatataaacactaacctaaccctacgcttaacaccaaaccctagacccttaacccaaaattctaatccctaaaccttaacctctgaattctaatccctaaaccctaaactctgcattctaaaccctaaaccctaaactctaaaccacaagggttagacaataaaccctacatattaaaccataatcccttaaccctaaaatttaaaccattaacccttaaccctaccttttataccctttaaccctaaatataaaaaataaaccctaaaaaataaatcctaaattctaaaccctaaacccttaac

SEQ ID NO: 13536 - DNA, 363 bp, Glycine max
  unsure at all n locations
atacctgatagagaatgatataacttcaaatgggatcctaagaattaataacctatctttaccaaaaagtgattacaccattacaaaatacccttcatttggaggaagttgatccatttacacaggtttatacacaaaagtagtcgtattcatcactaacactccccaaattatagtttgcttgtcctcagcaaataaagacagctcactggtcccatgtgacaaaacatgcaatgactatgtcaaggtgtatgcacaaaagtattgattgatgataaagaatgaacanaatgcctcatcacttgtcttcacaaacatgcagttatcaaagagaaaataaatgtacctgtcaatagatgaagt

SEQ ID NO: 13537 - DNA, 222 bp, Glycine max
  unsure at all n locations
agcgaagcaatcntggttttttatggcaacanaggacagcgagagtgatgctatgtgagatggtgcatacgtgtctatcatcacttttcaccacaagttacaagtttccattcaactgttccccattccaccatattcttgtggctatgggagaggattacaagataaggtactgagagctcaccgcccttattataataatcaccttatcattacaataaa

SEQ ID NO: 13538 - DNA, 174 bp, Glycine max
ttacatgtacttccaaagtgtatttgttacctacatcacacacatttcctttgctaaattcacatacatgcatactctaagcactttgtctatcaaaaaatgcatacgtgcacatcttggtatttctaatacctatacatacacaaacttcattatgaatcttgactatctaca

SEQ ID NO: 13539 - DNA, 308 bp, Glycine max
  unsure at all n locations
aganggagatgtggctgactganctgaaacaccgcacggacttatgaccgagcgcttctgactccttctcaccccgagacgggatgagtatttaacactcgtaccaaaacaacactgaatcactgttccaggcgaacgagtgggacatcccagtcggtgcatttgaaggactattcgcgagagagaacgaatgaaacggacttcgcagagataccgcggaggatgcctgaaagtgtgacattacgcgctgctcaaggagaactgaaagtccgggagctgtggaccagagattctgatgagcggcgaac

SEQ ID NO: 13540 - DNA, 527 bp, Glycine max
  unsure at all n locations
nttctaagttcccaagccctagcnancntannnnctnannnnatanacacncaagcnnngagcatgtcatcncgagaaaggagcataagaattttcatttttacttttccccaacaaaagcggggagaggatatgaatatagtagacgaactgcgagttctatccaccatatgtgatattctatagtaaccccacactgctagtttgaacatgaggaaagctgtagaagaatataaacaattccttctcatataatatcataactcacgctaggtgtcaatgtacgaatcaaactaatttctatggaccattgtgacctacataaccttctgatcatcatgattattcgttggacactgctatatcaagaattgacggatgaactctgttcatttggctccctatcgtatgctgtcaaatcttaatagatccgacattaatagcgcgtacactttgcaatcatgacttcacaatatcacttattactatgctcattgagaaaaccgcctgtgcttgactcatctttg

SEQ ID NO: 13541 - DNA, 420 bp, Glycine max
  unsure at all n locations
tatgcttgaattgcttatnggatgcccattggttaacttggtaagcccagctttggccttgaaccatgaaatnntgtacctgttgcaaagggtctgtggtttgtgctcctctgctgaccaccatacagacctttgcccttccatgcagcaacctggagcaattgagcagcccgaagcttatgctgctaatatttacaatagacctcctcaacctcagcagcaagatcaaccacagcaaaataattatgacctctccagcaacagatacaaccctggatggaggaatcaccctaatctcaaatggtctagccctcagcaacaacaacagcagcctgctccttccttccanaatgttgctggcccaagcagaccatacattcctccaccaatccaacaacagcaacagccccagaaacaacc

SEQ ID NO: 13542 - DNA, 389 bp, Glycine max
acacatagaaactcaagcttgatctaccaccaccaccgcaccatcatcttattttctttttgttaacattatagtactttgatttctagccatgtatttggctatattattatgacatttgaacaatttagtatttcatttatttgcatagtatgattgaacaattatgaattatgttaaatgactatgtggtttttatatatttgatctattcatgttacttgcttcatgattggtttatatttttcaatgaatatcttgtgaatgattagtaatggatgtatgtattatattcggtacgcactttggctttttgttgatgccaaagggggagagaaatggcgattaaatcaagaactcacataagtaattaacttaatttcaagtga

SEQ ID NO: 13543 - DNA, 355 bp, Glycine max
  unsure at all n locations
agcgtttattataaccatacaatncgancgcatntatcatgaaactaccctaaaccaagacaacagagtagaggcagaacactctgtccaaaactcattcaaataccacagctntccttactcatataccccagtaacattctcttcgttccgattcgttaaccattggatcgacttgaaaattttactggaggttcctagtacataaatctacantttgaccgttgggatctgctagaaatgcctggaacccgaaatgtactactcttcccatgactagcaatgcacaaccattnttctgcactatgttaaaaaaactgctgcacaattttgacagcatttttctgcataatat

SEQ ID NO: 13544 - DNA, 429 bp, Glycine max
  unsure at all n locations
cttgcacaattggtcttcgccagtgaaaggatcaatgtggngttgataatagngcaaattgatcatcctactaggacgactgaganaactgnngcaaataaagagggtgaggatgaaggagaaacccatgctgttactgccattcctgtacggccaagtttcccaccaacccaacaatatctttactcagccaataacaaactttctccttacccaccacccagttatccacaaaggccatccctaaatctaccacaaagtctgtctaccacacttccaatgacgaacaccacctttagcacataccaaaaacaccaaccaagaagtgaatnttgcagcgagatagcctgtagaattcaccccaattccagtgtcctatgatgacttgctcccatatctactttgatattcaatggtagccataaccct

SEQ ID NO: 13545 - DNA, 508 bp, Glycine max
  unsure at all n locations
aggggnacagcgtaannagcctgtcnactgaccgtcngnanccnncaacannnnaccgnggnncngggganccnccngacgcgaggcgaaggcaggcattctaggctaaatanaananancaaacaaggggacagagaggattttatagttcaccgaacaaaaaatgttcactaataataatctctttataagacttattactatgaactaataatatctttcatatatatatatacatatatatatagatatatatatatatatatatatatatatatagacacatagatccatctatataataagagacaactgatatctaacacgttagatctgttggtcctcgccgcgcgggatacaatagttataactcacgtgggcagaggtaccctacccgttaagaagatatatatagggaatgcgacactgcgggatccgaccacgggtggctgtgtaacacatcctatctgatgggttctgtatagagtgcgatatacatcaccgggg

SEQ ID NO: 13546 - DNA, 302 bp, Glycine max
gataggaatcggttacaacaaagcggattggttctttgaaaggttaagtgatatgatgagatctgattcaagtcgctctgctaaatatgacagtaacagagtgtatggttgtccttggttggatggttctttaaagcggaatctacctggaagaccagtagcttgacaagtctacgggtgagaggtgtcatgttcttttcctatctaattaatcattacaattgtatgtgttctgagaccgctgtgatttgatgtattgattatcattccaagccattaacttcatcaacctgatttagctg

SEQ ID NO: 13547 - DNA, 347 bp, Glycine max
tatcttgagttatcatccattacgagtgttctagatgaacttgagaaaccttcccttcacatgactgttgagacaaaaccctcaagaagaacaccttaagttatctgaacttagctactaatggtttctttgagtgtgctttaaaagacatgactaaattcagaaacacagagaatgtgtgaaacataggcctacagttgaagttctctagacataatatgcatattcagactaataccactagaaggagagttgttcaaaaccaagacagacaatcatgttttctatgccgataagtccaaatatcaaaagttgtatatgatcagaagcatcatgctgggagtagc

SEQ ID NO: 13548 - DNA, 334 bp, Glycine max
  unsure at all n locations
tcacanaagtttatatggcttgaaacatgcatcgatgtagtggtacaagaagtttaatgagtttatgagcaactcaggattcanaagatgtgacatggaccattgctactatgttgagaaatatactaatagttatgttatccttgtcgtgtatgttgatgacatgttgattacaggatctagtatgatagaaattaatagtttgaagcaatagttggcagaaaactttgaaatgaaggatcttggtccagctatacaaatccttggtatgagaattcttagaaacagatcagaaggaattttgaagttgtctcaggagaaatatatacacaag

SEQ ID NO: 13549 - DNA, 401 bp, Glycine max
  unsure at all n locations
tttgatccaattcaaacgacaataactttttactcggatgtctgattgactctcgtcacatatcgagacactcgaaattgaatgttgaagctctgagccaattcaaacgacaataactttttacttggatgtctgattgaggcccgtaatatatcgaaatgctcgaaattgaatgttgaagctcctagcaaattcaaacgacaatatctttttactcggatgtctgattgaggcccgtaatatatcgagacgctcgaaaatgaatgttgaacctctgagcgaatncaaacgacaataaacttttactcagatgtctgatagaggctcgtaatatatcgagacgctccaaattgaatgtngaagctctgagctaattcaaacgacaacaactttttactcgg

SEQ ID NO: 13550 - DNA, 384 bp, Glycine max
  unsure at all n locations
tcaacattcaatttgagcgtctcgtaatattgctgtactctttcagacatccgagtaaaaatttattgtcgtttggattggctcagagattcaacattcaatttcgagcgtctcaatatattacgggactcattcagacatccgagtaaaaagttattgtcgtttgaatttgctcagaggttcaacattcaatttcgagcgtctcgatatattacaggactcaatcagacatccgagtaaaaagatattgtcgcctgaattggctcagatcttcaacattcaatttcgagcgtctcgatatatgacgggactcaatcagacatccgagtaaaagttattgtcgtttgaattgctcanagctcaacattcaatttgagcgtctcg

SEQ ID NO: 13551 - DNA, 396 bp, Glycine max
  unsure at all n locations
agcttgttatataaactagttcaataattaatatacaaacacatgttgtcatgcctaacatggctaataacagtcgaataacacacttacacaaaatacttccctaaaaataatcataccaaaaatattgcttcaatacttaattccaaaataaacaaacccatacacctcacaatcacatgcaatacaaggcaaacaaaagtggctaagcctactcgggacatccttctcattatgagagtgatgtngcntcaacatttattttttttatagtacttgtagaccttatccacatgttctaatcatcataggtaacagaaaatanatntaatcatcanagtcttgaatatataaccacaattcacataaggaactttagaatnggaagtctaaaat

SEQ ID NO: 13552 - DNA, 127 bp, Glycine max
agcttgctctatatatatatttgatgtttgtattgatgggaggagggtacatgccatttttgctttaagaataacgtcccactggtaaaactaactttccaaatgtttgccttcgcaagaatggccc

SEQ ID NO: 13553 - DNA, 498 bp, Glycine max
  unsure at all n locations
agccncnnnnnnngcaggctagtngcaagctacnancgcacactctagnaaactcaagctnctgttctcaatacgagcgtctcgatatattacgggactctatcggcattttgagtaanaagtattgggcgngtggaatgatgctcagagctttcagttntcaatattcgagtcatcttcgatataactacagggacacaattcggacaatccggagtcaaaaggtatttgtcggtttgaatttttcttcagagccttcccgtttcaatttacgagcgtctcgatattacaacgagacacntcggacacccgagtaaaaattattgcctttgattttctcagagcttctattttaattacgagcgtctgatatatacggacacatcggacatcagtaaatgttatgcgttgaatgctcaactttgttcattagacgctcattatacggactatcggcttcagtaaattatgcgttgattctcaactagttcatacacg

SEQ ID NO: 13554 - DNA, 390 bp, Glycine max
  unsure at all n locations
catncgctgcacaaacagaatcaatcgggagggtatagtattattaatatgtgaattattgccataccgtgtggtacaaacaataatgtctcaaaacaactaatggttccgctttttcaagccctcagaacctatgatgggtatttaataacaataatagtagtctagtgcagtaagtatggagaataagttctattgcacgtatggagaataaaagctttgtttgtgtaattgtgctatggaaatgaatccgccgttataaaaccttgctttagatacgaaatgtttctagaaatgggagacaatataatanattgtggaagttttcttcctattatttgattcctatctgtaggacgatatggaattcgatgttgtacttcaaacatn

SEQ ID NO: 13555 - DNA, 386 bp, Glycine max
  unsure at all n locations
attgccttgtttggatgangtagacataccctttctggtttagggcttttgtgatgaatgttgtgatgtttatatgctgaaaatggctgatgaaaactattaaaaatgaagggtaaattaaacctagggtaaaaaagtgagaatgtggtgtatgagtgggaaaaggatgagactttgagagttggaaggtaagtctgaattcttgtgtaaatggaggttaaatgagtaatcctagcttgaatgtcattatgacatgtgagaaaggtangctgtgctagagggaaaacaaatgaccaagtgaacaaagagccatttctaggcaaaatgggtgttaagagtcaatttgattngtgagatttggtgtaatccagtcaacaatctaatag

SEQ ID NO: 13556 - DNA, 419 bp, Glycine max
  unsure at all n locations
agctggtattatacaatttggagcattctcatgctctncaaaaccaaaactcatcttcaaagctggctttgccatttcatccacaacactgttggcttctctgaccacatgattccaaacctcattttcatattgccctgaaaatctgtgaatctcttcgacaagttgatgctgaggatgacccanatcacatctcccatcaagaaggtttatagcctccctagaatccgaatccacacgaataagtcgaaaagccgaccatgcaaacttaagaccaagtaaaatggctcgaagctcagcataaagaacactgcctcctccacttttggcctgaaaactgcaaagcaaggaaccagcaaaatcgcggattagccctccatagcccgcaagactgccaaattgagcaacagatgcatcac

SEQ ID NO: 13557 - DNA, 151 bp, Glycine max
  unsure at all n locations
agcttggtattaaactatttanagattaananacaggcaggtggaagtgatgcctaacatggcttataacagtcgaataacacacttacacaaaattctttcctaaaaatatgcataactgagaatactggttcaactcttaatacatgat

SEQ ID NO: 13558 - DNA, 521 bp, Glycine max
  unsure at all n locations
agggcnnnnnggggtctagtactgnactancgacntcagaacntaaactctgctcantggcgaagaggtgtctaatcaagatgattttatcatcttcaacacangccaccatgcagtattcagagatacatgcatacatcaatactacatgctactttgtactctcacagcacacgttcacacatactgacagggtagagggtactgcttactcttaacaatacatcgtgtcacaccaactaacaatatgcggcatgcccataattcacgatatatgtcttctaatgattgcatactccttcaaagcatacgatctaatcatcgtcatacactccaatcgtgcgatccatcaattggaatgattcacaaacacaacttcttcacaatatacgaccatatcataatcgatcatactgcacactgttcacaggcattcacgtttactgaatagacaaacaactcacatacaactataagtaacaacatgcattgaatactaaatgatcacacgcagcagacan

SEQ ID NO: 13559 - DNA, 361 bp, Glycine max
  unsure at all n locations
tgcttatgtctctnggctttttctttaaaactagtcacttanaaaaaagttgtgactttttgaaaaatatttagaaacaagtcacttgaagattgtgactcttgaaatgatttttcaaatcagtcactggtatcgataccattaagtgtatcgatacacatcatagatgcactcttattttgaatttgaaaattacatgttagagctctggtatcgatacaagtattgtgaatcgattacacaagttaaatactttagactatntaacataagttataactcttaaattgatatcttaacgttcgaacactggaatcaatacatgatatggaaatgattcaactttgtaatcagtttgaaa

SEQ ID NO: 13560 - DNA, 149 bp, Glycine max
  unsure at all n locations
ttatatataccattctctcatagaatgcaaagcatggaaagagaaagactgagtagaacagactggganagaggcagtagacccctcanatnngtcttcttttttgccttctcagtattcctctttaactctaggtgctacagatctct

SEQ ID NO: 13561 - DNA, 174 bp, Glycine max
tatcttatctcccacagagtaattggatattctctctctgcaaaagttcaattaggaagcttgtaaaattaaagtattaatttgtccaaaataggtggatccaacacaaaattcttcaaagttctggctaaaatggcattggttggtggagaccaaaaaaaaaggaagaaaaaa

SEQ ID NO: 13562 - DNA, 439 bp, Glycine max
  unsure at all n locations
ctctcaatgtaatgctactaccctattcagtgtgtactataagtcattgctacttctaacagagtctagattcaagttaattaatataacccattcaatgttaactaatgttgaatactcttctctctttcttttttcttgggtattatacctctgatctctctgatcgctctctctctctgactctcattgataaaattatagatccctcatgtattctacttgtctttaaatagacatgcaattcagctgcaacatatactatatgctaaaggacttacaaattaagccaaagtcttgtttgagttctgattattaaaattcggtgtactttcttccatcacggatcctttccactntaataaaaaataaataaagtggagtgtccagattacatatcttacaattcatacatattnttccaatactttatatatta

SEQ ID NO: 13563 - DNA, 353 bp, Glycine max
  unsure at all n locations
agcttgtatatatgtactttactactattttaaaccttatcanaggattaaatgggaggtatttatgttgtaggagtatcagaacantcttgtttctgcagtgtggcanggcagaatgatggtaatgcccttgtaaaataaaattatatgccttttggtatttaaaggagtttcttctaggtggtgcaatgaagcctactacacatggccagtgggctcatttagcttgtgccatgtggataccctagtttgtttgtgtatgactntattcactcttttttacccagtttggttatttttaccaagtgtcaagatcatggacatgacangtatagtagcattctttacaccat

SEQ ID NO: 13564 - DNA, 465 bp, Glycine max
  unsure at all n locations
ctgcatgatttacaaaatacaaccaggagaagtatattcatatgtgcacgcacacacacatgttgataatagtttctggtgacttattacagtatatagtagatactntaataaagtgggggaacaaaatatattgtgatgtgatgaatgaagttgattggctacctacatagactacaaaactaggatgaagttgattggctacctacatagacaacaaaactatgtgtcatgaccagcacaccaacatgtgtttcttcagggggaaaaatcatgaataggctaattgaacagggatcacagttgaagtaacatgaaatangtgctttctgtgtggngggcttatatgattgcaacttatattaaaggttgccctaatntataatatnttnttctgaatataaaaatatttttttactggtagttgaataacttgaaatttctaatttgagaaatgaatggatg

SEQ ID NO: 13565 - DNA, 460 bp, Glycine max
  unsure at all n locations
gcgatgcattgtcttctattttnctcaattnntgaacngtnnctcgatgatatnnntagcgcgatntcatgatcgagaccatttccaatgctaaaaaggttatttggtgcgtttgggaatttcctactgagcccttcggtttgtcaattnntggagccatcnntcgatatattacanggaaactgaaccggacatttccgtgtataaagttattggtcatnnttaaattttcttagaagcttcggatctaaattttgagcgtctcgatatattacgggactcaatcagacatccgagtcaaaagttattttcgtttgaatttgatacgagcttccgtattcaatttggagcatctctcgataaattatgacactctgtcgggcatccgagtaaaaacttattggcgttagaattttctaagaagtttcattttcatattggagcgtctcgatataatacg

SEQ ID NO: 13566 - DNA, 411 bp, Glycine max
atatggagcatctcgatatattatgtgtactcttccggacattcgagacaaaagtgattgtcgttagaatttggtacgagctttcgttttcaaattggagcatctggatatattacaggactctgtcggacatctgagtaaaaagttattgtcctctgaatttgctacgagcatccattttcaatatggaacgtctcgatatattatgggactcaatcgaacatccgtgtataaagttattctcgattgataatgctcagagcttctgatctgaattttgagcgtgtacatatattacgagactcaatagaacatccgagtaaaaagttattgttgtttgaatttgctacgaacttacattatgaatgtgcggtgcctcgatatattacgggactcaatcggacatccaag

SEQ ID NO: 13567 - DNA, 316 bp, Glycine max
  unsure at all n locations
ttcttatgttctcaatttcaagcatcttgatatattacaggacacaatcggacatccgagtaaaaagttatagtcatttgaatttgctcagagcttctattttcaatttcgagcgtcacgatatattacaagactcaatcagacatccgagtaaaacgttattgctgtttgaattatctcanagcttatgttctcaatntcaagcgtcttgatatattacaggactcaaccggacattcgacttaaanagtaatgtcgttagaatctgctacgagcttccgttttcaattacgagcgtctagatatattacgggac

SEQ ID NO: 13568 - DNA, 398 bp, Glycine max
  unsure at all n locations
tttactcnatgtccgaagagtcccgtatatatcgagatttctcaaattgaaaatagtagctcctagcagattcataccataataactttntactcggatgtccgattgtgtcccgtagtatatcgtgacgctcgaaattgaaaacataaggtctgagcaaattcaaacgtcaataactttttactcagatgtccaattgagtcccgtaatatatcgagatgctccaaattgaaaatagtaggtccttccaaattcaaaccataataacgttntactcggatgtctgattgagtcccgtactatatcgagacgctcgaaattgaaaaaagatgctctgagcaaattcaaacgacaataacggtttactcagatgtccgatccagtgctgtaatatatcg

SEQ ID NO: 13569 - DNA, 288 bp, Glycine max
  unsure at all n locations
tctgcatgcttgcttctttatgtctagagatttctagagagagaaaggtccaagttccaaagagtttgagagattntgttgtgtgaagacctacagagaaccgagcttgaagaggaagccgtcctgaaagcttgagatgagtttgtgagtgattgtgaggttctagaggtggaggagacatcctcactgctgtgatttcttcaatccttcatctttctcttctctttgttgaaaggaagcttcccagttatggagagctatatcctctgttggttcttccttgcatgt

SEQ ID NO: 13570 - DNA, 354 bp, Glycine max
gacacataaatactcagcttttagtttagatgatgcagatgatttgtagatacctctatgctctcctctaatgactatagcatcatttctggtgctaaactgttgggagttggaagccatcttctcaattaaatttttggcttcagtaggagtcatgtctctaaaggctccaccactggcagcatctatcatacttctctccatattactgagtccttcataaaaatattggagaagaagctgctccgaaatctgatggtgagggcaactggcacataattttttaaatctctcccagtattcgtataggctctctccactgagttgtctaatacttgagatatccttcctgat

SEQ ID NO: 13571 - DNA, 341 bp, Glycine max
  unsure at all n locations
agcttgtcattagtcatgttcaaaaatctcatgaaaggttgagaggacatgnaaacattgtgggagattatgccactttttaacgttaagaatggtccggtttttttttttttctaatgaataaaaaccagccataattgattaaaatattataattttggacctttaaaagggaaccttaaacctttgggttcggtaatcccctccccttcaagcaaaaatctacataactcaatccccaagtattttctttcccatttccaatgttttagctctgataactntggntntttatatgattcttttgatttctggttcagaataaaaacattacttatacc

SEQ ID NO: 13572 - DNA, 403 bp, Glycine max
  unsure at all n locations
ccgatgtactagactagcttttcgaaacncagctgctaacttattatgttgcaacttgaactagagttttggttcttttgatagacacgaaatggatggacgcctgagattcaacctagaaatgattagtttctttaaaaggatatgatgctactcaaaattgtgatgatagctaggtgatgcaccagtacctgatagatagatccgttcttgcccataccaggaagctcgccaaagagagaaactcaactttatcacacttatctctcaagcttaagttctctattatggctngatntcttaattctactagaatattccctaaactaatccattgcttatttccacataaacccctaccatatatggctagagctaaatataaactgcccaaactatatgg

SEQ ID NO: 13573 - DNA, 492 bp, Glycine max
  unsure at all n locations
gcttttaannnaanaannnnannngggaggtgagctgtacatcgaaacccgacaggacacgggatccttagagtcacctgcggcatgcaagctaggcttttactttcnaagactgangggacacatagactgcgtacatactacgtcatgcgtgctaactgactttgcaccatgaccattgtagtcgtcatatatgactaactttgtattgaaaagttaataaaatgtatgtctcttcctcaagttatgggtctaattgtaggtaagtacatatttatatgtncagtttaattatatttctcagagatacttcctatatagtgaattaacgtggttcaacttcagattcacgtgataagatgaagaataacaatggtgaagtatctggtgtctcgcgtagagatgcatatgcgccgtatgagtcacatccactaagcgatgcactcagctcgactantgggttgagagaatcatgaagagaatcagaatacg

SEQ ID NO: 13574 - DNA, 358 bp, Glycine max
  unsure at all n locations
agctnctcctctcatnttctataaatatagggagaagtgaagtaaaaaaggggtcagccccttaggcacttctctctctttcgaatttcttangaaaattgtttccgtgaagaaaatcaacccaggcgcttctgtacgttccgtaacatttcctgagtgaattcgcgaaggtttcaaccgttcttcgacgtcttcattcgtcttcatcgtcttcagtcttaacggtaagtacctcnactaagctttcaancatctatgacccgggtggccacatttgttcatgattttatctcgttcattacttttatcccctttgcgtcttagccttattaatcttctccttaatctaaataaataa

SEQ ID NO: 13575 - DNA, 493 bp, Glycine max
  unsure at all n locations
aggccnnnnnnnccccagtagagaggatagcacgatctattngcaanactnctaagctnttaactgaatntacaacgttccaattaatgtcaaaatgttgtaatcgattacattgtttggggaatcgataaccaatggtgttgaatgttgaaatcaaatttaatttgtgaagagtcacattctttcacattaaaaccttggtgtatcgaatacacttaattgggaacccattaccaatgatagtttctgaaccaaattcaaagatgttactcttcccataattttcaaagttttcttgaagacatatcttttccaaatggttgtcaagggtttttcaaaggtatactcttcttatagtttcttccttgacttgagagctataaaacagggcttgattgcaacaaaacttttctacattcttagacacaactttgccactgattctaatctttgactctcttctcttttgcaaagcctcaagtnttgtttctaa

SEQ ID NO: 13576 - DNA, 402 bp, Glycine max
  unsure at all n locations
agcgtatacttcttaatnttttccaggannaatnctannnatnaacgaaacacagctgacttttcaatattcctttaagccattaataaatattgactannatctaagcacattgttttgttgcttagtattagaatntgatgtaagaatctaataatgacagaaagaatattagttaaaagataaaattactatagtgaaagaaataatgggaatcaaacatgaaaannacacgttcaacttncatgccaacaatactggtcggaaaacaccataacgatatttatttgcatgatcactgcaaggaaaagagaagacgttaattatgaatcattatataatcaacaatcagaatttatttgaattttagtcatcaactactagctcatattaatatgaatg

SEQ ID NO: 13577 - DNA, 472 bp, Glycine max
  unsure at all n locations
nccctaattgagcgaatcgnagtttgtacancntnnantactaagctncctctctaacatctaatnncatcatcctagtaaacatgaccatgtaatgatcatttggcctaggtccaaacagaanaaattaacaagtgatatcatgtccttgcattgggctcaaatattacatttacccanaattggaacacacacatacacacacaggttttacaaatatgcacatacatttccttaaacatgaaaacacaatgttaatccgcatcactagtattggggtcatgttaaatgatcttatcttacttactcatatgcatgtgaacactctactttgaatagttacgacactatgtcaccataaaaggaatcatgccttgtataactacctcactagatgaatcactagtgacatcagngtactaactttaagatgcctatgctcggacacatagccatgngtttactcagcttg

SEQ ID NO: 13578 - DNA, 282 bp, Glycine max
acaccacatattagtaacaccattatatttaatacacgaaaattacatattatacaaaataatacaatacgacatatttgaataataactaaaacctaaataattaacattcaaacttatatacctaaactaaaacaaatattaatatgaccaacaaaaataacacaaaatataacacttaccagttgaaaaccaattggcggaaacaccactaaagctttgcatacaagatacataccacaattaattaataaataccattattttatacaagaaattaac

SEQ ID NO: 13579 - DNA, 305 bp, Glycine max
  unsure at all n locations
tttcttatgtttaangaagtaagatgggngctcgagatgcatntaaaccttatctcaaccggacagcttgatgaagttgggatgatataccagttcggtgctggtagatggaagctatatagaggaagcatggtcattgctcaaggtaagaaggaatgctcctggtacatcgtgcaaggaaagatatgcatatggaagatgaatgttgctcaagatacaaccaaagaattatgacacaagagatngngtcacatgagtgagaaacgtttggagtttctaacataggatcactttccaaacataaa

SEQ ID NO: 13580 - DNA, 458 bp, Glycine max
  unsure at all n locations
tgactcatggtggaggagataggaatgaaattttgtgtttttaaatctncngnacgaaaaaagtgtgagttatctgccgacaatattatctaaatattttttgtccttcaattttatgtcacttttgtttttggtcctccaactcataaattatttgtcttagtctctcaatatttgtggtccttcaagtttatgtcacttttgtntattcattatgcatgcaaacttttatataatgtagctntctatacatgcataaccaacctaactaacaagattaacaaactctaacaaccaacaactgaattaactaactccacgtaactaactacacgtaactaatctgcacgtgtgttattatacttggctgcaatagtttcttcttcctaacatttcctaacccatcaaanacatcctgtcctagaagtgttaagcatatgctntgtggcacatgatat

SEQ ID NO: 13581 - DNA, 389 bp, Glycine max
  unsure at all n locations
tatcttcaattttaatgttttatcagancatgtcaaaaacgcgtatcaaattatggagatcgtggtatggtattgtaagtgacatccttggccagagtggatctgattgtgatggcactaagcacatgatcacagttgagaatgaanatgcttgngatgaatattgcactgtaagtattctttaatatgttgctatttgttattcaaagtagattggatttgacttttttttttccagtcgcatatatcggttaaaccgtttcaattcaaggtgcttcaagattgggatgatatagtggatttgtgtgctaaagatagagccaccggtcatggagcttaaactgctatggatgctgatgaagcgatgagtagagaaacaaatgaagtgg

SEQ ID NO: 13582 - DNA, 380 bp, Glycine max
  unsure at all n locations
tgcatcgaccgatgtcgggtatagacggtcaatttatatcttgtattatatcngangcnggctactagggaatgttcgatcggcgtcatcgggtgatgctttntattttagacctcgatcggccatctttcatggacgacatcggctatcattctcttttcgatcagtatcggagaataatgtttttctggcatagtaaatgagaacatgccggtgtcggccgaaacacaactntggttgagctctcacgaaaaaacctatccggcctactttgaaaattttatgggcgacgcccaactacataacttcctttactgcaaagaaatattgttggccatcgttagaacaaaattgcgcaatgtggctgaaaatatcatcac

SEQ ID NO: 13583 - DNA, 226 bp, Glycine max
  unsure at all n locations
aatctatgtcttatatgtttcccattctcttttcttctaatttacctaaggtaatttgttcttttataaaatatctgttttcaaaatctgctctattgttaatctatctttagatgatactttgttgttatgaaaaaggcttaaatttaaaatctaatcaattctattcttgtgaatctgccttacaaaaatccatagaaacaganatacaatttatcatttatgc

SEQ ID NO: 13584 - DNA, 330 bp, Glycine max
  unsure at all n locations
cccctctaatatctgagccatcatccacagggatcaacagtatctgaaaagctaacccttcngataaatggctcctcaatccttgttcctgaaganattcattccagaccaccatttcatggtagggttccattattggaaaacccgcatgcagatattcattgaagccatagatctaaatatttgggaagcaatagaattatgaccacacatacccactatagtagatgtaagcacaagcactacaacccataaacctagagataagtggacagaagaagatangagaanaatccaatacgatctcacagccaagaacattatcacttc

SEQ ID NO: 13585 - DNA, 342 bp, Glycine max
  unsure at all n locations
tttctntggttcaggnattcatgtnncatctaggccttttgagtatgtccattttgatttatggngaccatctagaggaaaaactcatggtggaagctcatactntctcaccatcatagatgatttctccagaagagtatgattgtatgttttgaaaaataagtcagaatcttttcaaaaattcagagaatggcatactcttattggaaatcaacttggtacaaaattaaaagttttaaggactgacaatggcttggagtttgtttcagagcagttcaatgagtnttgcaggaaaataggcatcanaaggcacaaaacagtccctcacacaccacaacagaa

SEQ ID NO: 13586 - DNA, 408 bp, Glycine max
  unsure at all n locations
tcattagccctgacanagagataaggaaataagttanaatatatcatttatactcaaaagaaaactatttttaacccacaatgcacggttcatgtgataaaaaaataaaatgaaatgtcaagtttcattgttaaccctaacataaccaaaaaaaatccatttaatgaaatacacatcaaagggagacggtcaaacatattaatgagaaaggcatangaagtatgtgtggcacttagacaccctttcctatttttatgaaagttgaatgcttgaaaaactgcataaacaatctttgaaacttggtttgtaatgtttatctggttcacatattttgatcagcttgatgaaatgaaagctacatgtttttttaaggttgattnttcatataacaatntcatattatttttc

SEQ ID NO: 13587 - DNA, 398 bp, Glycine max
  unsure at all n locations
ttcttttcttataaattgagtagcacatgatttttctcagaacatgtttaccaaagagtttttactctctggtaatcgattaccagtagcaaaatatttttgaaaaagttttcaaattgaatttacaactttccaattaatttcaaaaagctgtaatcgattacaatgttattgtaatcgattaccagtgcctttgaacgttgaaattcaaattaaaatgtgaagagtcacatccttttacataaaagctttgtgtaatcgattacactgatttggtaatcgattaccagtgtttgtttctgaataaatcanaagatgtaactcttcaaaaggtttttgactntttcaaatnggttttaagtttttctaaaagttataactcttctaaatggtcttct

SEQ ID NO: 13588 - DNA, 472 bp, Glycine max
  unsure at all n locations
ggtgactctaggcaatttctttcaaactagtcacttaaaaagttgtgacttttgaaagaatcttcagaaacaagtcacttgaagaattatgacttttggaaatgtatttttcgaaatcagtcactggtaatcgattaccattaaagtttaatcaattacacatcaacagatgtgactcttcattttgaattttgaaaattagaacgtttagaaacactggtaatcgattacaagtactgtgtaatcgattacacaagttaaaaatgtttaaacacaagttgtaactcttgaaatttgaaatcttaacgttntaaaacactggtaatcgattagtaccttttggtaatcgattaccagagagtaaaactctntggtaaagaaatttttgaaaacttcttgtgctactcaatgttttggaaaactntntttgtacttatcttgattgagtcttcccttgtttcttgaatcttga

SEQ ID NO: 13589 - DNA, 327 bp, Glycine max
ttcttgcctcttagaggtccaggaaggacaaggtggccgaaggaactagttccgccccaaagtacgacagtcaccgctttatgagcgttgtacaccagctgcgcttcgaagccattaaaggatggtcatttctccgggagcgacgcgttcagctcaaggacgacgagtatactgatttccaggaagaaaaagggcgccggcggtgggcaccactggttactcccatggccaagtttgatccagaaatagtccttgagttttatgccaatgcttggccaacagaggagggcgtgcgtgacatgagatcctgggttaggggtcagtgga

SEQ ID NO: 13590 - DNA, 386 bp, Glycine max
  unsure at all n locations
tacatgnncccaactctnncttgaataggcatttgtanttggttggttatcnttggttaggtgccattcttagtacanntttgatatatgtannttgcatcatgccatcatnncatggtttgtnntttgaaaaannagtttctanagttaagaannaaatttcttcagaaggggcagaaactctcttattttgatncgattacccaaccttattgtaattgatcacaacaaagttgtcttaagcttatagagttgagtcttgtatcggtttaatcgattacaactatctcataatcgattacattgttgtttgagagaatgactgatttattcaggagtcttggctttaatngattaccaagatcgattacttaaggcatctaatc

SEQ ID NO: 13591 - DNA, 386 bp, Glycine max
  unsure at all n locations
tnctttatatatatatatatatatatatatatatagatatatatatatatatatatatatatatatatatattcctttggcggatcaaaatatataaaaaatattgtgagcctcgtggacgagattctagagggtgatttgaagaagaagatcattgtcaacagttgtaccatttgttgctagaaaaatgagtttctggactcaccctggtcactgaaacacacttggctttatctctgtcagacaggcttataataagtccatgtttcattgtcaaatagatatgacgcacatgagcacatcttcacagttgtattatccacaaagatatcccacatgaatgatgtccttttatataccatgattttattacatgtgttcaagcg

SEQ ID NO: 13592 - DNA, 433 bp, Glycine max
  unsure at all n locations
ctttcanatgggtaaaaggttcacattcactttcttctacattatatncaaacttgtccaaataaataataaagttatctcgacacanagtaggtcatctaagtttcatacaattaatatagaacctatatcctaatgtcacatcctatcagagcgtggtgttcccgtgtcctctagcatgaggttcttcatagtcatccacctattcatctgctcccccgaacacaaagttcaatatcatcacaggatccaaacacaaatagcaaaccgggagtgagttatcacatttctaactactagagagaaacaacacaacatatagtagccaaatacaatttacttagcatatctcacattatttcatcactgtgccattcatcaatcacacttttcatccatcaatcacacctttcaatcatcaatacaatacaca

SEQ ID NO: 13593 - DNA, 412 bp, Glycine max
  unsure at all n locations
agctntntgtattntgtagagttgaatattaggctatttttcanatggaggacaacggaacactgatggccaagaaaataaccatttgctggaaagatgttggcactatagtttattaagcagaattgtatcaagaaaagccacaagagtttgtatgctctcatagttgaatttgaaaataatggtctaacagttagaacttagaaggatagtaaagagatgttttgcatttgaaacatttatttctccttttatagactacaaaaatgtacaattgatctatcactctcccgagtctaacgcaatcaagtctcttcggaacctcaagaaccgctactaccaacttatgatctttagatataccaattatttaaggccatatattgatataattatttgttgtgtaaaaatc

SEQ ID NO: 13594 - DNA, 414 bp, Glycine max
  unsure at all n locations
agctttnttctcatatctttcaacttatcccatgggtcgaactcaacggtctttactaccacccacacctntacctcaatgtggcaaaccatgcncctaccgctgcatgccaccaattaaccccatcttcttcattgttgcactaaaccacaccatccacgacgccttccgcggccatcgtgtcaaatggacacaccacatggagatgcggttcccttccgtcacccgtccaccatcaaaaccctaaccctcgagccagaactcaagaaactaatttgaaccacaagactacaagatatgtntgaaaaccatcgaagcactgttagatctgagatgccattaacatgcaccaagcaagactacgagatgtgtttgtgtggaagaaagatgaagatngagaaagagagaaagaga

SEQ ID NO: 13595 - DNA, 453 bp, Glycine max
  unsure at all n locations
ngattataaattttgcntgcagacancttgatactcagccttctcgactaatatccacccaccttgctccttctggtttaatttttcttagaatcttcttatcccctatggtaccagtggtcctaaatttaagaaggattataatttaatttctcattataaaatattaaggccttggaaccatatggccttaatcttcttgataatttaaggaattccggccacttattcttagggagccaattccattaatttggaattattcttaatccatattcctatttaattaccatatttactgggataaagatataattccatcaagataaatataactttctaaatcactaatacacgatttgatatttgatatatacatacatcctctctcatcttacactaacactcatatgatgtgtattggggtgactngagcatgtgtctatagactgc

SEQ ID NO: 13596 - DNA, 262 bp, Glycine max
  unsure at all n locations
ctctttacaagtaaaaacattgttctacttcaagaccccttgactactcacatagaactagtgggtcctataaactatgagtttgggtggtattactatgtctaattatagtagatgatactcaagttcatatggactttgatntgcaaaataaaaatgaagccttgatgctttcacaaactgccaagttattcaaatgaaaagtctcacattgttctcttagagtgatgtgaagtgaattcaaatgagtgtttgaaagttt

SEQ ID NO: 13597 - DNA, 319 bp, Glycine max
  unsure at all n locations
agctacttcttctaagttaccatgnagaaaagccgnnngtacatccagttgatgtaattccaagttaaaataagcaactaatgccattatgatgcgaaaggaatctttcatggatacaggagataaggtttctttgtagtcaactctatcccttcgagcgaatcctttggcaccaatcatgtcttgtgtctctcaatgttacctaatgaatccttcttggtatcgaaaatacatttacatacaatacgctttatcccattaggacatagcactagatcccatactgtattatttcccatagattccatatcatctttca

SEQ ID NO: 13598 - DNA, 345 bp, Glycine max
  unsure at all n locations
gggcnnnccgatttactgctgagtagaanccaactaacaaaacgtgcaatggtacggcacacttttcatttgacactctaaaacttgggagttctactggtgatgggtagagtagatgatctcattagtgattcatggaatggttctactatgatacaataataaaatatactctgaggggcatgttgtaggaaatcttatgactcttttgcattattgtgttagataaggagagtggaatctatttaccatataaaaaggatgtatctgaaaatgatccgatatcaaaagttctatactccttgctaacaaagatctatttcaaaccatttctactgaattgga

SEQ ID NO: 13599 - DNA, 405 bp, Glycine max
agcttgtattctgaattgagtatggctcacacattgcatgtctgatatgccttttagaggcttgaaaagtgcgagaaaatgagctgtgttttctggaaaacgcgatgaactcgctaagcgagaatgttgcgctaagtgagttcatcaatactcattgtatataagctttatctgaagaactcgctaagctcgctgactgtgctaagcgagttcatcctttgaggatgaacattcatcctcttgctgaactacctgtggctaagcgaggctgaatcgctaagcccgggtaacttaaccatttttttttgtgatagccacacgctaagttgagcattctggagccaagcgcaattggttgcggcatccgctgagctaagcgagcttcactcgctaagctcccatgac

SEQ ID NO: 13600 - DNA, 531 bp, Glycine max
  unsure at all n locations
agcnnaaaagcggatggaatgacctttgcanancnacacttagacactcagccttagtcaaccagaatntccccaaaatgtcaaggaatggggtgtggaanaaccatatcataactttctgngatgggttaataaatccaatctttccagatgagaatgcttcaaaaccattaaaaaacctaccagatggccctagaagaattgtattaccttgccagggatccaacttaaccaggtattctttttacttaaagccataagatgacaaaagtccattgcagagcaacgaggtcaccttaaggggtgaatctcaacacttcgcaagtgtgaatgacgccaatccttgagttgcttccatcccttactttgggttctttgatgacatttggagcttaactatgtcaaatttactatatgtgttctcaaatgtaaatgggttgacagcaacattggtgtgcaccccgatgatatangattcacgttggtagacctaaagaacttgggtaccacaatgaccctttcatcatggcg

SEQ ID NO: 13601 - DNA, 395 bp, Glycine max
tatcttcttatccaaggctcatcttggtggtgaagctccttcttacatggcttattccctagtggatggcgcctcctctcacctcttctcctttgttttccgctgcatctccatggtggaaaatcaccattaaaggatctcattgaagctcaaagatccagcctccatagaagccccacaagctaacttccatcacttattgtagtaattctgactttccgcagcctcatatacctcttccattcccacctagagccattccagaccaattgatggatgacgctaccgaagatatctcggagaccttcatgaaagtccaggtgaacatacccttgctagatgcatagggcagaatgtatcagcattgataggcatatatgtatctcacattcctg

SEQ ID NO: 13602 - DNA, 434 bp, Glycine max
  unsure at all n locations
gcgctgtatgctagctatcagtgatttcattngtatatctcanattgtattctangatatccttaatagaatgacatgaatntgtttccttanaaaaatatctatagcgccatgtaactaatatgaaagtcacaagaggtgaagaatagtaaagagaaggttaaaaagtggttgtggaaactgaggctcttcatttacttttgtaatggccaaagatgggatgtaaaagttttgattcatcgctctcgatccaacctcctgtttgcaccataattgttgaacataatgataacaatgcccaaccaaaagaatcactgcgtgtgtgtgttggacatacaattgaaacaacttatcccacaccaaaccaaaggcgctgtccatctgatcacatgaccatgcgccactatttaacgtaccttgttattcttgtgatc

SEQ ID NO: 13603 - DNA, 360 bp, Glycine max
  unsure at all n locations
atcttgttcttaaaaacctatttagttcctatgatgttcaagttattagtacttgttatcaattcccatacatctttcctttaaaattgattaaactcatcatgccataacataatccaaactcatctttaatgcatcatcaaaattaagggtcaactnaagacacaaaaccatatgttcacaaaacaaactaaagagtgctagtagtactctctttcatataccaatgatatgcatatatgattctaggggtaccatctttggaagactgtgatggggtcttttgaattattgtcaccacatttattntaggaatgttcattgagacctatatatctatcaaaatccttcttctttggg

SEQ ID NO: 13604 - DNA, 418 bp, Glycine max
  unsure at all n locations
tctaaggaggtgagcttagttatgagaggggtgtgtgtatctaagctctatcttctcaaggaagttttctcaaagaagcttctcaaggaagttttctcaagaaagcttctcaaggaagctacctagtctataaatagaagcatgtgtaacacttgtaactctgatgaatgagagtcttgtgagacacaactcanagttctacttctctccctttttcttccttcaatttcgtgctcccccctctctctttctctccctttttcttttcctccattgaagcatcctctctaagcttcttatccaaagctcatcttggtggtgaagctccttcttccatggcttattccataatggatggcgcctcctctcacctctnttccattntcttccgctgcatctccatggtggaaaatcacca

SEQ ID NO: 13605 - DNA, 380 bp, Glycine max
  unsure at all n locations
ttcttcacttttggccttattttattttaaagaacaaatttgattaaaaaaatcagaatggtggaggttgctggagcataaacaagtggaaaagagaaacaatataaagcanagcagtgaatgatggtttggtcgtcagagtacagagcacgacacaagaactagtggagcaaacaagtcagggagcatgacaaatcacagaactaatgatggaacacaacttgagaatgacaaaggctcattgcactggtttgggactccgggcaagcgattagggactgaaataaaatgagaacagattgcangactaaccagatggngtgtcacaggtttatttttccaaaacccaactgccaattcanaatcattggttcaccctt

SEQ ID NO: 13606 - DNA, 312 bp, Glycine max
  unsure at all n locations
ttaactttgctgatggtgttgcgactacactganatatttgaagccgngaccctttcaaggtacctcattgagtgcaactagtaccatggcaaagataaagtgcggttttgggagcagacccactccttttcaattgaagttctgcatatggtatcttgtgctgctcatttttgtgccttggcatgactntaagtanctatgatcaaaaatgattatagactnaaaaaaaataaaattatgataaactctctaccggagtgaccccaaccagatatttatactccttgtttttttatatatttgttttataa

SEQ ID NO: 13607 - DNA, 385 bp, Glycine max
  unsure at all n locations
agcttgctcttgaggatgtaaggatatttgcagctaatgaacaactttcttaactatttgtccttcggattttactgtttttttcttatatgtaaatataaataatataaggctatggcttatggacatggtcatttttacccctaacaatcttagaagtaagtatagaccatgtttttacgcgatacccttataccatttatatttacatattagcaaaaagaaatctggatacaaaccatcaatcttcttccactgggagcaatcagccggatgacgaaccattccatcagaaatccttccatttgcatgccatgttaggtgttttgcgtcgtcctcgttagcaaanagacgcttaaaccttggaatgattggaagataccac

SEQ ID NO: 13608 - DNA, 432 bp, Glycine max
  unsure at all n locations
tacctccaacctanacagtgacaatggcagtgagatgtaacttaatggcatgaaacttgaagctntcctcgtacctcaatcagcaatactgcaacagaagacgtactattattattatcatcaataanacatgaacacccaaggaaacttagcatacaccaagtttacgtacagtgtatgtagggttttcttcgagccacacttcgtagaacagtgtanggggttctgtgggttcgatcgaagggtttccggcagtattgagaacaatgtgggacaatgtgggtgtcgacggagcggtttccggcagatntcaggtgggaggagaaagagaagaaccgattcaagaatgangagaaagagaagaaggagggcaaggttttcgagcgcgcgggttatgaaatgtcatgttttaacttataaacataacaaaat

SEQ ID NO: 13609 - DNA, 387 bp, Glycine max
  unsure at all n locations
tgctttttgttgtcatagtgtgacggggcttgaataaaaatattgggggaaggggtcaaaaataagatttgaataaaaaaaatactcctaatttttttatttaataatttcatttaaattttctaactttttttctagtttgaaaaaaaagaaaagaaaaaatattaaaataatttaattatcattcaataactttttttaccaaaatcatcagcctatcatactaaaactagacaaaaaaaattgagaaaaagttaaagaatcttgtagtaaagttgtaccaaaaaccaaagaanaagaatatatatgaagaggtttgatctattcagtaaaggatagcacagganaatcaaagaatctattgaataatgggcaagtagagaacta

SEQ ID NO: 13610 - DNA, 467 bp, Glycine max
  unsure at all n locations
ctcagcttgtatttgtntatttaatccctggaacatactccattgttataatctgcattggaaacatagataatagataaataagttcagacataaaatggaaaatatgtgcattactacatttggcataataagagccatgaaggttaaacctgtggtgtggtataatcccagtagattgtaggaactttcacataatccatgttcttaaagttacttgcaaacaattctgcattagcagcctccttggtgtaatcaatctcctgaaaattattaatccatgttgcagtaacaggatcggagaatgttatttgctgagaacacgtgcatacatcataccaaaacaacagattcacaactcaagcaggaactgaaacaggaatgaccactcttatgtgtgatgatcttaagcccatatttgtattgtgtagatggttttcttacatcaagttttcctatacataaac

SEQ ID NO: 13611 - DNA, 302 bp, Glycine max
  unsure at all n locations
tgcttggttctaggtacttacccgttgaagatcgaagaacgatgaagaacgaatgaagaacgtcgaagaacggttcanacctttgcgagattcctcacgganaacgttacggaaacgtttcggaagcgcttcggcttagattttcttcacggaaacgaattttccaagcaaattcgaaagagagagaagtgcctaaggggctgggatccttttccacttcacttcctcccctatttatagcaaaataggggagatgcttgccgcccagctcgcccaggcgagctcagctcgcccaggcgagc

SEQ ID NO: 13612 - DNA, 150 bp, Glycine max
atatgtgcgagtgtccacatggatgtgtgcatggatcaattttgcatgaagacctaatcatcattatcatatgcgtgtcatggaagagattagggcattcccgtatacctgagcgcacttactatacaaatgttccaacatacatgatgg

SEQ ID NO: 13613 - DNA, 284 bp, Glycine max
  unsure at all n locations
tagcttgcatanatatatattngggtgggcttagagacgtgtacttcaaccttaaaagcatgcttctaaagtcttagacaaaaccgaaacttggttgtctcttttaaaaattgatcttctacctcanataataataaataaaactattaacatgatggagagaagataataatatgaaatatgtagaaatatcatcaatcgatatcatgctgcaaaacacagaaccaccacgttttgattttaatatgtaataaagtaacatatatatgcacattcaattaact

SEQ ID NO: 13614 - DNA, 260 bp, Glycine max
  unsure at all n locations
tatnccaaataattttcattgagtttattgtgtcacctgttatcggaccatctgcaaatgtctagttttgcaaacttacgcacaagatatcacaatcctcagtatgaggggtgtgcgctggaatcccacatttactagtattatggccacaataatgtgtatataactggaggcaacccatatttggggttgagtttggcccaaactcaaaattgtaaaagaaattattaatgaaaatgatagatagacaatctttagct

SEQ ID NO: 13615 - DNA, 340 bp, Glycine max
  unsure at all n locations
agcataacgttttgtctctcttcaatgttagtatnatggcttgcctttcttgttcccatgcagatcttctccatataaataacttgcgttcaatgtgtgttgtctttcccatccacacgtctccattctccaacatatgtaatatcaacaattatctccttaaatattttgaaatatctcttctaatccaggaaaacaaatgtgtgtatagctgtagcaattgtcataactttgttgctacaacaatgacccccatgacacaaagattgtaccaaaagatcatagattcgtgagggtgttgtctgcattcaaatttataacatgaccagtgcatggttag

SEQ ID NO: 13616 - DNA, 202 bp, Glycine max
  unsure at all n locations
gcatcttcagtgtttcttttggaatattatatgtaccaccaccataatctgcttgcatggggacaaaattaaaactggaatcattcantaagtgttgcattattggaatcactttagatgcgtggatcttttatgggcaataatgatgatgatgatgatgatacatatttcctttgagataacaatcttctaaatatgctca

SEQ ID NO: 13617 - DNA, 412 bp, Glycine max
  unsure at all n locations
agcttatattctccaatgtacagattataaagcaagttccacatgatatatgcatgaaaaacaaagataacagaaattaaaattgggtttcctcccaggaagcgcttctttaacgtcattagctngacacatttacctgaatgggtgatatcaaataaacagtgttatgtgccctttcanattcttcaccatggtacaattttaacctctagccatttactacccatgttctgtcaggattctgagattgtgggtcatatagctctattgcaccataagaatcaaatttcttgataacaaagggtccagaccatntggacttcaacttaccaagaaataatttcaatcttgaattaaaatgtagtacctgttgtcccggnttgaagtctttcttcaacaaatttttgtcatg

SEQ ID NO: 13618 - DNA, 403 bp, Glycine max
  unsure at all n locations
aggggtggcggaannnagttgatgctgtacatcgagacctgacnagcaccgngatctcttaagcacctgaggcatgcagctgatgtgttggttcaagtttcaaacactagagntcattagactccacgaataagtgcttagcgctgtcagttatattgacgaaagaacttgacgattgagtaacctagctctgcaagtacaagttcattgatcaactattgtgaccattcttgagtatagaaacttttgtcaacattatggttggaagccagatgggtcggacaagatcttggtctatctcaggaagataaagcatgccaatggctaaagactcttgaccaagtggctaagatcttgtctatcaaactgtaatgaccctcagtttgagaactggcgacccaat

SEQ ID NO: 13619 - DNA, 357 bp, Glycine max
  unsure at all n locations
agggaacggtggaatatagctcagctctgacnctgaantaccncncanaccnnncggaggggaaggaggtttaaattttacnnccccaaggggggggggatggagagaacacccccaaccccgaagaacaccacgacggcagaccaacgccatcccggcggacaccggagtactcggagggacctaaaaacaacaacttagagaataatcaagatgaacagaagggccgaagcgcgtggagcgtaaaaaaggagaggtacgcgcggaaagaagcgagcagcgaccgaagcgcaacgagcacaaaagaagggcgacaggggaagaggcatagcacgaaccaaaaagccggcggcggag

SEQ ID NO: 13620 - DNA, 411 bp, Glycine max
  unsure at all n locations
agcggatgtttcttgtttatgtnnncttacnaanngnngggatttgagtattgtattaattncttttataataaactcatccctcgcaatttttgtaccgtgtggttggtacctgtgatgatcgcgaactcttgttcatgggagcagaatgacagcagtagagtatgatatgtgagattcttttgtggagccaccgagccgacatgatgacgttgagattattttatgagagagttgtgttttgttaatcaactcctccatagctagttccataattcttttgttgaatcgaggatgtanatcacaattctaattatatgtatgaacanatttattctccattatgtgaatgatgtgtactgagttactatacctatatatatatatatatatatatatagtaaattactt

SEQ ID NO: 13621 - DNA, 404 bp, Glycine max
  unsure at all n locations
agagaccatcacaagcacatagcagggtcttgaaatttggttagctgctngctcaaggtccaaaagaaacttgtctcagcgtttatgcgagacagagaccaacatgttagccatcgtcagcaagtaccaagaagagctaaatctagccacggcccacgagcataaagtggcgggcgagtatgcccgagtgtacgcataaaaggaggctagaggaaggtgatcgactcattacatctagaggcaacaatgtggatggaccgatttgctcttactttgaacgagagtcaagaacttgcctgatttctagccaaggccaaagcaatggcggacacctactctgtccccgatgagatccgcggacttctaagctattggcaccatatgatagacttaatggcccatat

SEQ ID NO: 13622 - DNA, 330 bp, Glycine max
tgtgctagctgctctcaccactatatttctaagcaactccttcttcaatatttctatgagggacttagcaacatggagaggagtatgattgatgctgccaatggtggagcacttggtgatatgacgcctgctgaggctacgaatctgattgagaatatggcttccaactcccaacaattcagtgcacgaaatagtgctattgatcttagaggagtccatgaaatggccacagattgatcttcatctactgaaaataaaaagcttgaatgataacttgatgccttggtcaacctggtaactcagcgtgccatgaatcagaaatctacacct

SEQ ID NO: 13623 - DNA, 410 bp, Glycine max
  unsure at all n locations
ttctngactttcaacccttcttaaagtccccattgctcatcaatttcttgccttgtgctagtgataacaagttcagcagcatctagggaaagctcttctgcttctattctcctcattatcttatatgttgaattgatatcctccttcgattgacgcccttgcttaagaagctgttctagcttgtttcttccaagtgaatgaccagtgagcaccattggcacattcaaggcacctgaaagaagagcagcactatctccagcatcagcataatgtccatgaataacgtgtggccacactggtttccccccgctaacttgttcacccaatacttatgacatatngagaatgtgagctaaagccccatctacaaattcttgaatatggggccaaagaagttctttctgtagata

SEQ ID NO: 13624 - DNA, 354 bp, Glycine max
  unsure at all n locations
ttcttgctttctagctcgcccaggcgagctaggttgcttcctccagaaggcggtgtcttctggagaacttcctagaaggcccaagtgggcctggttgctatttgcaccccctgtttactaaatacaccccttgcctttatttgttgattctttttccgtaacattacgaaactntacgaatttcgtaacgatacttgttttctttccgtaatgttacgaaaccttacggattacgcaatcatcccttctttggcttccagaatgtcacagaactttacgaattgtgcatttacacttcctcttgactttcgacatgtcacgaaaattcacggggtgtgcaaccatgctttcttt

SEQ ID NO: 13625 - DNA, 447 bp, Glycine max
  unsure at all n locations
acacaagacactcagctgaagtgtgtccacaccattgtcatagaatttttggtatgtgttactatatggggatcatttctttccccgtcattggagtgccacttgagctccaggtctctcctctttgggcgtattctttaaagattcgtgccccttttncacatgctctgtagttgcttcctatccagaaccatatcaaaattgtactgatactgcctaacgaaagcaaccattaggtccttccaagattggactcgggaaggctgccagttagtgtaccaagtagcagctactctcagtagactttcttggaagaagtgtatcaacagttcctcatcttttgcgtatgcccctatctgtcaacaacacatctttagatggttcttggggcaagtagtccccttgtacttgtcaaagtccggcaccttgaactcgggaatgaccatg

SEQ ID NO: 13626 - DNA, 399 bp, Glycine max
  unsure at all n locations
ggcgtgctttcttctctttttccctctttccaancgcgctagcagcggtttagctcctggaatgtacatctctgtaagcttcttcagatacccaattgctccgtatgaaatcatcagttacttacatttcttacttggagaaagtgatccaaggcaagaaactgcatacttttttgcagtgttctgggggcttggatcaagcaactggaccatatttggcacacttttatcattcttcttaacctctctccgattctgggacagaaccattacgcttgaattcgcttgagcagcgacctctctagcattatttgctgtatccttaagcatctatataatataagggatgccaccggctacaccaactatctttttcatctccattgagctgcaaacact

SEQ ID NO: 13627 - DNA, 209 bp, Glycine max
tagcagcacatttaatacattctttatttggtttttttaacagctttatttgacacttgttaagactcataacatgcatggtgcgagtttcacttctttcttaagttattaagtgtaccactcattgtttttctgaattcatggcaaatgtctaccaataacaaaaaatgttatgaaaagaatttgtggtaaaatttgtgaggaatctc

SEQ ID NO: 13628 - DNA, 411 bp, Glycine max
  unsure at all n locations
tttctntactgtanatnttattaatgacccactaacctagaattaaaataacttaatgccattaacctanggaattaaaacaaacttaatggctgagtgtaactgaaattgttggcaaccaaaagtcacccccaacagccaacaagtcagccaccatttggtctcccaaaaggctgatgcctaagttgccaattgggcccttattacaacttgaactaaagcccttttagttgattaacccaaaacatatttttggtcagccaactttacaaggattgngccattatttatacaaactaaacactctaacattgaaataaagtggtgtcatttagtcctccatttgngccatgatacaactcacaaccttggacttttcttcttgaaacttgggcttgtattcaaataata

SEQ ID NO: 13629 - DNA, 428 bp, Glycine max
caattcaaatggtcataacgtttcactctgatgtcttattctagcgcataatatatcgagacgctcgaaattgaacaatggaagctcttgagcaattccaatggtcataacttttaactcggaggtccgattcaggcgcataatatgtcgagacgttcgaaatagaacaatgctagctcttgagcaattcaaattgtcataactgttcactcggaggtcagattcacgcacataatatatcgagacgctcgaaattgaacaatggaagctcttgagcaattcggatggtcataactatttcactcggacgtgcgattaaggcgcataatatatcgcgacgctcgaaattgaacaatggatgctcttgaacaatacagatggtcctaacttttcactcggatgtaccgttcacgcacataatagatcga

SEQ ID NO: 13630 - DNA, 293 bp, Glycine max
tgccgttcctacatggccaaatttcccaccaactacacaatgtcattactcagcaaatatctacccttcttattaccaccaccctatcaccatgaacacccaatcatccacaaagggacaccctaaagtagccataatgccggctgccaacatccaatgccaacaccacccttaataaaccaaagcaccaccaaggaagcattgtctagcagagaacctataaattcacctcaattcggtgtcgttcctaacttactgcatatctactcgataatgcatggtaccatacccta

SEQ ID NO: 13631 - DNA, 159 bp, Glycine max
ccatgtatccaaagcccgtactaaagcatacaactccttatcataagttgaatagttcagggtaagaccacttaacttttcactaaaataagcaattggatggccttcttgcatcaacacagccccaatcccaacatttgaagcatcacacttaatttc

SEQ ID NO: 13632 - DNA, 381 bp, Glycine max
  unsure at all n locations
tctgcatgctagcttattctaaggacatatgcaattactgtaaagagtcgggtcattggaagtgagactgtccaaagaaagcaaagaaagattatgtagttgctcttgtttaaaatgactcctcatcgaaaagcgatttggttttggttgttggtgaacaactacaacaacattttgaacaatgagtactggactcangttgttcttatcatgtgtccacacagacaattatttgtgacatatgagaagaaattgatggaatgtcctcatcctcttttttgnggggtggcgctaagcgccacatggcagcttaatgcctcaactatttttttgctttgctttgctaacattatncttactaatcatgttcttgttatctta

SEQ ID NO: 13633 - DNA, 385 bp, Glycine max
  unsure at all n locations
tggaagtgacttanagcananaagaaggtttctgctattcgttgacagattggatgcagaacccgattgtttcgggtgtagaaatttatgaaaaagctccaattntgcaggagaaggttgaatgttgatggtggttttgtcacgggttttttaatcatgtggcgagcttgggagatgctggtagattgtagaatgtactgaaatgtggctacggacaaaaattatcagaacagaacacaacagtcttggttttgtttttaatttattcatgtagagaagttttattatgggagtagaattgatgctgttggattggtgtaaggagctgtctcgttaaatggcaggactttgttatggtttgaagcatatggtagtatctaaagta

SEQ ID NO: 13634 - DNA, 402 bp, Glycine max
  unsure at all n locations
atgcaagctcgtttatttgattaaatatttctcttttatggtaaacattataaaaattttcaatatacgtaatacgttaaatatatagcataaaccaaagagtcaccctaattccatgaacacatacaaatgcaagatagtggacctagatgatttatcaaaggggtatattagaagcatgtgtaagtaactatgtacaagaaattttcttaaaatgcaaaacatgtatcatagtaagatgatgtatcaaagcataatatgtatattagagcaaaaagattgacatgaatgaaaatgcatcanatgtataaaccaattataacaagaaccaattttttccatactattnttttgtcatcaaactaaaaggaacgagtntcatcattgttaaaataaacaaaa

SEQ ID NO: 13635 - DNA, 508 bp, Glycine max
  unsure at all n locations
agggcaannaagcggcttttggtgaggctatnactacgtacacctgagcaattacccggngatcctctagattctatctagacgcattcaagccatactatcatgcttactccacaagctgactcgnggcttctttgagaagctgtctcaagaagcttctttgagaagatagatccttatctattcacacccctctattaactaaattaacctccttaaaaataattacggatgaaaataacgcaacaaataatcaaacatcaaacataattactaataatatatatatatatatatatatatatatatatatatatatatatatatatatatatatatatatatatatcagggtgttacagtaattgaaggcattgtatttggccacacaatctttgttcgtggcacacaggttgacacagccaatctggaagtcatctaaaaatcgcctccaccaacacaatgtcaaaggcattataagctctcaagacataatgtgttatatacn

SEQ ID NO: 13636 - DNA, 353 bp, Glycine max
  unsure at all n locations
tcagacctgaacagtaacagtctcatagtaagctttagaaaatatattcaatctattgaacaaaatccactgatttgaatggctaagtaaaataagtctaatagtaattggttntactactggagaaaaggtttatgaanaatcnaacccttggacttgattcaatccagtggcaactagaggaagcttatacttatttattggaaccatttcatttttttcatcctaaatacccactggccttccaattagatgaaagaggtactagtttccaagtatgattcttcatcaatgcttcacaatctagtggcatagatgaacaaccagttggataagtaaggcatgtttcacat

SEQ ID NO: 13637 - DNA, 496 bp, Glycine max
  unsure at all n locations
aggggnacnncccgcgagggggtgaagcatgacgttcgatagcaanaccnctcaagctgaggatatgacggacccatcacatgtggaactaggaggttgtcggttaatgttgcacaccaggttttcaacatccacaatgcgcgcataaaccaacaatcccttgtggccaacttcaatcggagctaacgtattccaacggtgccaatatcctggttnttctcaccaccgggtccccatcaatctctccaagcttccacaaattccattcaaaacaccatttaaccagaacaagctatcacagccaagcaaaacagggcaaagggcaaaaactctgctcacacaccacccaaatcacagctttcttactcaagacccaagacatttccttgatccattcgtaacattgatcactcaaatttactgcagtcatatgcttaacctcatgtgaccgtggattactacaacatcagactatttgactactttcacagcaccg

SEQ ID NO: 13638 - DNA, 416 bp, Glycine max
  unsure at all n locations
agcttgacatctaaatgttagtggcactacttacctctccaacccagataatatgcattaacaatactaacataaagatcaattgccagagtcactataataacgctcccctggcttttttttacacccatattattgtattgaattagactctgttgtgtatttaagagggttgggcgttgaaatgtctcccttgcagattgcaaccaatgaattaaccaataattattcgaaacaaataaattaaatgaccccatctgaaccaaatatatctcaagttagattntatttcctccaattcttattatttgactnttttggatgaaatgtttatattatatatncgattttatacttacataaagatcaatngcccgagtcactataacaacgctcccctactttttgttggcacc

SEQ ID NO: 13639 - DNA, 477 bp, Glycine max
  unsure at all n locations
ngtagtgctggaactatccaccatcgaaacataatcagtaagtgattcactagttcaatangtatgcaacatgtaaaattggagttgactganaattntggagtcacagtttcaaaggtaagaaactntaatcactccatagcttctttntctatttttgacgtcaaggatgctggaatattattgaagataaaaggaatttacatcattagcaatatttggtccaattgatcagggaccttatcaatccagcatctatctaataaagaanaagccaaattggctaaacaatgggcagctttatttccttgcctcttatcaaaattaagtttctgacttcctgccactgngtccagtcttcttgtctcctccaccagaccatgaaagagagagcgacctcctttgtctgatctgttccactcattgtacaactgcatgcaatctgtctcatattctgctccanagatgcacaattcg

SEQ ID NO: 13640 - DNA, 251 bp, Glycine max
attatatattcaggaaattatgaaggagtgtacaaagatgccccattttacacaaatctatataatcatcctattactttgagttacttaaactccccttaaccagtttaatatttatttgaagtggtaggattcatgcattgccaccccatcatgtcataaacaccttgcatatactcatttattcacagatatgctaagtatttgacttttgattgcccacactttactgaccattgactttgatcatt

SEQ ID NO: 13641 - DNA, 299 bp, Glycine max
ataatctaacgagccgctcgaccgtgatcaatagatactctcgagcaatatggatgcattctctgggtgtcatgtgctggtatcaaaggagtccgattaagataggactgtggttagtatcattggatcagatggtatgttctgactatatatttagattactttagtgtgttgattgtctatcatactttacataatgcgttgtgacatgcaatattgagattgatcacctcaatactgtgggcattgtaactatgaatgatggcagatagcaatcgatgcctatagcagctgtcctt

SEQ ID NO: 13642 - DNA, 368 bp, Glycine max
  unsure at all n locations
ctcttgcatggcttttacccagttcttatctttcatagcatcatcaatatgcttgggttccacttttgaaatgagagttgtgtaaccttgttttctgagagatccttttgtttggaccttggttgaggggttgagggatctctaatgatttgacactctggatggttcttccttagaattaatctagttggttctctttcttcttgaggttgttctgttacttgattagacacgtctgtttctggatattgntctatcagtggtccaatgccttcgtccagtcttatatctataaaagattcatcaagctgtggccattatgtatcntactntgtgtcattaaatcttacatgaatagcttattccac

SEQ ID NO: 13643 - DNA, 397 bp, Glycine max
  unsure at all n locations
atgctgtcgcagacttgccaggtgattattttgttttggtccacacattnttcaatgagaagtgatcatggaggtgaatttcaaaatgagtcttttganaacttttgtgaagaaaatggaattcaccataattttcaaccccaagaacacctcaatagaatggcattatggagaggaaaaatagatcccttgaagaaagtgcaagaacccttctaaacgaaaccaggttgcctaagtacttttgggcagatgttgtacatactgtttgttacaccttgaaaaaagtacttattagacctattctgaagaagactccttatgaattgtataaaggaagagaaccaaacactttacacctgagagtttttggttgtaagtgtttcgttttaacaatggt

SEQ ID NO: 13644 - DNA, 410 bp, Glycine max
  unsure at all n locations
atcttaatgtatgcccgcgtcattcatccctatgagatgttgttgaagtattggcgatcagaattgccattccttggattatagggttgaaccaagctcatgcttttacaaaaaggttcatcaagtcaagttgaaatatggaagtaaccgtcttgcaaaattgnggcaaaagatgaatcgagtcacatcactgcttcgtctactgccaaacatatttaggattgttgatgtccttgttacttccagtttcaccttgacaaagatgtcatggaccatgttgaaaatctaaattgattcaaccccatatcctgcgtaaaaattcgcaatcttcaactgtacatcattcgcatacatccatgcttttcattggttgcattgctcattgcattctttccttgaaaaataaaata

SEQ ID NO: 13645 - DNA, 467 bp, Glycine max
  unsure at all n locations
tccacaacatccaagcaaaacaatattcaaacagttcaagctatcacaaccaagcaaaacagagcaaaggcaganaactctgccaaaacaccaaccaaatcacagcttttctcacttaaagaccccagtaacaattccttcgatccaattcgttaaccgttggatcgactccaaaattttactggaagtctgtagtacataatcctacattgtgaccgttgggatctactagcaaacatccagaacccattttacattactctttccacaaccagcaaatacatagcatttttctgcacttgtgcaaaatcctgctgcacaatttcacagcaaaaatctgcacaaagtgcagatttcgaanatcacacttcctctcatccaatcttgctcanatcaatccctacaagtcccaaatcatgtatcaatcatgtctaacccanaatcaagctntacagcacagcaacata

SEQ ID NO: 13646 - DNA, 343 bp, Glycine max
  unsure at all n locations
ttcttgtgctctcaggtgacgggctagtagttagctcttatcacttcttgcgccaccccctgatattggagggcgaccaactgtgcaagtacaaccagaggaggaggcacgtctccagcttcgacgaggaggctatcgcatagctactatgcataccaaggcaagatttctctcagaccgctgcgatgagacgagtacggatctgcataccaccacaactctgatctcctcctgccgaacagttaactggtttatgccatcatgacatatgtaagtatgcacgtggctcaatggatntctaatgtcatatattgtttgcanggattgcacccacaagacactc

SEQ ID NO: 13647 - DNA, 371 bp, Glycine max
  unsure at all n locations
acacatagaaactcaagcttctcttggaccttgagcaagcagctaactcctcttttaagactatgctatgtgctcgngattggtctctctcttcctgatgtgccatcattntcttctattttctaaacccttttttgcaccattttaatcattgattgatcttaattgtcaattaattaggtagttttattatttgggctcatttagctaatttgatgtttttaatctaatttcaggaattaatgaaacattgagcttaatccggattttggttgtggacttgaagagggcaaataaagcagcgcttaccttagttaatttctaattaagaaatttcgcaattntattttatgttgttcagtgtttatttc

SEQ ID NO: 13648 - DNA, 406 bp, Glycine max
  unsure at all n locations
ttctnttgttatcaaactttatcgctggtaatcgattacaggaaactggtaatcgattaccagagagtaaatactctggtaacttataaaattttgagaaaactcttttgttaaaaaaaactgtgctatgtttggtttttgaaaaaacttttcaatacttcccttgtgaagtcttcttgatttcttctcttgaatcttgaattcatcttctctagaatctttgaaatcaacttctcttgaatcttgaatcttcttgatttcttctaatgaatcttgaaattaaccttgatcttgaacttgttgactcaatcttgaaatcattctatttggctttctgtcatcatcaaacctacttgatatgtacttgaatcaccatcatgatacttgcttatacacttactgactc

SEQ ID NO: 13649 - DNA, 450 bp, Glycine max
  unsure at all n locations
actaagctgcacctagtctcactaggtcgacatgctttcatttgtctgattaagttagaccacagaacagggtttcggtcttatcacattatattacttgatgtccaggaagatgcttaatgcttgnaccaagtaaaagaatataggagaatttgcctggcacggagactcaacgtgatattatttttttcttgcatcaatcatatacacattttttttttataaaacttgtactatttgttctctctttatcacattagttaatcattgtatctctgcattttttcttcttatctttctatctgacataaaaaaattatagaaatataatctctcttctttcctcattnttagacaagccattctaccattttcataacacacattcaaatgttcattcattgctgatagtattacgctaaacacacacgatcaaatgttaattaaaac

SEQ ID NO: 13650 - DNA, 386 bp, Glycine max
  unsure at all n locations
ttctngaatctgttatacatgattgaacatgatttgggacttgtaggatttgatttgggcaagattggatgaagggaagtgtggttttcgaaatctgcattntgtgcagatttttgctgtgaaattgtgcagcaggattttgcacaagtgcagaaaaatactatgcatttgctggttgtggaaagagcagtgcagaatgagttctggatgtttgctagtagatcccaacggtcaaaatgtaggcttatgtactagagacttccagtaaaaatttggagtcgatccaacggttaacgaattggaacgaaggaattgttactggggtctttaagtgagaaaagctgtgattttggttggtgttttggcagagttttctgcctttgctc

SEQ ID NO: 13651 - DNA, 453 bp, Glycine max
  unsure at all n locations
tcttgactcaccataaaccttgatccanggttagaatgtcaatccttaccctcagaaccaaaaaaagaagagaaggaaaatttccaatcaaaggaaaaaggagaaggaaaatttccaatcaaagaggaagcaaaaaaaggaaagaaggaaaatttccaatcaaaggaaaaagagaggaaaggaaattcccaatcaaagagtgggagaaagcaaaaagaaaagaaagaaaattcccaatcaaagaatgggagaaagaaaanaagagaaggagaagaaaganagaaagctcatgatcaaggatcgaaagaaaacaaaagaaatgtgcagagaggtctntggaccagacaatatctgaacaatacggaattgtcaccaaatgaacaaaagaaagaaaaggaaaccataacctanaagtggtcttctccttttgataccaaccaaaatctgtgtgtc

SEQ ID NO: 13652 - DNA, 383 bp, Glycine max
  unsure at all n locations
tatgcttatatattaaaggttgggaatgaatggatataaatcaggatctgctctccttgtaaatgctgagggtgattctattggtgganagttgtgacggtggaattggtattaggttgaagatctctccgcgccgaaccgcaattggagaaagcgcaagcagagctcangtgacgggaaaacccttcatgtgngttgcattttgcgtttgatacctttttttactgccatccattccattctattcataaagataactagccatgtcatatcaagaggagatgatgtcgtgaaaaagaagngagagccttgattcttganaagtatgaaagtttgatctttgcattcatatctcacatacttgatgtaatgatggcacctgt

SEQ ID NO: 13653 - DNA, 428 bp, Glycine max
  unsure at all n locations
gacactataaaaactcaagcttcttgagatgccctttggtaatatcgctataggatttggtatattccacaatctcattagagacatcaacattgaagtagtcaatgaatcttgaggcaagcacaacatacagaaattcataatccaccaagcgatgactnttcatcataatgtcttcaatcagtagtacctagttcatcttgatacctggtttcagatcataaactatttgtaaatcatcatccgttacctgagcatgatttcttgacctcgatgtgagaatgtangtaattaggtaaactaacatcttgtcctctaagtcattccaccaactgctaagcgattccttaagttcgtagcatggtcaagaagcattcccctataggtctacatcttattgtacccatcaagcatttcatcgaacttgc

SEQ ID NO: 13654 - DNA, 355 bp, Glycine max
  unsure at all n locations
agcttattattgattaaaacgtaccatacaagagattcatatataaaattattntatttaataggtgatatgaagaattgcttanatatcatcaataatcaattatataaaaattaaaatgaagctcacgagaatagtatgaaatcctaaaagcatgtattcttatacaaaatattntattttatataacanatntataataaatacatatttttaaatgtataaattttattataattaaaatttataatacaaaatattttttaatatataaattatattttagagttttgatangttaaaacaatttgaaatttgaaataactataaaatggaccttaaaattcaaattaaa

SEQ ID NO: 13655 - DNA, 440 bp, Glycine max
  unsure at all n locations
tcaacgtggtaaggcttgttaatttatccacttttagttaatttttattagaatattaatcacacatctttattttaaaagaacttaaaaaagggttggagcaatttgttggcccaaaataacaatatacaagtataggtattaaactcttatgagaaaaaaaatttatgcactgattgatatttacagtataataagttttatacaatcattcaattacaatcaatcatgtataatagattntttgatttttaaaataattataaagtaattcaaacgataattntgtgtttaactaataatataaaattgttttacattatcaatgtataggtattaaagtctaaaagataaaataaagattgaatatgtgcatcttgagaaataatgagtttttaataattatggttattttgactgcataattatgaattactata

SEQ ID NO: 13656 - DNA, 414 bp, Glycine max
  unsure at all n locations
agcttcttgtatcacttccaattccttacctttgtactccttgagcttgtcaattaacaatttacggctgctttcaatctcaaccaaggcaatntctctttcgtaccgttgttgttgttgcagaacctgtaatttgcacataatacatatgattcccaaattattatcttattcacattnttattatttcctcctggcaaagcataaaaataaatcagaaaaactntcaaaatcatcttacaagcactaatacaagctcaatgctactatcctcatagttctaagaaacaaaatcatattcttgtagtggtacaaagtagccaagagtgtgaaaccaatgaatcanatttcagttcacattgtggatntgctagatcaagaatgangaaaccattcatttagaatgtaaatgta

SEQ ID NO: 13657 - DNA, 201 bp, Glycine max
  unsure at all n locations
gcatcatgactctgttcanatgttcttgtcatagaaactacccttttgctcatcgtgatagggttcatacatatgactctccaaactcccacaagagtgagagccttgtgcactgngccattatttacaatagaagtgcaagaatntgagtagggaccagggctttctagtangaaaattgaatccctatgcatcatattc

SEQ ID NO: 13658 - DNA, 236 bp, Glycine max
  unsure at all n locations
ctactatganaagctgatangatacatgccagctaactttgcggatctcgtcttcgccggagaaagaattgaatccggactaagaaaaggcaagttcgaatatgcctccaacgtggcccccaacaacaatagaagagccccagtggtgggcgcgaggaataatgaaggagatacccacgcagtcaccaccacctcaacatggatgaaagcatcccaaaatatccaaagctcatacc

SEQ ID NO: 13659 - DNA, 432 bp, Glycine max
  unsure at all n locations
ggatccttagagcacctgcggcatgcaagctattttatgacttttcgnnatcatgcacagccgggcaggagttgactcacaataggccaatcatatctatggagcattntctttgagcaagtagcctggcctgaagctcaacttccattggtgagacnccaacgaggttgcttcgcgctgagnccacacttgtgcangtcaattcagagccagctgacccacaatctccattagtgaatccaccttcttcacctatgcttgaagcagttctgccatctcctcctctaattgtaatttctgacgcatcatcagatgatgcagttgcccctcctgattcaccaattgcaaaaatagctgacccctctgtttcctaattggaggaattgcttatctctctaattatcatctagagaagctgttgctctcaccgat

SEQ ID NO: 13660 - DNA, 350 bp, Glycine max
  unsure at all n locations
aaggacgtgactcttcgaagggatttggacttttccaaatcggctttaagtgcttctaaaagtcataactcttctaaatggttctcttgattttgattattgttttctgcctaaaataacctctggtaatcgattaccataatagtgtaatcgattacaagcagttatctctggcaatgttgatctctggtaatcgattaccatatttgtgtaatcaattacaacgcgtccctgcacctatatattcagatttcanattctgaaacctgcaactcttctctctctcgagaaccctcgcccccaaattgtcttccagccatactcactcaatcttgtccanatcactcccc

SEQ ID NO: 13661 - DNA, 327 bp, Glycine max
  unsure at all n locations
gagatgcagcggaagacaaaggagaatatgtgagaggaggagccatccactaaagaataagccatggaagaaggagcttcaccaccaagatgagtcttggataacaagcttggagaggatgcttcaatggacgataagaaagatggagagaaagagagaggggggagcacgaatgacgaacaatgcagagaagttgaactttgagttgcgtctcacaacactctcattcttcnaagttacaacaagtgttacacatgcttctatttatagactatgtagcttccttgagaagctgtcttgagaaaacttccttgagaagaatctttg

SEQ ID NO: 13662 - DNA, 312 bp, Glycine max
  unsure at all n locations
tatcctatgtgtcgaatgggttttttaagcttttaaaagattcctttaaaatatcaaaaccaaaaaaagggggtcgttaaggtgtgaacctttgaccaatctcaatgactttgaataaaaaaaattccagtatggggtgaatttatcctgggtttggttaataaccttcaatctctttaaagacaaccttacagcacttatgattggttaaggtaaaaattacaaaaacaatgagataacgatgataaaagaggagatgatatgcacaaacaacagggggcccctaaggtgcatanatacattcaatcttaa

SEQ ID NO: 13663 - DNA, 323 bp, Glycine max
  unsure at all n locations
actaagcttgaggattggtcttgccaggaaggatcatgtgggtctttaaaggcaaatttgtcatcctgcttggacgaatgagaaaactgnggcaaatgaagagggtgagaaagagggagaaacccatgctgtgactgccattcctatacggccaagtttcccaccaacccaacaatgtcattactcagccaataacaaacctcctccttacccaccgcccagttatccacaaaggccatccctaaatcaaccacaaagcctgtccaccgcacttccaatgacgaagaccacctttagcacaaaccaaaaaacaccaacaaaaa

SEQ ID NO: 13664 - DNA, 498 bp, Glycine max
  unsure at all n locations
aggtcaaaaccgcaanaagctgatcctatttcctgatnactcgananncnatnnngnacatngngacncnnnnnacccggacgcgcagggacgctatcagcgtgtttttcagctttcaggacccacgcgacaaggagacacncgtgatgcaatgaataccacgactttgttgcaggttgtgtncattcacgtgtttaccactaaatttaacattctatgtatcaggtatttgtcacacactaagttctggatactaactcttccttccatcgtggacgaaaacagaaatctcataggacaatgccaacggtattccttttcaacaagcagtctatgacttattccctgtactctgttactaaaattcttatccttaacatgttattccataacatgagtgagatggtgcaaggtatttaataaaaaaatggcacgtttgtcctgatcatagaactctatatggtttgctgatttcacgatcccggcatgctgatgttc

SEQ ID NO: 13665 - DNA, 362 bp, Glycine max
tgcttcgttcgtagatccctcatgtaagactaggcctaaactaaacagcattattgtaacaacataattaaaaccaaaacttaactcgtagatcccttatgtaagactaagtttcgatcccgcttcaattaagttctaaggcaacagtacatttcccaatgctaatgtcacctaactgtgcacacaaatgggtgatcagaccaaaagcatacaaacatcaaccattgaacacaaaaaacagaatcaattagatattaagtatttacatcagttgttcattagaaatccccaactagggtgtttagcgagccattacagaagaaatcctaacaataataagcttacaaacccaaggtatctct

SEQ ID NO: 13666 - DNA, 458 bp, Glycine max
  unsure at all n locations
actcaacttcgtangtaaatcaagtgcatccatgtccattttattctctctcacggngtggaggttgcgccatgttctcagaatattcaaaatcagaatgttcaaaattataatgctcaaaaggtactaaatgatgtctaaataatctatgaaatgtcctatctatctcangatcaaaggattgtaagtcggatggatttcgtctagtcatacactaaattcagcatgcacaattagttgccttcttatgcaagtaatagtataggtttgaactacaactaccattaaatgttgtccaaatgactagaaattntgtgagcaaccttataaaatgatgagaagatagcacataaaatttcaaacaaaaattcaaagtctaaatatagaatctaaaattggtaagttaagaaaaataagagaataaaacttggataataacaacattntgacagaatcac

SEQ ID NO: 13667 - DNA, 389 bp, Glycine max
tttctttgtctttctaacttgttttgaaggtttggttaaacttaaaagttttttttttatggataaatgcttacgagtctacttacatgatctagttgatttgaaggcttaataataatgagatcatgattttttatttttctaaatattcattatagacttaatttatggtgtcatctttaacttaccatcacttatgactatcacccaaaaaattataaccaagattatattacatattacttttcatcaaatcatgtttgacttgaataagcctcacttgttaaaaaaatctaaaatcaaagaccatcaagtatttatcatatatttcacttgttaggcttgacttaatcattcttagcttatatagttatgtatgtcaaactact

SEQ ID NO: 13668 - DNA, 426 bp, Glycine max
  unsure at all n locations
aatgaactctctgtcttgttgccggttttatattttgattgnnatgcataaaatataagcatattgtattgcggtttaattctcaatgaatgtctggtttgtcattggagatgccaattgtcagtttattcttaattcttgatgaaatcattaagactgttctaatctttctgccaggttctcctttgctatcttcgaatatgctgaatgaccaagatcagttaagggagttggaaaatgcagttgtcanagaaactgaagctaaaatgaactacagaaaaagggtagttgttgagcatacaaatgataacagatagtatggaaggacctgaacccagaatttgtctccataatatattttgtaaatcctgagctggcggaattgtaatctactgtttataactcttattctgttccttgttaaaa

SEQ ID NO: 13669 - DNA, 403 bp, Glycine max
  unsure at all n locations
ttgcttcatctaangaagagaataagagagagaggggggtgcgggaattgaaggagattatggagagaagttgaactttgaagtgtgtctcacaagtttctcattcatcaaagttatgcaagtgttacacatgtttttatttatagcctagcatatgggaagcttccttgagaagcaaggaaggtagcttccttgggaagctagaggaagaaagctttcttgagaagctagagaagggctactcatacccctccaatagctaagcttacccncatgccaaaatacatgaaaatgtgaatgtatgtatacaggttttgatgatgccaaaagaatntacttgataatggttgtaatcataaaaaataaggagaatgtgaatgtatgtatacaagnttttgatgat

SEQ ID NO: 13670 - DNA, 339 bp, Glycine max
tttaagccaaatcctaactcaccatagactcttgactctgtgtgagaatgcccatccttgctctcagaagaagacaaaaaaaagaaagttcccgatcaagggtcggaagaaagcaaaagaagaaaactcccaatcaaagattgggagaaagcaaaaaaagaaagaaaattcccgatcaaagatcggaagataacaaaagaaatatgcagaaaggtctttgggccagacaatatctgaacaatacagaattgtcaccaccaaataaggaaagaaaggataccacgacctgaagtggtcctctccctttgattgccaaccaaaatcctgtgcgtcagtgac

SEQ ID NO: 13671 - DNA, 381 bp, Glycine max
  unsure at all n locations
gaaatcaaagaatggaggtcaattataaaataagtttagtggaacaaaggggagtcgttatcacctttaattcaattacttgtaaaactcttctttctatatataaaaggtggtatacgcgaggtgggggacccagaataatttagtcaaacaaaataacacatagtactataagctactcagatcacttttctttattttntaactgtgcccctactttntgttatatgatgtaaatggaatggttgtcatgtgggttgactggcctctttccttaaatataatttgcaggacantgaagcatacatagctccaatngatcgacnntttgtttttgcgcttgcgtttagtttcggatattatgaataataatgggttgcn

SEQ ID NO: 13672 - DNA, 357 bp, Glycine max
  unsure at all n locations
tctatataagctgaaccattgtatcaatattcacatgttgtgttttattcagaaaattagagtttatctcttttatcttagtgagagtgattctcctaaattcttgagtgattcaagaacaccttggctgtatcaaaggactttcacaacctttgtgtgttgccctcactggaaagagtgattctttccttccttttatcttcacccttgatctttcaaaccacaattctagataatccacctctgcccagaattatctcgtggccataactcccatgttactcactcatattaagtgattcttgagcctaaattgaatctcaaaacgagaccttncacctcgttntggaatcacct

SEQ ID NO: 13673 - DNA, 175 bp, Glycine max
  unsure at all n locations
ttctttgtttaataagaagcctgnggcaaatggagagagtaaaaatgagggaggaacccatgctgtgactgccgttcctacatggccaaatttcccaccagctcaacaatgtcattactcagcaaatatcgacccttctcattacccaccaccctatcaaccaggaacacccaat

SEQ ID NO: 13674 - DNA, 409 bp, Glycine max
  unsure at all n locations
tgccttgccccttgatatatttgaaggactcatggtcactattaatgacaaattccttgggataaaggtagtgttgccatgttttcaaagcccgtactaaggcatacaactccttatcataagttgaatagttaagggtaggaccacttaacttttcactaaaataagcaattggatggccttcttgcatcaacacagccccaatcccaacatttgaagcatcacacttaatttcaaaagatttttganagtttggcaacgaaagtatgggggcattagttagcttttgcttaagaacattgaaagcttcttcttgtgtctctccccatttganaccaacattnttcttgagcacttcattgagaggtgctgccaatgtgctaaaatccttcacaaatcgtctataaaa

SEQ ID NO: 13675 - DNA, 419 bp, Glycine max
  unsure at all n locations
gcagatgacgaatgtagtctctgncgtgtcaaaccggcctcgctttgccttcttggcttgaccaaaaagggtgccnggattaacccataaanggtacccttccgcattgtcattcgggacttcgcccgtcttctggattgacaaaaaggtgcaaaaagacgatggtagtctctgcgtgtcaacaaagctcgctttgcnncctgttgacaaaaggtgtagatgacgatgttagtctctgcgtgtcaacaaacttgcttgcctctggtgggcaaaaggtgcagataaccataaggtacccctgtatgtcatcngctcactgtctctggatgacaaaaggtgcaaaagacgacgttagtctctgcgtgtcaacaggctcgcttgcccctggttgacaaaaggtgcagatgacgacgttagtn

SEQ ID NO: 13676 - DNA, 511 bp, Glycine max
  unsure at all n locations
nccagtgaccaaacatgacgtgcgatgcaaaacctcaagctgaagaaaatagtaataatgtaagtaaagtagaaattttgtgggaattaaaggtgattaaaggtgatctagattccatagaattagaanaagaattattgagtcattagaaagtggagggccttttcattaatgactatattactagtttaaaaataaaattntattttaactaattggtgacttattaaagtgtctaattatatgatatagaattatttaaattagttaaagttgtaacactctaaaaattacaacttagacttgacaagaaaactctatgttgtgtcggttgtgcatgtatgaatttaatctcaatagatatatgttcttaatcataaaatttcgtggtatgtatgtgtgtgtgtgtgtgcgcgcctattgattattaaaagcttgacanagaaaataaaattatctaagctagatttccgtctgcgcaagagttgcatttgcattgagtcataatgtn

SEQ ID NO: 13677 - DNA, 318 bp, Glycine max
  unsure at all n locations
agcttcaattttgcaacttaggagttgagcaggtaaaaaagattcgtcttcaaactcttagaggtgactttgagcgtttgtntatggaggagtccgagtcattttctgattttttttctcgagtattgcccgtaatcaatcaacttaaaagaaatggtgaagatgtngatgaagtgaaggtcatggaaaaaatacttcgaactttatatccaagttttgccttcattgttaccaacattgaagaaaacaaggatttaaagaccatgactattgagcaactcatgggttccttacaagcatacgaagaaaaacaaaaga

SEQ ID NO: 13678 - DNA, 390 bp, Glycine max
  unsure at all n locations
agctggctttaaatttacatggatgttggaattaatgggaggaggttgtatgccattttggttttaagggtagcatttcttggtaaaactaacttttccaaatgtttgccttcgcaggaaatggccccgaggaagcttgtctcaaagaagtccaggaaagacaaggcggccgaaggaactagttccgctcctgagtatgacagtcaccgctttaggagcgctgtacaccagcagcgcttcgaggccatcaaggggtggtcgtttctccgggagcgacgcgtccagctcanggacgacgagtatactgatttcctggaggaaatanggcgccggcggtggacatcactggttactcccatggccaagttcgatccagaaatagtccttgag

SEQ ID NO: 13679 - DNA, 323 bp, Glycine max
  unsure at all n locations
agccttatgaacttctatttttgcttgagggcatatcctcnccatccactagggtggaaattgctccatttaagggtcaccttttcctgaaatcctttgtcctgcacccaccaatccatgaccttgaaaggcttangaccccaatcaacactttangatcttagaaggatanggcaatgatctgaaaaatctctgtctagtacaaactgtgttgtgtcaggccactgaaatgatcctttgctaccctgcaatgagacacacacataanaatgcaatgattcttgcggatagtttgcattagtcattgtatttagtcttgaatt

SEQ ID NO: 13680 - DNA, 403 bp, Glycine max
  unsure at all n locations
tctgcatgctttcttgtcttcatcgttgtcgctcatcttcattgttgttgcttgtggaaggaaaagacagaaacaatggaaggagatattttgagaaaggctatggcacaaataaattaaagggtgtatgaggaaaactgagcgagactaatttcaaatatggttttaataaaaaaaatgtctttaaatacttgatttttaaaataattttattaaaaccgtctttcaacactcaccttctaaaacggtttttataaaattgttgtcatacatctcttgttatttacaaaattgttaccgcctaacgttctaagaatagtttatggtaaccgtcttataagggtcatcataaaaaaacaantttttttgtaatgtcaataccaatgataaaanacaccattca

SEQ ID NO: 13681 - DNA, 368 bp, Glycine max
  unsure at all n locations
tcaaggctaagtctccatgtagctccgtctatctctatacatttcttatcatnaggtatctaagctgtggttcttgaaatcaagtcttgcaatgcttgattcatcctcttagtcttgaaccttgtcataggacctccaatcccatgtaaaggatcattagctaggctggttgcacctctatcagttgttcataaaagtataacctatgacccttgaggaggcaattaaagatgaaaagtggatgactgttatgaaaaagaagttgaattcaattgataggaatcacacttagcaactagttccattggtttaatgaactattgcagtaaaatgtgtttataagattaagaggatgcctgatggaacta

SEQ ID NO: 13682 - DNA, 409 bp, Glycine max
  unsure at all n locations
ttctntgttataaactatgtgcggcaaaacttcattactattattcagtatatacaaatgagcttgttgcaattcttctagagttggagtgataacatgcaatccncttatacctttacctctcactctctcgtcaaggcgagactccagaatcccaacagggtttgccttttccatgtacttagaacaaaactcaatagcttcttctgcaatgtacctttcaataatagatgcttcagaacagtgtagattctntatatacctttntaagatcttcatgtatcactcaatcgggtacatccaccgcannataatggaaccgcaacatttaatttccctcactagatgaacaattaagtgaaccatgatgtcaaanaattaaggaaaatacatctccaaatgacacaag

SEQ ID NO: 13683 - DNA, 444 bp, Glycine max
  unsure at all n locations
tgtgtgtgcctatgtttctttcacgggattcaagctcattaaatgttttctttncattagatacttggtgtgagactaggacatcatttattatgatatgctcttcgcgattaataaagttgtcaatgctagtggcatttggaacttgtgacaaatgctcactttcttaatactaaatttttttttgctgtgcaaaaaaaatgaatcaagttgtcattttcttcctcatgcacaacattatccagcagttggaaacataaggctattaatcacatggcatactttaaggtcaattatagaggtgaattttgatttttaaggtataggaatgaattgaactcttatagtaagtttttgacaacacgagtgacaccttaaacagatgagtgtaactcaagatatgacataatctttctaaaagtttcatacataacactcaacacc

SEQ ID NO: 13684 - DNA, 394 bp, Glycine max
  unsure at all n locations
atcatccatattcaatactatttaatcatcattttaaaaaagagtgcggccaattaattntaaaaataaccaaataccttatttaaaatatatgtataccttanacatgtgtaatttgttggatcattgattatgtgtttatatattcaatagatattaactctcctttaatgtatgttttttgtcaacatgtttttcttggcttcggcttaattntattattcttcanaaaagagtgtccgggactttntgacaaanaaatggatgttntttatataaaaaanaacaatattctcaaagagtgtagtttggaaacaatntacaagacatatnttttgtcacataatatgtangagaaaccaatctcggtgtcactttatatttgttttatgtc

SEQ ID NO: 13685 - DNA, 466 bp, Glycine max
  unsure at all n locations
ggagantnctaggagatctcacaattatgaatgtatatattttttaataggaaatcaacaactatggtcaaattccttaataagattcaactcaatacccaggttccaattaagagattggatctcattatgaacagaacaatccactcagttgaatgacaaaatcaagaattaacatgaaacaaatcaaatcacatgagaattgataggatgancgcttttgtgctatggtatgtgccttacggtatccaaagtacggtcctctctgcttcctatgattgaagtgaagattcacaatgtctgctttccatactctgacaagtaagcaagtcaactaacttggtaagaagaanacaaanagtatttcacaatagaacttgaagctcgaagcgtctncattgagaaaatanagtatgattaaaaaatcaaaccattgggtaagctggctcggatagacnatcaacat

SEQ ID NO: 13686 - DNA, 409 bp, Glycine max
  unsure at all n locations
tatcttgtgttttggtacccacatcatcttctttctgctgttgctactttgagttccatgatgtggatggccatgtagatgatagcaaaagggctntatgtgaccatacttgccacagtagtgacacctccacttctttcttttgctccttttctgctgcgttccatgatgtcgagaccgatgttgtgacatcgtggctccagtgctgtttttggcaggaacaaattctgtcatggttgttctgccagcagacttaggattaaatccaagtcctctctggtttccaacattctttccaagctgcagcacctcatcaagcgtatctgagcctttattcagcatctttattgattctgtcatgttttccagtttagagttcagaaaaccaacttctcctttaagctcagag

SEQ ID NO: 13687 - DNA, 393 bp, Glycine max
  unsure at all n locations
cactcaagcttgcccaggtcgagaaggagcttgtccgaacaatttagctttatcaaaganaacatgtgggccatcatcgaccaatacaaggaaaagttaagcctagcggtaactcacaaacaaaggctagaggacgagtacgtgaaggtataagtcctgcaagtggaaagggaagcaagggaaagggtgatcgattcattacacagagaagcaatgatgtggatggataggttctcctttactgaaattctgatactgtggacagatgtcgtacaggatgtcacgacatcgcgcttcagaacatgcagctagtatatgaccgtatgaacagaataaacaagtaaataacacaagagaattgtaacccagttcggtgaaacgtacctacatctg

SEQ ID NO: 13688 - DNA, 378 bp, Glycine max
  unsure at all n locations
ttcttgtatctctccttgtattctattacatatgtcctttacacattgtgattgcatgtggatgggttgactgcatgcccgaatatgtgcttctagtgcgaagctcagagtatgcttctcttaggcttanattcactatgaaccctatgggtgggtgcctagatttcattatgtaaggagaaatcgaaagtgcttgcgatcgctggtgaaactcaccatgcataatggacatctaatttgtgctgaatgacacaactggactagatccactaatgaccctatggttgggtgcctaagttgcgttttctaagtagaattccatattgctagagaattgtgtaaaactcacactgcataatgaaaatctaattcgggttg

SEQ ID NO: 13689 - DNA, 420 bp, Glycine max
  unsure at all n locations
cttgctgctggatccatcaaataatcatgaaaaacttataaatttatgcatgaatcaactagatntaagggtagttntggaagaaaactattacaatcaaaggataagtgctaacaatntaaatcccaaaactacttanatntggcacttatcaatgcactacaactngtaaaaaagaaatcaccttgaatgaagaaggcaacctattgngccagatgaanagacactntttgaattncaatagttttttggaactatagcaagaagttcagaattttgtcactcaattacactaattggaagcctctagacaaagaccctatatgggatttgtgtcaatgtactaactttatccatttgaacatgcatcttagcatacttaanatgaatnggatctttctaaatatttttctttcattg

SEQ ID NO: 13690 - DNA, 356 bp, Glycine max
tagcttgcattttcaatatattgattcctacgcgtcggggctgtggatcgttgatggcttataagtgctacacatactaattacttatataagctgaatatatagactgcaactactttatccatttctatccggaacttatacactgatccgtacctctcgccttgatgaacatgtatcaccatccatattgagagatatgtcagtgattcaaactacgatgtctaccctgggaacactgtactatgatcccatgagccatagctacagcatcaacgagcctggttctcaaatgcgatacgaactcgaacattgacattgcatctcagctacacaaagtctctaaactaacacat

SEQ ID NO: 13691 - DNA, 286 bp, Glycine max
  unsure at all n locations
tgcatagctcagagacttctattgcatttgtgcataccactttgcgataactngatgagttaggactagcgttcattccattgctgcatatcagatagatatcacgctgtacatcattgagatagaatgagacggtcacttggcactgagggacattgtntcacaattacgcactatatgaagaggtgagatccattcttgatatggcaccnagacgtgaagccagcctccttaaacctattataactatactagttgcaatcaatattcaactacatacactgcg

SEQ ID NO: 13692 - DNA, 388 bp, Glycine max
agcttcatcattcaatttcgagcgtctcgatatatgacgggactcaatcagacatccgagtaaaaagttattgtcgtttgaattggctcagagcttcaacattcaatttcgagggtctcgatatattgcgggactcaatcagacatccgagtaaaaagttattgtcgtttgaattggctcagagcttcaacattcaatttcgagcgtctcgatatatgacgggactcaatcagacatcctagtaaaaagttattgtcgtttgaattggctcagaggttcaacattcaatttcgagcgtctcgatatactacgggacctcatcagacatccgagtaaaacgtattgtcgtttgaatggctcagacgtcaacattcaattcgagcgtctc

SEQ ID NO: 13693 - DNA, 312 bp, Glycine max
tgagccattcagacgacaataacgtttactccgatgtcttattgagtcccttcatatatcgagacgctcgaaattgaatgttgaagctctgagccaattcaaacgacaataactttttactcggatgtctgattgagtcccgtaatatatcgagaccctcgaaattgaatgttgaagctctgagccaattcaaacgacaataacgttgtactcggatgtctgattgagtcccgcaatatatcgagacactcgacattgaatgttgaatctctgagccaattcaaacgacaataactttttactcggatgtct

SEQ ID NO: 13694 - DNA, 397 bp, Glycine max
agcttggagcaaattaaatgctccagcttgaggggaagtgttaaacatatatattgtagagagctgtattgtgtagacaactatgtaggtaaaaggctattttgagtgtgtgtgtgtgtgtgaggttgagtgtgtattaagttttatgtgttgtcatgttgagtgtgagggaaactgagtatctaatccttatccaaaggcagtctctctttctattttatatataaatatataagcagtggctgagaaataaaaaaaaaaaaaataactcagcacttctctattgtattgtgtaattcaaatttcttagcaatgtagtcacttcattttcaacaattacatactcaccataatgaacccaagccttaatgtcataatctaatttggtcacagatca

SEQ ID NO: 13695 - DNA, 453 bp, Glycine max
  unsure at all n locations
tgaagggatgaacacttctaagtgttgttctatgtggatttatagtccaaagagaaaatacattgacaaatccaaaatcctaaagtcaatagagatgatttattttaaataataataataataataataataataataataataataataataataataataattattattattattattattattattattattattattattattattattattattattattattattattattattttattgagtccttacacttatactattattatgtgntggtcttaagattatatctagaaactacgttgtaatctatacatgtacttttaattccattataatctttatttcattaagtgtatactaatgccaccaaattgtaatttatggtggtacaaagccaccacaaatntattactaagatgatcattgttgacaatgtaacaatcctta

SEQ ID NO: 13696 - DNA, 245 bp, Glycine max
  unsure at all n locations
aaaaaaagcacatgcattgacgaagactcaaaatagggagcacctcacacttattaanaggaatgtccagattacgataagatttgtcaagctgttaagttattgatgcataattattagtgttaaacaaatggtaagcatcacggatgtatgtgtcatgctatgattactgataaagtgtaaaattaaaagatttggtctgggttaggtgtaatacgatcgttattggttttttctaccctccc

SEQ ID NO: 13697 - DNA, 330 bp, Glycine max
  unsure at all n locations
gctttanggaaaacttgtgcctgggcaacctgtaactcagcttgcctaaatcnaaatctcatcntgccctgttctgtttgtagagtctgggtctatgttctttgctgatcaccatacagatctctgtccttctttgagtaattggagtcatagcaacctgaacctatgctgaacatttatatagacccctcacagcaaaccacaataaatattatactttcagcacagatcaatccagtggagaatatcaatctgaatggaaatctccaacaccattctccttcaaagctgtgtcaacagcatatgtctctcatgacatacatactcaca

SEQ ID NO: 13698 - DNA, 312 bp, Glycine max
  unsure at all n locations
tttcaganaatattctcaacagtcacatctttttatgtggttcttgaatggctatcaaaggcctatatatatgtgacttgagacacgaatttgctaagagtntttcagaacaaaaaggtcttatcctcttataaagaaaaatcgttttatcctcttacaaattccttggccaaattacttgtgattcaataaggaattatttgagtgctcaaattgttcaatctatctctttcaagagagatttcttcttctcttcttcttcattctgannagggattaagagaccganggtctcttgttgtgaaataattc

SEQ ID NO: 13699 - DNA, 255 bp, Glycine max
accattaaaaaaagctgtccctccatccatctgttgcaactcaaggtcaaaatgagcaactaatgccaagattatacgaagagaatctttcttagatactggagagaaagtctctttataatctattccttcctttagagtagatcccttacaacaagacttgccttgtatctctcaatgttagctaatgaatcctttttggtcttatagacccatttacatccaatggccttcgccccattatgcgactctaca

SEQ ID NO: 13700 - DNA, 469 bp, Glycine max
  unsure at all n locations
aggaaacgggnnggaatgagccatcgananctgagacnttcggannctcgcgagttcctcagagccgacctgaggcatgcaagctattttggnggtttanatttttaccagaaggacggcaatggatccatagtatttataattagctgaccatcggatattgctgatatatatacataaggttaaattggatagtggatacggtggaatatattaaactacattgaaatttgccaaaaccaanaagcctataaccattgtcttgggtgcattctcattcaggaacaggtttcacttctgacaaaacaaaattcttacataaaagaaacggctctgttcaatttgcctatctgatctgctgtgtctcattaccatgattacaggtcattcagtgacacgtgacagtaggaactcatccttctacatggattttgagacccccattggtgctatacccgaatcttcctag

SEQ ID NO: 13701 - DNA, 401 bp, Glycine max
  unsure at all n locations
ggcttgtttctacaatttccctctttttgatgatgacaaacctgaaatcaagaaacacatacacattctttttcctagtcgatcactcacttaattctccatattctccccctttgtttttgagtttaagcttcacttgaaattaaattaattaattatatgagttcttgatttaatccctattttctctccctctttggcatcgacaaaaagccaaagtgtgtaagaaatataaaacatacatgatttanaaacaacatacacatagcatccgttgtaaatcaatcataaaggatttctaactaatcatgaagcanggcatgaaaccaaatataaatgtaaaccacatagtcatataacagaactcataaatgttcactcatactaagcanatattaaaa

SEQ ID NO: 13702 - DNA, 318 bp, Glycine max
agcttttatccaattggactaacctggaataaatgcctttgatagcccttttgagccttgtttccttttccttgtttggaagctactacaacccttagggaaaaacatgatataccatatccttaggaattttgagctttgaattgtttgggaattaatgtggggggtttttgttcattgacaacttgtttgtggctatgctcatgatgattttggccatactgatgtacatgatattgttaaatgttgacatgctgaataaatgttgttctcaaggctaagagtaaaaaaaaaaaaaaatcgaaaaaaaaaaaaaaa

SEQ ID NO: 13703 - DNA, 244 bp, Glycine max
  unsure at all n locations
ggagatgaaaaaaatcatgaggaagcggtatgtgccggctagttactcaagggacttgaaattcaagctccaaaaactaacccaaggcaacaagggggttgaggagtatttcaaggaaatggatgtgctcatgattcaagcacatattgaagaagatgaggaggtaactatggctcgatntcttaatggtttgactaatgatatccgtgatattgttgagctgcaagagtttgttgaaatggat

SEQ ID NO: 13704 - DNA, 401 bp, Glycine max
  unsure at all n locations
cttgcgtagccgctcttggtgctcagagatttccaaaatttattcctcttatnactagctattttgaaggctttagttcctgaatgtacaaccttcaaattgttgctcgttcccctctttcttttctgcaaaaaagaaaatcaaatgctgtcaaaacatggatgaagtcctaagaaaatcaatatcaaagaaaacatggatgaaatcacaattaaaaagcacaactacctatctttcagagtcctttggttaatttgtcttgtctccttatgtggtggagttttgtttaataatcttatactatctgccttccaaaaaaacttatcactaatccctctttcattaatccaatattgtatgttattgtataaaagatcatgggttcttcacctgcctccact

SEQ ID NO: 13705 - DNA, 398 bp, Glycine max
  unsure at all n locations
tgcattcaggaacctaacaaacaatacaagatgcttcacttccagtcctgctccaatgaataaatctttataagtaaaacatgtatgtttattctaactcaccccatcttggagcttgtcctctacagcagtggcaccaagaagaattaggttcttctcaatcttatctgatacttcctcaatcattatatcctgatcagcactgactacattcttggccctagagaatttactatcaaactccttgtattcttctgcatcaagttcacgataggccagtataaaggttctcaaacccgcatcagcatactcatgcacatngctcatggttttctcttcaaactccttcctattcttggcaagcctttcaaacatggtgctgcatgaaaacatcactc

SEQ ID NO: 13706 - DNA, 329 bp, Glycine max
  unsure at all n locations
cttaccataaaacggtaatgcttgcaaaccggactttgtacccatgaccattgtaagtctccattaatgacaacctttggtatggaaaagttaaataaaatgtatgtcttttcctcatttaatggttcttttggtaggttgtacattattntatgtttaggttaattttttctcagtagatactccctatattgtgaataaatgtggttcaacttcagttcacgtgaaagatgaagaatagaagttgagtagctgtgtctcctaatgaggctatgccctagtgagtacatcactaacgaggcctcactcgctagtggttggagatctgg

SEQ ID NO: 13707 - DNA, 403 bp, Glycine max
  unsure at all n locations
agcttgttggtaaactatatgccttgtttaacccggtaacccaactggccatgaatcaaaaatctgcacctgtcgctagactctantggttatgctcctctgacgaccaccacacagacctttgcccttgtgtgcaacaatctgaagcaattgagcagccctaagcttatgctacaaacatctacagtaaacctcctcaacctcagtagcaaaatcagccacaacagaacaattatgacctctccagcaacaggtacaatctgcggtggaggaatcataccaatcttaaatggtcgagtacttcacaacagtagctacaacaccagccttatttgtcaaatgttgctggcccaagttgaccatacgttcactcaccgatccagcagtaacaacaacaacagca

SEQ ID NO: 13708 - DNA, 362 bp, Glycine max
  unsure at all n locations
atgatgccacacatgatcaacagctatgctacttcctagtttctttactgtggatagctgcgattcagttcggaaaacctgttatcctcttacacgttgaacacttgatgcgtgctagctagtcattcttccatatgctgtaccatataagatccaaaagaaatagtttataatgatgcatgtacacttgctctactggtccatgctagaatttgcatgcgctgcatactanaatcatttaaagagaggaaaggatctatagaatagagacaagcgtgtctctgttctatatatncagtcatttaattaaatacacgcaatggatttctgcatgttcatattttaaataactatattaagtc

SEQ ID NO: 13709 - DNA, 388 bp, Glycine max
  unsure at all n locations
tacaacgtatgctgcgtgtgacatcgtcttttccgactatatataaataaacaaaatatataaaaaatattggtaaacaaattcacgtgggtaaaaggttcacattcacttcactattaccaaataaaacttattaaaaatatattcgactctaaacaaagccgtcaaaatttacaaaaaacgttttgttaaatcaatgaggtaaaataaaatagactaacatcatgcaattaatatagagcttatgctccaatgtcacatcctatcagagcattgtgtaccgacgtctttcagcacaaggttccttaaagtaaattacgtagtcatctgctcccccgaacacacagttcaagatcatcacatgatccanacacaaacaacacacatg

SEQ ID NO: 13710 - DNA, 264 bp, Glycine max
  unsure at all n locations
catgttgttctgaaaatctaaaatgtaactcttaaaaatgtttgacttttccaatgggtttagctttctaaaagtataactcttctgattggcttcttgaccagacatgagagtctataaagcacgctttgnttcgcattttctatcaagtctttctaacattccatacatccttacagccttgatctctgtgaacttcttcttctcttgtccaaagcttatgaaatttctggttttcaaacctgaaacttggctatcatcctt

SEQ ID NO: 13711 - DNA, 300 bp, Glycine max
  unsure at all n locations
ccactctcccaattttacaaaatcatattcatatatcattggggcatttcaccgagcacttggtgggcgcatgtttggacataaattgcaagagaattggggcaatgtggcatgccccattgcttcagaatacaacacaggcctaaggccttctcacacaaatcctcaactcaacaaatcaagcatcanagcaacccanaactgcctcacaaatataagcacgttctcacaatntagagcaccaaaagatgaagaaaacacatcaatgagaagctaaaaacctcaggattgaatacttac

SEQ ID NO: 13712 - DNA, 353 bp, Glycine max
  unsure at all n locations
ccttgctctaaattacatggaggttggtatttttgaaggatgtttttgccatttttgttttaagagtagcattccttggtaaaactaattttccaaatgtttgccttcgcaggaaatggccccgaggaagcttgcctcaaagaggtccaggaaggacaaggcggccgaaggaactagttccgctcctgagtatgacagtcaccactttaagagcgctgtacaccaggagcgcttcgaggccatcaagggatggtcgtttctccgggagcgacgcgtncagctcanggacgacgagtatactgatttccaggaggaaatagggcgccggcggtggacatcactggttacttcca

SEQ ID NO: 13713 - DNA, 392 bp, Glycine max
gctttatgtaaactgatgccttggtaacccggaacccaactgccatgaataaaaattgccctgtcgctagctctatggttatgctcctctgccgacaccacacagacctttgccttgtgtgcaacaatctgaagcaattgagcagcctaaagcttatgctacaaacatctacagtagacctcctcaacctcagtagcaaaatcagccacaacagaacaattatgacctctccagcaacaggtacaatctcgggtggaggaatcataccaatcttagatggtcgagtccttcacaacagtagcaacaacaccagccctattttcaaaatgttgctggcccaagtagaccatacgttccttcaccaatccagcagtaacaacaacaacagcagc

SEQ ID NO: 13714 - DNA, 355 bp, Glycine max
  unsure at all n locations
agatttaagccaagcccttactttcgaggggcaactcccaccttatgaagactatcccgggcaagacgatggggaatgagatacccatcttggccccctgctccacctcaaagatccatccccgcatgaactaccccagccgaacatagtccactatatcccggcctcacccacacccgtaaaagaatctgttcccttcgcggaagataagggaaagattgacgcgcttgaagagaggttaagagcagtcgaaggccttggcaattacccattctcggatttggcagatntatgtcttgtgcccaacatcgtcattcctctcangttcanagtaccagactgtgataagtacaaa

SEQ ID NO: 13715 - DNA, 435 bp, Glycine max
  unsure at all n locations
agggaggggtnagatagctttaaaccgatgcttcgacatccggggttngagccgccncgggatccttaagngacttgagcatgcaactttttgggccttcctgcaaacaaacattgggagtaagtttaccaagaataatgcctaattttacaccaaaaatgacatgcctaatccctccggttaaaaacgaactcatgcccacgttaaaagtacacatttatgcacatgcgtacgtgtaaaaatatcctactattatgtcacttacaagacacccacacatctaattgcctacattatgtgcatctgaaagacacacttctatgctcaggcgtgcgtcaacttacactaatatatcctaatttgctattcaactactaccatattgaatatattcatcaaatttatgttactcctttattattgctatggaaacta

SEQ ID NO: 13716 - DNA, 348 bp, Glycine max
  unsure at all n locations
tatagaagctagatttgattttctatggtncaatatttttgttcttgttcttgaaccatgaatggtgttgagtttaggttcctttgatttttgtcttgttattttttgtggctganacctaaaccatanaattcttacaaaaatatacaagtagaaaaaacctcaaaatctagagtgacttgttcacgtattggtagtttgtcatagaagtcatgtctagtcatgaaacttgtcacataagaattcttatgttgggctgaattntattttcttggttctttcgctaactcatttggtcatgagtgtataaattatttagcctattatttgattgagtccatctttcat

SEQ ID NO: 13717 - DNA, 459 bp, Glycine max
  unsure at all n locations
aggggncaagcggganaatgaaccttcgatanctttcgaaatctagctcggacccgggatcctctgagtcgacctgcggcatgcnagctttatctggattatttgtattgntncgatggtgaattctgggtggtcctggtgcggaaatgatggtacagcgggtgaaccaggagcggcaggttcttttggtgaaggaaccatgggaaaacagaccgttggaatgaattctaaatctcagatactattgggatatgctgataaaacacgaatgcccaccgatatattttgaatgagcatgtatagggcgtgtgaagcaccgtcgaattgcttgtgggaacggctataatgttagtgattcgtaggcacgtcagatagcataactgcttaattctctaccgacaatgccacttgccctagttttcaactgattgctccagccttggaaatattgctttgtcn

SEQ ID NO: 13718 - DNA, 403 bp, Glycine max
  unsure at all n locations
agcttgttaatggagaattgcactaatcaatcactacgcatagctgcaaactcgaaggtggaggacacatgaacgaaaacacaattcatggggctccgaaaaaagggttgataatggagaattacactaagcaatcactacgcatagctcacaacttggaggtggaggacacatgaacgataacgcaattcatggggctcccacaagatngaaaatggagaattgtactacgcaatcactactcatagctacaaacgcgaaggtggaggacacatgaatgacaacgctattcatggtgcttcaacatgattgataatggagaattgcactaacaatcactactcattagctcaaactcggaggatgaggacacatgaatgaaaatcaattcatgcggctccca

SEQ ID NO: 13719 - DNA, 488 bp, Glycine max
  unsure at all n locations
ggcncggcggcggtcnnngnaactggccatgaanctncgacnacgaaacnatgctnaagggagcctaccattctgctgggaccaatggtttaataatttcatcanggcgaacaatcttccactactttgtggtctatattacacgcccgagtagatcctttagaatctgaatagttcgttcagtctgaccatctngttgaagatgaatagctgaactaaagcttcagcttttggtccccaaggctttcattgtagaactttgtccaaaatcgcgaagtgaaccttggatccctgtcaatacatactagaggaattcctgcaccttctcttcttgattacaactcactagctnttgcattctatacctcatattcactgggataaaatgagcagatttggtgagtcgatctactatgacccacacggcattatgcncacgactagtcttgggtaaactagatacaaaatccatagatatgctcttccat

SEQ ID NO: 13720 - DNA, 318 bp, Glycine max
  unsure at all n locations
tgcatgtgaattaggacgcattatcaagaatcaagccaatgctattgtgcaagcaatcaatggggcataacacacccaatgattatgatgatggatggctcaanattatcacanacgtaaaatcatcactttcaaattgagctttcaaactatcatgacatgtagagaaaaatcaaagatttcaagtcacaaaatgtcaagaactttattttccaaaacaatacccatttcttgaacatatcctataattcaaaagaaaacatgctaagtcgtacgtgcacacaaaatttgaccctaattattatactaaaaatctga

SEQ ID NO: 13721 - DNA, 280 bp, Glycine max
  unsure at all n locations
tatcgagacgctcgaaattgaatgttgaagctctgagccaattcaaacaataataacgttttactcggatgtctgattgactcccgtaatataacgagacgctcgaaattgaatgttgaagctctgagccaattgaaacgacaataactntttactcggatgtctgattgagtcccatcatatatcgagacgctcgaaattgaatgttgaagctctgagccaattcaaacgacaataaactttttcacggatgtctgattgagtcccgtaacatatcgag

SEQ ID NO: 13722 - DNA, 370 bp, Glycine max
  unsure at all n locations
agcttctatcctttanttacatttcaattnattgaactaatgatctttgaactaataataattaataatattttaatataatatattaaaaaatatttattggagttgaattaagaatgccgattcataaataaattgagagaaattggaatggtaatgtctatacaaacataaacagtttatgagaagtggtggttacttacaaatattttgacacacaagaaaataattgttacctataaataacaatcttgaatttactagtagtgaattaataattattatctataaatattaatcttgtaatgtattagggttgaaacttctgccctacanacttgtacaaatcccgacacattntgtactcatc

SEQ ID NO: 13723 - DNA, 324 bp, Glycine max
  unsure at all n locations
aaactagttttatatgtgattatatattgtaacaattattgtacaccaaaaaaatatatcgtaacaattaatgagtaggggttttcttttttatattcaacaactagattgattttatttctttttggtgtcccccggatataaaggatttggtttcattagaatgtccattcttttttgccaacagtatgaatttttatttcaatcttaacgaataagtgcattaacattnttacacgaaaatntacttttaagcatcggaatttgaatgattccttaagaataatgtaagagggtccctgcttatattctaactaaacatac

SEQ ID NO: 13724 - DNA, 364 bp, Glycine max
  unsure at all n locations
agcttgttgactataccttcgaccgaacacgaccagtgttctgtctaggcccggattcaaggcgggctgcaacacccgctctgcttccctaactgtactggaggcggttgtcatggctntatcctctatggttttctggaagtttaacatgacctccgagatggaagccatttgatcttttaaggccgatagatcggccttcatctgttcctgcacgccctcttcattatccatttttctggatcgagtgttatangggtgccttggtggtttcttaattatgatgaaattcctaaagaaataaacaacggtgagtatgccaccaaaacatgagtatgccaatggatgatcggaacacttggat

SEQ ID NO: 13725 - DNA, 282 bp, Glycine max
  unsure at all n locations
tgccttgttccctttggtaatgtagtctctacttctagtgaccatttgttatccctatatatgtctgaatagttagctaataaaattaaaactctctagatggtggatcccattctntaatgttgncattttcctaacttgtgctcaaaacatcacaagtaaattagatcgttatcctcgaagaatgaggataaatgagtaattatgtagatctaataagaacgatgataattaattatgtagaattgctattgatgatatactcccttatgataatggata

SEQ ID NO: 13726 - DNA, 335 bp, Glycine max
  unsure at all n locations
agctttatcatcagaccacttncagggtgctggaactacttcacatggacttgatggggcctatgcaagttgaaagccttggaggaaagaggtatgcctatgttgttgtggatgatttctccagatttacctgngtcaactttatcagagagaaatcagacacctttgaagtattcaaagagttgagtctaagacttcaaagagaanaagactgtgtcatcaagagaattangagtgaccatggcagagagtntgaaaacagcaagtttactgaattctgcacatctgaaggcatcactcatgagttctctgcagccatcacaccacaacaaaat

SEQ ID NO: 13727 - DNA, 177 bp, Glycine max
  unsure at all n locations
caccaccatgaatgtgccttggataagaagcttgaagaggatgctntaatggangaaaagaaagagagaaagggggagcacganattgaaggaataaaagagggagagaagtggaactttgaagtatgtctcataagactttcattcattcaaagtacaacaagtgttacacatgct

SEQ ID NO: 13728 - DNA, 373 bp, Glycine max
  unsure at all n locations
aaagaaccaccttcaggtccaaaaaagtgaccaccttagggcctggcttcaaatccaaattgaccaccaaggttagggttcaaaccattgaactcaattgcaaaagcatttagggttttttgaactaaaatttttttttttattttgatttacgacggttttttatattaacttgcataattntataacacaaaacattctanggtggtttcaataacccgctanaatgtacgtcgtgaattccaatttcaatatataattacaaaattgcaccgtatcactttctanagcggttccctataacccgcgtagaaccgtgtcgtaaaatttttttttgagtagtgataattaatactttcacattagtattacg

SEQ ID NO: 13729 - DNA, 497 bp, Glycine max
  unsure at all n locations
aggggnaagcgggggatgagctatgagccccttgaattcgananngnacacggaatccnttaaaggcaccttgaaggctggcaagctggttatttacggtatttacctanngggaccccnagaagcgattcttaagaaatatctctcanattaaataataataaaaccacattgggggtcattcgcaagaaggaaattaagctcaaaaaaaccataaccaataagggataattacttaccattggaaatcaaccaaaaaacttttaggaattaaacaaaaagcttctattgtgtgggtttcacaactaccacctcttgagagaaagggctttaggccacaatggatacatgaagaattgagatgatgagacaaattgaaataggagaaatgaagttcttcatgttgatagggaattaagagaagtaagtgatcctttatctatccactacctctttttttattcccaccctctctaatgtttttggactaaatattn

SEQ ID NO: 13730 - DNA, 437 bp, Glycine max
  unsure at all n locations
agggaggggaagggagctgtgcgctganncctgaattctgangnncatgggatctntgagncacctgaggcggcagcgtgttgttagtgttgggcggtctcctcacggtcttgtcgggactgcgagctttggccactgcatttccttccgcgagcttctcttcataaccggcctgagtgggtttatagcctaacccatactcccacgatttcctttggcattataagctattatgccgctggagctttgccccaacccattcggagtcgaaccggttccaacataactcgaccattattatggtgctcggacaacagcttgcccaagaagaacacggagaaatgctccacctaaagacagaagcgggtcaaagaccctctgcggctccaaaagcataaggaggcagctaccaaaggttctcccgcacaaaacaaagc

SEQ ID NO: 13731 - DNA, 384 bp, Glycine max
  unsure at all n locations
agcttttaatgtattgacaaaaaagagaaaacccggaacccagggggagcagnggagacagannnaagccgagcngaaggccaaanggacactntcaatcgacaaggacagtgtcgatgacactgtatacaaaaagtatgacataagataagagaaatgggcccaattttatcaaagccgcatagacccttcatgggaggtaactttgtgatcttcattgttttcaaatctaaatcgacttattattatccattgtaatgataagtctcaatggtgtttaatatttgcaggatgtgcgaaaaaagcacatgccatccagaaacaaaatattgtccctcacatgttgtctcgtgagagttatgaatatcttgaaaacaagatgat

SEQ ID NO: 13732 - DNA, 325 bp, Glycine max
  unsure at all n locations
aaattgagtggggagaaaattttcactaattatgattagtgaattttagctatggttcagcccaccaatccaagatcaattccaagattctccactaagtgtgcttaggtgtcatgaggcatgtaaagcatgaaggacatgcacaaagtgtgactatatgatgtggcaatggggtgtagcaagcaaatgatcacctccccctctaatatttaattggattggtcttctcccaattcaattaaatntattgctcaacacacacatcaaatatggacttaattaacgtgaaattacaaaactacccctaatacacaaactatagtct

SEQ ID NO: 13733 - DNA, 259 bp, Glycine max
  unsure at all n locations
ctttggaaaaaatcttcagaaacaagtcacttgttgaattgtgacttttggaaatgtattttttgaaatcagtcactggtaatcgattaccactaaagtgtaatcaatnacacttcaacagatgtgactattcattttgaatcttgaacataaaacggttagaaactctggtaatcgactacaagtattgtgtaatcgattaccaagtttagaacactgttaaactatttaaacataagttataactcttgaaattaaa

SEQ ID NO: 13734 - DNA, 415 bp, Glycine max
  unsure at all n locations
cgaatacgctcttaatccgtagcacnccgcnnatagntattctccnncnacncanagaggagagggggtttcatctttattgtannangangacgggatgtgggcgtttaataccacttcctcctctaatggacgcgagatgatgtgcccaagtggggtcgcatgatctcgttttgtatgcacggagacacgttcctctgttcacaagagttctttgtggcgaagcggaaagaacactttacattaaaaagcttcgattggaccattatgaaattacttcccttcacagggctcaagttgataggacacataagtgacctcttctgaagaaccggaaaaggggcctgacccatcaacaattagttttacacctcccatttttttatatgcggtgagcgggctttggttggtatcg

SEQ ID NO: 13735 - DNA, 455 bp, Glycine max
  unsure at all n locations
nggggaaagggagatgatggcttgaacttgacacaagacgccacggatccctgagtccctgagcaccaccgatgtaactttataccttggggaagcctaaaaggatcaaatattatataaaaacctatttcaaagttaacctttacctaaataggtaaaaaaaaatctttacctaatttggacctacggggaatttacacttgaaaccaaatactacacctgcgaaaattcccaattccacacttgaaccgttgaactttttcccactatcttgactggctctagcttttttcacttagtagaattaccggctaatcctcctttcatttaccttttttatttgccttnttggactgacctacactttctctcgtcctttctgttctatctcactttcacgtgccanattgtnttgggtgggtatnttttagaataattcataatttgattcttag

SEQ ID NO: 13736 - DNA, 494 bp, Glycine max
  unsure at all n locations
agggaacgggcgttttaggctagtgccatcgaanactgagancnttcgacnnncnnccggngtatctctaanagcccacctgcaggcatgcaaccttgtatataggaatggtngattggtgaaactgcctgctttaatggtggaccacaaaatggtacctgaagatatgtcacgggggtcaggaaaccttgaggacgtcaggtggggtgctatggcccaaaaccaaccttgaccaatcccgacccaacccgggcatagtcggtcagggagaccctgtgatgtatctaagcaggcgagctccttgcagtcaacagataaaaggaaaacagaccacaaagcanggatgcttgtggtggctggccaactgtgaattttgtgaatatgtgagatattgcctcttgtaatcgattaccaagggtggggaatcgattcaaggcttanaaatgagacaggaggctaaatggtctctggaatcgataccacgngtgtaacga

SEQ ID NO: 13737 - DNA, 241 bp, Glycine max
aaaatggttggcttctggttttatgtcaatacatcaaaatcttatgttttacttgtgtcatcatgtaatgcttcctctactatagattccatcaaacagaaaaaaaacactagtatatgagacctatatcatcaccacataaaccaaatttttggctgctggctttggcccattccccacatttgatcttctatgatcccatctacaaatcttctccccgccccccatgagaatgaattaa

SEQ ID NO: 13738 - DNA, 388 bp, Glycine max
  unsure at all n locations
gacgcgaanganacggcgagatgaggcactccatgacacgaggatcacanggagaaaagagaccatatgaattgctccagagcttccatttgtcaatatcgagcgtctaaatatataatgcgccttcatccgacctccgacatagaagttctgacccatttaaatgctcaagagcttccattggtcaatttcgagcgtcacgatatattatgcacctgaatccgacctgcgagtgacaacatatgacccatttgaattgcttcatgagcattcattcgttcaataattgagccgcaacgaatatatatgcaacctgaatcggacctgccagtgacaccttatgaccaatttgatttgctcagaacttccattgatcaatattcagccc

SEQ ID NO: 13739 - DNA, 232 bp, Glycine max
  unsure at all n locations
ataanatatcgagacgctcgaaattgaaaatcggaagctcttgagcaattcaaatggtcataacttctaactcgaaggtccgattgaggtgcataatatatcgagacgctcgaaattgaagaatggaagctcttgagcaattcaaatggttataacttttcactccgaggtccgatacacgtgcataatatatcgagacgctctaaattgaacaatggaagctcatgagcaa

SEQ ID NO: 13740 - DNA, 369 bp, Glycine max
  unsure at all n locations
agctttttcgtatgtgctccaaacanaagcgggcatggtggtttaataagaaacctaggggaaattactgttcatgctgaagagactgttgcttcaaagagtgcagttgagatggtcttgcgttgttctcacttggataacagggatgtcttttctaaaagtgtacgtattctatatcccatattaatgtcccctatttaattaaatacatttttttttgtttgtcattcgaaacatctctcatatattgttttctcgtangaccctcttctaagaatatcaagaatggttgagagtggacgttatattcctatatgcaagactgaagttatcgacgacaatttaaattccaaatggaatcatttgtct

SEQ ID NO: 13741 - DNA, 265 bp, Glycine max
  unsure at all n locations
cggatgcgatgaacggagagcttgctcgtagtgaaatgaagtttgcctgattttgatggcggtttgagacttgagagtgtacaatggaattaatggcaacccacttatggtagtaactttctgcacctcacaaattgctttctgctccaatgcgtaaaanaggtgaaagaaatcactaattttgtgggaaatttagttggatgaagttgagaaaagaaccaataactatctttgtttttattcatatttattagttaattgcaga

SEQ ID NO: 13742 - DNA, 429 bp, Glycine max
  unsure at all n locations
acaaacgttctcttgctcaagactttctattaaccganaaaaatgcacccatatacaatcaaggcagcttcgttacctagattatttacacgtacttccaaggtgtatttgttacttacatcacacacatctccttggctaaattcacatacatgcatactcaaagcattttggggtaccaaaaattgcacatgtgcacatcttggtatttctaatacctatacatacacaaacttcatgatgaatcttgactatctacacaataaggtgctacatttcatgctcttttcaagtttttgctacctaaggccgcatgcaaattcaagtatattttccttcgctggctaaaattgtattcaaattaaaaaggatacattttttttggtaatgtatcttctttacatagcatgccacatatttatgtatata

SEQ ID NO: 13743 - DNA, 496 bp, Glycine max
  unsure at all n locations
agtgggaggggnnnnnagtttgacgcctttgancccctgatgcactcgtanacctcagggcgaatacagctcggacccgggatcctctaagtcgactgcagcatttatctttccccaactcgccaggcgagctaggtgcttctttanaaacacccgccttctgaggaaattttctgggaaggcccaaattgggccttgggtgctattatgcaacccctattttttactanatacattcccccttgcttttttttgtgattcttttccgtatgttacaaactttacgactttctaacgatgcatgtttttttccgtatggtaccaaaccttacggactatgtgatcaacccctttttggttttcgggatgtcatggaactttaccgattgcgcacgaacacttccttttaatttcaccatgtcaccgaacttcacagattgtgctacaatgctttcttttgactttcggcatgtcacgaaacttcacgaattgcctt

SEQ ID NO: 13744 - DNA, 297 bp, Glycine max
ctgctggtcgggtcatggacatttgattatcacatcttgcactatatcattgtaagaattatgatgcctcgttcttctaatctagctcaagcctctgaggaggatttgattctgatgtgggatttcttgaccgatcgtcaaatcgactgggcccatttgatttgtaccgcatgcataaggcattgcggtctagtgcacctttaccctatcctcagttaatcactttatttctgcgtcatttcaatgtacctcttgcttcttagcctttcattcaagttaaatgatccttctctattg

SEQ ID NO: 13745 - DNA, 399 bp, Glycine max
  unsure at all n locations
agcttgtattagtatacttcaccttgctgcggtggcacttaacctggctctaatcctggctgcacttgacccaattggggtttttcagtcttaacctcttcctgaaccagggatttctgcttctccaatgattgaaacttctttggggtcttcttttccttccttgagacctcttgatagcttgtggctgattctgccgctcgtaacttaagcagcctcatctctttcctcagtgcagcattttccacctcaaatttccggacatcaacattggttcgttctacctgtgcacttgctttagacaggcattntccatctcagaaacttcttcatagtgttttcctctagagattgtttttctttnttaagacgttcaactcatctttctcttgtctcaat

SEQ ID NO: 13746 - DNA, 375 bp, Glycine max
  unsure at all n locations
tctcatcggagggagaaaataggttcctatgttaggttaacctttggctttctttttgctaatttcattaccatggtnggactatccataagtgtttccttggttaaagtttacctttctaataccaatttggaattctaactaaaaaacttcaggaacttcaactagtaatcaaaaaatggtatccatcctttgaacctgatggcaggttcatattggatgtaatggatctttatttttggggcnacaaaaggggaggccaattgggtcttggtccttgtgaggcccagatcatgcaggtggactaatatcccttccaagtaaaagagttaccttacatattgttctatatctgtggcgatttctcatagcatg

SEQ ID NO: 13747 - DNA, 287 bp, Glycine max
  unsure at all n locations
agcttgtaatctnattttataggtttccgcanatcgggtcaatagctcaaggtatgtactctgtctaatccagccaacttatagttgtatacactagataagaagtggagcgttcatatttcgacatttcggcgccctattgttatgcagtcaatcctatggattcattcattactgatgatcgcagaactgctgctctagccatattatctctcaatggaaggcatcttgtagtgtcgctctttacataaatgttacatagattgaattctgattctaattataat

SEQ ID NO: 13748 - DNA, 398 bp, Glycine max
  unsure at all n locations
agcttttactaagttcatcctaccatcctcagactgatggtcaaactgaacggaccattcattccctggaggaccttttgaggtcatgtgtcttaaagcanaaggggagagctttctttcattgatagagttcacttacaacaacagttntcactctaccattggcatggctccctatgaagctntgtatggtagaaggtgtangacacctctatgttggctaaagccctgagaagacctcaccttatgacttgaagtggtacaacaaaccaccgagaaggtcaagttgatccaagaaaggatgaagactgctcagagtangtagaaaagttatcaggataagaggangaaagacttggaattcgaggtggtgatcatgtattcttgagagtcactct

SEQ ID NO: 13749 - DNA, 251 bp, Glycine max
tatatatggccatatatatatatatatatatatatatatatatgtgcagggagaaagataccttggatatgcatgtatgtagcacacaaaatttcacacaatatatatatgtatgtttaggtagcaagataccttggatatgcatgtatatagcaaaaatatctcacaaaacatatatacgtatgtttaggtagcaagatatctgtgacacacatgtatatatcacaatacctcacacaaatatacgtatg

SEQ ID NO: 13750 - DNA, 512 bp, Glycine max
  unsure at all n locations
nnnnnnggcggagannnaagactgagngctagagannctngcannanctanggngaacngagcgnggcacccgaggatcctctagagtcagaccggcaggtttgtatgctctatatgnncactagaacgagagtcaccagtgatcgctctataatttagatcaaagaccatatttgtgctaaacaaaataatgcaaagctgtacctttagaatagtacaacactcacgttttccttgaaaatgcttttaacacaatcactttatcattacggagcatatcactacaagtagtaagagtcaccaagacaaggtaaaaggtatcacaattgatatttgcagtacctgcataacttcaactaatggtttcgaaaactttatatattcaataaatagacaaagataacttgggctattatacagatcctataaacagcctaagaatgtgaggatatattgtatttaattcactgtcacacaaaanaaaagctcaataatttgagcagaacgacaag

SEQ ID NO: 13751 - DNA, 355 bp, Glycine max
  unsure at all n locations
cacaggcgtttctatgggttattcttaaattaagactctgaagatatttgttaacgttcttctcctctttattttcctttatatctttttgcatccgaacaatgcanttaatagttttgaagatgggtctgcaggcaacctattagagtaaaaaagtgtgggtgtgaacattatgcaagcaaattatgtagttctcaatacgaaattcaatcactgtctttagtttcgtgagtagtgtaagttgtaaagaaccgtcaagtgtattggatggaagtcaaggtacgtattatatgcttggaataanatcatctcctacttanaagaatcattcatcaataactcttgaacattttga

SEQ ID NO: 13752 - DNA, 256 bp, Glycine max
  unsure at all n locations
gggataaaaggagtttggatttacaacatggtagaaataaagaaaattgcgatgatactagaagaatacagagaagatttgggtttaggatattcttttttcctcttatttcaactcataactagctatgttatgggcctcgntggttctggatttcacataggttatttcctgcacctacaagctacttcctgcatctcttttttggctttaaaatgaccattctgaaatgaaaattacattttggaatgattat

SEQ ID NO: 13753 - DNA, 376 bp, Glycine max
  unsure at all n locations
agctnattattttctctgaagcaaaaccaatagcgtanagaagaagaaagttcggtaaagaaaggagacgagtttgccaaaccttacatcttcacctctaagaagcacaccaaagcgatagacatcaacagtgttggaggagtcacaccgagcagctaggtcgactttgacccgaggaaagataaagaagatggaaggccagcaccgatcgaagagttatgtttattccaactcgaaaaaatcctcaccaactcaccgaatagggcagaaacttgacaaacatcttctgaaggagatcgaggaagtgttgaaacagaacactgattttnttgcttagaatgtcgctgacatgctcgacatagaacccaatttcata

SEQ ID NO: 13754 - DNA, 334 bp, Glycine max
  unsure at all n locations
tggccaattagagatcaatgtcaatattattgacaatgtatatcatcaacaatacaattattataactccgcanatgttgatctacaaataatgtctcaccagtcaccatgttttaccatttgtcattctgtttataatctcacatggtacactagtcatgatgtagggattatttctcctgaacacgatcctgcatctctacttttacagtttagttaccaactcgtttatctctttaaatcaaaatanattgcactaagtcaaaacactataaaaaaattgcaacatgaaatacagaaatacccgataaactcatgcatattgaagaacatg

SEQ ID NO: 13755 - DNA, 279 bp, Glycine max
  unsure at all n locations
acatgttgagaattacgtcatcttccgcgctctctttatctgtcatactgactntngagtctcgccgacggccgaatatacccgagtggttatccgtataaactttatgatgtctataagacgaatagcctgatagcacgcagagactaacgtcgtcttctgcgcccttcgtcgatcgcggacgacaagcccgttgacacgtggagatttacgttatcttccgcgctcacacgatctgtcatactgacttatgagtcgcgctgacgggcgaaaataccc

SEQ ID NO: 13756 - DNA, 403 bp, Glycine max
  unsure at all n locations
attgaacaagcggaagctctgcgtgtataatcnagtgtttttaaattntcacacagatgtccgatgcggggaaataatatatcgagacgcacgaaattgaacaacggaagctctcgagaaatttgaatggtcataacatttcactcggatgttcgatccggggacataatttatcgagacgctcgaaattgaacaaccgaagctctcgacacattagaatggtcgtaactnttcacgcgaatgttcgattctgggacataactcatctagacgctcgaaattgaacaacggaagctctcgagaaattcgaatggtcataagttttcacaccgatgttcgattcggggacataatatatcaagacgctcgaaatttgacaccggaagctttcgagaaaatcgat

SEQ ID NO: 13757 - DNA, 378 bp, Glycine max
  unsure at all n locations
catnaaagggggcaaaacatatttcaaagagtgatcatttaacaaagaaataataacccaactgagtaaattctgcttacagcggcactttcctaccagttgagtgacaggaatgggtccttgtaaatttcattatatatcacttatcagatatagccactccacaaatgatccaacatataatacccanaagcatacagaacgaacatgataaagaagagcatgtgtaaatncatagnagattataggtagtgcataattcttatactattagttacaacanacttcattaatgactaagtactcagaactcttgagaaaaagaaaacaaatgttctagggacaatctaatcaatatatgacaatcagcattaacag

SEQ ID NO: 13758 - DNA, 469 bp, Glycine max
  unsure at all n locations
aggggnnnacggaggganaaaactgatccttacgagnnctaccgcactnctgagaangttcgccgaggatcctctgaagncaacctgaaggcttgcaacctttatttaatggtttgtggagacccactagaggaaccactgataaacctgtgaagtcaccaccgtgaggtaccataacctttttttccctaattttaatctcggacttaataatggaggatgaggtaatgggttctttaaacaataatgccatatgcatttcaatgtaattaacttcatgaccaatcttataaactgacataggtccataggtgaaaattatgcttaattagctttatttacttacgtgatgagcctgatatcaggagcaccaaattgaatgagatgaccattgatgatgagaaattttatgtacttgtntgacattaaagtgtattaccatcatttctcaataactatcgcaagttaa

SEQ ID NO: 13759 - DNA, 393 bp, Glycine max
  unsure at all n locations
taagcttatcaccatcggaagccatggataaaagcttgaaggtaggagaaaatgagtagagggagagggaaagaagggaatgaaatnttgagagagaaaagagggagaatgaggtctgaactttgaagtctaatttctcanaaataaaagttgcaaaatacacatacaaggtctctatttatagcataagtgtcatacaaaattagaaggaaatttgaatttctattcaaatttcacttgaatttgaatntgaatttatggagccaaatttggagccaaaatttcactaattatgattagagaatttcatctatggttcaacccactaatccaagatcaaatccaagattctccactaactgtgcttangtgtcatgaggcatgtaaagcatg

SEQ ID NO: 13760 - DNA, 216 bp, Glycine max
  unsure at all n locations
ttaaagcaaaaaccaaggttaggagttccaatacgatatttaaagattctcttatcaacaattaagtcaaattctcttggttnttttcttgaaacctatcacacatgcatacactaaacatgatattaggtctagacacaatgagatataggagtaatcctatcatagctctatattgggtaccttctttgattcctcatccattccaagatatgt

SEQ ID NO: 13761 - DNA, 467 bp, Glycine max
  unsure at all n locations
cgcttaacctggggctagtggcctnnganatcganagnnatcgaacnngccnccgggatccttagagtcgacctgcggcttgcaagctttantagtgaaaccnggngcggccatctcgcgagagtcctctcacgaggtggaggtggacccaggtcctccatatgaaaataataatggatgctcataatcagaatatccaaagtacccctcaataaaaggctcaaaatgctcaaaatgcacagaatgacctggatgcacactatctatgacaggttctatctacttcaagatcaaagggttgtaaacacctgtattgccctagacatgcactatatgcagcaatagagtggttctcaacaagcccctacaatggggtaaactacactatactcgaacatatcaaatgagcaaattttgtgaggacaccctaaatcatgatagatagccacaaatttcaacaaaattcn

SEQ ID NO: 13762 - DNA, 437 bp, Glycine max
  unsure at all n locations
cctccgnaatggccaaaccatganntcggaatagtaaatccncggngganggggagtcaagagttttatntttggttaaaactagggcatgaaggtccttatctcttggctaatcaaatcttaaaggtgattcgccatcagacttaatgtagctttcctcttcttcttcctcatcagacgaggtttatccagatcctccccaagtctcatgagtcatttcttatccttggacttgattacttcttcttgtcctttggatttttcagatatggacattcagatctgaagtgtccgatttctgctctctagcatatgatgaactcttctccttaaacacctgtaagaagaattcttcacatctttacatcttctgggatgaagagagttctcttctcctcatcttactttaattcatcttagatgatcttcctgcttan

SEQ ID NO: 13763 - DNA, 319 bp, Glycine max
  unsure at all n locations
agcttatggagcttactgtaggacacgacaagtctcaaacgacaatatggccctccttaaattccgatttgatttctctgcaatgcgagcagcaaaaccaggaggaagtgcagtccttctttctaccaatgaattctaaaacttgaacaatctgccatatagatntccaaagattcaatagagatcaatattcaattcagagaatgggtaagctaaacatgatcactatatataatatataataacgtccatttgaaatggtatattttggttgttgcataatatatgataaaccttggatgccattggtatacccttt

SEQ ID NO: 13764 - DNA, 268 bp, Glycine max
  unsure at all n locations
ttcttctttctgccttatcagagctagataaagcatcacttgaatgtgatctttagttaaccacaacatcaagaaccttcttttgcactaaagaagcttcatttgaggtatcagcctacttagatgcaggtttaagttgacatgttggaacaacctcatcatccttggttgcattgaacttactagagaatgatgctngcttatcaacttcatgcattgcaccagagataatgagatcaacaacgaccttattaatcttggcgatatc

SEQ ID NO: 13765 - DNA, 325 bp, Glycine max
  unsure at all n locations
agcttattgacatccgtgactngatcttaagcgaagatgttcgcaagagagatntangagaatcttccaatcatgtntccanttcagcatttgatactgaaggcangggaagtactacccaaaatgatgcaatcctaccccgcaagggcattggctagaagactccaagtagattgggctagagatccaaggaaaggccctagggttctcatgagccttanggtagatntcgagcccatgggctaagtatgagcccgcttatctttgtaatattagatanggtattccttcgtctagccctgtattttggctattctagtagtat

SEQ ID NO: 13766 - DNA, 323 bp, Glycine max
  unsure at all n locations
agcgcgggtctgagagacgaaagttatgtggtcgttatatacgaagatgatgtnccgagtacattggatntggtacgaccatgccctcctgatttccagctgggaaattggcgagtggaggaacgccctgacatttacgcagcgagcataatgtaaacctttacggttttaaaagctctatagtagggcctaggctttagagtttttccttttgttaaagctgtgtgtcttttgtctttgaatttataatacaaggacctttcttcatctgttcctacgtctctacccattctcattcatttgcatgtttacttctttttcta

SEQ ID NO: 13767 - DNA, 378 bp, Glycine max
cctatatccgatagccgatgggtgagtcccgtccaggtagtccccaagaagactggcctcacagtgatcagacatgagaatgaggagctgattcctactgcggtgcagaacagttggagagtctgcattgactataggaggcctgaccagagcaccaaaaatgaccattttcccctgccatccattgaccagatgcttgaacgcctggcaggtaaatcccactactatttacatgatgggttttctagttatatgcaaattactattgctgctgacgatcatgaaaagaccacattcacctgccccttcggcactcatgcttataggaggatgcctctcggcctgtgcaatgccctggtacattccagcggtgcatgg

SEQ ID NO: 13768 - DNA, 285 bp, Glycine max
atccaatatcatgctcaatatgagctgccctgacatactctatatgcatgggaccatccaagaaaacctaacgtgtccacaacactttacttagaaactagcataagtgtgagtaccctgtctgcacatgcactcccccgtcccctcacgagatacctgatctaaggagttctaacaatgaatgccctaaacatattctctatgagaaatacagtcttatgacaagtatactattctgtattgaatataaacatgcacataaatgcctgatgtgatataaagatc

SEQ ID NO: 13769 - DNA, 504 bp, Glycine max
  unsure at all n locations
agggggacgggngnnnnnggtttagtcctaactgannccttgatncttacngnananctnccggnnatttgnaanggccccccggngatcctntanaggcgacttgcaggcntgctttctttactaatngngaatatgngagagaggaaatgtgcanacggtgaaggaagaggaagtaaggacactaccaatcaccaatttaaagggctccacaagagcccaaaaggtgcgaagataaatataaataaacgatatatatatatatatatatatatatatatatatatatatatatatatatatatatatatatataaaatttctctaactatgttttttcatatacatcatgccacttatcatatattcactcccatctatgctatntctctcaataggcattggatagaatttagtatccaccaaactttccctatttttgtataaaaaacacacgggcatattacagtgttttatattgtacagttctcaagagaaagcaac

SEQ ID NO: 13770 - DNA, 376 bp, Glycine max
  unsure at all n locations
atgctcggaatgtaatatgaaatgagatgccggagaaacaccctattctattaaccatgctttaggtccctgttcaatattttgttttaatgaacgggttatgacccaacacggaggctcgggggccctacacatgaaacttaaaatgtagtgtgaagtttcacgcttnncccttttttgttttgttttgtcgaggacaacgcgaggatgnagcaacatgaaaacaaatggtatgcaattttgcagatcaaaaagtttgttgaacgcatatgcatgatgatgccatgactcatggcaaatgtgaggctggaatatgataaccgacaaatgcaggatatgtccattatgatgttatgaagagatgcctatgccatgn

SEQ ID NO: 13771 - DNA, 188 bp, Glycine max
tgaggtccttcaatggtgattttcaaccatggatatgtagtggaaaataaaggagaagaggtgagaggaggcgccatccacttgggaataagccatggaaggaggagcttcaccaccaagagagtgccttgataagaagcttaaagagaaaacttcaatggaggacaagaatgagagacagagagaga

SEQ ID NO: 13772 - DNA, 399 bp, Glycine max
  unsure at all n locations
ttagcttatctcatgtcagacaccctaatatcagcagttgcaaacaatcacagtttacttggtgccaacttaaagtggaattaaacaaggaatatacttaaagtgcataaaaaagttaaataatgctcaaaataggcaatcctagcttaaatcttaccctttccttgatgtcacccaaagttggcaagtacagcttatagaattcctctctgaatgcaaccacaaacctaaataaagtttagaaaccagctagaataagacaattagaatctgtntgattttgaataaatttaagggacaacangatacatctactatattatagtatcttcacttttaaaggactaaagacgaattattgaccataattgatatattatcatttgtatatcactaact

SEQ ID NO: 13773 - DNA, 281 bp, Glycine max
  unsure at all n locations
aaacaccgccctgtgaatcatattgttgcaaaaaatcagcaacaactcttgtagcanaaatcccgaaaaggtatttatttgtaaaaaaatgaaaaagaacagaagagaaagagaaagaaatcagcaccaactcttgtagaacaaatggcagaagataatttaaaaaaaatgagaaagaagagagtagtaaccttaagttggcatcgacggaggagcccccgaagacgatcaccgtagaaatcttgatttttgatatcgaaaacattcagatgacaaaaaat

SEQ ID NO: 13774 - DNA, 235 bp, Glycine max
aaacggaaaaattaagagagaaaaattacaaattcctatataatttaaccctcaaaatatactcctaattagaagttatcagggggtgcatcttgattttgttggaccctaaataagagtctaggaagctcaacaactggaagccaaatgcgttgtccataggcttgtcgatgctatgcagaggatacgtatctttgggacacactttgttaaggatgatgtagtcagtgcaaat

SEQ ID NO: 13775 - DNA, 309 bp, Glycine max
  unsure at all n locations
gtttagaaccaatatagttcattagaccatattaccacagaccttataatagtttaccctttgacaaagggattatggcccaaaacatttatagaacatgttaaaagtatgagcattattggtattgatgatcattaagtgtaatttatcttatgccatttagtgacactctgagctcatttatgatatggttctgagtacttgttctctatgtttgcatgcatatntgtattagaataatgttaataggttttggattgaataaagacattatactgaccaattatgtactcctaactaatgggcata

SEQ ID NO: 13776 - DNA, 307 bp, Glycine max
  unsure at all n locations
gaaattattgaaaaaatttggttccgtgaagaaaatccaagccgaggcacttccgtaacgtttccgtaacgtttccgtgggtgatttcgcgaaagtttntgaccgttcttcgacgttcttcattcgttcttcatcgntcttcggtcttcaactggtaagttccctagatcgaacttttcaattcattctatgcacccttagtggtcctcattgttnttacgtgctctcatttacatttcatttattttccgtacccccttttgacgtgcttaagccatttatttaaagtcatttctcgcttaatcta

SEQ ID NO: 13777 - DNA, 193 bp, Glycine max
  unsure at all n locations
actcctctttcagaaccatgctatgtgctcgtgactggtccctctcttcccttcgcagcttgagttcactattgctaccccatagagctccgcgaaatatattccggccatactcttccttgcgagcnctcttggtctcttgttcaacggctcttgcggtaattgcattctctttccgttacccggcacactc

SEQ ID NO: 13778 - DNA, 357 bp, Glycine max
  unsure at all n locations
caaatcccttgggataaaggtagtgttgccatgttttcaaagcccgtactaaagcatacaactccttatcataagttgaatagttaaaggtaggaccacttaacttttcactaaaataagcaattggatggccttcttgcatcaacacagccccaatcccaacatttgaagcatcacactcaatttcaaaagatttttgaaagtttggcaacgcaagtatgggggcattagttagctnttgcttaagaacattgaaagcttcttcttgtttctctccccatttgaaaccaacatttttcttgagcacttcattgagaggtgctgccaatgtgctaaaatccgtctataaaaacttgc

SEQ ID NO: 13779 - DNA, 186 bp, Glycine max
tatttatgacctctccagcaacaggtacaatcccggatggaggaatcatcctaaccttagatggttgaatccttcacaacagcagcagcaacaacaacatacttattttcaaaatgctgctggcccaagcataccatacgttctttcaccatccagcagcaacaggcccaaaaacagcaaacagtt

SEQ ID NO: 13780 - DNA, 272 bp, Glycine max
  unsure at all n locations
caaatatgcatgtgaattatgaagcatcaacaacactcaagccgaagatattgagcaagcaatcagtggggcaaaacacaccataagatgatgatgatggatggctcanattctcacaaaagtgaacatatcactttcaaattgagctgtcaaaactatcatgacatgttaacgaataacaatgatttcagatcacaaaatgtgaagagacttgtatttgtagaacgattacccatttcttaaacacatcctataatttaaagaaaaatatg

SEQ ID NO: 13781 - DNA, 349 bp, Glycine max
aggccctgatcaattctggcaattgcaccatttgtaagttttgcttcttttgatgcttgaacatcattccatttttccttgcaacattcatgaacagcatgcatcatctcgtgatgagaagtatacgctacgcagatcaaaagaactctctggttgttgcgagcagtaactctcattgccttttgcacagaacatgagaacattaaattcaaccttatggccataaccttcttacatgtatctcttctttgcatacctttgattcccatccatgatgaaagcaatatgacttggcataggaaccaccgataaaatgggcaacatgcatcttcttatataacaatataaa

SEQ ID NO: 13782 - DNA, 517 bp, Glycine max
  unsure at all n locations
acacgctcgttganacttttgtatangcgaaacacagaanacnacnccngcgcgccagtcngacgggaggacaggtgaaggagannctttttttatctgcaccggcnngacacaagcgggctaataatcatagaaccgatcagaatctggaaaaccctgcttcttcacgagtcaatgaaaattgctttatattttaattctgcgtttataaaacgaaggatcaacctacactattgagttgtgtatttctgaaacattctttttctagtttagtcatgagatagtccctaaaacatctcatatcttatataattatcactctattacccgcgtggccaggattcaccctctgaacccataccataacctggttcaatgaccttttgagtgtttaaaacattgggtgagtactctggttggccttcctcataatgaattgggtaatgttgtggcgttgcttatgagttacaaaccacaatttaaccattcaggcttttactcttggttgtccaatccg

SEQ ID NO: 13783 - DNA, 390 bp, Glycine max
agctttcattataataaactaagcaataaactacttcatattttccctgtgtgtgtggttgtcgtgcaatcccttctacaacttgccatgcaacattgccttgatcaaacccaagagcaagccctatggccaatctatcaataataacagaagcaacaaaaataattagattcatgataattttcttgtaacctaaatatgaaataaagaaataattaatgatataattgatcgggtaatcatgacttaattttttaattatcaagatttatcttattaaagtaattaataagagttccaaattgaaaataatagtagttattgaatactaccaatgaggattccaacatgcttgaacttatgaaattgtattattgagacacacactct

SEQ ID NO: 13784 - DNA, 478 bp, Glycine max
  unsure at all n locations
acataatactcagtagtccttgctacaagggaaaccttcgaaaaagaaaccanactgncttacatattcgataaaaaaacagaccaaatatttttttcaggggaaagaccacaaaccaggattggagttagctgcccctctaggtcaagaagacctttggcaaaagcagctgcagacatctgtttaatatgggtcatgaaaaaatggctcacatatgatgccaaaggacaaattaggcttataaacaatgcctagacatcaaacacttccaaaatgtataaaaatgtagcaaccaataatgaaaaccacttagccttcttatgattaaggtgagcacaactttaggccatacctgcacacgaccctcatcagagctgtaaatcttgagatcatgacggtatgtactatggaggcgaagaagccctgtaccttcttcttgcatttaaaccacacaaaaatttgcctttatacatactac

SEQ ID NO: 13785 - DNA, 361 bp, Glycine max
  unsure at all n locations
agctnttttaatcagaataatccaaaaatgtcaaagaattgtgtgttgaaaaagcataacaagactttctgtgattggtttaaagatacaatctttgcagatgagaatgcttcaaaaacattaagaaagctagcagatgggcctaaaagaaatgttataacttggcaaggatacgacataaacaaatattcattntacacaaaagcataagatgacaaaagtacaatgcagaatatccgggtcaccctaagggctgaatcttaacactttgcaagtgtgaatgacgcccattcctatgttgcttccattccttactttgggttcatcgaagaaactttggagctcaactatgtgaaattta

SEQ ID NO: 13786 - DNA, 329 bp, Glycine max
  unsure at all n locations
ngagacatatagattgaatcctagtgagctctaggacttagnttaatatctgtcaactggtcatgagaattgatgaacccagtgataatctccttggacaataatttctctcgaatgaaatgataatcaatctctatgtgtttagtcttttcatgaaagactggatatgaggcaatgtgaagagctgcctgattatcacagtataacttcatttgcaccacttcacaaaattccaactcttggagaaattgtttaatccacataagttcacatgtaaccatagccatagatcgatattcagcctctgcactagatcgagcaacaacagt

SEQ ID NO: 13787 - DNA, 460 bp, Glycine max
  unsure at all n locations
gagagaatgatgacttagtactaccggcgaantcagctcgggcccgggagactctatagacgacctgcgcgcgtgcgcgcgctatgtgaggtctcatcagagacgcgggcctcgtgcggcacgtgatacgtaccccatagtcctacaagcttgagattaggagatgtggaccggagaaacgctctgcatttgtcgatcaccacgaagtggcacctaaagacatgtcacatgaggcaagaaggcttgtggagcgggtgaggggcgctactgccacaaacggtcttgtacgatcccgacgcaacccgtgcattaccagaaactgataacgagtgtttgatatatccagtgagcatcctgcgaggcgcgggaccctagggaacatgacgacaaccccccgcagcttgttgtggctgggcaacttgtattctttggaacaacacgactgtcgcgcttaagaaaa

SEQ ID NO: 13788 - DNA, 501 bp, Glycine max
  unsure at all n locations
agcgattattatactttgtanancngccgaccaagaaactcagccgtggcggcataaaagcggggtccaaggagccccacattttttgtccacngncacnccacncggcggaacttgagaagccaaccgaaatataatccaaatgagctaaaacatttatgcaccgtcaactaaaactatataacaaatcaccttgctaatataatgcacagctcaaaacactaaccgcaattctttattaactcacccccatgatatatacataattataagagaatatgactcctcgttaatagagcatctctttatcactccttacacatgacgcaaccgcgttgtgactatactagtcagaagtcaaagcgacaccgaatgatgatgacgatctatatttgacgacaaatcattcgctccttcactctctcaaaggccggagtctaccaagggtccaactaaaacactcatgacatttgatcctggcaccaatactcaggccgtacg

SEQ ID NO: 13789 - DNA, 226 bp, Glycine max
ggtggatgaaaaacaaggagagaatcttcgtgatggatacggacaaatatctgtctgaaatttctgggctgagtgacgagagagaatacttctttttggttttaaataaagggtctcctctttttctattattttatataagctatgccacatgtccccatttgaatggaactataagggcccactttctctttgattgtgacccattctcatccgccaaaattga

SEQ ID NO: 13790 - DNA, 316 bp, Glycine max
tgccgctcccgagtacgatagccggcgttttaagagcgctgagcaccagcagcatttcagagccatcaagggatggtccttccaccgagagagacgcgtccagctcaaggacgacgagtacacagattctcgagttttacgccaatgcttggcctacagaggagggcgtacgggacctccagtcatgggtaaggggccagtggattccttttgatgcagacgccctcagtgtgacatccttgaaatttctacctgagatttttggagacgatgtatttggaattattatatataatatctgtaaggattattcagc

SEQ ID NO: 13791 - DNA, 207 bp, Glycine max
atgcagcagcttttttctatgcgggagcgcctctagttcaacacccgctcagcctaagcactccccacaggaagctcccaagttccaactccgaacgcgactctaccggccggtaattccaacacgacaaggaatttcccttcgaggccgttgccggaattcaccccgctcccaatgacatacgaagatcttctaccatccctcatc

SEQ ID NO: 13792 - DNA, 267 bp, Glycine max
cctggagtaatgggttattcaatcgaatttacctgtactcgtcctccttgggattcttggctacatttccaacatacactaaaattgtctgaaaggcccttctgactctggcatcctcaccctatacagacattttaacttgatctgatgaacatttgacggataaacgaagacccaacgattgtaattatcatctctatcagaaaagtaacgtcacaattctattaccactggacaggaaaataatatacgtgagctcttatactt

SEQ ID NO: 13793 - DNA, 288 bp, Glycine max
agcttgttgtgcaccatcgcccgaccgccacctagtaccacatgtgatgggtaccccataatcctacaagcttgagatgaggaagtgttgaagggtgaaacttcctgcttttattgttgaccacagagtggtacctggagatatgtcgcgggggtcaggagaccttggggacgtcaggtggggtgctattgcccaaaaccaagcttgaccaatcccgacccaacaccggcatagtcggtcagtgagaacctgtgatgtaccttagcaagcgagctcctggcagtcaac

SEQ ID NO: 13794 - DNA, 455 bp, Glycine max
  unsure at all n locations
tctntgaganaacttccttgagaagctagagcttatctactcacacccctctcataactaagctcacctccttgagaagcttccttaagaagattcctaaagaagctagagcttagctacacatacctctctaatagctaagctcacctccttgagatgagaagctagagcttagctacacaccccctataatagctaagctcacccccatgacaaanaacatgaaaataataaaaaaaaagtccttattacaaagacaactcanaatgccccgaaatacaaggctaaaaccctatactactagaatggccaaaatacaaggcctagacgaagganaaacctattctaatatttacaaagataagcgggctcatacttagcccatgggctcgagatctaccctaaggctcatgagaaccctanggcctntccttggatctctagcccaatctact

SEQ ID NO: 13795 - DNA, 235 bp, Glycine max
tatctaacgcttttaacctatgacttggtacaaacctccttgcccggtttgaatttgttcccatgccttgctaaagtggagacaacaagctggtgccaaatcaaaacttccgatatctcatggatggatgcatgaaggaatgcatataacacagatgcaatctaagaatgcgggggtccggggaattcgtccccttcttagacacaacgtctaggggtagcaaagtgccccaacg

SEQ ID NO: 13796 - DNA, 334 bp, Glycine max
  unsure at all n locations
cggttcccaaaaatctagtgcttcaaaatgggtagtcatccttgcagcccataggtcgtactcctcaccatcaaaaactggtggtggtattatgtgtgtngtgtctgcttccattatggtttctctcaactcacagatccctcaagatgatgactctgataccaatttgttgaatattagatcaaaaacagagaagagcacatatatntatgaaggatacatagttgttattcatttgctcttggttagagttaaatatacaaaacnaaaaatccctaggcatgactaaaacagtttctagtctgataaaaaacaatatcagaactcctacaaa

SEQ ID NO: 13797 - DNA, 306 bp, Glycine max
ctccttcttccatggctaattccctagtggatggtacctcccctcttctcttctcctttgccttccgttgcatctccatggtgaaaaatcaccgttgaaggacctcattgaaactcaaagatccatcctccatagaagctccacaagcaagcttccatcaagtggtatcagagcacaagagcttcaagtaggtgctccttaaacctccattaaatttttgctttaccttctctttcattggtgtttcttcatttttctccatgtatctcctcacatgtcttgtgctaaatgtttttaacatgattc

SEQ ID NO: 13798 - DNA, 392 bp, Glycine max
  unsure at all n locations
ttaattncttgcatggcttaacatgaaatatcaaatatattgattggcgtaataaagttaatttattgtatagcttaacatgacttcttatgctagatttgtgtgtattatttggaattattgtatttcctttatgtttttgtgtcaaggttaatttcttcaattgtctcatttttattaatcagagtcgtttccccctctttaggtgcacactacaatgggaagccaaatatctattcttatgagggagcaactgtaaacgatctaaactgtaagtactaactactaatcctttntgttgtagtgattntgatactagaatgggcttaacttgttaaagtgactctagcatgtaagatgaataaanaaatagaaattgctaggtgacattc

SEQ ID NO: 13799 - DNA, 317 bp, Glycine max
agtgctacacagctgggaatgacagaaagctcgccgttcaacattctctctctaactccgattccgatccccactctatcttcgatgacgagctcaaactcgtgcgtattcactctcgtcggttaatttaattcaatgtaatttggaaaataaataatgacttgattgcggttttctatgaatggaatgaatcactatgcttggtgatatatttaagtggagaatgcgtcgaggaagaaattcaagtcttacagggcgtggcatcatagaaaatgggtgctcaacaaggggcgttcgtccatagacaacgaaatgcg

SEQ ID NO: 13800 - DNA, 413 bp, Glycine max
  unsure at all n locations
tctataagcacggaaaagaggctagaaccaccctgttatcacataatagagctaatggaaaaagaaatatccttgacaattgttgcatttctcttgaacttctaaattgtcgtatgataaattgattcactctggattacagaagtttataggctcggctttcaaacttctaatctttcctctcatcacattgatatcatctttacagacctgagtgtgtgtaaacgtnttttagatggatattntatgggctgaatgacagtgaagtatgaatcttttactgtatgtgctatactgcttttaaagcatggttttgaattatggtggagatatatttcattgaatcacatctgactacgtacctcattgaatcaactagatgtgtctacactgaaatcctcataccttttcaa

SEQ ID NO: 13801 - DNA, 613 bp, Glycine max
  unsure at all n locations
ngggcttatatggggnaaaggtttcanagnnnactnntgctganagcncatannnanaacataccagcangctgggcantngcgctcgtcatggtcagaccttctatgatagagtcgcngacggngtacncagtagcnntcgacatntcggccccgtattagtcgaggtcggtngtgnaccanatntcacatggagccccgtctgttcttacanacccgtcgtagacctggnnngaaaacctctggcgattacgccaaccttaactcgcgcttagcagtcacgatcccccttttcgccaagctgagcgtaagtagcgatagaggggcccgcaccgagtcgcccttcccaacagttgcgcagcctgaatggcgaatggcgcctgatgcggtattttctccttacgcatctgtgcggtatttcacaccgcatatggtgcactctcagtacaatctgctctgatgccgcatangtaagccagccccgacacccagccacacccgctgacgcgaacctcttgtggcggaaacaatatatacttagtaaataagacggatcggaacgtctatacgtagggtccccgcctcccgtctgctatgcacggtgagaaaaccg

SEQ ID NO: 13802 - DNA, 341 bp, Glycine max
  unsure at all n locations
agctntatctttacactaagtaagttgccaactcaattgcgtgcaagtcaacctttaccttcatctgttttgcaggttacaggctgcacactttgtggtggagctcatgggtcagcttgtgtattcccactgacgaaacatttcatgaagttaattacatgggaaaccagcctagacaaaattttaatgcacgtggattttctggatttcaacatggccaatcttaccagcaatagaatcaatggagaactcaccctggtaatcaattcaataaagaccacggtgggtacctgacatgccacagcaacaatggcctaacttatctgagagaacaacaaaac

SEQ ID NO: 13803 - DNA, 483 bp, Glycine max
  unsure at all n locations
gacactataatactcaagcttaaattgaattaaacgttaataaatgctggaatcttattctcatatatgtgtaatcgattacacagtgcaaattttgaattcaaattttaatagctgttgcaaatcagttttggccactggtaatcaattacatcctctggtaatcgattaccagagattaaatttcttgtaaaagactttttaacttaaatttcttggccaaaccttttgctacttcaattggaattcccttcctatttaatataccctttctaagactctaaagactgtcttgatcattcatcttgaataaagctttgagacgcatgtgatcctttggcatcatcaaaacatcagcttgatcctttgtctacacatgtgatcctttggcatcatcaaaacatcagcttgatcctttgtctacaatctcccnctttntgatgatgacaatcctganatcaagacaagctatatgcaagatga

SEQ ID NO: 13804 - DNA, 336 bp, Glycine max
agctttatttctttaatatagaacttatatcctaatgtcacattctatcagagtgttgtgttcctgtgtcctctagcatgaggttgttcatagtcatccacctattcatctgctcccccgaacacatagttcaagatcatcacaggatccaaacacaaacaacacgcaaggagtgagttatcacattcctaacctatgaagagaaacaagataacatgtacgtgtaaatatcatataaaaagatacaacttactttagcatcactcacgttatttcaccactttgtcgcataatattaccctcgcacaccacacatttcatttattttcacaacat

SEQ ID NO: 13805 - DNA, 396 bp, Glycine max
gacacataatactcagcttatataacctttaccatgatagagataactggtggattgttgcatcaattgtagtggttctctgcctattatgggttggcatagaggatgtaagctttcatagcaaagggaccacactcaatcttgcaactcttcctgttgctgttggtctttatggttactgctactttggacatgctgtgttcccaaacatttatacatccatgacaaatccaaaccaatttccctggaatcctcttagcatggtaaatgacttttagctataatctaactcagcttccactagtccactcactaaatattaaatctcctcaagtcctgtacaaattgcaatttacaaatatagtcaaaagatataattatttggcttacgtcaac

SEQ ID NO: 13806 - DNA, 211 bp, Glycine max
  unsure at all n locations
gctgtgcttgtcaaataatngngaaagacaagtgaaagacccgataaatacctacaaaatagttcacgggaaggtctcacaactattctcctcttgcgatgaatgatacaagtagaaatccttaataaagaggtgtacatcatagagatattccaagtctaacatccaccaactttgaaacaaaactcaagtgagatgaaaaaatattatg

SEQ ID NO: 13807 - DNA, 325 bp, Glycine max
tgccagtcactgaggaggcgtgtggaaatcaaatgactgaactacacgagtccaagttaaaggaggcaaatggactagaacatttgatggtaaagccttaaaggctttagatggagtgtgctcatagtcaaaatgcgttcagatggatgcttcaatagatatggtttcctttaccactcgttcagtgaataagactttagagaacggagaaagcggtgtatgattaccgaggatgaaggacagagggaaacactatgcatccatcaatgggtcccttgtagttttccttctgaacctatcaaggtgttataaacatggaggtgga

SEQ ID NO: 13808 - DNA, 331 bp, Glycine max
aataatatttttattcctaaatactagaaacatagactctttcaaatatattaattagacatttatagaagaaacaaatagatgcattttttaaaatgattttccataattataaatgtacacttacacattacagatatcttattattatctttaattcctgtgtagcgcactttgtactatcacattatattacctattatacatacacttctctttcttttttctgtttgggatcctaagtgtgaactaagatgacatgtagtatttttcagtatttctgtcataattgtaagtggaccgaatttttctacatggatttaaatacact

SEQ ID NO: 13809 - DNA, 290 bp, Glycine max
cacgaagataagtgcgatgtatatatttttttaattcttaatatatctattacttactaccagtattttttttttctaagaaaaaaaaaacttaagatatccacaggccatgtacatcgtgtcacaataggatgcttcatgggtatcattcaatttcatctaattatattgggtgagattataagtattcggattaatttccacacaaccgaattaagattcgattataattaagttggtaacgagtcttatgtctaatattgtacctaatctaatccgtatcatataat

SEQ ID NO: 13810 - DNA, 260 bp, Glycine max
  unsure at all n locations
gctttatataagccnactccctttccaaatctgattcaggcttaaataggtggctttttgttcgtgctcgtacacttagcgcaattctgaaccgcttagtgcgcattaatgaatnttggcttagcgcggattttgttgctcatcggatggactgaagtggtgcacttaactggaagacccttcgctcaatgaacatggacaaatcatgcttcttccagattcttactaaaacttagccgacgaaacatgcgctcaacgga

SEQ ID NO: 13811 - DNA, 303 bp, Glycine max
  unsure at all n locations
tcatgatgatgaatcaagattgatgcaagtggtnttgattangattacnaagatgatgacaaaaagcccgagagaatgagttcaagattgagtcacgaacacttcaagaatcaagagaaatttgatttcaagtttgaagaatcaagaatcaagaataatcaagttgaagattcaagaatcaagaaaagactcgataaagatgactactaaaaagtttttcaaaacattgagtagcacatgattttttcacacaatcttttaccaaagactttgtactctctggtaatcgattaccagagtatt

SEQ ID NO: 13812 - DNA, 274 bp, Glycine max
  unsure at all n locations
agcttgcntttactatcgtaagtcattntcaactaactattagaattatatttcaatattttgtgaatggcatatacaactgtgtgttttctgtgcaggattcctttgaggagaaagcgacacagggatcctttgtcccccatggacgtcaggatgttctcaccgctgttattggatgtccagagcaccctgtacatgtncgtgctgctggagccagtgtcaccatcaagcaatactctggatctgctccacggatgtcccgcagctcttcctc

SEQ ID NO: 13813 - DNA, 413 bp, Glycine max
  unsure at all n locations
ntagttatgattaagacctcaatcgacaattagtcgcanattctacccaatgggttgaagtttgtggagatactatagggggcatcaaatgtcttaattatggtgattaccaatttaagggggaaaaaaatctaataacaatataatgccaaaagaaaaaatataaaaaaaataaaaaataacaaagaanagaaagtaaaaaaaaaaaagaaaggaaaagataaaaaggaaaaaataataaataaatgttaaaagaaaaaataatgtaaaaagtataaaaaaacatgtatttataatagaaaacatatgagctattagattagttgcacatatttgttttaatgttgaaagtatatttttaaaattgaaagtgggatatatnttttaaaattgaaagtaaaatgcctttttag

SEQ ID NO: 13814 - DNA, 331 bp, Glycine max
  unsure at all n locations
ctggtccgcaactagttgctctaactaagttcatttgcattatgggcaaaaaacttatttagttaaagatgtatcattaattaaccataaagatatgaaatagaagcgttgtaattaataatgaattntgcaatataattgaagatgaatattgaaaaagatgatcacatgtatgcatggacggattcaaggggatcgagcgtatacacagaccagtaaaaaaaaaaggcgtatacacacacgtatactttttattttgtttacatagacccccatatactatgttactaccacgtagtaatattggtgtattataatataacaatcatat

SEQ ID NO: 13815 - DNA, 343 bp, Glycine max
  unsure at all n locations
ttatcaaaccactgctgtttcacactttcacccccaaaaatatttgagtactttggcatgagtcaacatgcatctgaccttctctgtagcttgaggccgggcgtgaatatcatgcatttgagtaagagttttcgtataccagtttataactatcagcattttacttngaaaaattgtttattattggaatcaaatgatacgtattacgatcttctgtttttctgttatataaagataattcaatntgaaattgctttgaagcatctatttataaattctaaaatgtggactgatatagtgtcatttcaacattcttattcagccacattaacacttattattt

SEQ ID NO: 13816 - DNA, 346 bp, Glycine max
  unsure at all n locations
ctagagcggttcccttatgttatcaaacataaaaagggataaggtaatattgtagccgatgctctttctcggcgtcatgcattactttctatgcttgaaacanaattgattgggcttgaatgtttgaaaagcatgtatgaaaatgatgaaacttttggagaaattttttaaaatagtgaaaaatattcagaaaatggtgtctttatacatgaaggctttcttttcaaagaaaacaaattgtgtgtgcgtaaagtctactacaaatttgttgtttgtgaacacatgaagaagttaaaggggcattttgggtccaaagactctaaaacattaaaaacattttatggct

SEQ ID NO: 13817 - DNA, 225 bp, Glycine max
  unsure at all n locations
atattatgcacccgaatcggatatccttgtgaagagttatgactatatgaatnttccgagagtttccgatgtttaatttcgagcgtatcgatatattataagctcgaatcggacatccgtgtgaaaatntatgaccatttgaatttctcaagagcttccgttgtcaatatccagcttctcgatatgtgatttgcctgaatcggacatccgtgtgaaatgtttacc

SEQ ID NO: 13818 - DNA, 341 bp, Glycine max
  unsure at all n locations
taattaacaagtgggtggataatggccacccataccctttttagtagtatttttgcgtaattattgtatatctgctatacttttaaatnttgtttgtgctaatttgttgaataaattattttttagactagaagtatagtctttatacttgttgtatttgatctttgcttggttatgtgttattttgaaggaagtactttggagagatgatttgatgcgctatcattggagcctgangaatttgaaatctccgaagcactagctcgcttaatgactaaaattttaaacctggaccttatatttgtgctcgcttaacgagcaaccctgagagtctggttgtt

SEQ ID NO: 13819 - DNA, 331 bp, Glycine max
ctctcagccactaatgatagccgccgatgatcccattactgcttcccctaagctctttgtccttcttttgtaccaccccccatgccttgcggaccttctgaagtgtctccacgttggtcttattgaagccttatgaaatgacaggcgcgagcccatcctctagtggcgcccctctcatagggtagccaagttgtcttattgcaagaatgggattgtagctgatgcaacccctcgtcaccatcaagggaacatttggaaatcctccgcatgaaataagaactccgattcttccttccttccatcgagggaaccagttgacagatgctccttc

SEQ ID NO: 13820 - DNA, 369 bp, Glycine max
  unsure at all n locations
aaaaaagaaatgaaaaaaaggaaaataagagaaagaacaaaaatcaaacaaaaaaaaaaaagggggtgacctgaaacccanaanananngggganaaaaanaaggagaaganatttttgaaaaaaaaaaagggggggggaaagaaaaaggaaanaaagaaaaagaaaaaagaaaaggaagaaaaaaaaaaaaaaggaaaaaaaaagagggaaaagaaaaaagagagaaaaagaaagaaaaaaaaaagagaaaaagaaaagggaaaaaaaagagaggaaaaaaagaaaaagaagaaaaaagagaagaaaagagaaaagaaaaaggaggaagaagaggaaagaagaaagagaaaaaagaagagaaaaaaaa

SEQ ID NO: 13821 - DNA, 310 bp, Glycine max
  unsure at all n locations
caggcccggagggaattatgatgcttactgacggtccccataattccgaagagtttgaaggaaataaatgaaataatgggggagacgttatcagcacaagacgaggaggagattctagcacaatctgatgacttggaaatccacgnacatggattgccatgtttttctcaattttcgatctgttctactcaccccaatataaaaatcatattgaaactgttccaattgacctgttgcctaatcatagtatactatggaaaggacattcattattcctcaatttaacccctctttacatactgttcctctg

SEQ ID NO: 13822 - DNA, 387 bp, Glycine max
agcttgtaattattgaatcatcaaccatgctcgtcccagcagactacgcattctttgtagggcccatttcattctcgggcccatactgtaaacccagcatcgttttccaggtaacatatcaaacccaaagagagaaagtagcaggaataaacagagagagaaagagagaaaataacaggaaaaaaatgaaaagaaactaaataacatgatagcccacaagtgtgttcataagccaaatgtgatttggcatcaaaaaataacgtcaaccttttgtcattcaagtaagacagaacacatgtctgtcatttcccatgaatcatttacatttagttaaattttaaatatcaataaaatatttaagaaatattatagtttatttaataaata

SEQ ID NO: 13823 - DNA, 281 bp, Glycine max
  unsure at all n locations
ctcagctagatgtcatgcttggagtgagtagcacctgcctcnatactcttaaaccttcaccacaaccctgtgctccaacacctccacctactcaaactccaccaccaccgcataaaaaaattcaaaaaagaagaggaagtatttcaaacaatggatcaacataaataggagacaggaagggaaaaccaagtaaccaacttatgcctaaagaaaaaccttagtgagactatcaccatggtcctgataggggataagatatctcaaatggggggggggggggg

SEQ ID NO: 13824 - DNA, 207 bp, Glycine max
  unsure at all n locations
agcttgtagtangtctagacatganacatgncagaggggggtttggttcaaggataaaaatggatgccccacattatttccatgacacacatgctaaaatgatgatttggaaatnttatgcaaaactggtcatgcatgcacctatgtggacactcaagcgtcatatatttatggtcatgtgatgctagggctcaagattcatttcct

SEQ ID NO: 13825 - DNA, 367 bp, Glycine max
gacacataatactcagcttccttgagaagcttcttgagaagcgtgacttgaaagtttttatcttactacacacacccttctaataactaagctcacctccttgagaagcttccttgagaatattcctagagaagctagagcttagctacacaccccctataatagctgatcgaggccgtatctgaatcaaataaacattaaaaaaatgtagtatctaggaagtgatcctaagtcgtctcccaacgagcaatggtcaaccaaagttcataatagatagtgataaaacagtaacgaattgggggggttgtctgttttgtgtaattatacagcgagcaaatgttaattagaaaataacataatctaaaca

SEQ ID NO: 13826 - DNA, 212 bp, Glycine max
  unsure at all n locations
agcatttcttgtttctattncatgacccaggcgagctggatgcttgcctgtgcgagcttatgtctaataaaatccaaaaaaagacccttttgcccccttacttggtatctttttgtattcctgatcaagacactaagngattccttgctttgtaccggaattcgggtacaacatcgtaatttgactagcgagaatcaaaatatcaatgaatg

SEQ ID NO: 13827 - DNA, 303 bp, Glycine max
gtcctgctccaatgaataaatctttataagtaaaacatgtatgtttattctaactcaccccatcttggagcttgtcctctacagcagtggcaccaagaagaattaggttcttctcaatcttatctgatacttcctcaatcattatatcctgatcagcactgactacattcttggccctagagaatatactatcaaactccttgtattcttctgcatcaaattcacgataagccagtataaagggtctcagacccgcatcaccatactcatgcacatgccccatgggtttctcttccaactccc

SEQ ID NO: 13828 - DNA, 170 bp, Glycine max
agcttttttttatattatgcacatgaatcggacctgcgagtgacaagatatggccatttgaatttttcgagagcttccgctgctcaataacgagcgtctcgatatactatactcctgaatcggacctccgagtgaaaagttaagaccatttgaatatctcgagagcttcc

SEQ ID NO: 13829 - DNA, 241 bp, Glycine max
  unsure at all n locations
ggcgatcagaatngccatgccttggattatagggttgaaccaagctcatgcttttacaaaaaggttcatcaagtcaagttgaaatatggaagtaaccgtcttgcanaattggggcaaaagatgaatcgagtcacatcactgcttcatctactgccaaacatatttaggattgttgatgtccttgttactttcagtttcactttgacaaagatgtcatggaccatgttgaaaatctaaactg

SEQ ID NO: 13830 - DNA, 228 bp, Glycine max
agctttatctacatgggctatacgaaacattggataaatgttgcaaaaatatattaataatatgtattcataattttgcaatatttattctaatgctgttaaaagtttttaataacacttaataatttatattaagtgttagattaaaaaaaattactaaagatcacatgtattataatgaccacaactagcatacgtggaaactacggagaacaaagaaaatgttgc

SEQ ID NO: 13831 - DNA, 318 bp, Glycine max
  unsure at all n locations
tgcatttgagaagacacaacaagcactaggtgaacatgttcctatcctacaactaggagtngcttctttaccttgacttgtggaagatatttgtttctcatatataggatttaacaaccttcttgtcctgcatttcattagttgtagcaatggtgcttattgtttgaaagttaactatcaccttgaggacaaggtgcttttagatggcataggggatgataggaaaggaaccatggcccaataagatactactgtggacattaataaaaggcccanaaagaagatcactccaccaaagcatctagaatattatgtgtg

SEQ ID NO: 13832 - DNA, 319 bp, Glycine max
  unsure at all n locations
agcttcttantcgcaagttaatttttaagacttacggattaagttgatctgtaagtcttttacggatcaacttgatccacaagcttcttacgaataaagttgatccgtaaagagagaaagaagaaagaggtaatgttgccatttttaaagaagactgggtgcacctagctacactccacataataatgcagcaaccagcaatacaacagtgcactctgactcactataagtgatgcactcactgcactcctcgctggctcattgcgtattaaccagaagcatcaatggtcaccaccgagccggagcaccggccgcatga

SEQ ID NO: 13833 - DNA, 258 bp, Glycine max
  unsure at all n locations
tgcaactttntgttgtcaaaatagcttcctaatggtagggtggtgagagttacttgtcaaaccaaagcaaggtatgttattgcttgaatagcccttgtaacacaattatgtcatgtatccaattgctatggctgatcaaggagatctttatgaaagggatggaattgttttggataggagcaaaagggataaaagcagagtttcaaacccattaatgaaatgggcactactaactacaacttctgaggaataaatgca

SEQ ID NO: 13834 - DNA, 321 bp, Glycine max
  unsure at all n locations
tccttccattccaaggtggatggaggggtctggtggaactaaatggtcctaatcaatcacctataattcattaatctagatttgaaacttaacatgtaacttgtaattgtaagagctatatctccaaagtagtttcacacccgatgtggcgatgtccttatctcaagaagacacatgtccttatctcaagaagacacatcattctatattggaatttcataatttctatttaaatttctgctttaactgcataactctaatntatcatcactacttttcaattttctctatttctctacatatnntacttggtaatattca

SEQ ID NO: 13835 - DNA, 381 bp, Glycine max
  unsure at all n locations
caaggagntttaccattgcatttttatggcttattattntaatgacatcttanattagttttaaatttaaaattagacaaaaatatatgtgcaactatattgttataaattagtagtcatttttagtggacaaggatgagaatgagctgaacatatgagcacaaatttaaccctttctaaaaatggcagttgtccacttgtgtttggttaaaatgtaatttaatcaattntgtcattcagcatcatcttatctaagagaaatataatgatagaaaaaaaatcttatctcatagaaagaaaatattagaaaaaatacatttcactcttagactctctatcaatctaatgtagctccatgtagagcttgtaggccttggatct

SEQ ID NO: 13836 - DNA, 333 bp, Glycine max
ctataaatagggggagaagtgaagaagaaaagggttcagcctctaaggcacttctctctttctcgaaattgctgaggaaaattattttcgtgaagaaaatccaagccgaggcgcttccgtaacgtttctgtaacgtttccatgagtaattacgcgaagattctcgaccgttcttcaagattcatcgttcgttctgcgttttcttcagtcttcaacgggtaagtacctcaaaccaagcttttcaattcattctatgtacccgtggtggtccacattttgtttcatgtatttttattctcattttcatttactttttataccccccttttgacgt

SEQ ID NO: 13837 - DNA, 373 bp, Glycine max
  unsure at all n locations
gtatatgtaaatcaaccccctggatttgaaaactcagacaagactaatcatgattntagattaaaaaaggctntatatggctcanagcaatatagatactactcttttcataaagagaaaattacatgatattttattggttcaaatttatgttgatgatattatttttggatctactaatgaattattgtgcatggaattctctcatgacatgcaaagtgagtntgaaatgttaatgatgggagaacttaatttctttcttggattacaaattanacaaaccaagactggaattnntgtcaatcaatccaagtactgcanagagttaattcacatattcngaatggaaatgctancacatggctacccaatg

SEQ ID NO: 13838 - DNA, 237 bp, Glycine max
tggcttgcttgtgtattagttaattaggtagattaaatgggcctaatcaaggcccatccctttcttttgagtagtaaatgtatatattagtggaagttagttatttagtgagttagttacttcattttgtccaaaaacagatttagttacttgttgtgcaagttttaaaaaaattcttttatcttttttttccctctcaatcattcttcatttttcttcctcttttcgcttcttctc

SEQ ID NO: 13839 - DNA, 301 bp, Glycine max
  unsure at all n locations
cctaggatcttcttcatcaatggattcctttgcttcttggaagataaatggcngcggaatggagataggaagagagagaggagacgccacttcaaagagaagatgagtctagaagaagctcaccaccataggaggccatggataagagcttggaggaagaacgagatgaatgaggggagagggagagaagagcacgcaaatttgtgctctaaatgagcctctgaatctgaagtttaatatctcaatgatcaaagttgaaaaaaatgcacatacatgacctctattatagcctaagtgtcca

SEQ ID NO: 13840 - DNA, 198 bp, Glycine max
  unsure at all n locations
ctcctaaagcatgtcatcctctgccccattaggaccctatagctntgggagccaagtgatgccttgcgttctagacttcaaccatcggtgatagacgcctatgacaccattgctacttgccgcctactctatatcttttatttccactctattccacgcttgatggatcctctaaagtatcttcgcattagcttcatc

SEQ ID NO: 13841 - DNA, 301 bp, Glycine max
  unsure at all n locations
tggaatttttgattcgtgcccctgcaattcttgaagcagagctagaagttcaagtgttggctgattatcctataccttctagcagattgttgagttctgattcctctattaaagaccaaatggttagttaataacatagttgtctataggaagctttcagctttccttggtatgaatataagataaaaaaaaataagagtgctatgtgtgtgattttctaacttttgactaaattggaaatacgtgactgactcannatttagagtgtgatcatttctcaattctagttttaagttgctag

SEQ ID NO: 13842 - DNA, 132 bp, Glycine max
atgtctactatcatcgagataatctctttctctataatcggaggcgctacttgagctgccaagatctatccatctttgggcgtatcctttgaaagatccgtgccctcttttgcacatgttctgtagttgcat

SEQ ID NO: 13843 - DNA, 506 bp, Glycine max
  unsure at all n locations
aggtgatggggnnntnanncccctttgcacttccgagactccactaggantctncangcctctcacagaagggagacctaanttatgagaggggagagcgtttttttcttctcgctcctcaaggaagtnttctcaaagaggctcttcaaggaggttttctcacgaaagcttctcagggaagctacctactctataaatagaaacatgtgtaacacttgttgtaacttgttggaccttgtggcctcaataatcttaagagggagtggctcacaatatctaagaagcacaacaatcaatttaacaatgttctttaacatgcgcgacacaattgattgaacaccctaatcagattagggaagagagaatgcaaacactgtttatactgggttcggcacttcctggcctacatccagtcttctgaacccacttgagattacactttcttcgtaaaccattacaatctgaacccaccggacaccatccttgggtttatgctttaaaagaag

SEQ ID NO: 13844 - DNA, 213 bp, Glycine max
acttctattcaagctcatcttgggaggaagctccttctttcatggcttattccctagtggatggcgcctcctctcacctcttatcctttgtcttccgctgcatctccatggtggaaaaccaccattaaaggacctcattgaagctcaaagatccagcctccatagaagctccacaagcaagcttccatcaatgcacacacttgcatttatttg

SEQ ID NO: 13845 - DNA, 251 bp, Glycine max
  unsure at all n locations
tctagccaaatggactgaccttgaattaatgcctntgattgcctctttgagccttgtttccctttccttgttttgaatctcactacaagccttaagtgaaaaaccatgatatcaccatatccttaaggaattttggagctttggaattgttttgggaataagtgtggggggggtttttgtctcattggataacattttttgcaggctatacttcatgatgtattctgggccatacttgattgtcataccct

SEQ ID NO: 13846 - DNA, 307 bp, Glycine max
  unsure at all n locations
agctttaattttgaattaaaatgttcagaaactgctcgtaatcgattaccaaatatgtgtaatcgattacatagtgcaaattttgaattcaaattntaatagctgttgtaaatcagttttggtcactggtaatcgattacatcctctggtaatcaattaccagagagtaaatctcttgaataaagctctttaacttaaatttcttggacaagccttttgctactttaaataggaattcccttcctatttaatatacccttcctaagactctagaaactgtcttgatcatccatcctcgatatcttta

SEQ ID NO: 13847 - DNA, 411 bp, Glycine max
  unsure at all n locations
tagcgtaagctntcgcactaagcgtgtgtgtcatgggtcttttttcgctaagcgtgtgttgcacgctgagcgagaatgcgcgcaaggcacgtcttgcatgttaagcgggctttccaattctttcatttttttcttcaaggttttttcttccagtttttgcatcaatttttcctctaaagcacttgaaatctttttcttttaaatttttctaatcaaaaatagcaaagatgttaatttcttcattatttcattaaaaacaataataaagtaaaaaattacgcccacttattaatccaaattgactatcacattagcttatatttcgcaactatcanagggaaagagaattagcaaaaatggcaacgaaaatggcagttttctttacaggtattccaatttaatcttaataaa

SEQ ID NO: 13848 - DNA, 204 bp, Glycine max
  unsure at all n locations
agctttgattcctattanacaacaataactttgtactcgaatgtctgattgagtcccgtaacatatcgagacgctcgaaattgaatgttgaacgtttgagctaattcaaacgacaataacatttttctcggatgtctggctgagctccgtttcatatcgagacactcgaaattgaatgtggaacctcttaccttgattaaacga

SEQ ID NO: 13849 - DNA, 237 bp, Glycine max
tctacattcaatttcgagcgtatagatgtgtgacgggtcgtaatgagacatcccagcaaaaagttatggagcggttgtataggctgacatcttcaacaattaatatccagcgtctcgatatgttacggtactcaatcaaacatccgagtaaaaagttattgtcgtttgaattaactcaaagcttgaacattctatttcgagcgtctcgatatatgacgagcctcactcagacatccg

SEQ ID NO: 13850 - DNA, 388 bp, Glycine max
  unsure at all n locations
cttgttgtgattttcacnagnggcaaccaacgggaggcggaacctcggtatgaagaacagacaccccacgaagcctcaaacccgcttctcggtgtgtggatcaagcatatcaaggattgccttcaccttgtctcagatcacctctacctctttctggcttattataaaaccttacaacatttcccaacttgagcccagaagtgcacttttgcgaattctacccttattcgatacgtacacataacctctcttataagtttacgcaatgtcgattaagcgtttcctcctgttttattgaacctcgcgaattttcttaattacataacccttgcatctttttaggagtactgtgggaatactttcatctagaccgtcttgaagtgccccc

SEQ ID NO: 13851 - DNA, 103 bp, Glycine max
ccctttacccaagcccagcctcagcccaacaactcagacggtatgcccagactcatagcatttctcctctctacgagataacccacatgccaaacgccgtaac

SEQ ID NO: 13852 - DNA, 155 bp, Glycine max
agctcttgcgtaattaactaaatgtcaacatcaaaatgacctacatgtgataataggccaacatgatctcagaatcagggtaagggtaatccctaaattggctccattttaattacaatgtgacaatcaatccccttgtcttatttaagtggaat

SEQ ID NO: 13853 - DNA, 299 bp, Glycine max
  unsure at all n locations
tatcttgatgaggatgtgccatatgttcnttangactggactaatacattngctgcccaagtttcatggtcttgcaggtgaagatcctcataagcatcttaaggagttccatattgtctgttccaccatgaaaccccctgatgtccaggaagatcatatctttctaaaggcttttcctcattctctggagggagtggcgaaagattggttgtactaccttgctcccaagtccattactagctgggatgaccttaagagggtgttcttggagaaattcttccttgcatctangaccactt

SEQ ID NO: 13854 - DNA, 158 bp, Glycine max
agcttgttttctgattaagatcgcgactttggcggacggtggagatgggttctgggacacagctgctagctatttgctcttggctgcacttgacgtgcttcaaacactattgtggtagcgtagcgagtgtgaaacgacatgctactgtgcaaaggaga

SEQ ID NO: 13855 - DNA, 335 bp, Glycine max
  unsure at all n locations
taagtattctaaagatgtgcgtgacgcgagcaaagttctctttntcgtcgatctggttcaaaccagagacagtgttgttgaagatgataaaaagctcgagcagctactttatgaaaccatctttagggttcttaacaaaatacgtagagacatcgttgaagtgatataccttggtcggacacaacaatggactaaagtccttatgatcatcctctgatggctaatctgtatatttggaagtggatgcactcaatgagtcaaaccacatagcatgactccatgaagggtatgcatcattgttgcccaactccctcctaaatctatagttactaaac

SEQ ID NO: 13856 - DNA, 352 bp, Glycine max
  unsure at all n locations
cttcgtcaagtaagtgacagcttgatattgattttttaggccacattggtgcaagttgctgccactgtacctcttaactgttcaagtcaacaagatggcttaagggtgtggttggataaacaacttaattaagtgcttattagataagtacttatcatgtaagcccttatgtataagctatntctataataaaagtagaaataggattaaactctctcaatataagttgttagttattttcatgaggtatcatggagattggagatcttatngataagctgaaaacaacttatggacaaattataagctatgtccataagctctcccaaacacttacaagttcttatgtgac

SEQ ID NO: 13857 - DNA, 244 bp, Glycine max
  unsure at all n locations
aaatgaagcaatgtatagaagtaaatataaagaaatgaanaacggacctatacttgttgggaatggttttgatcatgacagtagttctagtatctttgggaccagattctacaatggcaccctctttgattagaaacctagtttcttgtntcttcgcttgttttcccttccagtgcctacttctangtacttgttgttgttgttggtgctgctgctgctgcttggtggtggttcctactactac

SEQ ID NO: 13858 - DNA, 305 bp, Glycine max
tcgataatgaccaaccggtgggcaattaaaataaagagttttagctatagaaacttttttctaactttagaacttttcttttaactcctgtatgatgatgcatgatgcatatatgaaatgatatagactaagatgcaacacacaatacaacaatcaatacaaatgccactcaagagagttgggcatgtaaaagaaaaaactttttgtagctcttcttgaagcttcaaggctaagtcttcatgtcgctccccctatctctaatagtaaccgttggaaagaagccaacaactagaatgattgttgtc

SEQ ID NO: 13859 - DNA, 353 bp, Glycine max
  unsure at all n locations
acattggtatgggtggtgatcttggtggtggcatcttantacatttgatatctgtgttgcattgctcatcatcatagtttgtgtgaagaaaagtttctaagttagaaaaatttcttcagaggcaaacactctctgttttaatcgattacatcctcactgtgattgattacaacaagttgtctgaagtttgtagagttgagtctcatattggtttaatcgattaccgatatcttgtaatcgattactttgttgtttgagaccatgaatgatctattcacgagtctctgctttaatcaattaccaagtggattaatcgatcacttctctctcatttagatgtcagacgtgaacaa

SEQ ID NO: 13860 - DNA, 359 bp, Glycine max
agtatcgatgaggtatacttaacagaaaatacttataacattacaaaataaccataaattgggagagttggatacatatttatacaaggttttatacacaaaaataagtcattttcaccgactaacaactcacccaaatttacagttttgcttgtcctcaagcaaaaagagaacaactcacttgttctcaagtgacaatgacatacagtgactatgtacaaaggtgtatgctacacagttactgatggcatgataagagaatgcgagtaaatgccctcatcacttgtgtttaataaggtatgcagttatgcagagagaaaaatgaaatggttacttgacagatagatgaaagtatgcat

SEQ ID NO: 13861 - DNA, 107 bp, Glycine max
  unsure at all n locations
ctatgtagncaatacacatggggcgggtcccattagactttttcaccattaccacgtttgccaaccacttggtatactacacctctctaatgaaagcaacacttagt

SEQ ID NO: 13862 - DNA, 322 bp, Glycine max
cacaagatactcagcttatgtcatagctgctgagagtagaggcgttaacaatttctttctcccctgctttgacctagacaggaattagtttacagtaaggttcaaacataacttgatatttagattaatacgcacttgccatcaagataaggaaacatacactctagctaatatgtatattccttgtcaaagcattcatactgtgccattaatgaacaggttcctcctgtatgtcgcctttcttgagattatggatcaaacatatgaacccctctaataatctactctctatgatataagaggtttatgccatacccaaata

SEQ ID NO: 13863 - DNA, 323 bp, Glycine max
agctttatttgttgaatcaagttgattcaagtcgttgtgataatgacaaagatgatgacaaatagcccacagaatgatttcaagattgagtcaacaagttcaagatcaagtttcatgagaagaaatcaagaagattcaagaatcaagagaagtttgattttaagattcaagagaagatgaattcatgtttcaagagaagaaatcaagaagacttcacaagggaaatattgaatagaattttcaaaacccaacatagcacagttttggttttccaaagagtttttctcacaatgttctaagctacatgagtttttactctctcg

SEQ ID NO: 13864 - DNA, 331 bp, Glycine max
  unsure at all n locations
ccctctggaaatgattnctatacaaaagtagagtcgataatgctactaacacggagtgatgatcaatcgatcatgggcctagcacctattcgtaccagcccctaagcttggacaaagaaaatggtatcatgcaacaagtgtgaaagaatattacaagatgtttgcattacccttcgcctgcccctagtgcttatctcanattggtgtggtgttgaccatcactcaactcttcatccatcttccgatttctaggatcctggataacaagatgcaaatgcctgcatgattatgatcggatgttgaatgtgataattaaacaagcgttatcatg

SEQ ID NO: 13865 - DNA, 242 bp, Glycine max
aaaaaaaaaagggggaaaaaaaaaaaataaaagagagaaaaagaaaagaaaaaaagaaaaaagaaaaaaaaaagaagagaaaaaaaaaaaaagaaaaaaaagaaaaaaaaaagaaaaaagaaaaaaaaaaaggaaaaaataataagaagaaaaaaaaaaaaaaaaaagggaaagaaaaagaaaaaaagaaaataaaaaaaaaataaaaaaaaaaaaagaaaaaaaaaaaaaaaaagaaaaaa

SEQ ID NO: 13866 - DNA, 184 bp, Glycine max
gtcattgtagtcaaaatcaagattctacttaggatcaaaaggttaaggaactataaattgtgtacttaatgacagctatcaggtcgattcgcgagatcctacttataagatatagtggtgcttaaagatattcatatgcatagtgaagagcattaatccgcgccaattatcttatgataactac

SEQ ID NO: 13867 - DNA, 319 bp, Glycine max
gctcgaaaagcgcgagagaacgagctgagttttctgcgtcttctagaaaacgcgatgaactcgctaagagagaatgctaagctaagcgagttcatcaatactcattgtatataagctgtatctgaagaactcgccaagcgcacttactgcgctaagcgagttcatcctttgaggataaacattcatcctctagctgaactacctatggctgagcaagggagaatcgctaagcctaagtaacttaaccaaatttcgtctcttaagccttgcgctaagccgactgtagctgagctagacgcatttcatcactggaaacttt

SEQ ID NO: 13868 - DNA, 83 bp, Glycine max
atgatgccgagtacaacaatgaagtcaatgtgaacgggagttcctagcataactgagggcatggatgaggatcataagactat

SEQ ID NO: 13869 - DNA, 332 bp, Glycine max
  unsure at all n locations
taccagaagcctctctcctccagatcgcgtatgctnttttctctctgatccactgcacaataactcgccgattaaacacatacacaacacagctatctcatgtgcctaggactcagaaaccagcttccaacaactctcaaactccccacaccggtgccaccccatcacacacccatcagaccctactccttctacccatctcccatcatcacaaacatcagcgtgcttaaaagaaacatctatatgacccatcagaatctccttcaaagcatgccgccccttaccatctgttcacccccaagccataatctgttcatcagcacatgcagaat

SEQ ID NO: 13870 - DNA, 456 bp, Glycine max
  unsure at all n locations
aggcttttgaccttttgtaccnacnggcgnaatgagctcgacccgggatcctctagagtcacctgccgcgtgcaatcttttgtantgaccagcagaaacaaacggccagcgggcagtggagccagacatatactggtcacttaacttttcacagaaacaccattcatggtaggtacgatcaaccaattcggacaaaggaagatgatgcacgaggcttaaacacatggccataccgaaaccatcttggacaagatccccaacgggtcgccagtgaagtgatactgacgcccttctgcttcacttgcccacatctgcccatgatatcagaaatgttcactatttttgagaccgagattacctacaccaagaatgagagacaaatccatgcatagctcttcccttctaaattataacaaattccaacgaagtctgctttactaccggattgttccttcc

SEQ ID NO: 13871 - DNA, 179 bp, Glycine max
gttgaattcaagaatcaaaaatcaagaatcaagtttcaagattcaagttccaagaatcaagatcaagattcaagaatcaagagaagactcaatccagataagtattaaaaagttttttgaaaaacttagtagcacatgaaattttctcaaaacatttttaccaaagagtttttactctc

SEQ ID NO: 13872 - DNA, 502 bp, Glycine max
  unsure at all n locations
cccttatctgtagctagtattcccggaccttgaaactcagcctggagtaacagcaggtagttcttttgatttaccattataaattactggaacattctgctatatctgtgttttggcaagcacacaatatattcactggggattaacaacactttaattcgatcaccatttgatatattatgtgaaacttgtgtttacccagcgcaccattaaaaacttcaaagccttccttttcacttttaataaccctttcctttgggggccgttaattaattaaaaatttcatgattttaatctaaataaatgaccctgattaaagatttttgttcaaantaatttaaatttagtattacaatacctgaaattaattctatgttctaaccaaacaaccaggaacaaagtgacanaccttgcactttgaagacctgtgttcgcggtttgtgtgcagatnttggtggagtnttgttggtttaactatctcatattactttacaatacaaag

SEQ ID NO: 13873 - DNA, 263 bp, Glycine max
tccaacacgacaaggaatttccctccgaggccgttgccggaattcaccccgctcccaatgacatacgaagatcttctaccatccctcatcgccaatcatttggccgcggtaactcccggaagggtcctcgaaccccctttcccgaagtggtatgaccctaatgcaacttgcaagtaccatgggggtgtccacgggcattccgtcgaaaaatgcttggccctcaagtacaaggtccaacatttaatggatgctggatggctgac

SEQ ID NO: 13874 - DNA, 383 bp, Glycine max
  unsure at all n locations
gccaaattttcctgtcctggccctcctgggaatccttgccaccatttccaccataaactaaaattgtttgaaaggcccttctgactctggcatcctcaccctatacagaatnntaaacttgatatgataaacatttgaagganaaaagtaaagccattgattgtaattattatctctatcagaaaagtaaggtagtaattctattaagtttggaaaggaaaatataatacattcattcttagacttcctgccattacttntagtgatgttctcatgtgttatgatttcagatgtactgatttataaagcttactcgaagaccatgcatcaagccaagagttaagttgagtgtnatcatgcatataagcctagatccatctaat

SEQ ID NO: 13875 - DNA, 62 bp, Glycine max
ctttttgcacatgttctgtagttgcatcctattcagaaccatatcaaaattgtactgatact

SEQ ID NO: 13876 - DNA, 374 bp, Glycine max
  unsure at all n locations
cttgggctgattgaggaaaaaaaaaacctttttggttttaaaataaaaagggttttcccttttttccattattttattcaagctctgccacatgtccctattcgattggagcaaaagggcccactttctctttttgactgtgacccatactcagtcacaaaagtgagaaaaatctgacctttgaaacgctaaaatcctgcctcggtttgcgtgtcatttctctgattccagtttctcgcgtntctctgcgtccgccggggccagttttcgaaagcaagcaatatatatatcaaaacgctcagaatgaaaccccgagtgtggtttagaggttgttttcgttaaattttaagtccacgcaacacgatgatttttac

SEQ ID NO: 13877 - DNA, 361 bp, Glycine max
  unsure at all n locations
caaagtaaacttagggatggagcaaacggttccccccatcataattcacagtcatcagtccctccttaatgagatccctcgattctgaaagttgagcaggcttgcccatgagtttctctctagacgacttatcaccaaaagcaccatctggtggtttcggtgccagactagcattcgctcctttccttctctctctaccatatcctattgatnttttttcttccaaaatatagtttctctagttttttcaatgaaataactcacaatctctccctcaaaaaagaaaagaaaggaaataactctaaatctaaaaaaaagaagcaatttgcggcatgtcattgttttatggacaagacctata

SEQ ID NO: 13878 - DNA, 354 bp, Glycine max
  unsure at all n locations
ccaatggaggtagttggcaatacaagttcagaagtgtcaccattcaatacttatggagcagatcgggaaacataccagattntgtgcaagcaaagtagaagcaaaatgagcatctnaaaatgttgaagatgaaaattaaatttaattgagggaaggattgttaggaaacaattcatatttttaatttcaaatctctaggatattgcttanatttaaaaaaagaatattgtcttatttctaggatgctctttagaattaaagatatattctgtaaattagagatntgttttctcttttaagattatgatgttagggttatatatagagattcttaagatgagaagaatcaccagt

SEQ ID NO: 13879 - DNA, 324 bp, Glycine max
  unsure at all n locations
cttgcttgttgcaaaacaagcaaacagcatctctaatncatcctgaaacaaaatcaacatttagattcaacaccaacattataatttccnaacactcattaatcccaatcctatttacattatcttgatttgggtaggatacgtcaccccaaagctagctaatgaggtgaggattgtcatttttttacagttctactttagccatatctaacaccctcccatgttaggattagcatctggacaaagagattgaggaatttttctgtattactgtaattccataagacaatacaaactatctccattttacataactcttacaca

SEQ ID NO: 13880 - DNA, 328 bp, Glycine max
  unsure at all n locations
ctcatcgcattatggttagtccctttnttctctctcctggaaggcattggactcaggttagtctgcatagaattctctcttacttttctattaattgtcaaaatgattctgacttgatgaagatagaaaatagtaaaaaaaaattaaactccactattatgcaggatattccttccttaagtgcagaggcagcaaaggaacatccagatgtgtcatacattgtaactgcaccccttggattacatgaactacttgtggtatgaattctcttaagcatgttntattcatattaagtatcctgagttgaatttgtttaaatactcactat

SEQ ID NO: 13881 - DNA, 142 bp, Glycine max
  unsure at all n locations
agcttgctcnatattacatngatgtnngnatnnatgggaggaggttgtatgccgtttttgttttaagagtagtgtcccactggtaaaactaactttccaaatttttgccttcgcaggagatggccccgaggaagcttgcctc

SEQ ID NO: 13882 - DNA, 457 bp, Glycine max
  unsure at all n locations
tagagaagaagcttcaatggaggaagagaatgagagagagtgataggatgggggaggcatgggaattgaaggagattaaagagagaagttgaactttgaagtgtgtctcacaagtttctcattcatcgaagttatgaaaagtgttacatatgtttctatttatagcttagcacatgggaagcttccttgagaagctaggaaggtaacttacttgggaagctagaggaagaaagcttccttgagaagctaaaggggggctactcacacccctccaacagctaagctcaccccatgccanaatatatgaaaatacaatgggaagcttccttgagaagcaaggaagaaagctttcttgagaagctagaatggggctactcacacccctacaatagctaagctcacccccatgccanaatacatganaatacataaaaagtccctactacagagactactc

SEQ ID NO: 13883 - DNA, 227 bp, Glycine max
agcttcccttatgtcgttgaagcctgactcggacgagtggactatgggagactcggcgcgttccgctgattcgccgcgtgctgctggcaaaaactacaaactacacggtgtaagttcttccactgccaagcgagcttcgtcgtcagccgtgtttacggcgagcatggtgtccggaattgaacctttggtgccgtttaaagatgttcctaatgctgagaagatgaacc

SEQ ID NO: 13884 - DNA, 418 bp, Glycine max
  unsure at all n locations
tgtagagctngagttgtagaactagaaggagtagtgataattacttagaacttgttaaatntagtagaacttggtggtttatcaagaactacacatactctcggtggttaagatgaaccagtataactttttgtgtctcacaagttttcatttttctttcgctttaaatcgacctacggttcaaatttgattctgtctttggaaacgttatctatcttatgaaatcgtgtctatcgcgtcaattgttttatgaaaatctgttatatactttttgtcacacttctcatcacacgataacgttgttttgttttaagaaggcatcaaaattgataacatcacgcttcaatcccttctcttgtgatatttctctttgtaaatagctaacacgatgcctttgaattggttgcctagcttcact

SEQ ID NO: 13885 - DNA, 352 bp, Glycine max
agcttcttcttcattttcctataaatagagggagaagggaagggataaaatgttcaaccctcctggtaattcaagatcacttgaaattagtgaaaaaaattgtttccgtgaagaaaatccaagccgaggcgcttccgtaacgtatgcgtgggtgatttcgcgaagattttcaaccgttcttcaacgttcttcattcgttcttcgatcttcaaccgataagtacccgaaaatcaacttttcaattcattctatgtacccttaatggtcctcatttggtttcacatgcctttactctcatttcaatattcgacccccctttagacgtgcttagtcatttatctaagtcattttc

SEQ ID NO: 13886 - DNA, 398 bp, Glycine max
  unsure at all n locations
tgcctatccaaggcattctctaggagccgaagctcctnattattggcttattccttagtggatggcgcctcctttctcctcttctcctttgtcttccgctgcatctccatggtggaaaatcaccattgaaggacctcattgaagctcaaagatccagcctccatagaagctccacaagcaagcttccatcacatcccttgtggatctttgcttgtaaaggattttacaaggttattggaaatctaaagaaccggtggttgcttggggactggatgtangcactggttgttgccgaaccagtataaacttgtgtttggcttcttcttccctacactctataattctcgctgtgtacttttaattccgctttacttaagtctaacgtattagttatgttc

SEQ ID NO: 13887 - DNA, 223 bp, Glycine max
  unsure at all n locations
agcttcttattttcagtcggngaagatgaatgcggggcgagcttcattcactcctctaatgacaatatcatcatttctggcactaaactgttgggagttggaagccatcttctcaattaagatcctggcttcagcaggggtcatgtctccaagggctccaccactggcagcatctatcatacttctctccatgttactgagtccttcataagaatattagaga

SEQ ID NO: 13888 - DNA, 314 bp, Glycine max
  unsure at all n locations
gcttcnattgtgctggatctttgagcttcaataaggtccttcaatggtgattttcaaccatggagatgcagaggatgataaaggagaagagttgagaggagacaccatccactatggaataagccatggaaggagaagcttcaccactaagagagtgccttgtataagaagcttcaatgaacgaaaagagtgagagagagtccggcacaaaattgaaggagaaaaagagagagataagttgaactttgaagtgtgtctcacaagtttcacattcatcaaagttacaacaagtgttacacgtgtttctatttata

SEQ ID NO: 13889 - DNA, 437 bp, Glycine max
tgtaggattatggagtacccatcacatgtggtactatgtgtcggtcgagcaatggtgcaagacaattctgcacatccacaaatcacgtataaacccaccatcccctgttgcccacctccaattgagctcacgtactcccacgtagcccttatcctcgttcctctcaacgccgggtccccatcaatcctctcaagctcccacaacatccaagaaattcaacatcccatcatcacaaactaaccaaaccaagcaaaacagggcataggcagatgactctgcccagaacacaaaccaaaaatcacagcttttcacatacaaatactccagtaacattgtcttcgttccaatctgctaaccggtggatcgactcgaaaagtttactggaaggctctagtacatgagtgtacattctgaccgttgggatctactagcaaacg

SEQ ID NO: 13890 - DNA, 326 bp, Glycine max
agctttagtcctgacccggtctgcacttgtaatgtgcgatgctcttgcccagtttccaccattatcggacaaagaaagcttgaagaccgagctatgcaatttctgagaggtctgaatgaacagtatacatacattcggtctcatgtgttacttatggatcctataccacccatatcaaagatcttctcatacgtggcgcaacaagaacggcaactgttatgtaactgctctcctaatctcaattttgaatctaaggaaatctccattattgctgcaaggtccgtttgtgagtattatggacgaatcggtcaccacaaaaatgtgtg

SEQ ID NO: 13891 - DNA, 228 bp, Glycine max
ccttgcttctacattccgctgatgaaactcatagtttcctagggcctgctgcaggacccatcgtaaaaaaatgatcaaaagagttactggtctcatgttttggggtagggttggttaggttttgactaaggttagagacatttatgtttgggttagggttgaggttctgtttggtttaagtagtgtgtgtggacgagtggcttaaggcattattcggtgtgttgtgtg

SEQ ID NO: 13892 - DNA, 315 bp, Glycine max
gtccatccattttcgataaacgccacttccttcgctgggtaaattggagtctccttgaatggtcaatgtgtgactatgtaaagggatatacttgggttaatcactaaaagggtgaaatttccatggagtaaagtttgtcgttggtgtttatgattagtgtacatggtgatgatgattgatggactgatgatgatgcttgatggttgaattatggtgatgatgatcaattgagtgataatgataatggcatatgatgattgaacccttatgtgatggttgatgaattaaggattattatgatatgctcttgtatat

SEQ ID NO: 13893 - DNA, 234 bp, Glycine max
  unsure at all n locations
agttagagcaaataatgaacttgcaagagaatggaaagcctcaagagatcatcccctcgacaacattattggtgatatatcaaaaggggtaacaagtagacattctcttaaagatntatgcaataatatggcttttgtatctataattgaacctgtcngaacctacccttcggcgggagggcgacgcgtgactcgcgggatgcgtgttccccgaaaggaatacgcgcagagtca

SEQ ID NO: 13894 - DNA, 463 bp, Glycine max
  unsure at all n locations
nnnttagatgangcttgtatnncagggactatagaagaagacggngagcttctatagagaaccggaggaatgaaagctcctaagtaaatacncnaannnanacaaanaggggagagtaacttaagtncgacgagctcgacatcgaatgtataccgaacaaaacctaaatccacaattttctttctatggaacaactgctgagtatcacatcacataaaactgctgccatgagtctattaactgcatcctttatcattatctgatattccggatgagcttgaaagtatacgatctaccgagaacgcttgaaatataaacaatgggccgataaattaaataatttaggacccaatttgaacaacaagtaacgggggagatgaaattgggccgatattcttcttggggggcaaatacgcaagatgtagaagaccaaatctcgaagtaggacctcaaccagctagac

SEQ ID NO: 13895 - DNA, 358 bp, Glycine max
  unsure at all n locations
ctattagtccttattcagccttatccttccttgaattaattcactttgaaccttaacatgattatgttttatcttgatcaaaatttatatggtttgtcatcatcaaaaaaggggagattattaagtntgaacggtccactatgtcaaaattggacaatccatccgcaccanatgtnttgatgataacaatgatataaattntttatggactaatagtatattcttaagtcaaacaacacttactttatatgagttcacattaaaaaaatttatcctatttctcatattagtaattgtccaaaggtcacaggaacttgtgtntattcatctttatccaacgtccaacatgttgttgtaa

SEQ ID NO: 13896 - DNA, 325 bp, Glycine max
ctgcttcaccacagcttggataaaaggtgagcgaagtatagcaccagttttcttatcgtgtttttttattatcttcactaaacctgcacttaaacatgcatcatcaatcaaaccccttctcaatccaagaagaataaataacacatgacctcatagttatcacaaatcggtatccaagaaaataaatgacacatgaactcatagtatcacaaatcgttatatatagtaagtttgtttacttttataaaaactacataaaaaagtgttaccaattctgatcatttgatagaacatagttaaaaaactttcacactgaaagtatatg

SEQ ID NO: 13897 - DNA, 367 bp, Glycine max
  unsure at all n locations
ctattcaacgactccgttccgttctctttcttcttcttcgaaaccctaataagcttctgcacttccttctgattccacttttggtaatataagcccctcctcttcttctcagatctgaaactacttgttttaactttttctttcttcgcattgaatgatttttacgtttcttaaacatgattgcacgactccttttccgaattccaatctacgctaaattgttaggtttttatgttctatnttatttgtttaatcgtgtactctagttggaaattgaaaatcacgaggttcaattgacggaaatcattctcctgaaatgcttttagatagatgtntagttatggacatgactagatcgttgagaagt

SEQ ID NO: 13898 - DNA, 200 bp, Glycine max
  unsure at all n locations
gggtgacaaataaaaaaaaacattcatttgaacttttgggagcatgctaaaggacttattcttatcattgattctcaacttcaaaaaactgacaagtgtgaaaagtagatatgggtgatttgtggaagaaatgtatcagtggtactgtatgtgcnatacaagcactgaaatgtgatcgaatgaacattgtttgacccctg

SEQ ID NO: 13899 - DNA, 401 bp, Glycine max
  unsure at all n locations
ctcaaccaaccaattcaaccttaccaggacattcatagtcgctgtttgaatacctcacccactcaagtgtagcacagaattatggcttttctctaatgaaacactcttgccttataccactctaaggctaacaatgtttttaggcacaattgaaggaaataaaattcagaatttaggagttcaagtaacaatccttcatacaatcaatatattaccttaaagagattntttttaaagttcttcaagcatgaaccattcagcccaattnttttttaattntgcttatacgaatntctgttttttttataacaaagagatcaaaaggcttaacttttgcaatggttcagcctataagaaaaaaagaacatgaacaagaatgtnatctaaatggaaaagaaaat

SEQ ID NO: 13900 - DNA, 347 bp, Glycine max
ttaaaacaaagagtttttgcctctaaagaaatttttctagcttataaacttttcttcacacacactataatgatacacaatgcaaaacagatatcaaatgtactaagatgcaacaaccaagataacaaccaatacaaatgtcactcaagggagttgggcatgtataagccaaaacttcttcataaatgcctaaaactctttaactactctatttctcccaccacatcatggtcactgcactccccatgtacatacataacatacattatcacaatgacgttttcaatgtcaacaacatctcatcttaattgtcttacccacatcaacatcatgtcatctcaatatca

SEQ ID NO: 13901 - DNA, 324 bp, Glycine max
  unsure at all n locations
tcaaacaaagctcacctcgtggagaggcttccttaggacgattcgtaaagaagctagagcttagctacacatacctctctaatagctaagctcacctccttgagatgagaagctagagcttagctacacacccnctataatagctaagctcacccccatgacaaaaaacatgaaaataaaaaaaaagtccttattacaaagacaactcanaatgccccgaaatacaagggctaaaccctatactactagaatggccaaaatacaagaccttgacgaaagaanaacctattctaatatttacaaagataggcgggctatacttag

SEQ ID NO: 13902 - DNA, 234 bp, Glycine max
  unsure at all n locations
agctttgctagctntcaacaaatttcttcacaaataactatcaaaaggcataaacctagtaaaactacccatcatatctcccaaaacccaatacccatgaacatttatgtgagaagaagtctacccaaacctgaaatctgaagtcccactatgtagaggtgcactntacgactccgaaaatggcttcttttcgcgatttggaacagaaatggtgagcaaaggttggagctttga

SEQ ID NO: 13903 - DNA, 318 bp, Glycine max
  unsure at all n locations
atctgacacataaaagccgaaggggaaatgacatagatcataaaacaactgcanataaacgtaaatgttctgaatgcataaatttaaatgtcctgctcctcctgtggctgatcttcattaagatccactgtggagctgctgatgaatcctatataagctgctcaagctccatgactggtgtggatcatcaggaataggtgcacgggctagacatggctttggaataatctttggagaagtttccttctctcgagccatatgtacacctgcatcataatcatagggcttaagaagagtcagctcattctcaccctctac

SEQ ID NO: 13904 - DNA, 327 bp, Glycine max
  unsure at all n locations
agcttgtgttttatacactacatcatccaaactgcagagaataactcaagttcttgaggcttgtcattgcatgtataccgtacaaaacctgaatccaaaatttccttcctaggtagcaactgctgagtatcactcacataagaactgctgccatgagtctttatctgcatcctttttctttatctgtttttcctgatgagcttaaaagtatccatctaaccaagaaccattgaaataataaacaatgggcagataaattaataaattaggatccaatatgaacagcagttaacggatgggatgatatngggctgatanttctctttg

SEQ ID NO: 13905 - DNA, 413 bp, Glycine max
  unsure at all n locations
gtacttcatcctctgcagtgttagatgagaagtnaaaaccatcaatntatcatanaaatgttttcaacaaaacaaattgacatacatacaacacaacaatgtaaaaatgattagtttttacaatatgctaattatgttaagtgaacttagtttgcacttatcattatttttatcttttgtctccatcatcagtgagaaaatacacagaacattaaataaattcacggtatttctatagttacaatgggagccaaagttgaatgcacaaggaccaaggagtcgagtatgactgtangggcagggaaattaactgnggtcaacggcccattcttgtttgggtccccgacgcatgtgttttggatgccaaccacttgtgtttgctttagttaaaagttaaggatacatttaatatg

SEQ ID NO: 13906 - DNA, 339 bp, Glycine max
  unsure at all n locations
agcttgtgttactcttaaagaaaaagagtcaaagncgcgcattgagatagagacatatgctactgaaaaagatacccttcttaagaactttcaggagttggaaaacaaactaaaagatcttcaaaaggatataaaggaacttaatgaactacatattcatcataaaagaaaaaagatgtgatctttggagagaatgcgcacaagcacacaaagattatgatgaactcaaagtgagtaaacatgattttttggtggaatgtgaagaactatcttttcttgaagagttatacaaacttcacatgtctacatggactcggacaatgaaacatctacttgatc

SEQ ID NO: 13907 - DNA, 406 bp, Glycine max
  unsure at all n locations
tgaaggtgtgtagtccaccatctggtgatagnagaatattggattgtgtctactatcattatcattgggtctccgtcattgaagtgccacttgagctgccaggtctctccacctttgggcgtattctttgaaagatctgtgcccctttttgcacatgttatgttgttgcatcctatccggaaccatatcaaaattgtactgatactgcctaatgaaggcaaccattatgtccttccaagagtggactcgagaaggttcgaggttagtgtaccaggtaacagctaccccagtaagattatcttggaaggaatgtatcagcaggtcctcatctgttacgcatgcccgcatcttccgataatacatccttagatggttctttgggcaagtagtccccttatacttgaca

SEQ ID NO: 13908 - DNA, 353 bp, Glycine max
  unsure at all n locations
agcttgatttcttagcataatcactngcatcgcacatggactcaaattcttgcccctatctggtgttgtaattcctggtgcaaacactaattgtgttttcaaatcattaaatgctctcatacattcttcattgaacacaaaagcaacatctttattcaacaaattgctcaacagtttggctactttggagaaatcttttatgaatcgcctagtgaaccctgcatgtgctaagaaacttcttattcccttgacattcangggaggaggtagtatgtcaattacattgtacacctctttccctcttactgacattttatgccccaacactattcgcttctgaaccatgaaatgac

SEQ ID NO: 13909 - DNA, 386 bp, Glycine max
  unsure at all n locations
tgcctctgaagaaaatggtcgtagcgacattaaaaaatgtatttatgcacatactnctncatggggagaaaccactctccatcactagtgtgttaaacactactatatgaagccacttccttttatgtctgagcaggtctgtgtaaaagagctcttcttttgatggtgattgaggaatcttagaacttagcttcatttattcttcataagattcaaaaattcctatgagaatgtgtctgcaaaatagatttcaaacacatggtattaaatgatctttaatttgtatcaaatcataattctatcttgctatcatctgaaacatcagacatcgacttcacaaatcatgttccgatagtgcatgagacataactcttaatctttgtatt

SEQ ID NO: 13910 - DNA, 414 bp, Glycine max
  unsure at all n locations
agcgnntgcaagctnntgagtccattatatcctgacttcacncataannnaccttgacgccaggtgtggagaaatagtnncaatccttaaccctttcggaagccagaaaaaagaaaatagaggggnggaaatttcnncacatcaaagaaaaacagaagaagggannaaatttccaatcgaagagccaaaaaaagaaaaaagaagggaannaattccccacnatcaaagaagtgggagaaaagcanaaaagaannagaaaagggaaagattcccaatcataagaaatgggagaaaagtnnaaaaaagggaagaagaaagaagggaaagaaaagctcctgatcaagggatcgaaagaaaaccagaagaaatgtgcagagaggtctttggaccggacaatatctgaacaatacagaa

SEQ ID NO: 13911 - DNA, 354 bp, Glycine max
agggtgatgttgcgcgtactgatgggtaccatgatgtgtttgctggagtttgacccacgcggttgttgaagagacggcatgggcatctccttctttcctttttgcccctgtcgccccgattcttttggcattcacgtttgtggaggaaacgtaatcaaactttcctctcttcaatccaacctcgattctttccccggcaaacgccagatccgcaaagctggacggcatgtaacccactagcttctcatagtagaacactggcagagtgtctaccatcatggtgatcatctctctctcaaccatgggaggagctacttgtgccgccaaatccctccatcgctgcgcatattcttt

SEQ ID NO: 13912 - DNA, 262 bp, Glycine max
  unsure at all n locations
acgatgcaagcttcgcattctnttactcaaactcttcacacaaagtcgcgtgccgcgtacagcgccaatacttgcttctcttgtcacatccttctttcgacttacacacgattagaatatccaactcaatacttcatgataaatggcgcgagaccatcgaatgaagagacaatggagtcatcctccaccactcgatgctgctgcccatcaccgacacggaccatccggagcacccacagcacctattcatacctctatgtca

SEQ ID NO: 13913 - DNA, 393 bp, Glycine max
  unsure at all n locations
gacacatagatactcagctttagccaatggactaccttgaatgaattcctttgaatcctcttgagcctatgttcccctttctgtgttttgaagctcattacaagccttaagtgaaaaaccatgatatcaccttacccttaaagaattttggagctttggaattgttttgggaataagctgggaataagtatggggggtatgtttcattggaagatatgatttttggccatgcttaatgtnttattttggccatgcttgatgtatatatatattgcctagttctttctttaatattcaatttcgtactgggcaataaaagaaataaaaaatccatagaatgaacaatgacaaataaatgcagttgctgcaaatgctgcaatttcgtacttcaaa

SEQ ID NO: 13914 - DNA, 180 bp, Glycine max
taaacgccacatccttcttcaccagctcattgacaggtgatgcgattgtcgataaattatgaacgaaccttctatataagcttgctaacccatggaagctcctaatatcgtccacactctctggggtgggccattattggatggccttgattttctcatggtccacttggaccccatttc

SEQ ID NO: 13915 - DNA, 497 bp, Glycine max
agggagcaggattcagcgacgttagcagcacgcgacgccaatgacgagcgtcgcgatctataatgcgcctgagtcggacgtacgagcgattatggtacgatcattgcacttcctcgagagcgacggtggttcaataacaagcgtctctatatataatgtgccagaatcggacctccgagtgaaatgttatgaccatacgaatctctcgagagctaccgtcggacaataccgagcgcgccctcgtaagatgcgcctgaacctgaccttcgagagagaagtcctgaccatgcgcattattcaacagcacgctcagtcaagaccaagggatctataagaatgcgcctggatcaacatccgagtggaagaaagacagggcatttctaacagcatccgtggacaaatcacgcgactcgacaaaaatcgactggaacggacactcagaggaaagtcagacccgcgcatatctagagaacgctcggtcaaataacagcgcccgc

SEQ ID NO: 13916 - DNA, 391 bp, Glycine max
  unsure at all n locations
cagctcggacccgggatccttgagtcgaccgcaggatgcaacctctatttttgatcctgagtaccttctgcagttggttacctcatggctgattcaagctttcactgcccatcctctcaaattgaactctgactcatctcttcttcttgagctataaagaagtggttcagctgttgaggccatgaatattagttagaaaataattcancagagtggaatggcgttgttgttgttgttgtaaataatcccccaaaagataagaaaataattattagcaaggatccaaatgcataacctacaaagcgcatattgctatgaagttttggctcacatcaccaagaatgctagaatcctttttctgaatatgtgaagcatcaggcatcatttaatc

SEQ ID NO: 13917 - DNA, 427 bp, Glycine max
  unsure at all n locations
ntggatctttgtaagcagtagaagaaaactatgatgctcctgatttatctttagatccaacggtggctcagatgaagaatcacagagaaaggaagaccaaaaagactaaggctaaaaattgccttttctctactgtgtcaaaaattatttttacaagaattatgaacttcaagtctgccaaacagatttgggattatctcagatcagaatatcaaggctgtgaaagaaccaaaggcatgcaagtactcaacttgngcagagaattcgagatgcagagcatgaaaaagactgaaacaattaaaggctacgctgaccggctgttaagcatagcaaatagagtgaggcttcttgggaaagactntcctgatgaaagaatagtgcanaanatcctggtcactatacccgagaagtatgaatcgaagatatc

SEQ ID NO: 13918 - DNA, 277 bp, Glycine max
caaaagccattcatgatttttctaaacctttgatcaacatgatgaaagcagctgggtgggaccttgatgctgctgccaactcaatcgaacctgatgttgtttatgcaaagagagctcataagaaatatgcatttgagtcttacatatgccaaagaatgttcagtggctctgagcaagaaaacttctctgtcaaatcagacaatattactgtaactaaagagagcttctttcaccaagttctcgcattaagagagatggatcccttggacatgctggg

SEQ ID NO: 13919 - DNA, 333 bp, Glycine max
caaaaaatcctaggttgagatatttaggatcaagaatttgtcaagatgaaaagagagaggagtaccggagacgttgttcgtcagatgagaacagtgttgaagataacaaggagggtggaattggtgctgggggtgctccattgtgtttttgagaattacaatcggtggaatcaagagagaattgaataagaagaagattggaagttgtgggagtcgatttggtgcagaaatgagagagatatggtgtttggaagattggggaataaaaggggcgtcgccggggttgcgagttcgtcaactgaagttttgtatttataggcgaggacgttctgt

SEQ ID NO: 13920 - DNA, 377 bp, Glycine max
  unsure at all n locations
cctcaccaaatcccttatttccagaagggaattctatcaatagacctccaatctttaatggagagggttaccactactggaaaacccgaatgcaaatttttatcgaggcaatagatctaaatatctgggaagccatagaaatagggccttatatacccaccacagtagaaagagtttcaatagatggtagttcatcaagtgaaagcataaccatagaanaacctagagatagatggtctgaagaggatagaaaacgagtacaatacaacctaaaagccaaaaacataataacatctgccctatgaatggatgaatatttcagagtttcaaattgcaagagtgctaatgaaatgtgggacactctttgattaacacat

SEQ ID NO: 13921 - DNA, 359 bp, Glycine max
  unsure at all n locations
ggcaaatataaccattatgcttggataaatgcaaaaaaactggggcaaatgaagagggtgagaatgagggagaaacccatgctgtgactgccatttctatacagccaagtttcccaccaacccaacaatatcattactcagccaataacaaaccttctccttacccaccacccagttatccacagaggccatcccttaatcaaccacaaagcctgtctaccgcacttccaatggcgaacaccacctttagcacaaactcaaacaccaaccaagaaatgagnatttgcagcgaaaagcctatagaattcaccccatgtgtcctatgctgactngctcccatatctactngataattcaat

SEQ ID NO: 13922 - DNA, 159 bp, Glycine max
agtcttcataatagtgatgaggtacaagccctaaaggcagagcttgaaagagcccgagtagtcgaagagaagttcaagtccatagccatcaaagtctggaaagagtatgatgaactaagggacgtcaatatggccaccgctgatgccttggaacgagaa

SEQ ID NO: 13923 - DNA, 264 bp, Glycine max
agttaagctgttgattcagaacacttcattcttggtatacttgcatctccttcccttgagtggtgccaatgtggtgctaggagtccagtggcttaaggctctaagacccattctcacatattacaacaccctctccatgaaattcttctaggatggccaattagtggagttaaagggggaagatgcatctaccttgcacctcctttctcatccccagcttcgtcgccttctttgaaaagaatggcgcgagtgcctactttcaca

SEQ ID NO: 13924 - DNA, 295 bp, Glycine max
  unsure at all n locations
tgaattgactcgagggaagaaaattgaaagagaacaaactcttgggtgtctataaggggttccgtttagacttagggatcaagggtcgctacgtctttgaaagttatagtgcacaagaataaaaaacaattaaaaatatatgattatacactgagtaggttgaaaatataattgttnctttaatgtgcgtatcattactttttaattaattaattaataatttataagtttaattcttgaatactttaattttcttattaaagatattggtttataaattaataatacgtttgat

SEQ ID NO: 13925 - DNA, 351 bp, Glycine max
  unsure at all n locations
agttgtatggttaagttattatctagttcgatagntctaatttttctattttcgcgtatgattagtcatgtatgtatggttttatatttcttacgcactttggctttttgttgatgccaaagggggagagaaaaatgaatattttagaaatcaagatattatatttttcaagacttcaaattaagcataaattcaaaaacaaagggggagaatatggagaattaagtgagtgatcgactatgaaaaagaatgtgtatgtgtttcttgatttaagggttgtcatcataaaaaagggggagattgtgaaagcaatgtcttccaagggtaatttgatgatgcccaagaatcaag

SEQ ID NO: 13926 - DNA, 333 bp, Glycine max
  unsure at all n locations
gctgagcgcgtgcttcagggaaatagaagacgagcgcgtgttttgcaagcttaacgcgagctnctgggagagggcggtcttagcgcgcgtgttgcaagcttaacgcgcgctattgttggatcatgggctcagcgtgtgacgcgcgctgagcgcgcgtataggattgagctcgcttctgatattcttcttttatttaataatttctgcctttctgcttgctacacctgcacgtatgatatctgcaggctaaattcaacaaatcatcaattctctaaaatagaagcgcaaatacctgcgtaataattatatttaaagacaatatgtgcttattga

SEQ ID NO: 13927 - DNA, 240 bp, Glycine max
agcttctcgatatattacgggactcaatcagacatccgagtgagaaagtgatagtcagttgaactcgctcatagctgacacatacaattctgagcgttacgatatattacgatactcaatcagacatccgagtaaaaagttattggcgccagagtatactcagagcttcgcgattcaaggccgagcctgtcgatatactaccggactcaatcacacctccaagtcaaaggctattggcgc

SEQ ID NO: 13928 - DNA, 397 bp, Glycine max
  unsure at all n locations
gacacttagatactcagcttgagcaattcagcaaaatcactttttactcggatgttgattgagtcccgtaatatatcgagacgctcgaaatggaacaccgaatctctgagaaaattcaaacgacaataactttntactcggatgtcagattgagtccagaaatttgtcaagatgcttgaaattgaagaccaaagctctgagcgaattcaaacgacaataactttttactcggatgtgtgactgagtcccgtaatatatcgagacgctcggaattgattatcgaagctctgagcaaattcaaacgacaataagtttttactcggatgtctgattgagtcccgtaatatatcgagacgctagaaattgaataccgaagctctgagcaaattcaaacgat

SEQ ID NO: 13929 - DNA, 253 bp, Glycine max
  unsure at all n locations
agcttggttgatgtacttacccgttgaagatcgaagagcgatgaagaacgaatgaagaacgtcgaagaacggtcaaaacctttgcgaaagtcctcacgggaaacgttactgaaacgtttcggaagtgcctcggcttaaattttcttcacggaaacaatttttccaagcaaattctaaagagagagaagtgcctaaggggctgaacccttttcttcttcacttccttccctatttaatagcaaatangggagat

SEQ ID NO: 13930 - DNA, 298 bp, Glycine max
  unsure at all n locations
tgcatagatataaacacanatgagagctatgatgtgttgctttgatagagaacgtaaccaaaagcatagtaaaacaacttcagctgttgataccgtcaaaacaaccaattctctcatgtgaagaatatggaggcaaccaccatgcctgttactatatggaggaagtagccaaggaaaccaaattcatgagagaatgcactacaaagttagaagaaattgtaatcaaccttagcatcacatcttactccaacctcgagaacaccgtgaaggtaataaattttttaaaagatcaagtaaa

SEQ ID NO: 13931 - DNA, 422 bp, Glycine max
  unsure at all n locations
gcggntgcaagcttcttcttttgtcgtcggcgaaagaaagtagtagtagttatgtcgtgagatagagtannttgacatnnnaccacgccgagaaggaagaacgaaatgagcananntcgtggtggggaacccacgttnntaagcgccgtgnngctggnnngaaggggcattgnngaaatannggtcgcttcnntgatccaaggggaagaattatcttctcttggcaaaatnntgggtcttgcntttgacnncattctctccctttttgaattntcctcanagaaaacccttcgccgatatgagcagctacttgcgtctgggccattctaactgttgtcgtagtctttgaattcaacataggtatataacaactacaactttacgtctataactaactaaaataccaatactcttcttttcat

SEQ ID NO: 13932 - DNA, 336 bp, Glycine max
acactataaaactcagcttgccttcctctgatacatttctttggcaggggatgttttcattttggtgcagggtacagttttaaccccttacaaataatttagtcatgccattctttctaaactgagctgtgaatatttaaaatgttgttatattcttttttcaaggttttcctccttattcaattgataagcataatcagcttcattacatggctgaatgaatgttgtgagtcagaaaaaattgcagcaagatggtaagatttcatcagttaaagaactaacagaataacatgcttcctgagcacgaacaatatgcttgagaaaatagtagctata

SEQ ID NO: 13933 - DNA, 293 bp, Glycine max
  unsure at all n locations
atttaatttagtcggaaaaacatttcatttaattatagttttgattaagttttcatggctcatgtaagtgatttttacttagccaagcttaagaaaactaaacacttaatatatattgctctagcanacataagcacacaaatattacaatgaatcatcacatcaaatgagaggccactcatctcaagcctcattatccttacacttactcctcacatcgacgccaatntctatgtgtatttggatgacacttannataaacattatactattattaagttatcacatgcttt

SEQ ID NO: 13934 - DNA, 184 bp, Glycine max
  unsure at all n locations
tgtcagatgtttactacttaacanacaaatgatcatcttaatcactaagcgttttacttactgccaccaaatcacttngtaaactaactcatcaacatgtgagaaggatgatgaatgctcagacatacatttactaaagcctttccttcaccactgttctgatgagatctctgctgtccacaca

SEQ ID NO: 13935 - DNA, 516 bp, Glycine max
  unsure at all n locations
nnnaacctagtcagcgcttgatgccccttagtagnncnntttgatccatttgagaccagggaactcgagagnggacccgggattgcaagactctcttgaggcatgccgcgacaataggagctatctacacacacccctcgtgtactcacctcggctccttgagaagcttccttaagatgattcctaacgaagctagagcttagctacgcatacctgtctaatagctaagctcacctccttgagatgagaagctagaacttagctacacaaccccctataatagctaagctcacccccttgactaataacataacaatacaaaaaaattccttactacaaagactactcaaaatgccccganatacaacgctaaaactctatactactagaatggccagaatacaaggcccaaacgaaagagatacctattctaatatttacaaagataagcgggctcatacttagcccatgggctctgaatctacccttaggctcatgagaacactanggcctctn

SEQ ID NO: 13936 - DNA, 387 bp, Glycine max
  unsure at all n locations
agggatgccccacattatggccatgacacaaatgcaaaaatgatgatttggaaactntatgcanaactggtcatgcatgcacctatgcggacactcaagtgtcaaatttttatggtcatgtgatgctacggctcaagattcatttcctctattttaatcaacccaatgtttccaaaatatgttcttttatcaatgtgtgcattcatccgagtccatttcaggcgtccggagaaatttcacagcattcacccttcatgtgtagacacattntccaaaaattgattatgatcaatgaatgttttcacagaaaggttgganatcgtctcttttcaaagcatgttggtttttcagcttgcaacttaatnttttctttcttctccttccttt

SEQ ID NO: 13937 - DNA, 498 bp, Glycine max
  unsure at all n locations
aggatgtgaactgatccctttggaanccgngtgatcgctgagctactgaancccagagnngacagcgaggctgccaggctccttttggtcagatcgaagcgggttcttaantttggcgcgccaaccgaacggaccggggagagagaccgaccacacaaanncccccgaaccaacacgcgncgcaaacccagcggaaggcccnacaaggaccgaagagagacaaccgggggaaaaggcacacccagggaaaaccacgaaggcggccaaaggacaaccaaaagcacccggaaaacgcaggaccccaaaccgaaccacagggccaaagccaagaaccacccaaagaggccaagacgggacggggcgacaggacacacgaaccaaggaancaagccgcccaanccaccaacagcagcacacgaacggaccgagcaacaanccccaagcgccgccgcgggncagcaacaaccgcaccggccaaaaggaacacagccggacacg

SEQ ID NO: 13938 - DNA, 382 bp, Glycine max
  unsure at all n locations
aacacagncataacaatggagtagcgagatataagtatcagagtattaaatacaataagccaaactcataatcaataaaataatcaaaccagaggtcacataacataaaatgtcaacaaccacaaaatatccaagactgacacacaagagaaataagcagagtacttagcatactaatgtacattctaagagactaaaagccaaaatacacggcttataaaagataaataagcagaatctacaatctaagaagactgaggaggtggtggaagatcaaaactctgacgaatgtatccgacatcctcttcaagctgtgtaagacgaatgtncatacctggcaagcgtgaatctaacgagtcaaagctgtcaccgacatacgaac

SEQ ID NO: 13939 - DNA, 503 bp, Glycine max
  unsure at all n locations
aagagtgtnnnntttgannccctttgngggngccgatgatgcgtttgaaanccagggcgacncagacangacccgggaggctctaagtcgatttgaagttggaacaccattatattcctgtgttagaccacgctatgggcgcgagagtgggccctttcttcccttcgcaactggagtacattattgctaccccatagagctccgcgaatatggttcgggccatactcttcctggtgagccctcttgtgctctagtccaagggctctggcgggaattgcattctcttcccgtaacccggcacactccttccgaacgtgtgtagcagccaacttgaacttctctttggcgagtttggcctttcctaactcgctattgagagcttggacttattcttcacgtgcagttgcttaaaaataatcttgctgacaacgtttaactcggcgagccattctaaacctcgtatgcgacctgtcaaccattcgtgggtaccaacaatgatgcct

SEQ ID NO: 13940 - DNA, 330 bp, Glycine max
gcttgagggcgtgccaccatcttgatagtagagatctgtaatgtgtctaccatcacgatatcgtctccctttccatcattggggtaccacttgggccccaaaccctcccctttaggcgtgactttgaagatccgtccccctttctcaaatgttctatagttgcatcctatccgaccatatcaaaattgtctgatactgcctacaaggaaccattagtccttcaaaatggctcggaagattcaagttatgtccatgtacagctccccgaagactttttggaggatgtttacaatcctctctttggtattccccatttctgacatcatctta

SEQ ID NO: 13941 - DNA, 336 bp, Glycine max
  unsure at all n locations
acatcgacatgattgtctttgccaactgcaaatnctgaatcggtcaaaaaaatgctcgcgagtatgtcatggatgcctagggtagtctggttgatggtccttctgaacagcagttcgctgagtgccttcagaagtttcaaatggcttgctcaccttggctaatgttcgttgactatgttaacgaaacctagatactcccacacaagagangatttattacagcctgtatgaataaggtgatgcacttatgcaacacaacaacaaacgggtattaaaatgttacaatttttctagtaatgtctatttaatcatggaatgtaattgcagcctatttta

SEQ ID NO: 13942 - DNA, 232 bp, Glycine max
  unsure at all n locations
ctctgagcacatacaaacgacaataactttntactcggatgtacgatagagtcccttcatatatcacgacgctagaaattgaacatagaagctcagagcaaattcaaatgacaataactgtctgctcagatgaccgagtgagtcccatcatatatcgagactctcgatattgaatacagaagctctgagcatatgcaaacgacaatacagtttgagtcggatgtcaactgag

SEQ ID NO: 13943 - DNA, 523 bp, Glycine max
  unsure at all n locations
nnnncctatagaagactgattgntanttagtactaccnggctaatttcagttgagnacccgcgatcctntagagnngccctgaggcgatgcagcannggtttttataggcagcaccgacaagttatttcgnggggacgagaccacgcacggggngcgtagcccgaanncatggaggacctctgagcattttcaccgacaataacgtgttactcgggatgcttgattgagtccagcatatagcgagacgctcgaaatggaatgttgaaccttttagccaatccaaccacaataaatcttaatcggatgtctgattgagtcccgtacatatcgagaccgctcgtacattgaatgtttaagctctaagccaattcaaacgacaataactttttactcggatgtctgattgagtcccggaatataacgagacgctcgaaattgaatgttgaacctctgagccaattcatacgacactaactgtttactcggatgtctgattgagttccgaaatatatcgagaccctg

SEQ ID NO: 13944 - DNA, 471 bp, Glycine max
  unsure at all n locations
nacggtctgtttaagctnntannnctncgnannnncagngcccaacnttggagacaaggtggttctccctgataaatataaaaaaaaatggcagagcaatgagggggaggaggccggccnaaaagaaacgccgcaaaaaaaggcgcacagcatcaacattgaatttcgagcgtcacgatatatgacggaactcaatgacacatccgagttaggagttatggtcattcgcattggctcacaggtgcaacatgtaatctcgaaggtctcgatatattgcgggactcactctgagattcctaacacgacgacattggggantgaattggctcagacgttcacatgtaattcgagcgcctcgattattatgggctagaaaaacattcgagaagaaggattgggtttgatatgctaaaggtgcaaattaattcgagcggtggtgtttatggactacattgaatccagataaggtgn

SEQ ID NO: 13945 - DNA, 348 bp, Glycine max
  unsure at all n locations
tgctgtcttcgtatatggccacctgataatcctatcgaaaagctctccacctgcacataattccatcacaacatgaacagccacggcatccttatatgcacctttgatggatataacattacgatgccccgccaagtggtgcattatctgaatatctcttctcacatcctccacatcatcatcggtgacgagcttcctctttgcaatagatntgcaggcgcactccagccctgttgccttttccacgcacaagaacgttgtcccgaactgaccctgtccaagtttctcccagagtaaagaactcttgaaatatcggtctctctttgaacacagaataacacgaaccct

SEQ ID NO: 13946 - DNA, 416 bp, Glycine max
  unsure at all n locations
aaagaattattgcatttgacaccgctcatgtcttacttatgcacatgcatatnnntatcttgtgaatcaaaagacaggaacaggatcgctttaagcgatgatcaaatactgtgccaaatccaagacagagatgaaccgaggtaagtggtagcatagccacatttttctacgcaatgtcatttcctgttttcaggtgctcgagaacgggtacaagtaaacgctaggcccgtgatcagcgaatcatcgtcccacgtccggctccgagtgattaggaagcacgactgggaggcagcctagtatcctttaaatatctgcctattatcatttttatttctctaaggagatgatcggatatgcctaacttatcctatgggtgtcgagtaaacgagcaccgacccatagagaacacgtatttt

SEQ ID NO: 13947 - DNA, 296 bp, Glycine max
  unsure at all n locations
tgctaaaacagaacattggcatagcaaagatcaaagagtagtgggttaaaacctaacaacttcaaagagaacatagtgtgctatgaacacttattgaacaaatcaacatgggtaacaacttccaagtttaagtcttctcaaactgcctaagcaagtcccaagtcctttaacacttcgttgcccatcggtgtggggacaagggtgaaataacattangcccacttgctcacaagtctcaaatggttagaactaagtcctatatacatgctctggcaacatgagctacaattcttaaa

SEQ ID NO: 13948 - DNA, 387 bp, Glycine max
  unsure at all n locations
tgtaagtggntcatgatgaagcagaatatcaactgttggatttatctattttatatggnnccaatggacaccactcacactagatttattgcttccttcctagcaaccttctgataaccatttgctgttgtcgaagtcaatttctggcaacagaatttttttaaatcttttccttaccacctttgttcctttctctccccatcaatcccttgtcttcgactgcaactgtctttcacaaaatattggcacccctaaaatatgaaattaaggccattccaagattgacaagtgaaacacgacataaacatcaaaagtgatgcgtatgaccaaaagtgcattcaacatactaatcttcaacacacatacagaaaagtgagatagtacaaa

SEQ ID NO: 13949 - DNA, 397 bp, Glycine max
  unsure at all n locations
agctgaagtttcttcatttgcacaagacgctaataggngaagagtatccttgtggaaccttcacccgacgaagacactgacaaaaacttatcttctccttcttggacaaggtatggcaggctgggggcaagtaaattttcttcccatcacaccttggatgcaattgtgatcgtatacccatatcagctagatcttgatgggtattcaagccatccttcgtcttgccttgaatgttaatgagcgtaccaatcacattgtcacaaacatctttctccacatgcataacatcaatacaatgtctaacgtcaagatcacaccagtacagaagatcaaagaaaatagacctcttcttcatatgcaactctgactcttatccttcttttgggcttaccaatac

SEQ ID NO: 13950 - DNA, 614 bp, Glycine max
  unsure at all n locations
cccgcctgtcgatgatncganagtcagaagcanntncgagacaccncacaacnacncaagccgtgagaccnncaagcgcgcaggagagacaagaagaggaagagatatganttctccgcctatgtcaccaggggcncgctagagttngacaaagtgagaatggatacaagaggacaaaancntatagcacaagctctcgtccttcacgaccagatcacatagacagtcgcacttttacacctttgttgcataacgaatgagtctcagcaccagaaagatcgtgtacccgaatacggcacatttaccaatgtgcgccactactcccaaaatttagcacgctacacataggcgcttgaggtggctctactctagtgagcgaggtatgtgttatcgtcatctaaccactagtaccacacgctctctgcagtaggtctcgaagcatgaaaatactctatgcgacagagtagagcgaagctttaacctcccatttatccccgatatttcaacagtggctatccaaccctctagagtgatctttgttcccctaataccaaactatttccactctctatcacaaaggaaatattaccctttgtctcttacaatatcaaacg

SEQ ID NO: 13951 - DNA, 446 bp, Glycine max
  unsure at all n locations
agctcggacccgggatccttagagcgacttgatgcatgcaagcnnnnatcatatagtaagtacacttaaatatgacataccagttgtttggtctcccaccattcatttggtgcatcaatagtgttcctgatattgtctcatcctaaaccagtttcttttctaaataatttgtatcatacacaccaatcttttctcaagttatcatacttattttttaattgtgccttggtataagtccttccagttaattgtgtaaacttggattgaatacctttccgccctaccttagtaaagctagaaccaaggcgttcccctctagtaatatgctccaaacataagcttcataaaagctgcatttgcttttggatcccaagtagctttttctgtgcaatattttgtgaaagatcgcaatagctattctctaatatactcataatcaaataaat

SEQ ID NO: 13952 - DNA, 106 bp, Glycine max
aaggccgactgtagcaccttctgactactgtcacaagttggacttttataacggcaaccgacactcgtctgcgatatgggataattacttagactgcgactgaaac

SEQ ID NO: 13953 - DNA, 327 bp, Glycine max
cctcatgcactcctctcatgactatggcatcattactggcgctcaactgctcacaagaggatgccatcttctacaacaaaggtctgcgcttcatcacgagtcatgtgacctacggctacaacactcgcagcatctatggtacttctgaacatattactgagtactccctaaaaatatagcagaagaaaccgttctgaaatctgatggtgagggcgaccggcacatagcttcttaaatctctcccagtactaatacaggctctatccactgatcgtgctaatacctgacatatctgaccagatggctgaggtcctggaacatggaaaa

SEQ ID NO: 13954 - DNA, 436 bp, Glycine max
  unsure at all n locations
ttcaatacaagaaagcatgacttttgcctatgaatctaagtnntggttttgaatgacaaaaggcatgaatattatgacatgtttgagaggttgttattacaatttaaatctggctgccccatgaggaataccttgcacctangtagcatggaaaatacctttcaacggtatgtatatatgtaaatatatatagcatggaaatgccttgcaaaatgttgaataaaatgccttgcagaaagttgaataaaatgccttgcacaatatgaatatatatagcatgaaaatgccttgcataatatgaatatatatagcatgaagtgccttacacagtgttggatgggtagcgtacaagtgtttttcaaaatacgtgtatttgcgagtaggtaacagaagaagccttccanacaatgtgtgtatatatatatgatgtagcatg

SEQ ID NO: 13955 - DNA, 287 bp, Glycine max
  unsure at all n locations
tttgcttgcttctacaatatgnacaaagataaatgggctcatacttagctcatgggcccaaaatctaccctaaggctcatgagaactctagggccttctcttgcatctccagtccaatcttcttggagtcttctatgcaatgcccttgctatgtaggatcgcatcacttcgaatgctttgagatgtactacatacccagggagagaaactccatatctgacttgctctccaagctggccagctccaccaggactgggcaccttatgactatcgtccactagatgctc

SEQ ID NO: 13956 - DNA, 449 bp, Glycine max
  unsure at all n locations
tcagaccacagcaacacagaatctaggagttcaaaatccctctattcaatgggttttctaggtttgaaaagtgaaatttagaatgaggtaaatttgaagcaaactctcacctcacaccagtccataacatccatttagacttgttcaaactggatttacacctaaaatctcaccgaatcaaaatttgactcttcaacacccaaatttgccctagaaatggctctttgttcactttggtcatttattnttctctctagcacagtccaagctttctcataagtcctaaatgaaatttcaagctagtattaactcactttaacctccatttaccacagaattcagacttagccttccaaccctcaaagtctcactctgtttccactcataacatcacattctcactttctaaccctangttagttctaccctttgtctctaacagatttgta

SEQ ID NO: 13957 - DNA, 247 bp, Glycine max
  unsure at all n locations
nggtgctgagctgagcttgactagctgaccgagacgcggcagtttatcaacacttttattagaaaagggtacaattggatttgaagaatttcataagcacaaatggaggaaatgggctgaaacggatcgtaatacttcctggttttacgtgatacgctttactaaaatggcatacatgtcctaatttagttttttcaaccattcattttgtaaatccgataagatatataagtttaatatattctta

SEQ ID NO: 13958 - DNA, 429 bp, Glycine max
  unsure at all n locations
atacatggctgaatgtagatctgctactatagctagtcaaattggaaagcacctcacatcatagcattgcacacgaaagcaaaataactataatatataaccaaagtaccaaacgggtttctaaactagagaaacccaggcactaaatcatatacaaggaggaaaaactaccagattagctgcaatggtccctttagttcaaactattacactatttgaagtttaatntactttcagccatgggcaagaacacattcaaacaaagtanttcaaatttgaactaaacaactacaatgaagcaagagtgcaatcagattcacaaattattggttggaatcatacatataaattacaagcacacactagttacatatttcaaaggtgaaaagtgaagagtacagtgatatactacattattcctgtaaaaat

SEQ ID NO: 13959 - DNA, 408 bp, Glycine max
  unsure at all n locations
attccagccnggattaagggcaagacaggnaccttgtctgggttggacngggnccanggangagaggattgcccaacataattcccttgacacaaagccaaaatggatgattgggaaccttcttgcaaaactgttattgcttgccccaatgtggacactcaagtggcaaattttaatggtcatgtgatgctaaggctcaggattcattccctctattttaaatcaccccatgtttccaaaatatgttctttatccattgtgcatcatccagtccatttcggcgtgcgggaatatacagcattcaccttagtgtagacacattttaaaatcgttatgacaatgaattttttcaagaaaagtgaaatatctctttcaaaagctgtcggttttaactgacaactattttct

SEQ ID NO: 13960 - DNA, 368 bp, Glycine max
  unsure at all n locations
tgaaaaagttccttcgccggtggtttcaaaattgatacaggccttttgaatcaaaagtacaagaagatgagcttgagacagacagtagggattccagtgatgttctgtcatcatcaaactcatttattatgttaactaaagagcaaattggagatnntgaaaaattgctttcaaagtggaacctgaatgttcagattgcaggtacattattcaatggggagcgagatgatcggaanactggtgatgcaaagtacagtgatctcaaggaccagtttgaacattggaaccacattgctcagatttggaagcatcccacattgaacttgcagttcaatatgaaactgcacagcaacttctgggtgatattc

SEQ ID NO: 13961 - DNA, 264 bp, Glycine max
  unsure at all n locations
gggttttggcctgatcattctgagctgaacatnaacgngnccnntcttttacgagatttctgcttcaacacagcaaggctattgatggcaaatccaagccaactagccttctgtagcacatcttgatcatgcatcctctgggaccaccgaagcatccccctaaaaacccgtaaaacccctgatattggcacaactgccaacccgcagatcctaagccttctagatttgagaaaaagtagacacttgactacaaaggtgctatcc

SEQ ID NO: 13962 - DNA, 116 bp, Glycine max
tgctagaaaaaatttgacatttgaaatcgctagtgttggaaacttgaacatacgaacttacataaattactgggaagtggtcactacggtttttggacctgaatttctacttgaat

SEQ ID NO: 13963 - DNA, 495 bp, Glycine max
  unsure at all n locations
nggggcgtggancctgatncctnctagtagtctnatgantcatttgagnacccgngatcttcanaaagaacctgcagcttccaacctggccttaccttcggattccaaggttctatangtgtccgcgcggcctaacctggaccatgaacgctatggtggcaaggccgtcggccttctgattttcctctctaggattgtgatgaaaggatatgtcttcaaggaatcctatcacctccttgatgtaagcctggtaaggcaccaatttatggtctctggtctcccattcacccttcaactggggaattaccaaggccgagtccccgtatacctggaccaacttgaccttgaagcgaatggctgcttggatcccanggcacatgccttatactcnctatgtcgttatgcagttgaaacccacctacccgtgaaagtatatatngtcgtctgggaaaccatactgccccactccatggctantgcatanacgtgcgtcan

SEQ ID NO: 13964 - DNA, 254 bp, Glycine max
  unsure at all n locations
ggcatagtcggtcagtgagattctgtgatgtacctaaacaggcgagctcctggcagtcaacagataaaaggaacanagaccacanagcaaggaggcttgtggtggctggccagctgtgaaatttgtgtgatatgtggattatggcctctggtaatcgattaccaaaggtgggtaatcgattacaanggcttaaaatgaagacaggaggctaagatggtctctggtaatcgattaccactgggtgtaatcaatta

SEQ ID NO: 13965 - DNA, 247 bp, Glycine max
tgaccaaggctggctcagcgtttgaagaccctccgcttttgacagattaatactattaaaaatggggctgttaaaaagaactatgctagcagttactgataagaaagtacaggtatgctttacctacttgctctaaaccgatggcgccctgtcacctaaagctcgctcatgggctgcgtatgaaaggcaataatagtgtgtatgtgtacaccttctatgacagcgagttgggaactctgtgcttcac

SEQ ID NO: 13966 - DNA, 321 bp, Glycine max
  unsure at all n locations
ctcaattaaatttctggcttcagcaagagtcatgtatcgaaaggctccaccactggcagcatctatcatacttctctccatattactgagtccttcataaaaatattggagaagaagttgttctgaaatctgatggtgggggcaactggcacatagttttttaaatcgctcccagtactcatacaggctctctccactgagttgtctaatacctgagatatctttcctgatggctgtggtcctggaagcaaagaaaantttttctaacaatactctcttaaagtcatcccacctcgtgatggaccttggacaaggtaatac

SEQ ID NO: 13967 - DNA, 271 bp, Glycine max
ggcgaactagcttgagcgtatcatgaactgaacaaggcgaggagcgggattagagagaccttccctgaggcaagaaggggaacacaaacgcccaaaggaaggacggaacaagcagaggagccagaggacacagcaacccaaggaggccggggcccaggacaaagaagagacgaaggcagccaacagagaaaagagaggaacccacaccaggggacaaacacgacaaacaaaaaaagggaaccaggaacacgaaaaagaagaggcaacaagg

SEQ ID NO: 13968 - DNA, 471 bp, Glycine max
  unsure at all n locations
nccccggaaactgnnnagnntactnantnagcaaaanncgaaaaggaangaggcgggcttagaaggagagaagaaanattaantttctccataacccggccacaccgagagggttgttaatagatacaagcgtccaccacaacaacaacnctaaaatgatcatgcaacagaaactacggcttgctgagactgtagtatcctcatcaactatgctctattctgtgtacgtaaaacccatcagatatccgacagaggtgctttttataaacgaatctcccagttcaaagagcatgttacattttccatggggaccaagacacccgacaacgggtgctgctgttgccaagatctcacgaccaaatagaccattgatcatattagttattgtggacgtcactataactcgagccacctgaacagctgtcaacgaggtggatgcacaaagaatccctttgtgaggtaaagctctta

SEQ ID NO: 13969 - DNA, 510 bp, Glycine max
  unsure at all n locations
aggggctgtnaantttganncccctttaggagacacctgatgcgactganatcatggaaatcgaccacggacccgggatcctctgagtcgacttgangcaacaagcgcacgttaccttattttacacngncggncancgcgtgttgtcaatggcacaatgcccgctgagaaatatcaaaggggctatataactaccagacgctggtactgctcgttctataccacccctgcactttactttgactatgtcggattacgagatgtccgatcggagacatacggtcatgctgctttgtgatacctcgctctgtcatctttatctggccgacttcagctggcattatagggatcaatatcggcgaatcatgcatctagcccatgtgggctaacgtcttcgcggctgatgatatgagagcatgccacagtcggccggaacacactctcgaacgaaaaacctatccgtcctacattgtgaatntagangctatacccgacagacgggacctatct

SEQ ID NO: 13970 - DNA, 308 bp, Glycine max
  unsure at all n locations
ntcagcaacttcaaacgacaagaacggatgacgcggatgtcttatngatttccgaanacancgagacgctcgaaattgaatgttgaagctctcagcaaatgcaaacgacaataacgtttgactcacaggtctgattgcgccccggagtacattcagacgctcgaaattgaatggtgaagcgatgcacaagctcaagagacaataactctattctcagaagcccattgagtcccagaaagagtcggatgcttgaaagcgaatgtcgaagctgtctgcatactcacgcggcaaataccttgtactcggac

SEQ ID NO: 13971 - DNA, 494 bp, Glycine max
  unsure at all n locations
ngggacgtggcaaatgatncccattgnagntcnnatgatctatggagcncagnggaaatcatctaggaccnnnnanncnctaanncnccttncggcaggcancangatttttaacngagccggcgggccaaacacgcacgtggatctctattgagaaaatgacagctgacctctgaatctcatcgatagagatgcgacgaaatacttgagtgactcaagaacaccctgactgtatgaaatgaccctcgcaacgtaccagtgtagccctcgccggacacactgaacccttccttccgtgcatcatcaacgtcgctctctacgaccactatgccagacaagccattgctgcccatagttgtctggaggccatagctcccgcctatgcatccatatgaaggattgtcgacctacccagccttcacgaggagagctatcacctcggttggagtacctaatctggacaccgcccgggagtagcgtatacctcctccagc

SEQ ID NO: 13972 - DNA, 374 bp, Glycine max
  unsure at all n locations
ccatatgaagcttagacacctctacacacanaccgagctgcagccggccgcgagacggaggagatttcgtgttcccacagcaacccgccatggaagcacggacacaacccaaagcgagagagcgcctcactcggaaaacctggaggaagacgacctccgcagaccttgatacaagggggaagatgttcaagctgaaaaaagacggagcataagagggggcaccaattcccgggagaggaaaccgcctggaatgagccgaacaatgagctcaagaccacaccgccgcgtcccatcaaaacgagggcccggaacattccggatagtatcagaacaagctattcaccaccgcctgagaggggacactgaacctctag

SEQ ID NO: 13973 - DNA, 494 bp, Glycine max
  unsure at all n locations
aggggcgggggtttgatnccctttggaggtcaatgatctactganccctggannatccagcnaggtcccgggatccttagagncgacttgaggcaggcaagcgaggttaatataatgcgcccgaaccaaacgngggacgcgggacggatgacganatcacaccccccactgtcggccgtgtgacaggaaagaaccataagaagctctcgacaacgtacgcattgaaaccttgggcgtatcgacccagtatgcgcaccaaatctgtaggatcgtgtgacaacttaagactcccaattatgtacccacacggtggaagatgtgcaggaataactcgagacgacctgtggtggaaaaagaaccatactttcatcccgaggcatccacctttgaccaaatcgcagtttgggacgggaaccaaaaaggttggacagcttatacaactcgagcgaatggcgccgctccacgaggtgctcaaaaacgggcaacggtgggcg

SEQ ID NO: 13974 - DNA, 488 bp, Glycine max
  unsure at all n locations
ccagacaactcgcanncantgcacaccnaanccnaagactccggccgnngagncagagaggagagagagagtgtatatttattatcaacaagcaccccccgagagcgtgtggctgatcagttgaacagagactccaatgcaatgcgcctagatcgagcttgcgacctcaaacttgagaatacgaagatcatgggccccttctttcgcataccaagaccggtgacttaaaagattggcggaagaacgactaccggaggctaaggaaggctcttggaactatataccaatgggatgtgtgcaaaaacctggctgagaatacgtgtctcgaggaccaagtagcctttattgagccaagtccaccctctgttgacagtgcactaccgaactggagctatagtgtgctcctgcgaagacttataatcccttaccgatatcgtgtccgactctttaatattcaagactcggcagaatggaacgcgacttggtgg

SEQ ID NO: 13975 - DNA, 402 bp, Glycine max
agctagccttttgcaagtgccatttggcccatgtaatgaactacatttccactatcagtgggtcctaaggagatggaggaaagtgtttctacaagagattgttgcaatgcttccaagccttgagataaagcatcctcagcctgctgggaagactgttgcagattataaattcccatcaactgctgatctgttaatggctcaaggtggttcttgatgatctgaactccaaaagacgagaaatgagtcaacaacaaactatatacacaagtgaagttactagaaaatggaagtacttaattggcaatcaccttgagaagttcggatgaacggaatccaccaagccacataaaacatctttccacaggtgtcttccacatcccattatgtatgtgtaatacatca

SEQ ID NO: 13976 - DNA, 95 bp, Glycine max
ccttgaaatatacatatgtcttctctaatgacttgcaaatcaacttcaatcaaatcccatgcaccaaacccatgttatccatgacattcaacacc

SEQ ID NO: 13977 - DNA, 405 bp, Glycine max
  unsure at all n locations
ctntgatataagcagncccgggtatatggattggcaatggaataaagcctttgatgtagttctcaaagtttcctaaaatctcagagactagtggatcatctggattaatattcagtatgcgcttcatcataacattaatgggaaactgtttcacttgaaagaaaaataaatatcatgtgtttgaaattgacaagcaatctctttcttagcaaaaactctaaaaagttggaaaaagtggttatttctccaacataagttgaactaaatgcatattcaattcttaaaatacgattatatatatagttcttctatttcattgtctgcaaaatactataagagtagaagaaggaatccctttgaaacactgagtagagacaaattagcaaattgatggcaccataccct

SEQ ID NO: 13978 - DNA, 464 bp, Glycine max
  unsure at all n locations
gacacctgatactcagcttgagaatggctagacatgaacatgtattggttggtttgtttcaagataaaagggatgccccacattatttccatgacacaaatgcaaaaatgatgatttggaaactttatgcaaaactggtcatgcatgcacctatgtggacactcaagtgtcaaattttttatggtcatgtgatgctaaggctcaagactcatttcctctattttaaatcaacccaatgtttccaaaatatgttcttttatccatttgtgcattcatccgagtccatttcgggcgtccggggaaatttcacagcattcacccttcaggtgtagacacattttccaaaaattggttatgatcaatgaatttttttcaaagaaaagttggaagtcatctcttttcaaaagcatgtcgattntttagctagacaacttatttttctctttttcccatttttttcttac

SEQ ID NO: 13979 - DNA, 367 bp, Glycine max
  unsure at all n locations
tttancttanantccaccagcatcaaggaatgagggcgggtgatggaacctctccaaatgcaagctttcggcaagacttatggaaagatcttagaattgaccttagcagaggtatccatagaagccattgcatcactcacccaatactacgaccagcctttgagatgcttcacattcggagacttccaattagtaccaaccattgaagaatttgaggaaattctaggatgtcctctcggnggaagagaaccatatctttcatccgggtgtctcccctctttgagcagaattgcaactgtggtcaaggattcagcaagaggtttggacagcataaaacagactcggaacggcatggcgggcctaccac

SEQ ID NO: 13980 - DNA, 413 bp, Glycine max
  unsure at all n locations
tgtaagaatttgtgatagtgattntgccgtagatgttgatgttttanaagtactaccggatttgtattttttatgggtgattgtgtttttacatggagttctaagaagcaagacattgtgacactttttacttgtgaagccgagtatgtagctgcaacttcttgcacatgtcatgccatttggcttagaagattgttggaggaacttcagttgttgcaaaaggaaagcacaaagatctatattgataatagatctgcacaagagcttgccaagaatccggtgttccatgaacgaagtaagtatatatatacaaggtagcatttcattagagagtgcattaccaaaaaagaagtagaattgactcatgtgataactcatgatcaagttgcggatattttcaccatgcctctcaa

SEQ ID NO: 13981 - DNA, 502 bp, Glycine max
  unsure at all n locations
agggctgttanaactgattgccattgggaacaccccgtganntcagctgatagctnttgnancncncagagccgaccggcaggcttccaaccttgtatggcagggatttaatccaatttccaaacatctccttgtccttttggaccttggggaaaggaaccttccagggaatatcccacggaggcctcctatcctcctctatatggacctttcttggaattcaaatgttagtaattcaaccgtattaaagacaaagggaatttgaataaacaggacatgtgcactttcctttctgtgatccccatncctgagagactagacacatgatttatcgtatgacagtgtgtatattgtatgaacaaactagatgctactaaataagagagctgacactagataaaatagagcaactctatctagttgtggcgatattccttaacataataatctttgtcacttgtcaanacaccatagaatatcaataattatacttatgttatcn

SEQ ID NO: 13982 - DNA, 441 bp, Glycine max
  unsure at all n locations
ctttaaaactagtcacttaaaggttatgactttggttagaatctncagaaacaagtcacttgaagaatgtgacttttggaaatgtttttttcaaaatcagtcactggtaatcgattaccattaaggtgtaatcgattacacatcaacagatgtgacttcattttgaattttgaaaatcttaacattntaaaacactggtaatcgattacatgattatggtaactgattacagctttgtaaatcagtttgaaaaaaatgctggctactggtaatcgattactaccttctggtaatcgattaccagagagtaaaacactttggtaaaaaatttggtgaaaacttcatgtcctactcaatgttttgaaaaagttnttagtacttatcttgattgagtcttctcttgattcttgaatcttgagtcttgaatcttgatcttgattc

SEQ ID NO: 13983 - DNA, 446 bp, Glycine max
  unsure at all n locations
agctgttttttgaaccttggaaggtctctgatctttgaancctgaaancacagngaccggaggagccaacnnggtgtgagagacaaacttangcccagccggaaacacaggggcccagggaagccgccaanaggcccaagcnaggagaacgaaancccgggcacnaacaaggcaacgcgagcnaacgaaannaacacaaacaagcacggacccaacaagagacaagaaagccnnccngcaacanacaaccanggccaggagaacaaccnangaagnggaaccagaaagacaaccccccaagagcncncaaccgggcanaggcggcaccaggacagagccacanccgcaagacgccaccangggggcaacaccccaaggaaccnngaccaggacagggacggcaaggcgcaaaacacgccncaacaccnagccaggggancncngag

SEQ ID NO: 13984 - DNA, 355 bp, Glycine max
  unsure at all n locations
tgcagatatgtcgcggnggtcangagaccttggggacgtcangtaaggtgctattgcccataaccaagcttgaccaatcccgacccaacccggcatagtcagtcagtgagaacctgtgatgtacctaaacaagcgagctcctggcagtcaacagataaaatgaacaaggaccacaaagcattgaggcttgtgtggtggctggccagctgtgaatcttgtgtgatatatgggttatggcctctggtaatcgattaccaagggtgggtaatcgattacaaggcctaaagatgaagacaggaggctaagatggtctcttggcatccattaccacggggtgtaatcgattaccaggctt

SEQ ID NO: 13985 - DNA, 499 bp, Glycine max
  unsure at all n locations
aganactgtagaacctggatgacaatttgtganaccnngtgattccattgtagcccctgggancctctggagccaacctgaggctggcaggctggacttggcgataggananaagcctannattacatcttaagaataagccaatggagttaggatggagaattcccacagagacaaggtccgatggattttggtgcttcatttaactanagaatatattcttttatcataatataataatgtaacctcttttttttaatttccaacgcggttatggcccgaccaaacggtgggaatcctttttaccaaaaattaacgaatactacaattcaaatgatcggtggatatgtattttttagattaggcgcgaattgacttaaataatggacggaagcacgtcaaaaggtggtcaagaggaaatgaaacgagattaaagttcccaaaaaaatgtggacaccacgggtcaggaatgattgaaaacttgttcgaaactacccgt

SEQ ID NO: 13986 - DNA, 304 bp, Glycine max
caatcatacttccactgttgccacaggtttgggtaaatttctggtatgctgtgggaaccaattccaaatttaattttggaaactatatcttttgatcaaactgttaagcattcagaatcttttgctatcaaattacccattgccttccctactgtattgtgtggcattatgttcagtcagcatcccaatatgttaaactacactgactctgtgatgaagagagaatctcctctatccctgcattacaaactggttgaagggacacatgtcccagacattgtctcgacatctgtctcgacatcag

SEQ ID NO: 13987 - DNA, 509 bp, Glycine max
  unsure at all n locations
agaaacgtgaaaattttgaaaccccctagtaantccggtgattccntttgagancggggagacctctaaagccaacctgcagccttccagctctggattcgttatatccaggagagttcacataattatctccacacggaccaccacttccacagtggccaaggttccttggaagatcctganacccctcttgaaggaccctccaaggtgagatatgtccaatggcacctttggcctccaaaattcgaaattctgaagatgaaggaggagaagggtttccttgacttccacatgaccatccttgaaatggccattgctggccttgcctggggagaaaggatgacagatganaagctggtgagaagatcctcagatctttgccttagagatttgacttgaaagtcactgcattagaggaggcccaagacttttgcaacatgagagtagatgaactcattgggtccttcaaaccttgacctaggactctcggatagactganaaaagagca

SEQ ID NO: 13988 - DNA, 397 bp, Glycine max
  unsure at all n locations
aatcaaaccacatgttgatttaagttatataaaatattnttaatttaactacatgtctttaaatttaaatcttaaatatataatcatattaaatatttagagaaagaaatttaccgtgtataataactctatcgtctatgattttaattcacaaaagatttcaatcctaagagcaacttaatagaaatacactacactacccaaatatacatggtggtatctagctcgacagatatttatcaaaataataataatacatgtcgtcttaatcttagattattattgattatgtaggctctagcttctcttaanttttttcctatcatgcatgtntcctttgttggtggtggtggtggtggtattattattattattattattattatcatagattatg

SEQ ID NO: 13989 - DNA, 148 bp, Glycine max
ctatcattgttattatttctttcttcatcattaagggaaacacttgggctgccagatccttccacctttggatgtattctttaaaagatccgtgcccccttttttacatgttttgtagttgcatcctatccgaagacattatactgac

SEQ ID NO: 13990 - DNA, 186 bp, Glycine max
  unsure at all n locations
gtttgggaaataagtgtgggggttttgttctttgacaaacttgtttgtggctatgcttcatgatgtattntggccatacttgatatacattgtatatngggttaaatgttggacatgctgaatgaaatgttgtttctcaaaagctatagaagtaaaaaaaaaaaatttcgaaaaaaaaagaaaaag

SEQ ID NO: 13991 - DNA, 438 bp, Glycine max
  unsure at all n locations
aggaactgtgaaaactgtatgcttttagacgacnnctgatctttgagnncntgggatncacccggacccgggacgcaaagncattttgagcatgcaaccattcattaagagcaataaanaaacggtcaaatggggggaacttctatcagccgaacattatctcattacagataaggcccacaaatgcatcatgtcagggaacttaacaaagctcattggtcaaaacgctatccctgaaagttgtatatcactcttatagagaactgcataaaacgaccaaagatataaatttttcctactatttaaccatttacagggtttgaaatagaaaaaacttatatgtggctctttagacgattctggtgctgttccgtcataagatttgcacgttcacctcaatgattctcataataaatggttactttaaaggttctctag

SEQ ID NO: 13992 - DNA, 402 bp, Glycine max
  unsure at all n locations
gctatctanatcggggatgaacaaaaaaacctgtttatattatgtttactccaaccaaatgcgtagattgcaaattgccagtccctcaactcatgcaaagatggaaatacagatattacattctttaaattgcattcaacaaacacaaacgcacatatatacgtggaacaattaatataatttgaatattgaatacataaatactatttttatgatgattaataacttgccttgtgacaatatatactacaacccagctgtgtaatatttcgcaaaaatgcttgatgactccttcttctctctgttcacatactgcaaaaattcgttgaatatccctatactagctgatttagacaacatctttcccatgggatccaagcaagtgctagctcttagacagaa

SEQ ID NO: 13993 - DNA, 607 bp, Glycine max
  unsure at all n locations
tgagatgtgnnnntttgaanccccttttnagagnncaaatganngcnnatcgatantcattcgagaanccacgcnncggtacccggggataccncnnagagncgatcttgcaggcattgcanacntnnggtttgtnngnngttgtaatgcaatnnaaaggnnaaccgagacaccaaagagcaagaaaaaataaagtggccatatannggcctacaggacggtctttgggaattggataccataccaaaacaattttgtggggcccattnttcattacacccctttcgttgggaaatggggttaaccaaatattttaattatcaatttcaatagacgggtnntactcctagaattatgccataccttgttttctttataccatgaaaaagtcacacatctctgggatgtgttcaaaaacatttaaaagttgaaagttgaaaaatcaaactcaacaaaaaagaaataaagtgtgtcaaaatctgacncgtggtggtgaatactatggcaaatatgacggttcaggtgaacaacgtctggggtctttttccaggtacctagaggaatgtggaatcgtcccacagtacaccttgccggggtcacctagcat

SEQ ID NO: 13994 - DNA, 450 bp, Glycine max
  unsure at all n locations
tatgggttagaagtaaatataaaacatgttgtctgaccatattcacttttaatngactgacactcaatttcttttttgttgctatctttattgctctgaagaaaatgttttgttttatttgattggttcctattttaactgactgcacatttttggtaacttgacaattggtgcctttgtgatgtcttgtcattttgatttattaatttacctatgaatttaactttctcatatgaatatttctacaatgttcagagttctttagtagttttctattgacacactaatctgttactgcttaatggcgtgtatatatatattttatatataatgaggaaatacctttccccaaaatgtgaggtttcgaagttcaaattcactctgagccatttactgatatgatgagaaaatagacaatatatatgtgcaaacaaaaaaatatgcttctga

SEQ ID NO: 13995 - DNA, 478 bp, Glycine max
  unsure at all n locations
gggcgtgattttgagccttttgnagtcatatgatnttttganancnccgaanncnanagngaccagaggtttgaagcnggatttttctattcaagcagnttaccttacagcgacagaccgaacaacaggggccctgagggcaacgacgcacggcacaaccagaaaaccaaaacgaaaaaccaccaagagaagacgcaccaacgcacgattgcccacaaaancgacaaacagaagaagaaggaggaagaganggaccangacaaccacacgaacactcccgaaaangccgacgccngcactgccacgggagaaaggacgacagangaaccaccggggacaaagagccccagagcccagccaagagaagggacccgaaggcacggccacagagaggcccaccacacgngaacacgagaacaagaacccagtcgcccgccgaccgccgagcaggaacccggaaggactgaaaaaacacgac

SEQ ID NO: 13996 - DNA, 386 bp, Glycine max
  unsure at all n locations
gcggtaagcttgtattgcacncttcaaccaacccagcggatgctggcgnagagggggggggggtagcttttacnggnccaccacgggggggtgagatgaagcttcaattaatccctagatttagagcacaaggtccgagataaaaccctatgcttgtgactctgttcacgctaagatcatcctgtaacacgtgcagaacaccttcactcccaatatactggggatcagcgcacagaatgttacaccgggagacatggcgctatctgaatatatgatatgtaggctgcgcgctaagatctctatatgcagctcctcttgtggggggcggggttatacctatgtatgagatctgtgtgaggcttcgcacgcgcttatatccataaggc

SEQ ID NO: 13997 - DNA, 500 bp, Glycine max
  unsure at all n locations
aggcgcgtaaantttgaaacccctggagaggccaatgatgcgttgtanccctggacanntccacacgnacccgagatccctagagtcgattgctggcgtgcaagcagagtttaataacattgcaacaagagnccacaggagcacggacgaccacgctggctcaactaatacaganacaccctccatagagcactcctacacagcaggcatatccgactgacacacacgtctgccacgacatctagcctgtgccacactgtcgattacacgtcatacgaactactccacggaactacctgctatactcaccgactacatattcttactcgaacggaagactccttagaacatgggagctacatcctgtcaaatgcgccctcaacaccagaatgagaagtaccggacctcactcagccacggaatcctgatgtgcaaggagacaactcatgtgagacctcaagcgttgacaaagacacttgtcggaggaaaataaaacatgg

SEQ ID NO: 13998 - DNA, 495 bp, Glycine max
  unsure at all n locations
gcagcaggtcangagttcactcatacaccnanaccnagacctagctgggcaaaacaaggcaggagatttaggcttataattgtcgctaaaaacgagcggtcgttaaatgtaaagcataactatatcttgctattaaatactcagagagagagatgtacacgagcataataactctatcgtctatgattaaaatccacaaaacatatcaatcctaacagcaactcattagaaatacactacacttcccagatatacatggtggcatcgagctcgacagatctttagtcaagataatcaataatcacatgtgcgtcttatgtcgttagagtgattgactgattatcgtagggctctacgcttgctctaagttctcacctatcgagcatgtatgcttagccgtggtgctgatgcagccctattatgactataatgataacgcacatacagtatggaggccctagctagatgccatttgtatgtggagatataggacan

SEQ ID NO: 13999 - DNA, 517 bp, Glycine max
  unsure at all n locations
aaacgtgaaatgtncctttgnactccggcgattccattgatanccgcganacncnaactcgaaccggagattctctacatcactttcatgcatgcacactntanttaagacaaagagatnaaagaaatccaagatggatgatcaagacagnctctaaagtcttataagaggtatattaaatatgaacggaactncaattgaagtagcaaaaggtttggccaagaattgtaagctaaaaagtctttgtcaacaaatgtactctctggtaatcgattaccacaggatgtaatcgattaccagtggcctaaactgattcacaacaggtattagatattgaattcaaagtttggaatgtgcaatcgatcacacatatatggtattcgattaccaccattctctgaacctttaattttaaaatttcgacccttgtattggatcacacacttacgtgagttgtttgcgcaagaaggttctcgagacattttgaaccacgcatttctttttgtgtgttctattg

SEQ ID NO: 14000 - DNA, 326 bp, Glycine max
  unsure at all n locations
agagagaccaatcacgagcacattcntggttttgaagaggagtnagctgcttgctcaaggtccaaagcgtttatgcgagacagagaccaacatgttagccatcgtcagcaagtaccaagaagaactaaatctagccacagcccacgagcatagagtgctggacgagtatgcccaagtgtacacggaaaatgaggctagaggaagggtgatcgactcgttacatcaagaggcaacaatgtggatggaccgattttcttttaccttgaacgggagtcaagaactgtcccaatttctagccaaggccaaagcaatggcggacacctact

SEQ ID NO: 14001 - DNA, 529 bp, Glycine max
  unsure at all n locations
agggggtgtgacnntttgaannccccttttagnngnccgttgttttcnnnttgnnncagcttgcanantcnnnccnnntnngnncnnggnncncgnggnncctnttttttgcgccngcnggcgttttttctcctttcgnnctngcccgcnncncggcgcccggggggngtntcggcggnncgcggcctgcggccnnctntcggctcnngcntttcctcgtttgcggtcgctttcnttcttcccctcccgntctgtnggcttctttgntgtttctcctcncccttttcctctgntcctcgtnctttgttccctctgnntggcccctgcctcccttgctctcgtctcgtcccttgttgcttgtgtttgcttgccttcgctgcttgnnnntggtccgtgtctcnttgccctcgtcntgtgggcgcgcgtggcttcttgcctctcgtctcgncttcggcctggggcctttgccngcctctccgtgggntcgcgnngtggttcctctccttcttgcctggtgtcggtgtgtgcg

SEQ ID NO: 14002 - DNA, 436 bp, Glycine max
  unsure at all n locations
cttgctaaaccaaaatctgcaacaactgcttcaaagtcctcatttaacaatatatnagcagcttcgaaatcacgatgaataatctttgggtcgcaatgatcgtgcaaataagcaagccccttaacagtggtggttgtgattttagacgatctacaaaaatacaatcaatatacataaaaacatttttacttttaaaaaacatgtcgaaatttaactacaagaaattttaattgcttttatgctattttagcataggagtttatttgtattctgtttcgactgcattaaatgagatactgttgttggttttgtggaggaaattataaaaaagagaggagagaagagagacaataagtatgcagaggaaatagaattattctattctaaattcaattgttctcaacaacgatacantaaatatctaaagataactaat

SEQ ID NO: 14003 - DNA, 359 bp, Glycine max
  unsure at all n locations
ctcccttgagtggcatttgtattggttgttatcttgattgttgcatcttagtacatttgatatctttttggattgtgcatcatcataatgcatgtgaagaaaattttctaagttagaaaaatttcttcagaggcaaaaactctaggttntaataaattacaacctcgttttaatcaattacagttacaacaagttgtctgaagcttgtagagttaagtctcatatcggtttaatcgattattgatatctcataatcaattacactgttgtttgaggcaatgactaatttagtcaggagtctctgctttaatcgattaccaagtggattaatcgattacttttctcttgttcaagtgttt

SEQ ID NO: 14004 - DNA, 386 bp, Glycine max
  unsure at all n locations
tgctcttatntacattgatgtttgtatttattggatgaggttgtatgccattctttgttttaagggtagcatttctgggtaaaactaactttccaaatgtttgcctttgcaggaaatggccccgaggaagcttgcctcaaagaggtccaggaaggacaaggcggccgaaggaactagttccgctcctgagtatgacagtcaccgctttaggagcgctgtacaccagcagcgcttcgaggccatcaagggatggtcgtttctccgggagcgacgcgtccagctcagggacgacgaatatactgatttccaggaggaaataaggcgccagcggtggacatcactggttactcccatggccaagttcgatccagaaatagtccttgagt

SEQ ID NO: 14005 - DNA, 215 bp, Glycine max
  unsure at all n locations
gaggactactggacttctactaaaccanngggcgggntttgggnnatttattggngngggggtggtgggngattcgggtcgggatttggttttctttngacngaaccaacttggtctcctgaaataaaacgcgaactattctccacaagaagaacgcgaactgccctcgtaagtaccgatgtacagaggccggcaaagctctgggagaaaaggat

SEQ ID NO: 14006 - DNA, 480 bp, Glycine max
  unsure at all n locations
ncttagaccgatcgnagncgtctacattngcacncagctgcacttgagacannggnaacagggagtgggggaaggtgactttccaattatanagangacacgggggaggagagggaaaaatcaaccacaccaacaccccccganaccagagaggacgacctncacgacggaggncgcgaacgagcccacaccaccgcaaggagcaaaagacacagggagaccccgacacaagacacagaaaacaacaacaagcacgaccgcaaacaggcacaggcgggggccgaancagcagacgaccgaaacccgatcccgagtccacagcggtcagagcaaagacgagacgggacagggcagaacccatgaccaaagaggcgactctttgacacttgactttcaatggtattaatccagtacatctggtttaaacggttacaatgtcaaatcccaatgacattcaatcctggtgtgttgatcgacccg

SEQ ID NO: 14007 - DNA, 427 bp, Glycine max
  unsure at all n locations
tggcagcctctttttcaatggaactaacctggttatattnccttggatagccctttggagcgtggtttccctttcctggtttggaacctcactacaagccttaagtgaaaaaccatgatattacattatccttagggaatttgggagctttggaattgtttggggataagtgtggggggtttttgttcattggacaacttgttttgtgactatggctcatgatgtattttgggcctacttgatgaacattggattttggtaaatgttggacatgctggatgaaatgttgtttctcaaaggcaaaaaaaaaaacaaaaaaaaggcaatagagttgagtgaataagatctttaatggcacaggaatgatgaaactcttggcctacccttcatggttaagtntaatcttacttctttttcttatttctaa

SEQ ID NO: 14008 - DNA, 449 bp, Glycine max
  unsure at all n locations
taactcttgaagaagttgtttgatccagactaactcacaagtggttgtggccatagccctacattttgcttctgcactagaccgagcaacagtgttttgttttttgctcatccaagagataatattacctcaatggatacacaatatccagtagtggaccttctgtctatggagcatccagtctttaacttgtcctcatataacaatccttgtcctggagccttctcaatgttcctgagaatgcgaatcacaaccttctggtgatcaacatgaggagcttacatgaatngactaaccagtcttctatatctttctggatctgagtatggatcaccttggtctgccattaacttttgatttggatctataggaatattaacgggtcaacagttagtcatgtctggttcttcttaaatatcaagagcatactnntctttgaagactatatg

SEQ ID NO: 14009 - DNA, 251 bp, Glycine max
gaaatgacctggaacgtgactagctgaacagagcagggcggacttagacggagtctatacgggaaagggccatgtgaaggggagacagagacttatataattttgatgccacacgaggtaaatgaactaaaaagggagcacctgataaaacaccttaatatgaacaagtggacgcatagcacaccggataatgaattatctcagtgtggcaacataagatttgtgtagcgagtacaacgtttgagagaaga

SEQ ID NO: 14010 - DNA, 245 bp, Glycine max
tcatacggacgggggcatgttagaatacctttccaggctcaaaaagtgcaagaaatgattggtgtttctgcgtatttctggaaatgcgatgaactccctgagcgagcatgtcgcgcataactagttcatcaggacttattgaatacatgctgttgcgaaagaactcgttacacgagcctaccttgctaagtaagtgcatcttttaaggatgaacactcatgctcttgctgagatgtaagtggcta

SEQ ID NO: 14011 - DNA, 234 bp, Glycine max
  unsure at all n locations
gaatgactgaggcatgactgaactgccaagacggcgacngttgagaaaattccggatcccaggcttataccaaccaatcccattaaaattataaatatagttattgacttaactacaacatgcggggaatgacaaatcttaccggtaaaattctacgtaggaagtgaaaaccaatgaaaaagaaaattgctatctaaggatggcccttttctgccattaaagtatgtagtgcac

SEQ ID NO: 14012 - DNA, 348 bp, Glycine max
  unsure at all n locations
gaccaatggaaaacgtgaatgccggaattaccatagactacattcaccaaaaaaaaaaccttaaggtccataccctcgccttctaaaaagcatgcttccttcttttttgccgaaatagaaattgttgtcacctaatctaaaaccaccatcctctcgaacctcatgattgtggtttgtggataacattaatggtgagtctaccgaggttgagtggaaatgaaagagccaattgtgagaagtgaaaaaacatataanagggaaagtgacatcaaaatgatgggttcagaatatcaatagaactcattacaatctctcataagttgatagataagggatcctgagaaaacg

SEQ ID NO: 14013 - DNA, 170 bp, Glycine max
  unsure at all n locations
ctctgattctgcttgctgatgagaagaaaaagctttggttaaaataaaaaggttccctttttcatatttattcagcttgccatgtcctattgatgagcaaaggcccactnttcttttactgtgacctactcagccaaagtgaaaaactgacttgaaacctaaatctgctc

SEQ ID NO: 14014 - DNA, 235 bp, Glycine max
  unsure at all n locations
actgggcgtgtgcatgaatggcagattctctntcagattcttccaactcgctaagcgagttgagtgccttgcttagcggatgttacttgctaagcgcatatgcctcgcttagcgagacaccagctacttcaaccttcttcttcttcatcctttagcctgaaactgaagttgaaccacattaattcacaatattgggaatatctactgagtgaaatgggactaaacataaatatgt

SEQ ID NO: 14015 - DNA, 407 bp, Glycine max
  unsure at all n locations
gggcgttacctgatcctttggagcatttatcgctgaacctggaaacccaccggaccgggatcccaagcgattgaggcagcaaccggttantcagagagggcccacaacagggacccccggcntggncaaaccccaccagaaaaanaaaaagcctttctaacaaaaattaagatgaccgaaatatataaagttaacttagattagagatcaataactatcagacagatttaaaaatcctccaaaaagtaatgataccctacactctaggttggaaatagatccacgccctatgagataaataataatattccctatattcttttttttcgactatatccttcgtcatataatatcatgaaagaaaattatccaaaaatgtatttagttttaaataaataattatttct

SEQ ID NO: 14016 - DNA, 458 bp, Glycine max
  unsure at all n locations
tattacaaatgtaganataagctgcatgataaatcatgattgtttcaaggagttntgatgataacagagatgatgacaaaaaactcaaaagtcaagatcacttcatgataacaaagatgatgacattcaagattaagttcaagattgagtcaagaacacttcaaggatcaaaaganaatttgatttcaagaatcaagattcaaaattcaagaataatcaagatcgagatctaagactcaaagattcaagaatcaagagaagacttaatcaagataagtattaaaaagtttttcaaaacattgagtagcacaagaagttttcacaaaatcattaccaaagagttttactctntgataatcgattatcanattatagtaatcgattaccagtggttttaaaacgttaagattntcaaaattcaaaatgaagaatcacatctggtgatgtgtaatcgatta

SEQ ID NO: 14017 - DNA, 408 bp, Glycine max
  unsure at all n locations
agcgtgtatctcttggctatttctttaaaactagtcacttagaaagttatgacttttgaaagaatcttcagaaacaagtcacttgaagaattgtgacttttggaaatgtatttttcaaaatcagtcactggtaatcgattaccattaaggtgtaatcgattacacatcaacagatgtgacttcattntgaattctgaaaatcttagcattttaaaacactggtaatcgattacatgattatggtaactgattacagctttgtaaatcagtttgaaaaaaatgctggctactggtaatcgattactaccttctggtaatcgattaccagagagtanagcactttggtaaagaaatcggtgaatacttcatgtcctactcaatggttctgaaaaagttntagtacttatc

SEQ ID NO: 14018 - DNA, 335 bp, Glycine max
tctaatatagttcttttctccgaccgattatggccttttgatgttccaaacggggagagaacttaagggtagaatctaggaataaattccaatcttaagggggagtaaggattgatagcacacattatcaatcgcatatcgcttatttagacctcagattattgtcatcatcaaaaagggggagatcgctcaagcatatatgatatgacagtatgatgataccaaagatgagcgtgattcatgtcaacaattcgtagatccacagaagaacgatgtccttagttgactagatcttatacagaattccttatgagatgccgcacaagtacggctaa

SEQ ID NO: 14019 - DNA, 390 bp, Glycine max
ttccaacctccttttcttgttagaatatcaatggttggacaagtggcctcaaatatcttaggaaggggggttgaattaaaatatcacaatctttccttattcaaaagttctattttgattttaacccaaaaacccaagatggctttcaaaatgacctcctaaataataatgcaaattaatcttactgattagaattattaagaattaaacattaaagaagtttaagggaagaaagattgcaaactcagatttatactggttcggcacaccctgtgtaaaatttgaatcaaatttctaaatagctgtataatcattttgccactacatcgattaccgagagtaatctcttgaaaaagttttgacaaaactcttaaaaatgagagaatgatg

SEQ ID NO: 14020 - DNA, 400 bp, Glycine max
  unsure at all n locations
tgcctcanagagatctaggaaggataaagcggctgattgaactttttccgctcccgaatatgacagcgcccgttttaggagtgctgaacaccaccagcgcttcgaggccatcaagggatggtcatttctccgggagcgacgcgtccagctcagggacgacgagtataccgacttccaggaggagatagttcgccggcggtggacatcactggttacccccatggccaagttcgacccagacgtagtcctcaagttttatgcgaatgcttggcctatagaggaggacgtgcgagatatgcgatcctaggtgaggggtcagtggatntcgttcgatgtggaggctctcagccagttcctgcgataccctttagtgctagaggatggccaggaatgtgagtat

SEQ ID NO: 14021 - DNA, 278 bp, Glycine max
gtcattaccctgagctttactgaacttgaacaccgccggtttagcatgagagcgcgttgtatgacggggaagcagttgctctggatctgactatgaggacactggaggggtatccatttattgaaatgttgctatcttacgactatcaatattgtccaatctctctatatagaagtaggcaactttttttcgtctcaggacctaaattaaatcatagatgagccaggtgctttttaacctttacatcgacatgctacacggactgagcgtcagcattt

SEQ ID NO: 14022 - DNA, 302 bp, Glycine max
caccatggagacgcagcggaatacaaacgataagaggtgagaggaggcgccatccactatggaataagccatggaacaaggagcttcaccaccaagatgatccttggagaggatgcttcactggaggacaagaaagacggatagatagacagaggggggagcacgaaattgaatgaacacaaagggtgataagttgaacttcgacctgtgtctcacaagactctcattcatcaaacgtactaacagtgttacacatgcttctatttatagactaagtagcttccttgagatgcttacttgag

SEQ ID NO: 14023 - DNA, 397 bp, Glycine max
  unsure at all n locations
tttgatgcatgcaagctagttttagatgttatggaatatatgctgaggcttcgcaacatgaacctgcgatactcatggtaacgaatttgttcttcactgagggcatttacaatggcagcaccctcagcattcttgggaggaaccctatgttgcagagtgttaaagaaatgccaattgttgggggtagtgggatcttcaaatatgcaaggggttcttctgtgcttaagacacatgtgcatgatgctaaagctggtgttgcaattgtcgaatacaacgtgtctgtcctgcatgtttgagtgaaataggttgaagttgctctttataatatangtttngtttggaaggtgagtttgaatctttctcttctaatctctctaattttaagtccattcgtctt

SEQ ID NO: 14024 - DNA, 356 bp, Glycine max
  unsure at all n locations
gacacaacatactcagcttctatccaagctcatcatggaggagagtctccttcttctatggcttattcctcannggatggctcctcctctcacctcttctcctttgtctttcgctgcatctccatggtggaaaatcaccattgaaggacctcattgaagctcacagatccagcctccatagaagctcctaaccccactaccacttcttcaaatacgagttctattaaatgttttaagtgtttgggaaatggtcatatctcctcccaatgtcctaacaacaggactatggttgtgtgtgtaatgggatatcactagcacatattcttctagtccttctaggaaactgatgacaaacc

SEQ ID NO: 14025 - DNA, 393 bp, Glycine max
  unsure at all n locations
angaccaagagaangaagggncatcatgctcagagctggagggcctcttccttgatactgaccatgtcttanacttcgtacttgatctgtaattccacccgtatatgttcttcgatctgttgcgcctggagagaaaaccttattgctagaggttccctgacttcgatagggatcgtggcatatgtgttcgttgtaaggcgcagaggggtcaccttagtcattggctgatgtgaacaatgatgagcatcaagtatattggaggagtgcttcttggacaaacccttcgacttgtaagatctcgtgcggagcgctgtaaagataaacttgttagttgcctctacttggccagtttgctggggatgttcagaaaaagtcacaaggtgctagacaccg

SEQ ID NO: 14026 - DNA, 661 bp, Glycine max
  unsure at all n locations
cgcattcctcccnnnnnnnaaggggcnaaggcnaacgatggggccgnttgccagnttnnctnctagcnattnnacgagacactccagntaatactcaagcctnttatatgccgcaagtagatagaaagttgctatatagntagtatccatgttgacgtanngccacataccagtgtgtgtgcctgaacgcanncgttaaacccattcatgtacttttcnntctctntctctcgtatctatctattcctctttatcttttaattcatatcctattacctacaccaacgtcatccttcgtcgcgatcgagatannatacgtangaacaccatagtgcgatagggaccttcataagtncacacgaatacgntctacaacgagaagaattcgtgcgcgtagatnattattaagatatgtgcaggccatagaataatgaaactttcactcaanaccaatgatagaatcaatagccatntacctgagtcaccttcacacaaatatgagacattatttcgggatgatattggagaatttacacggctcgatccaacatagttcatgtgatccaaagtgtgcatatgatgtccttactaatatgatagatagaaagccacaccatcgtataatgtagttcttagacgttaaatgatcactgcaataccn

SEQ ID NO: 14027 - DNA, 390 bp, Glycine max
  unsure at all n locations
taagcttattccgatatgggctcaaaacggcagcaggtatcttcagtttctgagtaagtggtctccatggtttgttcatcaattcagttggctgaacaaaatcatcctctttttcatttccaaaaccaccttcctttggccatatagcattgccatagccataggttccctttgttcaaagagccacctattatgatcaaaatctccagtttggctcctcaccagtgctgacttcgttgacttcatcatggacaatctcctctccattntagacattccacttggtggaggaagtagaaggggatgcccattatctatagccacttcatctagttctgtgttctgatatggctccttgcatcctgngcatatcccacctnctgttttact

SEQ ID NO: 14028 - DNA, 383 bp, Glycine max
atgaagtgcgtgagacaagtagttcaattaatgtttggtgatttacactcatgacaaggaatatcaggacgtgagagtgtacgacaatcattttcattcaatgaaaccaagctgcatccattctctggacaatacctcattcgagtcaatcctcaaattatacaaatataggccttctatgcataaatgcctgacaaaatgttgggtgatcgaataatacaagcatatattctatctacctaagtagagtattaagcaaataccacaagtttttttgtgttacagtttggtgaaactcattacttttatcaacaatttattatttacgatatataaaaatgtatgttgcctacaaaataattaacgctatgaataacttatga

SEQ ID NO: 14029 - DNA, 273 bp, Glycine max
agagttatgagcttgaacgtatcttgcctgaccttggctgaggggccctttttctaaatggaatggggaaaaagcacctctaatcaacctaattggaaaatgtccgagaaacaaccggcctcatgtccacgtcggggatccgaattacgcttactttggttcgcttaccgatcccatcacttcatatttgcctatgctatgttacgttattctcttctccgcccttgcgttacatctagcattttccatcaataaaatccgcttgagctcttg

SEQ ID NO: 14030 - DNA, 358 bp, Glycine max
  unsure at all n locations
acattcttgtgctttctttgtggaaaatacacacttgctcaaactcatgaaaaggaacacaaactccatcacaatcatgaattcaattcanaataaagacatacgccccattttcacanaaattaaaaataaaaaaataaaagtgttntactgccatgtcatagaaaacaagtcaaactattcaaaatgcttcaggatgagcaaactaactactaataaataaaactagtagtgtatgtagacataaaggaaatattgtactaaaaccataattataataataaaccanaaggcaaaaagtatcaccaagaatcaacaatgtcaacagtgtctaaaccggggaatcagtgagagcaac

SEQ ID NO: 14031 - DNA, 497 bp, Glycine max
  unsure at all n locations
tggatgannnttgaaagcttggaagacagtgattcattgagacccgggatctatgagncgacctgaggcatcaacctgtatgttaagtctaacaattttatcggcctgttgcaccaatggtaaggggaggtaatacaagacatcttgccaaacaaagtcaggttagcgataactcgcatggtgcttttttccttccatggcctatattgtagcanaagtcatttgatccagctcaaggtttgatgaagtttgaaaaatgatgccggaatttatacttgtgcacagttggagatgttattttctccctgctttctttgacatgatgattcacttgattgctcatctgggcagaaaaatcaaatgttgggtgctgttatctacggtggatgtaccccttgaccgaacatggacatcttaaacggtttgcaagaatctatatatccagaacctctattgttgaaagacattgcaaagaaccatgaattctttcaaaactg

SEQ ID NO: 14032 - DNA, 339 bp, Glycine max
  unsure at all n locations
cattctcctaacaaagtcgaacatgccataactcaatcgtgctttttcttcaatgtcatatgtagcaaagaccttgatcctgccaagttagatgagctagaaaatgaggctaccaatacattgtgtcgcatggagatgtatttacctcctgagttcttcggcattgcggcacacttaattgttcatctggtgagggaaattaaatgttatggtcttgtatatttgtggaggatgtacccgattgaacaatactagaagatcttacaatggtgtacaaagaatctacaccgttntgaagcatctattgtgcgaaggtacattgtacaataaactattgag

SEQ ID NO: 14033 - DNA, 530 bp, Glycine max
  unsure at all n locations
atgcgcgactcanaantttagaaacccctgtgagaaagacgntttgannccatttgatnaccttttgnacanncaatcagngnnncacaggagtgtggcgcgggnncccatctagatggaggggaggaggttttncccnttttttagccggcacgacacgggngacacagcggcttataattacctgattatacagcactctcctagattgccctataaatttatagtggaccgttaaaaaatatgagttatataaaatacatcaacacccactattcgttgcgacttaattaattatacgacaccaataggaactcttctatttaatagtcaactacagataaacaaaaattccattgtgttgccacaaagacctgctctcgaggattttatgctacacatcttattttcgttatcaacatcaccttgggtacaaataaaatggatagccaatttcatttcccctatctaaatttggtggtaaatgaggctccatcccgctacaactcaaaaccatatctcgatggccc

SEQ ID NO: 14034 - DNA, 517 bp, Glycine max
  unsure at all n locations
cgcagatggatattcgatgctanagcnctcgaanaacacncaancnanancacanggccnncaccgcnagaggaggagagtgggacttatnttatgctattctgaccancacgccgagatacatgcacagaagaatgtacaacctacggcttcttatcatggtgacaatgaggctacattcctcctgttcgagactcgccatctccatatacatccctaaaattctaacaaaccagacactgtatttattcacgcaataaacaaaccttctccttacccaccatccatctatcacaacagccatccctaataaaccacacagtatcgctaccgcactttcaatgacgaacatcacctttaacacaatcctaatacaccaaccataaaatgatatgtgcagcaagaaagcctgtgtaattcaccacaataccagtggtctatgctgacttgctccaatactactcgattattaaatgatggccgtaccctatccaaggttcttgaactctcatatttt

SEQ ID NO: 14035 - DNA, 451 bp, Glycine max
  unsure at all n locations
aggaggtanntttgaacccgttggaggccttgatccatcgaaccctggaacccaatanncactaaggtggcaggctaatgtagcagagaggccaacatattctnccaatttccatgggcggacaaaaggtcttccatggcacgcagggacccaaggggaaaacacagaaccccctaatgctcccctataaataaaatgcaactctggaaggcactactattatggcagacgatggctatgccggaaaccactaatgactgcactctgggcatccatgctacactaggaacatgtctgcaggatagtaaccaacgatcattgaatcgctaaaaatatcccacttgtggggcctcctttggatacatgctatgaaggggaacttcatttcaaatggagggtcccaactaaaggacatgccaacgatgttacttgaacatcgtatggaaagagg

SEQ ID NO: 14036 - DNA, 329 bp, Glycine max
  unsure at all n locations
tggaacatagtgtgggttcgagtagtatagcattaatantagcacaaagagcttcttcattttgctcacgtccttcaaacaaaacacctggcatagcacacaggacaatataaaatgtttatattacagtaagtccactcaaatatttctaacaagcagatgaatcttaactcattgcttcattcctgtatgagaaggtgatatgctctacctcatagacttcatggatgagactttacaatcttaaaacttatatgacggcatgtggatccacgcttaggcctataaacaggcataagctgataggattttggtttctattgaaccca

SEQ ID NO: 14037 - DNA, 226 bp, Glycine max
gcggatgactgagcatgactgaacagcaacacgccggagaaaattgtcacgtttacggaaaccgggcttaatccccaaagacgtcctgggggagcaccagccttgagactggcagtaaagcggcggagacatcaacagcccaccaaaaagaacaggaacataaaaaggcccatataaaggaagtttatgcaacgggaccgttaaataataccaccaacagtaggct

SEQ ID NO: 14038 - DNA, 452 bp, Glycine max
  unsure at all n locations
aggggcnncccgagcgttgactatggctatgcacncgccacaananaccaagcnctaccagcgangaggggagagagcttttctatgctctcccncaaggatagcggcgactctcacctcattaactttgtctcccctccatcaacatggtggagaataccatatgcagacctcttggaactcaaaattcaacctgcctagtacctccgtaccccactaccaacctttcaatacgacatctttcaatgtataaaagtccaggacatgcgcatattcctctcatgccctacaaaaagataatagtaggccggtaaaggacacactactcatttcttatattcacaaaggaccgggtcaaacctaaacgtgatccattggaaagaagatagggtgctgatcatgattacaaaatcaagcaacacttcctcatcggaggaatccaggacctgagg

SEQ ID NO: 14039 - DNA, 338 bp, Glycine max
  unsure at all n locations
agagtaattgagcatgagacgtgatcatgaancngacccatangncnggagaaagaatttaggggacacacattacgggggaaaaaaaagggcccccaacgccggcaaccaaaaggagaaaagcccaggacacgccaagcgagcacaaacgaagggcagaacaaaggagagacagaaaacaagaacggccaggaagagcaggcacacgagcgacaagcaccaaggccgccgagacagcaaacgccgaccgaaacgaagagcagaaacacgccggaaaagaagggggggaggaagagacggaggccaacggaggcaacaagaccctgacagcgagcccc

SEQ ID NO: 14040 - DNA, 653 bp, Glycine max
  unsure at all n locations
agggccccngaggcagtaacgttgngcannngcatcgnanncnnnatncatcnanatancnaanacacnnacacngnnnnagggnnaaggaagaggagggtggagagagttactactttctccgcncncccncncnccccgcncgggggccgtagtgtacaganannacacnacacacccacataccactacatccaccncanagcncaatgatctaataatctagaaacagcgtcagctgacacaagaataagattaaacctcnngcaatngactatgataacagagcaagacattgctgactccgatgtgagtatcgcgacctgaccgcctcgaggtatatacggacgctcgagagtatctcatccgatgtgcgtcattgtgtgacctcgatcgatttctgcatggacattgtataatctatcacatggtggtactactcttacacagaactgtatatatcactatcttcgcaacaatgcggatcggatgctacgatgcgtggctactacgacgggcatacgaagtacttnaccgaacgtgacatgcagcaattactgcacgcgagtgaagttatagagtaggtacaccacatgcgcgtgagagacaatgaacttgataaggacagaatccatcactcctggtgaaggcag

SEQ ID NO: 14041 - DNA, 510 bp, Glycine max
  unsure at all n locations
aggtgtcnatttgaaagctttggaagcctttgagccttttgaacccctgtgaaacccatcgngnncatgagatgggtgagggacacttcgagaggcgagcgagctttttacccttgtgacaccaacggggagagaagaaccacgagtgagaacacacacacaccaaaagcggggagaggccgcgaggaaggatgcactcacctaatgtttacattccaaacgatctgcaaaggcttgagctaggacagcatcaatgctggcaaagttatgtcttatagagataccgtagactcctttaaggttgtaaagacgactccaccaattctcatttattgttatagaccgaaaacataaattatcttcatggcccctatacctatgggtgagtacggctcttttgctcaaggttaacgcgtaggtgctgaggtaaggtaaacttgatcttccagacaacggagacactctactatgctcatagttatacttaaattcggcctgagttagccntcn

SEQ ID NO: 14042 - DNA, 280 bp, Glycine max
tcgatcactcacttaattttccatatactccccctttgtggttgaatctacgcttcactcgagattaactaatttaagcatatgaggtgttgaatcaatccctattgtctctccccctttggcattaacaaaaagccaaagtgcgtaagaaacataaaacatacataaatgattataatgcatacgaccgaatgtaagcacatatcactaaacatatattatcaagataattaagtttacaactgcatacaattaagagtgagcagatataatcatgttc

SEQ ID NO: 14043 - DNA, 514 bp, Glycine max
  unsure at all n locations
tgagtgacannanatttgaanaccgtttagtgaagccccggtgatngcaatcgtananccattgcgaanncatgctcggancctgaggatgctgtagagncgaccgtgcagtatgcangcatatcttttntttganttctacatcccccnanaaacaaagactgtttttcacaattctctgctataatagatcaccctgtgatataatcgactactttactttcataacagatccacaagtgatcaagagcactctcatctatgacattgagagtataatctattacattgctcatgaaagtctatcaattttatggaataacactttaatctattgcaatgatcaaataattcgtatctctataaatagtcaccttgtgctctcacttcaataacctcctataacttcttaatgaactaaagtaccagctattttctcatgatacgaagatagaaacaatgcttctaacagtgtgctcccacctataacttcgattttgagacaacttgcgat

SEQ ID NO: 14044 - DNA, 462 bp, Glycine max
  unsure at all n locations
agtgtatcttgcatgcacncntcacaacatccaacccnacacagcnggagaaggaggggagagatatctttttacnnccccacggccgccggggcctggctggagaagaccaacaagaatcccacaccgcgcactgcatcacagccaattcactccgactaaacctctcgttcacaacacacgcaactataccacgcctgtactgaggcgacgaactccctacaccgcaaacactgctacacgaccacccgaccatagctgatagaccaccgattaggtatctagctcacgatcatgaccaccacgcacgttaacatctcagtaacaacacatacaacaccacggagccaagcttggacataatcaactatacctatcgaacaacacacagacatatcaccacaatacgagcaacaactcagcgaagtctcaagagcgcccacaccgggaaaacaggagcac

SEQ ID NO: 14045 - DNA, 309 bp, Glycine max
  unsure at all n locations
gagganatgaacgtgaacgtgatcatgaactgaaacatgaanaaagagaggggtctttagggggggattagcncttttaggnggcgaaacaggaccccaagataggaggtccaaatattcctgctggattgaagaaacgaagcctgtactttaagctaccgggctgggagataaataattgtgcacaatgaacagaagaatttcgcctgatgaaacctggtatcctaaagcgtctttacatgataaagctaagagggtaatagatgaagacctattcacaaaactgaaatcgcccctctaaaggctagc

SEQ ID NO: 14046 - DNA, 310 bp, Glycine max
  unsure at all n locations
gcccagaggtgtgactagctcacacacacnatccnaccgccnggggggggggtggttaagttaccccccaggcgcgcgtgaaatggtcccttccattgagtggtagttatcaccgtctgctatgaatcaggggcataggagtaccacgtctgcgattccgggacgaagaaccaaaccgacgcttcacccactagactacccatgtctgaaaaaccatgcacctttgggacaaagcgctaccttaccgtttcccgacattataaaagtactttccgaaacgagcggactcagaacgtcgccgctcgctctc

SEQ ID NO: 14047 - DNA, 471 bp, Glycine max
  unsure at all n locations
ggatgaactgancttttgaacggtgtgcatgacttgaancaagnanaagaggagcnagaggattttatggagcagagcggttctcacattttaaaggacngaagaaggcgnatactagtggtgggggaacgtatcanaaaagaacaccaggccgatatacatacggnctattgctcttagcgcatccattatagaaaactattatgggatactgtcaagcagctaatagcagcacttgaggggttggggtgtatattgggcgattttaattccattaaggaccctgacgaaagatttgggaggtgccaaagattatccacaagatcgctgatgagtgaatttaatgaatggatagatgattggagatctgcaagaccttagggaggcggagatttattcgacataaccatggagcgctaaaaacgatgaccgtttttggatccttacatgctttgatatgcctgcagatca

SEQ ID NO: 14048 - DNA, 277 bp, Glycine max
gccccgagggtacatgatcttgaaccaacaaccaccggagggagagggaatacttattaccaagaggcgcctggttactagatacaaacggcttaattaggtgcataaattagatgtcttggacaccaagggttcaagagggaatgagaaaatttctccctaaagacactaattgtctccactgaaataagacttcttcagaccctaatcggaaccttaggtctggacgagctagcttttttttaaccgcgctagcaataagatttttaaacaatta

SEQ ID NO: 14049 - DNA, 431 bp, Glycine max
  unsure at all n locations
agacggcnnttcgaagcctttgtaaacggtgantctcgatgccttcggaaccnagaggngccaganaggaaggggaancatttgaggaaacagcagcaacaaagtgtggcgcacagaaaaggaaaccggggaacaaacaacccaacgaacaaaangaggaaaaaaangacgcccncgcccaccncaaacgagcccaccgacgccaccgggcaagagagacaagaacacaccggaggagaaaacagaaccggccccgcanaagacgacaaacgagcaaaaagaggacacggggcaacaacagcgacggacatacagaaacgccacaaaacaggcaaaagcggcccgaaaaaggagatgcacggcgaggcaacgaaaccgacaaccagcacggccagcacaagccattcgcgggcgatgaagcaggaaacccc

SEQ ID NO: 14050 - DNA, 405 bp, Glycine max
actcaagcggagcagccaactcctgaggtcatgcctgattattgaaaatggtgattaagcgcacaagaacgcctactctgcgaacactataagggacttcaagaatgtgttcaaggcatcctcatcaaacttcactaaatgacctctcaccctcacctgcgtaagtgatttatcctcagggtcatagaggttcgcataaaattccttcacaacaacgatgtctatactgctatcagacaaatcacccaacttctcatcccaatgtctactcttgagatcctccttcaacttagcaaactctgagaattaactaccacattcctttctaagagtagcttgccatgcaccacaatgtatgtatatctctactacacctctagggatgtgaatcaggatctataaatc

SEQ ID NO: 14051 - DNA, 342 bp, Glycine max
  unsure at all n locations
agagganntttgatacgttagagcgtgancttgancatgaancaagannnnaaagggcggaactttgtggcgaggatttcnnccttttcgggaggcaggaccggcctcacacagaatacgatggcacatcactgtgatggccgcatttgctggaaacaaagacgggacctctaaagctctgggcctggggagatgaaagaacaatgcccagggtgagaaaaacatcttggctctggtgaaagcattggcagctacaaacatctcgcatataatactctgaggggggagatgtcaaaaacttatttacaaaacatggacaatactctgcagaaagttatatcn

SEQ ID NO: 14052 - DNA, 409 bp, Glycine max
  unsure at all n locations
cttgagctntgagcacccacgactgtaccttgagcattgtangttttttttcgacccacacagttccaacagcagtgtagggttttcttcgacttttctttgatagaaggttctgtgggttccagccagcggtttccaacagtatcgaaatgaatgtggggcaatgtgggtgtcgaccgagcagtttctggcagatttcatgtgggaggagaaagagaagagagagtgcagcagggttttcgagcgcgcgagttgtgaaatttcaacacgttttaacttattaacataacaacatcaacatcagttttttaaggataaaaaatgttaggatgaatctgttaacatcgcgtttctaaaaatcgatgttaacttcaacaaggtaacatccgtttctcaaaaaccgatgttc

SEQ ID NO: 14053 - DNA, 260 bp, Glycine max
aaagatttaaaagtgaggaatggaagggatctgtaaaaaacaacgggaacccatggggataattatgattgacaattaataggatcatatattataggcatggttatgatacattgtaaaaaataatagggatggtataatgatatgaaaaatgttacattccagacagatgttaaatgaatgtgactaagagaataaggtcaaaaataactttttgtttcttatacatgagagctatttgactcataatgctgagctat

SEQ ID NO: 14054 - DNA, 342 bp, Glycine max
  unsure at all n locations
ttgcattgctcgggagcggccttgggtttataaatnttatagaactccttgactagggctaagttaatgtgattatctggttgcctggtcaaggctctgtgccacttgcacctcctcctggtggaactcatcatactgtgagaaggccaactccacattcctttatgggaggatgttcctgcaatggaccattttctcatatcgcttccaggcgaccttaaacatgaaccgagatgtgtcgtanggttcctgaagtctggaggtggaagcgcgtctctttcttgagaccatctgcaccaaaacacagcaaatgagtcaagttagacaggttttattgaaaaa

SEQ ID NO: 14055 - DNA, 484 bp, Glycine max
  unsure at all n locations
aggactggancttttgaagccttttnggagccaaatgatgcttttgaannccnggaacnnaaaannnaccggagagagttagncggatttgatagacccaaccagtttcttagtctacaacacnacaacggcgaaataaggacagggaatccataaccccacccaagagcactcaacctccatttttacaaggaccctactcaaacacaccatgtgcttataatggaggagtactgggcgcattaattgatcatggtgtgaccctgaaacatagaggcaaaacctgattgatgcaggctggctaaaattcaaggagggaattcgcttgaaaatcctgacattgggaaccacactatgcatggggcattgtgaaggtggtgccatatttctcaatgaatcttaggatataaagtttgccctctttgaaacaccagctcaatgtaataatatgataaataaaggccttgttttattctttctgaag

SEQ ID NO: 14056 - DNA, 264 bp, Glycine max
  unsure at all n locations
gaaaataacaccagtgactgtattttgttctcacgcttcggttgaaaatgttttggacaacataagtgttaacttgagttctatattggactggctctgctaacacaactgagcaattacagatcaagtggcccaacagagactgttgctacttgcacctctcccaatatttttctattggcatttcacaaccagaaaaagatgcatttgaatagtcattccaaaataaattagaattatngaagcaactgtgattgcatgaat

SEQ ID NO: 14057 - DNA, 247 bp, Glycine max
agggaatgccttggcgtgactgcctgaactaggctgggagggaattagaccccctttcggccacgagcgtccccgagacttaaacgggtaacaagagcgcagtctctggaagcaggaacgttaccccagagtcctaactgaggaagggcaccagtgaaaccgaagcccttgcaaggtcccccgaaaacatgaaggaacgcagggcaagttacagaaaacgataggggactgttaatctcgcggcgca

SEQ ID NO: 14058 - DNA, 333 bp, Glycine max
  unsure at all n locations
taccactactggaaaatccaaatccaaattttcattgaggcaatagatttaaacatttgggaagccatagaagttggaccttatgtacccaccatggtggatggaaatacaacaatagagaaacctagaaaagagtggtctgaagaagacagaagattactgcagtacaatttataggctacaaacatcattacctctgccctangaatggatgaatattttatggtgtcaaatngtaagagtgctaaagatatgtgggacactctacaagtacacatgaaggacaactgatgtcaaaagactangataatactcaactcatgagtatgaata

SEQ ID NO: 14059 - DNA, 261 bp, Glycine max
aggtttttaacttgagcttgatcttaacggaccaaagctgagggaccctggcttcggattactgggaagagacagaagcattaacaagggtacccctatacacactaggtataagaccgcctctcctcactcctccgaatcttcaaaaagccctccataggcctgtccaacatttactcggcgtgccacactgctctgtatcactcaccacactgttaaagcctcctcggttaactcttcactgagactgttaccaaggct

SEQ ID NO: 14060 - DNA, 312 bp, Glycine max
  unsure at all n locations
ggaaaaatnggatatggcactgttagcgaagccttggcatacaagtgtccttttgtctttgtacgtagagactatntcaatggaaaaccttttttgagaaatatgcttgaggtattctattgactttctccatgttagttttttgtgtcttcaatatattttggttatgagtgcctttcaagtaattatcttatttttttagttttatcaaggtggtgttgaaatgattagaaaggatttactgacttggcactggagaccttatcttgaacgtgcgataagnttgaaccctgctatgaagcaagcattaat

SEQ ID NO: 14061 - DNA, 318 bp, Glycine max
  unsure at all n locations
agctngttgtaacctgacacangaaaagtctctatatatattgattgcagnncaactgcagagccagcttttgaggttgcatattctattgcttttcctccttcatgtttttcaactatacataccatgaacattgataacanaacaaataagttaatccttaaaagctntaactgaagttagaacgtgcattggattaataagctttacattttcatcagtaatagtgttttccattattatgttacttatcatttttgttctgtaaataccttctaatgtttaaaaatactattttatttggngctctatttctct

SEQ ID NO: 14062 - DNA, 242 bp, Glycine max
tccacaccctttcccctaaaccttgactaaatggggggtagaaccttggacccaaagctattaatgtgtaaaattgtctttatacattactataaaagctatcagactttttcttagtagtcttggattaggcctactacccccaaaccacttaaaaaacactgtaattgagattgtcaactataagatacattgcatatttagtgatgtaacttaccactctcctagatggggactataca

SEQ ID NO: 14063 - DNA, 400 bp, Glycine max
  unsure at all n locations
ggatgtaaactgaagcattagaccnttgatcatgaancgggcatcaaaggaccgagattgtaaggaattagagaagcaacaattattgggtgaaaccaaaacagggaagggcactaaaaccccaaaacnancgcaaccncccgcacatgggaggccatacaacgcacgaaaaacccacagctgggctaaagttgtaaataatcttaaagttccaccgaaaactggtataaagctaaattaatttctatggtcaaattctggactggtctggaccaaaatgggtgagttaggtccttaagatggctggaattttggagctgaaataaaataaaacttacaaatataaagaaagaaactcaaaactaaggactgtcacctatgatttgcaacaagcagctag

SEQ ID NO: 14064 - DNA, 383 bp, Glycine max
  unsure at all n locations
catganggtgggctcatgggccactttgggatatacaagacgctcgtcttactcaaaggaaaagtttattggccccatatgaagaaaaatgtccttaagcattgcactaggtgtgtagcttgtttacaagccaagtctagggtgacgcctcatgggctatacacacccttacccatcccctctgcaccttgggtagacattagtatggactttgtccttgggcttcctagaacccaaagaggtgtagactctatctttgtggtggtggataggtttatcaagatggcacactttataccatgccacaaggtggatgatgcttaccacatctcaaaacgctttgttatggaagttgtgagactcgatggttcgcctggaccatt

SEQ ID NO: 14065 - DNA, 357 bp, Glycine max
atctgaagaaatgaacaaagtcaatatacaatatgagtgcaaacaacgctatcaagcataagcttggtagtgaagtataccaaatttcgcaaaagctagaccccaaaatcctaaatattggtcagttggaacactaaagaacgaaggggtttgaagaaacataaatagaacaccaatctcattcttaaaataaaacacccaacaataaatcatcatttgccttatctactttctttggcccaaggacaaatctgctatcaactagctgcaacacagaatacctttgaaccctaatctctcttttcattaagcttaataactaccaagggaaaagaacaccatagatcatctagttct

SEQ ID NO: 14066 - DNA, 426 bp, Glycine max
  unsure at all n locations
tgaactganattanatctatttctttcacacttgtgtcaatgtctctctggtataggctgnncaagtcaagcatttgtgacacttcagatttcctcaacttcttgttgccacaaggttgatcaacacaatgatcagaatcagtttctgcacttctctttctcccatcaacacttgtatctcccttgaatgctttaacttctgctggatgaatggaaatcaacggcaattcaactgaaacaccatcaaacttttgagggttgtctgcctcatccatgatgtgttgttgttcagagctttcagatgatgtcaaagagctntcaagtgaacacatggttcctctgtcttggtttctctcttcacagttcaaacttaaccctcgtgtttctgtgagttctgaaattggagaacttggacatgcattattg

SEQ ID NO: 14067 - DNA, 497 bp, Glycine max
  unsure at all n locations
agatgtnnnttgannnctttgtanancgttattcatcgaacnccggcacncaacgnngaccttagatggtgagagcaacctttgcgctgtccagcacgtttcntccancnaggggcngcagacaaacaaagagcccgctccagacaaccacgcaaacaannccacagaaacnngcggcagagaaaacgacggacacaacccagacagcaaaacgngagagagaaggcacaccacacaaacgacangcgccaccagaccaacagcaccacggaaaaaacacggccgccaagagaccccggaacacaggaaccgccacgggcgccgcgacgccgacacagcgcggccaaacaaganggaagccgagcgacaacacccaacgcacaaacagacggaaagcaacaangggccgcgacacgacaaagcgaaagcccccccaagcgaggggaaaacggcacgaacacagaacaacgaagagcacaaaacacgaaggaaaggac

SEQ ID NO: 14068 - DNA, 368 bp, Glycine max
  unsure at all n locations
agcncagcatgtatcgtttttcacncccacaaataccaccgnccccaagngaagaagggagagatttcttttgcncgacaccgagggggaggtgatgagaccaaccccccccaacggcaaatgcgcgaagagcacgaccatccgaaaccaaactgaacaagctagcgaggctgggctaccccttgtcctcgccagctccaaatcgagcctgcacgcctaccagaaggcttcacattccggaccggcaagtacctacagagacacacccgaccggcacccaaccgaccttaatcccacttgcccagagagctgcggtgatccttctctcgaacgccgcgtggcacttacgccattggaaacgtgactgg

SEQ ID NO: 14069 - DNA, 270 bp, Glycine max
  unsure at all n locations
gcgttactgagcttgagcttgatcttaactgaancacngcaagagcgacatttggcgcattaacttgaaacacggacgggaaancccaaccaaccccaaagcacacaccgccggaggaacccccgggcaacaggacgcaacncgccaacaaccacggcaaaagaaaaaccacccaccacagccaaccagcgcagcaaagaaacacaagaaaaagagcgacccccaaccaaccgcaaacccggaaaccgagccccacgggcaagaccaacc

SEQ ID NO: 14070 - DNA, 602 bp, Glycine max
  unsure at all n locations
aggccnccngagcagggggttgaatcgttactgangcaattgcancnacncnnattncncaagcnnggcaccngaagaccaagacgtgacgcgggcagaggtttgagttttgccttttacgnncnggaaggcgcccccaaggcagggctntacatgnagcacgcaaaaggcgcatcatccnccttgggcccaacctccaacgtgagcgtcacggtcctctcacgatatcgccagtatacatcgtantcttctcagacactcgaggtccggcctccaaatacctactagaggcttcccgcacacatcgaaaagttactttcgcccatttctcaaccagccnccaccactaccatccagactnaaaaatatcacgggtcagatagacagaaacacactttgcttctagcaacatccaacccagaatgctcgaagtttatggttatctgtaacgagtcccgagagaccaatgtaccttcactcgcaattccgtgaacccgttgctatggactcccagatgttaactgcccgtgtctaccccntgagacagacaattgggcgcgtgggggttactaggagacatcctgtaatctttattggatgcn

SEQ ID NO: 14071 - DNA, 428 bp, Glycine max
  unsure at all n locations
ggacggaactgagctttgaancgnggnaaatgtgctctcgaacaanganngaggggaaggggtttaggagcgagggtttatggggggggaagaggggactgacagngcccaaggaaacaaggaacaccagagcaaaaatgaaaggagcggtgaggcatgcggcaataaggccaaaggataggatgaaaacgagaacattccgataggaagcagcaaacccccaactgcatactacacataccgcccgaaccgccgcggaccaccaagaactagcgctaaagcggaacccaggagatgacgggcacgcgacgatacttccgttcccggcagatgaaggcacagactggggaattcgaccccaaccaggacaacaaagagagacggggaagaggcaccccacggcgccaacaacaaacggccaaagaaag

SEQ ID NO: 14072 - DNA, 240 bp, Glycine max
gatctgctatatctgaaccacaaccgcggccaagaagaaaattattcttccacccgggggagggtagcagcgtaggacaggagcgatgccattgcaatacaggtaattccctcattacacctattatctaagagggatatccagaatcttcccgcgaagagcgaactctatatcatcagggcgttccctatgaaaatgctaacaccaaagtgcgcccggctttgaaggaacccttttttc

SEQ ID NO: 14073 - DNA, 259 bp, Glycine max
  unsure at all n locations
aggggctgaccttgagcttgactagctgaacagancactgcgggactttttagggtttcgtaagaaaagcaccaagaccgggcacaagcaacgagacggacgagaaggggaccacagacaaaacaagcggaagccaaaacgcagcaccacaacagcaccgggacagaggggaccacaaaacaacgcagcanaaaaccagaccagcagagaaagacggagacggcgaaacggagcagcacacgaaggccaagagcaagag

SEQ ID NO: 14074 - DNA, 644 bp, Glycine max
  unsure at all n locations
ccgatgctggggacgtcagnntnctnatagcantnnacgcgacacncnagaaacactcaagcctntanggattgagaagaatatgagagtggaacatattctgtnttctanttgncntttcagcaatacgatnagagcaaatgagtagagcgccctatctgtatanntaataatatcgacccaaccctctacctggtagttacattgtcttcttgaattctagaaagaagatggtgggataacaatagcctgatgatagaagatatttatccatttaatacatcgcacagaaataaacatgtatacatactcaccgcacaccttatctagtcagttaggtctgtgagaaccatcattatatttcagaactctgaagagaagtacaaacgtattgtactttctcacacataattctctctcaccaagcatgatcgttatataagtgaagagacagtagaatatgtgaacagcaactagaagacaagggacgtgtaagagatacagatggagtcgaatgcttatatcatcatacttgcaagtgagcaagaacatatacttcagaaacattcggaggctaaacagaatatttattcatagtgaagaatttaggcataacacaaagcattattgtccatcatatgccg

SEQ ID NO: 14075 - DNA, 199 bp, Glycine max
  unsure at all n locations
aaaaaaaaacnatatgcatttatcaatatatntaagtaataaaaaaagttaatgaaaaaataataagaaattgtttatgaattattaaattgggattgattgaagtattgtttgaacgcttacaaattattatgattcctttaatgtgaagatcatggttagaaccaatggtttgggtcgggctttaggaagggttata

SEQ ID NO: 14076 - DNA, 438 bp, Glycine max
  unsure at all n locations
tgtacgattatggagtacccatcacatgtgttactatgtggttgtcgggcganggngcacaacaagttttccacatccacaaagcgcgcataaacccatcatcccctgttgcccacctccaactgagctcacgtactcccacatagcccatatcctcgtttctctcaacaccgggtccccatcaatcctcccaagcttccccaacatcaaagtaatacaacattcaaacagcacaaactaccacagccaagaaaacagggcaaaggcagaaaactctgctcaaaacaccaaccaaaatcacagcttttctcacttaaagatcccagtaacaattccttcgatccaattcgttaaccgttggatcgactccaaaantttactggaagtctatagtacataagcctacattttgaccgttgggatctactagcaaacatc

SEQ ID NO: 14077 - DNA, 252 bp, Glycine max
aacgtgatgactgaactgactggctggaccaagacgggggcacgctaatcagggttttagggggaaaccgtggtaaaaccccccgaacacttcatggctccgatgcccggactccaaaggcgaggaggccagacatcccccgagcacgacgttagacggccaacctcaactaggagggttcgacacccctagcaattcgtcaagaaagcccgggcctggtcctgcagtacaatctggtaccgctgccagggg

SEQ ID NO: 14078 - DNA, 364 bp, Glycine max
  unsure at all n locations
agacaacgttagtttctgtttgcttttaggctgagcgtcttacagacagcaataagcattgtctatacggatacgcactcgggtttttccgcccgtcagcgtgactcacattcagtatgacaaatattgtgagcgcggaagatgacgcatatctccgcgtgccacacggcttgtcggccgcgattgacgaaagacgtacaagacgacgttagtctctgcgtgctatcaggctttacgtctcactgacacctaaaaagaatgtttatacggataaccactcgggtatttccgcccgtcaacgtgactcanatgtcactatgacagatcttgagagcgcggaaaatgacgtacatctctgcgtgtc

SEQ ID NO: 14079 - DNA, 446 bp, Glycine max
  unsure at all n locations
gggcggaatgaacttgnagtcaatatgcactgaancacggaacncataangaccgggagtgcgaagggacttgatggggcnacaaggttgnccgagcggccaaaccaaacagggggactaacgaaacaananatcagaccaaggagaccaaaattanacggcccttatgaccgggacccaccatagtcatataatattaaagaattaactgaatggtcctttaaattaagtaaattaaaatatcaccataaaggccttgcctgtcaacaataggtgaactcagtgacccccgtaaactcgcccgcttttgtcgaaaaataatggttatccgggacagcaaagccataaatggtgcctctcacaaagctcacctaatgaaacgcgtataatccccggcaaaatccacaaataatgatcttcccggcctccgagctatagggacaaag

SEQ ID NO: 14080 - DNA, 488 bp, Glycine max
  unsure at all n locations
gggcccccnccggggtaaacttgcatgcagcacgtgcaactcagccacagcggacaangccttggagtagaagagctccttttacgttcntaagngcacangaagtgagatcacaagtagatgcatgagcatgtcgtgccccatgtctagcttatgcgtctaacattggatgccaagctatacatctaccttaggtactcctatataatatcctctccttacgcttcggacatacatgagcagcattggaatcatctctggcatctcgactatggcatagcattgttcaatcgcctcacgacattcatgacgttggacgctcacaatagagccccgaggcgctatggaatacaacactccatggcatgaggcacatcctattggaacgaacagacttctcaactntggccgcgttatatggatggaagaagatcggtcactactagaaaatagacgttcacgtcggntatagatcgatggtgacgtcg

SEQ ID NO: 14081 - DNA, 376 bp, Glycine max
  unsure at all n locations
agatggnnnttgaaaccttggaggccgttatcatgagccctgaacncaagngactgagcaggacccaattgtggaccggcatttgaactggaggcccancccaaacacggaacagaggaccaggccccacctatcacctaattggggccncccagcaccactttgggtgaagttttgtaccttttggagacactctaaggccccgggtattatgaagaacataagacatacccaatccagcttcttaagaaacacaacccgtggaagtatcaaaatctggaaggaaagccataatttcccctagccccttgtttacccacaggttttcacagcccggcccaaccacacaaagaagtggcaggaaaaaacctactaa

SEQ ID NO: 14082 - DNA, 296 bp, Glycine max
  unsure at all n locations
cttaaaatattaatgatcctcacaacaaattttcaagtttctttggagttttcaatctccttaatgaaatttagtttaaaaaccatccttagttgttccaaaactgtaaaaaaaagacaaaattcaccatgtgagaactatttagaaaacaacaaagctagcanaacacacttggcgaaatatttgtctatgtaggcaatatcctctttttcagcacgccatccacccaaccgatacaacaacgaaacatagtgtattaaataacaacacacataataatataacactttgcaaat

SEQ ID NO: 14083 - DNA, 501 bp, Glycine max
  unsure at all n locations
aggatgtgaanattttgaaaccattttgngacgacangctgatactatcgtancncnncgggaacnnnataanngcacttgaaggcaggcagccnggattgnattaaggcgctccaaatccattaggcgcgagattaccncggagggagagctcaaagctaggattaagggacataaagcnaagcttagtttactttggtttaacatttttgccatgtcctatgttatttgaacatggaatccattggttgatagtggttaataataaatcaataatcatggttaatgaggattaaaactacttgaaagcttaataaaatgtttaggattcactgggaccttccatggtgttccacagaaggccgtgcctaccatggtgttccaacagaaagcggtgccttctggcggaagcacacgggcgagctggccggaaccacctcctctttccctataattagggaaagggcggaagaatcgtnaaccctgaattatgatcacttg

SEQ ID NO: 14084 - DNA, 195 bp, Glycine max
  unsure at all n locations
ctctaatcctgaaaaaaattgattctctctattatcctttacggtggcgtnatctcaatcacggaataatccctgcataatttttgctacaaaaactgacaaattatcatcaaaacatgatttcatactaattgacatagatcatgattaaagaaattaagcatatctactactactttctaattattccgcacg

SEQ ID NO: 14085 - DNA, 482 bp, Glycine max
  unsure at all n locations
nnaactgtanancctgntggctagtacatcggttanncattgagacntggacctcagagcgacctgaggtctgcaacggcttgaagcaccagacgngttattttgggggaggnagangccagagggggtcaagaaaccgcccccccggaaaacgagctnnccaaagggagcctaccacgaaanggccccgaggaagctggcctcaaagaggtccaggaatgacatggcagccgaatgaactacttccgctccggagtctgatagtcaccgctataagagtgctgtacaccagcagcgctacgaggccataaatggatggtcgattctccgggagcgacacgtacagctcatggacgacgagcttactgatttccaggaggaaatatggcgccggcggtggcatcactgattctcccacgccaactggatcataaccaaacgtgtttttatgcaatgctggccacacagatgtgtgcggactg

SEQ ID NO: 14086 - DNA, 383 bp, Glycine max
  unsure at all n locations
ccggggatagtcatgctagantcnnaccctaacnccaacagcgacagggctagtagcaaaaggaattncttttacaccccacaatcacaaggggtcctaaaaaacacaaagcggcaacggacctcaagacaagaaaccttaacacaccctgtnaaaatacacaagaatacgcacccccccaaaggaatttgcccaaaacccgagggtacccaaatcgttgcaatgtaacttatccctattactgaaattcaagggacataccctaacaagtcataactcattttccagatacactaacgcacgtggctgcaggaaacccgggctccatgacatgaaggttgagcgaagtgaggctatgagcgctgcgaatgaggattggggat

SEQ ID NO: 14087 - DNA, 515 bp, Glycine max
  unsure at all n locations
aggggacggagatattgatagcttcttgtaagaccntnganntcattagaaacccgnggaaantcatacacgacccgggagacganagancgacttttaagcaagcaaccaggattanggacaagagcaacnnaaaaaaaanggggaaaaaccagagggggaccaaaacggccagggaaaggcacaaggggnaanggaagacanangcaaaaccaaacccngncaacccnnnagaggcaacgangcggcccccaaccggcagagnnacacccangccccaccaaacccagaaaacagggaacaaanncagancgaagagaggacaaggaanaggacgganacanagaaaggcnancaaaacannggccaaaagagaaacacaaccaaaacgaaagganacaccgcagncncaggcagaagcggacgggaggggccaaanacacacacacacacacgggaggcaaaaggagaccngncanncgcaaaccaagnncaaaacacggggangagagaan

SEQ ID NO: 14088 - DNA, 363 bp, Glycine max
tgtatatgctgaaattgctgatggaaaactgttagagatgaatggtagaactaacctatggttagaaagtgagaatgtgatgttatgagtggaaaaagagtgacgctttgagagttggaaggttaactctgaattctgtgatcaatggaggttaaagtgagttaatactagcttgaaatgtcatttatgacttgggagaaagctaggactgtgctacagagaaaaacaaatgatcaaagcgaatcaagagccatttctagggcaaaattgagtgttgaagagtcaaattttgattcggagagattttatgtgtaaatctacgttgagcaagattagatagatgttatggacttgtgtgaggtg

SEQ ID NO: 14089 - DNA, 412 bp, Glycine max
  unsure at all n locations
tgcaggcaggcagcctnnattatcctggtccccacaatatnacacaacgttggaccaccgagaccaacctattggatggaaagaataattaatcctactctcctatggtaggggacacctaaatttaaattattatattagaaattcctgtttaagccatccaaatcaagtcattttgaatctcaccattagtatcatgcatgtcaaagataaggagaatccggcatcgtaatgcatanacacacccaacatttaaaagaaaacatgcttnctaaagccaaccaaggtaanaatgattcattaatcatgcactttttcaaaatattagaccatattaccatatataaaacatggcagaaacatctcacacatgaacacatagccacacattcagaaatgagtgtanggaaan

SEQ ID NO: 14090 - DNA, 430 bp, Glycine max
  unsure at all n locations
tatcttacctatctatctcccagatgtctttgcaattattgattatataaaaaacatgaagttctaattcaagatgttttctttgttgcatgggcataatgcaatcactctatgtctagcattgattntattaagatgtccctacctttgagttctactaaaaattatcctctctcaagcgactaatccctaaaactgatgcatataaaaccttcaatgtatttctactaaggattaccctttttcaagcgccaaacccctaaagatgatgcaaggatgaagcatataatacatttgttggcattntaggcctcccaagccctaactaaaggggtttagccttccattgtcatgagagactnttacactntanggggttgatatggatggaagaagatggatggatagaggaagaaaagaggataatgga

SEQ ID NO: 14091 - DNA, 247 bp, Glycine max
  unsure at all n locations
aaatccaaatacatccaaaccatcaaagaaccctgcaagnaacccatccaaaccaccctcactttccttcaccgccactgccactgtggcctcctcttcaagcatcggcgaatgcccctcgaacagcgccacgtgtcccaacagcttgtccttcctcgaaaacgtagtcccgcatgagcacttccacgtggcctctccccgacactgctngacgtggctcctcaagtccgacagcaccgcgaaactc

SEQ ID NO: 14092 - DNA, 279 bp, Glycine max
  unsure at all n locations
tcaaaagacaaaaacccccagcaccnagcanggagaaaacactanatgtcagggtgtcctaagctagatcctttactgctgcacattngtctcatgtgacatgtgataactctacattaatcaagttcaacaaagtattcacgctgggcaggtgctagagatatgtcttcttctttgtttggtgaaaataagggacagatatatgtcttctaaatccaacagattatcctgattcctgaagagcgtggggaagtataatgattcttttacacgtgaata

SEQ ID NO: 14093 - DNA, 268 bp, Glycine max
  unsure at all n locations
gagtaactaacctgagcatagcctgacctgaacacngccggacaaggctttgagacagtgtacttgcgcccaggggcagaaacgccacaacaggacgaaggccaaggcaagctctctataagcctagtgtttccagaccaagctgcggtaacactacactgcctgcgacaaagcatgccccagatgcaagcccagccaagggaaccgcctcaatgacggagaaatgccccaatggccaggttaacgaaaagcatataagaagaaacgc

SEQ ID NO: 14094 - DNA, 490 bp, Glycine max
  unsure at all n locations
cccgcatgtattgtatcgtgtattgcancncntaatacncancnnnnggcccngcgagggggagacggggggggatttnttttggctttttaaccncgacangaggangagcgagggagacagaaacaaacaccaacacanacacgggcgccaagaccgcgacgaaccagacgaagaacacgcgacancatcgaacgtagangcaccaaagcagcaacccgcgacgaagacggagacnagaggaccggcccggcgacagcaagaccgacaaaacgaggaagacacacgagncacacgagacggnaaacggcacacaanagacagaaacgatcagaaagagagagccgcggagaacaacgacaggcaaagcacagcgaaacccgagagaacagatngcagcnagaacgacaggagaaagacaggaagccacaancgcagagaagggcgaggaaacagngaccgcaaaagacgacgggggcacaaaggagcg

SEQ ID NO: 14095 - DNA, 507 bp, Glycine max
  unsure at all n locations
atggagtgnnntttgannnncnttngnagagtcccatgannnctttgatgcattgcanancnaagcgaanacacgagggcccggganctttttagggaccggaggcaggttacncgcttgtctcacgcnccaaagcatgcatcctgtgncccttaagaccctatagctttgggagccaagttatgccttgcgttctatactccaaccattggtgatagacgcctatgacaccattgctactgtccgctaactgtttatctcttatttccactctattccacgctctatggatcctctgnagtatattcgcattagcttcatcgaaacctcgcgcgatgaaaggcgcgataatttcctccgatggcacacccctcatatggtcagctaactgtcttatggacaacacgatatttcgattaatacaacccattcgccctataaatggacatgtggaatccttacatgagcataacactctgctgctcttctttcaccgaggaaccaact

SEQ ID NO: 14096 - DNA, 442 bp, Glycine max
gggttttccgataagggctgcagttttaactatcaatttcttctaaaacctgcattgttttgggaatgatatcagtagttgaacttgctactatgactacaagtaagtgtgagttttggtgtttatatagattaaaaagtgagacttatggggggtggggaaactagatgctatattggtttgttaacaagtggtttgaactgtgtggataaaagctttagctagttatgggtaggataaaaatattttatcacaggaagggatttgaagtgagaaatttactagcaaaatctattcaagtcaccccttatattcttcattctcagcattcctcgccagctaagggatagaccctattttaatatgaattaatgtgacatgaatcatttctgcaagtcagtgtcttattataatgcacaccttcaatatttatccatgattg

SEQ ID NO: 14097 - DNA, 528 bp, Glycine max
  unsure at all n locations
aggggacctagtcgnnattgannnncnnttnngagnnggcattttagtgcgtcngaantcttcgnananacanagcgaanncgagctcgggacccgaggatccncttttttcganctgcacgcatgttgncngagtgcacganagnnacgaacncggagagagcagannganngnnanccgcacaaacagagaaaggacacaacagaccaacngggacggaanaagggaganggaggnagacgaacacaaacacagacaaagccagcgaaggcacgnancccgcaaaaaaccaggacaaacangcancgcaaaaaagcagacaaccgcagagagacangccancccacgaacaggaaaagaagaggaaccagccccaagacgacaggaaaggaaaaanggangannaggagaagaagaaaagcaaaaaaaaggacnccncnacacacanancagagcaagggcaaacacccgaccacacagacaaacnnggacaacacaagggacaanacgagaggaacggggngagn

SEQ ID NO: 14098 - DNA, 384 bp, Glycine max
  unsure at all n locations
gacacataaaactcaagctgtgaattgcctgtttggtgaattattatactcatnatgttttanggtncttgtgatgatgtttgtgatgtttatatgctgaaattgctgatagaaatctgttagagacaaagggtagaactaacctacggttagaaagtgagaatgtgatgttatgagtggaaagagagtgagactttgagagttgacaggctaagtctgaattctgtggtaaatggaggttaaagtgagttaataatagcttgaaatgtcatttatgacatgtgagaaaagttaagctgagctagagagaaaaacaaatgaccaaagtgaaccaagagccatttctatggcataattgggtgatgaggagtcaaattatgattc

SEQ ID NO: 14099 - DNA, 120 bp, Glycine max
  unsure at all n locations
aacaaacgcaggggaagccagccngncgaanagcacancaaggaaagcagagagaaaggcaccaccnaccacngcngcngccacnancncaagaacaaaagaagaacagagcagaaagac

SEQ ID NO: 14100 - DNA, 406 bp, Glycine max
tagcaagaagttgcttcagaagttggagactcactcttatagttgttggagctgtgcttgatgatgccgagaagaaacagatcacaaacaccaatgtcaaacactggctcaatgatctcaaacatgctgtctatgaagccgatgacttactcgaccatgttttcaccaaagctgccacccaaaacaaggtaagagacttgttttctcgcttttccgatagcaagatcgttagtaagttggaagacatagttgtcacacttgagtctcatttaaaactcaaggagagtcttgatttgaaagagagtgcagtggagaacgtgtcatggaaagctccatcaacatctctggaagatggatttcatatatatggtagggagaaagataaggaggccataatcaagttgtt

SEQ ID NO: 14101 - DNA, 225 bp, Glycine max
gggtctgactgagcgtatctgactgacaagacgtgcgactgctgcagaaatttctatcttccaggtatatcaaagccaggggccggagaaatgtcgcacatggtcaatgtgatgtggtgactattataaacttttcgactagtgagatctggtatgaagagattcatttaaaggaggggtacgtgtgctctatgaaaccactacttcttactacggcctcagcgc

SEQ ID NO: 14102 - DNA, 435 bp, Glycine max
  unsure at all n locations
ataagcactcanaagtctccttattccatatctttaactgttatgtataaatnataanatnnctagaccaattagaagtttcatggacgtgctcctatttcttcctaacanaacctagaaaatcttcatgcattaatcatgctgcttcaaataagaagagcctcatatgctagttctttntggtatgagaatctaacctcaagagaagaggcatgtgaccagacttcatccatccaagatggactatcatagcatcttggaacataagtctccaatcaagactaataaagctnttgtccaacctaacacccattcttccattcctccaagttatactatcaccttggtatcccatgtctatcanatntatgagacaaaggaaatcacggaaatcctcagtatcacgatggccctgagaatntgctcatcttatgc

SEQ ID NO: 14103 - DNA, 501 bp, Glycine max
  unsure at all n locations
agcggcgttttttgancccctttgnaagtgcaatgantcattgtanaccngggaanctnatgagcggactggagcgtgccagcctaaggttgntggccaanggnncctttcttattggagaatatgggaataaccatgggtctctttataatggaaaccaccctggcaatttggtatcaggtggtggacaccggtgaggaccgtgaccctggtcgcggggaccaaatggacaccagtagggggcaggaggtgaaatcctgttgaggagccgccaacccaacgtgatgaccctggaataattttgggagagagtggggtttggtaaatcaactcctccatagtgggttccatagatcgttggtggaataaaggatgtaaatcacaggattggaataatatgattgaataggtttaattccatatatgtgaatgacgtgtactgagtactatactatatatatggatccacttaagtatgtgtgtggntggtggactgatgcn

SEQ ID NO: 14104 - DNA, 409 bp, Glycine max
  unsure at all n locations
cgagtntattntagccttagtttcactgtagntattagcattttcgattaagaacgagaaatgccaaagagaaaacgtccgattgattttccgctttattatactaaaaaaaagatgttttttgattattatattatttttcatctctttttgttttccaacgtggttacggcacgaccgaacggtcgaaattcattttaaccgaagtttacggatcatacaattcaaacgttcggtggagatttattttatttttaagttaagcgagaaatgacttaagtaaaatggcttaagcacgtcaacagggggtatgaaaagtaaatganacgagaacagaaatacacaaaacacaatttggaccaccacgagtacatagaatgaatcgaanagcatggttcgaggtacttac

SEQ ID NO: 14105 - DNA, 485 bp, Glycine max
  unsure at all n locations
agggcgggantttgaanacatttgagaggaccggtgaatcattgagnacctngnanncncnatgagnccgaccggcaggcaggcaggcnncaattggtcagagctccagcctcttggcaaaatgttatgccacacaaagggacgaagcggctgctaatcccacggacacgaggaggggagggcanaaccagaacaacaaactgtgttggcggaaccgaccccctaaaaagaacaattacggccaagggacccatgccaagaaccagaaggaggcagcgaatggccgagaataaaagaaccaacgtgctacactcacccctatcagccaagatagacgggctgagcaggcgcacctaaagccttaggagaatagaccgagatgacggtgcctacaagacggcatgacatgagcctttgcctgatagataccagctcggccaactataatggggcaagccaattcctgagaaggatggaacggactc

SEQ ID NO: 14106 - DNA, 444 bp, Glycine max
  unsure at all n locations
ctctctggtaatcgattaccagtttattgttttcgattccagnggcaagnttggttttcaaaaagctttcaactgaatttacaacgttccaatcaatttcaaaatggtgtaatcgattacaatatattggtaatcgattactagtgtgtttgaacgttgaaattcaaattcaaatgtgaagagtcacatcctttcacacaaatgctttgtgtaatcgattacaatgatttggtaatcgattaccagtgataagctttgaataaaaatcacaagatgtaactcttccaatggttntcatgttattctaaaagttataactcttaatggttttcttgaccagacatgaagagtctatanaagcaagaccttaacttgcattntatagacattgaatacattgatttcaatcctttacaacccttgagtctctttgaacatcttctt

SEQ ID NO: 14107 - DNA, 67 bp, Glycine max
tttaaaagtgggtcccaatgggcttcctaattttcagctttcctatttggatgtgagatcatggaag

SEQ ID NO: 14108 - DNA, 312 bp, Glycine max
  unsure at all n locations
gctagagagatncccgatctgagagggtactgctccgtcggcatctttctttangtcaagatacaccaaatttgagagattcccaatctgaggaggaatcttccccatgattccagtatgagaagaggttgaggtgagtcaaggaagtcattgtcccaaggaaagaaggaattgacataccttctccaaggtattcattggcgctcaagtccaagtaattcaaatgctttatatcagccaaacaaggacttatctctccaccagagctccatctcctataagcttcccaatcatcattgaaaatagaatctg

SEQ ID NO: 14109 - DNA, 398 bp, Glycine max
  unsure at all n locations
actataccttcgaccaaacacggctgtgtttctatctccgcccggatttaaagtgggttgcagcaccggctccgctttcctaaccgtactggaagcggntgccgtggctttgtcctctatgggtttctggaagtttaacatgaccttcgagatggaagccatttgatcttttaaagccgatagatcggccttcatctggtcctgcacgccctcttcattatccaatttttctggatcgagtgttataagggtgccttggtgttttcctagttatgatgaatttcctaaagaaataaacaaaggtgagtatgccaccaacaaatgaatatgcanatgaatgatccgtgcacttggatcccacccaagggttttnggaaccgaatgagtccagaactttt

SEQ ID NO: 14110 - DNA, 446 bp, Glycine max
  unsure at all n locations
ngagtcattcaaacataaggcataactatatntaatgttctttaaatcaaaacatgaaagaattttgcaacgtacggacattactaaagtattctattgtatatttatttggaaatttctaagtgatgattttgcttccatgaatgttataaattcacttgttcaattattaatttagagaataaataattatttgaattagagcttaaaaaaaattaattgaatcagatataacattttaatccatttatacactaccaggaaaaaaaaaaggcacgaagtgccttttctaattttttttaaatatagaaataatattggataattattacgatgtgagtggaaaaatgtaactttggacaaaaattaggcattgacaaagtcattagatacatcctaccattaacatagttacaaaaagaatgaactaaatcaactattttttt

SEQ ID NO: 14111 - DNA, 508 bp, Glycine max
  unsure at all n locations
aggggacgtgcaactgagtgtgcttagtacggctngctgantcttcnganacccngggaactacagacaggacccgaagaaggcaaganngaacttganggcgaacgaccaccatcntntccanaggagnccaaggaaaccagagganccccgcacaaaacaaaaagcccgcagaagaagcgcaccccaggccgaaaccacggaacaaccccgaaccngacacccgccagcggaatgaaaacgccccggcaaccaagaccgcagaactagcgaggacacagccacacgcaccgctgacccaggaaccacaacgggaggaagccaaaaccagaagaagcagcgacggancaacggccgcggnactgatgacccaggaacaaaancacccagacgncgccccaacatggggacaaattgctccgatccataaaacggcgccgccagacccacagaacggagacccagcgacgacactcaaacgcagcccatggtcgaggacacatgcccg

SEQ ID NO: 14112 - DNA, 496 bp, Glycine max
  unsure at all n locations
cggacggtgttatttattttattgtacnncgttcacaanananncnncangccgggaganggaggagnacggagaggagcagaagagggttatnatttttatttgnggccccgcaaaccgggacgggcgagaatcgacangnncacacaaaaaccccaccaagagaacagaggaagccaangagtgacttaggagacgagagcgaaccgagaaaaaccaggggacgcgcancctcataggacgaggagctagtattcccgaagagagcagatcattcatagttgattgtctgtggagatctatatgatgatatacgtaaactagatgtcacatctcaaaaaaggatgcttctatatatcctagtgtcggaaagtcagtccgttcgatattatgattacttcagaccatcttggagtgacacattcatcaaatgaatcactgaatgctctcaggactatccgctgaaatctaaagtcattgcactcttagaatcgag

SEQ ID NO: 14113 - DNA, 510 bp, Glycine max
  unsure at all n locations
agggggcgtggncctgannccctttgnacgtgcnactgatctactgataccttggcaattcagctcggacccgggatcctctgagtcgacttgttgcatgacagcnangttcatatntctctacgaacgancactcgcagcagaccatccattaactaaagaacaattcacccctattccatcaagggtagctacttaccctaaatatttacatgtactttccaggggtatttgttatttacatcacacacgccttcctggcttaatttacatacatgcatactcaaagcattacggggtaccaaaaaatgcacatgcgctcatcttggtatttctaatacctatacatatacaaacgtcatgatcaatcctgactacctacgcaataaggtgctacatttcatgcctgtatttgtttcaagtctttgctacctaagagcccatgcaaattcaagcaatatttcctttgctgactanaattgttccaaattagaaggtatatttttctgn

SEQ ID NO: 14114 - DNA, 457 bp, Glycine max
  unsure at all n locations
ntcaacaagagtcttcacaaataaccatcatgaagtttnaaattatcattatctacccatcatatctcccanaaccccatacccacgaaaatcaaaggagaaagaagtccacccaaacctgaaattttgaagtcccactcgtagacacgcacttcacgaccccgaaaatgccctcctttcacgatttggggcagaaatgatggccaaaggttgaagctttgtgtggagcttcaatggtggaggaagaagaagagaatggcaacgtgagggagagagagagctgtctgaaataatgtggggctgagtgaagagagagagagttgctttttgattttaaaaaaaaggctntttcctcatttcttattattttattataaactatgccacatgtctccatttgagtggagcacaaagggcccattntcccttatgactgtgacccatactcagccacaaa

SEQ ID NO: 14115 - DNA, 242 bp, Glycine max
  unsure at all n locations
tgagaatgcccatccttgctctcagaagaagacaaaagaaagatagttcccgatcaagggtcggaagatagcanaagaagaanactcccaatcaaagattgtgagaaagcacaaaaagatagaaaattcccgatcaaagatcggaagaaaacaatagaaatatgcagaaaggtctttgggccagacaatatctgaacaatacagaattgtcaccaccatataaggaaagaaaggaaaccacg

SEQ ID NO: 14116 - DNA, 423 bp, Glycine max
  unsure at all n locations
ntatacgaaatgccactctactgcaagggtgaaatgtttgttaactaggaaacacaagtatatgcaccaggaaaacattgttgttgaaagaaattgtagtgttgtgattcacaagatccttccacctaagcataaagaccctgngagtgtaactattccttgttcaattggagaagtcactgtgggaaaggctcttattgatctgggagccaatattaacttaatgccactctccatgtgtagaaagttgggaaagtcagagatcatgcccactaggatgactttacaacttgctgactgctccattaccagaccatatagagtaattgaagatgtgttggtttgagtaaaacattttatcttccccgcagactttgtggtaatggatatctgtgaagataatggcattcctgtaatattggg

SEQ ID NO: 14117 - DNA, 286 bp, Glycine max
  unsure at all n locations
nagtaactagctcgatcatgatctgaactgaatcacggccggtccaagcatttgacacggttgttctggaacctcaggctttaagaatctcctcccctcaaaagattactttcaaatgacagagaatattgagaaacaagaatatacaagttcttgcacttaggacatgtacattaaaagactgtatatgaagattgaacatcgaactgcaataggaactttaataatatgcactgaaatacttaacacctttagaactcctacgagttaatacaagtcaaaatcc

SEQ ID NO: 14118 - DNA, 334 bp, Glycine max
  unsure at all n locations
cacttagaaactaagctaaagataactaaaatgatgatagaagatcggatcttatattctgattatatacnctatcaaatacaaactgattagttaggctaagaataccgatagaatatcttatcatatattttgataatatattctatcaaatacaaactgattagttaggctaacaatactaatagaatactgagactgtctcgaactggacctaggaccaccaccactaattnttttttccagaattcttgtgatatccagacggcttccctgttagatattaattagaaaaataattataacgagttttatgagccttaaattgtggaag

SEQ ID NO: 14119 - DNA, 239 bp, Glycine max
  unsure at all n locations
agtttatagctgancatgactgacttgaacagcgatatgccggtttttactgaggtttattanagaagtatcttgggatgtaaaacacgatttacgtttcttatcttaaatttgatcgagactaccctgggtgggttggattatcttgactgtaattgtgcaattccaatatatatatagtaatgattaggcctggcaatttgaactgtctaaatgagttgtctagttgaacgaatcat

SEQ ID NO: 14120 - DNA, 518 bp, Glycine max
  unsure at all n locations
agcnccccccccnnccgatggatganactgagactgttctgatcgcananccgcgacactatagactactcaagcctgtgtagagntgacaatcagtaatagtagttcaaatgacatatatacgcaaacnaagaaggataagcaactaaagttctaagctgaatgtaacatcaattccacatctcttgaaagataatgtgagcgagagagatgaatcgaaggaattgtaacttttgaaaaacaaaccatagagaattagtctgaaagggtgctatntggattaccaaagatatacttcatgcaccctgatttttgccaaacatatgataatcgcctgccacaccattggtaaatagagaatcatttgcaattttggtagatcaaagctaaaattcttgtgaaaccacataatgaggtggcctggagaatctgaatgcctcaaggcactcgcttctttgatacacctgcgattaaccaaaaaccaataaaataatttttatttaagaacaattcttaag

SEQ ID NO: 14121 - DNA, 518 bp, Glycine max
  unsure at all n locations
cgggagctgtcgattttgaaacccctttgnngaggnncggttganncccctgattgtcatgtananacacggcgaatncagctcggacccgggatcctcttagncgacctgccgcatgtttncncaattcatggagncancnnangagcnagaatgcatgatcttgacaagaagaccctctcttacgacatgccttgtaaatcctctaagaggctctctctaattaaagtgtggattttatcttgcacaagagtcacactagggaaataacatgatgtgtatttattatctaaaccattataaccgtcataatcgattaccagcacttagtaatatgttcttttgcttatatatccttctttatgcattatcagaacgttctaattgattacaataaacaggtaatcaattatttcaatcacaaagaacaatcttctaatatcacttagatataatcgattgcaagtatttggttgtcgattatcctacttgcaatatgtcatatttgcctttagttg

SEQ ID NO: 14122 - DNA, 409 bp, Glycine max
  unsure at all n locations
gacacatagaaactcaagcttctcaggaagctacctagtctataaatagaagcatgtgtaatacttgttgtaactttgatgaatgcgagtgtggtgagacacaactcanagttcaacttctctcccttttttcttctttcaatttcgtgctcccccctctctctttctctccctctttcttttcctccattgaagcatccttccaaggctcatcttggtggtgaagctccttcttccatggcttattccctagtggatggcgcctcttctcctttgtcttccgctgtatctccatggtggaaaatcaccattaaaggacctcattgaagctcanagatccagcctccatagaagctccacaagcaagcttccatcagtgatggcactcacattcttcagattctacaca

SEQ ID NO: 14123 - DNA, 404 bp, Glycine max
  unsure at all n locations
tncttatagatgctnctcaagaaagtttctcaagcaagctcctccactatagcttcctctttaagaaattattagaggggagtgtgtagctaagctctagcttctcaaggaagcttctcaaggaagtttctcaagcaagctcctctattgcagcttcctttctaagcttcttatccaaggcactctcttcgtggtgaagctccttcttccttggcttattccctagtggatggcgcctcctctcaccttttctcctttatcttctgctgcatctncatggtggaaaataaccattgaagaaacttctcanagatccagcctccataaaagcttctcaagcaagcttccatcaagtggtaatcagagcacaagagcttcaagtaggtactccttaaacctccatt

SEQ ID NO: 14124 - DNA, 451 bp, Glycine max
  unsure at all n locations
tgtctcagcagttgtgcaagaccgagaccaacatgttatcctttttcagcaagtaccaagaagaattaaatctagccacggcccacgagcacaaagtggcggacgagtatgcccaagtgtacgcgaaaaaggaggctagaggaagggtgattgactcgttacatcaagaggcaacaatgtggatggaccgatttgctcttactttgaacgggagtcaaaaacttccccgattgctggccaagaccaaagcaatggcggacacctactccgcccccgaggagatccacgggcttctcaactattgtcagcatatgatagacttaatggcctatataattaggaaccgttaggaagtttgtattgtcactcagatcttgactagttataacttcttaataaaatgagtttatctncgcgttttactcttaaaattagtacgaatcanatcact

SEQ ID NO: 14125 - DNA, 242 bp, Glycine max
  unsure at all n locations
ttctttngatattnggcaaagttaaaaataatgttttaaaaattatactaatcattaaactaataaaatacaaagttatgatttaataattacatagtaagtaataaagtaataataattaaaaattcataattaaatactatntttttattcatacagcttatatttaaagaactttatctatcttaaagtcattttaaacagaaatttaaaaagaaaaggggggaaataaagacagtgga

SEQ ID NO: 14126 - DNA, 321 bp, Glycine max
  unsure at all n locations
agtttaanttaacccactgatattcaaaaaaaangaattaggttaaaaactanatccannnnnnnnnccgggtgtattaatgggcccaaaaaaaanaaatanaaaatatctttattaaaactttatattaaatatatttatttaaataacacaaataatataatttcatcccttaacttaatttataaaaaaaaatttattacatataatttaaaatatttttaatattttttttacacttaacaatttatatatataaataaatactaaatttctatatattcacctattatatattttcattataaattcaatcaatta

SEQ ID NO: 14127 - DNA, 227 bp, Glycine max
aggcagaaaactcagcccaatacacaaacacataccacaacttttcttactcaaataccccagtgacattcccttcttttcaatttgatcaccgttggatcgactcgaaaatgttactggaggttcctgaaacataagtctacattttgaccgttgagatctgcatgaaatattcagaacccaatatgtacaaccctttacacagccagtcatgcctatacattttc

SEQ ID NO: 14128 - DNA, 480 bp, Glycine max
  unsure at all n locations
aaatccttttctcccaacgcnttttcttattgtannnntccccnnnnnnnnnntngaggtaaactatataggatccncctttacccttctcnnnnngannaaataccggganggcgganatgtgctgggtggctataacaacccctttgttacttaaatacacccctggccttatttggagagatctttatccgaacgttaccaacctttacgaattcgtaacaatactggttttctttcgcgatgtaacaaaaccttacggttcacgtattcttcccccttttgggcttccgggatgttactgacctttacaaatggcgcactaacacttccttttgacttccaccatgttagggaaattcacgggtggtgcaacattgctatggtttgacttccggcttgtacanaacttcacgatttgcctacgatgggtgccagtacttcgagtagtatacgatggtcgatcccacaatgatggtg

SEQ ID NO: 14129 - DNA, 403 bp, Glycine max
  unsure at all n locations
ccggaaaccgaccgatgaagaaacaaagaaagacgggaccaacaaccaaaaactataaaannnaagggagccgcaccganactcnaanncanagnacgagganncaaagaaaangaagaaggaaaaaattttgaaattgagggaaaaanggaggggagggggaaaaaaaggaccagaaaggaggaggggaaagaaaagggggaagaggaggagaangaaaaaaaagaggagaaangaaganaaggaaaaaaggagaaaaaaaggagaagaaaagaagtnggggggagaaaaaaaaaagaaaaanaagaggnggaggggagnaagggaaaagagagaaggaagggaaagaaagagagagggggaagaaaaaaggaaaggaaagagaaaaaggaggaaaaaggac

SEQ ID NO: 14130 - DNA, 458 bp, Glycine max
  unsure at all n locations
agannaannnggagtggtgatagcattctgacaacatanaatnatgcggaacganangngacgcggggcgcgggaggtttgccttcacttagacagaccaccggagaagcgggggtgcaagtaacgaatcattcaaccaataccactggtgccatgtctcttttggagcccagcccaacggaaagctccgcgaaagtctggaaggaccctcgcgggaagcattaaggaaaaagccttcctggatacccagagggggagctgctaccaccgtacgataacttaacggggcccctggcgaaatacatgagattacattgggacgacccatagtacgcaagaatgtagcttccttgaaagcagaggggacaccttctctgcccaaaacaaaattacccactgccgattccatggaatcattggagcccctgtgaagcagggtaaagtccattaaagcctaa

SEQ ID NO: 14131 - DNA, 450 bp, Glycine max
  unsure at all n locations
cgcaccaaaacaaggaggagcagggaacgaaaagcaaataacaaccaaccacaaaccaaaaaagggggggtgcttgactccaancacacgcccgggaccnaaaggaacgggagaggaagcggaggattaggggacccccacagggacaggggcacggcgagggcagcgaccccacccaacacacgaagcacccccaagggccaccccacggaccacgagcccacgacccctaaccgaaccaccacaccgggacccatcaagccccccaagctttcagaacaaaccancaaagcaaccaccaaacatcatgaatatcagaacaagaaacagggcagggcagaaaatctgcccaaacacaaccaaaccacagcttccgactcaaaaccacaaaacatacacggggccaaccggcaacgaggaacacccaaaaatcacggaagcccaagaaag

SEQ ID NO: 14132 - DNA, 489 bp, Glycine max
  unsure at all n locations
aagaagcggtaactangcatcngcatnaancantagaatatnaatagcttanactgccctcgtccctcngccgagaatacatgatacgctctgcctttataannggnggccanggaagtgangggcaagccttccaaacntcttaccagaatgctgggccacctggggcctccttcacaacctttaacaacacaaccccaagaaggctcgaacctaataattacctccaccaccaaaacctgtgccggggtttggtgagaccggtccatataaccctgagaatcccctccggtggaataataccgagaacctccttggcttctcttaccaacacctccttttaacaatccttttcttccgaaaggcctttggccggaaatctttatcaaaccgtgggggctccgccatctggttcctcaccactttcctttcccttgacatcgcgggttgactgtaggtcagaagcccacacacgaccctactgtcacc

SEQ ID NO: 14133 - DNA, 567 bp, Glycine max
  unsure at all n locations
cacaacggacgaacccgagaagaagcgagagccagacgaacaacgcatanaacaaccntatacaantaactncacactcaccacaaaaaaaannaaaagannaaagggagcgtcgaccccgtagtacaccnnaananaanananannnggggaannnnnaaannnaaangaaggaagagagacaagatttgaaaaaggtgaaaaaaaaaaatnagagaggggatgggtggaaaaaaaaaaggaacatgaaaaaagtaggggaagtaggaaaaatngggggaagtaaaggggggggtgtgaaagggggaaaaaaaagaaggataaagggtgatnggaangagggcataaggaagaaagggagaagatgtgagggatntaaaaggggaagaaaggaaggaataaaaaaagaaaaagaaaataaaggaggaagatagaggggggagaaagaaatagaagagaggaaaaaagaaaggggaagggaaaaaaaaaaaaggggggaatgaaaaatgggaaagaaaagaagaagaaaaagggaggaggaaagagaaaagggagagaaagaaagag

SEQ ID NO: 14134 - DNA, 271 bp, Glycine max
  unsure at all n locations
gaactactgatgaactcaaaatcagactngacccgagctgcgagcggttgttattttaaangaaggcgtggaattacgtcaaatatcccgatgttgcggaagtttacttaattctaactcctataatcactctttggaggccatcaactacgtaaattgaattattaaagtgagtcattcacattagttgcccgttgatggaagttaccttttatggactcgttaattagttttaggacccacgctggtaaagaaaacgattctcactgtg

SEQ ID NO: 14135 - DNA, 461 bp, Glycine max
  unsure at all n locations
ggactgtacatacgatcgatnnncttgnananacnanagcnaatnacagcgcgataccctagagncgacctgagggagggcaagtcttgttctaaattttttggncncacgcaagggcgggatcgagagtccccttatcctaagactaacacacgtatttatgcttggtatgcaaccgttacactcaacgtggtactgtgcctatgcagagattcaattgcctacgaaaattatagtacgagcagatcacatatatcagataacttcatcagatctccatggacgaagtatgccttcacagctactactaataagtatccacagacgcacttaaataatattaacaccgcacttagagtaagctacctgggataacagcatggtggcctcccggtaaccatatcaacccatatggttaccttgtacaggaaggggaaaaattactacgaggagccacaatt

SEQ ID NO: 14136 - DNA, 459 bp, Glycine max
  unsure at all n locations
naatacatagatgttntaccctgnnatnngatanancnnccnnnnnnnnnnnnanagagaaagagacaattttgtttctttaccacaaaanggggggggtaccttctctgccattgttgacccttcattnttcaccatgtatacttcctcacattgtctttgttgtaaaattatgttaacatgattctttagagtttccaccgattaaacttgctatagaagttagatctgatgttctattggtcatacttgtttgtcttgtacttgaaccatgaattgcgttgagtttacgctcctttgcagttgccctgtaatttttgtggctgaaacctaaccatatattcttacaaattattaagttgaataaacctctaaatctacatgacttgtcacctatggtattttgtctagaagtatgtctatcatgaacttgaccatagattcctatgctggcctaat

SEQ ID NO: 14137 - DNA, 307 bp, Glycine max
  unsure at all n locations
actttttgttgaaaaaaganacaaaagatggagataggtgcatgaaactgaagagaataggaaagagttaacttgaagtgcgctcataagttttcttcatcacagtgaacttgtgaattcatttacatttatgtgaatctaaaagaatattccagaatatccaaagcatctttcatataccctttaatgccacagcatggaagtgtgctctacacatgggaagaagaagaaattggcttgcccccaggaaaaggaggcaaaatcattggctggggagtcagtctaatgatctagatctccaccctca

SEQ ID NO: 14138 - DNA, 284 bp, Glycine max
gaccattggtaccaaggcacatgtcacatggaatagttaaatatatgaaaatccgtaagcttagtatctcaccttctatccacccttcataaaatctctccaactggatacctgatgatgaagtgtgttaatgtacacatcttcctttatgtgtgtgggtgggtgtgtgtgtatctttttatctttggaaagagataaaatactgcatgcaaacaaaattcactaatctttttctctctgtaggctagtaagacacttcaaacaatgtatcttactcatcaatt

SEQ ID NO: 14139 - DNA, 586 bp, Glycine max
  unsure at all n locations
cacacaccgatcgcaaaacaacgacggccgagacgcaactcaagacgacatcaggaagacaaccanactcactataaccaacnaaaaaaaanaaaaaaaaagannggagaggaacgtagccgtagtccctcganaanccnccaanannggnacnaggaganccannagagangaacagaacgcaagcaagcggattttatcaagtncaacaagggggcgaaacggcgacttgcagggctaaggcactagaggaagcagcggccacacaccacgacaaccagagaagaccgaaaaaaacacccccacgcccacggccgacgaggacggcattagcccaacaaagcggcgcaaaaacgaacccaaagaggacggcatgacccgcccctgaacaagagaaccaaggaccgaaccaagaagagaacgagccacgcacctcanaaacccgagggcgaagaggaagaacaaaccaacgcagcacgagcacaaatgaaagacagagggctcaaaaagaacagagcgaagagacagaggaaaccaaaagcacacacagagcggccgcgggaaaaacccaggaccgaccgcgaag

SEQ ID NO: 14140 - DNA, 172 bp, Glycine max
tgtcacgaggagtgtggcggtcacattcataacgaacgaactgatttgtcgatacggactccctaggaacatcatttctgacaatggcaccaatctgaataacaaaatgatgcacgagatgtgcggggatttcatgatcccaacatctaactccaccccctatctgccaaag

SEQ ID NO: 14141 - DNA, 407 bp, Glycine max
  unsure at all n locations
acatacgtagcccaggttaaaactacnnttaatnnaantttccangaagggatacagtaaagncgaagagaaggaagcaatcnatgcttaancccacaacaatcggaggattgataaaatgaaaaccatgattattgacaagttatacatacttcttgaaggaaaaaaaatttggnataatagcgccaccaccacaatggatgagataagngttgtatgtaattttatggcacttccccttctttcgttagattgaaaaatgattaattaataaacaaaaatttgagttggggtttgtattaagagagtagattttcaaaatagtcatagaacttttattggtgtaattttaaaatatttgaacaagtgcaatgaatatttttataactaggtatacattagaaaag

SEQ ID NO: 14142 - DNA, 372 bp, Glycine max
  unsure at all n locations
gaattncaaccgaccatgtgtgttgtaatgtcgtttaatcactgttaaagcaaaatctaaccgattgttcacactataacctcagttaaataaaaaaaaggcaaaataataataaaataatcaatatatcttgaagaaaaaataaaatcaaaaatcaaaaatatcaatcggacatttttctttgaaagtttccttgaatgaattgactaataaccaaagtgaaactaaggctaaaatcaactcacaaaccaagctttgtccgtaaaagtcacttgaaaccgttttaaggtccaatgccataaaacggtcctctatgcttatatcggttaacatggaccgttcaaaacatataatcaacacataactttaccg

SEQ ID NO: 14143 - DNA, 336 bp, Glycine max
tgtttgctagcttctatttggagttaccaaaggaacagtttggtccctcttgataaggaagccaccgcaatcaatcgatgctacggacccaatttcgagatagcatggcttattgtgcctcaagccatccgccaataaaacccaatagataacatataagccccttcagtttccttgtttcgactttcgattacaattaacgttaataatcctccctccctgtcgtaataatctttgtgtaaccaaaaaaatcctaaaataattattattttaattttttaatgcaataatacttattttttaacttatatttcctataatattaattaccaataa

SEQ ID NO: 14144 - DNA, 306 bp, Glycine max
  unsure at all n locations
attttaataaacgggggaattgctttttattgcaatagcttttaaaagtaactaaccacatgaaaataatttaatctttcaatgatagaaaaaaccgtataggataagcaccttacattttatgctcaaaagtcaaagactttcctttctaaagagtgcanatcgagatcgttttaatgatggaactatatatggttctacatttcgagtttcatattccattatagtactacattgtttattgagagaagaaatatatagccatatatatatatatatatatgggtcaatcttcaaccttaacat

SEQ ID NO: 14145 - DNA, 368 bp, Glycine max
accgtattatttaactgtgtactctgagccaattccaaccgacattactctttacctcggaggtccgatggagcccttaattaatttcagacgctcgaaaatggaaacgccagctcttagaaaaagtcaacgacgataacttttaactccgatgttcgaatgagccctgttatatatcgagacgcccacaaagaaaacggagccttaggaaaatcaaacacaatacttttactcgatgtcgatagtgcccgaagatatcagagctcgtattgagacgaagctttagaaaactacacaatacttttactggtgtcgatgggcccgaaatatcagagctcaattgaaacgagcttataaagtcacacatg

SEQ ID NO: 14146 - DNA, 464 bp, Glycine max
  unsure at all n locations
nnttagaaggcgaaacgacaggcttagcatncaacnaagctttattntaaacaccaanggtttcgatatataccggaaatctttcgaacttcttattaaaaggtatcggcggttggtatttcttaaaaccttagatttcaattccagccttctggtacacctccaggaaccatccggccaccgaatccaaaggtattggcggttggatttgcttaaaacctccggtttccaataccaacgtctcgaattctaccggacccaatccgacattccaatcaaaaggtattggcggttggatttgctcaaaacctctattttcaattaccaacctctcgattattaccggactaattcgacctccaataaaaatattggctttgattttctcaaactccgtttcaattcagcgttcgattacacggacccatcgacctcagtcaaagtattgcgttgaattcttcacg

SEQ ID NO: 14147 - DNA, 135 bp, Glycine max
tggaccaatatcacaatcatttacatgggtttccaaatcttctatttaagccccttcaaaccccctctcttcctttaatccaaacctaaaccttaaaaaaaccaactctttctctctctctctctaacttccaaa

SEQ ID NO: 14148 - DNA, 465 bp, Glycine max
  unsure at all n locations
naatccggaagtcagcctgcagtacatgcacattcagcacgaagctgcatgcntacggttgcgcacaggataaaattgtgacgtcctgggactctccctatatggggcgcggggttatacccaggagctactcacacttatattggaatgacatttttttttacacaatattgtaatgacctgtgaaaaatttataattattatgagagagaatagagcctcctccactttatgtgttatatatccccaactcccacacgggaataacacataaaagagagattggtcctctccatacacgtgaaaagaaaaatatttggggaaaaaaattatctcataatttttaccggccaagtattaccttttttaaaaaaaatcctcacttcataacctcaccatagagaatccatattatccctttccgaatccccaaatcctttacagaatgtgtgatacaagcacgtc

SEQ ID NO: 14149 - DNA, 431 bp, Glycine max
  unsure at all n locations
ggagagtcgtgattaacggcaatncaacacgaccgggagccctaaggcgcccgcaggaggggagcgctgtttatttacacttctcacgggaacgaaggagggaacaggggaatccattacccagagcaaaaaagctctatggaaaaacctattgcaaaatacttcaggcgctacgaaagggtggaaaaacacccaatacctccctggagggggctttcctagatccgggaaccttggatctggacaacacgaggatcctcggatctggatctagaagccggatctcgatcttgatgctggaactggaacttgaacgtgaactagacctagatcctgaattggcgtgaccaatcttgaggcatcgggagacttatgtaacaacggggaacatcaaacagctagaacaaccgacgatcacatgatcaacgcag

SEQ ID NO: 14150 - DNA, 476 bp, Glycine max
  unsure at all n locations
agaggtgggcttcnacgataacantcatttaatgcttngctgttacgangtttanagagagaaaggtccaagttctaagtattcttgaaaaattaaccggtgggagaatcagcgagacaaaaacctcgagccgaagcccgtcttgaaacctggaaataatttgggaagggatggtgaaacctctgaggtgagggaaacttctctcccactgtgattttgcgcaacttccatctggtcttcccctgggtggaaaaggaggttcccggactatggaaggctaattcctctgtggaatcttccgggtaggtcccggaggtaaatatattccaatctatgaaaggatggttggtgtgtcttctatgctaactgcttatcattccagatggctttaaccttgaacacttagatgcatgcttggtaggggcatccacagtgggaatggactgattctaagtccttgaagtatagactaattg

SEQ ID NO: 14151 - DNA, 299 bp, Glycine max
aaaaagctacttctcgatatcaagaccggatcttaataaccccggtggaacttttttaataataaccagccctggatgttaaccaaaatttttttaattcaaggcctggaatttttatagcctgctaaaatttaaccccaacgtttttttccctttaaatactcagttttgacaggaactgaacgatcgcaatcccaatacacctacctcacccacgttactgggctaacctatacttgctaaaaaatatacttttccacaatgaagactcggagagatgaggacttcgggctggtcgc

SEQ ID NO: 14152 - DNA, 485 bp, Glycine max
  unsure at all n locations
aaaattatttcaagtaccgataactntganattaagcanggacacagagtcttcattctctacacgaggtggtggtgtgttcctttgctgaaccggaaagggagagaatggatacatgacctatgaccccgatttggtcactatcggatagccataaaaggtgcctttgagattggtgatttggagtgatgttgtaaaaaaccacaatgggtttcatcttttgtgcctgaatattgtgcctgagggcgtatttgtgtttgtaccgtgtggaacacagttttactctaaccaaggaccaatattgtgcatatatttactcttatctaataaatatttatatattataaatattaattaattaaataatactctccaattattatttataaatataaattaatccgtttacctttatataggtcatgcgcccgagaaaatggattaaattattaccatatttttttaatatcataaatttatatttn

SEQ ID NO: 14153 - DNA, 478 bp, Glycine max
  unsure at all n locations
gggggnagggggcggggattttngatntcgttanttnacaacnnnnccgagagactctanagcgaccctgaagagtgcgagcctgagatcattctcaaactctacccnggnnnngggcgctgttggtatagcgggggacacacccccttacacacgtggatatatacgttatttcgcgcgctcaaaaacttgcctatcgtgctttgaatccccgttaccggccggaataccccaatgggttttccgattaactttttgctgtctgtagaagaaaagcctgataacaccccgagactaccgtcgtctttgcgccttcgtcaatccgggcgacaacccgttgaacctggagatttacgtatctttcgcgctcacaagatttgtataatgactttgagcacgctgcgggcggaatcacgagtggtattcgtataactttttgtgttgaagacaaaagcctgatacacgagagaatacgtcg

SEQ ID NO: 14154 - DNA, 470 bp, Glycine max
  unsure at all n locations
gtaacatcgacggtagacgacacttnaaaataacanngctggcaaanncgattcggagaatgaagattattattcttgttatccaatacangtattgggatatcgaatacaagcccaataagccctctggtgatcgattacaagatgttgtaatcgaatacaagctggctgttcatgtgtaaaccattacactaaatgggaatcgaataccagagcctatcctaagctaatttctaagaaaatatacatatttaggctcaaatacattctatatgaactaatttcactactaatacaccaaaatcaatcattcaattaccatatatacaggaaatcattaattctatcattagaaccagaattccaacaagatcaaaccaaataatctaccatcaaaagggaaaaagtaatcaatcatcaatcaccaatcattcctattttctaatctcttacatcaaaacctattcttt

SEQ ID NO: 14155 - DNA, 391 bp, Glycine max
  unsure at all n locations
ggtatgatgagtggagggagaaggagagatgaagcacgaaaatttatgccctaaatgacgtctgaaaattgaaatggaaatcttaaatgaatcaaggttaaaggttaaaaaaatccatccccaaggccttatttataaccctaaatgtcacacaaattgggagggaaattaaaattctattcaaattcatgtgaatctgtgaagctaattttgagccaaaatttcactaattatgattagtgaactntagcaatggttcaacccaactatccaagatcatgtncaagattctncactaagtgtgcttangtgtcatgaggcatgtanatcatgaaagacatgtacaacgtgtgactatatgatgtgaccatgggtgtagcangcaaatgcg

SEQ ID NO: 14156 - DNA, 492 bp, Glycine max
  unsure at all n locations
ccccttctaaacgactgacannctantgncgtgacntatagantactcaagccttcttttttggtccttaatcatttggtggccaaccttttgttcttattgtaagaattcctaatcctttgggaagggagctcttcccaagtgagaatcaatggcaaagctctcactcctatagaaggtgttaagcctggtcaagccaaaccagtgtgggtatttttttttgtgtgagggcctaaattttcatgtcaaatatatcaatagggtttgggtattggatgccatttttatatttaataaaacacattgaatatgtgggtgaatatttaatttgggatttgcctttcaaatttagtggaacactttactttaaaaaaagtcttatattgttttaactctatcaaagatcatttccttctaaccttcacatgtttcaattttcctctccaacctttcgacccatcntctcttttttttcatccaacagtagttgga

SEQ ID NO: 14157 - DNA, 351 bp, Glycine max
  unsure at all n locations
agcttggtttgattcggtctgacaagggatcgaggtttagtaattcaggctatagcatacaacacaaaagcatgattgattagagaaatatatttatatgcatcaacttgtttgttagaaagacctaccatttctacctactgctgtcacttttacttacttatgcatttatagtttttagcataaaagttagtttaaattctgtttgaattatcaatcatacatgttctctcaacaatgcttcattatcaatcatactgtagagaatccgtaaagcatggaatacagtggaatggaaagataaggagcttangggaagtagcaatggcatcgttggtggctatcacaagt

SEQ ID NO: 14158 - DNA, 368 bp, Glycine max
  unsure at all n locations
tacaagcctagaaaagtgcttgggaccagttgggtggtcctgaatataccccttgaaagaaatggcaaaaatggaaactggggtaaccggtgaatggtggattaaccctaacacctggggttgaatggaaccaggaccaatagggcttggggtgatgatcccttcctaatatttgcattcctactagcttatttcagttgtgttccttgataatcatggtcacatctttgaaaagctgcatgtcttgtgagaagttgtgattgaagcattntatgccattcatttcatgtgattgaattatntggagcaaacaccttgtgaataaccactgtgattntgtcacttgaggacaagtgagttgtttttct

SEQ ID NO: 14159 - DNA, 353 bp, Glycine max
  unsure at all n locations
agcttcttatttaagctggtaaataagttcttagaagtgtttaattaagttagttagtcaaatatatccaaaagttaaaaaggacaaaccttaaatgcagttccaagggtaatgggggctgctctccaattggaatggaaattcactccagaggtatatgttgcccttaattgtgacccttattacacgaaatatcaagatgaaactcccatttcattagagacaacaccaaagcatctaagaaatgctttaagtctgctatagctcttaaatctttattttgtggtgtcatttaactggacaatgttttagttgctgtaatnntatgaaagtgctgagtctcttgttgatga

SEQ ID NO: 14160 - DNA, 371 bp, Glycine max
  unsure at all n locations
tcgattatcaaaaccatgtaatcgatacacaaagctttttatgaaaggatatgaatcttcacaattgattttgaatttcaacgttcatatacactggtaatcgattaccaataccttgtaatcgattacaccattttgaaatcaattggaacgttacaaattcagttgaaagcctttganatcaaactttgccactggtaattgattacaggaaactggtaatcgattaccagagagtataaactctggtaacttagaaaaatttgagaaaaactcttttgaaaaacaaaactgtgctatgtttgtttttttgaaaaatcttttcaatacttcccttgtgaagtcttcttgatttcttctcttgaatcttg

SEQ ID NO: 14161 - DNA, 328 bp, Glycine max
  unsure at all n locations
agcttttttataaagcctatcaggnatgcgccaagggcgactgttccatggctctatggaccctgcttcaaacccgaaatagtgccttctttaatagaaacacctttgtttcatctccttttgcaacaaagccttcaaggtgctcaacataaatctcttcctttaggaagccatttaaaaaggctgacttgacatcaaactgataaatcttacattggtttgggttgaatagctagaacattctgattgatctagccttcaactggagcaaagtatcaaataatctactcccaaacttgacataccctttaccactacattgcttata

SEQ ID NO: 14162 - DNA, 639 bp, Glycine max
  unsure at all n locations
ntagattaattgcttgnaccaggtttanncngnnatnanctntannannaatnaaanccacnnngacgcntnacanaagaaacaacncacgcgcctgcacacggagaagngatcttttatgtgtttgtataatganannaaacnntatcaatgngcgatccgcgttggagttattgttataatttatctcttacacgtcaattcatttaaaatatatannaaactacatatatactttattcaaagtatataagataatggatacctaatnnngtgtgttctggaaatntgatgggtgtttttataaaagtagcatcagatatctgcgattgtcattcttatacaacttcangagcaaacatgtntactaacatctaagactnttttcaagtgaccaacctttaatattgttttatgttgcgtcacccattcatatatcatacaccacttcttacaatctcttcacaatatgtaaataacagttcttctacatgtagattcattttaccttaatgaaaacataccattaacctttgagaaataagngggctgatggatattnncaatatcttaacgaaattacttctatataatttttataactgttagagacctatgtaagtaacgttaatacttgag

SEQ ID NO: 14163 - DNA, 391 bp, Glycine max
  unsure at all n locations
tgctttcttcctttgggccatttcctgcgaaagcaaacattnggaaagttagttttaccaagtgggacactttactcttaanacanaaaatgacatacaaccctcctccattaatacaaacatcaatgtanatttagagcaagcctattgcgcatatntccctacgaacgttcacttgcacaagacatcctattaactaagaaaaatgcacccatatacaatcaaggtagcttcattacctagattatttacatgtacttccaaggtgtatttgttatttacatcacacacgcctncttggctaaatttacatacatgcatactcaaaacatttcggggtaccaaaaattgcacatgcgctcatctnggtatttctaatacctatacatat

SEQ ID NO: 14164 - DNA, 499 bp, Glycine max
  unsure at all n locations
aaaacgtttccccnaacttcngcanngcatanctgganactatgantactcagccttcttactgaggtccgatccaggctaatattaaatcaaacctcncaaaataaaccatcgaagcctcttgagaatttcaatgggccaaacctttcacaccgatgtctgatatcggcgccttatatgtccattcgcttgaaaatgaaccacggaagcccttgagaaaatcaaatggtcataacttttcaaacggatgtctgaattcggcgcataatttgtcgagacgcangaattgacaacggaagctctcgagagattcaaatggtcattaactttcacacggatgtcagattcnggcacataatatgtcgcgatgctcggaattgaaccacggaagctctcgagaaattcaaatggtcataacttnttcaaacggatgtccgattaaggtgcatcacatatagagacgctcgaaaatgaacaacggaagctctcgagaaattcn

SEQ ID NO: 14165 - DNA, 67 bp, Glycine max
agcttgctaaccaaatgctcaccactactaaaggagaagccttcaggttgtttaataaaaccctcct

SEQ ID NO: 14166 - DNA, 404 bp, Glycine max
  unsure at all n locations
atgcatggaaaatgtaattatgaaattgatatgcccgaatttacaccatttcctagttaaccatgcattangtaccatgttcaattattttgtttttaagtgaaatggggttatgatcccaacatggttggctcgtggtgcctaacacatgaaactaagaatgtaatgtgaagtttcacgcttcccccttttttgtttttgttttgtagaggaaaaacacaggatgagcaaacatganaacaaatggtatgcaattntgcagatcaaaaagtttgttgaacgcatatgcatgatgatgccatgactcatgcaaaatgtgaggccggaatatgataacggacaaatgcaggatatgtccattatgatgttatgaagagatgcttatgcgatgcatgatatgaatg

SEQ ID NO: 14167 - DNA, 403 bp, Glycine max
  unsure at all n locations
ggagaaagctaggaantgctngattcagctcggacccgggatnctctaatcgacctgaggcgtgcaagcctatttatttttatgctcaacaaggaggcgcgggaggtccccaaagaaaatagaaaccttagtttaaaaggaacctcttcttccttcataattttgggcatgagactaaaattatgacttaattaggaacacttatggatcggggcatatcttccaaggagataagcttttttctttctaaccggaaatcttctggcgaattttcattatcttaaaaaagaccaccatctcagtggcaggtggccatcatacattggaccaggagaatctctcttctcttggtgagccaaccccttaattcttgtcccaagaattatgaaccctaccaagacag

SEQ ID NO: 14168 - DNA, 483 bp, Glycine max
  unsure at all n locations
aaaactcnnataagggctagcagcgtcgcatanctactaagctggatacttacaaaatttttgggatgtgcatctcgcgcctatttcaatcatttttaacctaacgcctatccctgggggccggttgggcctaaccaacctggacctcctaagccctattaactaaaccaatttttggaattttgccttggcgctacgcgctaactccaattgctaccgcaattggtggcggttggaataaggctaagcaaggcttgctcgttaagcccaataatgcctagaattcaagccgggctaagcaacaacctttcgcaaagccctggtttaaaacggtttggctctgagctaagcgactgctaatctcgcttagccaataatgcagaaaaaatntctgtcatactcgcaaacgcacccctgtgtgctagccaatgaagtattctcataacacgcctangggacatgctttcctgacggccctaagcg

SEQ ID NO: 14169 - DNA, 441 bp, Glycine max
  unsure at all n locations
nnaataaactttcatnatctgcgactactctagtacgcggcgatgcataagtnaactgagaggtgccaaccgatatttgttcgcccccaaaccataaccttccttttagagtacatataccctggtaatgtgagaagaaccggttctcttggtggaccggcaatttcccccaaaccggctttaagaagaaccattattaccaccctggccaacatggggaggttggtggagttattattcctggtatgccattatttggaccaataaaaattaaatatccttaatcaacttgccaacaaatatttgcatgtgtttatttagaccattnctatatcctatagtatttgatatttaatgacaacaanaattaggaccacataatattaatattaaaaacgatgatcatttgcttgactatggccatgatactgtcatgaacta

SEQ ID NO: 14170 - DNA, 479 bp, Glycine max
  unsure at all n locations
aactttttggaattcgnanagtaganctgtgananataaagcccaaacacatggacctgttgtcccggcattatgcaacggactcttattagaataacaggcctggggaatattggacgttagtattgccgctataccggcgggaagaatggtggtgggcctaatgggtgccatggaataataacctggggaaggtaaaatgggggttgaacctggaaaaatggattttgaaggaaaaatggaattggggggaaaaatgggaatggggggtaggattggaaccctactaataatactccccccgaacccaacctaatcctcaaattaatcctgatgcccagcgacaacctccgtaaatacctcgcccattatgcccaccntcaccataatggtcacaattacgctgagaaatatcgacataagcacgccgtacgcccccgcctctcatcatcccctcctcagctccccatagccctccg

SEQ ID NO: 14171 - DNA, 240 bp, Glycine max
tatgtgtctatacacatgtccgcgaaaaatttataaatttggccatataaggctcacggctataaaattgggaccaataatcattacctggacgggggaccggtttagaagcattgttattctgaccgagattgatatgatcatggtcgtgccactcctgggacctgacctgtttcttctaataatataatcattgcctttaaaaaatcatatagtgaaggatccctgtaatagaaataa

SEQ ID NO: 14172 - DNA, 158 bp, Glycine max
taacttataaaagtttacctattatttctgaaaactttcttttcctttttaccctaaatttttgaatacaccaatgtattcattggttgaacctaataccctaaggtttaaccctcttcatattattttccggaaaaattaaaattttttcaaaaatc

SEQ ID NO: 14173 - DNA, 308 bp, Glycine max
ttccatagaggagggaacctacgtggcctattttttatacctccttaatacatgttggccattacacctatatgtctacttgtctaaattttgggattatccgagatgagttgattgatctacaatttgtgaacttgctcattcaattgtgatcttgagtgtgactttctatttgtataacatagagagatggtgaagtagagtgaactcgaagctctctaataatatttgcatgttggatataagcctaacagattactgagttaattcctaatgccctaatgtgagttttacatttgaataaatgg

SEQ ID NO: 14174 - DNA, 483 bp, Glycine max
  unsure at all n locations
aaattttgcctttgacgaccacactnanatngagcangnccanagagatccagganggataaagcggccgaaggacttanttttcnttcccaatttgacagcattcgctttaggacctctaaacacaaccacccctcctaggccataaagggatggcatttcttccggaaccaacccttccaccttagggccaacaagtttcccatattcaagaagaaaatacctcgccgcgcgtggcctatattgtcaaccccattggccaagtccaaccaaaacttatccctcaaatttattcccattgctggccctacagaagaaggcgtgccaaaatattaggcttgggttgaggggcagtggattcccttttgatgcagatgctatcgcccacttcctgngatatccttatatgcttgaaaaggtcaagaagtgaagtattggccaaagaggacccggtccatggttccatatgatgccatcccattn

SEQ ID NO: 14175 - DNA, 54 bp, Glycine max
atatacatatatatatatatatatgtatatatatatatatctatatgagaaaga

SEQ ID NO: 14176 - DNA, 454 bp, Glycine max
  unsure at all n locations
acacgaatgaggaagtgtnaangggtgaagctgccggctatattttntttcacttagagggacccggaaataagtcgcgggggttaagaaaaccttgggacctcaagtggggtgctattggccaaaaccaaacttgaccaatcctgaaccaacctgggcctaatccgtcaatgaaaacctgtgatggaccttaaccagccaacctctggcagtccaccagataaagggaccaagaacaccaaaccaggaggcttgtggtggcttgccaactatgaaccttgatgatgtgtgagatatggccctcttgtaatcgattaccaanggtgggtaatcgattacaaggcttaaaaatgaagacaggaggctaagatggtctctggtaaatcgataccacngngtgtaatcgattaccangcttganaacgaggtcaagagctatgaaggcttttggaat

SEQ ID NO: 14177 - DNA, 369 bp, Glycine max
  unsure at all n locations
ccaatcttcttgtattcctacttggagggatctggataccgctttcttaggcaatatcagtccaatcttgatttgcttctggaccgtcttcactggagaatatgttcaaaaaagaggcgaaacctttaagaatatgcgcacgattgaaggatttggcggcacaagttcttcttccatggtganaggagatgatcacatgatggggacactctgctgtgtctctatgagaacttgtaagtacatgccgccactttcggatctgtgtttgccgggaagattcaggttgattgaaagaagaaaattgattcgtttctcacaaagcgattgcaaaaaattcggcaccgggcaaaaggatgatgaatcccttcn

SEQ ID NO: 14178 - DNA, 320 bp, Glycine max
  unsure at all n locations
aaactatattatctacaccaaagggacacttctctatatttgcataaagggtgtttttcctaaagactgaaagaacttgcctgagatgtcctaagtgatcatctangctcctactgtacactaaaatatcatcaaaataaacaactacaaatctacctatgaaatcccttaagacatgatgcataagcctcataaaggtgcttggtgcattagtgagcccaaaaggcatcactagccattcatacaaaccaaacttggtcttgaaagcgattntccactcatcaccctntttagtcctgatntggtgataaccactttta

SEQ ID NO: 14179 - DNA, 327 bp, Glycine max
  unsure at all n locations
atcttgtgtgacacactttanagttcaacttctatccctatcctccttcaatttccactctctctctttctctctctctctctctcattctcttcctccattgaagcttcctctctaagcttcttatccaaggcactctcttagtggtgaagcttctccttcatggcttattctctagttgatggtacctcctctcacctcttctcctttatcttctgcttgaactccatggcttaaaatcaccattgaaggacctcattgaagctcaaagatccagcctgcatagaagcttctcaagcaagcttccatcaagtggtaatcaaagca

SEQ ID NO: 14180 - DNA, 450 bp, Glycine max
  unsure at all n locations
tacaaatctgttttaagtccaagcccataaataatttaaattctagataagataagacaaaatctagatgaattaatatctagatgaaataaaatctagataaaataatatctagatgagataaaatctagatatgataagataaaatctagatgaaataatatctagataagataagatntggtagcataaaattgtctgctctcttcaagtccaagcccaattccggattcaaacccaattgcttantaatttcctganattaaattaaaaacacaaaattaatccagtaggcccaaatgataaaactgcataattaatttgacaattaaggctaatcagtaattaaaatggtgacaaaaaggggtaagaaatatgagaaaatgatgacacatcaggacgacagcttttaattaaatccacaataccatgacttcagaatggtttatt

SEQ ID NO: 14181 - DNA, 371 bp, Glycine max
  unsure at all n locations
agctttatttttgcttaatatatcactttttagttgactatttttcttattagcttcctactattagtgcaaaaccattttgctatngtntcatgttttttttgctcgtgttgtgggtttgaatttgaaaattgaacgtttgtgcttaactttttgaactatacggtatgttgttgtttggatggcactatatcacatgaatgcattntggtttgcaacctggtgtgtttgcaaggggttgtgaagcgaatttaataataaataanatcaaatgctttctctctggttctttgtatatttaattgaaaagtatancatatctatagagtatcttcaattatacttaaaaaattaagtattatattaaaaaa

SEQ ID NO: 14182 - DNA, 409 bp, Glycine max
  unsure at all n locations
actggatgcattggttaactgggtttctcattggccttgaatcaaaaatttgtaactgtcgcaagggtnttgtgggttgtgctcctctgctgaccaccatacagacctttgccctttcattgcagaacctggagcaatngagcagcctgaagcttattgctgcaatatttacaatagaacctcccaaccacagcagcaaaatcaaccataacaaagcaattatgacctctccagcaatagatacaaccctggatggaggaatcaccctaacctcagatggtccagccctcagcaacaacaacagcagcctgctccttccttcaaaatgttgtggcccaacagacatacattcctcaccaatccacaacagcacaaccccagaacaaccaacagttgaggccctccacaa

SEQ ID NO: 14183 - DNA, 88 bp, Glycine max
tgcaaccttttttaaaattcttaaacctggttaaaacataattataagttggattgccgaaggtatattattgaacccatcaccttcc

SEQ ID NO: 14184 - DNA, 365 bp, Glycine max
  unsure at all n locations
ttcgtggagcttacagaccatgtcttttgaaatantctatcaaccttgtatgcccgtatggtgggtanggattagcnnaccaaatgagcacccctgtggaaatcggtctacaaacactaatatcatcgtgaaacccgtgggattattgcagcccctattattgaaatcgaggacaaatctttccatatgtgggaaggtattggaaagaggtgcagcaaaccggcagcccttctttgttcgtattttgtctgttcgcacgaaggacattgcacgatgtactggcggacatcttcttgtatatgtggccagtcaaaattctgtcgtanatgatggagagtctttgatacccctgtgtgattgtcgag

SEQ ID NO: 14185 - DNA, 221 bp, Glycine max
  unsure at all n locations
agtttgttttatcggttatgctagaccgagaccaacaagttagccatcatcatcaagtaccaagaagaattaaatctagccacggcccacgagcacaaagtggtggacaaatatgcccaagtgtacgcggaaaaggaggctagaggaaaggtgattgactcgttacatcaagaagcaacgatgtggatggaccgatntgctcttactttgaacgagagtca

SEQ ID NO: 14186 - DNA, 424 bp, Glycine max
  unsure at all n locations
aatgcctgttgggtgagtagaattctccttctgtttanggtttttgtgatgatgtttgtgatgtttatatgctgaaattgctgatggaaatctgttagagacgaagggtagaactaacccaaggttagaaagtgagaatgtgatgttatgagtgaaaaanaaagagtgagactntgagagttggaaggctaagtctgaattctgtggtaaatggaggttagagtgagttaatactagcttgaaatgtcatttagaacatgtgagaaaggttaggctgagctagagagaaaaacaaatgaccaaagtgaacaaagagccattgctagggcaaatttgggtgttgaagagtncaaatttgattcggtgagattntaggtgtaaatccagttcgaacaagtctanatggatgttacggactggtgtg

SEQ ID NO: 14187 - DNA, 354 bp, Glycine max
  unsure at all n locations
ggttttctagcttctatgactttaacacctagctgtcagttgtatgtggctgtactgtcttaatacaggttttaatacatggcttacacatatacatgtatatataccaggtagtaccaatgtgcttcacctgaactggatataatgaaacatcttccacaacaacaccaatggacaaaccaagttcaactacaacagactaattcagcttcacctgaagttgatataatgagtaatggcattagaagaactcacagccaaaccaagttcaagtacaacaaactaatacagctttttctcaaccaaagtatgtcanactactttgtggctataaaagtngtaggtattcatgtg

SEQ ID NO: 14188 - DNA, 350 bp, Glycine max
  unsure at all n locations
ttttaatgaatccattgccaaggatttcacttagggttgcttatctcttttatgccaaacaaacttgccttttgatgcctgattatttttataaataactttatttgttcaaaaaatggtttgcgaaagtgttatcttatggtctctttgttctctttacattaccccttgttgaatctaaagttagttatgatgcatgtgatgttttccaataaaatcttttaaaacttaactctaaaggtggagaagcattttagtgattttcttatttccaataggaaagtttactactttcttgttggtagaaaatccattctgaaagatctaatctcttacatagatntctttag

SEQ ID NO: 14189 - DNA, 352 bp, Glycine max
  unsure at all n locations
agctncttgccaaatggaattaccatgaattaattccttggatagccccttggagccaattttccttttccttggtttggaacctaataacaggcctaaggggaaaaacatgattcaaccttacctttagggaatttggaagcttggaantggtttggaataagctggaataaggtgggggggatggttcatgaagattgattttggcatgctaatgtttatttgccatgctgatgatatatatatgctaagtcttcttaatcttcaattcgactgtcataaaaaaaatgaaaatgaaaaaaatcaaaaaaaaaatcaagtgcggaatctgcagttcgactatcaaaaaaaa

SEQ ID NO: 14190 - DNA, 443 bp, Glycine max
  unsure at all n locations
ntgttggtgtttggacttcagatntagtgcatgtttggatgtgtnnatttatggaatgaccacttattttgcataagctctctcacaaagctgcaaaaatagtgattattttctcaagataaactgaaccaaacatgcgctacaaagagaaaaaattgctaagggaagataagtttccttagggcttgtttggataaaatttttcaaaaacaattataggagaagaaaataagaaaaaaatatgtgaaaaagcttctccataagccaaaattaacttatgcataagctaatttgtagaaactctcatattagcttctccaaaacttgattnttagcttacgtataagttaattttagtttatggagaagctntttccttggtttcttctcgtgtaagtgcttttagagaagtttatccaaacaaaccccaagtcctaaacaat

SEQ ID NO: 14191 - DNA, 259 bp, Glycine max
acgtaataaaggctaaaatgaattccaaccaatcatttgtgttgtaatgtcatttaatcaatgttaaaacaaaatctaaccgatcgttcacgctataacctcggttaaacaaaaaaaggtaaaataataataaaataatcaaaaaaatcaatcggacgtttttctttgaaagtttccttgaattaattgactaataacccaagtgaaaccaaggctaaaatcaactcacaaatcaagcttgtcccgcaaaaatcactca

SEQ ID NO: 14192 - DNA, 285 bp, Glycine max
  unsure at all n locations
ggattacaaaaaattaaaaaaagaggtctttccaaaaaggaaacccgaggaagtccccaccaccgttattttaaggaaaaaccaggaaaaacaaaaagggataaggatattctatagttaagaaaaggattcggagccgttattcatggggaaggtattacactcacacgcccgcatgaaacgaaatcttaatcgatgtgtaaaataagtacttttgatattatttccttgaaaataatatgttgcttatntttgtaattagaaagaagtgatttattttagaaa

SEQ ID NO: 14193 - DNA, 429 bp, Glycine max
  unsure at all n locations
gcttgcacacctatattagttattgtgagcgtctgatgtaaaaatacaagttggttcataaaaatatgcgaaaaaccacctatatttatgttatatccatgtgactgcgcggatatataggatctgagttctggaggaaagaattacctgttaatggatacctgaatttcatagcctggatattaccttctggctggcttaaaataatggtgaaaaaacattttaagcagaacaaaatattcaaaagaattaagtaggtataaagcaatggcaatgcaatttttaacatattatcagctgatgaacatctatgattcattcactaaaccaaaaattaaantgcatatcttcaacagctggcatgcctttcgtggatcaagcttctctacacaattaatctgtagtacatatgtttattcggtctccccn

SEQ ID NO: 14194 - DNA, 452 bp, Glycine max
  unsure at all n locations
nnnnnggggacttacgatgcacgcacaactttgaatactaagcttgcaacaagatgtaacgttcattaacgtaatcaaactttttattttttggggaccaaaatctatagtggggaaaaacaatgaatgggccctatctcccctatttaaataatgctcttggaatggatgatgtgcattggcccccacacatcatatatgggatttccctgtatgtggctaccccccttgcatcagtggaaagatgctgtctggaaaaagatcatgagcttgtgaacatatctcttctattatacacttgaatttaaaatgcgcagttaccagtgccaaaaatacccngtgatcttttcgccgtgtttttttgggtaaacacttttggcttcctctatcttaataaaccaccagcttgccttatatgatctagtctcggagtttccaacccataacaatgc

SEQ ID NO: 14195 - DNA, 466 bp, Glycine max
  unsure at all n locations
ggagttacttgatantcggcaattccactcgggacccgggatcctcttnagacgcccggcaggctggcacacccggttttccttactgttttccaagggtttaaattggcccctcgggtgggcttatatgggtcctggattaccaaaaaatggtggataanaatggccaatgtggccacatttcggctacattaaagccacccgcacctcaggaaacccttgatcttgccggccaatcacaggtgcagaccatttttttaaaccttgctacctatctatttagtatcaatgacttaagagtaagacttccgtgaaaatattacanacgaattattaaccccataaaccagggacaagtngaagagtagagggactccctaaaaanatattagagtagagggaggaaagtctttntgagagagaaaatagcttanggagaaagaaattcacttttcacatattttgn

SEQ ID NO: 14196 - DNA, 258 bp, Glycine max
tgaatccttgaattccaaccatggtaatcctttgggatgagaatctctataatatggaatttttgggtgggtattatttcaccttttcaaaaataatgagttaattaagaatgtgcctatgatgtgaaataaccttacaccggccctaaatttaaaatattgtctattaaggtaaccaatttattataaataataaattttgaatggaccatgtgaaatggttttattggatccatgcctaatcctttttctccttaa

SEQ ID NO: 14197 - DNA, 506 bp, Glycine max
  unsure at all n locations
aaanaacaaggctaagcantcgtgcgaattctatctcggnaccccgcggattcctctataagtcgaacctgcgcggcgttgggcacgcctataattatattatnntaagnnngctcataaaaaatccctcttggagaggagactgcgctatatcgagatacacctcatatactctatatatattntataaaaaatatttccacatattggattgggcctagatttaaatattgctatttggattgggccctttggaggggcgcttatcccagaagaattatattgggccatttttcttaataatggtttaaaccttccaatattatattaagaagaaattattgttgcctcaaccgcattaaaaagattgttacctttcaaagggtgccctggtcctttttctttggattgaaaacagatattatactatgcaaaggatatncaanatngtattagcttattttaaaaagaaaaaaaatggcattccgttcgcaaagtctaacttn

SEQ ID NO: 14198 - DNA, 654 bp, Glycine max
  unsure at all n locations
aaaaactttggaggtttgaccgnagaactatagantactcaagcatnctcgccaatggacaatgggcggcacaccntaatctcgcgcaatccttctgtgttgcatctaacggaaagaaagagacaccgctccatataatatctctaaaaaatatgacatctctttacactaaaatatatatttgtgaaagggggacaccctctacacgcgaaatattgtctatagagatgacactgtcgcactatagagtatataagttcacttttcacaacacaatataaagagaacgatatntatngtgttgcgacatcttgagagaatatcntataagcgactggggcntcttcgcgcccacatcttgagtacatatcctctgcgatacacagaaattatatatatgctcgcgtatgaaaaacctgtgggtgtgggttntctacaccacactatgtgtcccaaaacatctttgtgccgcgtgcgcgcggcgcgcgcccttatacaccccctatgaatatggagatataacccgaagagagagatagagtaccttctctcncaaagacacttgatatatactgagaaaaacactataatatataggttttccttttttatggaatttatacactatataccgacatatatatagggttgact

SEQ ID NO: 14199 - DNA, 417 bp, Glycine max
cagcctgcattatttctgggcctcttttcaatatacataccccacacaccccccatatatctctgcgcccagagcgcgctctatacatatatatctctcgctctcccctttctttgggccatggtcgcttcattcattatctcaaaggcgtgcaagtcgccatccgaaaataccccagaccaaatcgcccaagggtgccaagattccgaaattccgtagccgaagggtgcagtgatagaaacaaaaaaaagagagtgcgagccaagtagggtttgattcttatatttttaaatatgtgagcccagatcggtttaaaaaaccgatgttatcacatgatgttaagttaacatcgttgtctggtaaaaccgatgttacttatcataattaacatcagtttctgaaaatcgatgtaacgaa

SEQ ID NO: 14200 - DNA, 374 bp, Glycine max
  unsure at all n locations
ttttttttcttatgatggttccattagaaaaaacctaagaatggcttggaaaccgggattaaaagaaagggacttaacccttaccccgatctggccgtagaaccaacactatcgaattcttaacccttaaacaaaggaaaagttctcacaatagagaaactctcaactttcattagtcttcaaactctgttnttggagagtacaagagttccctatttataggctaatcttgaattgctagaataattctgactaacatgcatttactgcatgcattgantaatgcatgcccactacctangaaaatgagaataaacatgaaaattaattcccgctagccactaaatgacttagagaacttctaggaagcattt

SEQ ID NO: 14201 - DNA, 159 bp, Glycine max
  unsure at all n locations
agtttttttggaagctacctagnctataaatagaagcttgtgtaacactggttggacctttgatgattgaaagtctaatgaaatacacttcaaagtgccacttctttccttctttaattccttcaattcctggctcccgccttctctctttcttttcct

SEQ ID NO: 14202 - DNA, 446 bp, Glycine max
ggaatcggacctcagtgtcaaaagttatgaccatctgatatttctcgagagcttccgtggttcagtggcgagcatctcgacatattatgtgcccgaatctgactttcgtgtgaaaagttatgaccatttgaatttctcgagagcttccgatgtttaatttcgagcatctcaatatattgtaagcctgaatcggagctcagtgtgaaaagttatgaccatttgtatttgtcgaatgcttccttggttcaattccgagcatctcgacatattatgtccccgaatctgaccttcgtgtgaaaagttatgaccattcgaatttctcgagagcttccgttgttcagtttcgagcctctcgaaatattatgcgcccgaatcggacatccgtgtgaaaagttatgaccatctgaatttctcgagagcttacgatggttaatttctagcgactc

SEQ ID NO: 14203 - DNA, 383 bp, Glycine max
  unsure at all n locations
agctttcttgggccatttcctgtgaaggcaaacatttggaaagttagttntaccaagaaatgctactcttaaaacacaaatggcatacaacctcctttaataaacacaaacatcaatgtaaatttagaatanactcatgcacatactcccttacgaacgttcacttgcacaagatattctcctaactaagaaaaatgcacccacgcacaatcaaggcaccttcgtcacctagattatntatatgtacttccgaggtgtatntgttacctacatcacatgtacttcctttggctaaattacacacacgcatactcaaagcattntggctaccaaaaatcgcacacgtgcacattcttgtatttctaatactatgcatatacaac

SEQ ID NO: 14204 - DNA, 426 bp, Glycine max
tggattaaacaacggaagctctcgagaaattcattttgttttaacttttaactcggaggtccgattcaggcgcgtaatatatcgagacgctcgaaattgaacaatggaagctattgagcaattcaaatggtcataacttttcacttggaggtctgtttcatgcacataatatatcgagactctcgaaattgaacaacggaagctctcgagaaattcaaatggtcataacttttcactcggaggtcagattcaggcgcataatatatcgagatgctcgaaattgaacaacggaagctctcaagagaatcaaatggtcataacttttcacacggaggtcagatttatgcgcataatatatcgagacgctcgatattcaacattggaagatctcgtgaaattcaaatggtcataccttttaacacggag

SEQ ID NO: 14205 - DNA, 174 bp, Glycine max
agcttaatatacttagaattcaagtgatcatgtatcccgaatattagggggaaaaaccggtgccccttttatctatattccattggttggtgcctgcctggatcctgaattccaggattggattggcctcatccaaaaggggggaaatggtgaagccattggctttgatggttt

SEQ ID NO: 14206 - DNA, 443 bp, Glycine max
  unsure at all n locations
tatgcgcatatttccttacgaacattcactcgctctttatattcttctaactaagaaaaatgcacccatgcacaatcaaggcactttcggtacctacattatttgtatgtacttccaaggtgtactacctacaccacatgcatttccttggctaaatttacatacattgcatgctcaaagcctcttggctaccaaaaagtgcacacatgcaaaccttatgatgaatcttggctatctacacaataaggtgctacatttcatgctntattcaagtgtttttactacctaaagccgcatgcaaattcaagtatattttcttttgccgactaanatngtattcaaattaaaaggtgtttntgtaaggtattttctttacataacatgcaacatatttatatatttttgggagacattntgactaccanaaattatatgtacataca

SEQ ID NO: 14207 - DNA, 404 bp, Glycine max
  unsure at all n locations
tctttgtgtcctcaannaccaaagtggttccccaagaagtatcgaggcactctgttatatcatataaccacatccagtggtaatccgatacacctaaaaacacattttggaaaaaccgcgctttttaaaaagggtttgagatttgaaattttggatcctggtatcgaataccagaaggttgtgattggatacccaccaccggaccttataaaacaccttggaaaggcctgaaccttccaaatattaccggattatccaataccagaaacctggtatcgattaccaatggagatttcaganaaactttttgaaagacacatctttcaaccatttgaaaggcacgaaggactattatgtgttgtcagacttgaaagcagagaagatatctagagacttaatgcaan

SEQ ID NO: 14208 - DNA, 384 bp, Glycine max
  unsure at all n locations
tgagaagcacaaccaaaaactagtatgcttgtgcttaatatcttaattagnctttgggatcactattcaatgtattcaatctttcttctaagaaacaacttattcacttcaattttctcagttggtaaacattaacccatagaaattaaaatagttcttacacttcatgctatagcaaacatttataagaatttgagttgatttactgaataaaaaaagctaaattgtcaaaatggttaattattttgctctttttctttcgtttgacctcgattacattggttatccctcacaaattttactttagaaagcagggattcgacatcagtgaacgcaaacgcaatatgttaaaggaacaatttgggttgggttggcgggttgagt

SEQ ID NO: 14209 - DNA, 200 bp, Glycine max
  unsure at all n locations
atcttattggtatggtcataggtctnggctgggatggggagaagaaaaccattgcaactagtgatgaatggtgggaagccaaaattcaggtttgtattattcaacgaaaatagagtttttatgcaggccaatctttggttnttatattatttatgtgggatactngactttgcggccaaaattgcagttgcagaatgttt

SEQ ID NO: 14210 - DNA, 439 bp, Glycine max
  unsure at all n locations
tgcttacttatgtggagaatgatgagagcttgaagtcatgggtgacaaggattcaacaactcagtatcaatagaagaaaaccttcatctcaaatgcatcgtgccaactgcccagcagcatttctgcctctcaactttcctcattgtagatcatccccgaaaacattccttaggcctcgcttcaggtaagatcacagcatgtggctcggcatccaaaccatcagagattatgaaacagttccaaatggccagagcatccagcaggatctccagccattgacccatgttctgacatgccatgcttgactcacagatgtcatactttctggtgcatgagggctcatgccttcaacattnggccagtttactccatggaatcagttgaatccttcacttggaccatatccacttacttcccttcagccctcatctagtgatct

SEQ ID NO: 14211 - DNA, 387 bp, Glycine max
  unsure at all n locations
ggcttcaagcttgtatataataggcctgattcctcaaggatgtccatggtataatttctctaaaaattatgacaccatcgtggattgtgccaccaccattctatgaaatacgaagtttttcaagatctttgccaaaaaatcattgaaaagaagtttcaactaaatgatgccaacatgccatggtgattgttagaaactacacatctatttcaataaggattctagaacgaatggtcaagtttccccctctccttttttaaactttacataagtcctattcagcactaattgtctctttaatttatattnttcagtcaattaaacttgatctctaaaatgctcaataacattagatgtcaactcctttgtcatataccagaacatgat

SEQ ID NO: 14212 - DNA, 432 bp, Glycine max
  unsure at all n locations
aggatgtaaacagatttggaaccttcatatgacttttcacgaaataatggagaaataagaagagaagagaggtttaagagattcttaccaaagctttgagagaaaaaaaaaacctaaaaaacactaatatggagcttggaagaagaggaaatggtggcctcttagtaagtgccatattttagttatttttgggattagaatgttagcacttatcttttgattttaatagttttcttataaacttcctttaattctagttgttttatatattatacgtntataaatatttttttaaatatggaagattcatccatgcatttcttatgttttgatggttttttgttggatctagaatccaagccaagatgaagagcaaaaagtgtcattcttgaagaatctcatagtgccacatcgcccagctagcaatcaact

SEQ ID NO: 14213 - DNA, 336 bp, Glycine max
tcaaaaacttttaatgttggagatttagtttggaaggttatcctgcccatagatagtaaggatcgagcttttaggcaaatggtccccaaattgggaaggaccgtttaaaataattcagatctattcgaatggtgcttatgagttagaggagctaacccctcagaaacgtactttgagcataaatggtaagtatttgaaaaaatataaaccaacactactcgaagttaaaataagcatagaataagagaaataccggaaacataaaaatggcgataacagtaaattgccacgaaagggcatgtgtcaatattacatcgaaaagtaaaatcgaaatac

SEQ ID NO: 14214 - DNA, 288 bp, Glycine max
ttccactcagactcctagtcactgctattgttgggtttcacccctaacgaacacatcttttttagtgccccatcatatacccccttggatgaactagttaacgcttacgcactggtgggcttctgtggttgtacaagtaacacacattagctggctctctcgttatgcccgtccgactcccactagactgatgcatgcacactactctctgatggactgtcaaagctttggaatgcgaattaaatctttttgagattaatttagtatgtaacaatcattaaagcaatt

SEQ ID NO: 14215 - DNA, 331 bp, Glycine max
ggaaaaacctatgtgcctcattgaagttagcacccatcttttataaaactgatgggagaatatccaatcaacataacccacttgacccttttgcaccccatttttagggcttgttttgccaccacagagagcaacattctcccaagccccttcgtcttataacactccctcaagaacaagttctccatgtaaaaccctcgcttctctagaacgagagagaagttcggagaaaacaagacaaacccaacaatggaaacacctctgaaggtgtttaaattgtagtttctcgagataactattacttaatgggaaataatgatgaataattaat

SEQ ID NO: 14216 - DNA, 489 bp, Glycine max
  unsure at all n locations
gaagtatactcgatgcatgcagaacnttngatactcaaccntgtaagcctaagccatagtattgagcacatgcagggcctacttatttccaagtaatggaaaatggntggaatcaacccgacacaatgagggagcaataaatgtcctctataaacaatgcaccggctaattttcacccaaattaaccctccatacataccagttacacaacttaatggcacagtattccccctgtgcaatgacctctctaccctcacacaaattcaacgtgtgactcataagatacaatacaatttcagcaaacttttgaattaagatccaaacctttatctaatcacaacaatcatatgcagtggatacaaatacacgccagtttgtgactctcccgtcatctccttcattcctgcttatttcactaaacttcacaggaaatcttatcaatatggcgtctggttttgtggatattgggatacatccgaatgatgtctn

SEQ ID NO: 14217 - DNA, 481 bp, Glycine max
  unsure at all n locations
ggggaaaggaaagactacttgtnatactngcannnctcagagancngccgacacccncagagaggacccgagagggatagtgaaagccaagtttttttatctntatatcgccaccaanaaagggcgagcttcaatggaacttccaaaaaacaattattggcgttaaatttgctccaaagctcaacattcaattttaaccgttccgatatctgaggggactcaatcagacttccgataagaaagtattgtcggttgaattagctcagagcttcagcattcaatttccagcgtataatatgtgaccggcctcgaatatacatcccaagacaaagttatcgtcggttcggatcgctcaaaggtccacataccatttcaagcgggtttgtttatcacaggcctcaatcgacatccgagtataagatatatgggcatggatgttccaacacttaaacaatctatgtaaatcacaaatatataccgg

SEQ ID NO: 14218 - DNA, 394 bp, Glycine max
  unsure at all n locations
aggtgggtactcgtttcatgncatacagaaatcaatagccattaaacgacnnacgggggcgcggaaggttgttgttcctgtcnnaacaagacgctgaagtgagtgtgaattctgacaatccaacgacatacttttactcgatgctggatgagtccggaattaacgaaacctcaaatgaatgtgagcctagaacaatcaacgaccatacttttactccgatgtctgatggtccctcaatatcagacctcaaatttatgtgagctctaccattcaacaacaatactttctcaatgtctgatggccggatatacagtgctcaattgatgtgactctgaccatcaacacatactttactcgagttgttggtccgcttatgagacctgaatgaagtgat

SEQ ID NO: 14219 - DNA, 537 bp, Glycine max
  unsure at all n locations
gggaccttgatcnctccctggtatnncctatacnntctaatttcactnaatccntaccnncggagannnngnnnggannnaaacagagagagagagagcaagcttcatttcttacaccnaccacaacaaaccacacaggcgagggggccgcgatgacgacacacaacacaacacaacccccacacgcacngggacggagaacagaattcaaaagcgaaccccacgagcacaggacgcagccgcagacgactcacatcgcaaccgagcgacacgggataagaaccgacacgcaccgcatgacaacggcggaacggcccgacgagacagggccaacaaccgcccggaccacacaatcaccaacgacggaccgaccgccagagcagagacgcacaaagaggctgcgaccaccgccgaccgccgcccacaccccgtcaaacggagaaaggacacagaacgacccgacagcaacgaaagcgcgaggcagacgggccgccgaacggagcaacccgacgagagtccacccaacgatgagccacg

SEQ ID NO: 14220 - DNA, 370 bp, Glycine max
  unsure at all n locations
ggatgtacccgtaactngannacnaagctcgacacgggnnaaaagangaaagggaggacccctctttcacccccaatccaccgccccgcgacgcgcacccnntaggcacaacaacgggagtgaggaaccttatccggaagaaactacacacttggtactaatgggcatgggaaaaatcagcggaatgacatatcctggatacacaaatcacaatttatccaaggagctaccttgccacatttattgaggtattgaagcctaggttctatactaattttaaggctactcgctcattaataaatgtccctgacagaaaaaaatatcatccttggacacttttacaggaagccttggccaaaacaaatgcagg

SEQ ID NO: 14221 - DNA, 482 bp, Glycine max
  unsure at all n locations
tgggtttcgtttcttagtttttanantctttganannatncannaacntagganaangccaacagaaattgagcgaggctttaancttcatgnncnnngcagncnnagggggggggactaccagaaacttaccgaaccggcagngcnanatnnnccgaaaaagnacaangaangccaaacgagagcacacatagcaaacaaagcgcccccaaactagagaacgaaccgagacagggcccaccaggaacagagacggaggaagcaagncagaacgcatatccaaaangngagacagngccatgtgaagactgagacttcattcaaggtttcatatggaagttatattctgttatctcggtttcttataataggatatcataatcaataattataaatactcacttaaatattatataatatatctattgatatatattatcatattgaaatattgtattataaaactgatttcatttacatat

SEQ ID NO: 14222 - DNA, 223 bp, Glycine max
  unsure at all n locations
agtttgtgnaattaccccaattccaatgccatatgctgacttactcccatatctgctcaataatgcaatggtagtcataagcccaacaaagactccttaacctctgtttcctagactatacaaccccaacgtgacatgtgcttatcatgggggagttccagtgcattccattgagcattgtaagaccttgaaacataatgtgcaaagtgcgattgatgcaagc

SEQ ID NO: 14223 - DNA, 215 bp, Glycine max
  unsure at all n locations
ccttgaatnaaaaatctgtgcctatcgcaagggtttgtggttagtgctcctctgctgaccaccatacagacctttgcccttccatgcagcaacctgtagcaattgagcagcctgaagcttatgctgcaaatatttacaatagacctcctcaacctcagcagcaaaatcagccacagcagagcagttatgacctttccagcaacatatacaaccct

SEQ ID NO: 14224 - DNA, 308 bp, Glycine max
agcttgctctccagctctcccaggcgagctagggtgcttcctccagaaggcaccgccttctggtagaacttcctggaaggcccaagtgggcctgattactattagtacccactgtttactaaatacatccccttgcctttttgctgattctttttccgtaatgttaccgaactttacgaatttcgaacagatacttgatatctttccgtaatgttatggaaccctacaaattacgttatcatccctttttttgcttccataatgttacggaacctcacgaattggccacaatgcttacatttgacttt

SEQ ID NO: 14225 - DNA, 53 bp, Glycine max
gcaaggaaggtagcttgcttgggaagcaaggaagacagctatctcgaaaagcg

SEQ ID NO: 14226 - DNA, 175 bp, Glycine max
  unsure at all n locations
agactcaccctnccgggcggctgtattacgcccatggcaaaaccgttactcacgttccccttataaccttgcgatcatacttactgctattgattgtgaattattggtcttacggctgtaaagactcgctttcttcaatgctcattatgggttatctaattatctatcttatcac

SEQ ID NO: 14227 - DNA, 382 bp, Glycine max
  unsure at all n locations
cacgcatggatgggcttgtattgtatggtcaggatccgataatcaaactttatcatttcatctaatgctatgccttttatcgacaccaaaatcgactagaaaaagcctattgtttctagttgtataatgccctgtgacatttatcaagtagctaaattgaccaaatggtggctccaaaaaacaatgcaatccaaattatgttctcacttcgctcacacaggtcacactccttgaaatcaggctctgatccttttatgcatgactaatgagtaaaatcacttatttatactccaaacctagatggtaatcatatatataatggttatcaaatacgtacaataacatgtctcatntgtatgaactgctagtatctaaattatta

SEQ ID NO: 14228 - DNA, 327 bp, Glycine max
  unsure at all n locations
agcttgttttttcttattcaaatnacnggggggcacgaggccgagcatacctgagctaagtgcatttcgttgcggctaccattaagcttatcgagtctggcttgctaagccctcgtacttagtgaattttctgaatgtcattgtgctgctaagcgcaaccctgatgagcttagcgcacatctgttgtggcaatcgctagacttagcgggcacttgcctgctaagccgattatgcagaagtagaactttctacaacatcttgttagcggcctcacatgtcgctaagtgggtatgtgtattttgtgaaggtgagcttagcagaccatgt

SEQ ID NO: 14229 - DNA, 397 bp, Glycine max
  unsure at all n locations
attatgtgtatggatggttcgtagtaggctttaacattttcgttcttatgtgatntgtgttaacaatggtatttagaatgggaaataaatgaaaggatagctaggggggaagcacancatcattntgtattttactggtatacccttttctatgagatcatataccataagtgcacacttttcctgttaacaatcattgcacacctctcgctcanatccttcccactgaaatccaattgtcataatggattaacttatatctaccaatacaatacaagatcatatcaatgtcaaacatcagtgtcagctccctgtgactcttatagctttgctacaagaacccacatgttggcaagctcattttacaggtatgcttctctttgctatgattcttcaa

SEQ ID NO: 14230 - DNA, 275 bp, Glycine max
tgtgacacttgtagaaactctgatgaatgacagtcttgtagacacaactcaaagttcatcttctctccctttttcttccatcaatatcatgctccgccatctctatttctctccctatttcttgtactccatagaagcatcctctccaagcttgttatacaaagctcatcttggtggtgaagctccttctatcatggcttattccctagtggatggagcctcctctcacctcttctcctttgtcttctgctgcatctccatggtggaacacacca

SEQ ID NO: 14231 - DNA, 363 bp, Glycine max
ttgataaaagggatgcgccacattatttgcatgacacaaatgcacaaatgatgatttggaaattttatgcacaactggtcatgcatgcacctatgcggacactcaagtgttaaattattatggtcatgtgatgctagggctcaggattcattttctctattttagtcaacccaatgtttccaaaatatgttcttttatccatttgtgcattcatccaagtccatttctggcgtccgggaaaattttacagcattcaccctttaggtgacacacattttttcataaactagctatgatcagcgaattattcttcatagaaaagttggaagtcatctcttttcaaaagcatgttggtgttcaact

SEQ ID NO: 14232 - DNA, 266 bp, Glycine max
  unsure at all n locations
tttgcaagcttgttggtgtgtaacgcaccatcttttcatagtagaacactggtactgtgtctactatcacaatgatcatctcccttttcgtcattgngggtgccacctgggctgccaagtctctccacctttgggcgtattctttgaaagattcatgcccctctntagccatgttctgtagtggcatcctatccggagccatatcagaactgtactgacaactgcccaacaaaggcaaccattaagtccttccaagaatggactcg

SEQ ID NO: 14233 - DNA, 369 bp, Glycine max
agataccaccagcatcaaggaattagggttgttgatggattctctccaaatgcaagctgtccgcaagacttacggaaagatcttagagttaaccttagcagaggtatccatagaagtcattgcatcactcacccaatactacgaccagcctttgagatacttcacattcggagacttccaattagtaccaaccattgaagaatttgaggaaattctaggatgtcctctcgggggaagaaaaccatatctttcatccgggtgtctcccctctttgagcagaattgcaacagtggtcaaggattcagcaagaggtttggaaccgcataaacagactcggaacggcatagcgggcctaccacgggggtacct

SEQ ID NO: 14234 - DNA, 133 bp, Glycine max
  unsure at all n locations
tttgcatgcttgtttcgaggtacttacccgtngaagatcgaagaacgatgaagaacgattgaagaacgtcgaataacggttgaaatctttgcgaaattcctcacggaaaacgttacggaaacgtttcggaagc

SEQ ID NO: 14235 - DNA, 422 bp, Glycine max
  unsure at all n locations
nttcgattcgttctatgtacccgtagtggtccacattgtgttttctgtgcatttataattctcgtatttgttgagctttntatanccccctgttgacgttgcttaagccatnnnttacttaagtcattgtctcgctttaacttataaaatataaataatatttccacccgaaccgtttgaattgcattatccattaacttcggttaaaatcaattccgaccgttcggtcgtgccgtaaccacgttggaaatcaaaaagaggtaaaaaataatataataatcaaaaaatatctttttagtaaaataaagcggacaatcaagtggacattntctctttgggatttctcattcttaatcgaattgattaataactaaagtgaaactaaagggctaaatcaattcgtctagtcaagctcgtccata

SEQ ID NO: 14236 - DNA, 232 bp, Glycine max
  unsure at all n locations
tatcattccttgccctcggangaaaacacaaaaagaaggaaaatccccaatcaaagaaagggagaaagcaaaaaaaggaaagaaaattcccatttaaaagagggagaataagaaaataaaaagaagaaaggaaatcctcgatcaaagatcggaagaaaacagaagaaatatacagaaaggtctttggaccagagaatatctgaacaatacagaattgtcaccaagaaaacat

SEQ ID NO: 14237 - DNA, 483 bp, Glycine max
  unsure at all n locations
aaattcacgctcggctgattacgtgcacttgcatctaagctgttgaatgcctgttgatgagtaaactacccattctgtttagggttttgngangaggttggggaggttatatgcctgaattgcctgatggaatccggtagaaaccaagggtgaaacctaccttaaggttgaaagtgaaaatggtatggtattaagtgaaaaagaatgaaacctttaaaagtggaaggcgttagctgaattctggtgtaaattgagggttaagtgaagtaatacttacctggaatggtctttangacatgtgaaaaagggtaagcttgacttgaaaaaaaaaccaattgcccaagttgacccaaaaccctttcctaggccaaattgggtggtgaagagtcaaattttgatttgtggaaatttaggtgtattnccagttgggccagtttagattgacgttatggacctgtgtgaggtgagagtttgccttaaatn

SEQ ID NO: 14238 - DNA, 406 bp, Glycine max
  unsure at all n locations
cgtgcgagccttttttatttgcaagaantaagagaaaaannccgtgccgcccttaaggaggaccctccaagccgccggaagacgacgcttatgcttattcactttactatcatgatcaattgattgggtcatggtctctccttagcgttgaaataaccttcattaattaactcttgccttaactatatattaatatatacccttaacttatacccacgattattaatacccccaatggttctgggatctacatcacactcataaagtcgactcataatnattctatccaccatttaatttcttagacaaatactttattaattaaatatatcttaatggctctctttttgtttttatcagtgatatacatgtcaattttttgttgttgaacacatgaacgttaact

SEQ ID NO: 14239 - DNA, 450 bp, Glycine max
  unsure at all n locations
aaaacgatgngcattgatacgtaattataacnaaacgtgggcaggaaacacgtaccctatcacttctattgtgcganangggnngcaggcctacgagcagaataatattctcctctcactctgattataggtttttggagcatatatatggttgtcgctagggcttattaattggtcaaaaagttgtgggatagagtcatcggtggcatatttggactagttaacgtcattctgtgaaggaagtatcgctgttgcaaaatgaacgatgctgatatatgcgtggttgaagtctctaanattacgatgaacttgtaaaggtgatatgataaattacaataacgtaaacaattaacaaaataaaaaaagtcaaatgtgcggcttgtgacatctacattattaatgtccatttgagactactgaacgacactgaatatctatcatcatatacag

SEQ ID NO: 14240 - DNA, 453 bp, Glycine max
  unsure at all n locations
gggagtgtcttgtagncctctgaattactctgaacctgcgatccttaagagcgccgcgggcgtgacacctattttatttaatagggcgggacacacccatcgaggtagggttacaacactttaaaagagtttataaccaactcaggattcaacagatgtgacatggaccatggctgctccgctaagaaaatatgctaatagctatgttatcctggcctggtatgtggatgacatggtgattgcacgatctaagttgacagaatattacatgtcgaaacaaactttgcagataactttgaaatgaacgatcttggtctacctatacaaagccttgtatgagaattctagatacagatcataatgattctgaagtgtctcagagaaattatcacacgtgcttgcaggtttacctgatatctaagacaggaatacccttaggatctcattgaattn

SEQ ID NO: 14241 - DNA, 479 bp, Glycine max
  unsure at all n locations
cctactantgcattcanngcatncatacacantnnatactangcccttggaggattanaggggttggttcaagcattccaccagattaaaatatttctcatagaagngaaccaaattgggccatcatcctggacctttatcatgaccgccaccaaatttaagaaaattttgccaggttctacacttcagaagaattattgcttagcctccaaaagaacggtggaacctgtgacaccccttgaatccgtcctttaatattaccagaaaattattagggagggtccttcctaccaggggtgaaggttccagttagccacctccatggaccttctattatggtcttaacccaccacctgatcaagaatttattgaaaaacagaatatcagatatttgagatgttggctttgctttctcagctcaatgcagatatgccatgagcagacaagaatggcacacagcattacaacgtagtctagtt

SEQ ID NO: 14242 - DNA, 470 bp, Glycine max
  unsure at all n locations
nnccaagatttgagtaacttcantattagtaaactccgaaccnnaaatgaaccgaaggaaggcaagcttgttcaatttcgaaaatggcncngaccgaccaaaaggaagaatccacttcaaccaatatcacccttaggcacaaccatacataacattcaaatcatgacaaaggtggacaattagctagagtagcaaatattatagcaatactaattgcaaacaacgggaaattgaccacattaaaattaccttctggggaggtccgtttcgcatccaataatggctcagcaacaatcaaacaagtgggaaatattacagtaaaccagaaaaatttaggcatangtggatctaaatgttgacttggtaagcatcctatagtaagaagagtataattatgaaccttgagaccatccacatggggtggcgaaaggagggacccantggtagaaaaacccagaactccttggatg

SEQ ID NO: 14243 - DNA, 428 bp, Glycine max
  unsure at all n locations
ccactaaccgaactgggacgatanctgtaactatatacacgaacctgacaactttccagagacgctgggagagtctctttctagncnaancnccngngagangagggccaggtgaatatcaaaaaaggattttctcttngaaagatggaaaatcctaattagtgcgtgacaaaatggctacttcccataccattattatgatataccccaaactccatagtctccttcacactataaatctttgagaccttaggtgcaccatatagctttgccacatatcattgtgcattgatctgatgttatttaaatcaaacctgtactgataaaccacaaaggatttgcgatacagagattaatgatacattatagaaacactggagcaatctaaccaaaataatgctgcctgatattaacccataattgtgaac

SEQ ID NO: 14244 - DNA, 416 bp, Glycine max
  unsure at all n locations
naaggattaccctangatacnctngantgagcaagagcaccggagagagctcctaagaggacctgaggggtgtgaacgtctttttctttataaagagacacaagggcccccacccctggggccctcttgaattagacctaagagaaacctacccgtagccaaatctagaaaaacctatttacatgccttaaaatcttgctaacagtatttgtaaaacaacgaaaagtagagcaaagatgaatcattggcagacctgctggatgttaacgcctctgagctaaaaaaatcaaatagaagtggagcacctgttctaaaactttctttttcttcttactatgcacttactcatcgagtgtaactgtagactgttgaggaaccaagactatttaagaacatataccttgtacgatattacg

SEQ ID NO: 14245 - DNA, 390 bp, Glycine max
  unsure at all n locations
ccaataccggccactcctttcataaccaattaacacaaatgaagtccttcctctcataccagtgttggtgtttaacctcataattaccgccacgaatccaatttcataagcgaatgatcgatcccactgcaaaacatcatctcaggtagcaaacatctagaatgcaagacacacaattttagtcttcaaagggacattcctnttattaattaaataacaataaatcacattattatctgaaaagtatttaacgcctcagaacaatcaacatgttcttcttcattcacactagcttcgtcgccattttaatcattcatatcaactttntcagacattatactgtcatacatccattgatcttcgtccatcttaacaacacattcaaaaatt

SEQ ID NO: 14246 - DNA, 78 bp, Glycine max
agtttgtttcaaagaggtccaagaaggataaggcggccgaagggactagttccgctcctgagtatgacagtccccgct

SEQ ID NO: 14247 - DNA, 401 bp, Glycine max
  unsure at all n locations
ctatanncatctcccactccaagtaggcctccgatcattctttcctctaaagggggaaatgtgatttnatacccatcattcggttttgtctaagaacaccatcatttccttcttctccctccttctttttcattatgatctctattctccatgtgatccaacctctcatggagcgcatcatctcgntgtttcattaacctctccatatgttgcatcaaagctngcatttggaattgcgaaagtccccctccatcattangaattgttcctgccatctcaaacanacaaatcaaacgtaacaagacaattatagtctgctgtttgaatacctcacccactcaagtgtatcacacaattatggcttttctctaatgaaacactcttgccttttaccactctaa

SEQ ID NO: 14248 - DNA, 77 bp, Glycine max
agcttctatcaaggggagatggaccatttcaagtgcttgaaagattcattgacaatgctaacaaagttgacctgccc

SEQ ID NO: 14249 - DNA, 448 bp, Glycine max
  unsure at all n locations
nttcttctacagttaatttgtattgaacatctcgataaaatttaaattgtctgatnncttttatagttaatgtaacccatgattacaggattaatctaacccctcattaggaatttaaattagaatccaattgaatcatcaaaggaagcattacaacaacaaacatgtagagaaaaataagaaatatatgtagaaagcctatatatccttgaaaccaatctatgttacaaatgctaaacctgagcttcttgtagttctatatttgccaggtgttagttttggaagcaactangtgctacaaaaaataaggaggaccatctacctaagcatgttnttaactgaatgtgaggcatttntgtttataactagtgaatactcgtgtttaagattctgcagtaagaatagttcatggggtaaatntgataatgagctaattgattatattctg

SEQ ID NO: 14250 - DNA, 324 bp, Glycine max
  unsure at all n locations
acttgttgtgatgttagctttgttcgtcaatgctttgaccttccaccaccatctgcatagatttagattattattattatatttaaattttaagccttgtatttggctatggtttatgacatttgaatacttagtatttctttcatatttacttagtatgactgaacatgatgatttatattacttgcttttggtgtttatggttatgtgtggtaaaccttattattttatgatatatatgtctagtgatatgtacttacatttggtattgtgtngatgtatgtcttataattattcatgtatggtttattntacgcactatga

SEQ ID NO: 14251 - DNA, 416 bp, Glycine max
  unsure at all n locations
tacatttttgactttttaacatgagatgaaatacagagattggacctcctgtaagttgttatcaaggaatacctaaacacctgggcctgagtggaaccagaaccctgaaaacgggggttgaaccaactttcctgaatctgtcttaataataaacctcatctattggaatgttcacattttgttctccttttgtctagttgcatattctgtgaaaacaagggataggtacacattgcttcatctttctcatcatgcaatcaatgaattntgatgcatacacccctatacataatcactgcatgtnntaccactngaggacaagtgagttgttatcttttgctcgaggacanagcaaactgtaaaattgggggagttgttagtcgatgaatacgactaacttttgtgataaaacatgt

SEQ ID NO: 14252 - DNA, 392 bp, Glycine max
  unsure at all n locations
agcttgttgnggagtgtcatttncagnnncagaatgatctgagtacatatatatatatatatgtctacctgcacatacatctttgaggtntttttcacatagtttaatggaatcatattatctctattattcacaccccttgtttacactaaactagaaataggccattttcaatttcttttggtgatggacaagcacaagctagtgtcattacaattaatgattaagaaattaaaatgcaaaattacttaataagaaatataatatctattatatatactatatgtaatttgatacctcttattttgtaatgttataataatacccacaaagcatgtcatgaaaaatataaaattataaatgtctttagcaaggtatctacacacgtacgt

SEQ ID NO: 14253 - DNA, 450 bp, Glycine max
  unsure at all n locations
caactttgcggactganacngatgacgtacanttagacactaacctgcaaacanataagtaggtctatgatgcttttctttgttctagagnactatgtaatgaaactaactgtttcttgtaatctatcatgttgcctgtcctggtatataataaattatttcgggaataaaaaacgttttggtgggtgatatgccagtcattttcttggtggtaggtacccctatcttaagaatagttgggccaccacctaatagaagaaacgtccttccttatagcatatgcccaaatgacacttccacatggaaagtgcacccctgagatgaagtaccccactgtgagtaaaanatcacttgggcttagtcataaatgttggattgaagaaagtgaactngtaccaaaaagaaatgcattagggccaatgacttgatagaaacagtttattgtaactt

SEQ ID NO: 14254 - DNA, 509 bp, Glycine max
  unsure at all n locations
ggaagaggagttganaccttagganactnntganaacnaaannnntggcnaaggagacactnnanangagaccggaaggcacgcaactttggttaantcttttataaagactngagcgcgccggggtttctccccctttgacaacatcaaaaagccaaagaactcggaaatcaacacagtcttaacattggagtaccaggatataagtatcaaagtattaaatccatttagccaaactcataatcaaggaaataatctaaccagaattcaattaccaataaatgtcaacaaccccataatatccatgacttgaacacaagaaaaataagcacagtacttagcataataatgtaaattctaagaaactaaaagccacaatacacggcttataagagatatataagcagaagtctaaatctaagaagacggaggaggtggtgggaagatcaaactctgacgaatgatccgacattctcttcaagctgtgtaagacgaatgtccatccggcn

SEQ ID NO: 14255 - DNA, 310 bp, Glycine max
  unsure at all n locations
aagtcatgcacaagcactcattntatatcaagcanatcacttattatcataactggaatttaatgactgaaatttaaatgactgaaacatagagcaactaaataactaataactaaattgttcatgatttgtagaaattaaaacaaaaccaaatttaaacatcctgctcatcctgtggctgatcttcatttaaatccaacactatagcagctggtgcatcctgaagaatgggctgctctggctccatggctggtgctgatggcatggtgtcctcagaaataggtgctggagagatacgaactggagaatt

SEQ ID NO: 14256 - DNA, 340 bp, Glycine max
  unsure at all n locations
ctacaacctgcttgcagtntgagaatcgaatctatcaggaagtttcataccatccatttcttcctcatcgatatccttgaagcactgatctacactttcttccctacccagctctaccttgtaaggtcccacctcgttatttaataaataagacacaaacatgacggtaaaatattcattatttacatataaactaaatttgtgaaaccgaatggataggagactatctttaatgagtttaccttggcttgtgtcttatcaatcaacttgctctgtccctactacgttttgaagtgaataaggtcaataaagggcgtaatagtctttcataaaagactaa

SEQ ID NO: 14257 - DNA, 190 bp, Glycine max
acagctgcataaataataggtaatcattatatttccaatccacccattcattgtttgttacctaatttacttcattgacaacatcgtaaaatatatacaaaaaagaaagatgtagtatataagtataaatttgacagagtaataatacatagatatctctttattttaatggtatcaatacttctcatat

SEQ ID NO: 14258 - DNA, 321 bp, Glycine max
  unsure at all n locations
ttgtcttcttattatgtataaactatttaaaatcgtaaggaataactttttataagattgaactgaaaataaataaattttggtggataaaaatcgtaacaaattgtgaaatcgtaaactcaatgaacaaagaggggactaaagtaacttttcgaaaattgagggactaataaaaataatntttttgagaactaaaaatacttaccgaaattgaaagataaaaatatatttagccttaatcatcttataaatcagctgtagatgaagatgtccaccttatatacctaatttgctatatctctagacatgtgactcaacaca

SEQ ID NO: 14259 - DNA, 417 bp, Glycine max
  unsure at all n locations
ttataagtgcgggtctgggagacgaaggtcaagtgttcctttatgcgaagatgatgttccgagtacttgggatttggtccgaccatgccctcctgatttccagctgggaaattggcgagtggaggaacgccccggcatttacgcaacaagcataatgtaaacctttacggttttaaaagctctatagttgggcctaggctntagagttttcattntgttaaggctntgtgtcttttgtttttgaatttataatacaaggatctttcttcatctgttcctggtctctacccattctcattcatttgcatgtttacttctttntctaaaacggcagattcgatgacgagtcccccgaaggtactaatacctgggacccgtctatcaacttcgagcaagaaatgaatcanacggaagatg

SEQ ID NO: 14260 - DNA, 475 bp, Glycine max
  unsure at all n locations
aaaaaacgggcttagnttacgtcnggantncanctngnnaccggggatactcttaaagccaacctgcaggctggcaacccggggtattaagggtataggccagggaaccctggaattcttttaaccctacacagagagagaggtccccgagggtcgtccattcttccaccccgaaccgagagacgcggattccaaagtagaggcaccatattcgcgaacgtggctcctcttccgcttcggcaccatnttcgttggtttcaggtctttcctaaaagcttcagggattangttacgggtttcggcgatccttgtctctttctgggcctgcgacagcgagtggttcacgacgcggaggctctgatcggagcangcagcatggaacacgctctggccgtcggagaagctgatcttctcgacggagatcacgcagcactcctgccagctgagctcaccgagatccgcaccacatcctccn

SEQ ID NO: 14261 - DNA, 492 bp, Glycine max
  unsure at all n locations
aaaaactttaccttgattggcaagcaatacaaactcaagcttctgagattcccacgtgtctttgaaactgatctctgagttttgatactattgtgcctctcacaacaatatttaataaatttggatttggtggattagttaaacccggtattcgcaccataaaagtcacaactgcgggaacttcgcaagctattcttagggaatcttaaaccttaaatggcttcctttaaccttggtcttggaggttcaacttaacccttattgggttatgatattataatttggtatccaaacctgttggtccctgacctggattggaacgggaaggaagtagaccatcctaaaaagccactaggaaacttctggacattcgcatttcttaatcacagcttcttgccttgtgcttttgagtagaatatggcanatatatatcanggtgctgttatgaaatatactacacatttgtgttttgcgacgtggtcatgtgtatan

SEQ ID NO: 14262 - DNA, 248 bp, Glycine max
  unsure at all n locations
tttggaacctttgaattggtttgggaattaatggtgggggggttttggttcattgacaactggtttgtggctatgcttcatgatgtattttgggccatacttgatgtacattgtatattggtaaatgttggacatgctgaatgaaatgtttgttctcaaatgcttaaaaacaaaaagaaaatcgaanaatataataaaaaataaaaaattcgaaaatagaacaagaaagcaatacagttgagtgaata

SEQ ID NO: 14263 - DNA, 425 bp, Glycine max
  unsure at all n locations
aacggcctcgactangctcttctagacccgtagcacttagagcancanccncaattntctataaataggggtgaagtgaagtaaatcgggttcaccccctaggccctctctctcttcggaattggctggaaaaaatggttcccgggagaaaaatccagccgtagcccctcccaaaccgtttccttaccgttccggggaggatttccccaaaggttccaaccgtcctcaacgtcctatatctccttattctctcgacttacggtaatccctcaccagcctttcaatcttcttttcccctggtggcccatggggttcggatttatctcttcgttactttatcccctttgactgctaacatttattaatcattctccttactaaataataattcaccacgttgatgatatcgtactcgtaaatgatcg

SEQ ID NO: 14264 - DNA, 447 bp, Glycine max
ggaaggagatgacttagacagcgattcatccgaccgcgatccctgagacacccgcaggcagcaaaccggttttttccggttatggaatcccaacctagagccttacacaaggcaccgaatacaccgttgaaggacacaattcctttcaaccttaggggaagagatcccaccaaaaggctaacctggaacctacctggatccagaaagattatttatgaaatggagggaagaagggttggacctatatgaattcaaaacccattggccagtgggtggtcttgtgtctaaaaacgatgttgtcgtctggttatgttcgttgcgtaaaagcctgatatcatatcaaagtgcagttaacagttaagtttgtattaattgattaatctatgggaacctggataaaaaatgtgtattgcgttatacgtgatgttttttctaccagtgcatgaa

SEQ ID NO: 14265 - DNA, 404 bp, Glycine max
tttatgaacgacaaacctgcacaacattggcctatttattcttcgtttagcctccaataacctctgcatgttagaataattagctacttataatgcacaacattttttcataggttggtatattttacctattgaattaagtaaagtcctatgcagacctctttttgtgattccttcacccatgtttcaatgtgatggtgacattcatcgcgtctattctttgcattgtgtatggactaaggctcaagaaatacatacccggaaccatgacccaaccttatactaaacttatccataaacctatttttaacattacaaatcaaaattggtaatcatacatatcataatgaatattaattattaggtaatgaaaagtaaccttgaaatacaaatcacttacatca

SEQ ID NO: 14266 - DNA, 477 bp, Glycine max
  unsure at all n locations
naaatgatgctttgattntcttgcaggcnaatcacagacccggggaacccnanaaggcgaaccggaaggaagcgaagccngagtccttttggaaaggaccaaacctnaatacacggagggcgcggggagccccgaaacacacaaaacgcgcaaattataaagccgcagcgcggagaaaaaggaacggcaaaaactctatacactggaagcccgggagagaccctgtaaaatatccagaacgccgcaaantgaaaacggagctcggaggaaatcaaagacgaaacctctatcggacgccgattgaacgggtatatatcacgacgaacaacaatgagactagaagcgccgagcaaattgaaacgacaacaaccttatacacggagggtccgttgaaccccgcgaatatccagacgcgcaagattgagaaccgaagctctgagaaaattgagaggcaagaaccgtcgcaacggaagcccg

SEQ ID NO: 14267 - DNA, 548 bp, Glycine max
  unsure at all n locations
agacaccannnnnnnaacgggttagaccccaatcggannatcngnatnancatnncatattnaatacnannacagatngactggggaccccgnggttgagaaggatgcgaggattatggttttcntnnggaanaccnngaacctcagtggaggggtggccatcttggggattggttgggtttaatgtggtgatcctgggggatgtgggagaagttgactttgcccccattgccccgacacggcaacctaattcaccacaatattaattggttacccccataattcctacaaaccttggaattgaaggaagtgtggcaagggtggagactttctaactttatttcgttgaacacagaaggggtccctgaagatatgtcgtgggggtcatgagacccttgggacgtcaggtgggtgctattggcccatacccagctttgaccatccccgaccacacacgggcatagtcagtcagtgagacccttgatgtactaaacagcnagctctaacatcaaccgttaaagacaaataccacaagcaggagcttgttt

SEQ ID NO: 14268 - DNA, 376 bp, Glycine max
  unsure at all n locations
tagggcgccctactctccttgcagtataaatctgacaaactgaggataaggaagctacactacaaagaatggatcancattcaccttcangaaaccaggatatttacactggtttttacaatattcataattagctacatataaattatcagagggagagacaaattaactagtgttaatcattagtgttctttggatacattcttcataagtatttatagaaatagaaaataaaataaaaaagattaacatcttctctaaataagattaattaattatatgaacttaattttatggaagtctctcatttctctanagctaaatattaaattaatttaattatgaaagnacttaataattcacttactttctattt

SEQ ID NO: 14269 - DNA, 500 bp, Glycine max
  unsure at all n locations
ngggtaatgtagtncncngtcgatnctatagcaannacantaaagcnaancncnggnnaaacaccctaatagtggtggctcggngaagttctgggttgaaggaaaagaaccgnnnccggggtatgaactatattccaatgggaacccttcacaatggctatttggtaattataattttaccctttttttggcatgaatggttgaatatggttactcttctattcatggtctctgaagaattaaccattgaatacctcaagcgagaaccaggggctattctggataccaagggtagaaatcgcaattgattgtgctagaggtctttggttcttacatacctaccaaggaggatgcattggtcaccgtgatatcagggcaatctttattaattgaacatgacatgttccaaaattattatttgggttactaaatctctagatatggatcaatgcttctatatctaaaacttanggaatccctatcaattggttgacaatatn

SEQ ID NO: 14270 - DNA, 103 bp, Glycine max
  unsure at all n locations
agctttgtttatttggtcttcgccagtgaaaggatcgatgtgggtccgaanagaggcaaatttgatcatcctactaagacaactggaaaaactggggccaatg

SEQ ID NO: 14271 - DNA, 382 bp, Glycine max
  unsure at all n locations
gaaagagatggaccaacagcttttcgtccgcggaatacacacccatctttcggcaatacatctggagatgcccttttggacatgtcgtccctttgtacttatcaaagtctggtactttgaacttgggagggatgacgatgttgggcacgagacataaatccgctaaatccgagaatgggtaattgccaaggccctcgactgctcttaacctctcttcaagcgcctcaatctttcccttatcttccgcgaagggaacagattcttttacgggtgtgggtgaagccgggatatggcggactatgctcggttggggtagttcatggngggacngatctatgaggtggagcatggggccaagatgggtatctccttcctcatcgtc

SEQ ID NO: 14272 - DNA, 285 bp, Glycine max
  unsure at all n locations
agcttggttctgtgtttcagaggaaanngacgcnggcaacgtatcaagagcaatgctggcacgactactgattcaactgatcatggtagagagctagaaatagttcatatgacactaaacgaaaagttggctgatacaaaatttctcctcgtttaggatgacgtgtgggaacgaaaggcggccttaatggagaactgtgctgaatgctccttgttatggagctcagggaagtacgatccttgccacgacacgcagtgaagaagtggcttctatcatgcgggcaga

SEQ ID NO: 14273 - DNA, 445 bp, Glycine max
  unsure at all n locations
ctacaataaaaaggaaatgactgagagatgttttntattggattgtaaaccatgaaagcactcaacatgaccttgcaaaacacaatgattacggaacaatggctctagataccatnttcgataaactgagagagaatatgatgagaaaaagacgaagaaaaaaaatctaatattattgatatgaaaagttagttggagttagttataactgaggtatttatagacctctacatagttgaactaaccataactgattctaactaatcccaactgacttctaactaactaatcctattgagatgcaaatagaaaagttcttacactccctaaattactaactaacactagatgggtattgttagcaaaagctaacaacccttacaatatgtatctatcactcaatgggtgatgttagcaaaagctaacaagccttacaattaatata

SEQ ID NO: 14274 - DNA, 338 bp, Glycine max
  unsure at all n locations
ccaccaaccccacacaaccacacgatccaaaaacaacaagcaacaactannaaannaanagggaccctcaacaccataaaannnngtgttnttgataaaaaaaaaaattttttaaangaagaaagggggagaaaaaaaaaaagaaaaaaaaaaaagaangggaaaaaaagaaaagaagagagagaaaaggaagaaaaaaaaaaaggaaagaaaaaagaaaaagaaaagaagaaaaaagaagaaaaggaaagaaaaaagaaaaaagagaaaaaagaaaaaaaaagaaagaagaaaaaaaaggaagaaaaaaaaaagaaaaaaaaaaagaaaaaagaaaa

SEQ ID NO: 14275 - DNA, 384 bp, Glycine max
  unsure at all n locations
cgacgaatctggcagtactgancacnnatttatcannacnnccgnnggaagaggaggagggagtttaattcntnnnaancannnacggggcggggggtcaaatacacaacccaccccccaaaaaaacataatttcaccccgctccctcgccgagtatcgagctaactacataacggcaataccgaagaggcacaaggtaaggagaaaaacaactcaactataggaatgtaacgccagaacacagactaggtggacgtacacaaagataaactccacagtcattgactgattaccaagtagtgatgggccaacacaagcaacaaactagatgtaaagagcacgtgacgtccgagccagcacaaggataacgcgcaaatgcatttc

SEQ ID NO: 14276 - DNA, 405 bp, Glycine max
  unsure at all n locations
agcttnagtcntttttatctgcacaaggctcttaaaggttgaagactatccttgtggaaccttcacccgacgaagacactgacaaaaacttatcttctccttcttggacaaagtatggcaggctgggggcaagtaaattttcttcccatcagaccttggatgcaactgtgatcgtatacccatatcagctagatcttgaagggtattcaagccatccttcgtcttgccttgaatgttaaggagcgttccaatgacactatcacagacatntttttccacatgcataacatcaatacaatgtctaacgtcaagatcacaccagtactgaagatcaaagaanatggacctcttcttccatatgcaactttgacttttatccttcttttgagtcttccaatacagtat

SEQ ID NO: 14277 - DNA, 428 bp, Glycine max
  unsure at all n locations
gacaccaaaggataatgtatggcttcacttgtnnnnnctttncattnnngggctcaaacatcatcacagctcttcaactcttcaccaagacctcaatattatttcattttcccccctaattctatgctntcaactctgttcaccgatttcaaatattctgagataagacaaattaccatcatatttagatattagcaaccagagtttcattcaagataaaaagtacattaacacaaaaactttcaattgcaagtccacctgcaagattaaatagaaggccaggcttttgaacatagatacccttcanataaattcaggcagaaacgatggttgaatattcaacaaatcacattcttgcaatctatagttcatttgaagcatatntaaaacctcaaatacctgtatgaagaaattcttcttttgcattt

SEQ ID NO: 14278 - DNA, 397 bp, Glycine max
  unsure at all n locations
ggtttgtcttctntgttgaacttanagaggtaatttcatagttacttttgccttctctctatcaaattctgagttataattttcattttgcattttattatttggcacagaaatcgtttagagatttggaagaatctgaatatgaagatgggggttataggccatcccctagctcccgagagaggcgtgccagaagacagctaacaaaaataacaaaaatgaatgacttcattcaatcatctatgctnttcccaaaggtgtggtgtggtggaattgcttccacaggacacgttttctatcttctttntttaattttaaaaagtttcaaatgagatatactngtctatctagttcggttggcttcatttctttcctgttcgtaattattcgtattatt

SEQ ID NO: 14279 - DNA, 444 bp, Glycine max
  unsure at all n locations
actcaagcctaatgttntattgatgatcatcaacatattcaaagttttgtatacattggcaagaagtggggctccattgttcactatgaagttgataattggctctatatatggctctacatcgctattaaaaacggatgtactgtgtgggtaggcgggtgcagcaatgaaagcagagtatattgctgttgacaccttgagtcggccatgcaaattggctaatgaaattgctntttgaatgttggtcatagcaggtagaatgtattggaccgacctcattggtattggggccaatttcgtttccaacaacgatgtacttaaaattgacgtctcgtgagtagggtgtcacgtacttattgacccagtctctggctgcattagcgttngtcagagattgaagggtatccttagcaacgtccatgatcaactcaatgcctgaacctc

SEQ ID NO: 14280 - DNA, 262 bp, Glycine max
  unsure at all n locations
ggttttttgctngttgccttaaatagcttcaagcggtatgtatcatgaaatatagtctaattttatcattatgtccatattcgtggtgaaaagctgctcctatttgttgtataataaaaatactacaaattacgcaagatgaatttgtattataagataatcaccgtaattgtaattaaatatctcattctttatatttagtctctattattataacaactatccaattatatataaacatgtatgtatcgtgtggggttga

SEQ ID NO: 14281 - DNA, 361 bp, Glycine max
  unsure at all n locations
acgcatgctngacagagaagtattaggggcagagacattgtccttgtagttgtaacggattggcataccagttaaatgctccaagatattgtcctcttctgaaccatctctaggagactcgggcaacctttgctttcttctgtggtatctaactcccccaaagaccagaccacaaatgacaagcaaggttattatgacaatgaccacaacaactatggtgtgcttattgccacctccactgcccccataacccgtgccagcacctccaaccgtcgagaccttgatgtagagacataaccagaatcacaatcaggtttctgaaagcatcctacactgttcaaaaggaaacagtcccctgaac

SEQ ID NO: 14282 - DNA, 344 bp, Glycine max
  unsure at all n locations
tctgcttgatggtaaactagatgcttagttaacctggtaacccagctagcgttgaatcagaaatctatacctgtcgcaaaagtctatggtttatgctcctctgncgaccaccacacagatcttttcccttccatgcagcaacctgaagcaattgagcagcttgaagcttatgctgcaaacatttacaacagacctcctcaacctcagcagcaaaatcaaccacagcagaacaattatgacctctccagcaacagatacaatcccggatggaggaatcaccctaatctcagatggtctagccctcaacaacaacaacagcagcctgctcctttctttcaaaatga

SEQ ID NO: 14283 - DNA, 382 bp, Glycine max
  unsure at all n locations
tactaagcttctttggacttgacaggcaactaactcctctttantatcatgctatgtgctcgcgactggtccctttcttcccttcgcacttgagttcactatggctaccccatagagctccgcgaaatttggtcccgccatactcttccttgcgagccctcttggtctctcgttcaaggctcttgcggtaattgcattctcttcccgtaacccggcacactccttccgaacgtgtgtagcagccaacttgaacttctccttggcgagttttgcctttcctaactcgcttttgagagcttggacttcctcgtcctcttccggtgcttcaaaattcccttcgctgacgacttttaacttggcgagccaatctaaacctcgtatg

SEQ ID NO: 14284 - DNA, 294 bp, Glycine max
  unsure at all n locations
ctcgggaatatccgggagatgtgtggacctttatgganaagtatggaaggatatggaaggaagtagaagagtgtaaagactcctagatgtgtgagcatctagagaataatcttcacccaagatacagtaatctccacattcattgggaggggagtgtataatagctaagtagagcctcttcctattatcagacagagtaatcatttttaagtgaaaagctaaagtaagagcttttgaagaaaataatactgaaaatttattctagctgatgaccccgagatgatcattataacc

SEQ ID NO: 14285 - DNA, 480 bp, Glycine max
  unsure at all n locations
aaaaaagggagtggcttgattngcggngnatatncanacncaagctatggagggcattaccttatggatctaaatttgaggggtntattgaccataagtccctaaaanatnggntggaccaaaaaaacctaacattgaggcaaagaaattggtaaaagtccctaagggataccaatttgagcctaactattattccaggtaagcccatggaataactggacccctaagtaaaaaattcctttcaatggttggtttgatgggtagagaagtggaccctctaaaacaagttaaaaaccattaatttggcatggtgagatcactttagtaacaataaagtgggtaatgtgagaagtcacaacgaacttttgagcgagatctggaggtcagaagttgaccattcttgcagcctgtagagtcatatcgcaggagagagagagtttagaggggactgatgagtctgaggttcaggaanggttgcgn

SEQ ID NO: 14286 - DNA, 304 bp, Glycine max
tgacaggaaacccctcatgctaattactgagtatctaagaggggtatgcaaataaaacataattccttcagatgtccacctagttttggtttaacaaactatgctttaaatgaatcctgttcattatatatgggtgaactcatcatacctaaagaaaaggccgctagtctgaactgctatcactttccatgatattgcacgatggtgcttacatattattttcttatttatctctaaaggaatatttgaatgaagaaaatcattgaggagaagagaaaatatctactatgacattagccataaa

SEQ ID NO: 14287 - DNA, 515 bp, Glycine max
  unsure at all n locations
naaaatcatggactacngnattagnattnacgtgacactataaagcantgngccgntgacatcancacggntagctagtatcatgcacataatttagaattttcntcgctanaacgaggggngncggagatngcgcgcctnaagcgcaccatcnnctcacttaagggcccaatgggcgtgttaagcatgtctttgtgttgtgccctaatgccaaaatcttccctttatttcatatttttntctattttctgcatctttttgacatttaatccttcatttgcatatctgcaggcataaataagaaaaacatcaattcttaaaattaaacatatataaatgctaaataaatacttttaagggtattttcattataaaaaatacctcatgtttaccagttatctttcaaccatttctattgctaaaatcaaatccaatgcgccagacccaacatatctatgttaaatttcatgttatcaccccaacaaaatgattttaacaacactgaatctaatacg

SEQ ID NO: 14288 - DNA, 232 bp, Glycine max
acccactaccctagaatcaaaataactcattgccattaaactagggaattaaaaaaaacttaatggctgagtgtaactgaaattgtggcaaccaaaagtcaaccccacagccaacaagtcacccaccattgggtctccaaaaggctgatgcctacgttgcaattgtgcccttattacaagttgaactagacctaactaaagcccttttagttgattaacccaaaacataatt

SEQ ID NO: 14289 - DNA, 374 bp, Glycine max
  unsure at all n locations
taacggaagctctcgagatatccaangggtcttcatnttttctcatcgtaagtccgatccagaccgcttatattcccgagccgctcaaaattgaaccaccgaagcctctgaaaaacctcaatgggcattatttgtaacaccggagtcccattcagggcgcttatatattgagaagctcgaattgaaccaccggagccttcgagaatttcaatggtcataagtttgaaactgaggtccattcagcgcatatatatcgaaagcatgaattgaacacggaactctgagaaatcaatgtcatatttgtccacgagtcgatcatatgctattacgaacctcgaatgacacggagcttcgaaatcaatgtctacttcaat

SEQ ID NO: 14290 - DNA, 262 bp, Glycine max
  unsure at all n locations
gtagggttacaggactttccattagtcctataaattggccatatactcagccggtattaggcctcatgagctttctcatattaagcaccttacaggatttaccttgggtgactttcctttaaatacttgggtgttcaacttttatcatctaaattaaatgtatgtcattatgctcccttgctttccaagaaaactggcctgattcanggatggagcaagaagtctttatcttatgcangcaagttagagttgatcaaagcag

SEQ ID NO: 14291 - DNA, 391 bp, Glycine max
  unsure at all n locations
gaaacttaactacttgctgaaaaaaaaaaacttctagaatttaaccctatctttttattttaacaatagacaattgcaaaaaaaaaatcaagatttgaattgactaaactctataaactgggctgattaattatgagttaaacagtcttaattatttaataataaatattaataacatttaaattgtacagcataatttatactattcacagaggtattggagggagacagagagaagggaaccaacctggtcttttgggaaagtagggcaacaacaccaaagatganaaacataagaagcattccagagtgctcaaagtcattcatgtgagcggngttaaggactccaccaacaaaaatcttgaggtgtggtgaatacaaaagctcgatg

SEQ ID NO: 14292 - DNA, 292 bp, Glycine max
  unsure at all n locations
tttttgtctttcttattcattcaatatcgagcgttgcgatatattatggactgaatcanacaaccgagtaaaaagttattgtagtttgaagttgctcagagcttcaactttcaatatcgagcgtttcgatatgttacgggactgaatcagacatcanaataaaaagttattgtcgtttgaattatctcagagcttcagtattcccattcgagcgtctcgatatattacgggactcaatcagacatccgagtaaaaagttattgtcgtttgaatttgctccaagcttcaacat

SEQ ID NO: 14293 - DNA, 414 bp, Glycine max
  unsure at all n locations
ttgagtccttaaacaacaataactgtttactcgtttgtttgattgacacctgtaatatatccagacgctcgaaattgaataccgaagctctgagcaaattcaaacgacaataagtttctactcgtatgttcgattgactctcgtaatatatcgaaacgctcgaaattgaagaccgaagttctgagcaaattcaaacgactataactttttactcggatgtctgattgagtcccgtagtatatcgagacgctccgacttgaatgccgaagctctgcgcaaattcanacgacaataacttttttcctcggatgtctgattgagtcccgtaatatatcgagacgctcggacttgaatccttagctctgagcacatcaaatgacataactnttactcgatgtcaagtgagcccgaata

SEQ ID NO: 14294 - DNA, 349 bp, Glycine max
  unsure at all n locations
atcttcttatggaagcttctcaaggaggtgagcttagttatgagaggggtgtgtgtagctaagctctagcttctcaaggaagttttctcaaagaacctctcagggaagtttctcaagaatcttctcaagaagttacctagtctataatagagcatgtgaacactgttgaactntgatgatgagagcttgtaaacatacttcaagttcactttctcctctttatccttcatttcggctcccccattctctttcttcctctttcttttctcattgaacatcttccagcttctatccaggctgatcttggtgtgaagctcttcttcatggctatccctagggatgggcctct

SEQ ID NO: 14295 - DNA, 435 bp, Glycine max
  unsure at all n locations
tgacaatnngggaagacagatacactattgtttttatggttcattgatagcaattcagcaggcactaagtggttgcagaccctccactntagttagttacaacattccactagttagttatacaacatcattctgttataaccatttccaattctgttagaacaattagtataagtatatcaagcagtggaatgaataaaggaatgagaacaattacctcaattagctntccttagttccttagctgtagcagtagaatagagtagttattcgtatcagacattaacaagtgcaaattagatatggaggctngtagacaacttgaagatcctctcagttgctcaatatatggaattaaataaccacttaaactctttgcttcatcaagaagagcactnttggaagcaaagggcgaaaatctattggttgagtgat

SEQ ID NO: 14296 - DNA, 106 bp, Glycine max
  unsure at all n locations
agctttgtttgcacttttcaatggagnngacaggaagatcttcgaactgatcaacacttgcacagtggccaaagaagattggaagatcctgaaaatcactcatgaa

SEQ ID NO: 14297 - DNA, 410 bp, Glycine max
  unsure at all n locations
gcttaacattcaattntgagcgtctcgatatatgactagactttatcttacatccgagtaaaaagttattttcgttgtaattggctcagaggttcaacattcaatttcgagcgtctcgctatattacgggactcaatctaacatccgagtaaaaagttattgtcgtttgaattggctcagggcttcaacattcaatttgagcgtctcgatatatgacgagactcaatcagacatccgcgtaanaagttattgtcgtttgaattgtctcaaaggttaaacattcaatttcgagcgtctcgatatgttacgggactcaatcagacatccgagtaaaaagctattgtcgtttgaatttgctcagagattcaacattcaatttcgaacgtctcgatatattatgggactcaatc

SEQ ID NO: 14298 - DNA, 271 bp, Glycine max
  unsure at all n locations
agtttagtttttttncattcncgtcggcaggagaagcctagatgtggctctattcattcacaggtaacagtctaaagacatgggaggaagttgttgagaaatttatgaataaatacttccccgagtcaaagctgcagaaaggaaagctgctattttatcatttcaccaacttcctgatgagtccttgagtgaagcattggatatgtttccgggtttgtaagacagactcccacacatggattctctgaaccaattcagttgaacatgttta

SEQ ID NO: 14299 - DNA, 404 bp, Glycine max
  unsure at all n locations
gactaaacggagtagtttaagccatgtttgtntattagtcgttnangctatgttataaagtgaagcaagacatanataatgaggtgaaattaatatgagccttgcaaagtcaacaaggccatgttagtccaatgacaagagctngngctatgagaagtaaagggactatggcaaacatagttgctaaaattcgtacaacagtcatggtagcaatgggacagcatgggtctactagattgaagctttgaaagactaacggagtagtttatgccatgttttttttttataagtcgtttaggctatgttataaagtgaagcaagacataaataatgcggtgaaattaatatgagccttgcaaagtcaacaaggcctaatttgggctgctagtagtttaagaatactt

SEQ ID NO: 14300 - DNA, 441 bp, Glycine max
  unsure at all n locations
agaggacagaaaagagaaagaaagacagaaggaaaaaaaaaaaacaaacaacnaaaaaaaaaaagaaagagaagtagctctgagacatcgannacaaaaannnaagnagggaaannagaagaaagaaagaagaaggtgttatagtttagggaannnnaaggggagaagaagganagaagnnatgaataaagaaaaaaggagaaaaaagagagggaaaagagagaagggaaaggaaaaaaagagggaagtggaggtaagaaaaaggaaggaaaaaaaaatgtgaaaaagataaaaagagaataagggaatgaagtgaggaaaatggaggagtaggaaagaaagatgagnggaaagaaaatggaagggggaaggtaaggggaaaaaagggagaaaagggaggaagaagaggagaaaaaaaaaaagaaaaagggaggaagagag

SEQ ID NO: 14301 - DNA, 340 bp, Glycine max
ctcgactcaaagaaagtcatattagtctcatacaattaatatagaacctatatcctattgtcacatcctatcagagcgtggtgttcccgtgtcctctagcatgaggttcttcatagtcattcacctatttatctgctcacccgaacataagttcaagatcatcacaggatccatacaaaacaacacacagggagtgagttatcacattcctagctgatagagaaacaagacaattgaatatacatattatataaatgagataccacttgctttaacatagctcacgtaacttcaacacttcgtcattcacaattcactcgtcaattatcaatcacattac

SEQ ID NO: 14302 - DNA, 353 bp, Glycine max
  unsure at all n locations
tgtttgctttctnctttattaatatnaactatcttccatttttgagtatttgggaccatataatctagaacgtaacttctcatcatctcattcaacctcttaggctcttagctatggacatgatagtttgtcctaatttttacttcaacatgctcgtttggacgtggtggtcattttgtgacaacagtgcaagtaggagatgctgattctttccctttctgcttcaagtgttgggtgttggcggttgaggactcgtgcttgtgcgtctccccaattttatcggaagctntctgatcaactcgaaccgatgatcaggatagattcaaattttgtgtgaattttccccacaatgg

SEQ ID NO: 14303 - DNA, 402 bp, Glycine max
  unsure at all n locations
agcagttgcagaagtcaatgtatgtgctaatgactattatcattnatatcttacctattttgaattatggccttggtttgtgtgtctagattggcaccagactcctacatacacaatatctttcattgcaagcttagcagtagtcccaaaacccaatgtttatgcgcaaccaagtgtcatgatttctatattaccaattntgctagttgttaatgttgaatcatagttttggtctctcatttagcattcatctcatattgtaaacttattccgtgtcgtccagatttanaacaaacttctcttactttatttcanaatcattcttttgtttaccttacaactcactcaactctatcattaccctttttcaatatgcagaattaccaacatgcaaacaaatct

SEQ ID NO: 14304 - DNA, 179 bp, Glycine max
ttgtctccttgttatgtaataatgcctttccaggattgacctttaccattaaaacaattggcggcaattggaatcctaaggttaattttgttgtgatgaagggttcaccactaatgaaccctactgctagtctgttggctaagcaaaatcacccccatccaattgttagctcaaggtga

SEQ ID NO: 14305 - DNA, 435 bp, Glycine max
  unsure at all n locations
tcatggttcagtgtcatgttgatcatgacaataaagtatatttggatttgaccatgaactagttttaagtttacttggtaatatagtttttttgtataaaattatctttcaattntgaatagcatagtaacacctattttagaacaccaaaacanaattttaagaggctactatcgtgtaagtacaaaattttccctgttctgtaaactcaaggtaaaaacacctgctttcatacaaaaaacgaccaaagaatatggcataactagttttaagtttacttggtaatatagtttttttgtataaaattatctttcaattttgaatagcatagtaacacctattttagaacaccaaaacaaaattttagaaggctactatcgtgtagtacaaaattttccctgttctgtaaactcaaggtaaaaacacctgctttca

SEQ ID NO: 14306 - DNA, 237 bp, Glycine max
tttgtcttatcttgattagtgacaaaaacacagtggctaatataggcttttttgaacacactccttttatattataatatattagaaagaataaaattagtcaataaaatcagtaaataagatatgcgacccacaaattttgatgatttttctttataaatttcaaccaataaaagaatatgtggtaacattttctatgcaagctgtatcattttctctgtatcaagggaacttaca

SEQ ID NO: 14307 - DNA, 439 bp, Glycine max
  unsure at all n locations
actaccctgagaaccacaaggagtcatgcatgctacttgaatatctggagggacaaagngcagcatccagaattagttttgagaaccatcaatttaagaccatccttgttcaagacaacacattcaaccactttcatgatcagaatttttatagctctttatacaataaaacatgagaacatagcaaccatgaacatgctgagaatcatgaaaatacattcctctttctctgttgcaaaccgaaaccttaatccgtaaaaatgaaggaacatatacattccatatgcgcagtgatctcaatagatagtcaaatactcacaaagattcatatgtagtcataaacaaattatataacttgtaattctcattataattgaacaactgccatagaagtttgtatataatataaaatacgacagcattatagtcatgttatatt

SEQ ID NO: 14308 - DNA, 420 bp, Glycine max
  unsure at all n locations
ttcaacctctcttcaatatccttaaccccaccaaaacaaaccgtggggggcagtgttctatttctgattggcttgcccctttttccgcacatcctgcaaaaatanaacataatctttcaaattggtagaatgaattataacaatttaatgttttttgaaaaacaacttaaatggcaaggtacataccttccaaaaagggtctttgcgagtctggcaaaactgggcccatttttccttgcttatgtcgtatntctcacggacagtgtcgttcacaccgtcctgatcggctgcaagggcctatntccttgtgaggtctgatntaaactgcctccatctcttgccgacagtctgaagtaacttgttttttgtcctactatcagaagcctctgggatttcaaaatccgcttgacaataacaaat

SEQ ID NO: 14309 - DNA, 497 bp, Glycine max
  unsure at all n locations
agagatgatggccttganaccncccnatagtaacatcctgacgaannngngatngnggatttggccggagatgtggatgttatataagtcctaccggattggaatttttgatgggtgattggtgtnnttaccatggagtnctaaagaagcaaagacatttgtgacactttttactttgtgaagccgagtatgtagctgcaacttcttgcacatgtcatgccatttggcttagaagattgtggaagaacttcagttgttgcaaaaggaaagcacaaagatctatattgataatagatctgcacaagagcttgccaagaatccggtgttccatgaacgaagtaagtatatagatacaaggtagcatttcattagagagtgcattaccaaaaaaagaagtagaatngactcatgtgaaaactcaagatcaagttgcggatattntcaccaagcctctcaaatnttgaagattntcgaagattggcgagcagacttggtgg

SEQ ID NO: 14310 - DNA, 230 bp, Glycine max
atctgcaatgcaatatgtctcctgtcagacactctgagtgtactctcacaagaacatcatgtccgtctccaatgtcaccctgtcaaataaaaaatgtcagaaccactcaatggtttgaagttgacaattgaaccaatcaatcgaagtaagatagcttcaagacaattggaaaagctcgccaaagcccacgtatgcatcacattgtcaggtctactcactatctactaatg

SEQ ID NO: 14311 - DNA, 217 bp, Glycine max
aaacaccgccactttccatatgcttgtcagtgtttacgtggccaaataaaagggtgtgtgaaacatcatgatccctacaaattgatctacctacacataactaaaagacgactctgacatttcggaaatctcaaagcttgaaatcttatgatttcattctgaggctttataccactttattagtatcttatattggaaaaaagccaacgtacctttc

SEQ ID NO: 14312 - DNA, 331 bp, Glycine max
  unsure at all n locations
cacccgnngtgagacaacatacactgtgactatgaacctacacacaaacattcattttctttatgtaaaaaactctatataaatgtctatataactccgcaaaataacttgattatcttaagaaaaatgactaaaggctaagattgtatattcgtatgtaagacaattaacagcccgtcattgtgcacacaaataacaaatgtgtntgattcatataaaggctaatacaattgtatattcatatgtaagaagattaaaacctagccattgtacaaacaaacagcgcactcatttgatttatgtagagtcaacaatggctctgtaagacaaa

SEQ ID NO: 14313 - DNA, 254 bp, Glycine max
ctactgatcaccagaatgaacttggtttattgtttctcctgcctggcctcagatgctactaaatcaatgctgattgtatcatcacacctctagactgcatttctagttaattctcattaagcttcagccataacttacagccgcatacacacaattatcttttccatgtgacaacaactacactctgtttttgacccacagatgggagtccaattgaaaactaccagagtgcttttctatctcttataccaccc

SEQ ID NO: 14314 - DNA, 354 bp, Glycine max
  unsure at all n locations
ggcacaaataccatatttctatactctaaacctctaattcaggttccgagtgtttgacaaaagagtctctgacataatcttaaaactaatgatataaaaaaattaatatttcttgtggaactaaatttgctagaaaattcacatgaaactttatcctaattttcctaccacattattataatattaataaattttacctaccaatacatgtccacaagaaaatcgtaggtatttcctgcaaattatatatccaataacatccgcacgtatttcctatggatcttcttcanataaaaatctgcacgaatatcttgtggattatttntcacagataaattcgccagaaattatcac

SEQ ID NO: 14315 - DNA, 402 bp, Glycine max
  unsure at all n locations
ttttcacttgtgtacttgatggagttggagttattttcgatgatctcattctttcctttagtcccaattttgaacaatctctagtgccatgtgttanggtgtaatcaacattatataatgtcttactatagatgaacataagagaaaagcatgagccaatagcaaacctgaaaggaactcttcttatctactggactatcatatgacttcatatgaagcgtgatggagtcaaaataaagaattaaggctgattctgcaagaaccatgagtccacatatcccaagtagtgcagcaacacaaattgacctaagtaaacattgattttccaccaccgttcgatcctgtcaacagaaataatgattatatatcaacatcattacgcataacaccttatgctatgtg

SEQ ID NO: 14316 - DNA, 312 bp, Glycine max
  unsure at all n locations
aatcctcatcctcgcaaatcttgaatncgcaggcactgtctcaccctcctccaaaactattgatgactctaagaacgcgtacaagctgtcagcatcaatcttaattgaatgtactcttaccctcacttgcttagggctctggtcttacgagctgtataagaaagcataaaactccttcaccatagctacatctatgcttgcatcttggagattggcgagacgtttgtgtaagttacgcctttacaactctgccttanactcgtcacattcggtatgatgaatcttaacattcctttacagaatgatcctccg

SEQ ID NO: 14317 - DNA, 491 bp, Glycine max
  unsure at all n locations
nggctcaacaatacgaacgtcnacatccnaaannnagccngagcccaaatccacctcacataaacatagacccgggttagtattttttccttaccctcggaagcaaaaaacaagagacggaaaatttcctttccaacaaaaagactgagaaggaaatttccctatccaaatgaaataagatagagagaatgaaaattttcactcactggaaaaaagagaggaaaggatattcccaatctaatagtgggagatagcgaanacaagagaaaggaaattcccatccaacgaatggtagaaatgaagacaatgaacgagagatagctcctggtcaaggatcacactaaaacagaacatatgtgcagaaaggtctttggaccggacaatatctgaacaatacagacttgtcactaaatgaacgaaaagaatgaaaggaaaccatgacctacagtggtcttcttcctttaattgccaaccaaatcttgtgtgctacg

SEQ ID NO: 14318 - DNA, 416 bp, Glycine max
  unsure at all n locations
agcttatttcatatttccctacgaacgttcacttgcgcaagacatcctattaactaatacaaatgcacccatatacaatcaaggtagcttcattacctagattatttacatgtacttccaaggtgtatatgttatttacatcacacacgcctccttggctaaatttacatacatgcatactcaaagcatttcggggtaccaaaaattgcacatgcgctcatcttggtatttctaatacctatacatatacaaacttcatgatgaatcttgactacctacgcaataaggtgctacatttcatgctgttttttttcaagtttttgctacctaaagccacatgcaaattcaagcatattttcctttgctgactaaaantgtattcaaagtagaaggtacatatcctttttgtaatatgt

SEQ ID NO: 14319 - DNA, 482 bp, Glycine max
  unsure at all n locations
cgccgctacgtgcttgagatttcgaanacttagtanaatntcgngnccccngagangaggcnaaagagcatatgttcccgttgtttatcatctcccccacaatcttaagaggggtggttgggtgaatacatacactcctaactatccctacacataaacatctatctcactttttattcaacgttataactccctcaataatgaactctttccctattgattttaatagaacaattcgagtacgaatcttgtgccataatgaacacccgagaatcttgcaagataacagaccagctcaaattcttactcgaactgccgcaccctctgacctacctccagttctccatcacaccgcttgtgaatcccatcatcctgcccttccctctacaaagtctgcacacgctgggatactcctcaccttaggtgtgaattctttctcacctatgacccccgtctcttatcccatgcgaactaagcaatat

SEQ ID NO: 14320 - DNA, 394 bp, Glycine max
  unsure at all n locations
gtggccagtgcagatgacataccaaactgcaattttgcacatgaatcatagataagattaaaaaatcaaaaataaatgtcacatggcaaaatagccatgataacaataataattgttcgttcttctatagactaaaacaccagattccccacatatgagaaaatctatgaaacaccaatacttcaatttgctttgcctatccgtattcgatttgtttacgatactaatactcttaattggatactntacgtatatatagatattgttgaagtattactactaaaaatatgatatttagtaatatttttttatcaacactaaataaaaatgttactaaaagcctttgacgacatttaatttttttacaaaatgatgaataaatgttattaatata

SEQ ID NO: 14321 - DNA, 376 bp, Glycine max
  unsure at all n locations
tcnggttgctcattgactccagattgctgcanagaaggacatatatttgtatggtgatctgcagaagaacatagaccatagctcttgcaacaagtatatatttctgattcatggcaagctgagttactangttgaccaaggcatcaagttttccttcaagctttttattttcagtagatgaagatgaattcatggccacctcatggactcctctaagaacaatggcatcatttcttgcactgaattgttgggagttggaagccatcttctcaatcaaactcctagccccagcatgggtcatatcaccaagagctccaccactggcagcatcaatcatactcctctccatgtngctaagtccctcatagaaatattg

SEQ ID NO: 14322 - DNA, 415 bp, Glycine max
  unsure at all n locations
agcttatgtttcctattttgcaatgttatctcccagatttgagtagcatctctactatgataccagttatgaaaacaatgcacgaattctaaaatgcaacacttagcagaagggtcaatttgtaaagttcatatagcaattcaattctaatccatatataacgtattttatatatattcatattccccaagagtctacttttcaaatataattttattttcatcaaacgttatgtgaatcaaacaaagtaaaaaactatgtgaagtatgtcaaagttgaaatttgtaaaacagcatgtgtgcacaaactttcaacaccaaataatttagaaatgactctaagagcccatactcatggaggataacctnccanaccaaaattgacattaaagaanatagaaactctcaataccttg

SEQ ID NO: 14323 - DNA, 352 bp, Glycine max
gctttaggagaaaccatcaaaactaaagtagtgcctaaacttatatatttgaggaagcttcgccgagtgtccccattgaaaaacctttattcaaacctttcaaagttagtgataaggctaaacgaaaaattatggaacttagaaaaactaaatccttaattgaaggcgtaagtgacaatcatagcgaattactaaacaagattagtagtttgcttaaggtcattccatatactccccaagcttctgaaaatacttccaaaatggtaacaagaaagacctccaaattaattaattgtatgaatgaagatagtgaccaaaacttatataacacaactgagataggatcagtgtc

SEQ ID NO: 14324 - DNA, 355 bp, Glycine max
  unsure at all n locations
agctttctcatacatacgaagattttgtgagtntacaaaccatgttgtcattcttgacaagataaccaagaggcatgtccatgtatactccctcaatcaaatcactattgagaaacacattatttaaatcaagctgaaacatgttccaatttctgtgaggtgcaatggaaagaaacactctcattgccgtatgcttggcaacaagtgagaaagtgtccaaaaaatcgatctctgcttgttgtttgatgtgtgtacccttttgcaacaagacgagccttgtatctatcaagggagccatctgctctatacttgaccttataaatccatctgcaactgatgggtcttttatcgggtg

SEQ ID NO: 14325 - DNA, 325 bp, Glycine max
  unsure at all n locations
tcngggtttgctcctgcttctctcgtgagtataagttctggtgattgtggtttccgtctgataaagagaagaacgtatactatgctgtgagtacaaagcatatagatgcacatgattggccatatgtaatattgaaagatgaaaacacatcaagaacagccaaaaagaggaacaagaatgtgagatcaaaagatgaattccatacttgggtatcttaattgcttcattgatggatcgatcgtaatcatctgcaatgacagcgacgtcaaaagttagctcaatgtgggatcagcttatactgatactaaagaaataaagtttactt

SEQ ID NO: 14326 - DNA, 413 bp, Glycine max
  unsure at all n locations
ttcttgtatgaagaaggagatgaatgaacggagagggagagaagagcacgaaattntgtgctcaaaaagagctctgagatctgaagttaatattcaaatgatcaaagttgagaaaaatgcacacacatgacctctatttatagcctaagtgtcacacaaaattggagggaaattcaaatttcacttgaatttgtggagccaaactttggagccaaaatttaactaattatgattcgtgaatgttagttatggttcagcccactaatccaagatcaattccaagattctccactaagtgtgcttaggtgtcatgaggcatganaagcatgaaggacatgcacagagtgtgactatatgatgtggcaatggngtatagtaagcaaatgctcacctctccctctaaaattaattgg

SEQ ID NO: 14327 - DNA, 384 bp, Glycine max
aacatacacaactcaagcttcaatgaggtccttcaatggtgattttcagctatggatttatcgaggaagataaagaagaagaggagagaggaggcaccatccactagagaataagccatggaaggaggagtttcacgccaatagagtgtcttggataataaacttatagaggaagcttcaatggaggaagagaatgagagagataaagggggggctcgaaattgaatgagaaaaaaagggagagaagttgaactctgaagtgtgtctcacaagttccctgagaaacttccttgagaaacttccttgagaagcttccttgagacacttgcttaacaagcttccttgagaagctagagcttatatatacacacccctctaatatct

SEQ ID NO: 14328 - DNA, 426 bp, Glycine max
ttcttgtttctcgtggctagtgtgtgggaatgtgttgagggttcgatgaaacctggtatttataggagtgaagcgtagttgcaggtccttgtgacaccctctacccctcacatatatattaataaaggaataaaaattcaaatattaattaaaagtattgttaaaacatttttaaatacaagctcttcaaatggataaaaggctcacattcactctcttctacatcatattcaaatttgtccaaataaataataaagtcatctcgactcaaagaatatcatataagtctcatacaattaatatagaacctatatcctaatgtcacatcttatcagagcgtggtgttcccgtgtcctctagcatgaggatcttcatagtcatccacctattcatctgctcccccgaacacaagttcaagatcatcac

SEQ ID NO: 14329 - DNA, 324 bp, Glycine max
catagaaactaagcttacatcagatttagtatgatgcactaacctataatattattcttaatgccaataacctaaggaattaaaataacttaatggctgagtgtaactgaaattgtggcaaccaaaagtcacccccaacagccatcaagccagccaccatttggtctcccaaaaggctgatgcctaagttgccaattgggcccttattaaaacttgaactaaaccaaactaaagcccttttaattgattaacccaaaccatatttttggtcagccaactttacaaggattgggccattatttagacaaactaaacactctaaaa

SEQ ID NO: 14330 - DNA, 343 bp, Glycine max
  unsure at all n locations
aaccttttcacacaaggatgctattggtaatcaaaattcctagagctcttttaataattttacttctctatcacatcattcttctttcgttacttatatatcatggtctaaaaactattaggagaaatttaagtgataattcatatacaagtntatgaatattgattctgttactcattaattatcatgcaatntgngaccaaacttggctagttgggaagctttgatacggggaagattacattgacaaattgttcgatcttaanttttcattgtcatacagaatcagtactagttcatagttatacaaacaataactgagatgggaaattaatatatatta

SEQ ID NO: 14331 - DNA, 467 bp, Glycine max
  unsure at all n locations
ggcatttggacangttgatcgtcgnactganacanagcnngccatggttgggtcgcggaatctaacgaaccaattaacccttaatcttctgcctcacacctctgaactggcagtcggagtctgaggccttccttttctctcatcccccttttctcgaaccttttggcggagccttgtgaatcacttccaccccattttctctaaacccagttgtggctgctggtgtactccctccacttttcaagtgtgtcttncacataaacacttccaccgttgcgtctctttcgcgatttcctctccctgcagccattccaaaaccaacaaatgaacaaaatatttgtaacttcactcttactttcttcaacaaatcggtagcttagtttcacagtacaaagaaaactcttatagaagctaagaaacaagctatgcgcaccacaattcataaataaatgggttgaatgatagaa

SEQ ID NO: 14332 - DNA, 526 bp, Glycine max
  unsure at all n locations
aaaanttatccccgattgccgnatctntctggcgaattctagcancgtagcacgccgacgcatcctatacagaccagcctgcatgcaagcatgctcngtgnaatcganctcactagacacggatggaacgacactagtgacgagncacactttctttatactcgaagcttttttaatgacagcgcctagtaaacaaacaacttattaggtctcattacttccatgtgatggcctaagaatgaactgcctcggactaataacaaacatgttgaaggagccaaacagacgacgatccgatccttgcatgccttttatacgacatagaacactccctatcgctgtactagtcgcacacctacaaccaattgctcgaagccaaggagagtaacgcatcaatgtcttctatacatacccatacatgtatacactgctgccgacgtggcaatagcatatggctctgcgcacaagcgtgagataaaactttctactgaagaatggctcgtgttacaacaagcctatgaatgcg

SEQ ID NO: 14333 - DNA, 382 bp, Glycine max
  unsure at all n locations
aatacttaagttatctcataataaacaacagcggacgggaaaaaagagagagattagtctaaaaaacggccccagggcgggggaaggccccccaccacaacgagaaaccccgaaggggaaacgcccccaccggaacacaaccgctaaaggaaaaccggccacgaacacaaggccacctacggggcgccaagagcccaaaaacggcaacagagagaacaagccggcgcgcaaanggagggaacgcaaccgcgcaagcaccacaccgggcaagggacccacccaaaaccagctgtaacgataccgaacaggacacaacagcccccaagacagcgcgaccagacatcaacaaaagagcgcgataaaggctcagatccacacacga

SEQ ID NO: 14334 - DNA, 503 bp, Glycine max
  unsure at all n locations
aggagaccgaaaacttanaaaccccantnancannnncagcgaggctcatagncgaccagcagcatgcaagcgggntttgttattctccacgaccgtcacgagcacggcaacaatagttatcctagcctacacaagaccgagcgacagagcaaggcaagacaccgacaccaccgctgaacaaaacccaacgcgctatatgcggacaaaggagctgacccacgcgggattgataacatggacaatgaggagacgaacctacgctgcctgtagaaaaggtaccagccacgtgctcgaatgacatcatgatatctcaactgcaagataagcacagatatctcagggagcggcactgatgacacgcgacgcaatacacaagcactgaacatactgtacaactacacctgacctcgcatgaccctaggccaccaacataaagacctatgactagaagcacgctactgagtagagccccgaaccatacatacacaccctgaacggggct

SEQ ID NO: 14335 - DNA, 457 bp, Glycine max
  unsure at all n locations
tggcggcgaaacattgcanacaacanctaganannaagcnngcaaacccgccatggaagatggtgacgccagggcaacctgttgttnttttgacnaagagcccattccctccggcaaagagtatggtctatgcgtgaaggcagagcaccatgccgggaatcactatcacactcccaccaatgtccgagccatgtgacttattgtcgcccaatgcgcgaaatccgacgaggggattcgttcacctgttgagagttgcaccaactgacagaataggccttcaatgaattaccgcatcatttatagggtgtacactttacgagaagggggctgatttttcagagacacagcgaccattgtgacacactggcacttgatttctgttgttgagtcttcccatactgctggagatgtctccataacatggtgggctccaacgtagcgttgtcctgagatgtcn

SEQ ID NO: 14336 - DNA, 516 bp, Glycine max
  unsure at all n locations
aggagtcgacagcctcatnnnccacgactattcagctcggcacccgagctcctattagactgcctgcatgcagagccgctatgtttgtgttntctcaacagggggaggcctcgagagagatgccgcttctcctttatatggcaggagaatattccttctgtcctaaccaatgcttcagccaaagaaccgaaaagctcattatgcttgtaggccacaagagaggttaaatgatgacacgatactagtttcttgacatagaacgaaaaatgaatcgctcgcatgctagggaagcgccttaagacccaagttataagcttagaccagctatctttctgctctaactaacttttctcctatattgctgtatacatgctaattcttggagccttttcaggcccagcattaataggaaagaatcttagacatagtaaataatgttgcaccaatctgcactgtcctgattcataaacttgaactgtggcttacacatacatatatacaactctctctatgcan

SEQ ID NO: 14337 - DNA, 497 bp, Glycine max
  unsure at all n locations
nnntttaaccaattcangangtacttgctgcgatacaatanaanacccnagcatacatagctggaggatttacttgatggaatacaagtatgcttttcaatgctctttatcactatgaatctgctagtgtgcttctgatattggagagatgaagggatctggatcttctcattcctaagcttaatagcaagagaactaataagatttaggctaatagctttttgtgattgaacaagacatttatttaatgaagacatggagagaacaaaagttgagaataaagcatcctagcaagaaacttacagaagaanaaatttagaaactaatagattgagtcatgtagcaaggcatgccaatctctctgcatataanatccatgagaataactatgttccaagtgttggatggagaagttccttaaaaaattcagcattcctttcctccaaagacaccaccaagcagcaaatcagaccactgccacagattcttattttctt

SEQ ID NO: 14338 - DNA, 360 bp, Glycine max
ccccaatcctggcaaactgcaacctttaggctttgaattttgacttgatcgaaccttttcttatgaaagggtgattgattcgatcccatgttttttctagaatgaaaaattctgtttgaatcaaactttgacaccctatcatggaggaaatatgatcaatgcatgaaggaatgcttatgctatgcatgacacaaatgcattgtgcagacacaagagcccgaaagatcatctcttcttacccactaacattcaggcatcatgattcatttgcagtcatcaccacagtgccccatgtatgcatataataatgtgatgtggaccttccaacttcccgtgacataatgatgagacatatgtaac

SEQ ID NO: 14339 - DNA, 354 bp, Glycine max
  unsure at all n locations
aaaccatgaaacaaatttctctgtattagctatatcaatgaaagtgggaatgttaagttttgtgcctgaacctctggccgtgcaacacttgagagatattgcggcactaaagtacttaagtaatcttccaaggtcactcgtctaggatgactcagaanagtgagcctcttcaaagactgatgctactgttctgtcgtgcaaaagctttctttttctctctacattgtttcttctaaaggtgacttcaatttctaaatccaatggaaccaattcacctgcaaaagatctacgcatacaaacactaacaggaacaacagttaaccaattcaagaagaaaataaattttggactaaa

SEQ ID NO: 14340 - DNA, 425 bp, Glycine max
  unsure at all n locations
cctgcatgcatgcaagctttgttaatctattacactgattnggtaatcaatgaccattgactgtttctgaataaatcaaaagatgtaactcttcaaaaggttcttgaattnttcaaattggttttaagttcttctaaaagttataactcttctaaatggttgtcttgaccagacatgaagagtctataaaaacaaggctttgttttgcatttcaattatcttgaacacttattcatacaatcctttacaagccttaaatctctttgaacttcttcttcttctttgtaccaaaagctntctgaagttttctggttttccaaagcttgaaaacttgtgctattcatcttttcattctcttctccctttgccaaaaagaattctccaaggactaaccgcctgaattctntttgtatctctcttctccc

SEQ ID NO: 14341 - DNA, 398 bp, Glycine max
  unsure at all n locations
tgacaaattccttgngataaaggtagtgttgccatgttttcaaagcccgtactaaggcatacaactccttatcataagttgaatagttaaaggtaagaccacttaacttttcactaaaataagcaattggatgaccttcttgcatcaacacagccccaatcccaacatttgaagcatcacactcaatttaaaaagatttttgaaagtttggcaatgcaagtatgggggcattagttagcttttgcttaagaacattgaaatcttcttcttgtttctctccccattagaaaccaacatttttttagcacttcattgagaggtgctgccaatgtgctaaaatccttcacaaatcgtctataaaatcttgctaaaccatgaaaactcctcacctcggtcac

SEQ ID NO: 14342 - DNA, 428 bp, Glycine max
  unsure at all n locations
agcttgtctttctatgagcttactagtngggtatgtggtgtttcactgacaagtcacatattctttatactngaagcttttntaaataaaatgcatatttggaaaaaaattattgattctcattccttaaatttgatgggttaggtatcttctgtttgcagataaataacaaaatattttaaggagagaaacagtaaatgattgttacaaaatatngtttttatttgccctaaaatactcccttttgtttttttatacaagaagcanacaactaattcatcaaaaccaatgaaagtagttaattaatttatttcaaanatacccatagaattaaatcggtttagtagtgattatagttaatgacagtacacataatcaagagataattntttctactgatgaatggccttgtattttaatatgcctat

SEQ ID NO: 14343 - DNA, 378 bp, Glycine max
  unsure at all n locations
gcatctttattcttaacgcagactactgggtttacctcttaagagattatgagtgaaattatgtggtttaggctctttcacatgaagaatcatggttagagtagtttagttgacgaagataatagttggaatgactttaaatggtgaaaaatctttaacactgcatcaagagttagtttggtaggttaagcatccaacacatctacaaaatctgcaccaaacatcattttccacctccaagtgtntggtttgttggctcttgcattntgctatgctttcttatcccttattatggttgaagtttatatttctgcacttattactctaaaaatatttagttntagtcattcattcatttaattcttggtatatacaaac

SEQ ID NO: 14344 - DNA, 434 bp, Glycine max
  unsure at all n locations
agncttgtttttgactcatcttctctttgaagtggcgtctccaatcattcttcttccttatccaatacactgccattgatcttcaagaagaaaatgactccattgatgaagaagatccaaggcctacaagctccacatggagctacgtcatgtggtattaagagcatcttcgtctaggtgatgttcttttgcttcctctatcttttttcccggtcaattcactctaattccttattcttcatcttattctccatgtatatcctccattttcttgtggtttggtactatttagagtagattcacaaaanataaactgattaaatcttagatctacacttgttcttgcatttctattggttcaaatttatagacctattcttgaatcatgnttttgtgttgattntaggttctatcattntcagtcataatctttt

SEQ ID NO: 14345 - DNA, 423 bp, Glycine max
cgatactataaaacccagcttaatagatggtggtctattatgccggaggcatcctattgtttcttaaagttttgggtcgtcttctttgtgggaaagataaggaagtatgggaaagtcagctacacaaacttgaaaacatgccaaatacagatatttaccatgcaatgagattgagttttgatgatctagatcgcaaagaacagaagattcttttagatcttgcatgtttcttcataagattgaatttgaaactggacagcataaaagttttattgaaagacaatgaaagagatgattcagtggttgctgggttagaaaggttgaaagataaagctcttgtaaccatttctgaagataatgctatatctatgcacgatatcatacaagaaatggcttgggagattgtgcgccaagaatcaattg

SEQ ID NO: 14346 - DNA, 388 bp, Glycine max
agctttgatgcattttatggagaggttaatgaaacaacgagatgatgcgctccatgagaggttggatcaaatggagaatagagatcataatgaagaagaaaggaggagaagagggaatgatggtgttcctagacaaaaccgaattgatggtattaaactcaacattcctccatttaaaggaaagaatgatccggaggcctacttggagtgggagatgaaaatagagcatgttttctcatgccacaactatgaggaggaccagaaggtgaagcttgccgccacggagttttccgactatgctcttatgtggtggaacaagctacaaaaggagagagcaagaaatgaagagccaatggttgatacatggacggagatgaaaaagatcatg

SEQ ID NO: 14347 - DNA, 430 bp, Glycine max
  unsure at all n locations
ctagatgagttatgtctgcgaatcgacatccggttaaattattgaccattggaatnnctcgagtccttccgttgtttaatttcaagcgtctcgatantttatgtccctcaatcagacatcggagcgaaatgttatgaccattcaatttgtcgagaggctcccgttttcaatttcgaacgtctagatgaattatgtcaccgaatcagacatctgagggaaatgttatgaacattcgaatgtgtcgagagcgttcggttgtcaatttcgagcgtctagatgagttatgtcagcgaatcggacatccgtgtaaaaaagtatgaccattcaagctttgtcgagagcttccgttgtcaatttcgaccgtctcatatatatgtccccgatcggactcgggtgcaagtatgacattggactttgcagagctccgtgg

SEQ ID NO: 14348 - DNA, 429 bp, Glycine max
  unsure at all n locations
agctncattttatcatctttatccatctcatcaacgtttccaactgtaggctctccaaccattatccattcatgatcaacaaacctcattccaagcttcttaagatgtctttcgataatctcactagaggctttggtaaagtacacaatctcattagagatatcaaccttgaaatagtcaatgaatcttgagggaagtacaacataaggaaattcataatccaccaggcgacgacactttagcacaatgtcttcaatcagtagtacccaattcatcttgatacctaatttcaaaccataagctatctatagatcatcattcattacccgagcatgattacttcacctaagttagagaatgtaggcgatgaggtatactaatattgtgtcctctgaaatcagtccaccaactcctaaacgaatcctcaaa

SEQ ID NO: 14349 - DNA, 375 bp, Glycine max
gatgaatcaagattgtagggagagtgtgattatatttttatgatgacaaaaagctaaaaagtggagaacaattcatgataacaaaagtcaagaatcaaagaatgagttcaagattgaatcaagaacacttcaaggttcaaaaggaaatttgatttcaagaatcaagaatcaagaatcaagtttcaagattcaagttccaagaattaagatcaagatgcaagactaaagattcaagaatcaagagaagactcaatcaagataagtattaaaaagtttttcataaattgagtagcacatgaatttttctcaaaagcctcttaccgaagagtgtttactctctggtaatcgattaccacattgtcgtgatctattact

SEQ ID NO: 14350 - DNA, 386 bp, Glycine max
  unsure at all n locations
agtttttattccccttctaaatgatagactcatagtacagaagtagaagcaacattcattttaataatgtgctttaaacatgcaagacagatttgattacaacataataaatgagataatggaacagagaatgcgtacacaactgtatactggttcagcaatggtggacacacataaatgtgagaggtatctagagatatcatccatttagatattatacatcgtggcggtagggactatcagcgacatcgtatcattaaagagaaacactctagatgaggcttcactagtatcaagcgagtcgaagacctagcatgaccacagatcaaccttcactttctatgtctgcacggacccggatatanggcccaataactcactatgtg

SEQ ID NO: 14351 - DNA, 314 bp, Glycine max
gtgcttctacacaagagccattaaagcactgtttttgtatttttaaagcatagttttagagggagagtaaaaaatatatcacaaggagaagctaaagcgacaacaagtttttggtaagagagcttacgttagaggaatgaagtttagggtttagaggttagaaaaaacatcctcgaccagcctttgtcattttatttcactcaaaacccatcctttcttgtattgagcatattgcttggaatggaaggctaagcctatatgatgagaacgtctgctgaaaccttgatgtaacactctgtcactatctatataat

SEQ ID NO: 14352 - DNA, 395 bp, Glycine max
  unsure at all n locations
agcttcatttgaatcaaaggtgattcanaggtgttttgatgataacaatgatgataacaaaagatgatgacaaaggtgatgacaaanagctcaaagatcaatcaaagaacaactcaagtgaatcaagaacaattcaagagttcaagataagaatcaagaagaattcaagactcaagaagaaagtttagagtcaagaatcaagattcaaggttcaagatctcaagaatcaagatcaagattcaagactcaagattcaagaatcaagagaaggcttaatcaagataagtatgactagtctttctcacaaattgagtagcacatcatttttctcacaacatgtttaccacagagttgttactctctggtaatcgattaccagattggtgaatcgatta

SEQ ID NO: 14353 - DNA, 333 bp, Glycine max
tgctgcctcatgaggaatgccttgcgcttagatagcatgattaaacccttcgataatatgtatgtatgtaaatatgtagcatgaaatgccttgcaaaatgtagaatagaatgccttgcaaaatgtgaatatatatagcatgaaaatgccttgcataatatgaatatatatagcatgaagtgccttacaaagtgtttggatgggtagcgtaaaagtgtttttcaaaatatgtgtatttgtgagtaggtagcaaaaaaatccttccaaaaaaaaatgtgtgtatatatagaagatgtagcatgaaaagggttggcaaaacagtatgtacatggat

SEQ ID NO: 14354 - DNA, 427 bp, Glycine max
  unsure at all n locations
cagcctaatattctttattaaaagtcataattggtgccattacctatcatcatttctatcttacctattttgaattatggccttggtttgtgtgtctagattgacaccagactcctaaatgcacaatatatttcattgcaagcttaacaacagtcccaaaacccaattntattcgaaaccaagtgtcatgatttctatattaccaattntggtagttgttaatgttgaatcatagttttgctttctcatctgccctttgtctcatctctttaccttacaactcagtcaattctatcattaccctttttcaatatgcagaattagcaacatgaaaacatatctaatccagcaaatgccaccatcaatagccaggctatggtccagaaccaacgaaatgcctcatgtcccatttctttcatcttctaaa

SEQ ID NO: 14355 - DNA, 100 bp, Glycine max
  unsure at all n locations
caaatgattttttttctttgaagccttctganaatataagatcaaacacccagttaattcagggtatttttcaacaaaccgaaaaaaaataaacctaaaa

SEQ ID NO: 14356 - DNA, 406 bp, Glycine max
tttggccaattgtgctttgacccaaattttcctttgatgaatgatgctctcctacaacctaagacaaggtagaaggagataaattctacaggctcaaggttcaatcaaacaatcatactttcagctcaaaatatgtgcaagggataaatcaatcatgcacaaggtaagctttttagctaagtggctatcttcaatcaaaacatggccttcatcatcttcaatttcacgcattcattccatactcagagattcatgcaaaaatcattactcaatgttagtcgttctctcacaattaaagatcacactctcacctggctgtggctaatgagtaccttcacaatcaaactgtcaaactgactaacattatcagtcatgatcctaatccatgttctttctcttctaatca

SEQ ID NO: 14357 - DNA, 427 bp, Glycine max
  unsure at all n locations
acatgagtttgtggctacttcattcactcctctaatgactatagcatcatttctggcgctaaactgttgggagttggaagtcatcttctcaattaaatntctggcttcagcaggggtcatgtctccaacggctccaccactggcaacatctatcatacttctctccatgttactgagtccttcataaaaatattggagaagaagctgctcataaatctggtggtgagagcaactggcacatagttatttaaatctctcccagtattcatatacactctctccactgagtttcctaattcctgagatatcctttctgatggcagtggtcctggaagctggaaaatttttttctaagaatactctcttgaggtcatcccanctcgtgatggaccttggagcgaggtaatatagccagtcctttgtcact

SEQ ID NO: 14358 - DNA, 313 bp, Glycine max
agctgtatttgttctgttctgggaaacgaaggtcaagtgtgtgcgatatgtgaagatgatgttccaagtacttcggatttggtccgaccatgccctcctgatttccagctgggaaattggcgagtggaggaacgccccggcatttacgcaacaagcataatgtaaacctttacggatttaaaagctctatagtagggcctaagctttagagtttgcattatgataaggctttgtgtatcttgtttttgaattcataatacaaggatcttactacgtctgttcctggactctacccattgtcattcattagcat

SEQ ID NO: 14359 - DNA, 353 bp, Glycine max
  unsure at all n locations
tcaccttcagaggactacacgtnctcgccttcagaggactacacgtgctcgccttcaaagggtcatgtaccttcacctttataaggctacacgccgtcaccttcaaaagactacacgtcctcacctttagaggactacacgtcctcgccatcagaagactacatgtcccccattttcaaaagaggacatgccctcacctttagaggattgcatgtcctcgtcatcatangactacactccctcgccttcaaaaggcgacacgtcctgaacttcaaaaggctacacgccctcgcctttagagggctacgcgtnctcactttcagtgggctccatatccacaccttaagataatt

SEQ ID NO: 14360 - DNA, 384 bp, Glycine max
  unsure at all n locations
gactgctttaaatagctacataatgggggattcctttgaccaagaacatcatgacaattgggattcataatttggcctggttgttgaatgttgggcatgccataggtccttggaccaaattttgatgactatctntaatggtctggtaaaagaggctaaattttttgcaacatgcaatctacgttagtgcatttggttgaaggtaacacatatttaaggttttttgggctcagcagctgatttggaataagaataggtgtttcacttctgtttggtgcacaagcaataaatcaagggtatccctaacagagagactgagagatgatgtaactttactccatttatgtttactctttctccatcttgactatgttttcctttaca

SEQ ID NO: 14361 - DNA, 213 bp, Glycine max
  unsure at all n locations
aacttccttgagaaagctctttgagaaaacttccttgagagctagagcttagctacacacacccctctataactaagctcacctccttgagaagcttgcttaagaagattcaagctagagcttanctacacacnccctataatagctaagctcacccccatgacagaaaacatgataataataaaaaaaaagttcttattacaaagacaactc

SEQ ID NO: 14362 - DNA, 262 bp, Glycine max
cgtcgccacctttaaacccaaggaacctattcaatgccacgatggtgtagtgaaccgcgcaagaccctgcagccaactctcttctcaacgatcccatgtgcgtaacaatatacctaatcagcttaattgacaccgcgtacaggtagagaaaagatttagcttaccgcggcttcttcgtcgccagcgatggcgtgcgacaccaccacgccatgatacgacctaggaccggtgctgaggccggcggccatcatgtcgcacataa

SEQ ID NO: 14363 - DNA, 476 bp, Glycine max
  unsure at all n locations
aggcccccggaattttngagcntnatacataaaactcagcttcactcatttatttgtccagtagaggacagaattcattactatacaaccagagctatggacgctttggtgtaactacagaccctccaaaaaatcgcactcgagatgctgagtgatgtggctaacaactggaacttcaatacacgatagggttggacatcgaactatacacacatcattccctgttccaccatttctaaattataaccagaacggttaaatctatcacatttcacaaaactaccaaagtatacaccatgacaatattcatcacaccaaacaacagtgaagtcatactccaacaagcaacacaccttgtctacaaactcattgtaatcatgacgagcacctgattcaactagcttgcaataggcaaagatgtgcattcaataccgtgggcttattattgaactgggctctgcacaagacacacaaag

SEQ ID NO: 14364 - DNA, 426 bp, Glycine max
agcttgtattattatggggtatccatcacatgtggtactaggtggcggtcgggcgatggtgcacaacaatttttccacatccacaaatcgcgcataaacccaccatcccctgttgcccacctccaactgagctcacgtactcccacgtagcccatatcctcgtttctctcacaacaccgggtccgcatcaatcctcccaagcttccccaacatccaggtaatacaacattcaaacagcacaaactatcacagccaagaaaacagggcaaaggcagaaaactctgcccaaaacaccaaccaaaatcacaaccaaaatcacagcttttctcacttaaagaccccagtaataattccttcgttccaattcgttaaccggtggatcgaactccaaaatttactggaagtctctagtacataagcctacat

SEQ ID NO: 14365 - DNA, 266 bp, Glycine max
gagtcccgtaatacatcaagacgctgcgaaattgaatacaaaagctctagcaaattaaatcgacgataactttctactcggatgtccgattgggtcacgtaatatatcgagtcgctcgaaactcaatactgaagctcacagcaattatcaacgacaatgaatggtatactcgatatcacattgagctcacgtatatatcgagacattcgaaattgagtataaaagctgtgagaaaattctaacgactataactttttactcagatg

SEQ ID NO: 14366 - DNA, 284 bp, Glycine max
  unsure at all n locations
gaggtggctaagggtcaacctagtctcaatgttttccaatcgggtagtatgtaaatgggctagtggatttatcagcgatcgacgcttttcttgcttatcaccacaacaagtaaagcccagtcattgttgttttggctgatgcctatgccacattcgacctgagatgcgaaaagagtagtgcangaaattgtctgtgtacacctgctctttatgtatggttggtctcccacattttttgtcatgaaggtaggcctatatgtccnctacaaggtcatcacatgtgt

SEQ ID NO: 14367 - DNA, 440 bp, Glycine max
  unsure at all n locations
tcctcgaggccattncctgcgaaggcaaacattnggaaagtttttttaccagtgggacactactcttaaaacgaaaatggcatacaacctcttcccataaacatcaatgtaaatttagagcaagcttatgcgcatatttccctacgaacgttcacttgcacaagacatcctattaactaagaaaaatgcacccatatacaatcaaggtagcttcattacctagattatttacatgtacttccaaggtgtatttgttatttacatcacacacgcctccttggctaaatttacatacatgcatactcaaagcatttcggggtaccaaaaattgcacatgcgctcatcttggtatttctaatacctatacatatacaaacttcatgatgaatcttgactacctacgcaataaggtgctacatttcatgctctttttttttttt

SEQ ID NO: 14368 - DNA, 332 bp, Glycine max
agcttgttttgtttgcttctatggaggctggatctttgagcttcaatgaggtcctttaatggcgatattccaccatggagatgcagcggaagacaaaggagaataagtgagaggatgcgccatccactacggaataagccatggaagaaggagcttcaccaccaagatgagccttggataacaagcttggagaggatgcttcaatggaggaacagagagagagaagggggcaacacgatattgaaggaataaaagacggagagaagtggaactttgaagtgtgtctcataagactttcattcatcagagttacaacaagtgttacacatgct

SEQ ID NO: 14369 - DNA, 255 bp, Glycine max
gcggatgttaatgtatctttcttatgtctccgtaaaagacatatgaatcaagagatttgtattagctcgtctcatgtaatgcatgctctaactttcaagttatagttcctgcgtaggatactctcatgatattcatatgctaagttgtataatttagcgatctaacaagacaaatgtaatctcccattgcgtgtgatagaccaatcacatgcatgatgcccaacacggaacgcctcctaagaatgtcacacctct

SEQ ID NO: 14370 - DNA, 411 bp, Glycine max
atatatatatatatatatatatatatatatatatatatatatatatatatatatatatatatatatagggtgatcgttgagagacaaaatcgccctcatgcctatcccggaagtgtccgactccacaaaaaatggcaaggagaagtctggtaaaccaaggatgggtgcttaacacacagcatccttcaatttgatgaacgcctgctcatcctcagagttccatgagaacgagccctttgacaaaagcaccgtgagaagtgctgctctactcgacgatccctttatgaatctttgataaaaccccaatacacctaacaagcctcagacagctctcgcagatcgtggtgtgggccataagtgtatggcttaaattatcgtcgcaccagctccactccgcgcggggacatatag

SEQ ID NO: 14371 - DNA, 341 bp, Glycine max
  unsure at all n locations
aatatgatgtagaagaaaatgaatgtgagcctttttcccctttgatagacttgtaaaaaaacatatgttttacaaatacttttaattaatatttgaattntatttttccttattagtatatatgtgaggggtagagggtgtcacaatgagtgtgatgatgcaatgttatagtatagaaatatgcccacttgattatagtattggtagtagaatattacttcacttgttctcaagagcatattttatctgtaaggacaatgggagaaataatcagaacatgaatgtaacatataacttaactcgtgctcatcaagtacttataagaaatgattgttgatttt

SEQ ID NO: 14372 - DNA, 429 bp, Glycine max
  unsure at all n locations
agcttattgtatcaaaattgccttaatcatttccaaatatgcatgtgaattangacgcatcaacaagaatcaagccaaggctattatgcaagcaatcaatggggcaaaacataccaaatgattataatgatggatggctcaaattcttacaaaggtaaaatcatcactttcaaattgagctttcaaaactatcatgacatgtagagaagaatcaaggatttcaagtcacaaaatgtcaagaacttttattttcaaaacaattacccatttcttgaacatatcctataattcaaagaanaacatgcaaaatcgtacgtgcacacaaaattgacccagaatattaaactaataatccgacgaaactaacaacattaacaaattaacacaaccaacaaaactatgcaaaccaaagaacactccccccccccc

SEQ ID NO: 14373 - DNA, 385 bp, Glycine max
aaccaatattctctagaccattgtagacactacctacggattcttttcaaaatccctcttccaaaattgaccatcagtagtacctatagctggacttccaaaattacttgttgtattcccaaagaactctagaaccaggagtcactagactactctcatgttctatttagtagctcctactaccaaacacacataacaacctattatgttccccaaaaacttcagaagtaacaatcacctatctacttttttgagatctttccttctaagcctagggggtggacaaacacttgttcggatatggcattaatggctccacctagagtgcttttggctaagaagtccattcaattaggtggtttttctactgacctttaccctatac

SEQ ID NO: 14374 - DNA, 371 bp, Glycine max
  unsure at all n locations
tttctttatctcaaatcctgactcaccatanaccttgacccagggtgagaatgtcaatccttaccctcggaagcaaaaaagaatagaatggaaatttccaatcaaagaaaagagaatgaaaatttccaatgaaagaggacaaaagaaaagataggaaattcccaatcaaagagtgcgagatagaaaaagaaaagaaagataattcccaaccaaagaatgggagatagtaaaaagggaaggaagctcctggtcaaagaaaccagagaggtctttggaccagataatatctgaacagtacagaattgtcaccaaatgaacaaaaaggaatgaaaggaaaccacgacctagaatggtcttctccctttaattac

SEQ ID NO: 14375 - DNA, 438 bp, Glycine max
tcttatccaaggctcatcttggtggtgaagcttcttcttctatggcttattccctagtggatggcgcctcctctcacctcttctcctttgtcttccgctgcatttccatggtggaaaatcatcattaaaggacctcattgaagctcaaagatccagcctccatagaagccccacaagcaagcttccatcactgctgttgttggtgctgacggctggaccatctgaggttagggcgattcttgtatccagggttgtatctgttgctggagaggtcataattgttctgctgtggttgattctgcttctgaggttgaggaggactattgcaaatatttgcagcataagcttcaagctgctcaatcactccaagttgctgcatggagggcaaatgtctgtatggtggtcagcacaggagcacaaaccacatacccttgtaca

SEQ ID NO: 14376 - DNA, 431 bp, Glycine max
  unsure at all n locations
atcttgtatgattatggggtacccatcacatgtggtactaggtggcggtcgggcgatggtgcacaacaagttttccacatccacaatgcgcgcataaacccaccatcccctgttgcccacctccatctgagctcacgtactcccacgtagcccatatcctcatttctctcaacaccgggtccccatcaatcctcccaagcttccacaacatccaagagaaacaacattcaaacagcacaagctatcacagccaagcaaaacagggcaaaggcagaaaactctgctcaacacaccaaccaaaatcacagctnttctcacttatagaccccagtaacaattccttcgatccaattcgttaaccgttggatcgactcanacattntactggaagtctatagtacataagcctacanttttgaccgtgggatcta

SEQ ID NO: 14377 - DNA, 336 bp, Glycine max
tctacttatgtggcagggcgggcttccttcaccttcttgtcttcaacgcgaattttgaccattgttcttccttcccgcgatgcttcttttcatgtccgcctgagtgggcttatagcctaaaccatacttcccacgatttccttgggtatttatcaggctagttatgccgccgttgttttttcctaaacccatcccgggttcataaccgttccccaacataactcgggccatcattaccgctgcatcggacagacaaggcttgccaaagagggagtccacggaggaaatgctgaccacctcaaaagactggaaagcagtttctaacgattcttctgc

SEQ ID NO: 14378 - DNA, 382 bp, Glycine max
  unsure at all n locations
atcctcctccggaaacagctcacccgcgacgactcttacctgtggccgcgcctctcccctcagacgcagtcttccctcaaatcgctcctcctctcctcgattcaatcggaaaacatcaaatccatctccaagaagctctgcgacaccatctctgaactcgcctctggtattttacccgacaacgcctgggcggagcttcttcctttcatgttccagtgtgtttcctccgattcccctaagcttcaagaatccgcgtttttaatcttcgcgcagttgtcgcagtacatcggcgattccctcactcctcacatcaagcacctncacgatatctttttacagtgcctcacgaacgctaccgttaaccctgacgtncgaattgcgg

SEQ ID NO: 14379 - DNA, 363 bp, Glycine max
  unsure at all n locations
tctatgagtccccttgagaattgngtttctcttcttcttcttcttcttatatgggatccctctagcctttgcctgacactccttgacctcacgcaggtacacccaaatggctcctcctacaaaaggattagtctctggcgatccgtcatgctcctcataagcagcgcgaagccggcctatgagggcatcgaggctaccccatgcttgcctgagagggcaggcacacggtgcacgaggggtgggctggccaaagaagatgcaaccgtgcaagtggagcttggtttcccatattgatcgaggaccgaacgaaatccaacacatggttgaagttgcactgagagagtggaactggcggactctgat

SEQ ID NO: 14380 - DNA, 430 bp, Glycine max
  unsure at all n locations
ntctttatttgttttctccacaagcttcattgagaggcttgtagcacactccacacatcttctcaaaaatacccacgggcagatcttggaaaaatgtgttgcgcaattgtagaccacaattagagaagataccaccggttatgaaagcttggccatggttttacccatggaggctcctgtttctttctttaaaagcctcatttagaaggcttctctagaaacctcctctagaagcttcctcggggttctttgagaaactctctcaagaggttctttgagaagctacatccttatctatcccccctctattaactanatttacattcttaaaaataattacggatgaaaataacgcagcaaataatccgacatcagacataattacttatcatctatagatatatatatcacggtcgtacattgagcatcn

SEQ ID NO: 14381 - DNA, 430 bp, Glycine max
  unsure at all n locations
naaaacgttcgngatgctanatagtacacactccgnccataaaaggcctcaatattaccccgctattttctaacttccaggcaaaaagtaatggaggccggaatttcttataacctccggtttccattcggagccgtttcgtatattaccaggactaaaccggacatccagtataagtgtatgccttttcattatctcaagcttcgatatgaaattgacctctcgtatataatggactcactacacatccgaggcgaagtattttcgtctgaattgatacgacatccgatacattccgagcatactccaaaatacaacactctgcacgcatcaaatacaagaatggtgttaaatttctacagttacttttgcgttggaagttgaattaaacggactcaccgtcgtactgataagtacagtgtcagatcct

SEQ ID NO: 14382 - DNA, 431 bp, Glycine max
  unsure at all n locations
agctctggtttttcttcatgaagaaaccaagaatttctcacgagtggactgggctccaaatctaatattcactttggccctttaaaagatatcctcctccgttaaggttattattaatgaccagaattggactggtaagaattgtgaaggataccattgtggtggtaaatcattgaggttataacatgggtagctatagaactaacgaagattgagtttccaatgaaggaagtaaaatggagctcacaataggctcatccatgttagagcactntatggactntgatctggaggaagataggaataaagaggggttatggaagcaggaggcagatcgganagcacgacaaggtgttcaatcagagaagaaacatttctattcccactgngtaataaccagaagccccagtctagcaaaagtacactacata

SEQ ID NO: 14383 - DNA, 472 bp, Glycine max
  unsure at all n locations
nggctttttacttttgcgatggctntatgatactcagctagaagactnncncnngngggcaaggctgatgggaagcnattantttgttttnacgcgaagcacgacccaaagccgtttattacaaaatcctgtcatgtctagtacacgcaaacgggcttacaacacgtttccatacgatggcgcgacttcacttgcgtgatacattatgctaatgagaccctccgacgtcctccctatgcacatgccaaggatccaagccgttcccaacattacaatccccgtgcttcttacatcctatggcaagagacggggcgccacaaaggaggttcagtggggaagcgcgcccttaaacaacagagaatatattctaccatgcttctgcggttcaccaaggcgtgaaggcgagcactctccaacatatttcttccctgacacaagacaaatgtcgcgcattaaacatcttttgggaccg

SEQ ID NO: 14384 - DNA, 434 bp, Glycine max
  unsure at all n locations
tgcatgccagcctatatcttctaagcaacactctcactctggggagactccaaaacgatgccgttttgggccccactcaagtcaagcctctccaccaagctcctcaacataaccgtctcctctctctgcaaagcgaagcanatccccaatgccgaaacggcaatcgtcgacggcatacgactcggcgtgctccccgacgtggtcacctacaacaccctaatcgatgcgtactgtcgtttcgccacccttgatgtcgcttactccgttctcgcgcgaatgcacgacgccggcattccccctgacgttgtttcattcaataccctaatctccggcgctgtgagaaagtctctgttctcgaagtccctcgacctgttcgacgaaatgctcaaacgaggcatcaaccccgacgcatggagccacaacattctaatgaa

SEQ ID NO: 14385 - DNA, 329 bp, Glycine max
aaggattcaggaggattcaatggaggattcaggatatgcaagagctttagaaaaggcttcagttaggtaaaagaatttttccaagaaaagattgaccacacaaattgtccagaaaatttcagaatatctttaccgagtttactctttgtatagaatacataggtagtatcgttactaaagtcaaacatttataatgattacaaggagaatcgttccagggctgtatcgatacattgcttgtacgtcaaactatttcaaatagtgtattgataccagtggtctgaatgtggattcaacctcacatgagagtctaaccttataaaataact

SEQ ID NO: 14386 - DNA, 334 bp, Glycine max
  unsure at all n locations
ggggaccaacttttaatgctaattttgaatggggggaatcatggggcttggcaattatttattataatcttctaccttctaagttgtaattaaattatatattatntatatgatacacaaaacagcaccaagagcttcatctaaagtttttttttttccttttaaaataaagagttgaaatcttgatcaacttcatctttgtcgtttggtttcacttagtagcgatcctttcgaagccccttccttccatcagaaaacacaaatcccgataaaaaaaattgcatgttctaaagtgtgaacgtcaacactcagaagtacacaaatttcctcaccc

SEQ ID NO: 14387 - DNA, 457 bp, Glycine max
  unsure at all n locations
gggtgtgacctgaaccgccatgaaccagctccatggacactttttaataagcggggggacttttgaattatatatgtgnnagagcgccctctcaaatatggatctatatatatattctcacattctcttttatctcgcgctctaaatatattcttctcaaataataaataacaattttttcatatttttattttttatccttaaaatatggcgatacttttcaccaccagaaaaatacctattcattccaatgagtcttttaccaggtaaacgatctttatatttaccccaggcttatggataccagggataagttacccactttttccgcncttgagaaagggagaagaggaatgcttggatctgaacccatttgagaaaggtggagaggtgagacggagagaaaaatgatctgaaaacacaaaagtgataactgatttcatgtnnaaaagagaga

SEQ ID NO: 14388 - DNA, 295 bp, Glycine max
  unsure at all n locations
agcttatttatgtatcatcggacagggattngatggaggactgttatgattgagtcttctttctatatataattacggctgcgcattatatcgatattcaatcatatttccgctgaaccgatatttcgttcaatcaatccttggacacatggtgaattttgagcacttcaacagcagctcgaaagtgaatcatctggcgactttcaacactccggtactgatggcacaccaatcactagaacgaagtttactacggacgctgcacagagggacaagatcagtgatccctacgatc

SEQ ID NO: 14389 - DNA, 391 bp, Glycine max
  unsure at all n locations
aatcatgaaggaggaaatacatgatttaacagtaatatttgaaggagtgtaagttatgagggggaaaagggaaaaataagaaaagaaaagcagcacaaagtaatagtataaaaacaaagcaagtagcaatcgagaactcaacaaatcacattatatttcaataccaatcctagatgttggggttttacataagactcctatagtacatttatccaggatttcaattatgaaagtggaagcaccagtgagaacagtacatttcaaaggagcgtaagttatgagctaaaggaanaaaattaacacggtaatagtatatacacacaaagaaagttgctatgaagaactcagcaaatcatattagttctcaataccaatgcccgtgtgaatatta

SEQ ID NO: 14390 - DNA, 428 bp, Glycine max
  unsure at all n locations
agcttgatgattatggggtacccatcacatgtggtactaggtggcgatcgggcgatggtgcacaacaagttttccacatccacaaagcgcgcataaacccaccatcccctgttgcccacctccatatgagctcacgtactcccacgtagcccatatactcgtttctctcaacaccgggtccccatcaatcctcccaagcttccacaacatccaagcaaaacgacattcaaaccgcacaagctatcacagccaagcaaaacagagcataggcagataactctgccaaaacaccaaccaaatcacagcttttctcacttatagaccccagtcacaatatcttcgatcctgttcattaaccgctggatcgactcgaanattgtataggaagtctttagtacatacgcctacattgtgaccgttgggatcta

SEQ ID NO: 14391 - DNA, 388 bp, Glycine max
  unsure at all n locations
ctccatgtttttaaaaggaacagctaaggaatatagaagaatgataaatgcttcagcaggaagatactatgtcaatgggaccacaacaaaagtaaagaaaattatagaagatgtagcagctagtgaacgaggccgtgattgcaaccgcacctctccaaaggacattcccaaataagataccgaagatgaatcccttaaacaacaaacacaaatgaaagctatgatggagagcataaccaacagcatagtnaaacaacttcaaccaatgatacccccaaaacaatcagttctcccatgtgaagagtgtggaggtaaccaccatacctcttactgtatgaaggaagtagtcaaggagaccacattcatgagagaacagactacaaaatta

SEQ ID NO: 14392 - DNA, 421 bp, Glycine max
  unsure at all n locations
agcttcttttcaattntctataaatagggggagaagtgaagtagaaaagggttcagccccttatgcacttctctctttctcaaaatagctgaggaaaattaattccgtgaaaaaaatccaagccaaagcgcttccgtaacgtttccgtgagtgatttcgcgaaggttttcgaccgttctttgaccttcttcattcgttcttcatcgttcttcagtcttcagtgggtaagtacctcaaaccaagctttttaattcattctatgtacccgtggtggtccacatttggtttcatgtatttttattctcgttgtcatttactttttatacccccttttgacgtgcttaagccatttatttaagtcatttctcgcttaatctaaaaataaaataaatctccaccgatcgtttgaattgtatcattc

SEQ ID NO: 14393 - DNA, 408 bp, Glycine max
ctcaactaagattacgctatgcagaagctgtaatttgtctaatgtctatgctcgagccaaagcttcttattagaaacttttgtgaggtttatagatacaatacaatttacaaacgtttgtatagaataagttacttaaagtactgacacgtatcctaatgtgatatcaatactccaccaatatgaatatgagaagtatccaagcctttaaaaaaaatagaatgcttgtgctccttacataagaggcaaagtgaacaggatgaagcatcttgtatagaacttttggagtgtgtctctaaatcaaagagacatttagatcgtgatcttgataatcctaaaccatgcaagtctagaaagtcaatagttctagttcattattttcttgccagtacagcaagatctcattttg

SEQ ID NO: 14394 - DNA, 393 bp, Glycine max
agcttttgtattattcaagaagtgccttatgaatactcccgtgcttatgccaccagtacctggaaggcctctcattttgtacatgacaatcttggacgagtcaatggggtgtatgttggggcaacatgacgaatccggaaagaaagagcgcgctgtttactacctgagtaagaagttcacgacctgtgaaatgaattactcgttgctcgaaagaacgtgttgagctttagtatgggcatcccatcgcctaaggcagtacatgctgagccatactacctggttgatatccaagatggacccggctaagtacatctttgagaatccatctctcacgggacgaatcgcccggcggcaagtcctgctatccgaatttgatatagtcgacgtcacaca

SEQ ID NO: 14395 - DNA, 404 bp, Glycine max
  unsure at all n locations
attgaaatcaaactntgccactggtaatagactggttttcttattaccaaaaccatgtaattgattacacagagcattttatgaaaagatgtggctcttcacaattgaatttgaatttcaacattcaaatacactggtaatcaattaccaatatattataatcgattacaccatttaaaaaaacaattggaacggtgcaaatttagctaaaagcttttgaaatcaaactgtgccactggtaatcgattaccacagagtaaaaactctggtaacttagaaaaatttgagaaaaaactcttttgaaaaacaaaattgtgctatgtttgaactttgaaaaatcttttcaatacttcccttgtgaagacttcttgatntcttctgatgaatcttgaattcatcttctc

SEQ ID NO: 14396 - DNA, 422 bp, Glycine max
  unsure at all n locations
agcttgtttcttttggtgcatagaatgcaggcaaaaaaaaaaatagtaagtgtcatgaatctatgacataagcttcaaccaattaacattgtttgtatgacaactgttgtagttggacagcaatcacacagtttgtccaccatggaatgctntatgttcctattggttatagttttggtatgctttatgttcctattggttatagctttggtgctggaatgttcaatttggagtccacataaggaggaactctatatggtgctggagtttttgctggagatggtacaagacaagcaagtgaaatggagctggagctcgcagagtatcatggcaagtatatatgaaattagcccatanaagctaggctggattctgtgattaatnatccattaagccctcctagctaggttagcattctagtc

SEQ ID NO: 14397 - DNA, 410 bp, Glycine max
  unsure at all n locations
ntaagtntcacggagtntgatattggttgtgcattcttatatttgcaatctatttcacaacaattatctcacttttccttgaatcgtagctaagtttgcccttgtttaagttagggaatatatataattagttagatattttcatatagttaaaatttaggaaatttattagcttttacatgtttttacagtgatttagtcattttagtgcacctggaaagaaattaagggtttggaagtgaaaattgatcactcaatgagttgccaagtagcttaactaggaagccatattataagaagacacgtggtagctggtggctatgcgagaagtctatctctcttagcagatttctcttgaagaggccatgtcaacaacatcaaggcttgttgagtgaagcaacctctttgga

SEQ ID NO: 14398 - DNA, 410 bp, Glycine max
  unsure at all n locations
ttcttattttgtagcagttccagggaccatcgacgaacgggcgatcaatacanaaagaatactcattccatgggaaaggaatgaaaatcacacactttgcctcaactctgctaaagcaattggatgtacagtggtcaacattggcactcatgacttcattgaaagaagggtatgtatgtaagccttctagtttccacccataaaagcagaattattgtgggcatgtacactgcagaaccacaaaatttaagatttaatttaatttataaatgaaatctggtcagatttgattatttctcgatcaaagtaattctcaatcaagttacccctgtttntaaatgattccgaatgctggtaaagtatctctatagcatgctacatatttatacagtcaaagcctttctctattc

SEQ ID NO: 14399 - DNA, 273 bp, Glycine max
gtgtggtgcggaggaccgaatctcggttataatattggttgttgcgtggggtcagagaagtgacacgaatccgttatcagcgctggttcaggactccgtgaagcactccgcgaagaataaggtggttccgttccataagaaattgcccaaatggtggccaactgtaatcaattccaacgcttctattttttacgccgatgaacatgaggaatacaagagggaggcttatggagtggttcgaggtttgttttttctttcctcagatacatttag

SEQ ID NO: 14400 - DNA, 424 bp, Glycine max
  unsure at all n locations
agcttatatgaagaaattaaccggttgtgagacaacatacactntgagtatgaacctacgcataaacattcattttctttatgtaaaaaactctntataaatgtctaaataactcctcaaaataactggattatcttatgagaaataactaagggctaagattgtatattcgtttgtaagacaattaanagagctagtcattatgcatacaaacaacaaatttgtttgatttatataagggctaataagattgtatatttttttgtaagacgattaaaagctagtcattgtacaaacagacaacanattcgtttgatttatatagaccccacgatggcttgttaagacaaataatatcggggtttaataagattggggtggagtttgtcttggtaagtaagaagtggtggtgacaaaatactta

SEQ ID NO: 14401 - DNA, 339 bp, Glycine max
  unsure at all n locations
tgtgcagagttgtgagcaacanagggatctaaaaaatatattctaaaaattaataatcaaatagtattgataaaaaaaatgtgcataaatcaagtacaaatccttcaaaacaaagtaagatcaaatagtaattntagcagaaaagagaaaaagaagcnaaaaaaaaaagataagcaactaaagttagaagctaaacgtaagaacaaaaccaaaaccattggaatttaaggtgtgtgtgagagaactgagccgaaggaattgtgacctatgaagaacaaatcanagtgaaaatgcatagaagagtgtcattttttttaaactaagaaatatatactttac

SEQ ID NO: 14402 - DNA, 402 bp, Glycine max
ctccaaacctatatacatccactcactctaacaacaatctcacagcctgtactttatttgtatttactaataacttatctttaaaattaattaagtctaatcatgagagaattaaaagatcttaatcaagtgaatttattgctattttgtgattgaattttaaatatcaatttaactaatacctatactatgttgcataaagataatgtagatatgtactgacttatataggcgaacaatgcaatttgtgtgatgattaaagtgtgattaatagtaattaatcataatacctttgtggaggattgagttcgaagaggatagaaatggaaaagcagattgagaagatgtggccttccttggtaaagtgagagaagtggccaatatcataacttcaataacaaa

SEQ ID NO: 14403 - DNA, 433 bp, Glycine max
  unsure at all n locations
gcatatgtactntaagtgagagagaagatataaattatttgtaataataattaatattacgagtaaataacatatacaaagatgattaatttttacataatcaatcacatattatcatataatgtaaattgattgatagtaataataaaaatataaaattcatattaattatgatttaagttctaaacattatagatgatatgataaaaaaaatgtgtataaaaatgagaaattaagcaataatgagagaaaataaaattgaataatgaaagagagaaagagtgtgaccgtcacagcttccaatagattggtgttgtcgtgcaagtacttgaggacccatgttagaacacttgctgtggtgtcatgtgcagcaaagatgacaccaatgagattatcaacaacttgagaatctgtgtgctgctgatagtacatc

SEQ ID NO: 14404 - DNA, 383 bp, Glycine max
  unsure at all n locations
aatccaaggggccttttttccttgcctgaactctcttttaatattggtggaagaaaactcggccctgcgtactcacagctttgctcattaattgtgggtgcttgttttcgcactgagcgtgtattgtgctggacctttttcaactatgctctattgttcttagatgataggcttttaatccatccctttcatatctgcaagcccatgaatatgaaaaacatcagttcttaacaattaagcatgaataattgttaaattataactttacaggatattttcattatatgtttattataanaaacatatcatatntacctgttttaactagtgacttatagccaaagaagatgaaataactgaacttagttcatttccactgcact

SEQ ID NO: 14405 - DNA, 347 bp, Glycine max
  unsure at all n locations
tttttttatttcttagtctatcgtaaagaagcttgccttgtgaagccattgtggaactagaggtgtgtataactataggccaaataataatttgcgcgctggaaaaatatggatggtaatgccttaattgtttgttaatattcacgggattgtgacgtcttgtgtaanagtactttttctatgatgtccctttgatatgtataacctgtaactgaaagcaataacacgtgagaactaactcggtgcaattaattgagataatggtgctggaatttataagtaaagcccatctaatggatcattgataaattttgaaaactctaaaaatatatctgaactaacatatg

SEQ ID NO: 14406 - DNA, 411 bp, Glycine max
  unsure at all n locations
aacctactcagacagcagatgaggcactntgccaacatcggtccataaccttagcgaggctggcattgtaacatcatcatgatatgatacaacacaccgagtgactagattgacataacggagacacctaatggtatctaattgcaaagaataacacttgcctaacgggctgtaaccctaccttcggcacctcccacactatacatcgtgagctaagatgtgtgggagaacggctgatcggccaagcgcaccaagatgcaatctccgaaaaccacatgattcgaatcgaatatgatgccnggcacgagtgcgcctgagtgctataatctacaatctctatacgaactacgcactcatctgggatcttagagaaacttcttactagatgttcacaagctaggctattgaatt

SEQ ID NO: 14407 - DNA, 139 bp, Glycine max
gatcactatcaatcaataagaaatagacctagatatttattttagacgtgagcatagcacctctaatccgatataagcgtgaaatcttattgttagtagacagagtatcgcatcatgcaatctaattcctgtattgtac

SEQ ID NO: 14408 - DNA, 391 bp, Glycine max
  unsure at all n locations
gaaaattactcaaagaaaattgcaaaaccttactgttataagtaatagaagcaaactgcattgagttataaattacgaaaaaatactatagttcagaacaaaaatgctgcagtcaacatcatctataatcacattatctataagattggttacctgaggttacctgtaacagttgcatattaacatcccgcggaacaccactcagcaaggcagaaatgttcccactcccaccccctccttttgaacctgccaagtcaaaagcatcaataaagtaagccacgagccatgacccttccaacataacatataatagaaaatcagagtaaactctcattctagttccgagattgcaagtgtaggtcattntagttctnttacaaaatctcatatt

SEQ ID NO: 14409 - DNA, 382 bp, Glycine max
cacagcttcagttgttgatctgtaaccaaaaaggtacgtgatatatgcttgtttgattaggtgctacatttagacgagagcttctccaagatcagtatttgtttatcaaagtaccagtgacctccaacatatattctttgcacatccattctgtggaacaactggaagagatacacacccccttctccttcatgatattatggcttcgtataatactattgttttcatcagttaggctgaaaacaaaaccatcatcttcttcatctatcaacatgaaaccctacattaccttctccatgttgtcactctctcaaaacctcaccgtgtgtcactcagaactctcagtggattctctcactcaaactcaaagaacagaacagat

SEQ ID NO: 14410 - DNA, 381 bp, Glycine max
atgatctagagaatgcctgttaccatctgttcggacatgattaagtttttaacataatagtcatgcttgtattggtttaagacaattgtgcaacaattactttattaactactacattatcaattaaccattagccgttttacccaagctcaagcaagcctatcacaacctttcttaaatgttagccattgatgttacgaccattcaactaactggataaaatttatttaccaattaccattactggattgataatagggtaccaaacatgattgttagcacaaaatattgcttgctctttagtaattggatgttcattgttaacagataatatctgatattgcctctgtgcccagtcttatttctctctagcgagtatat

SEQ ID NO: 14411 - DNA, 380 bp, Glycine max
  unsure at all n locations
acatgacttacaagcatgatctagaggtagcattagtcacggggtagacattagaagctacacatgacttaaaattcatcacaagatgcaatgtataaacaacaatgaagacatttgtgtctacatagtcaagaagcacacaccagaagttgtgacgaacaaagtcatgcactagtgtactaatgcaatatcatgacaaactcctctaatatcaatgatcaaatatgaagaacagagctagtcacgtactactattactatattaataagttaaccgtgagagacaaaaatgagtctctaacatctgcaatgttaacaaaaggatctacaccattatgtagaagactcactnttctaaaagagtagcaaaactcatgact

SEQ ID NO: 14412 - DNA, 393 bp, Glycine max
agcttgttgcatcgtatatgcgagacagagaccaacgtgttagctatcatcgccgagtaccaagatgagttaggtctagccacggcccacgagcatacaatcgcggatgagtatgctcaagtatatgcggaaaaagacgctagaggaagggtaatcgactctttacaccaagaggcaaccatgtggatggatcggagggctcttaccttgaacgggagtcaagaacttccccgattgtgagccaaggccaatgcgatggcagacacctactccgaccgcgaagagatacatgggctgctcggctattgtcagcgtatgatagacttaatggcccacataatcagagatcgacaggaaacttgtatgggctctcagaccgtgactagatatgac

SEQ ID NO: 14413 - DNA, 394 bp, Glycine max
  unsure at all n locations
attcaaatttcaagtctgaagagtcacaactcttcataaactaactgtgtaatcgattaccacatttatgtaatcgattaccactaaggaattttcgaaaataactcccaagaatcacaaccgttcaagaagttcttgaatgaccatcaaaggcctataaataggtgacttgtgatacgaaattcattagagttntttttaataacattgtcttatcctctcaaaaccaaattgtcttatcactctcaaaatattccttggccaagatactttcaaattcaataaggaatcttgatcgatcttcaattgtaatatgcttctcttaaagagagaaaattcttcttcttcttattcacagagatctgtttaagagaccaatggtctcttaagttgt

SEQ ID NO: 14414 - DNA, 434 bp, Glycine max
  unsure at all n locations
agctttcatgcatttgtagtacgctttcttgatctgccctggagtggcatctggaagctggtgaaatggatcaaccaatcattaaacatacactatacagtatgatattaatatatatcttgataataatgttctctctcttccctcaattataacactactctaaaagaagggaaggagggaaagttcaccggttcgatcccaactaataaattaacgattaacatttattaataataaaaaaaaattatagcattactctcacagccacaattactctagatgtaactttcgaattagttgttacaaaattagagtaagtaaaaaaagttngccagtatcatgtattgtattaaattcttcatttgtggttaactgattgagcagcttggatgggttattgtaaatcttgtgatactntcttcaattcatat

SEQ ID NO: 14415 - DNA, 433 bp, Glycine max
  unsure at all n locations
tggccaaatgcaacacaatttgttcccaataaatccatatctctttatgatcaatcataagagcattggttagggacctcatccaatgaaagtattcaactnttggattgatgaaacgagctttcttgactttgtaaggaaggcatacaaatcctacaatgttcaaggatgaggtgcttatgtggtcaaagagaaactcaagctcctaaaaaaaatcatcaataagtggagtgtggacaaggttgggagtcatcaaacacaagtcgacaagttggtggccaatataacttctttggatgttggaagaatttcatangagaaggtgtgtgaaagggaagacatgctcaanggagtttggaagaatgcaagaatccaagaattaattaatctgcanaagtttatgcttaagtggccaatataactttccttggat

SEQ ID NO: 14416 - DNA, 423 bp, Glycine max
  unsure at all n locations
agcttggttcgaggtacttacccgttgaagatcgaagaacgatgaagaacgtcgaagaacggttgaaacctttgcgaaattcttcacggaaaacgttacggaaacgtttcggaagcgcctcggcttagattttcttcacggaaacgattnttccaagcaaattcgaaagagatagaagtgccaaaggggctgaaccccttccttcttcacttcctcccctatttatagtaaaataggggaggtggttgccgcccagctcgcccaggcgagccaggttgcttcctccagaagcaacagccttctggaggaatattctggagggcccaagtgggcctgggtgctatttgcacccccatttttactaagtacaccctcctctgcctttnttggtgattcttttttcgtanagttacggaaacttac

SEQ ID NO: 14417 - DNA, 413 bp, Glycine max
  unsure at all n locations
cctcgaactcgctaagctcatataacttagacgaatttttttatttntgccttgcgctaagcgcctcacttttgcactaagcgttattcattgcggtttgtataaagctaagcgagacttgctcgctaagcccaatagcgtctagtagtcgagtcgcgctaagcgagcacctctcgctaagcgcatgtttaaaactgtttttccctgagctaagagagtgcctatctcgctaagccaattatgcagaaaagattttctgtcataactcgctaagcctatgagttatttctcataaggcacgctaagcgagcatgatctcgttgagcgcccactgtgtttntcagtttttaatgcatgctttcaatttaaataaaagttagctaatatagttntaatggttcttttgtcacaaa

SEQ ID NO: 14418 - DNA, 401 bp, Glycine max
agcttattttatttcaattatgcgacgacgagaaaacaaaacacaattaaagggatgaaattcatactttaataagtttatgggatgaaaaatatgttttaatcattattttattaaaaacttaattatatcttatattctaaggtttaatttgatccctcaatttttaaaatgtttaatttgatctttcaattatttagaatgaaacaactatatcttttgcatcatatctcttaattatgtggtgaaaatagattttttttttattacttgtcaacacaattgatgtaaaacattatatttctaaaattaattgtttggccaccgatgttaaaagatatcttcaaaactttaccaaatctagccttttacatcgattgtcaagcaaccgatttttaaaa

SEQ ID NO: 14419 - DNA, 382 bp, Glycine max
  unsure at all n locations
ntgagccacaatcctaactcaccatagaccttgacttantgtgatatatgtcaatccttaccctcggaagcaaaaaagaagagaaggaaaatttccaatcaaagaaaaaaaagagaaggataatttccaatcaaagagaaagtaaaaaaaagagagaaggaaaatttccaatcaaaggaaaaaagagaggaaaggaaattcccaatcaaagagtgggagaaagcgaaaagaaaagaaacaaaattcccaaccaaagagtgggagaaagtaaaaggaaggaaagaaagctcctgatcaaggatcgaaagaaatcanaagaaatgtgcagaaaggtctttggaccagacaatatctgaacagtacagaattgtcaccaaataaa

SEQ ID NO: 14420 - DNA, 396 bp, Glycine max
agctttatttgttttggaatcaaataaagaaccaaaaatagtctcatattggaaaaattgttcatatcgtgtctcaatagaattaattaattgatctaatatgtataaaaaatactcgatacgaacagattcttcacgtgaatgtgtgatctcattactaatattttcatcaaaatgagattttctatgaattttacgtttttcacaaaattttggctctatatccatttcgatagccattttttctgtggattctaaagtcgatgcaaacccgtcttccctataatgttttatataagcgataagaccttttaaatgatctatagcaacatctatatgcatatctttggattgtacaatcctgctaacagaaattgcaacaaacaacatatcata

SEQ ID NO: 14421 - DNA, 339 bp, Glycine max
  unsure at all n locations
ccctgatccgaatagncgaggttggtttctccgctatatttatttggctgggaaaaattcaatgcagggcatatcatttccaattttctggttctaaaaccaatgttcaaaattgattctggaattagcaacaatacatgtctccacttgtatgaaatgtgacaaggcaatttgatattaagacgtaggaatgcaatttgagaaggctaggtgcttgagatgttaatgtgagacgcgactttgattgcacatacttaggcttatatctacaaggaagactatgataactttatttattttttgggngagtcaccttctaactctatgctggcttaagga

SEQ ID NO: 14422 - DNA, 426 bp, Glycine max
  unsure at all n locations
atctttcattattgaaatcaggtgcagccatctccctaagagtcctcttacgaagtggaggttgagtcatgttctcagtatgaaaattactagtcgaatgctcaaaatcagaatattcagaatcaccagcaacagaatactcaaaatgctcaaaatgcacagaatgaccaagatgcacactatgcctaactaatctatgaaaggttctatctattccaggatcaaaggattgtaaatcacctggattacccctagtcatgcactatatgcagcaaatcatgtgtntctcagacaagcaccagcggagggttaaaactacaactatagtaaaacgatatccatatgagctgaaattctgtgatcaacaccctataataatgaaaagatagcacaaaaattttcagactaaaattcaaagtctaacta

SEQ ID NO: 14423 - DNA, 329 bp, Glycine max
cccatgttgacacagatatcctagctactatatatactaatctttcttcatgtgggtgcttaactaaatatatatgtatttctgacaaatcacacattagtatgaaaatgaatgatagtggtacacaagttccagtacaatagttgaaattcaataggaggttggcaaattcataactcagaaatagagaaaacaaaaatcttatcaaaaggtaagggcaatctgattcaggcattcgagtcaagccaatatgaatattaattttcacctgtagctaatacacagaacataacaggaataatagcatatactgagatcgattactttac

SEQ ID NO: 14424 - DNA, 346 bp, Glycine max
  unsure at all n locations
atcttgttgtccgcgattgacaaagggtgcagaagacgacgttagtctctgcatgctatcatgcgttgactgttagcgatagcaaaagaatgtttatactaataaccacttgggtatttctgccggccccctaacttcacgacttattaccgacagagtttgtaagcgtggaagacgacgtatatctccgcatgtgaacgagcttgttggccgcgattgacaaatggtgcagaagacgacatatgttttttcatggtatcatgcattgagtcttacagatagcaaaagaatgtttatagggataaccacttgngtatttacgccgacccccaacatctcgagtttg

SEQ ID NO: 14425 - DNA, 331 bp, Glycine max
  unsure at all n locations
tcaagaaaaagatggcctcagcaaattccttatttccggaatggaatnctatcaatagacctccaatctttaatggagagggttaccactactggaaaacccgaatgcaaatttttatcgaggcaatagatctaaatatctgggaagccatagaaatagggccttatatacccaccacagtagaaagagtttcaatagatggtagttcatcaagtgaaagcataaccatagaaaaatctaaagataaatggtctgaagaggatagaaaacgagtacaatacaacttaaaagctcaaaacataataacatctgccctaagaatggatgaata

SEQ ID NO: 14426 - DNA, 337 bp, Glycine max
  unsure at all n locations
cttttcacatgaatgtccgattcgggcgcataatatgtcgagaagctcgaaattgaacaacggaagctcttgagaaattcaaatggtcataacttttcacacggatgtccgattcaggcttataatatatcgatacgctcgaaattaaacatcagaaactctcgcgaaatttaaatggtcataacttttcacacggatgtccaattcgggcgcataatatgtcgagaggctcgaaattgaacaacggaagctctcgtgagattcanatggtcataactcttcacatggatgtgcgattcaggcgcataatatgtcgagaggctcgaaattgaacaac

SEQ ID NO: 14427 - DNA, 395 bp, Glycine max
  unsure at all n locations
tcggacatccggtgnaagttatgaccattagaatttctcaagagcttccgntggtcaatttcgagcgtctcgacatattatgcgcccgaatcggacatccgtgtgaaaagtcatgatcatttgaatntctcgagagtttccgatgtttaatttcgagcgtatcgatatattataagcttgaatcggacatccgtgtgaaaagttatgaccatttgaatgtctcaagagcttccgttgttcaatttcgagcctctcgacatattatgcgcccgaatcggacatccgtgtgaaaagttatgatcatttgaatttctcgagagtttccgatgtttaatttcgagcgtatcgatatattataaccctgaatcgtacctccgtgtgacaagttatgacca

SEQ ID NO: 14428 - DNA, 357 bp, Glycine max
  unsure at all n locations
accaaagatgatgacaaaaagcccaagagaatgatttcaagattgactcaacaagtttcaagaatcaagagaagtttgatttcaagattcaagagaagatgaattcaagattcaagagaagaaatcaagaagacttcacaagggaagtattgaaaagatttttcaaaaaacaaacatagcacagttttttttttcaaaacagtttttctcanaattttctaagctaccagagtttttactctctggtaatcgattactagtttcctgtaatcgattaccagtggcaaagtttgatttcaaaagttttcaactgaatntgcaatgttccaattaatttcaaaatggtgtaatcgatta

SEQ ID NO: 14429 - DNA, 379 bp, Glycine max
  unsure at all n locations
ttcctaactagatgatatagatgatggatgttaatgtgtncaaccctacaatgccccaaccatgaatcatcatctatgttactcaccaagcaacttagctcatgaaaagatgcatgctcaacattcagcatataaatattacctattctcttaccaatgtggacaactttaccagatatggcttcacttataagatagcaattgctgtcaaactcaatcttgaaacctctatcgcaaagttgactaatgtttagaaggttatgctttagtgcatccatatgtagcacattctttatctgagggttgtgtaaatccctatatttccttccccagttatatttcctttggtattgtctacaaacatgacatatgatccatc

SEQ ID NO: 14430 - DNA, 405 bp, Glycine max
  unsure at all n locations
cttgatattgagcgtgatgatcaaaaagggggagaatgtggatcatgcattgttttgatgatgttgaaacaaaatcacttgattgtcatcatcaataagtgggagaatgtgaatgtatgaatacatgaattttgatgatgccaaagaagaatcaaacaaggccacttcaaaggataagcatttgcttcaagattaattcaagattgcttcaacaaacaaagccttgtttcaagattcactaaagttcaagccttgcctcnaaacaaagggtttcaaggtcatgcaacgctctggttattgattaccaggaagtgtaatcgattaccataagggaagaatgaaatagagctgttgaagagggtntgaatttgaattttgaacatgtaaccgattaccatatgtctg

SEQ ID NO: 14431 - DNA, 439 bp, Glycine max
  unsure at all n locations
gcatatttccctacgaacgttcacttgcacaagacattctatttctaagananatgcacccatatacaatcaaggtagcttcattacctacattatttacacgtacttccaaggtgtatttgttatttacatcacacacgcctccttggctaaatttacatacatgcatactcaaagcattntggggtaccaaaaattgcacatgcgctcatcttggtatttctaatacctatacatatacaaacttcatgatgaatcttgactacctacgcgataaggtgctacatntcatgcattttttttcaaagttttgctacctaaagccacatgcaaattcaagcatatgttcctgtgctgactacaattgtattcaaactacaacgtatatactttttgtgaatatgttttcttacataacatgcacatattatattatttt

SEQ ID NO: 14432 - DNA, 431 bp, Glycine max
ctgtctggcgtttatacatcagcgcacacacgagtgaggagtcaggatgattcacatattcgcctgacctgtacgacagcgagaggcgcgctatgccatctgcactgcccgcacaacattgctgagataccgtgccgcccaatcctgctttgatgccaaagcttgctgcatggcggatagctgcctaaacggccttgctcagggggtcctggacatattcgaaattatcccaatccgccttcggtcaggtgatagcggtggctacgtcgatcaaactgataacatgaatccaactgcttacgaccgcaccgaagaatatgtctctggcgacatttgaaaggaaaagctgtgagacgggatcgcggttagagcatgacatccggctgtgccctgtaagcctggggacgcggcgcaggactcttggaaaaccc

SEQ ID NO: 14433 - DNA, 159 bp, Glycine max
  unsure at all n locations
cacactgactaatattcctaactgtctctgctgtcagacgttcttccaactcaccaaacgatacatcttntttccctctcaatgacccaatgattatctatctcacttcactttcttctcgcttacttcccctcacactcttacgtgcttcatcactta

SEQ ID NO: 14434 - DNA, 396 bp, Glycine max
ccaatgaaaggatcgatgtgggtctgaaaaaaggcaaatttagtcatcctgcttggacgaatgagaaaactggggcaaatgaagagggtgagaaagagggagaaacccatgctgtgactgccattcctatacgaccaagtttcccaccaacccaacaatgtcattactcagccaataacaaacctcttccttacccaccgcccagttatccacaaaggccatccctaaatcaaccacaaagcctgtctaccgcacttccaatgacgaagaccacctttagcacaaaccaaataacaccaacaaataggaattttgcagcaaatagcctgtagggttcaccccaaattccgttgtcatatgctaaacttgatcccatatccactcaataattcaatg

SEQ ID NO: 14435 - DNA, 431 bp, Glycine max
  unsure at all n locations
ctcgcccaggcgagcagggttgcttcctccttaacttcagccttctggaggaatcatctggagggcccaagtgggcctggttgctatttgcacccccatttttactaagtacaccccctgcctttttttggtgattcctttttcgtaaagttacggaaacttacgaatttcgtaacgatacttgttttcttttcgtaatgttacggaaccttgcggattacataatcatccccttttttgacttacggaatgttacggaacctcactaattgtgcatcgatgcttccatttgatttccggtgtgtcacggaaccttacggattgtgcatcaatattntctttngttttctggcatgtcctggaatttcacgaattgcctaatgatgggtgccaagcacctaacaaggaccaaacaanagtcgcatgtcatc

SEQ ID NO: 14436 - DNA, 399 bp, Glycine max
aacgagacatcgggagcgattcaagatatgacgagcggtcatccctattgactgatttcgcgagtgactgccgcattattaggaatcaagacaagtatgattccacgattcctgaggagatgatttcatgattctagatattaactcaggaagacttcccaaggtaattattgtatcgatcgttcacataatctacatagcacagtgtctttatttataactggtcttatcatatctctctaaggtcccatattgtttactatctggtatagatgactagatcctgtatagatttccatgggaatattctgtgtctaacgttcaactgattccaatgttgccactttttataatgggtgacattgaccaatgtagttttcgatacattattgccgacat

SEQ ID NO: 14437 - DNA, 435 bp, Glycine max
  unsure at all n locations
tctctataaaggtctcaatttgcttgtttaagtgcttgttntgagctagtaatgcatcttgagatgtgagctcaacaagactcttctttgtaggtttgtaagctcattcgtgaaagatggcatgatcactgattgccatattntccattaactccatagcttcatcaacggtctttaatttaatttttctgccagcggatgcatcaagaagctccttggaatggggtcgcaagccatcaatgaatatatttaactgaacaggctcactgaacccgtgagtaagagtcttttggagtaaaacatggaagcgagcaagagcttcacttaatgattcatcanggaattgatggaatgatgagatntccaccttccctttagcaatcttggactcttgaaaatatttatttaggaagatctccaccatatcttcccatg

SEQ ID NO: 14438 - DNA, 520 bp, Glycine max
  unsure at all n locations
aggagtcgtttagcatcactacacanncntnnannacnagcnccngaggatcttntnnagacgagctgcaagcatgcatgcttatttatcttttctcactaatctgctccatgcgtggactattacaacctgtacctctgcaccaccaccatgtgcggaaatagtactcaatctactgattaacaacatatattacagcatatatattataatgaagcacactgtcagatgatagatagactagtatactactacctctgggacggtatatgaactagaagctcgaagctcgctgtctagaaataggtgagacgatttcatactctgccccactccaacaacagctgcttcgtacgctcattattttcattcatcatattactgagcgacccgcttggcacttgctgacccgtgccatgtgcattacttctgagactcaccttgtgcgaatgagctcggagacacaaaaacagacaccctcctataatataccccacgatccgctgaggccctgcttctg

SEQ ID NO: 14439 - DNA, 376 bp, Glycine max
ttatattcatgacgatcgagagatttgtttttttgatgagttatgaattattggatatatcataaaaaaggtgtgagaccatgagagctctaaaataatatctgaatatacttacacgtacattatatatattagttcttttttcattgtcatacattttatattatattatacacggggtttaaactttatgctaaatcaacttctattattaattttacaaatccataaaattggcagaaaagctacgtcatctagttaacgaagttttttatgcttcaaggaatttgaaattcactatatagacaggcctgatcaattgtcattagttatttaatgtcacgtaaacaaattaattaattaaacaaaacgaatg

SEQ ID NO: 14440 - DNA, 428 bp, Glycine max
agcttgtctttggtttagacatgatttatatatgatttaggacttgtaggattcaatttgggcaaaattggatgaaggcaagagtggtttttgaaatctgcactttatgcagaattttgctgtggaaatgtgcagcagaattttgcataagtgcagaaaaatgcttatgtatggttggctgtggaaagggtagtgcacatggggttctggacattttttagtagatcccaacggtcaaaaggtaggcttatgtactagagacttccagtaaaattttcgagtcgatccaacggttaacgacttgcaaagaagaaaaggttactgggatatttgtatgtgaaaagctgtgattttggtatgtgttttaagcagagttttctgcctttgccctgttttgcttggttttgttagcttgtgatgatgggatg

SEQ ID NO: 14441 - DNA, 231 bp, Glycine max
cccgttgaagatcgaggaactatgtttatcgagtgacgaacgtccaagaacgggtgaaacctttgcgaaattcctcacggaaaacgttacggaaacgtttcggaagcgcctcagcttatattctcttcacggaaacaatgtttccaagcaaattctaaagagagagaagtgccaaaggggctgaacccctttcttcttcacttcctcccctatttatagcaaaatagggga

SEQ ID NO: 14442 - DNA, 411 bp, Glycine max
  unsure at all n locations
agcctatcttttatatgaaacacccccaaaaattctcaaatgtgaaagttttaccttctttcctgaccatacttctttgggaagctgataattcanaggaactgatggtcctctattgatgagatatgttgttgtgtttattgcttctgcccagaatgttttatgcaagccagattggatccacaaacaccccgctctcttgttcaaggttctattcatcctttctacaacaccattttgctcaggtgttcctagtattggcttaataattctgattccatgttctgaacaaaagtccttanaatcctgactatcatactctctgtcattgtcagattttagactnttaacctttagacctgtntgattttcaacttctgttgtccacttttaaacacagaaaacacatca

SEQ ID NO: 14443 - DNA, 386 bp, Glycine max
  unsure at all n locations
atcttgatggttttgaagatggttattaatgaaacaaagataaatggagaaaaagtgcaatttaaatatttctgatttaggaaaagaacagggatacttctacataatgaaaattcaccaaatctgtatatgtgctataaaaacatgcctttttagtctttagtgacagtaatngttttgttcttacctttctggtttttgtcatgcgaatntgagtttgtttgacttgccctcattattgcctaatgctatctggactttcagggagagtggatcttatctngaaaagatgctngcaacaactacaaattacttcatctttatatgtatgccgcgaagtgtgaaaatcttggccattcaaaggatccgttcttgactcaagtttc

SEQ ID NO: 14444 - DNA, 323 bp, Glycine max
  unsure at all n locations
caactaaaagtgcaacacggatactcttcagatatcaagagccttgcatccctcaataatactatattggcgagcctgtagtcgtatgattgtcacatgttaatgcaccaactattggatgtagcgattagcgatatcttgcctgacatagctatggttgccataactcgtgtgtgctcttctttaatgctatntgtagccaatgtattgaccctcgacaatcggatgatttgaacaatgaagctgccatcggccttagtcaattgtagttgtatcttactgcatcacttattgacataatggatcacttaattcgtcatctc

SEQ ID NO: 14445 - DNA, 232 bp, Glycine max
ctggccatcggccgggatgatcatggtcctccaggctggacaggcagaagcaatgtgtcctctgactaagcattggaagcattgtatgttactggtgccggcgccggatgatgagacaaaactatgctcggtttcatggacttacattgcattaaacttcattaaagagcgcaagatacatcaataaatttgacaactcgagcttatcctggaatgatatccatataacaca

SEQ ID NO: 14446 - DNA, 226 bp, Glycine max
ataacatgcttaatgtggcgaccattcaatttttactttcaaatgtatatcaatgagcggaatcttgcctcaatttatggatccgcgagtatatttatgacatcagtactaatatgtcatatgcactgtaggataagttattggcttgactattcgatgtcattagattatgattctccgagaagtctagcggctctatggaagaataatacatctcgacttatct

SEQ ID NO: 14447 - DNA, 247 bp, Glycine max
tagtggagaatgatacaaccatgataatgatgattaatttgtgatagcatatggagaactaggaatgacaaagtctggaatggagtgacccctcacacatagtgccaattagggatcatgataccctatatcaatggaggtgtgctatgcgtatcatgcaagagccacctcatagacctctcacacaccaagtacatgattggtatgcctcgccaccaggttatttgaaattcaatgtagatgttgt

SEQ ID NO: 14448 - DNA, 414 bp, Glycine max
  unsure at all n locations
agtctttatgctatgtggtaccatgtcagtgaaaaacctcggcgggcgcctatgagtacatgacaagacaagccacacaatagtaagtcaagtcactctcactaggtaatatcatagggagaccagtcagggtcacagtgttttgcgagaattttccaaccatatgagatcaacatatgcttaaaggagcactcaaaccgtgtgacccccaaggcctacactccgaagagtccgtcagggcctctccctcctgattcatgtccaaccaagagaatattttagcacacagactctatctatgaactgtacaaaacacatgacttctcaattgttctcaaaatacatntaactcgtcgtcctttaagggtcttatcattaactcgtcgcccttaaagggacttaacattaactcgt

SEQ ID NO: 14449 - DNA, 511 bp, Glycine max
  unsure at all n locations
agggtgaagcagtcgncgactnctnnctngattaanaccccncccgcgtncaancgccacacagaatgttaggcgggtttctttttttatgccgtaccgacactgggatggagtatatcgttaagtgtctcgatcttgcgctctttgtgctacgattggtttctgcgatataattctgcctaaggtgggaaattcgcgtagctcctcnttcagaggctatcaccattctaggcgtttttttagtgtgctcgtctgtcgttagatacttccttgcctttctctcttgttcctcgtgctataatacttctctcgctgaactctggcctccttgatcctctattgctattctcgccgtgtactgagtctcctatctctctttacaattagatgctctgtaggaacattccatcttttgctttttctttttttccgtgtgaggggtacatttgtgcattttttcgtatcggttttcccttcgtttcgatttttggctgctttcacaattgctatg

SEQ ID NO: 14450 - DNA, 362 bp, Glycine max
  unsure at all n locations
aaaaaataattccaaacctcctatatgttcctggtaataatcccgtgaatataaaaattaaaccaaaataaatattgcaatccaaataagcatgtcttcatagtnttactatacactnttggaagcttcaagttctcannatttgttgttgggttatagaaagctntggannagcttgattttcttcttattattccgagaatatganagcaatggaagaaagatattgcatagctaanaacgtatgttgtcctgagtatactatacacgttgaaagctgctggtgcttgaagttttgtaccgacaaacttatagaaacatatgcgtacgtgaattagatttctaattatgatatacatcat

SEQ ID NO: 14451 - DNA, 456 bp, Glycine max
  unsure at all n locations
actcaagctggactgacctanacattatggtacttatctatgagagcttgtgtatttngttttatggtgtgaaagcttatggtacttaattagcatgcactggtgcatgtgcgcatcatatgctntagtctancatgaaattatggctgagccatgttggttctttggtataggaagtgtcacatgaaatttgctagcagttttctgctcacgtgttggagctcttatgcacactntggagcaattcgtgctagcaattttctttggatttgtacaatctccataatagttaaagcagcttgtagagtttgaaaaataatcacatgatttaatgtcctgttcttctctttctcttggaatttacacattgccttggagctggtattngaactntgaaatanagagaacaaggaatgaccattactacaagcagaaaagtatgtcagcaaaatgatt

SEQ ID NO: 14452 - DNA, 325 bp, Glycine max
ctcgatatactataggcctgaattggacatccgtgtgacaagttatgaccatttgaattgatgcagagcttgcgtcgttcaattttgagcatctcgacatatgatcagcctgactcggaccttagtgcgaaaggtatgaccatctgaatcactcaacaacttgcgatgttgattctcgagcgtctctatatgagaatcgcctgaatcagaggtgcgagctaaaagtcatgaccatttaaattgctcaagagcttccggtgtcaatctcaagcggatcggtgtgcgacgcgcatgaatcggagatccgtgtgaatagatatgacca

SEQ ID NO: 14453 - DNA, 280 bp, Glycine max
gaatcggacatccgagtgaaaagtgattatccttttgaatttctcgagagcttctatgtttaattatgagcgtctcgatatattatacgcctgaatcgaacctcagtgtaaaaagtatgaccatttgaattctttagacatacgatgtcattttgagcgttctatatgtgatgaccttatcagacctcctgtgaaaggatgacattgaattctcgagagcttcgttgtcaatttcagcgctcacatttatgccccgatcgacatctgggaaagtatgaca

SEQ ID NO: 14454 - DNA, 389 bp, Glycine max
  unsure at all n locations
taacctagaataaaaataacttaatgccattaacctatggaattaaaacaaacttaatggctgagtgtaactgaaattgttggcaaccaaaagtcaccctcaacagccaacaagtcagccaccatttggtctcccaaaaggctgatgcctaagttgccaattgcgcccttattacaacttgaactaaagcccttttagttgattaacccaaaacatatttttggtcaaccaactttacaaggatagggccattatttagacaaactaaacactctaaaattgaaataaagtggtgtcatttagtcctgcatgtgggccatgatacaactcacaaccttggactnttctccttgaaacttgcgctagtattccaatagtatggacagcac

SEQ ID NO: 14455 - DNA, 382 bp, Glycine max
  unsure at all n locations
ctcggatgttttatttatgcgcataatatatcgagacgctcgaggttgaataatggaagctattgagcaattccaatggtcataactgttaaactcggaagtccgattgaggcacataatatattgacacgctcgacattgaacaacggaagctctcgagatattcaaatggtcataacttttaactcggaagtcngattgagacgcataatatatcgagacgctcgaaattgaacaatggaagctcttgagcaattccaatggtcataacttataactcggatggccgattcaagcgcataatatctcgagacgttcgacattgaacaatggaagctcttgagcaattcaaatgggcataactcttcactcggatgtacga

SEQ ID NO: 14456 - DNA, 440 bp, Glycine max
  unsure at all n locations
tgcctgccagcctcgtattttctcttatatggggaaaccgctcattgtgaactttcataaatggggctccacacattcaacccagtacttgaggacaacaggtgagcattggactaccaccgtcagaactctcattcctcgtgggaacagtcagtgcttcacatgactcttactgtgtgactaagtacatcactcgtgaaaccgacttcctataacgaattttagaaaacatccttcacaagccacagctgagctacacactcccgaatggtcactaatcgcctctccctcagataccagacctggaagatctctatggaagcttgagcagacccacacctactcatactacttgtgatatcgcactcttcagatgtagaacctaagccagctacgcatccccgatataactcacgctaccgcatctctcaagaaggatn

SEQ ID NO: 14457 - DNA, 130 bp, Glycine max
cccagatgaaatgcgctcgaaggttgtttttcctagcccactccacgggcagcgtcgagtcgcccaattgaaagatgcctccggaatgcaatgttttaacgtattgacccgaactcgaagaggcgtgtga

SEQ ID NO: 14458 - DNA, 324 bp, Glycine max
  unsure at all n locations
acctatacttaacagaaaatacttataacacaaaatgaaaatactaagtatttttgggcctttagggctccataatataggtaaggtaccctagaaatgtaacatttttcagtccttgtattttagggcacctagactagttttttgtattaggggtagttttataatttcacatgcattaagtgaatatttgatgtgtgtggttgtaaataaatntaattgaattgggagaagcccaatccaattataatttagagggggaggtgagcatttgcttgtacaccccattgcacatcatatagcacactttgtgtgtgccttcat

SEQ ID NO: 14459 - DNA, 292 bp, Glycine max
  unsure at all n locations
ctaaaagcttttcacccttatcgacgattgaaaaaagcttttaatggaagtcaggggaatgaangccccccagaaccattaactggaaaccaagttcatgatcgcgtaaaggacattgtaaccgtgtttgggaagtcccagaagaagacatcatctcccaacaacatgtggaagaaacgctcaatattctttgatcttccatactggtctgatctatatgtgcgtcactgtctagatgttatgcatgtggagaaaaatgtgtgtgatagtttaattngtactcttcttaaca

SEQ ID NO: 14460 - DNA, 388 bp, Glycine max
  unsure at all n locations
cccacttaaactccaaaactgagcagagttgctcattcttcctccattttcacaagctggtcaaaaggaaagaagacatcatttccactcttcttccaagattttccaaccgtaaaagaaccctccttccatcaagcttaggtgaatgacctccattttcacttcattatcttgctctattctcacttgtagtttcaaatcttatattcgcactcttgaacgttggaaacaagaatccaaactccctcattctgccttctaaatttgttggagactacaacacgtanggggtgtctctccaactcttgaaccctatgcttttagttaacttccttgaacatgttgtcttgaaattcccgtgctagttgcctatcctggatctgtgtgc

SEQ ID NO: 14461 - DNA, 206 bp, Glycine max
gaatcggaccttagtgtaaaaagttatgaccgtgagaattgctgtggagcatccgttggacatttcccagcagagctatatgtgatgcacctgagtcggacctgcaggtgaaaagggacgaccgagcgaatttcgcgagcgctttcgttgggcaatggcagccgccacacatgttaacgcccctagtcgaacatccatgggaaaag

SEQ ID NO: 14462 - DNA, 433 bp, Glycine max
  unsure at all n locations
agcttggttatgatgcttcaatggaggaaaagaaagagggagagaaagagagaggggggagcacgaaattgaaggaataaaagaggtatagaagtggaactttgaagtatgtctcacaagactctcattcatcaaagttacaacaagtgttacacatgcttctatttatagactangtagcttccttgagaagctttcttgagaaagcttctttgagaaaacttccttgagaagctagagcttagctacacacacccctctcataactaagctcacctccttgagaagcttccttaagaagattcctaaagaagctagagcttagctacacatacctctctaatagctaagctcacctccttgagatgagaagctagagcttagctacacacccnctataatagctaagctcacccncattgacaaaaacatg

SEQ ID NO: 14463 - DNA, 303 bp, Glycine max
ggctggctattatagaaagatcattgtatgattttctaaattggcattgcccctaactaagttgactcgtaagaatgagaagtctttctggaatgagaagcgtgatcaaagtttccaagagttgaagaggcggttgacgacagctccagtgttaattttgcccgacccttatagaacattcgaagtgtattgctatgcaagcgggcaaagcttgcggtgtgtgttgatgcaagatggaagagtactggcttatgcttctcgtcaattacgtcctcatgaatttaactatccgactcatgactt

SEQ ID NO: 14464 - DNA, 329 bp, Glycine max
agctttgttgtctatgatcaggtcatcacgcgcgcgctcaaggatctcggcggcggctcgggcaaccacgccaggatcgacagcattcccgtgcagatgggcacggccacggccggcagcacgcccttcgagggccggctgcagctgatcgacaaccaggtcgatgcccgaagcggcacggtgcgcgtgcgcgccgtcttcgacaacaaggatggcgccctcatgcccggccagttcgcccgcatccgcatgggccaggcgcgcgacagcagcatgctgctggtcagcgagcgcgccatctgcacggaccaaagcaagaagtacgtgat

SEQ ID NO: 14465 - DNA, 213 bp, Glycine max
  unsure at all n locations
atgcgcatgcaccctgatcatatacctcacaggccttgcatattcnaagcggcatgcatgggctttgcaatgcatcacaacgaacagaatgtcatggaaactaataatacttaatgacaaccatcacttgacctacctgcaagcgcgcctgtcactgttccccagctgactgcaccaccgcagtgctctatctacatcactgatcaaatgact

SEQ ID NO: 14466 - DNA, 330 bp, Glycine max
  unsure at all n locations
agcttangttttttaaatngnngaagacaattatgtgtgtgttacactgatcacatttatatatatacattactgtatatagtatattggcatttaatttgtattaatagttcacagttaattgttagacgcgcaaaatttttagctatctagtaactgatgacgtgaggatgaattgcgcaaaattaatcatgttaaacaaatgtagacaataatgtgtgtcttactaatcatatcacaattatatacattgtggtggagcaagtgagagtgaaactttcttacagaaagccatacaacagcaagggagagccactatcatggacacca

SEQ ID NO: 14467 - DNA, 394 bp, Glycine max
  unsure at all n locations
agaagctcatccagagagatgtagccactngctttgttttattaaaagaaaaagcagcaactgaatgatcttctatttcaactttgtttaaatgtaatgttgcagctatgaattctctgtagtcaattgtgccactgttgtcaacatctgcctgcgatcagaattatcttttttttaaaatggaacaaatggattataatttataaggatgtgctactaaaactggttaacactacctttaccattctggattctatttacaatgttacttttccctacttgcataacaatgtgtgactaaatgatactcagaagtctttcccttgtaagactatatctttagaatggaattataaacactacccataatataggtcaagttacaacttgaaca

SEQ ID NO: 14468 - DNA, 419 bp, Glycine max
ttcttgtctaattgctacaactcgcagccacttcaatcacattgcttctggaatgcaactgaggagtcgactcccctactccacctcttctatattgtgactgttccacatgcacatcggctggctcaactctcctcacagaaccagactggtccccaagaaccctcagtttatgctcagcaaaaagcttatcaagctcatcagccttcattatcagctcatcatgcatcccttgattccctctagattgcctcaccctctggagttgctgctctaaaggtggagatgaggttgcgcgtgcattatcctgagtctccaaaacttgtttcatcttgctactttcattagcaccatcccttgtaccttgtgccgtgcttattagttgttcatttctaccaggtaatggattatggtactca

SEQ ID NO: 14469 - DNA, 317 bp, Glycine max
gctctgatacaatagagagagagaggcttgatattttatatgtacaacagaaagaaaaaaaaagattaatcttattgaactcatgctagactgaattctagatgaggtcttataatagtagtgtagaagtaataaaataaaggtgcttaaaagggaggagggaaaaaaaaataaataaatcaacactcgtaacatactatttttttttaatcaacaaaattggtataagatatatatatgtgggcacaaagggggtccaaaacccgtatacatgtgattcatggcagaaaaccacccatattggctaccgaatatta

SEQ ID NO: 14470 - DNA, 363 bp, Glycine max
agcttatatttattatacttacgtcataggattaacagaatagcttatatcacattataaaaaaaaggatgacacactgatgataatttaaaaagttttacaccagcatctaatcccaacccatcttgtatgttaagatagttgattcttatgctaattactttataagttatatcaacaatgatgatataatttaataacggtataaaactattttatatatgaggatcaactcattacattaacaataaaattaccaagagaatcatgtcttattctaatacgaatattttataattgattattagaataaacaaagatttctcttttctcttgcttactaattgaatgtatccttttatt

SEQ ID NO: 14471 - DNA, 287 bp, Glycine max
  unsure at all n locations
gacacatagccacncaagctgttgcatgatcgtctggtcatccagctatttatttgtattgatggctcctacactcaagaatctgagagtcttaaattgagagtcttgccaactaggaaaacatgttaagtcatcatttcctcaaactgtgcagagatgtaactctgctttctctaccattcactctgatatttgaggaccaagtacggttacatcttctgactttcagtgttttgtgaccttcattgatgaatagttcagatgtacttgggtttatgtaatgaaag

SEQ ID NO: 14472 - DNA, 360 bp, Glycine max
atcttgattcttgaatattgattcttgaattcaactttcctcttgaatcttgaagtgtccttcaacctttcctcttgagtcttgaactgttcttgattccttcttgtacatcttgaactcatcctttgattgacctttgagctttttgtcatcacctttgtcatcatcattgttatcatcaaaacatctttgaatcactcttgattcaccatgaagctctgcttctacaaagaagataacacagagaacaaacaaaacatcattacatatatagaaatatatttacattagatacctacagggaagatccaatagaggatatagctctccatagtccagaaacctcttttacaacaaaga

SEQ ID NO: 14473 - DNA, 330 bp, Glycine max
  unsure at all n locations
tgccacccagctcgcccaggcgagcagggttgtttctctctataagcaacagccttctggaggaatcttctagagggcccaagtgggcttggttgctatttgcacccccatttttactaagtacacctccttgccttttttttggtgattcttttctcgtaaagttacggaaacttacgaatttcgtaacgatacttgttttctttccgtaatgttacggaaccttgtggattacataatcatcccctttttgacttacggaatgttacggaacctcactaatngtgcaacgatgcttccatttgattttcggtgtgtcatggaacctta

SEQ ID NO: 14474 - DNA, 532 bp, Glycine max
  unsure at all n locations
aggacgtgtttcgacnttctgttannaccccncnaannnnaannaangcnnccngcgggannncannaaannaccgcccaggatgggagcgacgcttccttttatttttcntaancannacgcacaccgagaacggggaggggctacgacgacangcgacggagacacccgcccnggcagcgacaaccggggggacaacagaggagccaaccgagccagaacgacncggacagacagccaccagaaaacaccgcccggaagcataaaaacgccggaaagacgccccacacagccacagggcaacacgcacaaccaagcaagacacagcgacagcaggagccaacaaccagccaaaaagcnggcagcaccaacgncacaccggagagacacgaaaccaacccagagaaaaacgcccacaggatgaaccacgaaacctctgatcatgagaccaaacttatatgctgacgctgtgactcacaagagggttgggctcaatcgatcacaccactacctcataggtgagtgtgcaccg

SEQ ID NO: 14475 - DNA, 427 bp, Glycine max
  unsure at all n locations
ataactttgtactcggatgtcttatttagttccgtagtatatcgagacgctcgaaattgaaacagaagctctgagcatattcaaacgacattaactnntttctcggatgtacgattgtgtcccttagtatatctagacgctcgcaattgaaaacggaagctcgtagcaaattcaaacgacaatacactttaactcagatgtctgactgagtcctgtagtatatcgagacgctcgatattgaaacataaggtctgagcaaattcaaacgactataactttttactcggatgtccgattgagtcccgtaatatatcgagacgctccaaattgaaatagtagcttctagcatattcaaacaacaataactttttactccgatgtccgattgagtcccataatatatcgagacgctccacattgaaaacat

SEQ ID NO: 14476 - DNA, 429 bp, Glycine max
gcttttatcatggcgatacttgaggggacagatactaagcaccggtcctgtgtgaaaggggacactttaaaggacttcctatatgatgaatcgcatatgcagggtgacatgcactcgccaaataattcatctgcacgacatgctctgagcttacttcgtcaactgcaacacatcaatctgtctaaaacctactcccatacgacagtttgtaagactcagatcactctgtggtgatatgcgagaaatacaagagaactttatgctcaatgtgaaagtccaccgctcatggatacgatgccattgacgtggctgcatgtgagagacagatagtatataaataatgtctaagactctatgaacatatataggcacacataatcaagtgatcacatgaagagagggactgaatctttggcttatcattaatgg

SEQ ID NO: 14477 - DNA, 480 bp, Glycine max
  unsure at all n locations
nnttaaccaattacgagatngcacattgatacacaagctncctcctgacatctggtctgcttgaagtggactgcaaccatatactttanttgtaccccatacctcaaccctggaccttaatacagcaatgcatctctttgaagtaaaataccctcggcttacttcctcgtcttgagcctccatacatttccaccttgttaaagcaccgaactaagctcccccatggatgagcatacgctcatcatacaggctcacccactaactgaagctttgaccacaagaactgatacctttaagcttaacattcttacattgtttcgccaatagactatccttaactgcgtgtttatctcccctttacgaactaatgcctcacgcttctctctctgactatcctatgactctctgaaaagctgtgctgatgatgcatcacagctgtactatcaaacttgcctgaggaggttgtagattctggctcgg

SEQ ID NO: 14478 - DNA, 433 bp, Glycine max
  unsure at all n locations
cagcctcctatttattgtaatttttgggtggtgaacctccttcttccttggctaattccctagtggatggtgcctcccctctcctcttctccttttccttccgctgtatctcaatggtgtaaaatcaccattaaaggaccccattgaagctcanagatccaacctccatagaagccctacaatcaagcttccatcaagtggtatcagagcacaagagcctcaagtgtccaggaaaggagcccagagtgtgaagaacctcgggatttgaggtcaaatcctttccaaggtggagaggatgatgcaatcctaccccccaagggtattggatagaagactccaggaggcttangctagagctactaaagaatgccctanggttctcatgaaccttangttagctntttgagcccatgggtcatnggtggatccactc

SEQ ID NO: 14479 - DNA, 438 bp, Glycine max
  unsure at all n locations
ctcagcttatgagtttctggttccaaccttgaaaactggctattatctttcattctctnctcctttggccaaatgaaattcgccaaggactaaccacctgaattcttttttgtgtctctctttccccttttcccaaagaacaaaggactaaccccctgaattcttttatgtctctcttctctcttgtcaaaaaattcaaaacaacacagtctaagaattcttttgattcttcccatccctaatacaaaagtgtttaaaggactaacggcctgagaattcttttgtatcccattcacaaagtatcaaaggtttaacagcctgagatctttgtcttaacaaatttggacggtacatcctttttggtacaagtagagggtacatctacttgggtttgactgagaacaagagagggtacatctcttgtggatcagttctagt

SEQ ID NO: 14480 - DNA, 289 bp, Glycine max
  unsure at all n locations
atctgggccttctttaaaggcttccaattgtgtgaatttggccaattccgtgagacaatttgnggcaagtttgtgctttgtttctttgaattgaggggttgtaggggatggccttangcctaggttatgctgtgaaataatggagcaagccacattgcccctattcccttattattggcacccaaaagtgcgcccaccaagtgctcagtgaaatgcctcaatgacatttgggcatggttttgtgaactntggattgtggggctgatttgtgtgtatagggacaacatgt

SEQ ID NO: 14481 - DNA, 229 bp, Glycine max
  unsure at all n locations
tcaattcaatccctgaataatttttggatattgtccaataagaaatgttcgatcggcgtcatcaggtgatgcttgctttttattttagacctgctggatcggtcatctttcctggccgacatcgactatcatttnttttatcagtgtcggtgaataatgttttttggccgaggtgggctgatgtttttctagccgagtaaatgagaacacgccagtgtcggccgaaaca

SEQ ID NO: 14482 - DNA, 421 bp, Glycine max
  unsure at all n locations
ttcttgcttctacaatcaaaacctacanaaccatgaatgaatctttcatatttaaacaaaaacattagtaaatgtacaatatatataaaccaactagatttaagggaagtttataagagaactattacaaaagatagataagtgctaacattataatccaaaaaataattgaaatatgacacttatcaacttggcaccctattaagggtgtaagtcgtaagctttaaggcttctccccaaagtgactctggcaaaaaagaatgactaatcatatttctcaccatatctttaagagtttgctttcttcgttcttctacaccattcgtgctacgttcttcaaacatagcgtatggccaaacaattccacacactgtgagtaaaagcacaaaaagtactgaacgttgttctcctaatttgcata

SEQ ID NO: 14483 - DNA, 240 bp, Glycine max
  unsure at all n locations
aaaccagctcttgctgccgctctgggctcagaaattcattttttttccctcttatnactagctatagtgaattctttagttcttgaatgtacaaccttcaaattgttgctcgttcccctctntcttttctgcaaaaaagaaaatcaaatgctgtgaaaacatggatgaagtcctaagaaaatcaatatcaaagaacacatggatgaaatcacaattaacaagcacaattacctatctttc

SEQ ID NO: 14484 - DNA, 417 bp, Glycine max
  unsure at all n locations
agctttganggtttcattctgtatttttctgattgtattggtacctaagcatttattttatttctttctgcatttatctgttgggaatatattgatctaacttgttattattntctgtttgaaagctctttgagagctctgctctgatgcatatatctgctgtaaagtctctcctctctgcattatgtcaactttcacatcaatgcatgacttcaagcagtttgggaccaacaactagtcaaaaaattggaagcatcagcttttcagtggaaagaatgatatccatccttgtgaataatgctcacagtatgtagcttcaatacctttgagcatgatagcaaatcttttatgctggatgctgttttcttagaatggtgggttgggcctaactcaacacccaaagctagctcatagggt

SEQ ID NO: 14485 - DNA, 393 bp, Glycine max
aagaagaagaaatcaaaagagagttattatgcttgtgtcttggactctcatattacagtgacaaagccattgctgtgatgacgtgaaaacaaaacacgaaggaaaaggcagaagagagagaaagagaggtacataacttttttaattgtgttttaatcttggctgttcatttttctttaattgtgatctaatggctaatgattaattctcatttctcatttaagaagtgttttcatttgaaacatcccacatatatatagagagagaaggttgttattcaaattaactacgactattgttttttggttagcttttatactctaacaattaaagtaatgaactaatggtagtataaaaatttctttgcttgccatccaattttatgataaaact

SEQ ID NO: 14486 - DNA, 399 bp, Glycine max
  unsure at all n locations
agcttgtttatatggctagacatgatacatgtcanggtttggtttggttcaaggataaaagggatgccccacattatttccatgacacanatgcaaaaatgatgatttggaaactntatgcaaaactggtcatgcatgcgcctatgcggacgctcaagtgtcaaatttttatggtcaggtgatgctagggttcaggattcatttcctctattttaaatcaacccaatgtttccaaaatatgttcttttatcaatttgtgcattcctccaagtccatttcgggcgtccggngaaattnttacagcattcacccttcaggtgtagacacgtnntttcttcaaaaatcggttatgatcaatgaatttttttttcaaagaaaagttggaaatcatctcttttc

SEQ ID NO: 14487 - DNA, 287 bp, Glycine max
  unsure at all n locations
ccccggagtacgacagtcaccgctttatgagcgttgtacaccagcagcgcttcgaagccatcaagggatggtcgtttctccgggagcgacgcgtccagctcanggacgacgagtatactgatttccaggaggaaataaggcgccggcggtgggtaccactggttactcccatggccaagtttgatccagaaatagtccttgagttttatgccaatgcttggccaacagaggagggcgtgcgtgacatgagatcctgngttaagggtcagtggatcccgttcgatgcc

SEQ ID NO: 14488 - DNA, 400 bp, Glycine max
  unsure at all n locations
agcttgttttgcattcttggttaggttcattgngtactatgctgatagctaaaaacaaaccatgttggggttataaaatcctctttcctaaaaatgataaaaaaaatcatgtgaatatggtacccaacgcgtggtctttgaagtgtctcgtgtcgatctcataaatacacatgtcatgcatcgcataactatatcctactcattcatcatatatcctctatgatagattgtcgaagtattgacaatcaaaatttttattctttggaacatggggccgaaccaagtgcagtcttttaagataaaggttntaccaagtcaaggtcaaaagggaagtagccagcttgcaaaacttatggaagtgaatggagctaatgacttacataatcaagaaattgtgatg

SEQ ID NO: 14489 - DNA, 461 bp, Glycine max
  unsure at all n locations
tacaaacccaagcttgacactatgaaatngaaaacttgaaaccctcaagtttcattctaagttgcaactgacacagtaaccaagattgcatttttttacccccttcttccttctccagcatcatcaaacatcacaacacaaacctcaaatgcctactaccaccaccactttttcttgcttcctcttcaccttcctcatcaccacttccaccatggcttctatggttggagctgtgggggtgaactggggcaccatggcttctcacccacttccaccccacaaggtggtgaagctcttgaagtccaacagcatcaacaaagtcaagctctttgatgccaactctgatgttcttcaggccctttctggctccaacattgctagtactgtgggtgttcccaacactttgctcagaagcttgaactcttctaagaaagctgctgatagctgggtccatgataatg

SEQ ID NO: 14490 - DNA, 377 bp, Glycine max
  unsure at all n locations
agcttctttccaattttctataaatagggggagaagtgaagtgaaaaagggttcagccccttatgcacttctctctctttcgaatttgcttggaaaaattgtgtccatgaagaaaattcaagccgagccgcttccgaaacgtttccgtaacgtttccgtgaggaatttcgcgaaagtttcgaccgttcttcaagattcatcgttcgttcttcgttgtcttcagtcttcaacgggtaagtacctcaaaccaagctgttcaattcattctatgtacccatggcggtccacatttcgcctcatgtattnttattctccgtntcatttactttgtatactccctgttgacgtgcttaagccatttatttaagtcatttctc

SEQ ID NO: 14491 - DNA, 504 bp, Glycine max
  unsure at all n locations
aggttaaaggactttgagctcntatgcctactatanaanactcaagcttctcccnncaatttctatacgtacgggggagaagggatttgataaatgtggttcacccccttaggcactttctctgctttttctgaattcgacttggaaaaatgttttcccgtgaagaatatctacagccgaagcgctttcgaaacgtttccgtaacgtatccgtgaagaattttgcgaaagttacaccgctctttcaacgtcatcatgtcgtcttcatcgttcttccatcttcaacgggtaaagtccttgaaccaagcttttcgattcattctattgtcccgtggaggtccacattgggtttcgtgtattattattcacgatccatttactgtctatacccccctttgacgtgcttgagccattctatttaagtcatttctggcttaacctaaagaataaatagaattccaccgatcgtttgaatctgattatgccgtaacttttgttaaaattn

SEQ ID NO: 14492 - DNA, 426 bp, Glycine max
  unsure at all n locations
atcttggttcatatgatttatatgctccagcttgagggggagtgttggatatccttgtattttatctatattangtagctttgttagtaagcttgttcagaagggcagcagtgagttgtcactgtcactgcccttctctctccatcttgtactctatatatatgtcttttttgaaatgaataaaggtgtgagagaaaggagggaatttctccttcagtttcaagtaattttaatatgcactccaatgatggctttcaggggagagttgatccttgacaggcaatatattcaactgggaaagcaaattaaattataaaaatatatgtatttttcatcagtatattgaagactgcaatgggtgaaaattttgaacaaattctagactgcaatgggtgaaaattntgaacaaattctatcatctctgtc

SEQ ID NO: 14493 - DNA, 382 bp, Glycine max
  unsure at all n locations
agatactaagctatttgagaaacttccctgagaagctaagctttctacttcacccctctaaaagctaagctcacctccttgagaagctntattgagaagctagagcttagctacacacacccctctaataactaagctcacctccttgagaagcttcctcgagaagctagagcttagctacacacacctctctaatagctaagctcacctccttgagatgagaagctagagcttagctacacaccccctataatagccactgaatgtcgcgcttagcgaatgctcgctaagccagcagattggcttagtgagaaggtgagaataacacttttgccaatntgcctaattaacctgagattgagagaaatngattattaaacac

SEQ ID NO: 14494 - DNA, 382 bp, Glycine max
  unsure at all n locations
agcttctttctatatacaagactgaagctctgataccacttgttagagaagtggcctcagatatcttaagaaggcggggcgcgaatgaagatatgaccaactatttaccctaatcaaaaatctatattactgctcaaccaacgtatgaattcccttaatgacaatcttcttaaatattaattcanatgagacactttgaatatgaatataatgcactcatagataacggagaataacggaagagaatatgcgcactcagttctatactgtttcggccacacccgtgtgcctacgtacagtccccactaaacccgctagagagttccactatcttagaaatgctttgtacaagttctaaacacacaaagacaatccttccttt

SEQ ID NO: 14495 - DNA, 332 bp, Glycine max
  unsure at all n locations
tagcagccaactcctgaggatcaagcctcaggagtgctaactgggaataagcacaaagattttccccctcttccagaatcactgcggtcttcagaaaagtgttcanagtatcttcatcaaatttgatcagatgaccactgaccctcacctgcttaagtgacttgtcttctaagtcatagaggtttgcgtagaattccttgacaatagctacatcaatactaccttcaatgaagcttgtcaactcctcatcccattgttttctttctaattcctccttaagatcatcaaaatcagtgtagtatactatagtagaaactctttcaataatactc

SEQ ID NO: 14496 - DNA, 428 bp, Glycine max
  unsure at all n locations
agcttgagtatgataacggatttgtttacgttcataaacatgactgactgaaatccactattataaaacaaaaaatcaagtgactgctaaattatgacggtttgtgaagttgataattactagtaaatggtgcaaaaaatcaagtgtagtactaacacttaacaagtaaccaatgataatataataaatgaccattgcttgtgtacccaacttcgtccttagatgatgatattgtaatcatagcagctcccgacaccagcgattgctctatgcgtttccttgacttctattccanaacaattcttctcttttcattnttaatgttcatcactttgtgggtcccaacttctgcacggcaacaagtcggttattttagtctctgctcctttttccctctgaattcggtactctgccatgcatgaatcata

SEQ ID NO: 14497 - DNA, 433 bp, Glycine max
  unsure at all n locations
tgtccnccatcaaagataagacaaagtataaatcatgttcttctccattctgctagctatcatgtccacagaaatccatatatgtcaatagagattgtaaagtaataatcatatcacaatatcacatgttatttgctacggcctacgggaaagctcgagcgagcaaacttgcttggtgagtaatgctaactgtttgttgaaaacgcccaagtaattcattacatttttacatcacttgacaaggagtttcggatcaatgtcttttgttttgcgtgatagcacggatgcagatcaacttggacactacttcaaaaatcagaacgtgaatgataataaccaaataaataagtggataaactttgcanatgcanggtgttgcaaattgcatgaagcccaagtactggacttggaagtttattgttcttctttcatc

SEQ ID NO: 14498 - DNA, 244 bp, Glycine max
  unsure at all n locations
cttaacttcctcaatggtgactnagtttgctagttcatcaaacatattttggccaatctgagggatagaattcagataaaggctagatggatcacaagttttagggcattagaagagcttcttaaagaacttcaaggctttcttcctgagtaagtcatcatctgtgcactgaattccatcaatcataagactcgtgattttatttcttctccttctaataaccacttgagtatggaaaaatttg

SEQ ID NO: 14499 - DNA, 160 bp, Glycine max
  unsure at all n locations
aaatctgatcatcatgctgtgatttatgcaaaanaaaaaacaactacggcaaatgaagagggtgagaataagggagaagcccatgctgtgactgccattcctatacagccaagtttcccaccaacccaacaatgtcattactcagccaataacaaatctt

SEQ ID NO: 14500 - DNA, 329 bp, Glycine max
  unsure at all n locations
ctaagttttgaaaggctggaatgcaatcaaaggtttcagcacacaagaattccatatcaataaacttatggtcgataatggaacgagatgagaaaagattggagtaccgtttctgctgttcgtcggaagaaaacactgnggaagaggacaatgagggtggaattggtgttgtggatgcgctagtggctccagaacgatgagcccttgaagccgaagcggaggcggaagaaccctttcgtttcttggacgattcttccattngagggaagttttgcagattntaatcggtganatcaaaagaaaaatgaaaaagaagaagattgaattta

SEQ ID NO: 14501 - DNA, 387 bp, Glycine max
aagcacattttatttctttggagaaaccttggtctaaaatgtggcaacataatgttatcaatctaacaaaaaatcctatcatgcattctaggactaaacacatagaaataatgcatcattttcttagagatcatgtgttaaaaggtgactgctacattgagttcatagatagtgagcattaacttgcagacattttcactaaaccacttgctagagataggttctgtttcattagaaatgaaataagcatattagatgcttccaacataaaataacttcctatttgcataatgtgtgatgcacattgctatttgagacgatgactaatttattctggagtctctactctaatcaattaccaagtagtttaatcgattacttctctct

SEQ ID NO: 14502 - DNA, 184 bp, Glycine max
tttcgttcaaggattgaatcgagggctcgttatgcgacatctgtcgcgacataccgaccgatattcttcagccgacattgcacaattctttttagaaaagctcgctggtcgataatggtctttttacggcagagtaagttatcttggtttggtgttgcatacaaaagttacaatgtacttcagc

SEQ ID NO: 14503 - DNA, 505 bp, Glycine max
  unsure at all n locations
aaaaattgcgggttagcggttctancnctagntacaagtcncgnncccatnnacataaattgggggagaagtgaagtgatataaggttcagccccttaggcacttctgtgtctttcgaatttgcttagaaaaactgtttccgtgaagaaaatccaagccgaggcgcttncgtaacgtttccgtgagtgatttcgcgaagggtttcgaccgttcttcgacgttcttcattcgttcttcatcggtcttcggtcttcaacgggtaagtacctcgaaccaagcttttcgattcattctatgtacccgtggtgggtccacattgatttcgtgttttttcttctcggtttcatttactttccgtaccccttttgacgtgcgttagccattttatttnagtcatttctcgcttaacctataaataaaatagatttgcaccgatcgtttgaattgtattatccgtggaacttcggtaaaatgagttccgaccgttcggtcgtgccataacccn

SEQ ID NO: 14504 - DNA, 456 bp, Glycine max
agggttcgggctttgcgtatgcgacacactagatactaagtctgaggtgagtgagaattggatcaagagttggcaatcggatgtgttggcattgagggaggaattggatagagtaagagcttgatgtggagctgactctcagacacaaactactcgaatctgctgtgtgagctaaaatcaatgtggcattgcaacaatggaaaggtgagaaatttgtatgttttgcctcagaaaacatgtactttgaattcccttccaatgtccctattaaggggtgctttcttattctggttataattccaagtgtgggtaatcccgttattagagtcatcactcactggtttgatggttttccatgtggtaagtgtactcttaacttatctatggtaaaaaatgagttaaatatctgttttatgcataaaaatatctgcactatcttggaatcatctgattttt

SEQ ID NO: 14505 - DNA, 164 bp, Glycine max
gtatcctatgtcgtgtggatgattctccagattacctgggtaactttatagagagaaatcgaaacctctgaatatcaaagagttgagtctaaacttcaagagagaaaactgtgtatcaagagaataggagtgccatggcagaaatttgaaacagcaggtcactg

SEQ ID NO: 14506 - DNA, 333 bp, Glycine max
  unsure at all n locations
gcacccctgcgggcagtttactatcaatggagtgactcacaaagccacattgttgtatgagtatactcacattcgtttttaagaaaatctttaagatatgattgcattgataaaccattcatgttcaagataagctatgtaaacaatatacctgagtggtcagcatggattgttgagatgctagtacatcattatgcataggttctatatntaaattgctgccactacgttgtgaagttggtggatcttactattgttgttgtcactgacaaaaaatttctacacatatatgtaagagatgaaatataacttttgtaagagtagtggaaaatg

SEQ ID NO: 14507 - DNA, 394 bp, Glycine max
  unsure at all n locations
gttcagccctcctggtaattcgagatcacttgaaattagtgagaaaaatcatttccgtgaagaaaattcaagccgaggcgcttccgtaacgttttcgtaacgttntcgtgggtgatttcgcgaagattttcaaccgttcttcgacgttcttcgttcgttcttcggtcttcaaccgataagtttccgaaatggaacttttcaattcattctatgtacccttagtggtcctcatttgtttcgcgtacttttattttcatttcatttactttctgtacccccttttggcgttctttagtcatttacttaagtcattntctcgcccaatcaaaaataaaataaatttccactgatcatttgaattgtacattcgttaatttctgtaaattgaatctga

SEQ ID NO: 14508 - DNA, 333 bp, Glycine max
  unsure at all n locations
tttctcatgtgttcactttacccaatctccgggttcgaagacaaccttctttcttcctttgttggcttgtttagcatagcttttatttttcctctcaatttgatctttgactcttacatgaagcttcttcacatagtccgcctttgcttgaccttctttatgcttaaaaacagaaacattangcataggcaaaagatcaagaggagttagtgggttagaaccataaacaacttcaaaatcatcaaaagtggtagtggtcaaaatctgatttttgcaaaacaagatatatagtgactgtttagcatgaaacaacctcttgacctcactttttgt

SEQ ID NO: 14509 - DNA, 219 bp, Glycine max
  unsure at all n locations
atgtgccaactctcgaagatgtggctatatcatatagacagtacacacacgtcaggattcattacctttattaaaagtgctgaattttcttagaatttgggcttagggcctcactaaactcatcccacaaaactggcttgtaagtngagggctgcctaagcattataagcactatttacatcatatctctagttaatgtggagattaaataccaccctt

SEQ ID NO: 14510 - DNA, 478 bp, Glycine max
  unsure at all n locations
aggcaatttttaagttttngttgcgaanattatgataccanncnnnccncgcangacccaannaacccgatgtgaaaacaaagttttatttgtttccacggagnggacangagagacgtgttgccacttctgagagaacacaaccacctgaagagtatgagccacatcgcacataaaatatctttttgcatatagtttactcccacttgggtttgcaatgatagctgatatgaggcagttgaagatttcatatttttcttatatgaacaaattgtctgataaacaatagataatatctgctactatgtcatcgttgatcttactctcccctttgttgcatcaaaacaaatcatgaatagagaagacgaaatgtgcctcttgtgtatagatgaaatagcgatccaaaagattanaccatctcttaatgaataaatgatcaatatgtcagcaaacaagatgttccttcatctaacacatc

SEQ ID NO: 14511 - DNA, 167 bp, Glycine max
tcttgcgtaccgctctgtgctagaaaaccctaatctatccctctatactagtatttgaatcttagttctgatgtacaccttcaatgtgctcgttccctcttctttctgaaaaagaaatcaatgatgcaaacatggagaagcctaagaaataatatcaaaaaacatga

SEQ ID NO: 14512 - DNA, 357 bp, Glycine max
  unsure at all n locations
accggatgacgccgatcgaacatgtcctaaccgacgtattcatatttcgttcanggattgaattgaaagctcgttatgcgacatctgtcgtgaagtagcgaccgatatttttcagccgacattgcacaattctttttagaaaagctcgctggtcgataatggtctttttacggcagagtaagatttcttggtttggtgttgcataaaaaagttacaatgtacttcggctaggtttttcgtgcgagttcaaccgacattttgtttcngccaggaaaacattagcccacctctgcaaaaaaaatattngctaaccgtcttcatgcatatntcattcaacgattgaatagaaaactcaat

SEQ ID NO: 14513 - DNA, 494 bp, Glycine max
  unsure at all n locations
aggaattgggcttgggggatgcgaacactagatactcaaccttcacacaattatctgtctagacgtgagggcgcactggcttagttctatcacaccactgactcgacgagggacatgacacatgcctgtgtcagtgcccctgtgatgtcgcgaccaagaatgatcccactcacttctttgaaactcatacctcaagatcttgaatgaattgtggatcacatatggcaatatccaagtatcttgccgatatgggcaaccgcctcagtcatcagttactttggacagaaccggcacccactgaggacatgcactagctctaaaaagaaagtctctctatctcttcagataatcttgtaggatatncaactatacagcctattatcatttattggacatgaagagtggttatattaccacatctctcaatcaatagcctatcctactcttcaagaaacccaganacaggctgcatcgtgaacacagctgtgttatcn

SEQ ID NO: 14514 - DNA, 480 bp, Glycine max
  unsure at all n locations
aggggttaggggttttgcgtaatgtgacacnatagantactcaagcctngcgagggcatccccctatatgttctagaattcagaangattgatcctcaaagcattacacactatatattgcatacaacaaatatgcaatttgaccaacctgtataccatcttggattgaaaaagaagtaccttctggaggttggacaagcttccggttatgacgagcggccattttcttctttaactgtgtcagtatgtcctccatggagtactctctgtgccaatttgcaagaagaccaaatgtctttgggtcaacctatttctttcagtctataaatcctggcacaaagataattagtattaagcccataaaatagactaaattttctcataatcattaacatgaaaagtgtcgcaagatggaccgattcaccccgtctttgaataaagtagaaaaaatattttcattatgcttcccaaaaacccaan

SEQ ID NO: 14515 - DNA, 251 bp, Glycine max
gggagagaagctgaactttgaagtatgtctcacaagactctcattcatcaaagttgagacaagtattacacatgtttctatttatagcctaggtcactaactaaatgattgggaatttcattttcatttcatgtgaatctaagaggaatattccaaggatatgccacaggcatcttagcatattccaagaatatgtcaaaggcatcttagaatattccaagaatatgtcagaggcatcttaccatattctc

SEQ ID NO: 14516 - DNA, 324 bp, Glycine max
ttatcttctcaactgagttcgaaggttagttgaatctttcctactagatgatgagatgatgctggttgtggtagcctatatgcacaaccaaaatatctatcttatatcaacactcatctatgaagatgaagtcatgttaacatatgatttcctattctcttgcatatggacactcccggactacttcctatagacacatcttactgatcatttgaacctatccatattgactaatgctagaagtatgcttatcatcactaaacattcttattgcgttgactatttcaatattcttctccatatcttacttattgtgctctgcac

SEQ ID NO: 14517 - DNA, 294 bp, Glycine max
gattcaagaatagctgaaaaaaggctggtgactgtccctgaaagatttgacgctactattacaaccttggagaatactaaggatttgtcaaaacttaccttggcataacttgtaaatgctttgcaagcccaagagcatagaagaagaatgagggctgatgattctgtggaaagagcattgcatgctaaattacaaattaaccactgagagaacagcatgtggaagaaatacaagaagaagaatttcaacatacaagaagcagcggctaacactagcaccaaaagtggagataac

SEQ ID NO: 14518 - DNA, 189 bp, Glycine max
  unsure at all n locations
gtcacacgaagtccgattcaggtgcataatataccgagacgctcgaaattgaacaacggaagctctcgagaaattcaaatggtcataacttatcacacggaagtccgattcaggagcataatatatcgagaagcttgaaattgaacaacagaagctctcgagaaattcanatggtcataacttgtcaca

SEQ ID NO: 14519 - DNA, 275 bp, Glycine max
  unsure at all n locations
taagaaccccatcgtcttcttcgatgtcaccatcggtaacattcccgccggtcgaatcaagatggaactctntgccgatattgccccaaaaaccgccgagaatttcaggtatctatgcttctagtgttaaagcgtttcttcttttagtgctagttagagtgccccttggctttaagcattgctatcaacttgtgattgaacttctacgaaaaatcactanttnttgttttagtctacagaagtttactcattttaattgcaaaagtgcagattta

SEQ ID NO: 14520 - DNA, 275 bp, Glycine max
acttatctccgactgaagaccgcatgtttttgtttggcccaagtttattgcgggctgtagcaccggttccgcttccctagctgtattggaggcggccaccgtggcattatcttctatagttctctgaagctctagcatggcctccgtgatagaagccatttgatcttctaatgccgataggttggccttcatctgttcttgcactccctcttcattatccatttttctggatcaagtgttatatgggtgcctttgcctctcttattatggagagt

SEQ ID NO: 14521 - DNA, 159 bp, Glycine max
gggctacgtgggagtacgtgagctcagttggatgtgggcaacaagggatggtgggtttatgcgcgatttgtggatgtggaaaacttgttgtgcaccatcgcccgaccgccacctagtaccacatgtgatgggtaccccataatcctacaagcttgagat

SEQ ID NO: 14522 - DNA, 350 bp, Glycine max
agatgtatcacacaatcaaataaaggggctactcccagattgttggagaccctaaaacacttacttgttcttgatttaagcagcaataaattgtcaaggaagattcctatgtccatgggcgcccttgttaatatggaagccttggtttttaaaaacaatggtttaatgggtgagttgccttcttctttgaagaattgcagcacgttatttatgctggacctgagtgaaaatattgtagcccggccaataccatcattgataggacaacgtctgcagcaattgataatctttgacatgcgaggaaatcacctttcatgatatatacccattcatctttgtatttgaaccga

SEQ ID NO: 14523 - DNA, 497 bp, Glycine max
  unsure at all n locations
ngggcgcctttagcatgantntgcgacactttagntactcaagctnctcagccaactggtttcctcactaacagtggctagtgctattatctcaaattccatagcggactgaggtaagatagtcttgttctttgactttccaagaaacaagcccaaccaactatgcctaaatatataggttgctggtntgcctttggaatcaatctgaaagagtgttccaatctgcatcattgtatccttcaagtacaacgggaaaccttttataatgtaatccaaggtttatggttcttttaaggtacctcattaccctttcaatagcgtgtcagtgctccatactangtctacttggtaacctgcataataatcctaccacataggctatggcggatctagtacaatcagtggcatacctatggctgtcaatgatacttgtgtactcagtttggtcgatacccttcaccagtgtcttaaaccaggttacacttggaatcatatgg

SEQ ID NO: 14524 - DNA, 491 bp, Glycine max
  unsure at all n locations
aggcggtgatgttgnnccttttgccttacgtagaactataganattaaagcatgcacccgaggagggaagtgatatttgcagctaatgaacccttttttatctatttgtccttagatnaactgtttcttttcttatatgnaaatataaataatataaggctatgccataaagacacagtcatttttacccctaacanatcttagaagtaaatatagaccatgtttttacggaataccctttacaaagatagtggaaatctcaagtgggttgcttgagtactggacgtangcacgggttgtggccgaaccaatataaaactgtgtttgcattcctcttccctatctcattatgttatgcaatcattttgccttgcttgttatagaacatattataatgattggtgtggttctctgcatctaagctatccctctaaaatattggattccactatcttgtaaaatcatacaaagttgaccaccaggacaccctn

SEQ ID NO: 14525 - DNA, 251 bp, Glycine max
tctgtacctgtcgcaagggtctgtggtttgagctcctctgtggaccaccatacagacctttgcgcttccatgcagcaagctagagcaattgatcggcctgaagcttatgctgcagatatatacgatagacctcctcacctgggagcaaataaaccacagcatgacaattatgacctctgcagcggcagatataaccctggatggaagagatagcctaaccttacatggttcatccctcaacaacaacaaca

SEQ ID NO: 14526 - DNA, 374 bp, Glycine max
  unsure at all n locations
ccaaagcacagcttcaaatttgggcactttagatgtatcacacaatcaaataaaggggcaactcccagattgttggaaatcagtaaagcaattactgtttcttgatttaagcagcaataaattgtcagggaagattcctatgtccatgggcgcccttgttaatatggaagccttggttttaagaaacaatggtttaatgggtgagttgccttcttctttgaagaatgcagcagtttatttatgctggacctgagtgaaaatatgttgtcnggtccaataccatcatggattggacanagtatgcagcaattgataatcttgaacatgcgaggaaatcacctctcangatatctacccattcatctcntgtattt

SEQ ID NO: 14527 - DNA, 335 bp, Glycine max
  unsure at all n locations
tgaaggtagcaccgtatcttcctatctgggagtcgatcatgcctcacccaacaacagatgaagccactcaagtaatgacagtggaagaagggtctcanagctgaaccttgaccatctaccaatctagcttggacagaanatttgacatagatcgatgagacgacacctccaataatgcttgaaacccatttaagagcttgtccaactgtaactcggaccaaaattggggcagtgcacgcggcttagcanggacctcaccattcatgagcattgacgcattgccgatgtgctatgcagaaatgcggatctatttacctgacaaacatctgacatgc

SEQ ID NO: 14528 - DNA, 216 bp, Glycine max
tgtccgagcagttaagcaagaccgtagaccagtacttgattatctaagcttggcagcgactcataagcaaaggctataggacgagtacaccaaggtatcaatcctacaagcagaaagggaagcaagggaaagggtgatcgattcattgcacagagaagcaatgatgtggatggacaggttcacctttactttgaatgggagtcaagagcttccccg

SEQ ID NO: 14529 - DNA, 402 bp, Glycine max
  unsure at all n locations
agggaatatcttgtagacnncncntncatagaaactaagcctgagaaggcagncaggtacgaggaaggtttttttctctaaagtactatagagaaggtatgtaccaaacctaactgtgacctataacacttatgatggtttttataattgacagaaattaacctaacctgttttaattatggacaatttatctaaatatagccaagggttattatataaacactattcatacccgttctgaattgagaggagtggattaactgtctgaatgtgcatctgagactcatgatatataaaatgttttataactcttccacctattatgagctgggctaagtacctaaataggtgaaatactcttcgaaacccctaaattgttggaaatgggctttctggaaggcg

SEQ ID NO: 14530 - DNA, 488 bp, Glycine max
  unsure at all n locations
agcttctgccatgatccccctagataccactctcagcaagcttcccgtatatcacttgggaagataattacttggattcatcaagtgattcagaaaatgaaattgcanatctaagcctcatggccaaagactatgaaacccgaagaagaggtgacatcttctaactatgatttatctatttcttttgatgaacttcaagatgcattccatgattngcataaagaatctatcaaacttgccaaattagtttcatttctaagataacccgttcanatttagaaaaagaaattttgaaattaaatgtagagttagaaaatcttcaatctcgagttaaaacattaaaatcaatagataaaaaccaaccttctacaaaatgcttaatacaagaaaacaatgaagcatctcattcatgtgaatgcgctgtataaattnanagaagaaantgtnnatttaaaaaatgctcttgcaaatttactctttgtaaaaan

SEQ ID NO: 14531 - DNA, 269 bp, Glycine max
  unsure at all n locations
tttgcccgctgaaatcttctggacgaagcaaatgttgaacacaaactcttagaaagatattgagaaattggttgttctaaattcatgccatgatcacatatntatagccatttgatggctcctgaagannncntgttaaaagttgtgacttttggcaatttcttcaaaaccaatctattactttaaaaaggtgggacttgacaattatttcaaaaccagncaccttaaaagttgtgactcttgacaatttcttcaaaacactcactggt

SEQ ID NO: 14532 - DNA, 254 bp, Glycine max
  unsure at all n locations
tcagcagcagcctatctatccatagtagtgatggnggctttgatcagagattaaacttattcacactgaagcgcaatacacacgtagtgatcatgagctacaccatgaacagatcatcattctatcgggaaaaatccaagtctcacattgtctagagatgaaactaaaactaaacttatcagtgcgggaaaaccctcaccctatgagcttgccttagggcttagttatgccccaactagacaaccctaatggac

SEQ ID NO: 14533 - DNA, 170 bp, Glycine max
cccctaatgagcgatgacattatgccgcgtttacaacgtctgatggaaaacctgcgttcccacttatcgcttgcacacatccctttcccactgcgtatacgaagagccccaccgacgccttccacagtgccacctgatggcaaggccctgagcggatttctactaccatc

SEQ ID NO: 14534 - DNA, 434 bp, Glycine max
  unsure at all n locations
ccagctcgcccaggcaagctaagttgcttcctttttgaacttcctggaaggcctaagtgggcctggttgctatttgcaccccctgtttactaaatacaccccctgccatttttgctgattctttttctgtaatgttatggaactttacgaattccgtaacgatacttgttttctttccgtaatgttacggaaccttacggattatgtaatcatcccctttttggctttcggcatgtcacagaacttcacggattgcctaacgatgggtgccaagtacctcgaagcagtcaagcaaagggtgcatgccatcaaacaatggtccccagatgaaatanggtatgacagttgcccctctttacttaccttttatcggagataggangaaagcaaagttaaacactgattcgttcgtttacctctttcgaatcatctat

SEQ ID NO: 14535 - DNA, 196 bp, Glycine max
acacttatgttcataaaaacatagtgatcttagcattcacaatcacttatgacaccaatctaagcatgataaaagttaaaataaactatgagcacacatgtgtaacaccctggcaaataattacaactcatattggtagaggacactttgcgttatatcatctcgacatgtgtgtacttaatggcagagaatatat

SEQ ID NO: 14536 - DNA, 492 bp, Glycine max
  unsure at all n locations
ngggtgtcaagctangaggacncacncntnngntannaaacnnggcgccccatcnccgacggaagacagaggagcagnagantttgccnttctcnagagcgcgcctgcacacgcgggtctgcttccctaactgtattggacgcagccaccgaggcataatcttctatagtttggtgaagctcaagcatgggctccgtgataaaagccattcgatctttgtaggccgaccggtatgcctacaactgttcctgcactgctcttcgttatacatttgcctggaacaagtgatataagggagccctttcgactcacttagggatcgagagtcccctaagcaaccaccaatggtgagtatgccacacaaacatgaatctcgcgaagaatgagcgaagccttcggatccactcacggcacttttatagagaagaggacgaaggctaaaacctatcgttgattaaagagaacaagcttttttcaaccaagacataaaat

SEQ ID NO: 14537 - DNA, 273 bp, Glycine max
atgcatgcacctatgtggcactcagtgtcaaattttatggtcatgtgatgctaaggctcaagattcatttcctctattttaaatcaacccaatgtttccaaaatatgttcttttatccatttgtgcattcatccgaatccatttcgggcgttcgggataattttcacaacggtcacccttcaagtgtatacacacttttttcttcaaaattggttatgaattttttcaaagaaaagttggaagtcatctcttttcaaaagcatgttggttttt

SEQ ID NO: 14538 - DNA, 361 bp, Glycine max
  unsure at all n locations
ctcctctaatgactatggcatcatttctggcgctaaactgttgggagttggaagccatcttctcaattaaatntctggcttcagcaggagtcatgtctccaaaggctccaccactggcaacatctatcatacttctctccatattactgagtccttcataaaaatattggagaagaggctattctgaaatctgatggtgggggcaactggcacataatttcttaaatctctcccagtactcatacaggctctctccactgagttgtctaatacctgagatatccttcccgatggttgtggtccctgaagcaagaaattttttttctaagaatactctcttaaggtcattccaactcgtgat

SEQ ID NO: 14539 - DNA, 300 bp, Glycine max
  unsure at all n locations
gataaaagggatgccccacattatttccatgacacaaatgcaaaaatgatgatttggaaattttatgcaaaactggttatgcatgcacctatgcggacgctcaagtgtncaaatttatggtcatgtgatgctagggctcaagattcatttcctctattttaaatcaacccaatgtttccaaaatatgttcttttatcgatttgtgcattcctccaagtccacttcgggcgtccggggaaattttcacagcattcacccttcagatgtagacacttttttttttccaaaaactagctatga

SEQ ID NO: 14540 - DNA, 273 bp, Glycine max
aagtaacaagttggcaaagaagcaaaccgaatcgacaagcaaagtacataaattctgtagaagcgagcttcatgatgaatcaagattgattcaaagaagttctgatgataacaaagctgatgacaaaaagctcaaaggtcaagaacacttcatgataacaaagatgatgatctccagaatcaaagaatgagttcaagattgaatcaagaacacttcaaggttcaagaggaaatttgatttcaagaatcaagaatcaagtttcaagattcaagt

SEQ ID NO: 14541 - DNA, 267 bp, Glycine max
ctccatgagaggcgggatcacatggagaatatatatcataatgaagaagaaaggaggagaagagggaatgatcgtgttcctatacaaaaccgaattgatggtattaaactcaacattcctccatttataggaaagaatgatccggaggcctacttggagtgtgagatgaaaatagagcatgtcttctcatgcaacaactatgatgaggaccacaatgtgaagcttgccgccacggagatttcccactatactcttgtgtggggaaca

SEQ ID NO: 14542 - DNA, 358 bp, Glycine max
  unsure at all n locations
tataaggaaattgacggttatcttctaaaaagaaggttttaagaagagtgaaaatgaagtcactttgtatgtgaagtgataaaaaaatgaagtgcaactcattggttctttatatgttgatgatttattntttatatatagggtatcaaattccttaaaccaaatcaagaatgatatatatgaagaaatttgaaattatagatttggcaaaaatgaaatttggaatggagaatctcactactagaaaatggcgttntacgacacagacactacgacgattatgggggaaccgccttaaaaagatgtgcggtggctttttgtaattatttgacaatattaggatttacgatttaaatta

SEQ ID NO: 14543 - DNA, 217 bp, Glycine max
  unsure at all n locations
tatgtggcagggcgggcttacttcaccttcttgtttcttctcgaactttgaccattgttcttccttcccgcgatgcttcttttcatgtctgcctgagtgggcttatagcctanaccatacttcccacgattaccttgngtatttatcagtctagttatgccgccgttgttttttcctaaacccatcccgggctcataaccgttccccaacataactc

SEQ ID NO: 14544 - DNA, 411 bp, Glycine max
  unsure at all n locations
atcttcttcatcaatggagtccgttgctttttgtatatcaatgacagtggaatgcagaaggaggaaaggtgattggagatgccacttcaaggagaagagagtcaagaacaagttcaccaccataggaagccatggataagagcttgaaggttggagaagatgagtggagggagagggagagaatgggcacgaaatttatgcctcgaatgaggtctaaaatttgaagtgtaatttctcanatgatcaaagtagaaataatgcacacaacaggcctctatttatagcctaagtgtcacatgaaattggagggaaatttgaattttattcaaatttcacttgaatttaaatttgtggagctaaatttggagcctaaagttcactaattatgaatagtgaaatttanctatggtt

SEQ ID NO: 14545 - DNA, 288 bp, Glycine max
agatggaccatttcaagtgcttgaaagaattatgacaattcttacaaagtaagctacccggtgagtataatgttagttccacctttcatgtctctaacttatctctttttgatgcagatggagaatccgatttgggaccaatccttctcaagagggagagaatgatgacgaaatgaccaagagcaagggcaaggatccacttgaaagacttggacgacctatgacaagggttagagcaaggaaagccaaggaagctcttcaacaagtgttggccatactatttgaata

SEQ ID NO: 14546 - DNA, 226 bp, Glycine max
attctacatcgatgagatcgatgcaaagactatcactcgcagctagtcgttcactcacaatgtaagatcatactctcaccgcgtctggaacaagctgttctttctcaataaatgtgtctattgactaaccattctaattgcagacttacatacttgctctttctttgtgcaacacacatacttgctcagactcatgaagagaaacatagactgcatcataatcatg

SEQ ID NO: 14547 - DNA, 314 bp, Glycine max
  unsure at all n locations
cccaaacaccttgaccacgaatctcttctcttaatgctttgttccaatcctcgacctcaaagcaatatttatatgttaattctttttgtggaccttgggctcataacttaagaggatggcttagangcagaagaagcacaatcaattaatagtgtctttaaataagatagggaagagagaatgctatacagtttatactgttcgacacaacccgtgcctactcagtactaagcacccattgagattttatattttgaaaaatcattacaactctgaccacacagacaaccatccttggtcaagaatctacactc

SEQ ID NO: 14548 - DNA, 146 bp, Glycine max
  unsure at all n locations
tcaaagtctgacaagagtatgatgaactaagggacgtccatatggccaccgctgaagccttggaacgagaaaccaagaaggcccgaaaggaagaacacgtgccagcaaagttntgaggggctttatacggcagcaatagtaagctc

SEQ ID NO: 14549 - DNA, 277 bp, Glycine max
gctataactcttccatgttgtttgttgaccacacatgtatattctataaaagcaaaaccttgactggcatttcaataactttttagaacaacttcttagaatttcttgaacaacttttgagaaatcttgacacattggctacttatctttcttcttcttcctttgccaaaagctgtctaagttttctggtttacaaaccttattctttcacataaaacaaaagcgtgatatatctctatattctctgctccctttgccgaatagaatggaccacgac

SEQ ID NO: 14550 - DNA, 172 bp, Glycine max
tccactgtcgctgatccgcagagtgttcaagtcaaccaagcatgtgttggcagccccattccatggctcaatgaaggtactgattgcgcattctcttgtcctatagttaaagggaatcaactattgataatggattcggaggttacaggtcatatttgcacatccattgact

SEQ ID NO: 14551 - DNA, 218 bp, Glycine max
  unsure at all n locations
cccagattattaacactnatactcttgattcacaaacacaaagttgacatgatgccaattcaaacctanagaaggacaccactaacgcaatacatcaacttttctaacaagaagaaacttgcatagaaatatgtcatcaaattcacactcaatatatcactgtgattctttctggatatgaaagctcattctttatttttatgaaaattgtataatat

SEQ ID NO: 14552 - DNA, 381 bp, Glycine max
  unsure at all n locations
agttgacgtttatgtggcctgccaggagaccagtcttcttcctctagagggggtggggcctccacaacccaggagcctgtgactaaagagcctgcagcagaggaagagaccactccagctcagactcctcagccatctccaccatctgaacctgctcctgacgagactcaaccatcatcagcactggatcttaatgaagaccagccacaggaggagcanngacgtttaatttttttttttgcattatgaacactttagttttatttcagttattttatgctttatgtcatttaaatntcagcttttatatttcagtaacatagttgtttgtttgcttgaacaaaaagcttgatngaacagtgaattgattgacattgcatg

SEQ ID NO: 14553 - DNA, 348 bp, Glycine max
  unsure at all n locations
ctctcttgttcaaaagattttggacatgttctatggtcttcanacctttgttggtgaaaggtttgatactttgtagttacaagtggacatgtgattcaatgagatggagtcaacgatcatcaaggttgaagaagatgtttcttacattcgtacaagctttgatctaccaccaccaccgccaccatcatcttaggtgtctattatgtntaataatattagtactttgaattctaaccggggatttggctatattattatgacagttgaacaatttaatatttcttttatttgcatagtatgattgaacaattatgaattatgttatatgactatgagggttttatatat

SEQ ID NO: 14554 - DNA, 405 bp, Glycine max
  unsure at all n locations
ttctagccaaatggacttaccttgaattaattccttttattttccttttgagccttgtttccctttccttgttttgaagctcgctacaagccttaagtgaaaaaccatgatattaccatatccttaaagaattttggagctttggaattgttttgggaataagtgtcgggggtttttgtttcattggacaacttgttttgttggctatgcttcatgatgtattttgggccatacttgatgtacattgtatattggttaaatgttggacatgctgaatgaaatgttgtttctcaaaggctaaagagtcaaaaaaaattcgaaaaaagaaaaagaaaagcaataaagttgagtgaataagatcttaaatggcacaagaatgatgaaactcttnggtctactcttcat

SEQ ID NO: 14555 - DNA, 494 bp, Glycine max
  unsure at all n locations
nnnnntttcccgggttcagnacgtacngncnnntcactatagaaaccccaagcttgcttaaggcgtaggaccttataacgagttttagttattttttgctgacanagcttgatttgcgagtggattctagctctagtttcacttacgtaattagtcaattcattcaacgaaacttccaaagacaaacgtccgattgattttttgcatatttattcaaagaattgtgattaatttatattatctttaagaaattngattatggtatattatttatggaaaagtacgaaagcttgcggaagcatatatgacttcattntctttcttttactcttccctttcagcactatcaagtgatatatgcttacccaacgttntcngannatntacggaaacattacggaagtcccggaagcccgagaagccatttttcacaaaacatgggacgaggtgctgcgcagtcgcccaaaaagctaagttgtttcaccttaacaagg

SEQ ID NO: 14556 - DNA, 363 bp, Glycine max
  unsure at all n locations
agctaccttggnttatactctgcccagccttcgttaaccgttggatcttctcaaaacttggtttgctactttaaaagacacttgtccatgatctgacagttgggatctttgagaagatgtttggagtcttagaagcttccgttcccgagagcatctcttatttaaacattttagcctttgctttcgtgtagttgaggaaaaacgtcatttcttcttctttctttcttccaaagccatttctaaagttccgagaactttctccatcacacacagcctccattagccaccacaaaccatcattgttctccattgaaaacccacaccgagaggaacccttcaaccgaagcggaatcttccaacttg

SEQ ID NO: 14557 - DNA, 392 bp, Glycine max
  unsure at all n locations
agcttagtcttgttcaacctaccatccttagactgatggccaaactgaatggaccattcagttgttggaggatcttttgagagcgtgtgtcttagagcaaaagggaagttgggagagttttctgccattgatagagttcacttataacaatagttttcactctacgattggcatggctccctatgaagctctgtatggtagaaggtgtaggacacctgtcataccctaatttcgttcggggaccagctgtttgttgggatgcgaccctcgtttgaccacttcgaggtacttggcacccatcgttaggcaattcgtgaagttctgtgacatgccggaagtcaaaagatagcatntgtgcacaattcgtgaagttccgtgatgtgccggaagtc

SEQ ID NO: 14558 - DNA, 416 bp, Glycine max
  unsure at all n locations
agcttctatccttatagacttaccttgacttaattcctttgatagcccttttgagccttgtttccctttccttgttttgaagctcactacaagccttaagtgaaaaaccatgatatcaccatatccttaaggaattttggagctttggaattgttttgggaataagtgtgggggtttttgtttcattggataacatgttttgttggccatgcttcatgatatattttgagccatacttgatgtacattgcatattggttaaatgttggacatgctgaatatgatgttgtttctcaaaggctacagaaaaaaaaattataaaaaaaaaatcgaaaaagaaaaagaaaagcagtaaagttgagtgaataagatcttanatgacanaagaatgatgagactcatggttctactctttat

SEQ ID NO: 14559 - DNA, 342 bp, Glycine max
  unsure at all n locations
agctggngtgggtataggcaaaagcatcggcggatcaaggagaatgggcttctttcacggatgtcttggcatcattgatattcggagtcatcctttttccagatgtggatgggctagtatacctagcggcgatggatgccttccttgcttatcaccatagcaaggaaagtccgatcgctgctatgttggctgctgtctatgacacgttcgaccgaagatgcgaatagagcaacgcgataattgtctgtggaacacctgctctctatgtgtggctagcctcacacctctattgccatgaaagtaaacccatctgtcccctgcaaggtcaccgcatttgcgccg

SEQ ID NO: 14560 - DNA, 344 bp, Glycine max
gtatgaaatccactcgacaaggtttgaagtagaagagaaccttcatcctataacgcaacgtggcggacaaaaatgggtagttaacttgaatgaccattattgtcaatgcggaaggtattctgcgcttcactatccatgttcacacattattgcagcttgtggttacgtgatcatgaactactaccaatatatagatattgtttacaccaatgaacacatcttataagcatactccgcacagtggtggcctcttgggaatgaagcggcaattccttcttctgatgtggcatggacactaatccctgacccaactacaattcgtgcgaaaggtcggccaaaatcaa

SEQ ID NO: 14561 - DNA, 487 bp, Glycine max
  unsure at all n locations
agggannatnnnnncttttgttcgtacacgtcgagttcgagctcagcccgcggcgatgcgatacagtcgagctgaccgcgtggcaggcaagcttgcttttaatctgccctacctgaacgaaggagtggatatttaccttattgatttagctccacatctaacactagcgcaaggataaaagctaatgggggtcctggagatgtctataccctcaggagagggcgcacttaacaatatttgtcactctaacacatttaactctacatatgaataattgtagagcataaggtggaggactactgtcttactgtgattaacatctgtgaccgacgggtagagtgatcaaacctcatacgccattacgagcactaggatccaagacttgctgaagaccagactgtgagacgcgcacccggagaaagaattcacgcatttgaaagtccgtgagaccagaatctaaacgactgtaatgtctattaggaagaan

SEQ ID NO: 14562 - DNA, 167 bp, Glycine max
agcttcattcgcacattctctctcgtaagacgaggcgcagactaaacagcattattgtaacaacataagaaaaaccaagactgagtgcgcagatccctcttgtaagactaaagagcgatcctacttcgatcaagttcgaatgcaacagtacatttcccaatgctaaa

SEQ ID NO: 14563 - DNA, 253 bp, Glycine max
agcgtgccttccagctcacccaggcgagcaacggggcttcctccataagcaacagccttctggaggaatcttctggagggcccaagtgggcctggttgctatttgcacccccttgtatactaaatgcactccctcctttctatttatttgtaattctttttccgtaacgttacgaaactttacgaatttctgaacgataattattttccttccgcaaggatacgaatccttacggattatgtatttactcttt

SEQ ID NO: 14564 - DNA, 311 bp, Glycine max
  unsure at all n locations
agcttttatagtgatgtttgtannngancnccnactcacaagcaaaagagacatagaggaacgaagacaaataaaagaaagaaataaggaatagagggaggctcttgcacgtttatatccacccctcttttattaaatagttttgttgtttacacccagttcctctaaacacctccccttctatatccaaagtttacaaataaagtccaacactttcacaacctacactttaagccctacaactntatggaaactatcaacaatactatggcgattaataaancataacgattgttattaaaattttcata

SEQ ID NO: 14565 - DNA, 275 bp, Glycine max
  unsure at all n locations
agtttctttgttatatcttcgatcggacatctcgccaggccgaggtcgaccgtcattattttcgatccattacggngaataatatttttttgccgagatgggctaatgtattcctggccgaataaatgggaaaatgccagtgtcggccgaaacgaaaagtcggctgagctcgcacaaaaaaacctagccgacctacattttaaatttttcatgcaaccccaaaacaagaaaacttcctgtgccgtataaaaaaaaaaaaaacattacatgacagc

SEQ ID NO: 14566 - DNA, 434 bp, Glycine max
  unsure at all n locations
nacgtttgtttcttgacttganacnagnacnggaggtcagcgacgcaggggcgggcgagtttgttttcnattctctcagggaccagcgggcgatgaggtgcagtgctncacactctatactccatgtataatggtctcatgatcgcgtctccatcggcatccaagtaagcaactggcttgagtcgcggtagtttttcgaatcattatccttacggtagataattgatagacaatttttcacatatctggtcacatcggcgtcttaggtcgaggttgaacactagggcggcgcgcgattaaggaccccatggggcatgcctgtagacggaaacccctttactggttaatactaagaacgactggccaccgccttgctagtggtcagccactgcaagtgtaattctggagacgctcgaccggccttcagcggtccg

SEQ ID NO: 14567 - DNA, 487 bp, Glycine max
  unsure at all n locations
nggaagttagtttcattgatgctctttgnananacncnnngaacccgaggancgnacacagggaacccgcagagagcgaccgcgaagcgtgcttttttnattcgcaanggacngaccagggagcgagcgcggaagaaaccgaacngaccaggaaaccacgaaacggcanggaggcaacaagaggccaagggngaaacaccgcggnaccaccanagcgccgaagaaggagggagcgacgagaaagcgcagggaaaagagagggggggacgcaangaccaagagagacgaagaacgacggccaggcacaacaaaaggcgccggaccagacgcagagacacgaggaaaggggaaaaagccggccacgccggcagagggagnngccaaaggcgacgaggcgacccaccacaacaaagacccacccccgcacaacaacagagcaaccgcaccgngccgaaaggacagaaacccccgcaaggcgcagcccggn

SEQ ID NO: 14568 - DNA, 398 bp, Glycine max
  unsure at all n locations
agcttttatctcttgtgcttgtgcctacattngttcttttgtgcatttttctgcctgtgctttaagttatcttctgcatcctttttgctctcatcttgcatttccatcacaatccaagtaagcttcttgctttattttcattttcttttcgaaacttaaaccttagggtagataatttattgctttttagtttacatttctgtttagctttagtgtttttaggtttagggttcacaatatagggtttaggtaagattttagagccccataagggcaatgcctgtaagagggagaagcccctcatttctgctagaaatcgcgatgaacgtgctaagcacaccagctatgcttagttggttcatcgcaactgacanaattttagatttctcgatgatcgc

SEQ ID NO: 14569 - DNA, 332 bp, Glycine max
cgctgaacaaaacatacatggaactggtgtaggtattaatgtctacatgagtctgaaagcagcacatcatcaaaacaacattctgctcgctctgaaagaaagacatatggacctgatgaaacgtgaaaacaaacatgctattagattgttgattcaatcacaccataatttacaacttggtttattttttaggagagaagagtaacgtaaaaaaaaagaagaagttaatgaacctgagattttcctttgacacgagtggctatgatggagaggccttgcagccattcctcacggttgaagtgtccatctgcaaagaagccattcccatcatt

SEQ ID NO: 14570 - DNA, 397 bp, Glycine max
  unsure at all n locations
agctngtgtgttatttgtgtttgcaagtaaatgatgaatgagcgagcgcatagcacaatgaatntaagatgaaacgacgtagttggcagtgaggcaggaggagtttatggttttagcattgttgttcttgagttgtgttgaatctggagagagagatgaataattgtatagcaaagagacgtgagaatgcgaggagcagtagagaggaagatcaactgatagtgactccattaggcgctggaaatgaagttgagtcttgttcgattgtggaatacacccggcttactctggcatggctgctttgccctatttcgacgagattgacccttccatagtcaatgttcttctcatcactcactttcacttggatcatgctgcttccttgccctattttctc

SEQ ID NO: 14571 - DNA, 415 bp, Glycine max
  unsure at all n locations
agcttcatttattttacatatttcttcaccaaaaaaaatctttaccataaaaaagtaacttatttgattaattaataaatttcaaatattaaatcaaaaaatacaaaacaaaaaagttgttaataattttttcgaaagcatgccacatttttatttaatgtttttaaagaaccccccttggtactagtactgcttcaccttggcttttcctcggaaataataggaaaatatttggttaaattggtttttttcttctcaaatttgatcttttattataaaaaaacgtagacaaaaaagttaaaataagctntgtttcatttaatactaaaatatttatgacatanaaatatataatattatntaatattcaaaaaatgaatatgtntattaaaaatggatatcatgattacaaaga

SEQ ID NO: 14572 - DNA, 354 bp, Glycine max
  unsure at all n locations
agctnagattcttctattacttccatacatnggctntgaacaccatgaggaaattcgcacaanacactgaattggtgagacacaaagttacaagatttgctaccactttcttaactntgcaaagattgcataagcaaaaggccaatcttagaaggatgtttacttcggatgaatggttgaagtctaaggaagctaaagagtctaaggggaagcaagcaacaaatgttgttcttatgccatcattttggaatgatgttgtctacattttaaaggctatanggcctcttgtaagtgtgttgaggttggtggaataatgaaaaaacctgcaatgggtttcatttatgaagcaatgga

SEQ ID NO: 14573 - DNA, 224 bp, Glycine max
cgaccgcgcaggcaggcaagcttggttatccagcgactaaaccccaacgagcgccgggcagtgatggaaatcttgacacccacctgcgaacagattgtcgaggggaacacaccagacgggccaaactggaaaccacaagccacagtgcctgatgatggctgccgacacattcaaccaacggcccgtgaccacgaggattctcacggacctcgatatgtcacaag

SEQ ID NO: 14574 - DNA, 398 bp, Glycine max
agctttattctcattgtctctcacagtctttagattttgggagccaatccaatccttgtgttcggactctcagccacttatgatagccgccgatgatcccattactgcttcccctaagctctctgtcctttcttcacgtcgcatcccatgccttgcgaactccttggagtaccctcgcgttgtggtcactgaaaccccgtgtgatgaaaggtgtgatgcttttgtctgatggcactcctctcatggggtagccaagtggtcttatggcgaggacgggattataattaatacaaccccttgttcccatcaagggaacatttggacatccttcgcatgaagatagaatcctgattcttccttccttctagcgagggaaccaattaacagatgctccttct

SEQ ID NO: 14575 - DNA, 335 bp, Glycine max
gtgcaagcgacattttattttatcttttttcttcaccaaaaaagagctggaccataaagaagtaactcattcgactaattaacaagctccaaacatgagagcagacagctacacaccgaaaaagctgttactaatcttttcgaaagcatgccacatttttatagaatgttctgaaagaaccccccttggtactagaactgctacaccttggcttttcctcggaaatcagaggaaaatattcggttaaattggttcttttcttctcagatacgatcttttactatgaacaggcgtagacaaaaaagttaaatgcagctttgtttcatttaatacta

SEQ ID NO: 14576 - DNA, 388 bp, Glycine max
  unsure at all n locations
agcttcgttgattgttcgggactgcgngagcaagcacctctactcctccgccatcttcttcgccgacaaagtggcagccttcaccgccgaccccgcagacatctacatgcaggcccaggccctcttcctcggccgccactaccgtcgcgccttccacctgctcaacgcatccaaaatcgtcctcaccgacctccgattccgctacctcgccgccaagtgcctcgtattcttctggttccttctctcttttttcatttgattattgattaaaaccattcattgaaaatacacatcaattctaataatgggatgtctttttctatttttatttanacgagttgaaacgtgattcttgaatgaattcagatagtatgagttacaacttata

SEQ ID NO: 14577 - DNA, 297 bp, Glycine max
aatgagaggaacatgaaagataaattataccttaagtaacattgtgatactttctaatattaagaacttaaatgacaacaaaatacattctgaagatcaagatgatgatgataaaagaacattgcatagcataagaaaaacactctaagagtgtgtatgatttatatgagagaggtagaagacattcaaaaaatataattttgtattaaaataatatgtaagaaacatgaatttgacatgataaaatacagaatgtctctgttatttagttattggcgaaacaaacacacccgaagt

SEQ ID NO: 14578 - DNA, 510 bp, Glycine max
  unsure at all n locations
nnnattcgtgggctttcgtttgatncnntgaanaaacnggnaacnggagctgggaccagggagccgaagagaggacaccgaggcttgctttctgtttctgacaanccncaagagcgggacagcgcgtgaacaacatacgtgcgcaccactcaaccagtatatgaggcgtcggcgaccgagcccaacaaagcacgctcgaaacctactggacatgcgacaccccgcagcccgtgcctggcgagcgccacagagcacccaaaccttgaggacacagaaacaccaggtgaggagcagggggacgcaatagaccgatggcgcgcctaacaccgagtagcctagtgtgcttaaggcgcggacaggacaagaaccaatacgtgcactcgggccaccaaaggaacataaggacagcctacacatgacgatagaatgcggattcgctcctccatcgagcgacggaaccaaataacagatgctccttaaatggctagactagagtcagacccacaatcg

SEQ ID NO: 14579 - DNA, 306 bp, Glycine max
  unsure at all n locations
atcttattctacgcttagnnctcaaagaactacgtaggtctgatttccttatcacaattgacgaatacgtatgagcaagggaaacacccttgtcgaccccaaaaaagataaaaaaaatgtaaaaaagcacaaaaagacataaagacgtaaaagggaacataaaacaaattgaagtcatatttgcacacttgattaaaggttgtcgtcccttgtgacggacgcgtggggtgctaataccttccctgtgcgtaagtataactcccggacctttcacttaaattntgtagaccacacctttccagtttt

SEQ ID NO: 14580 - DNA, 431 bp, Glycine max
agcttctttgttatacctcgatcggtcatctttccaggccgaggtcgaccgtcatttttttcgatccatttcggtgaataatatttttttgccgagatgggctaatgttttcctggccgaataaatgggaaaatgccagtttcggccgaaacgaaaagtcggttgagctcgcacaaaaaaacctagccgacctacattttaaatttttcatgcaaccccaaaacaagaaaacttcctgtgccgtaaaaaaaaaaaaaaaacattacatgacagcgagcgttttgaaaaacaaaattgcgcaacgtcggctgaaaaatatcagtcggggcttcttcacgaccgatgtcggctattgagttttcaattcaatccgtgaacgaaatttgcatgatgtcggttaggaaatgttcgatcggcatcatcctgtgaag

SEQ ID NO: 14581 - DNA, 408 bp, Glycine max
agctatagttatatacttactaatcatagctacaaccttccgattaaggagctcccattcgttgtctttcttccctttcatcttattcttatgggtgattgactcgtgcaaatccttgcagtacagatgattttccatcattgacttccaataggagtaactttttgcaattagcttgaaaatatctgcatcatgagtgatagctccctccatcttgaatcacacaggataatagctccccccaaatcaagcaagctctgataccactattgggaaacactagctctatttccctctctgtagactcaaaatagacacttagcggaaatgaacaaaaaaaatagaatagagagtagaagaatgacacacacgaatcttaacgtcggaaatcctttcagagtgaaagat

SEQ ID NO: 14582 - DNA, 480 bp, Glycine max
  unsure at all n locations
ngacgtaggcattgagatngtaanaccacaatcagcaggtcacagggaccgaggacgcacgcgaagatgcctcttcaattaattcngcaancgccgaggaaggactgggaagagtttcctacacaatagcgaccacagagaaacacggggaacaacgtggagctcacctgaaaaaaagaggaaggtaggaggcgaacatgccgatactcagtccaggggccatttatcaaaagagaaangaataagaccttgaatacaagtcaactcacaaagcatagatacgatgggagataaaacgctggctcagagcatatatggcaacggcaacctgaaccaattggttggatagaaccaccgtcaacataatcacccgattatctgtaaaaggctagggcaggaatggcagaaccactctactgcatagaagcgccagaaagcaaacaaatgacctggcctngataaggatagtaagcaaatggn

SEQ ID NO: 14583 - DNA, 421 bp, Glycine max
  unsure at all n locations
agcttccattgattcacataactcccatccactggatccgcccttatttcctccatcagaaacttgtaagcagtgttggtcgaataaataccactcgaatgttgcttccaaatccaagaatctgctccatgttgttgaattgatatcagtcctatatcctataggaattctgcagccattgaagcttcactatcgaataggtttctcctccaattgaaattccattcccacccttcctccttgtggcttcccatgagtctgatagtttgttgttgttggttagaaacttgatacagcgtangaaatttgtccattaaagttctgtccccccctaaccatttgtcatcnccaaatctggtcatgtcttcacaatgcaccttccactctatttgatccttatttttattcactcctctatttg

SEQ ID NO: 14584 - DNA, 270 bp, Glycine max
  unsure at all n locations
agcttatttttctttatttataacgaacacagaagacgnnagaactgcgttgaacctccagcctacattcacacgatctggaacatggcacaactacacgtctagacacagagcttgtacagagctnatntncacccgcaacacgaaaacaagattacatggaaatatgaatatatactgtgttgagctagacctagaaacgttcaagaagatactgtcggtatgttgcactaactaattcaaataacatgctnttcgagcctatatata

SEQ ID NO: 14585 - DNA, 403 bp, Glycine max
agcttgcattctataccttcgaccaaacacttgcgtgtgtatgtctcggcccggatttaacgcgggttgcaacaccggctccgcttccctaactgtactataggcggctgccgcggctatatcctctatagttttctggagttgtaacatgacctccgatatggaagccatttgatcttttaaagtcgatagatcagccttcatctgctcctgcatgccctcttcattatccattcttctggatcgagtgttatacgggtgccttggtgttttcttatttatgatgaaattcctaaagaaataaacaacagtgagtatgccaccaaaacatgaatatgctaatgaatgatcgaagcactcggatccaccccaaggtttctatattacatgatgagatcagaac

SEQ ID NO: 14586 - DNA, 424 bp, Glycine max
  unsure at all n locations
agcttgcgtactataccttcgatcgaacacagccgtgtttctgtctaggcccggattcaaggcaggctgcagcaccggctccgcttccctaactgtactggaggcggttgcggtggctttatcctctatggttttctggagttttaacatgacctccgagatggaagccatttgatcttttaaggccgatagatcgaccttcatctattcctgcatgccctcttcattatccattttttggatcgagtgttataggggtgccttggtgttttcttacttatgatgaaattcctaaagaaataaacaacggtgagtatgccaccaaaacatgagtatgcaaatggatgatcggagcacttggatccaccccaagatttttagataacgtaatgagtccagaacttctcattntataaaaagaaca

SEQ ID NO: 14587 - DNA, 184 bp, Glycine max
gactaatgaaatctcaatcaatctaatacgagatacgatgttctaggaatttttaaattagttataatcctatgaatatgcgttttattttatggatctcagtgataatgcacttcttaaatgctaatctcaatttctgttcaagctacaaactcttttccactatagattttcaacctacaac

SEQ ID NO: 14588 - DNA, 362 bp, Glycine max
  unsure at all n locations
agcttctctaatattatgcgcctgaatcagacttccgtttcaaaagttatgaccatatgaatttctccactgtattccgtgtgacaagttatgaccatttgaatttctcgatagcattcgttgttcaatttcgagcgtctcgatatattatgcgcctgaatcggacttccgtgtgacaagttatgaccatttngaattgtcgagagcatccgttgttaaatttcgagtatctcgatatattatgcgcctgaatcggacatccgtgtgacaagttatggccatatgaatttctcgagagcattcgttgttcaatttcgagcgtctcgatatattctgcgccttaatcggacttccgggcgaca

SEQ ID NO: 14589 - DNA, 379 bp, Glycine max
agaagaggggggcttgcattgccttttacctcaatagacaagatttgcaagtggttgaagaaaaactttataggcagtttcgtgtcagtccaaaagatggtattaaagtgttgcttgataaatctcttataaagattaatgagcatggtcgggtgataatgcatgacttgacacaaaacatggttaaagataatggtgacattacaacttgacacagaacatggttggagataatgcctaaaccataatatcatttcaaacaaggtgttacaatcgtttggagaaaacactgtaagactgatatagatggtttgggtttgtaatcttttactttgatacatctcatttatcaatgggagttcatcatttattgatgtta

SEQ ID NO: 14590 - DNA, 203 bp, Glycine max
ggcttgcttcttcttatttcagagaaaagatgaatacttggctacttcatgcactcctctaatgacaatagcatcgtgtctggcactaaattgctgggagttggaagccatcttctcaattaaatttctggcttcagcaggggtcatgtctccaagtgctccaccactagcagcatctatcatacttctctccatgatactga

SEQ ID NO: 14591 - DNA, 359 bp, Glycine max
  unsure at all n locations
tttctaatgatcaaaangcctcaatcattccaaaatgcatgtgaattaagaagcatcaacaagaatcaagccaaggctattgtgcaagcaatcaatggggcaaaacacaccaaatgattatgatgatggatgactcaaattctcacaaaggtaaactcatcactttcaaattaagctttcataactatcatgacatgtataggagaatcaaggatttcaagtcacaaaatgtcaagaacctttattattaaaacaattacccatttcttaaacatatcctataattcaaagaaaaacatgccaaagtcgacatgcacacaaaattgacccacaatattaaactataaatccacgaaact

SEQ ID NO: 14592 - DNA, 343 bp, Glycine max
  unsure at all n locations
agcttgatatgattaagtgtataagggtgaaacttcctgcttttattcgttgaccacagagtggtacctggagatatgtcgcgggggtcaggagaccttggggacgtcaggtggggtgctattgcccaaaagcaagcttgaccaatcccgacccaacccgggcatagtcagtcagtgagaacctgtgatgtacctaaacaggcgagctcctggccgtcaatagataaaagaataaagaccacaaagcaaggaggcttgtgtggtggctggccagctgtgaactntgagtgttatatgggatatggcctctggtaatcgattaccaaggatgggtaatcgatta

SEQ ID NO: 14593 - DNA, 485 bp, Glycine max
  unsure at all n locations
agacgtctgactctgntactnncacantaannaagacccgcgagncgaagagggacctgcagggagcgagcaggtgtgttatcccaacaggaacccaacgaggcgaatccagagcaaagcccggcccccacccccacagagagaaacatacaggagccgccagcctgacccagagacatgacgcgacgtggggcgcggccacgaagccaagaagcaggacaggagcggcccgcaggacccaggggcgaccatcaagcatagcgccacgaggaagggacctgaacacatgcaaacgtagcgaggacgctgaggcgaacgacccccgcaggctacaaacacgagagggcgacaagcgcaaggcccatgaggaaagagcaacgtgcggcacggcggtcgcgaaagcagacgaacggagccgacgcgaacgccagagcaccggaataaagcacgagccgacgcgacgagaagcgcggctagagaggacc

SEQ ID NO: 14594 - DNA, 377 bp, Glycine max
  unsure at all n locations
gactaccgatccgagantctgaaacacaanaccngaganggacacaggaacccgacggagagagccaagcttgatatactttattggaacacagcagcggaggacagcactgacgccacacacaagaagggcaccctgggacgagcccggggcaccaacgaggggaaaccagagcggggacgtagagagggacaaacgacggcaggaccgaccaaacagagaggagggagggctcacgagccacgaaaacggggacccgatagcgacaaccccggaccaaagacccagggaccaaagagggaaaaaccgccagaaggcccaaagaaggaaaacaccagcagcccgaaagaagaaccaccggaaagccaggcctgacc

SEQ ID NO: 14595 - DNA, 401 bp, Glycine max
  unsure at all n locations
agcttctctatcttatatgcatcttgtggctataaaagtcaaaaattaaatatatccctgctagcctaagtatttttaagtgaataaccagaataacttgaacaagtaattcaaagaatcagcaacatacctcagcaggccaggcatcagactccttcaaactcacatttgtctccaactgcttgaattcaggatagatacaagcactagaggcataaaaaaacctaaaaaaaataaaccaaaaaacaaggatcactatgacggcgacataaagactatatcatgcaattgaaagtgacataataacacatgtntgttcaaaatgaatgacctcttaacaccattgatcctggcagcctcaatcatgttgaagctaatcatggtgttgttgtacataatga

SEQ ID NO: 14596 - DNA, 109 bp, Glycine max
  unsure at all n locations
agcttgctctatattacattgatgtttgtatntattggaggggtttgtatgccattttttgttttaagggtagcgtttcttggtaaaactaactttccaaacgtttgcc

SEQ ID NO: 14597 - DNA, 168 bp, Glycine max
gtggcggctgaccaactgtgaactttgagaggtaaaagggatatgagctccggtaatcgactaccaaggatgggacacgagtacaacgctcacaaggaagacagcgaaccatgacggctcagatatccctacccctcggacgcatcaaacaccgagatgaaaaacgaa

SEQ ID NO: 14598 - DNA, 127 bp, Glycine max
taccacccaccggaccctagcaccgagagcgctgttttgttctagagaagaggatatcgagaaattccggaaagaagtaagaggggtggccaaacaaaagagctacgaggcggacttggagctaaaa

SEQ ID NO: 14599 - DNA, 419 bp, Glycine max
cttaccatatatttggtgaatgaggttgctgcatgtacacctcctcttccaaaatcccattaagaaaaacattatttacatcacactgttgaggtggccagccataagtgacagctagggtgagaagcaatctcactgttattggctttatcacaggtgagaatgtttctgtatagtcagtttccatactgctgatggaatcctttggccactaatctggctttgtatttactgactgtaccatcaagattctctttaattctgaaaacccatttacaaccaatgggaactctgttatgaggcagagaaacaagagtccaagtactgttgttgatgatggcatcatactcagctttcatggcagctaaccatatgaagtcagtcaaggcttgcttaatagacttagtttcatatgacat

SEQ ID NO: 14600 - DNA, 402 bp, Glycine max
aagagaaagaggccagagagacccattcaactccacatgtccacggcgagaaaacaacacatagcagcataagacacttcatgtattgccatattatctgatggctatcttttattattgatatgaacacatgtatatccttacatcttatatggttggggatgattaccttctctatattcatacacactaatggctaaggtgaagcaatttgctctgtatccgtatgacagtgcaatatctactatatcatttgttggatagtgatatattaacacagtttttttctataattaacgttgtgttctcactattgacccttgcatactcaatcatgttagcacttttttatgtgtagatttacattattattgaatgcttggtctgattattttattcacg

SEQ ID NO: 14601 - DNA, 410 bp, Glycine max
  unsure at all n locations
agcttattctaatttataaaaattgaatcatcgtcttaacaagtatttatttggcaccaaaaaaaaaaataaacaagtatttaagaaattttagctagtcaaaataagaaaatttttattttaaaagttttattccaccccttcatcccaaattgtgggagaataattgaattaaatggatagatgttatataaatcatagtcatcttttttttatcatgtagtatcacatctctcaatattttattttatattctaataatagatgctatcttgaaatcttaaattatttttttgacccacaacaattgaatgcaaatcaattntatgaagaaaaaaaaatcaatcttttaaatggagggtagattntaacagttaatttacaagaattgaatcactnaaatcaaacat

SEQ ID NO: 14602 - DNA, 111 bp, Glycine max
tatcttgctctaaatctacattgatgtgtgtatttattggagggggttgtatgccatttttgttgtaagggtagcatttcttgtggaaaactaactttccaaatgtttgcc

SEQ ID NO: 14603 - DNA, 157 bp, Glycine max
acaaaggaggggacatccctagcggatctttgcttgtaaaagattttataaggatattggaaatctcaagaatcggtggtcgcttgtggattggacataggcactggttgggaccgaaccaatataaatattgtgtgtgtcttcttcttccctacac

SEQ ID NO: 14604 - DNA, 421 bp, Glycine max
  unsure at all n locations
agcttcatgtgttatggcctcagcaaacttcttatttccagaaggaaattcaatcaatagacctccaatctttaatggagagggttaccagtactggaaaacccgaatgcaaattttcattgaggcaatagacttaaacatttgggaagccatagaaataggaccttatatacccaccacagtagaaagaaccataatagattgaagcacaacaagtggaagcacaacaatagaataaactagagatagatggtctaaagaagatagaagacgagtacaatataatttaaaagccaaaaacataattacatctgccctgngaatggatgaatattntanggtttcaaattgtaagagtgctaaggaaatgtgggacactctacaagtaacacatgaaggcacaacatatgttaaaagatct

SEQ ID NO: 14605 - DNA, 297 bp, Glycine max
agctatttatcatttcaaatggtcataacgtttcactcggatgtcggattcaagcgcataatatatcgagacgctcgaaattgaataatggaagctattgagcaattccaatggtcataacttttaactcggaagtccgattgaggcacataatatattgagacgctcgaaatcgaacaacggaagctctccagaaattcaaatggtcataactatgaactcggaggtcggactgagactcatattatattgtgacgctcgaaattgaacaatggatgctcttgagcacattccaat

SEQ ID NO: 14606 - DNA, 406 bp, Glycine max
  unsure at all n locations
agcnaagcttatttggncnttgctagagaaaggancgangngggtctgagaaaggcaaatttacccatcctgcttggacgaatgaaaaaactagggccaatgaagagggtgatgatgaatganaacccgtgctgtgactgccattccaatacaacccaagttcccacccacccaacaatgtctttactcagccaataacaaaccttcttctttacccaccgccagttatccaccaaagccatccctaaaatcaaccacagagcctacctaccgcactttcaatgacaaacaccacctttagcataaaccaaaacaccacccaaatatgaatttgcagcgaaaagcctgtagaatcacccccattcagtgcctatgctacttgctccatatctacttgatattcaat

SEQ ID NO: 14607 - DNA, 422 bp, Glycine max
  unsure at all n locations
agctagatttcttttataagacaggacacactgctgtcttctactataagctaaaacagatacaataatctattctaaagatacacataattataacatattcaacactgatcctatgtgctcattataaataaaggcttagtgtggtcatccaagacgcgacattacacagtaaaacactattataataaatgaagactaattgtggtcatcctcaacaacacattacagcaaacccttccaacatccataatgtgcaatgaatggtatttaatgcatataatgcaagaactagtaacatgtttgctttgacatctcacccatgctcatgtgtgtntcaccgaaacaaacattcacggcttctacatatattaagctatgactcatggatatgaacagacctaactatggattttttgtaa

SEQ ID NO: 14608 - DNA, 495 bp, Glycine max
  unsure at all n locations
nnnaagtacgttgttagttttcttttacnntcacannnaatnagagcaccgggcgcagggatccagtagagccgaccgcgtgcgcaggcaggttaatttttagtactttataaangaaacaacgngcgggcgagtgttcatttgggcccgccacaaacgactccgtgaataaacgatattgcgctggtcaaagaaggaaaatttttatatgaatagatgtataccaccccttcataccaatcgagggagatttatagggttaaatggtacatgttgttcctacatagacatctatattgatcgtgtgaatacatctctcatattggttggaattctagaatgcacgccatcttgaaccttacatatttgagtgcgccccgcaaaagaatgctatcagggtgccgagcaataaatataagacttctatgtgcaggaacgcaacagagaatagttcgacagtgtatgctgccatgaaacattcccccttcataggtg

SEQ ID NO: 14609 - DNA, 178 bp, Glycine max
  unsure at all n locations
cctagcgtgtcgccaggacagaaaacaagtaccatagtttacagatgcctaacacataattgcctctgctctgcgaatggacgaatatcctaggcgttcaaacagtagattgctgcgacatgtgtacactctaaagtaacacctgacgcgcacatatgtagaagagctggataactcn

SEQ ID NO: 14610 - DNA, 397 bp, Glycine max
agcttcatatggagtttttctaccagaatacttgtgtactccctcttccaaattggtattacttgtttttatatgggagtggtcttaccagcaagtgcaccgggtcaccaagtaaaataattaaaacggaatgaaccgagtatcgaacacagcgaacttgttcgattagcaaagtttttttaagtaagcaagcatttgcaaacagaaattaatgattgtgaattaaagcaaaagtatgttctatcctaagtaaaagcaataaacgagaacaagtaagtgtgagaacatatatctaaaagcgtcgggtcctcctactaagtaagttgatgcaataaagatgttatttaataaagatgtcctatgtctatgtcaggacaaaatacaacacaaatcctca

SEQ ID NO: 14611 - DNA, 311 bp, Glycine max
tacgaaagactgccgaggatattcagaaatttaatgactgcccacacctactgactcgaggggggtatgaactgcttgacaagagacttatggaggagaataccaagcgttgacatgaggaacatcactatactgaaaacccaacactcaacatcgacccttcatcctctatggcaagacacttgatgtggaagatcgcacgcacaaagagctatgacccaatgacgtcggacgcggcacgagaatttgtgcacataattgagagaccatgtcttcttttggtactggcattgccaaataatggtgagcca

SEQ ID NO: 14612 - DNA, 302 bp, Glycine max
agtctttttcttagggagacggaccatctcaagtgctcgaaagaatcaatgacaatgcttacaaagatgagctgcccggtgagtataatgtgagtttcaccttcaatgtctctgatatatctctttttgatgcatatggagaagacgattagaggacaaatccttctcaatagggacagaatgatgatgacatgatcaagagccatggcacagatccacttgaatgacttggagagcctatgacaacggctagagcaaggatagccaatgaagctgttcacgaatgttgacatactatttga

SEQ ID NO: 14613 - DNA, 102 bp, Glycine max
attaatgcgcagcaacacatcgtctaagggcaccaatgactgccttaaataaaggacgccttgtcctgctactcatctcaacactcgccgcattgattaacg

SEQ ID NO: 14614 - DNA, 277 bp, Glycine max
ttgatgcactcctctaatgacactcacatcgtttctggcactaaattgctgggagtttgaagccatcttctcaattaaatttctggcttcagcaggggtcatgtctccaagagctccaccactagcagcatctatcatacttctctccatgttactgagtccttcataaaaatattggagaagaagctactcagaaatctgggggtgagggcaactggcacataattctatacatctctcccagaattcatataggttctctccactgagttgccta

SEQ ID NO: 14615 - DNA, 408 bp, Glycine max
  unsure at all n locations
gaggtagcctgacatcgatcaaaancgnagtgacaggacaaaggagggggcgagtttgtttcgtttangaccacacacgggcgcggagggggaagaaaacactcgcacccaaacaacggagaaacacgaagccaccggacgccacgcagacacaaaggaagaacgcggtgggtacgcacagacggacacgacggccgaacggacagaacgcccggcacgatcgcaacccaggacagggccctgagaacgccgagagccgcggacgcccgaaccggagaacgacgcgccgccgccaaagtgaaccacactagcgtacggcgccagtcaagcaaacacctagccgggcaggtatgcgcccaagagaagacaacagcgccgcggtaaagcacatcggacgccccccccccg

SEQ ID NO: 14616 - DNA, 312 bp, Glycine max
agcttcttatgttttagttgataaagatgaattcttggctacttcatgcactcctctaatgacaatagcatcgtttctggcactaaattgctgggagtttgaagccatcttctcaattaaatttctggcttcagcaggggtcatgtctccaagtgctccaccactagcagcatctatcatacttctctccatgttactgagtccttcataaaaatattggagaagaagctactcagaaatctgggggtgagggcaactggcacatagttttttaaatctctcccagtattcatataggttctctccactgag

SEQ ID NO: 14617 - DNA, 389 bp, Glycine max
  unsure at all n locations
agctagcctcctttctctcccaggcaagctaggttgcttcctcctctggaggaacatcttggaaggcccaagtgggcctacttgctatttgcacccctctgtttactaaatacaccccctgcctttntttgctgattctttttccgtaacgttacagaactttacgaattctgtaacgatacttgttttccttccgtaatgttacggaaccttacggattacgtaatcatcccttttttggctttcggaatgttacggaacctcacggattgtgtaacaatgcttccttatgatttccggcatgttacggaacttcacggatcgtgcaacaatgctctcttttgacttctggcatgttatggaacttcacgtatcgtgcaacaatgggt

SEQ ID NO: 14618 - DNA, 292 bp, Glycine max
  unsure at all n locations
agcaagagtgnctgtttgttgangnngagccaagagctagcatgctacgctaagctctaattctttgtggctctgaacattgtagacttaggctaagctcagttgcgtgctaagccattctacaaaaaatgtttctgtgtcttcgagctaagcgtcaacttgctgcgtttaacgcttgagtaaaagttaataaggtgcgctaagctcaacatgctgtgctatgcgcccagtcagaatttcagtattatttttctgtttgtgtgaaaataacatgtattaatctcttgtgttt

SEQ ID NO: 14619 - DNA, 341 bp, Glycine max
  unsure at all n locations
ctgcatactcatcccttatcacaagattgccaaaatccaataactctgccactggattatgtgcttcttttggacaatttgtggaccacacaaccgtgttgttgtgtgtaaggaccaaattgccagaactgtttagtctcaagatggcagaggaatcatttattgggttgccaccgtttgcaacccaaacaacattttgtgacggattattcttgaaccaaatccccaggtagcttttgtttggaagtccaagattgaagaaaccaagctcanagattcccctttgggaaaccatggtctttccaaaactganggattgggactgtgaaatggatgatgtg

SEQ ID NO: 14620 - DNA, 421 bp, Glycine max
  unsure at all n locations
agcgantatttcttgcnttctatggcggngagccngngcttgactcatcttctacttgaagtggcatctccaatcacctttcctccttctncattttgtttccattgatcttcaagaaacaaaggactccattgatgaagaagatccaaggcctaccagctcaacatggagctacatcatgtggtatcagagcatcttcatctaggtgatgatcttttgcttcctctatctntntgcttggtcaattcactataattccttggtcttcatcttcttctccatgtatctcctccattgcttgtggcttggctctgtntagagtagattcaaaaaaaaataaaccgattcaatcttagatctacacttgctcttgcatttctatggttcacatntaatagatctactcttgaatcatgtttta

SEQ ID NO: 14621 - DNA, 222 bp, Glycine max
  unsure at all n locations
gcaccggcgaggcgatacagagagccgaccggcagcagcgcaagcttcttatataaatgcgagagaacggacggcgggtgccagcacaacgacaacacccccgagcggcactaaagngagggagagcgacccacaactcagcccagacgggctgaccaggggtcatgcgtacagagcgcaccaccagcagcacgaccagacctcgccccgcactgagcccca

SEQ ID NO: 14622 - DNA, 417 bp, Glycine max
agctttacttcatatgttttccaaatcatcaagaatcttgttgaaaacagccaattgttaagtggctgttcttgactctgtcatcttgaaggtgtacagtttttgcttcaagcatagccgatttgcaagggactttgtcatatacaatgactccagtttcaaccacattgaggctgctgtcttttctcttgcaacttctcttaaagctttatctccaaggtatataatgattgcacttctggctttagcaatcatctctgatttctcctttgagcttagagattcagacatcttttcttctcctttaagagcttctgcacaaccatgatgaatcaagattgcttccatcttgattctcataacccacagtcattttccctgaaaacttctctatatcgtactttgttgttccatctt

SEQ ID NO: 14623 - DNA, 371 bp, Glycine max
agctttgttccaaaatcctgacacaccataaaccttgacccagggtgagaatgtcaattcttaccctcggaagcaaaaaaaaaggggagagggaaaatttccaatcaaagaggaagcaaaaaaggagagaaggaaaatttccaatcaaaggaaaaaaagagaggaaagggaattcccaatcaaagagtgggagaaagcaaaaagaaaagaaagataattcccaatcaaagaatgggagaaagaataaagagaagaagatagggaagaaagttcccgatcaaaaaaaaaaataatatgcagaaaggtctttggaccggacaatatctgaacaatacagaattgtcaccaaatgaataaaaagaaggaaaggg

SEQ ID NO: 14624 - DNA, 360 bp, Glycine max
  unsure at all n locations
agcttctatggaagctggatctttgagcttcattgagatcctgcaatggtgattntcaaccatggagttgcagcggaagataaaggagaagagttgagaggaggcgtcatccactatgaaataagccatggaaggaggagcttcaccaccatgagagtgtcttggataagaagcttagagagaaagcttcaatggaggaagaaaatgtgagagggggggggggcactacattgaaggagaaaaagagggagagaagttgaactttgaagtgtgtctcacaagattcttattcatcanagttacaagtgttacacatacttctttttatagcctaggtagcttccttgagaaacttccttg

SEQ ID NO: 14625 - DNA, 400 bp, Glycine max
  unsure at all n locations
agcttattttaaggcatgtgaagtgggtggaattcctagagcaattcccttatgttatcaaacataaaaagggaaaaggtaatattgtagccgatgctctttctcggcgtcatgcattactttctatgcttgaaacaaaattgattggtcttgaatgtttgaaaagcatgtatgaaaatgatgaaacttttggagaaatttttaaaaattgtgaaaaattttcagaaaatggtttctttagacatgaaggctttcttttcaaagaaaacaaattgtgtgtgcctaaatgttctactagaaatttgcttgtttgtgaagcacatgaaggaggtttaatggggcattntggggtccaaaagactctagaaacattacaagaacatttttatnggcctcatat

SEQ ID NO: 14626 - DNA, 218 bp, Glycine max
taaccgccatcggccagggccaatgacgttggagatcagcagggccccccgaaaaagtgtgcagtaaggaggcgaaagatagcgttgcggaggtaactacggtgagacgtggacctgctctcgaagattatgtactgacacatttgatgacaactgctcttcaaggggaaggggatgatggaagactacctatgaggggacgaagcactataacaatg

SEQ ID NO: 14627 - DNA, 363 bp, Glycine max
  unsure at all n locations
ggcttttattctattttcccaaacatgacaaagaatgtttccaacaatctaattctcacgttaatctagtaaatcttgtcctactctntatatagttttatgattatccaattgattcaagagcaaccctgcatgttcacatggtatcatgaagtattatataaaaatctatctgatcatcatcaataagcaaaatacagaggctgtcaacaattaattgaacaataacatattaaaatcaaatagatatctcttgacacacatatacagaaagcatactcaattcatgatagtaaatcaatcaaacgtacactttataggtacgaganacangataaagacacattataatcatagataaat

SEQ ID NO: 14628 - DNA, 413 bp, Glycine max
  unsure at all n locations
agcttagttctatatgggatgaaccttttcaggttttggagaggatcaataacaatgcctataggttggacctcccagaagagtatggagtcaggaccacttttaacatttctgatttaactccttttgcaggtggagctgatattgaggaagaggaactaacagatttgaggtcaaatcctcttcaaggggaaggggatgatggaatcctccctaggaagggaccaatcactagaacaatgagcaagaggctccaagaagattgggctagagctgttgaagaaggccctanggttctcatgaaccttangatagaattctgagcccatgggccaaggttgggtccaattatctttgtacatattagactangatgtcattatanttggtccttgtatatagggctccatatt

SEQ ID NO: 14629 - DNA, 424 bp, Glycine max
  unsure at all n locations
nanttttgttgagcaganananngganaggcacgggccagcnngcagcagagaggaacacgaagcaacaanccgnnnnnccaccgcaanagaancanccccaccnggcgggaaccacgaacccgngcgaacaaancngcagcgannccaaaagaaccaaccacaacacnncnacagcacggagaaacanngaangaggggagaagggccacnacgcggaaaagccggngggaggcagngaccngcaccacnnggcagcaacggaacaagagagnagccnccaacgaaacacnngacagcaccaaancgangggcaaagcagccaccncggagcggacccggcngaagcacanggagaaggaacaacnacgccacnncaaccaacgggccacgaaacncagagaacggaaagcgaacagcccacg

SEQ ID NO: 14630 - DNA, 468 bp, Glycine max
  unsure at all n locations
naaaggctatcttgacatcgtgatncacaagaaccgggannccncagagncgacctgcgggcaagcaagcnagnatgctaataangtgacgcaggcnannnaagggacgcgacaggagagnatgcnagcacacccacacagaaagacaganagacaaanaaaaacacacagagaaaggcacacanaggcaaagagacacacacaagaacacggaggccagcgggagcacagaggacgggggaagcaaaaagcaacgaacgccgcggccggcccgcagaaagaaagagaggcgcccgccccacaaaaaaanggacagagccccccgacacaccacccncangggggaggaaaagaacgacccccccacagagccacaaacaagccccccccggnggaaacacaganagaanccgggcgcgaaacagaggaaaaaacacacaccggcggcgaaaaagcagaccagggccg

SEQ ID NO: 14631 - DNA, 430 bp, Glycine max
  unsure at all n locations
gangatgattttggngtacccgncacaagnggnacgagggggcgaacgggcgaaggngcaaaacaacncnccacagccacaaancacgcataaacccaccaaccccagnagcccaacctncaacggagcncacgnacgcccaagnnacccccnatccncannccncncaacaaccgggcgcccancaaacgcncccaagccgccgcaacanccaagcaagacaacanccaaccatcangaaccagcaaaaccaagaaaacagcgcanaggaagaaaaccngcccanaaaacacaaaccaanaccgcaacnnnncntactcanataccccagnaacattctcttncttccaatttgtttacccgtggatcgactcgaaaatttactggnggccccagtacataaatctacattgtgaccggtgggatctgn

SEQ ID NO: 14632 - DNA, 330 bp, Glycine max
  unsure at all n locations
nagcttcgtttacgatgtttaaacataaagtcaacttacagcatactaggaaaacattgcaaagatttaactgcgaaccatacagtgtgcaactcccttttgcggaggccaccgtactcctgatgctgttcactaaggatacgccggatcccccacgttattgagaaacgcgataccggagaaccgactcgactgtaatgaagtcgggagtgattacgcacgtgatgtanttcacccacacgtcgcccaaggacgcgagttatggatgtcaacagacttgattttatgtccttgtatgcttatatctctaccttttaattttctttgtgc

SEQ ID NO: 14633 - DNA, 503 bp, Glycine max
  unsure at all n locations
aaaaaactgctgtctagttcatttatgtacngcagagttaataaagcaccggcgaggganacagnagagcggcacgcaaggcaggcaagctttgttttcatggcaaccaacacaagncacggagaggctcatgtgaatgagcctctcngcccgcaccatcatgaacacattgtctttcagtaccttctattcctccaaggaaataactcctccatacgggagaaactgacattgatgaataagaaccacatcatcgctagtataatcattacaatgggaaggggaagatagaagccaccctatgaagggaccaagtcctagagcaatgattgcgacgctccaaaaataaaggactatatctgtagataaacgcccaaaggtaacaggaaccgatggatataaagctcaaccatgcggcacagtggcgccagaaacctagacattgaaactggcatgacttctgcaaggcacgtggcggagtctataccgtcggctggacatcn

SEQ ID NO: 14634 - DNA, 375 bp, Glycine max
agctttctttgtcttctttaagtaaagatctagtggtagaaaccccaactagtggttctgtgttaacttctaatgtgtgcttgaattgtcctgtggaaatttctggtagaacatttgtcattgatctgatttgtttgcctttgagctaaattgatgttattctaggaatggactggtatcagagccggtcgaaactttttgtttagagtctaacaaaagtaaaaatacaatattatccatattttctaatttttcatcatccaacaccttttttctttttccatatgcatctccttctctaaacctcctatgtcttgacttttcattatcccatatcttttttttgctggtttgtttcacttcatctcgtcggtg

SEQ ID NO: 14635 - DNA, 403 bp, Glycine max
  unsure at all n locations
gcttattacatgttctacctcacagaanaccgggaaggtcagattgngcttcgttctgaaccgaaaccgtgagtcaagtttggaagattccgctccaattgaagggttcctctcggtgtggggtttcaacagagaaatacggcggttcgtggtggctactattggctgtggtgatgtagaagaagctttggacgttggaaatatttttggaagaaggaaggagacagaaatggcgtttttccaaggctacacgaatcacaaaggctgacacactcaagttcttctgctctcggaaaaggaagcgtttctcacacgccggatgtcgtatcgccgatctcaacggtcatgtcgtccacaaatgtcttatgaaccttcagaccaaatctcaagaggatccaacggt

SEQ ID NO: 14636 - DNA, 393 bp, Glycine max
  unsure at all n locations
agtttttcttgataatctatagctnagcnacacacacccatctaaaaactaatctcaccctccttgacaaaatacatganaatacaaaaaaaaaatccctactacaaagactactcaaaatgccctgaaatacaaggctaaaaccctatactactagaatggccaaaatacaaagcccaaaagaaggagaaacctattctaatatttacaaagaagagtggatccaaccttgacccatgggctcaaaaatctatcctaaggttcatgagaaccctagggccttctttattagctctagcccaagcctcttggagtcttctatccaatacccttgnggggtaggattgcatcacctgtgtanaggaaggtggatatgtacttgtcgagacaaca

SEQ ID NO: 14637 - DNA, 97 bp, Glycine max
  unsure at all n locations
tttctnattttnatacnngagncagcgacttgagctgagtctattcttacctgaaggatctgtgaaccaaactcattttaaattatatctaacctaa

SEQ ID NO: 14638 - DNA, 283 bp, Glycine max
atcagactcatgagaggaaacacacactccatcacaatcatgcattctaaccaaactcaatacatacacgaattctcgcaaaaggaccatagcgattcactgcaatgtcatcacaatcaagatgaactgttccatatgctccataacaagcataccaacggatgacagaatgcacaactatataactataaacggaggccagaactactcagaacaatgcgctataactaatatagtcataatcctagagatcaacttgaactgagcattctcctcatctatc

SEQ ID NO: 14639 - DNA, 350 bp, Glycine max
  unsure at all n locations
ttcttagtttttcaccntanaaaccttaattnttgaaattataaataacccatggtggtgaaaatccaaagagaattgacagtcacttcaacacaagtttgggcctttatttcaactaacaaaatgctaataaaaccactcaacaaaggtggcaccctctactcttcttggaacatggtgcaattgacaatccaaagcttcgccacttgtaacttgggcctaaattcaaatagcatggttaacacttgttaaagagtttccttggccttctttgttctagcccttggcataagtcctccaagtccttctaaaggttccttgcccttggttattgccatgtcctcatcaaa

SEQ ID NO: 14640 - DNA, 423 bp, Glycine max
  unsure at all n locations
agcttttctatctcaatcatctctgtctattgactaacaattctaattgcaagttcacattcttgttctttctttgtctaaaatacatacttgctcaaactcatgaaaagaaacacaaactccatcacaatcatgcattcaaaccaaaatcaattcatacaccaattttcacaaaaagataaaagtgtttcactgcaatatcatcaaaatcaagttaaactgttccatatgcttcagaacaagcataccaacaaatcacagaaagtataactatataattataaacggaaaccaaaattactcanaacaatgtactaaaactaatatagttataataaaagagatcaacagaatctgagcatcctcctcatctatcaaatggagaaactagggaatcagtgagagcaacaacttctccggatg

SEQ ID NO: 14641 - DNA, 428 bp, Glycine max
  unsure at all n locations
agctntaattgctttcatgtcatctgtaacctttacaagttcaacagttggcttctccctcacaataggcaagagagcaccctggacttgtgttgcatttgcaagctcctcgggagtagaatcaccagcctacaataaaacaacagtttcacatgacacacaaacatctttcatttcgaccttcatcagaaatgaaaatgcctaccacaatcaaaatagataatggaacatctgaattaccttaaccttgtgtgcccgtcttgggaacacaaccaatttggccttgtatgttttcagcctctgcacattagcttgcagactttccaaagaacggttcttgcgacgatgatcaacagcaatacctatggttggtgcaagctttttgggaatccctgctgcctatggcataatatanaaaatacataata

SEQ ID NO: 14642 - DNA, 422 bp, Glycine max
  unsure at all n locations
agcnnngattatgtcttaattaatcacatgtnngncatcatcaaaaagagggagaatgtgaatgtatgtatacatgattttgatgatgccaaagaagaatcaaacaaggctgcttcaaatgataagcatttgcttcaagaataattcaagattgcttcaacaaacaaagccttgtttcaagattcactaaagaccaagtcttgccttaaaacaaagtgctttcaagacatgcaaggctctggtaatcgattaccagaagacagggttgagaaatagctgttgaaaaaggttttgaatttgaattttcaacatgtaatcgattaccatatgtctgtaatcgattaccagcaacggaactttggaaattcaaattcaaaagtcataacccttcanatataacttgtgaatcgattacacaaaca

SEQ ID NO: 14643 - DNA, 408 bp, Glycine max
  unsure at all n locations
aaagttttttttctttganctcannaaaaggaacggcagggaacagagaccgagggtgccggcaggttgttanntctttaacgcnganccggaggggcatgtccagtatccacccctccccgcagaaccaccaattagaatgcgtaacaccgaatattcggaccgctttcctcacaactattgggcagaggtagactacgtttactgtgaaaactaccatgaccacatgactaatcagtggacacaaaagaataataatttttttgaagaggcaagcaagatatgctcttcaaaaaaaaagagatttatgatgggagggggctcccaggagtgggtaacaagacataatatacacccccgcggaaccttgctcaaacataaaccctcccgagactcttccattatgcc

SEQ ID NO: 14644 - DNA, 365 bp, Glycine max
  unsure at all n locations
ggcttgctatcttggttataaaagaaaccgtctgtgagtcatatgagaatttttggttgtacaacatatgcattagttgatttaaggactaagctggatgataaatttgtcaaatgtgtatttattggctatgctacttagtcaaaggcatacagactgtataacccactaactggcaagataattgtcaatagaaatgttgtatttgatgaagatgcacgctgggtttgggaggaatgtgaaatcagtaaaagtgtttatcagaaatcagtcagttntgatggttcataggaggtctcaaatgtgccagaaaatgatcacactccaagccctcattcaacgccatcaagccagggatcattaac

SEQ ID NO: 14645 - DNA, 402 bp, Glycine max
  unsure at all n locations
agcttgntgttctccattgcgctaaagatcgtgacaggtacgtttcatttcgtctacctgtgttgttctattgaatagctaggtttgtttctggaacctttggttaacctaaggaccttttttggtttctggtgcaaggattgnggaactcatggtgacctgagacccattgccgctgccattgaatagctgagtctcgctgccattgtcggtgttgagtttgaggtaagcttcatgtcttcattgaaactttgtgcttccgcgtacgtgctctttgtgctcacttctctttgaagcatgtntatgttcccatcgtaatttgttcttatgaaaactagctggtatagattgtagttagttggtaattagtactactatacggtttgaatgcacctattggta

SEQ ID NO: 14646 - DNA, 406 bp, Glycine max
  unsure at all n locations
agctttgtttattgttatatctgtccctcaaacaaactctgcaacttagcatctgaagtctgggagctttgagcagatggggttgttgatactggcgaagagggaacaccagctgctctggacctggttttccttgcccttggaaaattaactatttggtcattcacattccaacatttccttttaatataggccaagataatgaccagcctcaggctcttgtaagcagtaagagcatcagatccaactccccttgacctacacaagactttgattaaagctgggaagcctaggcaagaagagttgaactgggccataatggttatccctgtgactaagccataaactaacctagctctgtcaatattcaagttcgaggtgtgggaggtangagctangttggagt

SEQ ID NO: 14647 - DNA, 391 bp, Glycine max
  unsure at all n locations
agcttgagttatgatttgaatagagatcatcactaccaacaatgccttgaagtaagacttcattggttgcctgtgatttaactgtgcaaaagtgaggaaagaattcagagtaaactccattatctttggcaaatttacttacacttgatggatttttagtgattgagggagcatgtaacaagtaatgaagataaagaggaaaactaggattagtaggggacttataagaaggagaaccagaaccaagaatttttaaaccttcaccattaccaatataaatctgatctcatccatcanagtgaccaagctgatgaatattntgtggttctccagtcacatggaatgaagctcccgagtcanggatccaggttgaattagcattgtccatgag

SEQ ID NO: 14648 - DNA, 277 bp, Glycine max
  unsure at all n locations
agcttgcttaatgatataccacnnnnaacaaaagagggacgcgggggaaacaagctnncacacgaccangcacanacccncaaaanaaaaagaggggggcgacaaggcctccgataggacaaactcaaccacaaagagaacatgcaaagaaatacgaaggccaccaaaagcaatgcgacgaagacatgcgcaaacgactcttgagaacatcacatgaaagcagagatagtctaacatatactcatgcaattattcaagtggaagaaaggagataaga

SEQ ID NO: 14649 - DNA, 345 bp, Glycine max
  unsure at all n locations
tatcttacttatctgtnntaaatccaagcccataaataaattaaattcaaatctagataagataaagataagataagatctaattttgtagaataaaatagtctgccctcttcaagtccaagcccaattctggattcaagcccaatgcttcattaattcctgaaattagattaaaaacatcaaattatctgaatgggcccaaataataaaattgcctaattaatttgacaattaagactaatcagtacttaaaatggtgcaaaaagggttaagaaataagagaaaataatggcacatcaaccattcatcaggaaatagcctaagtatgtccacatgacattgact

SEQ ID NO: 14650 - DNA, 115 bp, Glycine max
  unsure at all n locations
ncttctaggtttcctcgacatagaacctggccatctcttggacattatactttgtctatccttgcaccatacatatatctactaatcctatgggaactacaaagatagccctctt

SEQ ID NO: 14651 - DNA, 416 bp, Glycine max
ttcttggttatctccttctttactacatcaagaatcaccgggttgagtcttctctgtggttgtcttactggtttagctccatcctctaaatttattcgatgcatacatgtggatgggctaataccaggaatgtccgccagggtccagcctatagccttcttatgcttcttgagaattgacaacaacttctcctcttgttcatcagcaagggaggcagatataatcactggaaaactcttgctatcatccaagtaagcgtattttaaatttgatggcagaggcttcaattctggtgtggtccgctggacagtggtagaaggagatggtttctcagcctttacctcataaagaaagtcagaggtatgtgtacttcctgaaacatggttagtcctatctgactctataaaaacaatctc

SEQ ID NO: 14652 - DNA, 409 bp, Glycine max
  unsure at all n locations
cccctctctttccctgatctacaatgcattgttctgagtcactgctacatgtgatttgatccatcttcaatntatttatctaaaaaaaaaaattggttttccaatgcaatggttgtatgtgatatatgatataatttgctcttcattctaattactccctctctaaaacaaattaggcctggaaatataatttcctgggtatatcttattgaaaaagaacaattgtgagtggcctcttgttgatgcttggctatgttntcatataanggtgttgcttctttaattaaattctttttgtctatctttcgggaagccatgtgagaatgtgttttatgctcgaaaatgaatatcacatgcttctatggaactaanattgttgtctagtttagcctttggaaatctttgaata

SEQ ID NO: 14653 - DNA, 353 bp, Glycine max
  unsure at all n locations
aaaaaaaatgggttttgaattaatattccactaaaaatgaccaattagattctttagcaaaaattagttntataataaagagtttttacagtattcactaattagaaatcatgttagaaataattnttaaagtatttatttcanagtaaaaagaaattactagtactgtacataataaattntaattgattaatttacactttactggtaaaaaaatgcgtagagactacgggaacttgctttggaaaatgatgatacgaatggatgaagacaaaattggggatgtttggtgtaggtatgaaatatcaaaggtcaaaatcaaagttcaccaaaaaagaagtcgaaaaccaaaa

SEQ ID NO: 14654 - DNA, 423 bp, Glycine max
  unsure at all n locations
agcttctacttatgtggcagggcgggcttccttcactgtcttgtctccaacgcgagctntgaccaccgctctttctttccgcgatgctcctctntatatccgcctgagtgggtttatagcctaaaccatacttcccacgatttcctttggcatttatcaagctagttatgccgccgttgtctttgcctaaacccattccgggttcgtaaccatttcccaacataactcgggccatcattattgctgcatcgggcaggcaaggctgcccagagaaggagtccacagaggaaatgctgaccacctcaaaagactggatagcggtttctaacgattcttctgcggcttccacataaggcatagaggatgggcagctcaccaagatgtcttcctcgcctgacacaatgaccaagtgcccttccacca

SEQ ID NO: 14655 - DNA, 267 bp, Glycine max
cttaatccgacatcagttttttcttatttttcacatgaatatgaagctctcagatgctgatggtcatcttcgcaccacgcgaaggatgatcgacgaaatggagagtccgcagaggaactcactagatcaggtacttcttgattatcaggatgcagctgagcgcttgccgtacttgaaaacaacctctcttctttttgtcctctcatggcgaacggtgggggtatatactaaatttaacatccagtgagcatgagtccttgacctttc

SEQ ID NO: 14656 - DNA, 366 bp, Glycine max
  unsure at all n locations
agctttgtatgttcttatnccaccattatccatagtagaatactggtgatgtgtctactatcattgtcatcgcttttttgtcattgaggtgccactatgagctgccatgttctccacctttgggcgtattctttgacagaatagtgccctctttttgcacatgtactgtagttgcatcctatccgaagacattatactgacactgcctaacgaaggaaaccactatgtcctttcaagaatggactccggaaggttccaagttagtgtaccatgtaacagctacccagtaagactttcttggaaggaatgtatcaataatttcttatcttttgcgcatgctcccatcttgccataagtcatctttag

SEQ ID NO: 14657 - DNA, 423 bp, Glycine max
  unsure at all n locations
actaagctnncaagaatgacatatgtttatgcaaatgttgatatgtaagaattttttgtagtgcagcaatatatattcaaggatgtagcaatgctaagatatatttagttatgtgaccttcgcaataagtggaccataacataatagaataaaaaatattgatgtgtgatagagcatttttagtttattattttcatattcttcttaggttatttaacctttttttactcttattttctcaccttaattcaattttggtcttatgcaaataattagacttacacaactcaaaatgaatcatatgagtagtacctagaaagctaaggaaaagagctcgaattttatcggttatgagtttgggcgaattctactttttttatggttattctgggcttacaagtcagcgcctctatacttggcttt

SEQ ID NO: 14658 - DNA, 408 bp, Glycine max
tacaagccctagaggcagagcttgtagatcccgtgattcaaagagaagttcaagtccatagcggtcaatgtctgaaaagagtatgattaactaatggacgtcaatatggccacagccgatgccttggaacgagaaaccatgatggcccgagaggaagaacacgaacagagcacagttgtgaggggctttatatggcagcaatagtgagctcaagctctgaagaggtgaaagggatcatcacgggtcatatgcatgatcttgaaggacgagctaaaggctcgccttatgtcgaacagaaatttgtcccaacagttaagctagactgaagggaatatgtgggccattatcgatgagtgcatagagaagctaaatctagcggcgactcacgagcaaaggctagaggatgag

SEQ ID NO: 14659 - DNA, 324 bp, Glycine max
  unsure at all n locations
agcttttctactattgccactctactcaggaattcgtgagggatatgttgacgaggaacaccactgcttcctccaggagaatgttgttgtggaaagcaactacagtgctgtaatacagacaattcttccgccaacacgtaatgaccctggaagtgttactattccttgttcaatcagagaagtcactgtgggaaaggatcacattgatttgggagcagtatcaacctaataccactctctatgtgtataatgttgtgagagcttggaatcatgcccacgagaatgactntacaacttgctgaccgatccatctcaagaccttac

SEQ ID NO: 14660 - DNA, 207 bp, Glycine max
aacattttctacttacgcggatcgaaaccctaatcctacagatacctgttgatacggccttctactgacaaagagaggccgccagagacgccaccattgtgcggagtaagcttttaccatgtgcctatttatgtaaacaacatgtatatattggtagtagttcacgctcacgcaaccaccctctgcaataatgtgtcaacatggata

SEQ ID NO: 14661 - DNA, 375 bp, Glycine max
agcttgaatgttctataagatgagtggagaacaaaaactacccctaatacaaaaactagtctacgtgccctaaaatacaagggctgaagatcttacattacaagggtatcctaaacttgtggggtaccctccctacattatggagcactaaatacaaggcccaaaaaaataatgaaaccctaatctaatatatacaaagataagtgggatcatacttagcccataagcccaaaatctatcctaacgctcatgagaaccctatggtcttctcctgcatctctagcccaatcttcttggagtcttctattcaatgcccttggagggtaggatagcatcattaggggtgcctaaaagcaagatattcactatggtact

SEQ ID NO: 14662 - DNA, 521 bp, Glycine max
  unsure at all n locations
naggacgagacttgaaaacttgcagntacntacgagacaccacnnannaatacaagcacgcgagcanntgacgttagctcactataagagtactanggaatatgtatcatttttactctcnaaacnactgccctgctggaatgactctgatgggcctacttacaagggctataccanaggaagccgatgaaactctctcacatgtgctgctcaaactatttgaatacaaggcctggcttcatcaagaaacgaccaatgtttacttgtatcatggccctcatggacgatgactaaatggccccccttcgtctcaatataacaatgaaaaggttgtctaaatattggcccagttcttgtccaatggggagaccataaaaatgttctgtgttaatcaagtaaacaggctttattattgttacttctagaataagtatggcacaatttatacacaaagctctttctttcggacaccaatcgttgtaactaggggctagggggtggacaaaaacacggcacattcn

SEQ ID NO: 14663 - DNA, 389 bp, Glycine max
  unsure at all n locations
ttcttgagagttttgagagaatttattgtgtgaagatctgcagagaccagagcttgaagaggaagctgttctgagagcttgagatgagtttgtgagtggttgtgagatcctagaggtgaatgagacatcctcaccacttgtatttttgcaatctttcatctggttcttctctctattgtaaaggaggcttcctggttatggaaagctaanatcctctgttggatcttccctgtaggtacttaatgtaaatatctttctatctatataatgatgtgttatgtgttctctgtgctatctgctcttcattctagtatgcctttaccttgatcacgtagatgcatgctttgttcgggtcattcacacaatgaaactggccttattctgatgac

SEQ ID NO: 14664 - DNA, 462 bp, Glycine max
  unsure at all n locations
acacataaaactcagcttaacgaccacactaatccacacattganccattttctttggatcccacttacattcgacgttctggaacattgcacaactacacgcttgacacagtgcttgtacagagctcatctcccccgcagcacaaaacaaattagttggaaaaatgaaataactgtgttaagctagacctaaaaacgtacaagaagaactgtcgtttgtttcactaactaaatcaaataacatgtttttgtagcttatatatatcattaagaaaccagtcaacagtacctgaaggaagtgaattgtcttttaatcgagtcagaaaccagtatatatcatttaagatatgtaagagagtgttgtcttttcagacaaatgaagcattagcgaagcanagacacatcatcatgttgtgcatgtggaggtggcgggagctgaactgcgtattcattatatgtggg

SEQ ID NO: 14665 - DNA, 455 bp, Glycine max
  unsure at all n locations
cgccagattgctatacatggattctggtattgtgccattctatttattatgatagatgtcaaggtttgtcaagtgtatggtactcaagtatgaaactaggcaatccgccagtgaagacattgagatctaaagcaagatgagttaaggcaaggcattccagaaacatattcttacatgcgaatccaactacgaattagttcagccaggttttgttgatattacgcatagaggtaaatgtaaatataggaaaaatataactatatggtgtggtccacgtccgctgtggtatgtagtgattataattgaattccttgttttttaaaccaccataatgaaggtctttggttctctgacggcacaatgactccaatttccatgcatgaagatcaatgcactagtagggtcatggcactaagatacaanaaaaaaaacaaagagtctatcattttacttca

SEQ ID NO: 14666 - DNA, 469 bp, Glycine max
  unsure at all n locations
gcttataagaacattattgcctcaatcatttccaaatatgcatgtgaattatgaagcatcaacaagaatcaagccaaggctattgtgcaagcaatcaatggggcaaaacacaccaaatgattatgatgatggatggctcanattctcacaaaggtaaactcatcactttcaaattgagctctcaaaactatcatgacatgtaaaggagaatcaaggatttcaagtcacaaaatgtcaagaacttttattttcaaaacaattacccatttcttgaacatatcctataattcanagaanaacatgcaaagtcgtacatgcacacagaattgacccanaatattaaactagaaatccgacgaaactaacaacattaacaaattaacacaactaacaaattaacaaaaccaacaaaacttgtaaaaccaaagaacacttccccncccccatacttaaacaacacattgtcctc

SEQ ID NO: 14667 - DNA, 410 bp, Glycine max
gccctatagtgagtcgtattacaattcactggccgtcgttttacaacgtcgtgactgggaaaaccctgtcgttacgcaacttaatccccttgcagcacatccccctttcgccagctggcgtaatagcgaagaggcccgcaccgatcgcccttcccaacaggtgcgcagcctgaatggcgaatggcgcctgatgcggcatttactccttacacatgggtgcggtaggtggcaccatataccgcgcactcgtaggccaatctgctctgatcccgatatttatacccagacttatggccgcctataaaaacgacgactcgaaagcgttgcagacccatttgaatcacctctgtgacccatgatattggaatgatcagcgggaaaaaaaaacctattgcctacttagccattcg

SEQ ID NO: 14668 - DNA, 427 bp, Glycine max
  unsure at all n locations
agcttctccctcaatttcctataaatagggggagaagtgaagtgaataagggttcanccccttaggcacttctctctcttcgaattgcatggaaaaatatttccgtgatgaaaatctaagccgaggcgcttccgaaacgtttccgtaatgtttccgtgaggaatttcgcanaggtttcgaccgttcttcgacgttcttcattcgttcttcatcgttcttcgatcttcaacgggtaagtacctcgaaccaagcttttcgattcattctatgtacccgtggtggtccacattgtgtttcgtgtatttttattctcgttttatttactttgtatacccccttttgacgtgcttaagtcantttatttaagtcatttctcgcttaaactaaaaataaaataaatttccaccgatcgtttgaattgtattat

SEQ ID NO: 14669 - DNA, 405 bp, Glycine max
  unsure at all n locations
ntgacttcgctcaccactaactactagggaattcctcatgcttactctctaaactactccactaatggaatcatctcatggttcacttaaaaatatattactagaggttgaggatcaaagtcctacacatttctaactcaccttggtcgaaacaagggcttgacatcatctcacaacaacatgtgtattcttgacaagaacatctcatactccctaatcaacacaacaacatcctactaaagaaacatatgaaatggaatcaaatatcttaaaattgatttccaccaatgaggaagtaataaaaatagtcattgagaataaggaaatcactatatgtttttttcatctttagaaataagttctcacagaatttatagaaaagtactttatacatcacaactaact

SEQ ID NO: 14670 - DNA, 434 bp, Glycine max
  unsure at all n locations
agctttattattatagaatatccaaggagaatacctggatctgacttatcatcaaattttcctaagttatcttttccattattcaatacaaaacatttacaaccaaagatataaagatgtgagatgtttggttttctgccattgaacaattcatatggagttntctttaaaatgggtcttattaaagccctatttaaaatgtagcatgcagtgttaacggcttcagcccaaaagtattttggaagaggagtatcatttaataaagttctagcaatctcttccaaagatctatttttcctttctacaacacccatttgttgagggtttcttagtgcagaaaagttatgctcaatcccatgcttatcacaaaataattcaaattctttattttcaaactcacccccatgatcgctcctaatagatataatctttag

SEQ ID NO: 14671 - DNA, 438 bp, Glycine max
aaaatttgaaacctgtatacatcatttattgggatttggggacataacaatcaacatgcaaaggagaaatggaagaaaacgcataacatagaacacaaaataaaagattaagaaataatttagaaaatccccaacaaatcgaaatggaagaaaacgcataacacggggagggaaaacaaagaaagcgccatcaaggtagaagaaggatcatgaacacccaaacaattaaccaaaaaaaatcgcacctgttgtgataaaaatctctgctttttttgagataaaaatcaaagctttagtgtgttctttgggcttctatgcgaaacaaagtatgagaaggatcatgaacacccaaacaattaatcaaaaaaattaagctttgaaagaactacaaagaaaacacacctattgtgataaaaatcgttgtttttttttaaagat

SEQ ID NO: 14672 - DNA, 434 bp, Glycine max
  unsure at all n locations
agcttcctctacatccaagcaaaacaacattcaaacagcacaagctatcacagccaagcanaacagagcaaaggcagagaactctgccaaaacaccaaccaaatcacagctgttctcacttagagaccccagtaacaattccttcgttccaattcgttaaccgttggatcgactccaaaattntactggaagtctatagtacataagcctatattttgaccgttgggatctactagcaaatatccagaactcattctgcactgctctttccacagccaaccacacacaagcatttttctgcacaagccaaaatcctgctgcacctatttcacagcaaaaatctgcacaaagtgcagatttcgaaaatcacacttcccctcatccaatcttgcccaaatcaattcctacaagtaccaaatcatgtatcaatcatg

SEQ ID NO: 14673 - DNA, 500 bp, Glycine max
  unsure at all n locations
naacctggtgnngcctanngttcngaanctagnnnannnnngtcgagnancnatatngngataataanaatagagataanagtnttgnggtatttatatctaactgtctatanggggaggatcgttgagcctataataccaaccatancaatcaatggattaatttngtattaaagnaagaaaaggtagaacatantacttttttggtgtaaagatatacgagatgtatggaaagtgaaggggaaaatggagaatcctgacgcttgctaaacggattgggcgagcaagtgagagtgaaaacagatatgatgaagcattgtgtcattatattgacacacatgaggcaattaggggtgccctaacgggaaagaaatgaggtgatctatgataaacggacagatacctaactccgatgtatcgagagcattgacttcaaaaaaaaagggagaatctacatgtcgatcggagaccataactaacagaacggtttctgattcacg

SEQ ID NO: 14674 - DNA, 389 bp, Glycine max
  unsure at all n locations
agctnttatattatgtngacctcgagtgtatatgggttgtcttccatgtttcaatcgtacgtagcttgtgtcttcttcacagatagggcatgcacgatggcccttaacactgcatccactcaaattcttgtatgctgganagtcattaatggtagaaaataacattgcacacaatgtgaatgtctcatttcgatacccatcaaacacaacaacttccttgtcctacaactctgtcaagggttcaatcaaaggactgagataaacatcatagacaacatcaattatttttacttcatgcactaccaaggaggtaagttgtaaattactagcanaacaagtcacaaactatgctgagttcttanatngtcatagggattcattccatcact

SEQ ID NO: 14675 - DNA, 421 bp, Glycine max
  unsure at all n locations
agtggtcgaagaaacacgtcattgctcgtcgtggctaagagtgaaacacaatagacagcattatacatgcaagcccattctgacttagtttcatgaactaccaacatataaggtctggcagtgaaaacctatctataaagactaatacacactgtctcgatcgataatctatgaacatctagaaagcttgctattggagataatgcaaccgccaatggtctagaccacatcaaggagagcaaatattaacttacacaaccttgagaaagtctatgtntanaagagaacaattggacagagtctatagtccgcctttttttttttttgataatcatagtgtcttcaccggaagaaacgaagtggaaactcatccttaaatcgtggtagtaaaaccacattaaactcaaaaccatactcgact

SEQ ID NO: 14676 - DNA, 435 bp, Glycine max
  unsure at all n locations
tctagttaaattgattaccaattattttgtttcgattacatagnnnagnngagaccatgtgttttcatgagtctctattttaatccattatcaggtgatcgtaatcgattactatgttcttgaaagtattccaaggagtgatcaagaacactttaatcaattaaatcaagaatctaattgattatattattcttgatagctttctagattttgggaagaacactttaatcgattaaaatgggaatctaattgattacttcttcgagataatcgattaccttggcaatctaatcgattacaagcagttataattgttctttataaatagtcaccttgtgttttcactttgacatgatttgaataagtgttgtaaaatgagcatttgcaactcactcactctagtcttcgtttctaaagcattcatggntaaagtga

SEQ ID NO: 14677 - DNA, 392 bp, Glycine max
  unsure at all n locations
agcttgttattgtttcacgaaagctctcgagaaattcagatggtcataactnttcatacggaagtctgattcaggtgcataatatatcgagaagctcgaaattgaagcacggaagctctcgagaaattgaaatgatcataacttatgacacggaagtccaattcaggcgcataatatatcaagacgctcgaaattgcacaacggaagctctccagaaattcaaattgtcataactcttcaaacggaagtcagattaaggtgcataatatatcgagaagcttgaaattgaacaacgtaagctctcaagatattcaaatggtcataactgttcacaacggagtccgattctgacgcataatataccgagacgctcgaaattgaacaacggaagc

SEQ ID NO: 14678 - DNA, 447 bp, Glycine max
  unsure at all n locations
cagctnctgctgcctctgcttcctggttagtctcctctgcttctgcaatggcagctgctgcttcagcaactgctcgagcagcaaatgcagctgcctcttgtggagtcatagaccttatcttttctaactctaaatctatctgagatctagtaaggatgttggtctcatccctgtcaattttcatagaggctttatgcctcccttccaaatataacacagatgagtttcttcttctgtcagaatatgctgctataggtgcaattctatacttgcgatttacctgaaataccaaagtcagccctaaagtaagatctctaatagaaacaacttaatataactcccactcaaaatgagaacattcagaatacttgtcaagctcacgtaaaaccaaatgactaataacattaaatcaagacagtggagttcctgaaattatattatataaaa

SEQ ID NO: 14679 - DNA, 377 bp, Glycine max
ctaacacatctattcaacacttgttgatcccataagagttaccaatgtcgcgtatagtgtaatgcaatgtattagttgagattcactaataaagttttcagcaccaggtgaatatgttttagtcacatctttagctttcttttcttttttgccagacagaaattattataaacacacatgtggaaaaagaagtggaacaaagttgtatagatattttcacctcaacactatttttggttttatcctaatatttatcaccccttacttcattagaaaattataagaattataattaattaccaaattaaaacaattactaatttattgtactaaatattcttacttcaatagattacaataataactttcatttttaa

SEQ ID NO: 14680 - DNA, 361 bp, Glycine max
  unsure at all n locations
tctccaccgncgncaccatcatcttaaaattttatttttatattatgagnacnnngatnnggagccttgtattttggctatattactatcgtattngaacaatntactattttcctattttgcatggtatgtttgaacaaatattaagtttgttgatagactatatgggttgtatagttaatctatttatgaatgttgcttcatgatacttgcttcatggattggttgttagtttcttaatgaatgccgtatggatgtttaattatttcaaattttttacgcactttggctttttgttgatgccaaagggggagagaaatgggattaaatcaagaactcacatgagtaatcaacttaattt

SEQ ID NO: 14681 - DNA, 322 bp, Glycine max
  unsure at all n locations
agcttgttattttggaaganaagaataccgcaagtaggcgagatgatgaatgacagccaacacaatacgaatgaattgaaagcctcatattcaaaaacttaccgattgatgaccgaagaacgaacgaacaacggcgaagaatggcggaaaatcttcatggaatcgctcatggaaatgtctcggaagcgttacggaagcacctcgacttggatttccttcctttgttaacttcttttcgctaaacaaaactaaaatacacagcatagaggtcaggggcccttgaaactcagcctcctccccctatttataggagataatggga

SEQ ID NO: 14682 - DNA, 435 bp, Glycine max
  unsure at all n locations
gcatcctgatactactgtntgtttatgtgaaatctaactggaagtgcggtgggtcgtcgagtaaataattaaaacagtgtgaatcgagtatcgaactcagggaacttgttttacatggaaaagcatcattcagtaaatatgaatttacgtaaagaattgattatcatgaagtaaaaatagaagtaattctattctaagtagaagcagtaattgtgagcaagtgagtgtgaaaacagatatgtaaaagcattgggtcattctactgagatacttgatgcaattagggtttttctctacttgaaattatttatgtgttctatgatgaagggacaaataccaaacaccgatgtctcgcgagtntggcctaattcaaataaacttcgttctcaaatgtctgttgttgaacttagcctaacagaacaacattacaattac

SEQ ID NO: 14683 - DNA, 169 bp, Glycine max
cactatccatgttcacacattattgcagcatgtggttatgtgagcatgatctactaccaatatatagatgttgtttacaccaatgaacacatcttatgagcatactccgcacagtggtggcctcttgagaatgaagcggcaattcctccttctgatgaggcatggacac

SEQ ID NO: 14684 - DNA, 465 bp, Glycine max
actccgcttcaggttgctaattgctccaggttgctgcacggaaggctaatgtctgtatggtggtcagcagaggagcacagaccacaaacccttgcgacaggtacagatttctgattcaaggccagctgggttaccaagttgaccaacgcatccagtttgccttcaagcttcttagtttcagatgatgcagatgggtttgtagctacctcatgcactcctctaatgactatggcatcatttctggcgctaaactgctgggagttggaggccatcttctcaattaaatttctggcttcagcaggggtcatgtctccaagggctcaaccactggcagcatctatcatacttctctccatattactgagtccttcataaaaatattggagaagaagctgttctgaaatctgatggtgggggcaactgacacatagtttcttaaatctctcccagtactcatacaggctc

SEQ ID NO: 14685 - DNA, 398 bp, Glycine max
  unsure at all n locations
agccttttgtcttctgattgtttggaacttgcttaactcttgattccttggcatcatcaaaataatcttggaagtcattgcttccacatctaagtctattctatacatgccttgaaatgtcatgtatgtctgtcatttgtaacatataagagaaagaacaacatgataaaaatgacagaaaatgaacgaaaaaagagttaccttttgttgatattgcacctccaattgcacatccactcaacaaagcaaccatttattntcttccccaatcctttttatttattttctgattagaaaaaaaactaaggaactatagtagaacaaagcctagataataataataataataataataatgaaacaaaaccaaaataattcccaagttttcttccctaatc

SEQ ID NO: 14686 - DNA, 329 bp, Glycine max
gcacatggttcgcgtgtatgatatccactcgatatgttttatttttatgagaccttcaatcctataaggcatcgtgacagacaaaagtgggtacttaactcgaatggccattattgtcaatgcggaaggtattccgcgctacactatccatgtacacacatgattgcagcttgcggatacgtaagcatgaactactaccactatatagatgttgactacacatatgagcacctcttagaagcatactccgaacagtggtggcctctggggaatgaagcgagaattcctccttctgatgatgcatggacacttatgcgtgtcgcagatac

SEQ ID NO: 14687 - DNA, 331 bp, Glycine max
  unsure at all n locations
caaacgtctcgatatattatgcgcccgaatcggacatccgtgtgaaaaattatgaccaatagaatttctagagagcttccgttgttcattctgtagagcctctatattgtatgcgcttgtatcggacatctgagttaaaagttatgaccatttgaatttctcaacagcttccgttgccaaattntgagcatctcgatatgtgattcgcatgaatcagacatccatgtgaaaaggtatgaccatctgaatttctcaagagcttccgttgttcaattatgagcgtcacgatatgtgattcgcccgaatcggacagtcgtggtgaaagttatga

SEQ ID NO: 14688 - DNA, 416 bp, Glycine max
  unsure at all n locations
cgatatattatgcaccttaatcggactaccgtgtgttatgtttgaccattntaatttctcaagagctggcgttgttcaattccgagcttctcgatatattatgcacctgaatcagacttccgtttgaaaagttttgaccatttgaatctctcgagagcttccgttgttctatttcgagggtctcgatatattatgcgcctgaatcggacttccgtgtgataagttatgaccatttgaatctctcgagagcttccgttatgcaatttcaagcttctggatctattatgcacccgaatcagacttccatttgaaaagttatgaccatgtgaatctctcgagagctttcgtcgttcaattttgagcgtctcggtatattatgcgcctgaatcggacttccgtgtgacaagtactgacca

SEQ ID NO: 14689 - DNA, 435 bp, Glycine max
  unsure at all n locations
gttggaggaatcaaatcctggaggctgctgcatgtagacttcttcttgtagaatgccatggagaaagacattgttcacatccagctgctgtatgggccagtgataggtgacagccaaagtgagaagaagtctaacagtaataggcttaataactggtgaataagtttcttgaaatctgtgtcatattgcttgagggcaaggttgattgaggctgtgatttanatgaagaggaagagggaaagaggtcatanggaaatctggactcattgaacaccacatccttagatatgtagattctgccttcagaagaaagacattagtagcctttgtgcgtaggagaatatcccagaaaatgcattcttgagactgaattggagtttattcttcttgtangagaggaanacaactaggaagtctattaattaaatagacact

SEQ ID NO: 14690 - DNA, 414 bp, Glycine max
  unsure at all n locations
tcaagctttaaaatgtanattcaattctctaaaagttgttatttacaatttaaacttctggtaatcaatgacataccttgtgtaatcaattatagcctttcacaatcaaattcaaaatttgtcaaactgtttcaaaattcaatttggccactggtaatcgatcagagagaaaatatcatatttttgaaatctcacaaagattttgtaaaatatcctttatccaaacctgtgttgcatcagattaacgaatctatctaagatcctatgaactaagtacatcattcttcttgaatctctggattcttgacttgaattgcgctcatctctggcatcatcgaaacttcacatcatatatgcttccacactggtagcaaccataatgtcaacctaacattcaagagtcagtgttatatt

SEQ ID NO: 14691 - DNA, 405 bp, Glycine max
  unsure at all n locations
acacatagaaactcagcttctgtcacctcctccttacaaagtnnntgaacacatgttttgaaggctcataaattgcacataccttaagtcctcatgaacattccctacctcaaacctctccatcacctccctagctactccctcagcattggccacaccctcccctacaataactgtgtttttcctcctcaccaactcactcagcacactagttacatcattattgttaacatggtctaaattacgcttcgtgaaggagccagcagcaacttgaccaaaaggtccagatgatggagacacattattactaccaccaagaacaacatgatggtgcttggtgatattntctttggcatggctcctatcagaagaagccttntgtgaacaagcttccattgaaacagc

SEQ ID NO: 14692 - DNA, 454 bp, Glycine max
  unsure at all n locations
agcttgtttgattatggtgtacccgacatatgtggggggaggtgtggatcgggcaatggtgcaagtcnactctccacatccacaaatcacacataaatccaccatccctagttgcccaccttcaactgagctcacgtactcccacgtagcccttatcctcgttcctctcaacaccgggtccgcatcaatccatccaagcattcacaacatccaagcaattcaacatgcaaacatcatgaactatccaaaccaagagaatagggccgaggcaganaactctgcccaaaacacattccaataccacagtgttcctcactcaaataccccagtaacattctcttcgttgtgatttgctaaccgttggatcgactctaaaattntactggaggtncctagtacataagtctacatgttgaccgttgggatctggctataaacgtccataacccaatat

SEQ ID NO: 14693 - DNA, 454 bp, Glycine max
ctagaaaacataccatcaaggcaaagcatgatcaagagggaaatcatttttagcgggcagtatctctagcacctctctcaataggaaaattaaagtgttaatgcacactccaactctatgtaacacctacaaagagaaaaagttaacaaatgcaatcaaagataactatataaaaagcattcatggatgaatttagttacttcctcattttctttctctgcttttgatatcactagctttaaggaagcacttaattaagacaaaagtatgcttatcagttatgacaatatttcttgcaactaaaatagagaatccatgtttcccccctcacgtaattcatgtcaaaacattctaaaatatttagtgttaaaaagcttaatatcatgtgaaaattatatcgtgaatacgatcttatatacaagggttgtgtcccagtgtcacttgaatcctatat

SEQ ID NO: 14694 - DNA, 450 bp, Glycine max
  unsure at all n locations
caattgcttcagattgttgcacagaagggcaattgtttgtgctgtggtcgacagaggagcataaaccatagagtctggcgacaggtgcaaatttttgattcatggccagttgggttaccaggttaaccaaggcatctattttaccttcaagcttcttagtctcggctgatgaagatgaattcgtggctacttcatgcaatcctctaatgacaatagcatcacttctggccgtggtcctggaagcaaggaaatttttttctaagaatactctcttgaggtcatcccanctcgtgatagaccgtggagcaaggtaataaagccagtcctttgccactccctctaaagaatgaggaaaagcctttagaaatatgtgatcctcctgcacatctaggggtttcatggtggagcagacaatatggaattctttcagatgtttgtatgggtcttcac

SEQ ID NO: 14695 - DNA, 435 bp, Glycine max
  unsure at all n locations
agcttggttcgatttacttacccgtngaagatcgaagaacgatgaagaacgaatgaagaacgtcgaagaacggttgaaatctttgcgaaattcctcacggaaaacgttacggaaacgtttcggaagcgcctcggcttagattttcttcacggaaacagtntttccaagcaaattcgaaagagagaaaagtgcctcagggctgaaccccttccttcttgcattcctcccctatttatagcaaaataggggaggtggttgccgcccagctcgcccaggcgagctcagctcgcccaggcgagcagggttgcttcctccagaagcaaccgccttctggaggaatattccagagggcccaagtgggcctgggtgctatttgcacccccatatatactangtacacccncctctgctgtttttgggattctttttcgtaag

SEQ ID NO: 14696 - DNA, 409 bp, Glycine max
gacaaactgctgaacgtctgccttctttcccctccaatatttatttgccgctattcttctttatgcgcgacagaaaccataatgaccaccttcacgagtagcatggaattcttccagaaattttggaatccaagctaatttctctgggatgacgaggcgatttttataataaagtaccccttgtctatatacaaatccagcattgatcttctccccctgtcctttgttcacttcttcgattattgttcttaacttctcatctgtgtgcacctcatcattgatttcttgccaatccaaccataccgggaagtaaatcacattgctcagtttcatttcatctctactacgggacaaatcatcagcttgtctgtctcctttccagcttataaatatctcaaattatacccta

SEQ ID NO: 14697 - DNA, 407 bp, Glycine max
  unsure at all n locations
gcttggttctctttgcatgcaatggctaaaggacaaggtgtgtgaagcaactaanattatattcaaattcgttctactcttgtttttgaagttcatgttattgaaaataagttattgtatcttgtaccagcatgttaattataaattgcattaattatctcaatgtatctatttggtaaataactgtatagtgtatgcatgtntgaattaactcttttatttaatagaaaatatagcagaaatatatgaacattttttaacagaagagtgtatgttgaatacaatatatatgaatgcacatatttgcatgccacttngatttagttttccttacatacatacatgatacagtgtgagtgtcgtaacatgagtaaaacaaaaaacaatgtctttttttttaatcatgt

SEQ ID NO: 14698 - DNA, 384 bp, Glycine max
actagcttcaggcttcaaaattaactcttcaaagagtatatttttggtgatcgggatgacagatagttgggaggcgtctactgctagttatctaaattgtgagcttgtggacataccttttctctatctgggtatcccgattggttcatacccaaggggctcaaagctgtgggatcctattgtcaaaaaatgtgagaggaaattggtgaaatgaaaacaaaaattatcttttgggggaagggttacactcttaaatgctgtcctaaatactattgcgatatactattttctgtttttcagggctcctgcaagcattctgtatagactgttcatggcacacgagtggtttttgtggggtggaagggcatatcgtatcattatatt

SEQ ID NO: 14699 - DNA, 374 bp, Glycine max
  unsure at all n locations
cttgtaacaagacaaccttatcacccnctataaatntaccatattatcaaaagagcaaaggcaacatgttatcccctctctcaaacaatccatgcacatttctttctcaatggaacaccattcccacactaaatcttcaacctatcaatccaattggaattctcaaatacaactgttctaaataatcatattgcgcaagaatcttagaatgtgggtttaggcctaactcaaccccaaaagctagctcatacgatgagggttgcccccacttatatactctatattggccttatccctagctaatgtgggacttgtgttnttcacaatacacccnctcatgcccaacacttttgagcttggtgcgtggataatat

SEQ ID NO: 14700 - DNA, 182 bp, Glycine max
  unsure at all n locations
cacattgaagatggtgatgccagagataatagattcattacagttctcattcataggcggangaacactgtaccacagagtattgtaaacattgcattctgcgtatgaagcatagaggcgacatatgccatgcttgctgttcaaagtagactatgaaagagcataccactccgtctcgtggg

SEQ ID NO: 14701 - DNA, 342 bp, Glycine max
  unsure at all n locations
ttcatcttttcatccctctcccttgccaaaagaattcccaaggactactgatgcaacctaccccgcagggcattggataaagacccagtagaatgggccaagatgcaagagaagccctaggttcttatgaccttatggtagatttcggcccatgggataatacgagcccactatctttgaaatatagataaggttcattatttggcctggatttaggctcatatgaggagggaccctaaaataangattttcacccttgtatttagggccctaacagttttgtatangggagtttgtaattacatgcactagtggatattgatgggtggtggaaaaaattaa

SEQ ID NO: 14702 - DNA, 294 bp, Glycine max
tagagacatttacattggatttaatgacgaaatctgtgcattttcacgtcaaaaagaggctaagttctgaatcgcacaatgtaacagttgggctaagctcggcagttggactaaacgcatatccaccgttaagcgcagcttcagagcgctcaccgcataggagaatctagcaaagcatgaacatcaaatccgcgcactaagtgccagatcattgcgctaatcgcataaagagcctttagccaggctaagcttgagactggcgctaagccctatttcacttactcacgctaaaca

SEQ ID NO: 14703 - DNA, 373 bp, Glycine max
  unsure at all n locations
agcntactttgtttattgaatatgggcgcaaagagggagcagaggtgcatgcaatgcaaggagatcgaagtactatggagaggctgagaaaatgctcagaggaagtataatggtaactgcctaaggcagtcgccttatttgatggcagattcgaatgactcgctgagcgcatggacacgctaagcccaatacaaaactatgaaattccatagaagtttttggtcttagcgcgaaggtacacgttgggtgagatctgcatctgtgataggtcttgcaactctcgcttagcaagccgcagccactctgagcgaataaaatgctccttanatgcagtagtggactgtgcgtaatgcatcgtgctctcttaacgcta

SEQ ID NO: 14704 - DNA, 447 bp, Glycine max
  unsure at all n locations
aatgttacttgggcttgnatcttaaanatnaaaanaagcggaggcattgtngggcgtgatagcaagaagccagcggtaagtttggacagnacngcgctgggtgatatgtgtganacaaagatcctctcccactctgtgtcttatgattgacaaggttactaaggatcaaagttaacttggcggcgcacaatcatgtgttatgatccttacccgtgagaaaagacattgttatatacatgatatggatcttatcagaggtctgggagctggagatggagggaacccttcgctgctgtgattcctagtaaatggtataccaacaactgcgtgtatcggcatgcttatcatatggttagaactgaagtaaggaagaaaatatatgaccacctgttaggcagtgcantgtgaagacccggatcgggtgtntgctattgttgcgctccaccc

SEQ ID NO: 14705 - DNA, 316 bp, Glycine max
  unsure at all n locations
gtgatgtacacgccacctgacccacangcccgatagtggaccttgcatgnaaatggagataaccagctcgcggggatgcgcacccctgtcgggaggcatagccccttgcccganagagggaagtgctgtgtgcatgagaccgttgtctccaagggaaaggagatccttattttatataacccacatgaccagcagaggagtgataatgttgggccattttctgctatctacacccccaccacactaccatcccaacatcttgagaccttaatgaagggaattacggacccaaatggttccagcatgcatcatacac

SEQ ID NO: 14706 - DNA, 451 bp, Glycine max
  unsure at all n locations
actcagcttaagttgcccgagtcattcatccctatgaagngtgttgattattggcgatcgaaangccattccctggttatggggttgaaccaagctcatgctttttcgaaaaaagttcatcaaatcaagttgaagaatggaagtaactatcttgcaaaaattggggcaaaagatgaatcgagtcacatcactgcttcgtctactgccaaacatatttaggattgttgatgttcttgttacttccagtttcaccttgacaaagatgtcatagaccatgtggaaaatctaaattgattcaaccccatatcctgcacaatacttcaactgtacatcattcgcatacatccatgcttttcattggttgcattgctcattgcattctttccttgaaaaagacacataaaataaataaataaataaaatanaatcaaaatgatcttaatcattggta

SEQ ID NO: 14707 - DNA, 364 bp, Glycine max
  unsure at all n locations
gctggatcatttttatccacagtgctntattgaatgctgtggttcacaggtagagacctgactcacacatgttacatcttcctgttggtgaatgcagaatcaccttgganagtgttgctcttcaacttgatttatgcgttaatggacgactagttactagtgcaacatattatgattgggaacaaatgtgtgcaacatatataggtgttgttcccccaaagaatgcattggtgggatcaaagcttaaactataatggttaatagataacatgttgactctcccaacagaacccttaccacaacaattagcagcccgttgtaggcatacattatacggttgatttatggttgttgatgctaaacc

SEQ ID NO: 14708 - DNA, 431 bp, Glycine max
cttgataataatggtttttggtagtacttgctatcttgaaatattgacaatatattttgagtgtttgctggagctgttttggatataatgaggggatgattcttttattcataaacttagatgtactagaataaacaaacccacaacttgggcttatgtgacaaaggtaatgtgattatcgtcattgtttattacattatttgaattaatcaaacaggaataagaaagttttgcaaattctttttttttttttctcaatctgcatggcctgattatgggaacctaattaactggttatgggttctgatgtgtgttatgaataatggtgatagataacataagagtggtagtggtgggtaccagagcaatttggaaacattaaattgtggtgtaaagtatccctgattgtcggcgaaataatgcatggtagt

SEQ ID NO: 14709 - DNA, 503 bp, Glycine max
  unsure at all n locations
naatttgatcttgaganctaggcaantagnnccggatgttcatcaccgcggctgcaagctgaatgtcatcttgtgataggacgaccagcgaagtgggaagagctaccgatgttcactttcccgctcctcgacatattatgcgcccgaattgtacatccgtgtgataagtattgaccatttggatatgcgagagcttccgatgcttaatggcgagcgtatcgatatattataagcctaaatcggacatccgtgtgaaaaggtatgaccattggaatttctcaagagcttgcgttggacaatttcgagcttctcgacatactatgcgcgcgaagcggacattctagtgagaaggtatgaccatgtgcatatctacagaacttccggacgttaatttcgagcggtgcgaagtgatataaacctgattcggaccctcgtgcgacaagtatgactctatgatttcccagagctccgtgtcaattgcagcactcgattccaatggatct

SEQ ID NO: 14710 - DNA, 438 bp, Glycine max
  unsure at all n locations
gataatggcactggattaaaaaaaatgtcctgtattctaatgtgattggatggngaagaagagaagagaaccctaaaaaatttatgcctatctcccaaatgacgatcttgtcctctgtaacttttcaattcatccgcgctagtgaaagggtgattctgcctttgtacagtgaaatttgctgcatctctagatataattaaatgtaaaatcaataactaaatttggatgcaaaaaatcataatcataataatcatttttttatatagaattcttgaaagggaatggaatggcctcaaccgcatccttttgtaacaacttgtggaaatgccatgtgcaacgctcaccacataatattctctatcttttcctaaatagcaatctttctctgccaatctcagaaaagaaattatactttctatcctaacagaatatactata

SEQ ID NO: 14711 - DNA, 355 bp, Glycine max
  unsure at all n locations
gagtagtcgaagagaagttcaagtccatagccatcanagtctgaaaagagtatgatgaactaagggacgtcaatatggccaccgctgaagccttggaacgagaaaccaagaaggcccganaggaagaacacgtgccagcaaagttttgaggggctttatagggcagcaatagtaagctcaagctccgaagaggtgaaaggaatcatcaagggtcaaaggcatgatcttgaaagacgagctaaaggcttaccttatgtcgaanagaaatttgtcccaacagttaagcgagactgaagggaatatgtgggccgtcatcgatgagtgcaaagagaagctaaatctagcggcgactcac

SEQ ID NO: 14712 - DNA, 451 bp, Glycine max
  unsure at all n locations
tcttagtctcggctgatgaagatgaatngttgtgcttcttcattcactcctctaatgacaatagcatcacttctggcactaaattgctgggagtttgaagccatcttctcaattaaatctctggcttcagcaggggtcatgtctccaagggctccaccactagcagcatctatcatacttctctccatgttactgagtccttcatagaaatattggaggacaagctgctcataaatctggtggtgacgacaactggcacataatatcttgaatctttcccagtactcatactagctttctccaccaagttgtctgatgcctgaaatgtcttttctgatggcagtggtcctagatgcaaggaagaatttctccaagaacacccttctaaggtcatcccagttgaaaatagacctgtgagcaaggtagtatagccaatctcttgccactccct

SEQ ID NO: 14713 - DNA, 341 bp, Glycine max
  unsure at all n locations
agcttctttgatatctttcttgagaagctagagcttactacgcacgcccttttatatctaagctcacctccttgagaagcttccttgagaagcatccctgagaagtttccctgagaagattcctagagaagctagagcatagctacacacacccatgtatagctaagctcacctccttgagatgagaagctagagcttagctgctacacaccccctataatagctaagctcacccccatgcaaacatacatgagaatagaggagagtccttactagaaagactactcanaattccctgaaatacaaggctaaaaccctatactactatagtggccaaaata

SEQ ID NO: 14714 - DNA, 457 bp, Glycine max
tctagccaaatggacttaccttgaattaattcctttgatagcttttttgagccttgtttccctttccttgttgtgaagctcactacaagccttaagtgaaaaaccatgatattaccatatccttaaggaattttggagctttggaattgttttgggaataagtgtggggggtttttgtttcattggacaacttgttttgttgactatgcttcatgatgtattttgggccatacttgatgtacattgtatattggttaaatgttggacatgctgaatgaaatgttgtttctcaaaggcagaaaaaaaaaaaaaaaaaaaaattcgaaaaaaataaaaatttcgaaaaaaaaaaaagaaaagcattaaagttgagtgaataagatcttaaatggcacaagaatgacgaaactctcggttctactctacatgttaaacttttatctttacttcttttatt

SEQ ID NO: 14715 - DNA, 306 bp, Glycine max
  unsure at all n locations
atggcctctcggatacgcaccgccattttgcataacataacacacactagctccttatatggaagccccaaatattggtggttgattcgatgtgaattagaacttggaattgtacaaccctgaattctgagatccaactttgttaaacgactcttcataggcccacagctcataatcgaaacgaacccgtaaccctacttcttgttcaatcctccaaagccaaactttcacgttggtggtanaaagtacgtatgccgctttctacattagaaaccatgagaatctctatatcacaaacctatgtgt

SEQ ID NO: 14716 - DNA, 456 bp, Glycine max
tatacgttagtaacatgacattgtgtcatactttgacatattatcgctcaacaaaaaaatattttattagctgaattgcattgttttaaactccttttatatattgttgttagttttatgtgacatttactattgacattttgttaaccatttgacaagtgtaccaaatgtccaagtagtaaagactcaaaagtctgagtgttgattttcacagggattttattttgtacttgtgttggataattttcaatttatacgaggacaagataagatgaggtataaaagatgaatttaaaagaatagtaattaaataatagatattaatagaaaacaaaaggaaataatagaaaattcaatgagatgagaatgttagaacctaacatgtcttatttgcctaaaatgtattcattgagatttttctctatcaattagggttaatttttctacccacatcta

SEQ ID NO: 14717 - DNA, 451 bp, Glycine max
  unsure at all n locations
agcttcatgttgctcattgactccagatngctgcanagaaggacagagatctgtatggtgatctgcagaagaacatagaccacagactcttgcaacaggtgtagatttctgattcatggcaagctaagttactangttgaccaaggcatcaagttctccttcaagttgtttattttcagtagataaagatgaattcgtggccacctcatggactcctctaaggacaatagcatcatttcttgcactgaattgttgggagttggagccatcttctcaatcaaattcctagcctcaacaggggtcatatcaccaagagctccaccactggcagcatcaatcgtactcctatccttgntgctaagtccctcatagaaatatcgaagaaggagttgctcagaaatctggtggtgaggacagcttgcacacaatttcttgaatctttcccagtact

SEQ ID NO: 14718 - DNA, 449 bp, Glycine max
  unsure at all n locations
gggttcgaggtacttacctgttgaagatcgaagaacgatgattatctattgaagaatcgtcgaagaacggttgaaacctttgcaaaattcttcacggaaaacgttacggaaacgtttcggaagcgcctcgacttagattttcttcacggaaacaatttttccaagcaaattcgaaagagagagaagtgcttaaggggctgaacccttttcttcttcacttcctcccctatttatagcaaaataggggagatgcttgccgcccagctcgcctaggcgagctcagctcgcccaggcgagccaggttgcttcctccagaagcaacagtcttctggaggaatcttctggagggcccaagtgggcctggttgctatttgcacccccatttttactaagtacacccnctctgcttttttatggtgattctttnttcgtaatgttacggaaactta

SEQ ID NO: 14719 - DNA, 410 bp, Glycine max
  unsure at all n locations
gcgcatcactcgctgtcgcacttgctcaccctcaagccgcaaaaatctcctcanacagttccggtaatttctttctatcattntcctcccttttatttgtttaataattgtatttccgtttattaaaatgacatggtaaaattatatcgtcaaccaatgatntgtaccatcgagcaccggatgaactgatataaattgttctagcttaatcaatagtctcaagtttatgagatataangttggcccctgtggttaacaaaactgacaaactaacatttgtggataaaaaaataaaataaaaatatgatcttgagtntactgtattcagtatgcagttgtgttaaataatcgaaatgagacatttgttgcatacagtaattttagccggctcgaacaagattgactctaac

SEQ ID NO: 14720 - DNA, 435 bp, Glycine max
  unsure at all n locations
tgtcttcacaaataatcatcatacagcagaaacctatctagacttttcatcatatctccccaaaccccatacccacgaaaatcaaaggagaaagaagtccacccaaacctgaattttcgaagtcccactcgtagccacgcacttcacgaccccgaaaatgctctcctttcacgatttggtgcataaatgagcaccaaatgttgaagctttgtgtggagcttcaatggtgaatgaggaagaagagaatggcaacgtgagggagagagagggctgtctgaaattttctgttttgctgagtgaggagagagaaaagctttttggtcttaaataaaaagggttttccctttttccattatattatttatgcaaaagccacatgtctccatttgagtggagcaagaagggcccactntcccttttgactgtgacccacac

SEQ ID NO: 14721 - DNA, 412 bp, Glycine max
  unsure at all n locations
gcaagctttctatatannntctatgtcccgggggggccacggcgggtgttgagtattattattctcattccatttacttcttataccccctcttgacgtgcttaagccactttacttaagtcatatctcgcttaacttagaaataaaaataaatctccaccgaacgtttgaattgcattatccgttaacttcggttaaaatgaatgccgaccattcggtcgtgccgtaaccacgttggatatcaaaaagagaggtaaaaaaaataatataataatcagaagacatcttttagtataataaagtggaaaatcaatcggacgttttctctttgggatntctcattcttaatcgaattgagaataactaaagtgaaactaaggctaatatcaactcgcctagtctagctcgtcca

SEQ ID NO: 14722 - DNA, 438 bp, Glycine max
tataaatactaagcttcgctaaatattattgctttgaaacgctcatgctacgctactcatgcatattagctatcttatgacaggagcagtgatcgtttaagcaatagtcaaataccgagccaaatccagagacagagacgaatcgaggtaagcggtaatgtggccactatttgttgcgcaatgtcgttgcctgctttcatgtacttacggatgggcacgagtggaggctatgcccatgatcaatggatcgtcgtgccacgtccagcttgtgacaagcgagaagcgctactgggaagcaggctagtatcctttaaattcctacttattattgttgttgtttctttgaggagatggtcgaatgcctaatttaccctaaggggttcgagtaagcgaacaccgacccatatagagcgcgtacctttgtgttagaaaaaatgc

SEQ ID NO: 14723 - DNA, 353 bp, Glycine max
  unsure at all n locations
atattgatgattaatctcatagtatgataaagtgaccatagttttntaggatatctcaagggctaatcaaggtgtcagaggctctacttatggtattaaaaaatattatttttctataaaaaaaaatattaaggactactttttgtctccactaaagaaagttactgaatcctccactatatttaagccttttggttatgcatatgagattcttacgtttgagcagcaatgcattttcatacttttcatgtaaatgaattcaatgtataaccttaatgacttgagttaacctcaaagagtttcataatcgtgttcgaaaactcaaaaaatcaattgttaaatttagttgaact

SEQ ID NO: 14724 - DNA, 420 bp, Glycine max
  unsure at all n locations
agctntgaacttacatctaaaaatattgaagggaatgttacacaattaaatcaaatcaatcactattgtgaagtgaatcanatatataaagaattaaatctagacgtataatcaaatatggacggtaaaatttaatcttaacaagtcatgtgagttttttaaaaagtgtgtgactttntaagtaattatatcacataaaatcttaacctttcatgtatgattaaacaattcanatttaatcttttcactttcatataagatattntatctcataacatatatcttatatatagaaagaatagatacccatcaatttatgtcatcatgggctcattggcagctntntttntttttttaagtataatggttatctaacaataaataaaaacagaaaacattgaagtctttgaaaaatataaa

SEQ ID NO: 14725 - DNA, 450 bp, Glycine max
tactcaagctcgataggatcaatgtagcgagcgtagtgtttgctacaacttatgtatacacaaggcctaactgagaaatgacattgtgggggcaatggaaagaaggaaaattgataaaattgttattctattatctcttattcacaacaaaaacacgatattactctaaggagctactatgcatacatcacatttcatatttacatacaaacacacaaaaactcactatttttatatgttctcgccatggcaaaaggaaattttgctctggcgaaaacatttctgacatgattatgtagaagcagtcatataaatttcaaagctaacactcacaagtatcctataaacaatcatcaactacaaagcttcctaaactagtttatcgctcgcatcctattactacttgttgttgtggatgtgatatctaaccggcaagtgcaccgggtcgtc

SEQ ID NO: 14726 - DNA, 415 bp, Glycine max
agcttattattattggtttacggcaattacctgtagtctttgtgtcacatccttccatctgaatcttgttgattcatgttgtaatctatatgcattccactggacatgcatagcacatttacatacactgctgaatgataaactgtttgacctcactatcaaagctgttaatgatctttaatggtttccattttttgatagggggcaagttgaatgggatgcctttgaatggatgcatgttgagtgctttcctaatttgatacagctggcttgcttgttacctcagaaagaagataatttatgaagttaaatttcaaaggtcacttgtctatcttgtgaagttgttaatttaattattttatgacttctgatcatagtttgttcggagcttttgctggcataagtcatttagaca

SEQ ID NO: 14727 - DNA, 437 bp, Glycine max
tgcttctacaggcatgtcttgatacgtccaagcaaagacgtcttggtagtccctcagcagggccactaattcttcatggatggggcggtcatacccgtgcctacttttacttccttcttttcactgccggtacctaagtttacgagttctgtctcttcttgatgggccttatctcttgatccttatgagtaaatatcctctctagctctgggggaagccctacgtcttcgtcttcttcatcctttgtccaactcgcttcttgctcgaaatcgacggctgggtccccgagattagtaccttggtgggactcgtcgttgaatctgtaccgtgtaagcgtaacaaggacataaacatgcaaatgaatgataatgggtagacgcgcatgaacagatcaagagaaatctttatattataaattctagaacaaaagacataat

SEQ ID NO: 14728 - DNA, 345 bp, Glycine max
  unsure at all n locations
tcattaatttttttctttaccttctcttccattgttgnttcttcaattttctccatgtatctcctcacatgtcttgtactacatgttattaacatgattctgtagaagtttcaccgattaaacttgctatacaagctagatttgattgtctatggttcaaatgtctctgtcttgttcttgaaccatgaattgtgataagtataggttcctttgagtgttgtcttagtatgctttgtggctgaaacctataccataatattcttacaataatatcaaagtatactagactctcgaatatctagagtgacttgatcacctattgacgtttgtcatataagtcatgtc

SEQ ID NO: 14729 - DNA, 452 bp, Glycine max
  unsure at all n locations
cgaagctgaatntggtcgttgcttacgtacgcttaatcctccttatacatgtaagaagtaagaaaaaagaactgaagataatactaagaattatcaaagttaattaggtcccatagaaactacaatcattcttaaaagtactctaagccccaccttttggggggaacatattggcaggtatggtcaaatagtgcaaggtcgactaagttgtcttatttcgttattgcagccattgttgtgcacatgaatttcttgcaagcttaattaggttcttttgatctttaacttgtaattactaattgttagatatataacttttcacctgctttgattgctaatgctactatggtcaaattgaacaattagtcagaattaagtaaccataatggctgttttagagtcattacaagtgtgagatcacactatacttacctaccttacacaatatcgct

SEQ ID NO: 14730 - DNA, 453 bp, Glycine max
  unsure at all n locations
agcttattctttcttgtacgtgaatttcaaccatggaccatatgtatatatatagatgagagatcccgagttcaactcttccattaataaagaattaacaattaacaattaataactagcatttgttgataaatatatgtctcaatctaccattccaccacctatatggaagcacattgtgtcattgtgtgtatgttttaaggtgaagctatataaagttatatgatattacatcatttatattataattgaaaaaatttatactattttttaaatgagaaataaattctcttaaaaaatgaaaactaaatataaattatcgtatgagatttttcttctataaatagtggattggtattacttatattttgaaacanatattcagaataacaaacaacttctacaaatcaatgtttttcataccttaagcangcatanataattgaacacact

SEQ ID NO: 14731 - DNA, 447 bp, Glycine max
aactataaaactcaagctgggcccttaattgaataagtcacgccagaatccagattgtctgtttaataggggtcccagtcagaaaccatactccaagggaaactgtggagtttgcataccatatccagaaaagggacaacaatcttgtgggcagtgtatttagggggtaacacaccaaagtgggctctttataatagcgatctacaaccaccagaatagccgtgaaatcgttggaagggggtaagccgatgatgaagtccacgctgaggtcttcccatattgacgacaaaatgggaagaggttgcaaaagacccgtgggcttcttggactcgtatttagtttgttggagagtggaacactgagcaagatattggcgaacgaccgaatgaatttgtggccataagaaattggcctatagatgatgaagtgtcatggcgacacccatgt

SEQ ID NO: 14732 - DNA, 408 bp, Glycine max
  unsure at all n locations
agcttctcatattataccacaagttcatcaatgatctgtcgctgtttcataacataaatccataataataattaataaggctgataattgaagtgaccgaaccattcataaagttcataaaaaagtacaccctggtttactaaggttgagaataggtcatcatttacaaaatcaattatgatatgacacgttggctacaaaatcaacagtaatcagacaaaatgaatgattatataccgtctgaagtagtntgttctctggctgcatgagtccagcctacaatatatctttgaatcagaatttcatataatatttgattaacttgggaaaaactctcangaagagaatatgacggaagagaatgtaaaacgaatattctatcatccacattcatactgattgaaaaat

SEQ ID NO: 14733 - DNA, 463 bp, Glycine max
ctcagcttcccttcaactcttcaaagctctctgagcctcttctcttctcttgaacccatccttcttggtaagttcagtcaatgggttagctatcttgccataatgtttgatgaattttctgtagtagccagttaaccctaagaaccccctcactcccttcacattcattggggttggccattgaatcacactttcaatcttgctaggatccactgctacaccagcttgggatatgacatggcccaagtattcaatggtgtgttgagcaaaatgacacttctttttgttggctactaacccatgtactgctaacagttgcaaaacagtttgcaaatgctccaaatgggcttcccaatcaacactataaactagtatatcatcaaagaaaactaatacgcatttcctaagcaaggggttaaagacatcattcatgaggctctgaaatgtcgagggtgcattcatt

SEQ ID NO: 14734 - DNA, 291 bp, Glycine max
  unsure at all n locations
tccaaatgaaacaatagatgatggtggacacttgaccatagtttcctttaatcttgtgttacagccactcccttgttgacatgggagacatgtttgacgtagcaacttggactttgaagaaatcccacacttggagagactaataacaatcacgaaataagtggaggattgtctcattgtcttggttgcatttgcaacaagtatgattatgagaaaggtgacgctgttacanaaaaaggttagtaggcaaacaatntatattagataaccataggaagtgttaatgtatct

SEQ ID NO: 14735 - DNA, 452 bp, Glycine max
  unsure at all n locations
gggagagaggaaagcataatcatttcttagaatatttanaaatatgagacaagaggtagagtttcaacggatgagacgaaaaccagcttaatttacaatacgattttcagtattttataatttgtagcagtaccacctattagggttggggtgtgggcatattctcatagacagaaaatgggtgacatacgcatgatatgataagcttacattacgcaagtaatttttttttatatatattaattatagtatttcgtaaaatgcgctgtgcttttctttttataacttttagggtacgaaaatacctttgtttaagtgcacactagctataccaaaaaattacgatagtaaaatgtgtgttttattaaaaagtacgatagtaaactttattaagggatatacgagcatagtcttttatttaataaaacataaagtttgggtataaatattac

SEQ ID NO: 14736 - DNA, 331 bp, Glycine max
  unsure at all n locations
tgacaatatatgtctgaggtaacattccagtatgatcatattatagcaccattatgaagactctctatctatagttcatgtgtggctaatcacatccatagatagctatgtgtcataccctaatntcgtccggagactattgtttgatggcatgcnaaccttggttgaccgcttcgaggtactttggcaccctttgttgcataatacgtgaagtttcgagacatgccggaaatcaaaaggaagcattgtacgcaatccgtgaatttcgtaacatgccggagatcaaaagaaagtntngttacgcaatctgtgagtntccgtaacattccga

SEQ ID NO: 14737 - DNA, 448 bp, Glycine max
taatgattaaggggttgtgaagcatacaataattaatgatgggtgagccttattcttaatcagcgcaatatagtaactttgagaaaccacgacacactcaataaattactagccaagagcttattgttcaatgcatatattctatgtcgtgaacagcttcattttcttttatcaaaccaaaatgtactttgtaaagatcccaaaggaactgatggaccatagcttatactttttgtatttggacagtatgatacaccattatgaaattgtaactttttattagcatcacgaattgcaatacaaaacagcaggggtacataagtcgaattggtaatttgtgaataaatatcggcttagatcatggccatcacagtgtacgtagtgattaatcatgcatcataattgatacataattgaccattatgtcacattctcctttctcattgaa

SEQ ID NO: 14738 - DNA, 408 bp, Glycine max
agctttattatgtttagagagagagagacattaccatgcttgtgtcacattgtagttatgcttaatgttatattactatgtttatgtcatattgtacacttaatattatataatttttcaaataaacatgtgcttaatgtgtgtgtgacatatatgggcgtaatatcaactgatgcaatcctagcccccaagggcattggatagaagactccaagaagattgggccagagatgcaggagaaggcccaagggttttcaagggccttatgatagatatggggcccttgggctcagtagatcttgggcccatttcatgctccttctctccttctacctccactcatgttcttctaccttcaagctcttatccatggcttactatggtggtgagcttgttcttgaatcatct

SEQ ID NO: 14739 - DNA, 441 bp, Glycine max
tatcaaactcaagctgtcgacatcgttcgcgtgtatgatatccactcgacaaggtttgaagtagatgagaccttcaatcctataacgcaacgtggcggacaaaaatgggtagttaacttgaatgaccattattgtcaatgcggaaggtattctgcgcttcactatccatgttcacacattattgcagcttgtggttacgtgatcatgaactactaccaatatatagatattgtttacaccaatgaacacatcttaaaagcatactccgcacagtggtggcctcttgggaatgaagcggcaattcctccttctgatgtggcatggacactaatccctgacccaactacaattcgtgcgaaaggtcggccaaaatcaacaaggataatgaatgagatggattgggtcgaaccatctgaccaccgacaaaaatgtagtatatgt

SEQ ID NO: 14740 - DNA, 355 bp, Glycine max
  unsure at all n locations
agctntatactttgtaccgtaagatacacgtatcattcgaggtgagctatttggtcaaaagagcttgtgtctatacaattcatgaccttcatcatgttctgagttatacaaatgattctagaattcatagaatcatgcaaagatcattattcacagttagtcattcactcacagagtaaggtcaaactctcaccggttnttggttcaagctcttctttcacacttagtctatctagtgactaaccattctattataagttcacactcttgtgctttctttgtctaacatacacatatgctcaactcatgataagagacacaaactacatccaaatcatgcactcgattcaaaata

SEQ ID NO: 14741 - DNA, 467 bp, Glycine max
  unsure at all n locations
ntgagccanaatcctgactcaccatanaccttgacccagggtgttattgtcaatccttaccctcggaagcaaaaaaagaatagaggggaaatttccaatcaaagaaaaagagaaggaaaatttccaatgaaagcaaaaaaagaaaagaaggaaaattccccaatcaaagagtgggagaaagcaaaaagaaaagaaaggaaaattcccaatcaaagaatgggagaaagtaaaaaaaggaagaagaagaaggaaagaaagctcctgatcaaggatcgaaagaaaacagaagaaatgtgcagagaggtctttggaccggacaatatctgaacaatacagaattgccaccaaatgaacgaataaagaaggaaagggaaccacgacctanaatagtcttctccctttgattaccaaccaaaatcccgtgcgctagcgaccgcttttttctcgccccgcactaaacaaaaaaa

SEQ ID NO: 14742 - DNA, 404 bp, Glycine max
atggaggaaaagacagagggagagaaagatagaggggggagcaccacattgaaggaataaaagaagtatagaagtggaactttgaagtatgtctcacaagactctcattcatcaaagttacaacaagtgttacacatgcttctatttatagactaggtagcttccttgagaagctttcttgagaaagcttctttgagaaaacttccttgagaagctagagcttagctacacacacccctctcataactaagctcacctccttgagaagcttccttaagaagattcctagagaagctagagcttagctacacatacctctctaatagctaagctcacctccttgagatgagaagctagagcttagctacacaccccctataatagctaagctcacgcccatgaca

SEQ ID NO: 14743 - DNA, 446 bp, Glycine max
  unsure at all n locations
atcaaccagcttcacaagcctgccttaaaatgtttcctgcctntttttttacttgtatccctagctataactctaaggctagtgaaatttatttcaaagaggcatgtagtgcattaaatgcactgtagactttggatggacacaacaattttccccttccagccagaggggaatatcctcaatttctcataggcaatccatatcgattagctcgacacaaagttgaagcttttctcgtgctacaactttactcatcatattcgtaggatttttatcaatgtgaatcttttccaacttgaagtgttgttcttccacttctcgttgcaacaaatggtatcttacatcaatgtgatttgtgagagagtggtacatcacattcttacttaaatccaaagcactttgactntcataatgaatcatgtaactntcctgcttcattcccaact

SEQ ID NO: 14744 - DNA, 169 bp, Glycine max
  unsure at all n locations
agnctctatctcttacactctctaggcggggaagctctggcgggcatggcttattcactagtgggtggtgcctcctctcacctctgcttcttgatcgtccgatgcatctccgtggttgagtatcaccggtgcaggacctcattgaagctcaaagatccaaccttcatat

SEQ ID NO: 14745 - DNA, 447 bp, Glycine max
  unsure at all n locations
agctntgactttattgtgatgcacttagaanacacaacagcagacaagtataagaaattatcctttttttattangttgttggacttaatggatacaaatacttgtatttgttttttttttgtgtatttcatatgcagggttggatctgctcattgggctctaaaaaaactattacagaatagccttagagacctatgtagtgtttgggaagccatgaacaacatgatcacgttgcaacacactgaaattaagatatcttttgagacaagtacacatatggttggacatgtatntaaagttaccttatacaagagactatttggcatggtatctaggtatgctatacatcagattgctattaagtttgagtgtgtacattatgctagcanaaaccattctcgttatggaggtgtcatgataactattcacgtcttccacatgcatgt

SEQ ID NO: 14746 - DNA, 428 bp, Glycine max
tctttccttcctaagatggttctctttcccagtccccctcattaagaactagctcctttcttcctctattgcccttagttgaatacacctttgtttggttctctatttgggtcttaaccctctcatgcaacttctttacaaactctgacctagattccccttctttatgtataaaagaagtgtcaagcgggaggggaatgaggtctaagggtgttaagggattgaacccatagacaacctcaaaaggggatcgcttggtggttctatgaacccccctattgtatgcaaattctacatgagcaagatactcatcccaagacttatggttgccttttagaagagcccttagaagagtggataaagacctattcactacctctgtttgcccatcagtttggggatgacaagtggtggagaaaagaagctta

SEQ ID NO: 14747 - DNA, 188 bp, Glycine max
cactaccgcagctccggccaagctgtgctgaatgaagtgtatcaacagctgttcatctctagaatgggcgcccatcttacggcagtacattatgagatggtttttgggacaagtcgtccctttatacttgtcgaaatccggcactatgaacttcgggggaataactacatcgggtactaatcaaagat

SEQ ID NO: 14748 - DNA, 434 bp, Glycine max
gtgagggtgcgtagcccaccatcttttcatagtagagtattgattatgtgtctaccatcacgattatcggctccctttccatcattgggagtaccacttgggccgccagatccctccaccttttgggcgtgttctttgaaagatccgtccccctttttgcaaatgttctgtagttgcatcctatccagaaccatatcaaaattgtactaatactgcctaacaaaggcaaccattatgtccttccaagaatggactcgggaaggttccaagttagtgtaccaggtaacagctaccccagtaagactttcatggaaggaatgtatcaacaattcctcatcttttgcgtattcccccatcttctgacaatacatctttagatggttcttgtgacaagtagtccccttgtacttgtcaaagtccagcaccttgaactt

SEQ ID NO: 14749 - DNA, 402 bp, Glycine max
  unsure at all n locations
agctttatgtatatggagtacccatcacatgtggtactaggtggcggtcgggcgatggtgcacaacaaattattccacattcacaatgcgcacataaacccaccatccactgatgcccacctccatctgagctcacgtactcccacgtaacccatatactcatttctctcaacaccgggtccccatcaatcctcccaagctagcacaacatccaagcaaaacaacattcaaatagcacaagctatcacagccaagcaaaacatagcagaggcagattactgtgccaaaacaccaaccataagcacagcttctctcacttaaagaccccaggaacaattccttcgttccaattacataaccggtggatcgactcaaaaantttactagaagtctctagtactt

SEQ ID NO: 14750 - DNA, 449 bp, Glycine max
  unsure at all n locations
gtgagccanaatcctaactcaccataaaccttgacccattgtgtgaatgtcaatccttaccctcggaagcaaagaagaagagaaggaaaatttccaatcaaagaaaaaataagaaggaaaattcccaatcaaagagtgggagaaagcaaaaagaaaagaaagaaaattcccaatcaaagaatgggagaaaaaaaaaaaggagaagaagaagaaggaaagaaagctcctgatcaaggatcgaaagaaaacagaagaaatgtgcagagaggtctttggaccatacaatatctgaacaatacggaattgtcaccaaatgaacaaaagaaagaaaaggaaaccataacctaaaagtggtcttctccctttgattaccaaccaaaatcctgtgcgtcggtgacttgctcacctcgtgtcaaacaaaaacagaaaaggagatatccaaaacacac

SEQ ID NO: 14751 - DNA, 372 bp, Glycine max
tactcagcttcttgggttgctggctttatagaaagttcattgattttttctttttgcattgcccctaactaagggactctaagaatgagaatttttctggaatgagaatgtgatcaaagttcaagagttgaagagcggttgacgacagctccatgttaattttgccgaccctaaagacatttgaagtgtattgcatgcagcgggcaagctgggtgtgttgatgcaagaggaaatagtggctatcttccgtcatacgtctctgaattactatcactatgactgactacacggtggtttgcttaagattgaggctttttgcggtctcgtttagtttcagtgtcacaatctaaatacttgtcatcaaagactcat

SEQ ID NO: 14752 - DNA, 461 bp, Glycine max
  unsure at all n locations
agctntgtatgttctanatagcttatcactgcattttttgagaagaacaatattgcaactgcttggttgttttgtttcaataatatgcataatgttgggtacattgaatatggaatataagtttgtcatgtacaaggttatgtgcaggctaaaaattaagtggctttcatcgtgccacaagaatactatgttagatttgtattagaattgtatactaatgttagttagatattattcttcttatatgattatttatgcatcaacatttattgatatcgactnttttactctatatggagtttagaattgatgaatgaatattacaggaattgctacgaaatagcatagataatgatgcagattactagaacacctaaggagatgttcatcaccattataccaaggatcaangttaacaattattgtgatattattgtcattntgattctgatataacatat

SEQ ID NO: 14753 - DNA, 329 bp, Glycine max
  unsure at all n locations
tgtatccagtgtccttganaactgagaatgccacagtccttcctttaatatctaatgaggaacatcaacaggtcggaggggtctctccaattcttgactgttatgtatagccgaaaacttccttgaacatgttgtctcgaaatccttgtgctatgtgccgtgtcctgaatctatgtgctatgctattttccttaatttgttcatgccacctatcatctatgggcatgtcgatacatatgactagcttctctttattatgatgataaatgagaaacccttcaaagccccctaatttctctcagacattctgacccccatgatatggaccc

SEQ ID NO: 14754 - DNA, 397 bp, Glycine max
  unsure at all n locations
agcttcatcttcttcctcgggagtgaatgttncttcaacttcctcatgttcccctccaccctgtccctattgcttcctcaacttcctgaaatgtagataatagtgtcaatggttcctcantttttctctgtaatgtccaagtctatttgcattggcattttttgtgaagtgtgatttcattnttcggtgaggtttactctatttatttggtgcagctacttaaagaattggagagttacacttcaatttttaagaataatcaatttctatattttggtggaaaattatgatttgtaaaagtcttatcaatctgtttaattctaatttaagaggaaaatcttattttgagtaattntggtaatgttgacatntttaaaaatagaatatttattcttga

SEQ ID NO: 14755 - DNA, 418 bp, Glycine max
  unsure at all n locations
gatgattctctacattaatgtataatgttttatattatcgagactcatcatgcaaaagtgtaaatcgtcaaatttttaatttcaattatgacatcattaaggttaatatataatactttaactgatattattaaaacattcattcaataattaacatgtaatcaattaatatttatccaatatatccaatgtcggtgctaatagtaatacttaacatattatttcgagcgaattttgtataattatcatcatcgttattgaatcagatcatctaacatacaatgattcaacatcttaaaaataaagagattcattgcattcattactacattcgattcattatatgagcacattcactatccttgatcgncactatgagtacaaaattatcagcgtatacattttcattattttgaat

SEQ ID NO: 14756 - DNA, 422 bp, Glycine max
  unsure at all n locations
tgatgagggtgttccatatgttctcaagactggactaatagattttctgcccaagttcatggtcttgcangtgaagatcctcataagcatctttaaggagtccatattatnntgtccaccatgaagccttctgatgtccaagaagatcatatctntctaaaggcttttcctcattctttggagggagtggcaaaagattggctatactaccttgctcccaggtccattntcagttgggatgaccttaagagggtgttcttggagaaattaatccctacatctangtccactgccatcagaaaagacatttcaggcatcangaaacttagtggagagagctngtatgagtactgngaaagattcaagaaaatgtgtgcaagttgtccccaccaccagatttctgagcaactccttcttcaata

SEQ ID NO: 14757 - DNA, 282 bp, Glycine max
  unsure at all n locations
ntataagtgcgggtctgggagacgaaggtcatgtgttccgatattgaaatgagtccagacttggattggtacgacatgccttctgatttgcgctgggaattggccatggcaggaacgccccgacatttacgcaacaatcttattgtaaacctatccggttatgaaagctctatagcgggccctaggctttaaagataccttttgataacggcaccgcgacttttggatgcgaatggataatacacggatcttaattcatcggaacctgggcattgcccattc

SEQ ID NO: 14758 - DNA, 213 bp, Glycine max
  unsure at all n locations
tcatatactcaatgggattggcaactnggctggatttttttcttcttctctgatgtatgttctttatctgttctcgaatatatcttatcctccttgtagatatactntacttccctcttctataataaatcttactaactaaaaaactatatatatatatatatatcagactgcctgaacctgangtatcacttctttaactggctcgctaca

SEQ ID NO: 14759 - DNA, 453 bp, Glycine max
tcagaaaactatagaagataatgccacggcggtcgcctccaattctctagggaagcggaaccggtgctacagcccgcaataaacttgggccgagacagaaacacgacggtgttaggtcggaggtatagtcctcaagcctacccttatggtttgcctccggacttcactccccatactactccggacgatttgagccaagcccctaccttcgaggggcaactccctccttatgtcgactatcccctgcaagaagatgaagaaggagatgcctatctaggccccctacttcccctcaaagatccggccccccataaattgccccaaccaaacatagtctgccatgtcccgtctccactcgcacccgttaaagaatctgttccctttgcaaaagataaaagaaaggttgatttacttgaagagaggctgagagcggtagaaggcctcggcaactac

SEQ ID NO: 14760 - DNA, 367 bp, Glycine max
tctgcatctgtacctgttactgttgcaagagtctgtggtctatgttcttctgctaatcaccatatagatctttgtccttctttgcagcaatctggagtcaatgagcaacctgaagcctatgctacaaacatttataatagatcccctcagcagcaaaatcaacaacagtagaataattatgatctttcaagcaacagatacaatccaggttggaggaatcatccaaatctaagatgggaaaatcctccacaacaacaacagcctgtccctcctttccagaatgttgttggtccaagcaagccatatgttccttctccaatggcagcagcacaacaaagacaacaagcaactgaggcccattctcaac

SEQ ID NO: 14761 - DNA, 457 bp, Glycine max
tgagatgaggaagtgttgaagggtgaaacttcctgcttttattgttgaccacagagtggtacctggagatatgtcgcgggggtcaggagaccttggggacgtcaggtggggtgctattgcccaaaaccaagcttgaccaatcccgacccaacccgggcatagtcggtcagtgagaacctgtgatgtacctaagcaggcgagctcctggcagtcaacagataaaaggaaaacaagaccacaaagcaaggaggcttgtggtggctggccagctgtgaattttgtgtaatatgtggattgtggcctctggtaatcgattactaagggtgggtaatcgattacaaggcttaaaattgaagacaggaggctaagatggtctctggtaatcgattaccaaggggtgtaatcgattaccaggcttgaaaacgaagtcaggaaacttaaggagtctctggtaatc

SEQ ID NO: 14762 - DNA, 446 bp, Glycine max
  unsure at all n locations
tgcaagcttttctattgtacatggatncaaataacatgtacctagctacaagcataacaaagaaacctctgtatgtcacacataactagaatccattaataaaatgtattattttatagagtgagccaagtgaatgggaagtcatgtctaacctggttttctactttccataagctccaacattgaggagactntgaacttgatgatctcgaaagaggcacttcatgaatgtttgcttggctaacaagatccatccttggacagcaaaacagatccacacgtggagcttcatctgttctggagacaacacatnctatagaaacataaccaggaggagctataggataccagaagaaaacttcatcaaaccctttccctacaatatgggaaacattgtaaattgacaggtttgaaagatatacgactgcattcttgagatattctag

SEQ ID NO: 14763 - DNA, 432 bp, Glycine max
  unsure at all n locations
tagactcacccccggcttctttttggtgtgatgattccaacttgaagagcttggtcacctcctttttcaccacatctagaatgatggggtcaagtcgtcgttgtggctgcctcactgactgagctccatcctctaaaagtatcctatgcatgcaggtagatgggctaatactatgaatgtttgctaaagtccatccaatagctttattgtgcttctggagcactaacaacaactactcctcttgctcggcagtaagggaggcagagatgaacactggatatttttccttgccctccaagtaagcatacttgaggtttgctgagtagggcttcaactctgatgcgggtggtggatgaatagcgggaggaaccagtgtgagagaacaagatganggttcctcagcctgtacctcataaagcatgtcataagtat

SEQ ID NO: 14764 - DNA, 174 bp, Glycine max
ttcccaatcaaagagtgggagaaagcaaaaagaacagagagaatattcccaaccaaagaatgggaatagtcaaaaagagaagaatacagctcccggtcaaagaaactacaagaaatgtgcataaaggtcttttgaccagacaatatctgaacaatacagaattgtcaccaaatg

SEQ ID NO: 14765 - DNA, 459 bp, Glycine max
ctctagtgaacttctcgtcatctctcttcatcatgaccgtaattatctttttgtgcatctcttcttgctgagccattatcttgtgcacaatgctctcacaaaaacacttgaacatctcaaacctatcaggcctcttcctcttgcggtcctttgtgatcttttccactgctagtgcctcgtcgctttgctcgtattgttttgtcaccaatgcgtcaacaacgtttctagaatccccttctacttccaactccaatgcatggtggcccatcttgtcttgtttctgcagtggtggctgagtcgtattttcaagatgatgatcaccactacccccttggtgataaagctgttcaagctcactaacacaccgataatcgctactattactattattattattattcttgccgtaattaatgttgttgaaatatctactctcttcttcaaacttctccttgcact

SEQ ID NO: 14766 - DNA, 463 bp, Glycine max
  unsure at all n locations
aagtgaaattaggtgcagccatttcccttagaggcctctcatgatgtggaggttgngccatgttctcagaatgttcaaaatcangatgttcaaaatcacaagtaacagaatgcacagactcaccagtaacagaatgctcaggatgcacaaaaggtataaaatgatgcctaattaatctatgaaatgtcctatctatctcaggatcaaagggttataagtcagatggattgcctctagtcatacactacattcagcatgcacaactagttgccttcttatgcaagtaacagtgtaggtttgaactacagctaccattaaatgatatccaaatgacttgaaattttgtaagcaaccttataaaatcatgaaaaggtagcacaaaaanttttatgcaaaaattcaaagtctaactatggaaactacctaangaaagtttagaaaaataaaacaataaaacttgaaa

SEQ ID NO: 14767 - DNA, 409 bp, Glycine max
  unsure at all n locations
caagctatgttgtatattntacaatagacctcctcaacctaagcagcataatcaaccacagcagagctattatgacctttccagcaacagatacaaccctggatggaggaatcaccctaacctcagatggtccagccctcagcaacaacaacaacagcctgctccttacttccgaaatgctgctggcccaagcagaccatacattcctccaccaatccaacaacagcaacaaccccagaaacaaacaacagttgaggcccctccacaaccttctctcgaagaacttgtgaggcaaatgactatgcagaacatgcagtttcagcaagagaccagagcctncattcatagcgtaaccaatcagatgggacaattagctacccaattgaatcaacaacagtcccagaattct

SEQ ID NO: 14768 - DNA, 356 bp, Glycine max
gttatgattatttgaatttctcgagagcttcctatgtttaattttgagcgtctcgatatattatacgcctgaatcgaacctcagtgtaaaaagttatgaccatttgaatttctttagagcatccgttgttcattttcgagcgtctctatatgtgatgaaccttaatcggacctccgtgtgaaaagttatgaccatttgaatttctcgagagcttccgttgttcaatttcgagcgtctcgacatattatgcgcccgaatcggacatccgtgggaaaagctatgaccatttgaatttctcgagagcttccgttgttcaatttcgagcgtctggacatattatgcgcccgaatcggaca

SEQ ID NO: 14769 - DNA, 335 bp, Glycine max
  unsure at all n locations
tcttcgagcttagtgccagcctgctgcgcttagcgcctgagtaaaatttcataatgcgcgctaagctcagcatgttgcgctaagcgcccagtctaaatttcagtcttatttttctgtttgtgaaaataacctgtgttaatctcttgtgtttagtttacattttgcagatggcatccaagaaaagaaaatctccttctacacctacccaagccagatttgataggtccagattcacatccctagaggcttgtgagagatacactgacattgtggtgcctcgaaagctactaccacataggaatgtggtagtttattacacagagtntgacgagatc

SEQ ID NO: 14770 - DNA, 450 bp, Glycine max
ctgcttgtgaggcttctatggaggctggatcttgagctttattgggtcctttaatggtgattttccaccatggagatgcagcagaagacaaaggaaaataggtgagaggaggcgccatccattaaggaataagccatggaagaaggagcttcaccaccaagatgagccttggataagaagcttggagaggatgcttcaatggaggaaaagaaagagggagagaaagagagagggggagcacgaaattgaaggaataaaagaggtatagaagtggaactttgaagtatgtcttacaagactctcattcatcaaagttacaacaagtgttacacatgcttctatttatagactaggcagcttgcttgagaagctttcttgagataacttccttgagaagcttctttgataaaacttccttgagaagctagagcttaactacacacacccctg

SEQ ID NO: 14771 - DNA, 390 bp, Glycine max
  unsure at all n locations
aaaataacatgttagaggaagtatcccacaatttaagcaagaataacttcattntggttcacaaccttactggtatctaggcattagtaggtaacacatacgttntctactatgacatagtgcatagatcctaccaataattctcaagtactaattaattaaataattgaaagttgaaactacactatcgatatacattgattagcttccacaacttgctaaacactagaacactgaaacattcttcattttacaaaaaaaatactaataagaaataaaaagacggtgtggtgttggaagaaccaaaaggtagcaaactagactactactcattgcttaaagtatgaacaatcttaacctgaggaagacaatctagtgcacaacactggc

SEQ ID NO: 14772 - DNA, 459 bp, Glycine max
  unsure at all n locations
tcattcaattgaataaagagagctgttntgctacatctattagtatcaatttagagttgttgcgcttgtttaattgggtgtgcctctctctttcatttagttattgttttttaatcacctcattcatcattgaccggtacagaaagtccttgtgcagattgttttttcccatgaaagcatttttttagttcatattattataacatgttgttgactttgaattgaagtaagtaattggaaaagtgattactcccaacggttgtaatatcttttacgttaaactatctacttggtatgtaatgttctctattttaagtttttttgctatatcattgtcatcaaatatctatcaatgttatttattattaatttttgttagaaaacttaatcagtcacctttaatggaattatttcttttcattcacatttttgtttattcacaaaattcatacttattta

SEQ ID NO: 14773 - DNA, 347 bp, Glycine max
  unsure at all n locations
gagagtgagttgtgcccacaaagaaagtaacttaagaaaaccaaaatattagagtccgtagaaaacanaaacaagaatcatcagcatcaaagtgatattttgagaaatgaagagataatgagatatgantatatatacatgtgacttgactttcaggtgatccaacaactatttggttggccaggatccanaattcttgaatatggcccaataaaagtgagaagctgtgaagatggaagagaaatagttataactataatagcctatgctattaaaagtgtgcctgccatagagaaattctctaacttataacattggtagaacattcatcanacaaaaagaacatg

SEQ ID NO: 14774 - DNA, 318 bp, Glycine max
tgagatgaggaagtgtacaaaggtgaaactacctgctcttattcgttgaccacagagtggtacctggagatatgtcgcgggggtcatctacgactgactgttacgatcactctttgtgtttttatatgggtagacctgatgtataggaatatgatgattgtatatatctggctgaagccgccactgtggacacctttgctatgatatgacgctttttatttaatacagctcccctcttttcgtcacctgcatacgacgtgcgcagctatgagccttcttatgctagtaacagagtacggttgcatctattatttgttt

SEQ ID NO: 14775 - DNA, 455 bp, Glycine max
  unsure at all n locations
agctntgttggtcgtatcccaccatcttttcatagtagagtatcgataatgtgtctaccatcacgattatcgtctccctttccatcattgngggtaccacctgngccgccagatccctccaccttttgggcgtgttctttgaaagatccgtccccctttgtgcacatgttctgtagttgcatcctatccgaaaccatatcaaaattgtactgatactgcctaacaaaggcaaccattaggtccttccaagaatggactcgggaaggttccaagttagtgtaccaggtaacaactaccccagtaagactntcttggaaggaatgtatcagcaattcctcatcttttgcgtattcccccatcttctgacaatacatctttagatggttcttgggacaagtagtccccttgtacttgtcanagtccagcaccttgaacangngaggggtgatgatatt

SEQ ID NO: 14776 - DNA, 376 bp, Glycine max
gcgatataattcgttgtaacccgtcactaaccaattaatattatcaactactcctttggttaagcaaggaaagtgttggtccaacaaaaatcatttacgcgtacagcatacatcattgtcataattgacaacacataatgacatgcatgcgtgttacagattgagcgtgacaacacatgggttgactatagtacacattttgaaactatcagtcgctcaacaacacattgggtgacttgactacacattagcgacaacacataggctgacttgactacacatttacgcgtgtctatgttttcgaaacatagttaaacaaaggctcgcgtccaaccatgtatatatatggcagactaggctactaaatcacacatta

SEQ ID NO: 14777 - DNA, 185 bp, Glycine max
ctttattgtatcaagtcttatcttatccagatattattctatctagattttatggtattcgagatttatttcatcacatcttatcgtatcttatcttaattttattgtatttcgtttatgggtgtggacttaaaatagatttgtaagttgtggggccgaggacctatataacagcaccaaagttt

SEQ ID NO: 14778 - DNA, 351 bp, Glycine max
tattacccacaaccacccaccaaacctatctatttttagattatgacatcggcagaaatgcagttgagaagagaaaggggcctatgctttacttgtgatgacaagttttcccctagccatcgttgtcctaataagcaatattttgttccacagtgggaagaagaagatgaacctgcattacaaccagatccaccacacgaggttgagacagctggtgaccccagtttgcaagatcatcatttgtcttataatgctttaaaaggctcatcatgtcttgggacaatgaagtttcacggatcaataaatggattgagagtgtagattctactagatagtgggagttcagataac

SEQ ID NO: 14779 - DNA, 405 bp, Glycine max
  unsure at all n locations
ctcttctaaggacaatagcatcatttctgcactgaattgttggagtnggaagccatcttctcaatcanattcctagcctcagcaggggtcatatcaccaagagctccaccattggcagcatcaatcatactcctctccatgttgctaagtccctcatagaaatattgaagaaggagttgctcaaaaatctggtggtgagggcagctngcacacaatttcttgaatctttcccaatactcatataagctctctccactaagttgcctgatgcctgaaatgtattntctgatggaaatggtcctagatgcanggaagaatttctcaagaacaccctcttaaggtcatccctgctgaanatggacctgngagcaaggtagtacagccaatcttttgccactccctcta

SEQ ID NO: 14780 - DNA, 381 bp, Glycine max
  unsure at all n locations
tcggaagatagtgatgaggtacaagccctnatgcttactttattagcctgngtagtcgaagagaagttcaggtccatagccatcaaagtctgaaaagagtatgatgaactaagggatgtcaatatggccaccgatgaagccttggaatgagaaaccaacaacgcccgacaggaagaacacgaccaaagaaaagtcttgaggggctctatagggcagcaatagtgagctcaagctccgaagaggtgaaaggaatcatcacgggtcaaaggcatgatcttgaacgacgagctaaaggtttgccttatgtcgaaaagaaatttgtcccaacagttaagcgagactgaagggaatatgtgggccatcatcgataagtgcaaagag

SEQ ID NO: 14781 - DNA, 432 bp, Glycine max
actcagctcagcacttctgtaggttcaggcttccatctctctgatatatctgccatatactcagccggtattaggcctcatgagctttctcatatccagcttactggatttagtttgggtgacttcccttttagatacttaggtgttccccttttatcatcgagattaaatgtatgtcattatgctcccttgctttccaagattactggcctgatttagggatggagcaagaagtctttatcttatgcaggtaagttagagttgattagagcagttattcaaggaattgtgaatttctggatggagatttttcctttgccgcaatctgttctggaccgaatcaacgcttcgtgccgtaattttctgtggggcaaagcgaatattgcaaaaacaagcccttggttgcttggtcagtagtttgttctccgaaaa

SEQ ID NO: 14782 - DNA, 465 bp, Glycine max
  unsure at all n locations
ctcctctntatttcgttcattntcgatttcttttcttccgtctttatcgcgcttttaccgtttatttaagccgttttctcacctaataaatgataaaatgaatttcaaccgatcatttgtgttgtaatctcatttaatcactcttaaaatgaaatctaaccgatcgttcacgctataacctcggttaaacaaaaaaagtaaaataataataaaataatcaaaatatcttgaaaaataataataaaataaacaaaatatctttgaataaaataaaacaaaaaaatcaatcggacgttttttctttggaagtttccttgaatgaattgattaataaccaaagtgaaactaagactaaaatagactcacaaatcaagttntgtccgaaaatcactaaaaaccgttttaaggtccaacgccttatacggtcctctntgcttttatcggttaacatggaccgttcaaaag

SEQ ID NO: 14783 - DNA, 389 bp, Glycine max
  unsure at all n locations
agctttttgattataatccacatcagcacatgaacggcgtagtcgtatcgagatccagcgccaataatataactccgtgaatgaaggatatataccataactgtcctgtttattatctatcggatgagcgaattctagtgaggtctatatcttgaaatcaagttatattcattggaccaactaaagagcgagagacatggaagaccctcgtatgaataaagacaagtcactctaccaatgtgcattgngaaactgcaatgatctgtacttgcataaagacaantagcttgccataaacatctgatatgggtagccttatcatggacgtattggccgctaccatattgatagtgacatcatccaccgttctaacctanatgcaaccacac

SEQ ID NO: 14784 - DNA, 460 bp, Glycine max
  unsure at all n locations
ggcgagcagaagaagaaggagaaggagaagagaagttgtngagggtgntcctattctgaggcacacgatgactggtaatggtagtcatgatggttcctcctcccattgatgggggtactgcatagagagtttctagttattactcttccataacataatcttctattaggtggatgatgagataagatgttggcatttgcttcttggacccacttttagatgttggaatttgcttcttacaccccctattttgcttcatgcacgcccctaaagacatgaacagatccaaatacccctgcctctcccaagcaagtggggcccacccaaaacctccgccaacccaaacaccactgccgtaactgtcaacaccaccaccgacaaccatgatttanaaaacaacacaaatcaagttgttcaagtcanatataaaaaagaggagtaaaactataccttactctgg

SEQ ID NO: 14785 - DNA, 322 bp, Glycine max
tgggagagaaatgttcatctaaagcatacaagtccctaatattatcaaatcctaaaatttgagctcctagggagcaaaacaatgtgtgtctcctagagagggcatcagctaccacatttgtatatccctttttgtatttgataacatatggaaattgctctacgtactctacccattttgcatgcctcttgtttaacttgctttgccctctaatgtacttaagtgattgatgatcactatgaatgacaaattccttggtaacaaagtaatgttcacaagtgtggagggctcttattaacgcataaagctctttatcatatgt

SEQ ID NO: 14786 - DNA, 302 bp, Glycine max
tcatgtgcttacgatagagtacaacatgaaagtatgtattacagtcaagctgtgaactcaactcatttctagacatgttttgttttttctgatttctcatgtagtgtcaactatccctactctaatttaatatattatgtgttaatacttaaacttctatacttttgtagattgaatcaatggcttcaaatatactacagggagattggagaaaaaagtgggaaacatgagatcaaatttagggagaagggaactgaattctttttaactaaactgaatataggttgacaaaaagggacttt

SEQ ID NO: 14787 - DNA, 438 bp, Glycine max
  unsure at all n locations
ctcaagatgtcgtctatctttatgatgaaataagaaccttanaaactacattatccaaatttgtcaatggaataaataatcttaacaaattattggaatactgtagaagttccatagacaaatctaaaaatgtatatgatgggaaggtatatgttcatgatgaggacaccattttttgttatttttgtggaaaacctggacacatgacatccaaatacaaggattatgctaagaagggttcagccaatccctttatggctaacacaaaaggacccaaaaatatttgggtaactaagaaaaatattattgcagttgcagatgtccttgatagtaggaaatagatgcctatcatggtacctagacagtggtaactcatgacacatgtcangagaaaagtgtatgttccaatgcctgactccctatcatggtggaacaatc

SEQ ID NO: 14788 - DNA, 181 bp, Glycine max
  unsure at all n locations
tatgtatctcttcatagagtatggccaacgacattgttctgatgagtcatgtangtgattgtgcaacgacatcccttctgatatcaggttttaatcctcccacaaagcaatccaatagagcttcttgtgtaattacttgtactcgcataactanagccgtgaactgcacgtaatatgactg

SEQ ID NO: 14789 - DNA, 205 bp, Glycine max
tttggattaaataacaagggttctccctttttccattattctattcaagctctgccacatgtccctatctgagaggagccaaaagggcccactttccctttctactgtgacccaccctcagccacaaaagtgagaaatcatcttacctctgatacgctaaaatcctgcctccattggcatgtcacttctctgattccagcatctc

SEQ ID NO: 14790 - DNA, 412 bp, Glycine max
  unsure at all n locations
ctctgcgtgctatcagggctttcatcttacagacagcaaaagaaagtntatacggataaccactcgggtatttccacccgtcaacgtgactcanatgtcagtatgacagatcttgtgaaggtggccgacaaaagcgaggctcttgctcctacgtatcctccaatgaggaactcagacctacgtagttcttgataacttgtgagacttgacaaagtctccaccggaagatgctgacatctccggaaagggcgcagatgaccacattggcctctgctcgtcaatcacacttgnggtcactgaatgacgaggtgcggataaccgtaaggtgtctccgcgaactaccagctcttgngtcatggtaacaaanagcggtgcggtcgacaaaagcgaacctcttgctcctacttatccc

SEQ ID NO: 14791 - DNA, 270 bp, Glycine max
gctttttctttattttcaaatgaacaaatgaagtgtcgacagtcattggatggttgctcggtacacgtacatgtaattaactaataagatttcctacatgttatgtataattattaagaacaggcactatgtatatagacttttatatataaatcttattagagttttaacacaatctccactggtggttgaaacttattgagaattataagatcagaacaatgactcatcaaatgactattgtgacctgccaaatatgtgatttttaat

SEQ ID NO: 14792 - DNA, 429 bp, Glycine max
ctcaagcttatattaattaaatataaagcaaaatcatagcgggaattgtgttttatattccaaagtctgaaaatggagatctttctatatggagaggggaaattccgtctcagagtttggagcaaactttctaagtaataatttcacggattcatatgaaagtactaataatttcacggagtaagacgtaagattggcaatcccaaaaagccgtataattgactactaattactcatcatagagctcttgaattaagtctgcagaatttattatgttgactagttaaggtgatgaaatttcgaactaactatagtgatagtactatcttgcttctgcataattcacaaagaccagcataaccaactctttgacgggtgacttgagttctaaagttttatatagaaaaaatggagattgaatcttgtggc

SEQ ID NO: 14793 - DNA, 410 bp, Glycine max
  unsure at all n locations
gtgaacctcaggggttcctattttcgtcttacatagatantttntttaacaatcacaagcgtgtgcggtttcatccagatccgactcaaagcaaatagcatcctgatcaatggcttattggcttgaacgtggttagggggtagagacctatgaaagaaanggatagaaaggctcanagggtgtttgagggttacattgagtaagaaaccttagagcgttgcttgtatcttttgggttaggctctactccttntgtattattcagtaatccttntcgcacttttgtgcatttcttgtanaatctggagatggttgtctntcttttttttcttcactcacctttgggcggatntatnnttcttnttcttttcattggtgcccaacttcatgcatgcgttatttgcattgccn

SEQ ID NO: 14794 - DNA, 420 bp, Glycine max
ctcagcttgtaatgctcgaggcacatgttgtagtaataatcagaagttgatatttgtcaatgtgaatgctccttgtgagctggttgggaagaaagctttatgggatgagttgaggcagctgaaggcttctaatcctagtggaatgtggtgtttccttggggacttcaatagcattagaagtgctcacgatagaatcaacttatctcagagaatggcagatccttatgacattgcagcctttaatcacaggattgatgatatggagcgtccagacattacctgttatgggaatagctctactcggattacgcctagtggctgtgtgaaaagcatgcttgatagcttcttggtctcacataattggatatctctctggcctgagagctgtcacactgtgcatcaaagtaacctctctgatca

SEQ ID NO: 14795 - DNA, 434 bp, Glycine max
  unsure at all n locations
agctntatatttctatgatatcgcgatgctgcgcttagcgccaccctcacgcttagcgcgagtaagtgaaattgggcttagcgccagtctcaagcttagcctggctaaaggcacctgctgcacttagcacactgatctcgcgcttagcgcgcgactttgatgctgatgctctactagattctcctttgcgttgagcatgctgaagctacgcttagcggtggatatgtgcttggctcaactgctgagcttagcccaattgctaaattttgcaattcataacttagcgtctttatcacctgaaaaatgcatagacntcatcattaaatccaatggaaatgttctagagacaacattaaccataatacatgatgtatntacaaaaatcactacaaaataaccataaatttgggaactatacaagctttagaaaatga

SEQ ID NO: 14796 - DNA, 224 bp, Glycine max
  unsure at all n locations
cttctccttagattcaatgcctctgctgcttgagcttattcccacatagagccatgtgttgaatattganaatacaaaccaaacccatatactcttaaaatcatagtgtatttacttggcaataggcagtaattaattctggtctcaagatacaaaatcgagaaccaagtgcagtatagttggcatcacgaggagttactctgtgaccagttgtcacgatggtg

SEQ ID NO: 14797 - DNA, 310 bp, Glycine max
taaggaagcagctccattgatatcatctaatatatgctatgcttaagcccgaataagaaaacttgtatcacaggaaaagatctaatccaagttgaattaaggatcatactgattgtggtggtaaaactggcttgaagtagccatctgggtcatatcctgaccaggaagtttgctttggtattaaaacagtgtcgtgctcaaactgctaatgtataaaatgagattacaaatatctaagctttcctcatgagatcaactaacagtatcctattcataatatcacataaatacatttataggacttaccatg

SEQ ID NO: 14798 - DNA, 431 bp, Glycine max
  unsure at all n locations
tttatctgcaaacatggatggtttgcatgctcaaactcagtgcaatcatgagatccgatgcaccaaatctggcaataactcagccccaaatccaatgattacccacannaaatcatcctncatctataccagagagcaacggaaattaaacacagaaaaaaagaaaaagaaaaatctaagccatttggctgatacaaatngcaatgagctcaacttaaagtctggactntagaattataactgccaaatgaatctcagtactttaaagctgcaactcaagtgctgggaggactgggtgcggtgattcccccaacttccgggttccctctgcttctaactaccgcatttctcccatgtttgtagggaccttggtgattgcattgttatttggaagtagaagtgacanaataattntggctcattatgacatc

SEQ ID NO: 14799 - DNA, 397 bp, Glycine max
  unsure at all n locations
tgaagctaacagagagtagagaagcaggatattctctcttgaagctgcgagcnnncattgataatttttacatgtgttcaagcttccttacttgagaatgtctctgaaattgctggttttttttaccatatacccaatatgaaatttctgcttaaatgtatgtctttatgaaaatttgttaaggtgataatcataaggattaagccatatatagtttaagtgcaaggttctaatgccaaagtattatttggaaacaataattgtcctcatatcaattagatacccttctccagtcttcctctccttagttgccattttcatggccaccttacactttggtagacttatatatatcatcaaaccacttagagcacatgcacatgttctatgtgacagc

SEQ ID NO: 14800 - DNA, 439 bp, Glycine max
  unsure at all n locations
ntataagcgcgggttcaggagacaaaggtcaagtgttcgcgatatgctaagatgatattccgagtactttggatttggtacgaccatgccctcctgatttccagctgggaaattggcgagtggaggaacgccccggcatttacgcaacaagcataatgtaaacctttacggttctaaaagctctatagttgggcctaggctttagagttttcattttgttaaggctttgtgtcttctgtttttgaatatataatacaaggatctttcttcatctgttcctggtctctacccattctcattcatttgcatgtgtacttctttttctaagacggcggatacgatggcgagtccgccgaaggtactaatacctgggacccgtctatcaacttcgagcaagaaatgaatcaaacggaagatgaaggagatgaggatgtgggac

SEQ ID NO: 14801 - DNA, 337 bp, Glycine max
  unsure at all n locations
tgcttagacgaatgagaaaactggggcaaataaagagggtgaggatgagggagaaacccatgttgtgactgccattcctatacggccaagtttcccaccaaacccaacaatgtcattactcagtcaataacaaaccacctccttacccaccacccagttatccacaaaggccatccctaaatcaaccacaaaacctgtctaccgcactctcaatgatgaagaccacctttagcacaaaccaaagaaaacaccaaccaagagatgatatttgcagcgaaaagcctgtatgattcaccccaaattccggtgtcatatgctaactngctcccatatctac

SEQ ID NO: 14802 - DNA, 464 bp, Glycine max
  unsure at all n locations
ctaagtgtataaagtatnntaaaaatatacataaagatataatttttttaatatgattaatgttatagtattaaatatataaacaaaagtaaaactttattctaaaaatagacatacaaaaaaagattaaattgtaacttttatccttatttaattcataatcagtaattttttgtctccctattttttcaatgattttaatcttcacattctagaaaaattataattttggttcaatttttaaatttttgtatattttatttctttttctttttacattttaattaattaaaatatttcttgatataaccttaaatgaataagtaacatttaggatttaattagactaaaataaaagaaataaaataaatgtaaaatgacaattnttttaaatataaggactaaaataaaataaatgtaaaattacaaattntaaaaatatagggactaaaataaaataaaaa

SEQ ID NO: 14803 - DNA, 394 bp, Glycine max
  unsure at all n locations
agctntgtctatatgtctagtacctcatcactttgtttcgaagctgtacactgattgtctctcacaccctctatatttgcgagccactccaatccttgtgatcggactctcatccacttatgatatgcgccgatgatcccattactgatctctctaagctctatgttctttcttcacgccgcatcccatgccttgcgaactccttggagtaccctcgcgttgcggtcactgaaaccccgtgcgatgaaagacgtgatgctttcgtctgatggcactcctctcatggggtagccaagctgtcttatggcgacgacgggattataattaatgcaacccctttgtcccatccagggaacatttggacatacttcgcatgaagatagaatcctgattc

SEQ ID NO: 14804 - DNA, 460 bp, Glycine max
  unsure at all n locations
agcccgcgacatgtaacccaccatcttctcatagtagaacatcggttatgtgtccattatcattgntatcatctccctctccatcagtgggggtactacttgagctaccagatccctccacctttgggcgtattctttgaaagattcatgctccctcttacacatgttctgtagttgtattctatccggagccatatcagaattgtactaataatgcccaatgaaggcaaccattacgtccttctgggaatggatccgagaaggttccagattactatatcaggtgacggttgtcctagtaagactttcctagaagaaatgcatcaataatttttcatctttcgcatatgccctcattatcttgtagtacattgtcaggtgattcttggggcangtagtccccttgtacttgtcgaaatccggcatcttgaactntggaggaataaccatgtcaggcact

SEQ ID NO: 14805 - DNA, 204 bp, Glycine max
gatgtgctgacaaatattttgcacacattccttggctctttagaatactaatagtgatggtgatcgcggcggtatattactaccggtgggaatttgcatgattctgagcctgaggcctctgatttgaggcatgcggaagagtactcattgtcggaaagggtgtgttccgttgcgcaagtgatgctctttctcagctgtggggat

SEQ ID NO: 14806 - DNA, 99 bp, Glycine max
agcttgttgtgtttcttactaattcagcgatctctgacactcgttgaacttttatcttatgcatagtatgactatacagtgtccaacaatattgactct

SEQ ID NO: 14807 - DNA, 422 bp, Glycine max
  unsure at all n locations
ntgagtatagactcatctctctaattgagtgcatgtacaaggtgttatctaatttgtcggctaatacactcggcaaggtgatacaccaagtgattgatgacacctaatctgtgttcatccaagacaggcatatactggatgacgttcttattggaatgagcttgttgaggaagcaagagtaagtggcatggaaatgattatgttcaaggttgatttccagaaggcatatgactcgatggatcgtgattgtcttatgatgaagacggaagatatgggttttcttaagacatggcatgtatgaattcaagaatgcctgtaaactgcaacaatttttggtatactaaatgggagtccatctaaagaatatgtgtatggtcaaggtcttgggtaacaagatcctttatcacctttcctgtgtctga

SEQ ID NO: 14808 - DNA, 384 bp, Glycine max
  unsure at all n locations
ntgagaaaggtgatgtgaacaagcggttactgtatatagccttcaataagaccccaattctgagttcatttctttgctttggttgctttccattgtcgaagctcttcaaagcgcgtttgaggattccccaattgaaggtagaccacacaactgaacgtgtgttcaagaacctcgttgcttttgagcagtttcactatccagacaagccttacttttgcaactatgtttctttcattgactctctgatacacactcagctagatgtggagttgctggttgagaaagaagtgattgtgcatgaacttgcgagtgatgaggaagtggcaactcttgttaatggtgtatgcatacatgttgtcacaaactcaacttgttaccatcaca

SEQ ID NO: 14809 - DNA, 356 bp, Glycine max
  unsure at all n locations
tctcttctggattatctggctctttaaataatgcattatttcatacaaaagttaactacactagctagtatgataaaatcattctccttgactaanatatcctcattaaaatagttaaaatctaattgtaaattagtctaaatagtaatatttttgccatagcacagtatacaatataaattgttatttttatataactaaattcataataataaaaacattaatatgtaaatcatattacaattaaagttcataatanataaatatctagaacatataaattatatgttagatntacaataaataatctatattgtagtacaagagtactgttaactatntgataattcttttaa

SEQ ID NO: 14810 - DNA, 300 bp, Glycine max
  unsure at all n locations
gtacagagaagagtggaaggtgccgccgctggcaacctttattaactccatgagcgtgtccagcacgagttccttgagcatctcatctccctatggcaaagcgaggacgttgatgagggacttaaggaactcttcgaacttggaacggaaccaggagaagtagatgaactcgaatggtcgtcaacagtggagggagcggcggcggcggagagtaaagncccttcagtccttaaatgaatgatacgatatgtttcttcttttacattcgagtaggtaggctattatagtgtccccttgaat

SEQ ID NO: 14811 - DNA, 442 bp, Glycine max
  unsure at all n locations
agcttgtataatgtctatacatgatacatgtcanggctcggtttggttcaaggataaaagggatgccccacattatttccatgacacatatgcaaaaatgatgatttggnaaatttatgcaaaactggtcatgcatgcacctatgcgaacactcaagtgtcaaatttttatggtcatgtgatgctagggctcangattcattntcctctattttaaatcaacccaatgtttccaaaatatgctcttttatccatttgtgcattcatccgagtccattttgggcgtccggggaaatattcacagcattcacccttcaggtgtatacacatttttaaaaactagttatgatcagtgaatcttttcaaagaaaatgtggaagtcatctcttttcaaaagcatgttggttgttcagcttgacaacatatttttctcttttctctct

SEQ ID NO: 14812 - DNA, 395 bp, Glycine max
  unsure at all n locations
tcttgcgtagccgctcttggtgctcagaanatcccanaaacatatccctcttattactagctattttgaattctttagttcctgaatgtacaaccttcaaattgttggtcgttcccctatttcttttctgcaaaaaagaaaatcaaacgctgtgaaacacatggatgaagtcctaagaaaatcaatatcaaagaaaacatggatgaaatcacaattaaaaagcacaactacctatcttttagagtcctttggttaatttgtcttgtctccttatgtggaggggtttagcttaataatgttatactttcgccttccaaaaaaaacttatgactaatcctcttttcattaatccaattgtgtatgttattgtataaaagatcatgggttctccacct

SEQ ID NO: 14813 - DNA, 457 bp, Glycine max
  unsure at all n locations
tgtcttatatctagtactctcatgccacagtggttgtcttttagaccacatataccatcttacagaatatattttatatgaacttgataggattactctaaatgatgcaactgtctttctaattatgtaacatacgtgaatatcttgaatctcaatgcataacatctaattacacctgactaatgtgatgtgaattgatcgagactcggtggtgtcacaatgaagttatacccattgaagtcgacacgtccggaagttgaattacacagaactcttgcacagtcaaatcagactatgtntgtttgtctcttgttatcgtgcatcccagcgaatatacgatgaatacgtgtactggcactgtgaataacaattcaggatcaacaaaaggcaactgaaagtgacccacttcgtaatngtcatgtcaccttactatctacagcttgagtggatctatgtn

SEQ ID NO: 14814 - DNA, 371 bp, Glycine max
  unsure at all n locations
agcttgatagatcttgggtagtcaaagagaagttcaagtccatagccatcatagtctgaagagagtatgatgaactaagggacgtcaatatggccacagctgaagccttggaacgagaaaccaagaatgcccgataggaagaacacgaccaaagcaaagttttgaggggctttatatggcagcaatagtgagctcaagctctgaatatgtgaaaggaatcatcacgggtcataggcatgatcttgaaggacgagctaaaggtttgccttangtcgaaaagaaatttgtcccaacagttaatcgagactgaagggaatatgtgggccatcatcgataagtgcaaagagaagctaaatctatcggcgactcac

SEQ ID NO: 14815 - DNA, 436 bp, Glycine max
  unsure at all n locations
tattaattagtgcggtcacattcaaaaccgtcgccgtggttctttttttttatgttggcacaaactctttgactaggtcaccaatgttgaagttacggaccttacggtgcaacttggtatcacacactcatgatctcggcggcaactatcacgttttcacgtcaaagttcttacacagctatagttgcaacgacacaaagaacatgtgcatttccatagcttaaaagtcgatgttgcaagagataatataaacaacaaaactaagattaagatgaacgacgtaaaaataaagaacgttaactgtgagatccataacttacctgtcatgttagaattaatattntattaacccttgaactggaaagtatgctatgaagtctatctctggccaattggagcactcganagttctggtcaaataacgtttaattgatta

SEQ ID NO: 14816 - DNA, 389 bp, Glycine max
  unsure at all n locations
ctactatngaattcaaagctgaggatgatgtatgtgtttggagacttaacctcacttattcatcaactcaaaggtgaatgggaaggttgagatgcaaaattaatctcataccactcttacattaangtaatgctggaacagttcgatgaaattactttccatcacatcccttgtgagaataaccagatggctgatgttctagcttctttatcttcaatattcatgataagtcaagaagaagaagtaccactaataaatattcagaattgtgttcagccagtgtactgctaagcaatataagaagaattagacgggaaagccatggttntatgatatcaagcattatatgacagataaagaatatcctcccacactntagaaaatgataa

SEQ ID NO: 14817 - DNA, 400 bp, Glycine max
  unsure at all n locations
ntagatgaatattcaatgtcataattatactttatttacatttttaatatttttataaaatgaacactctacagaagatttttttaaaaattgcattatgcatattttctatttcatcaacatcttttttttacgcaaataagaaaatgaatataataattattttcagaagttattggtttgtttagtcaaggactttgggcatagaaaagataattaaataggaaaattattcaaatcttaattaagtctagtccaacaaaaatttatcagcgggtttatttagcaattattaagctcaaactcaaatgtcagataaatacttggaatttcacaccacatctactcagttatggagcccatcaccgatatatagtcaaaccaataagtccttaattca

SEQ ID NO: 14818 - DNA, 514 bp, Glycine max
  unsure at all n locations
naacgcgaatccattagaactgccagnnaanttagnnncgcgcgctgcgatacagtagagctgccgcatggcagctctacccttatgttgttncatgttgctgctcgcttatctttggcgatggtgatggaaccacatgtaccatcttgcgagtatcctacattctttcactgacacatcatgtcgagcatgcttctgaggaatgattcggtggattatgacgacggatcaaagattcctctgttcttggagggatgaccatcgacatgaccagatctactatggttctgatactcccaggagttctagatatgctcctcgacatgttcttgcattactcggaggacgttcatggcgtcctgatagattatctacacttacaatgcacgtggattgctgttgatgacactaaattctatagtgtgctcatatgaggaaagacaaagaatctccttctccctccgcaggaatgtctttcgagactagaatacactcgcaacagacctctataatc

SEQ ID NO: 14819 - DNA, 447 bp, Glycine max
  unsure at all n locations
ntgaatgctctattcaatggagttgacaagaatatcttcagtctgatcaacacatgcacagtggccaaggatgcatgggagatcctgaaaaccactcatgaaggaacctccaaagtgaagatgtccagattgcaactattggctacaaaattcgaaaatctgaagatgaaggaggaagagtgtattcatgacttccacatgaacattcttgaaattgccaatgcttgcactgccttgggagaaagaatgacagatgaaaagctggtgagaaagatcctcagatctttgcctaagagatttgacatgaaagtcactgcaatagaggaggcccaagacatttgcaacatgagagtagatgaactcattggttcccttcaaacctttgagctaggactctcggatagggctgaaaagaagagcaagaacttggcgttcgtgtccaatgat

SEQ ID NO: 14820 - DNA, 388 bp, Glycine max
  unsure at all n locations
ctctaatatctcccacactgtgtggggtggccattcttggatggccttgatattctcagggtccacttggaccccatttctaccaactacaaaacctaagataactatattatctacacaaaaggtacacttctctatatttgcatagagggtgtttttcctaaggactgaaagaacttgtctgagatgtcctaagtgatcatctangctcctactatacacttaaatatcatcacaataaacaactacaaatctacctatgaaatcccttaagacatgatgcataagcctcataaaggtgcttggtgcattagatgagcccaaaagcatcactatccattcatacaaaccagacttggtcttgagagcagtgtctcactcatcaccc

SEQ ID NO: 14821 - DNA, 409 bp, Glycine max
  unsure at all n locations
ntgcggatntggtctttgccagtgaaaggatcgatgtgggtcttattaaaggcaaatntantcatcctgcttggacgaatgagaaaactggggcaaatgaagagggtgaggatgaagtanaagcccatgctgtgactgccattcctatatggccaagtttcccaccaacccaacaatgtcattactcagccaataacaacctttctcattacccaccacccgatcatccacaaaggtcatccctaaaatcaaccacaaagcctacctaccgcacttccaatgacaaacaccacctttagcataaaccaaaacaccaaccaagatatgaattttgcagcgagaaagccttagaattcaccccaattccagtgtcctatgcgaacttgctcccatatctacttgataattc

SEQ ID NO: 14822 - DNA, 259 bp, Glycine max
  unsure at all n locations
tataagttacagttaccagaacagtctaagatacatcctatnnttcatgtctctttattgaaaaaagctattggggaatattctgtgttaggagaacttcccaaggaattagaggttggtcctgttgatgacatatatccagagaaggttattggctcaaggctgatcacacaggggggtgtctcaattcctcagaaccttattcaatggaagaataagtctagtgaggatgttacttgggaagacgatgctgtcatac

SEQ ID NO: 14823 - DNA, 371 bp, Glycine max
  unsure at all n locations
ctaactaccttgnaanntccattancnantccgntgaaangnnttaaattaaaaacttattccanannaaanaaaccgaattttaataaatgccccccaaccaannaccnnaanaaaaaaccaaaaaaatttaacaattaccttctccactacactctctacccccacctccaatattaccctttattaccactatcaaatctatacnccccttactcttcctacctctctctcctctctccccacttcccccctcctcccactaccatctccccacttcttcccccctctacttccctcccattcccctatctaccccccccattcttccanatcctcccctacctctttcctctccttttcctcccccc

SEQ ID NO: 14824 - DNA, 442 bp, Glycine max
  unsure at all n locations
agcttagctgttatttatgtttcaagcccaaatgacccttgcatgaggggatgtgttattcacaatcatcattggtcctctagctaactcgttaagcttttaagattattggttcttgacatgttntattcagatgctctttgtgggtctatttataaaccatatgcatacaatgtgaaatgtttcatctattcttgaaaactgattccttccataaatagccttaagtcactgttaatttttctgaaattggtccaagcggactggagagaggacattaattatggtcatggttatagattggaanaatcctttaatatcagaatagtctccctgctcaaattttcattatgatgataatttaagtgctcatattgtacattggtttgttggattgcagaatactttaacccattccttttcaggatcaaactgcatatat

SEQ ID NO: 14825 - DNA, 450 bp, Glycine max
  unsure at all n locations
tccctanttattggatatataaaaataattttttattctttcattagnnaaataaccaagtaagacattcatttattttcgaaatcatcattttaatgtatttattttctaatactatgaaacccttattttaattaaaaaaatctttttctttcatttatttaatttttaaaaactctattaatttttaaatntttttatttaaaaaaaaggggtgttacaaagggaagaatttgtagggctctgtgttcttgctgcaaatgcaaccttgctgcttcagtgcttctttgctaattactggggcattattttggttacactgtttgtctctcccacgttaatgaataatttatggcaaatgctanagacactggttagtaagaaccttatttattgatnaacaaanggaatgatttcattcanaacttacttattatatttggtatatat

SEQ ID NO: 14826 - DNA, 395 bp, Glycine max
  unsure at all n locations
agcttcctttatattatttctatagaagctagagcttagctacacgtacctctctaatagctaagctcacctccttgagatgagaagctagagcttagctacacacccnctataatagctaagctcacccccatgaaaaaatacatgaaataaaaaaaaatccctactacaaaggctactcaaaatgcctcgaaatacaaggctaaaaccctatactactagaatggccaaaatacaaggcccaaacgaaggataaacctattctaatatttacaaagataagtgggctcatacttagcccatgggctngaaatctaccctaaggctcatgagaaccctagggccttcccttggatctctggcacaatctacccggagtcttctatccaatgcct

SEQ ID NO: 14827 - DNA, 370 bp, Glycine max
  unsure at all n locations
cttgtagcttcaatgcaaggaaacatgcttatggctatgaatctcaaaattggttatagagttagaaaaacatgaaaattaggatttgcttgtgagagtatttgctcgaattagggctgccccatgtttgatacttcacatagaggcagcgtggaaaataccttgcaatagtgtgtatacataggtaaatataaggagtatgaaattcctagcanagtgtgaatgaatgtatgatagcatggaatgccctcttgaatgaaaatgtgtgcaggatgtaattagctttccgatatgcatataaataaatatgagagaaacaatacaaacttgtatggtggacttcacatgtatgtaagtagtttgtgatagc

SEQ ID NO: 14828 - DNA, 491 bp, Glycine max
  unsure at all n locations
gggagtctcgactgcatgancacgtgtnnttaatatacccctctgtggacatagtgccgattgtagtgacaacacccgctctttttatgcttctncattttccttgggggggggtcatatcaatggactcccaaaaacaattcactgtgtttacaatgttgactgatgcataatatcatactttcacctcccaacacatgtgaacctcatgggttgcataccttcttttatattatcagcttccattcactccagccagataatctatttatggattatcaatcagctattcaaatgcgtcaaaccatgtttatattgacgcacaaaacatatcgaatcattacggcatatcgattgcgaaaaacacataatggccgttctaacgctgttcacttggatcctactcccactttctgatgtttatccaagacgtttcttctgtcaattcatacttaatattcaagttgaaatgtgacatttttcccacctcg

SEQ ID NO: 14829 - DNA, 408 bp, Glycine max
  unsure at all n locations
aacgnnnacgcgnggatagtaggagttagtaagtattctcttctcgataaatagattgtctaaaagattatatctgatcttgtcgctcttgcagtcaacttgataacaatgacttttgtggatatagcattccacaatcttatggcaatatctcaaaattgcaaaattgtaagtgcatattgtgattccatgtttggatgtatgatgccacatacaagtaatggagcttatgtgtatgagcctttatcttcatgtatggagtgaaataccagtctacatgccattcttgtatataaatcttcaattggagaaaaactttgtacgagattaataatatatgtcaaacattcaactacattattactatggttctataaatgatattaaacgggcaccacttttatatct

SEQ ID NO: 14830 - DNA, 293 bp, Glycine max
atagaaggtatgttcctaatttctctacaattgcatcactctctttatgatctggtgaagaagaatgtggcatttacctgtggtgaaaaacaagagcaagcctttgctttgctcatagaaaagctgactaatgcacctgttctagctcttcctgacttgtctaaaacttttgagctataatgtgatgcctctggagtgggagttggagctgtattgttacaacgtgggcaccatattgcttattgtaatgaaagacttcatagtgccaccctcaactaccccacctatgataa

SEQ ID NO: 14831 - DNA, 415 bp, Glycine max
  unsure at all n locations
taatgaaacggcgagatgatgcactccatgagaagttggatcanatggagaatagagatcataatgaataagaaaggaggagacgatggaatgatggtgttcctagacaaaaccgaattgatggtattaaactcaacattcctccatttaaaggaaagaatgatccggaggcctacttggagtgngagacgaanatagagcatgttttttcatgcaacaactatgaggaggaccataaggtgaagctcgccgccacggagttttccgactatgctcttgtgtggtggaacaagctacaaaatgagagagcaagatatgaatagccaatggttgatacatggacagagatgacaaagatcatgangaagcggtatgtgccggctagttactcaatggacttgaaattcaagcttca

SEQ ID NO: 14832 - DNA, 442 bp, Glycine max
  unsure at all n locations
gagcttattaanacccttaaaangttgccccattttcgagnntgcnggnnnnnanaatnacctccnnatacaacatactgctatttttctgaccatagaattatcaccgctgtctttataattttggcttcccaataaatgcacctatctactttctttgaaagtttgaccataaaaatctctatactctctattaaatttcaacctctacacatatatgcacttgaatcggacttcatttgaaagtttgaccattaaatttctatgacattctttttaatttcaacgtctcatatattatcgccataatcgacctcctgctacaattataccatttaatatctcacacttcngtattaacttaaactctcatatatatcccctaacctaattctgtaaaattatacatttaaattcaaacttcttttaattcaaccctcag

SEQ ID NO: 14833 - DNA, 382 bp, Glycine max
  unsure at all n locations
agcttgtctcttagatgtccaggaangataaggcggccgaagggactagttccgctcctgagtatgacagtcaccgctttaggagcgctgtacaccagcagcgcttcgaggccatcaagggatggtcgtttctccgggagcgacgcgtccagctcanggacaacgagtatactgatttccaggaggagatagggcgccggcggtggacatcactggttacccccatggccaagttcgatccagaaatagtccttgagttntatgccaatgcttggccaacagaggatggcgtgcgtgacatgaggtcctgngtaaggggtcagtggatcccgtttgatgttgacgctatcggccagctcctgggatatncattggtgttgga

SEQ ID NO: 14834 - DNA, 198 bp, Glycine max
ctatgttggatttaaaatttttataatctgttaggaagggcttaacatttctggataaaataatttctttactgaaaagtagtttaatgaaagacatggctaccattcccgtaccacttacggcaccaagaaatggcgactacataaccctatgagcgaccataatacttaatagattaaagatcagcgctcacacat

SEQ ID NO: 14835 - DNA, 365 bp, Glycine max
agctttctttttgataagaagaggaaacacattatagttggccacttggctagctagctaactactaaactacatctcttgcctttttcttggagcccactatttgtattttcttgtcaacaatcaaacactagtttcttcttaagtccgaacagatcatcgaagtgagttttgtgtgatagaacaaagtcctctccactacattccttgtctctctagcttgtttagcaaagctgtgattagtgcatccctcttctcagccctagcttcttccctaatcctcctttgttcctccctttctctccatctttcttccatcattatcctctcattctccaacacctgcatggcttgcctacactcca

SEQ ID NO: 14836 - DNA, 277 bp, Glycine max
  unsure at all n locations
accatatctttgagtaggtttggcctgttttttctctttatcctttgctagcatatagtttgtgagactttctgantttgatttanctgttggttccctttcattctgaatgggaacttccctagagtttgttactcctcctaaaaactccacctcaagttgggattggtttggttcttggatctcaacaacttgaatagttttcaccaagattgtcatttcttcctctttaaatacaacatcacaactgataaagcatttagtgaaactcaattca

SEQ ID NO: 14837 - DNA, 359 bp, Glycine max
  unsure at all n locations
agcttatgtctggtctagtacagatntgagcatatataatactcctaacaattgatgcatactaaattgcttccatttgttntcgttccatatcatttctaggacattgtgcgagactaaatttgtctcctttctgaattggaacgggtgatgctgagcacttttccatcctaaacctctctagtantttattgatatatgctttctaagacaagcctaacaatccttgtgatctatttcagaataattctatccctatcacatagcttgcctcacccatattcttcattttatagttactagaaagaaacttcttagtgtctgaaaaaactatatcattagttgcagcattatcatca

SEQ ID NO: 14838 - DNA, 366 bp, Glycine max
  unsure at all n locations
tggaacaggaagaagccatcagcaaagcacctaagggctttgttatctatatgctacattcatattctagacatgaagaggcacaagcttgaagacaagactatacgaggtatcttccttgggtatagcaatatctctaagggctaccgtgtctacaacttgcaaactaagaaactcgtcatcagtcgagatgttgaagttgatgaatatgcttcttggaattgngatgaagaanaagtggagaagaacgttcttatacctgctcaactacctcaagaagaagatgaggaagaagacccaggtgaaccaccttcactctccaccacacaacaagatcaagaactatcatcacccgagtctactcca

SEQ ID NO: 14839 - DNA, 439 bp, Glycine max
  unsure at all n locations
tttaagtttcagttgactaatacttgtaattagttaaagttaatgaaacttggtagtttgtcaataattgaacacaatttcagtggtagagatgaactagtataaatctttgtaacttatatgtttccttgtgtttttctgctttaaagtgacataaggtttaaatttgattttgttttggaaagttctatttgttttacaaagtttctcttcanatgataactttgttttgttaaaaaaagacttgaaaattttctaanaccacaattcaatctctcttcttgtgatatttgcatttacaatatatatatatatatatatatatatatatatatatatatatatatatatatatatatatatatatatatattctaacaactctctcattgtctaaagtctaattacgagttgactgtgcccatcaagaatattgctg

SEQ ID NO: 14840 - DNA, 269 bp, Glycine max
  unsure at all n locations
tgcttcanagagatccagtaaggataaagcggctgattgaactctgttccgctcccgaatatgacagccatcgttttatgagcgctgagcaccagcagcgcttcgaggccatcaagggatggtcatttctccgggagcgacgcgtccagctcagggatgacgagtataccgacttccaggaggagatagttcgccgacggtgggcatcgctggttacccccatagccaagttcgacccagacataatcctcgagntttatgccaatgct

SEQ ID NO: 14841 - DNA, 518 bp, Glycine max
  unsure at all n locations
ngggcatggactgacgctgnacccctggcaaantcagccgagtcccgcgatgctctagagatacctgcaggctagctgccngctcgttatcttctgtttgcagacatagaccaccgcgcacccttagcatagtcatgccaaacgactactctgcatggtcaacgcccaccatatcatgactatcccgggcatgacgatagggaacgacatgccaatcttggcccccttgtccacctaagagatacgtctacccatgaactaccagcgtcaaactgcggccgacatatcccggactcacccacacccggaagctaaactgaccggtgatcacttgatacagtaaagagcgacgctcttgatgagacgatatgatcttactatggacatgactcttacaccattgtcggatgtatcccatggatctatcgatggcggacacctactcctccccgatgagagcccggactttgctctatcgtcaggcgacatgactaatgacacctatagtgtatcgccta

SEQ ID NO: 14842 - DNA, 330 bp, Glycine max
gactggaacatgacctacatccctatcctatcttattgtctgtacctcagcagatgacaatatctttatgctctggacacagcttacaaattctctacagggaattataagttcaagaataagataataaacctgaataagagtaaatagtaggggctatgaactacaaggaattgactacttactcccaagggtcgtcaccaacaagaagaatgtcgttttccatcttaacactcccacttttcctttccattcccactaattattgcactgctaatagttatgaataacttcttcagtcatttaatactcacaagattcaatatgtga

SEQ ID NO: 14843 - DNA, 404 bp, Glycine max
  unsure at all n locations
tgcttctcatggaagtnntcttaagaaagcttctcaaggaagctacctagtctataaatagaagcatgtgtaacacttgttgtaactttgatgaatgaaagtcttatgagatacacttcanagttccacttctttccctctnttattccttcaatntcgtgctccccccttctctctttcttttcctccattaaagcaccctcttcaagcttcttatccaaggccattcttggtggtgaagctccttcttccttggcttattccctagtggatggtgccctccctctcctcttctccttgcctttcgctgcatctncatggtgaaaaatcaccattgaaggacctcattgaagctcaaagatccaccctcatagaagctcacaagcaagcttcaccatgacatc

SEQ ID NO: 14844 - DNA, 272 bp, Glycine max
  unsure at all n locations
tgtattcaaatgggagatgttacaatgattaataacatattttataacatgatcgtttggatgtcctaacctgaaacaacagattntgagcctatgctagagctattattgacagtagcaattgaataagagaagtcagcatttgtaacaggggcagaagtagacatcagcagggaaggattgccttgaagctggagattgtgaaatgaataaatgccatcaacacccacaactccttgaaggaggaccttatgtgtctnctgagatttcac

SEQ ID NO: 14845 - DNA, 398 bp, Glycine max
  unsure at all n locations
agcttatccttatgtgtctgcctccggacttcaccccccgtgccacctcggaagatttaagccaagcccctactttcgaggggcaactcccaccttatgaagactatcccgggcaagacgatagggaaggagataccaatcttggcccccttctccacctcanagatccgtccccccatgaactaccccagccaaacatagtccaccatatcccggcctcacccacacccgtaaaagaatctgtccccttcgcggaagataagggaaagattgaggcgcttgaagagaggttaagagcagtcgagggccttggcaattacccattgtcggatntagcggatntatgtctcgtgcccaatatcgttattcctcccaagttcanagtaccggactttgat

SEQ ID NO: 14846 - DNA, 460 bp, Glycine max
  unsure at all n locations
ccacccagctcgcccaggcgagcaaggttgcttcctccagattcaacaaccttctggaggaatcttctggagggcccaagtgggtctggttgctatttgcaccccctttttactaaatgcacccctttttctattttttgtaattctttttccgtaacgttacgaaactttacgaatttcgtaacgatacttattttccttccgtaaggttacgaatccttacggattatgtatttactcttttttacctttcgaagaagttacggaaactcacggattgcgcanaaacacctctttccgacttccgccacactacggaatttcacggatcacgccagcctgcttccttttggatttctgagacgtctcgggacttcatttattgcatgtcatcaagtaataatccctggacgaaaatanggtatgacagtaccaatatcctccccaacaatatcactac

SEQ ID NO: 14847 - DNA, 431 bp, Glycine max
  unsure at all n locations
agctnctaattanatantttgaatatccagaagattcatggtgagccatgatagcaataagctagtacatggagagaaatgataacaatcgaaatccatatatcgaaaagcactaagaacacaaccgggcaaaagaaacacatattccaatccaaattcagctcagataagaagaacagnaaatagaaagaaataaaaaatatataaatactaaccagaaatgaggataaaaggattggcatatccagcatgagactcaaggaatggaatctgctaaagccctcaaaagatgaactctagaataagcaacaaccagagagttgtaattatttattgagaagcaagtagattcgaatagttaacagctcaaaaacgcaatagatgtacagggtagatgaaaaatanaacatacacactatgatctgaagaag

SEQ ID NO: 14848 - DNA, 444 bp, Glycine max
  unsure at all n locations
acaaaacttcagaatttggatattgacctatatttgttctccttttatttcataatggttgtcttcaatgaaagagtatgtcatcgactttatacactgttctatagaatataacctggcaatgaanatcttatagcagatcttttgttgctgcagtggagtttgcgattgatgcctccattaatggtgagacagtaggatatgctactatagtgcagattaatagcagcacagctgatggatacaaagtgggctgcagttcttntaatcctgcttataaacaaggtcatgatgataatataactcaagattcttctggaggggacacaatcccatcaggaattcctgcagtatcggttgcgtcagttgatgagccctatgtgggccaggagtttgaatctgaagctgcagcacatgcattctataatgcatatgctaaacgtg

SEQ ID NO: 14849 - DNA, 392 bp, Glycine max
  unsure at all n locations
agctaacaatcntttttatagtttgagcttgacctctgtagctagagaggcttcttaaatagcttgagtctgacctttatggtagacaaaccaagtcgagccgagccttacatagaccgagccaaagaccctcgataagctgctcgactcattntcaccactagacgtaaccaatcaaaagttcaagatgtattggaataataataaagtcatcactgaagtgtgtgctagttattgagtaatacacaccaaattaatcaattcaatgataagcattagtcacattaatcacattcaatacaattattaaaaaattatctatattttacatattcgagatatattacataaaataatatgagaaaatatattacatattttagataaataaa

SEQ ID NO: 14850 - DNA, 355 bp, Glycine max
  unsure at all n locations
cattttctataattagggggagaagcgaagcgaattanggtctcaccccttaggcacttctctctatttcgaatntgctaggaaaaatcgtttccgtgaagacaaatcatgccgaggcgctttcgaaacgttttcgtgaggaatttcgcgaaggtttcgaccgttcttcaacgttcttcattcgttcttcatcatccttcgatcttcaatgggtgagtaccttcaaccaagcttttcgattcattccatatacccgtggtggtccacattgtgtatcgtgtatctttattctcgtttcatttacttttatacaccttcttgacgtgcttaagcgcatttatttaagtcatttctc

SEQ ID NO: 14851 - DNA, 184 bp, Glycine max
cctcatatattgccggtcaaaagtctggcaatgttttccagaagctttttactcatatattatacatgttgatgactatgaatttgaagtcagttattggaaaagtgattactcccaacggatgtaatatcttttaacgtaaactatctactatggatgaaatacaccctattttaagctattt

SEQ ID NO: 14852 - DNA, 297 bp, Glycine max
  unsure at all n locations
agcttggcatttgtttagattcactngacaggaacgtctgaactcgacagagtggctgcgagcgatggcanaagattgtggaacagagctttcaaccttccagcagagaaagtgtactggttgatctcctcanaagattcatcccgtggcacataaacaggatgaggctnttcaattctactctcagacagtggatctaattgcattgacattgcaccaattacacaccccattagacatgctatttgctcattccanaacccaacacaaaaagtaactaacaagaaagcaaattta

SEQ ID NO: 14853 - DNA, 320 bp, Glycine max
  unsure at all n locations
aagcttgataaagtttccacttcccgtgttaccggcaaagagatattttatttattgtcaaccacattgcaattttaagtgtatttttggaagaagaaaaaatgtttttttaaataaaaatattatttctcatacacgagtgagaaataacacaagttcttgttcccctttntatttatattgcgtgactgtgacttagccgcacatgcaacagataaggaagagcaacgtcatgccttcacttttcaatactgcttggattcagaanaaataaagagtgcaaatattcctgttttggagggagtggaggtttcacctga

SEQ ID NO: 14854 - DNA, 517 bp, Glycine max
  unsure at all n locations
cggggcggctgagccatgcagacngcaaggtgaatnagctccggcccgggatactctgagccgacctgcggcatgcaagctttgcgtttcttcatgatccattacgacacgagccgcgtcagatagacatgacggtgcgctcacgggccacggggagatagacaagaccgatgactctctcagagaagaggatatggaccgcatacgaagaatgtgccccttcgccttgtactaggtgcgtggcttcgtgaacaaccccagccaaaggtgatgcctcatgggctatacacaaccctgacccatcccatgtgcacctcgcgtagacatataaatggaatttatcctcgcgcttgctaagacgcaaagagcagtagacggcctcgtcgaggaggcggagacggatatcacgaaggcacagcctttgccatgccacaaagtggatgacgcttaccaactctgaggacctgttataacggaaggacgacattgctagggggcctatgacattaggtgcaag

SEQ ID NO: 14855 - DNA, 517 bp, Glycine max
  unsure at all n locations
nggggtctttttggggctgnantacgtgacnttanaatactatacttaagcgtctattacgtcggattatcgcatgtccaatgcatgattgttgtatggttagtccaaacaaaatcgatcgtgacaattataattgattttgacaaagaactcaatgtgttatcaatacatatattttctgttaaacgtgatcaaattaagttactatactttaatattgatgaatgaggacgttacattcaatacatgtctatatatatatatatatatacatatatatagctatgtatatatatctctatacatagatactcgaaagcggaactctagaatgcacgatgaattctcacaagagagagaatattgatgtgcctgatacaatcgagtgcacaaatttattgatacaacaccatcataacatctttctgagtactagattaacacacatttgtcctcctgaatagaaacatgctctcatgattttgacactgcatgcgcttcgcattgttatacatag

SEQ ID NO: 14856 - DNA, 421 bp, Glycine max
  unsure at all n locations
agcttttaattattctagaatttaagggtcaaccttaagatgttgccaaacttcataaggaaattagaaccttanaaactacattagccaaatntgtcaatggaatagataatcttaacaaactattanggcactatacaagttcctcaaacaaatctagaaatggatatgatgggaagatctatgttcataataagaatactattatttgttatntttgtggtaagactggacacatgacgcccaagtgtagagatcgacctaagaagggtacaaccaatacctctatggctaacacaaaaagacccanaaagatttgggtacctaagaaaaagattattcctattgcagatgtccttgatagcagaaagtagatgcctatcatggtacttggacagtggctgctaacgacacatgacaa

SEQ ID NO: 14857 - DNA, 444 bp, Glycine max
  unsure at all n locations
tcatgggaaaccagtggttggaaggcaaggttggatggtgaatttatgtgtgaaagtcacaatcatgaattggccaagtcattagttggacattcatatgctggtcgattgactaaggatgagaagacaactattgttgatatgacaaagtcaatggtgaaaccaagaaacaatctcctaacgttgaaggagcacgatgccaatagttgtacaacaatcaaacaaatatacaatacaagaagtgcatatcgttcttccataagagacaatgatactgaaatacaacatctaatgaagcttcttgaacgagatcagtatattcattggcatatattanaggatgaagatgttgtatgtgatatcttctagtgtcatcctgatgcaatgaagttatgcaatgcatgtaatttggtgtttttgataggtagtaccctacaaacaaat

SEQ ID NO: 14858 - DNA, 397 bp, Glycine max
  unsure at all n locations
agctttaagtgataatggttcaaagccncactttgagggtgtgtctctgtttcttcttctgtccatgaaacttctctgtgtcacttgatgaatgagccccacttaaaaagtttgaatattgaggtgaattatctttctgggtgtttttcaagagagcaagttcttgaagtacttggggtttatgtggaatcctctgtctgggttatggacgctgctgctataatggcaattgcacttgccaatggangggtgagttgagcaaattcaatcttgggagtttttaatcactatggttgatgctccatagattatcttttaatttttttttatgcaggtgagccccctgattggcaagattttgttggatcatcaccttgcttctcatcaattcactatc

SEQ ID NO: 14859 - DNA, 314 bp, Glycine max
  unsure at all n locations
acatcaagagcacaacanagaaagtagtgatatagttatttcttcaaattatggcagtgttgaaatgccacaagaaattgaatgtgaggaacacaatgttgttgatgagggaaggaatcatggtcatgaacaacataaggaagatagagagaagaagaaagaaagaagaaatgataatgcacaacacatggatgattattattctaaaaaattgacaagtaagttggagcataaacgcgacatgtcaagagctctataggaggtttgatgagaacaaaggagttgtacaactgcagttgtggccctttcttttg

SEQ ID NO: 14860 - DNA, 384 bp, Glycine max
  unsure at all n locations
agcttgtgattggctatacatgatacatgtcanggcttggtttggttcaaggataaaagggatgccccacattatttccatgacacatatgcaaaaatgatgatttggaaattttatgcaaaactggtcatgcatgcacctatgcgaacactcaagtgtcaaatttttatggtcatgtgatgctagggctcaggattcattttcctctattttaaatcaacccaatgtttccaaaatatgctcttttatccatttgtgcattcatccgagtccattttgtgcgtccggggataatttcacagcatttacccttcaggtgtatacacatttttaaaaactagtaatgatcagtgaaatttttcaaagaatagtnggaagtcatct

SEQ ID NO: 14861 - DNA, 319 bp, Glycine max
  unsure at all n locations
tactaagctntgaatgctctattcaatggagttgacaagaatatcttcagtctgatctacacatgcacagtggccaaggatgcatgggagatcctgaaaaccactcatgaaggaacctccaaagtgaagatgtccagattgcaactattggctacaaaattcgaaaatctgaagatgaaggaggaagagtgtattcatgacttccacatgaacattcttgaaattgccaatgcttgcactgccttgggagaaagaatgacagatgaaaagctggtgagaaagatcctcagatctttgcctaagagatttgacatgaaag

SEQ ID NO: 14862 - DNA, 338 bp, Glycine max
  unsure at all n locations
agcttttggtatcttgtcgttgattggcacaccaacggatgccccttgacctgcaaaaatttcttgaagctttgcaagtaagtgctcctaattcctctttccataaccctaaactctttttcaattntattatcgggtcttcattccttattattattcgataattttttgggtgcttctgaaacaaaaacccttattgctcaacgaatgtgtggtttgggaagcaatatttggtagcattttaagcgtttaaggtcactgaaatgtgtcgtttaagaattagaaaataagagaggatagggtggttttcttattgctatgttacatttatgtgatgg

SEQ ID NO: 14863 - DNA, 277 bp, Glycine max
tactaagcttgccgaatagtttcgccgggaaggatgaagttgttttatataggcaattgattatcctgctgtgagaatggaagcctaagcaaatggagagaataagaaggagagaagacccatgctgtgtctaccattcctacatggccaaatttccacctgctcaacaatataatacttaccaatatcagcccttctcattacctaccaccctattattagacacccatcatcacaaggccaccctaatcagcacaaacctgctactgcatattcg

SEQ ID NO: 14864 - DNA, 512 bp, Glycine max
  unsure at all n locations
nnnttcgggctggacctacagctangcannacangggagttgagctcgtacccggtgtcacccgagtcacctgccgcatgcttctttgcttatcangatcgacagtagatgaagatggacatcatcctcaagccttgaagcagcagcaagctcctcactctcaagaccctgcacactatgcattacaagataaaatatgcttacgaaccatccattgtcttcattctagtgttacagctcaagcctatgatgtaatccagagattcagatcaacatctgcaaaaggcgcttatattctacaatcgatcatctcatgtgtggtttataggtgagttgttaccanattgattctgcgtaaaactaattctaacgtgatgcgagtcatgttcgatgttattattcgtaaacaaagtactaacaaactcagtataaatgtagctagatgctggaaccaaaatgtgaaacttatcgtgatgcacgtaactgggtatataacatgaatcaacgatgcn

SEQ ID NO: 14865 - DNA, 360 bp, Glycine max
  unsure at all n locations
tactcagctacgcatttaatccnattaaatataggtgtggcttatctttatttaatccaaccaacacattgtgattgtggtgggaagacaagaataatttacagggagggtagcagcatggtaagggaggagggcaataacgtaatttgaagtggtgtgaaaattacttgacaggcaatctttgtctcatatgcaatagagttacacccaaggcagcacacaacacagccattcccaaagagaaacaaacacagttgcattgttgcaattgcaactaatatccgcgcctgtgatcgcaccttcatttcanaacctgctccatttttttctttctttctttcgcattcgtagctctatctc

SEQ ID NO: 14866 - DNA, 137 bp, Glycine max
  unsure at all n locations
tgcttgatgcttctatangcgangaaaagagtaatggcgtgggagagaagatgtgcaagctctctgatgaatatgtgagtgtaaagtcaagttcatctactacatcaagttctcaacaacctactgtggaagaagat

SEQ ID NO: 14867 - DNA, 216 bp, Glycine max
  unsure at all n locations
tgtaagtcacaagtgtttggtggtctttctatgataaaaaccttgggcgtttctgtatcctttactcatttataattgtgcaatntgtctttattatttggctaaattactattttggtttanaactacttccacaatccatgacccacgcaacaaatccaacttcgtcgaggctgaagtcttgttcgatggccataattatgttgtcgctctcgt

SEQ ID NO: 14868 - DNA, 363 bp, Glycine max
agctttctgttgagacttctttgagaagctagatccttatctatgcacacgcctctattaactaaattaacttccttaaacataattacagatgaaaataacgcaacgtataatcaaacatcaaacataatgactaataatatatagatatatatatcacggtgtgacactgtcgccccttgtgacgaatatgtggggtgctaatacgttccccatgcgtgaatacaactcccgaacctttcacttaaagttcagagatctcatcttttccggattttccaacgtgttgctcaaataaacgttggcggcgactccgcgcgcattcctttcttggaagacgcacccgcgagtcacgtgtcgctc

SEQ ID NO: 14869 - DNA, 392 bp, Glycine max
tatcatactcagctggaaggatgcttcaatggaggaaaataaagacggaaagaatgtagagatgggggagcacgagatagaacgaatgaaagagggagagaagtggatctttgaagtatgtctcacaagactctcattcatccaagttacaacaagtgttacacatgcttctatttatagactacgcagcttccttgagaagctctcttgagaaaacttacttgagaagcttctttgagaaaacttccttgagaagctagagcttagctacacacacccctctcataactaagctcacctccttgagaagcttccttaagaagattcctatagaagctagagcttagctacacatacctctctaatagctaagctcaccttcttgagatgag

SEQ ID NO: 14870 - DNA, 378 bp, Glycine max
  unsure at all n locations
agcttcggattaatgtgatgaggtacaagccctaaaggcagagcttgaaagagaccgagtagtcgaagagaagttcaagtccatagccatcaaagtctgaaaagagtatgatgaactaagggacgtcaatatggccaccgctgaagccttggaacgagaaaccaagaaggcccgaaaggaagaacacgtgccagcaaagttttgaggggctntatagggcagcaatagtaagctcaagctccgaagaggtgaaaggaatcatcatgggtcanaggcatgatcttgaaggacgagctaaaggcttaccttangtcgaanagaaatttatcccaacagttaagcgagactgaagggaatatgtgggccgtcatcgatgag

SEQ ID NO: 14871 - DNA, 452 bp, Glycine max
  unsure at all n locations
tgtagaatggctagacatgatacatgtcagggcttggtttgtttcatttgtaaaaagggatgccccacattatttccatgacacaaatgcaaaaatgatgatttggaaactttatgcaaaactggtcatgcatgcatctatgcggacactcaaatgtcaaattnttatggtcatgtgatgctagggcccaggattcatttcctctattttatatcaacccaatgtttccaaaatatgttcttttatccatttgtgcattcatccaagtccatttcgggcgtccgggaaaatttcacagcattcacccttcaggtttacacacattntttttcccanaaactagctatgaattagcgaattttcttcanagaaaagttggaagtcatctcttttcaaaagcatgtttggttttcagctagacaaactatttttcttttttttctccttttttt

SEQ ID NO: 14872 - DNA, 300 bp, Glycine max
  unsure at all n locations
caaaaaatgcttgggagtatgtcatggattgcctaggtagtctggttgattgtccttctgaacagcagttcgctgagtgccttcagaagtntcaaatggcttgttcaccttggctaatgttcgttgactatgttaacgaaacctagataatcccacacaagaaaaaatttattacagcctgaatgaataaggtgatgcacttangcaacacaacaacaaacgggtattaaaatgttacaatntttctagtaatggttattaattcatggaatttaattgtagnatattnntaattttttt

SEQ ID NO: 14873 - DNA, 306 bp, Glycine max
  unsure at all n locations
agctntgagctctttttctgactcaccataaaccttgacccagggtgagaatgtcaatccttaccctcggaagcaaaaaaggaagagaaggataatttccaatcaaaggacaaaagagaggatagganattcccaatcaaagagtgggagaaagcatatagatnagatagataattcccaatcaaagaatgggagatagattataaaaagagaaggagaagaaggaaagatagctcctggtcaaagatcgaaagaaaacagatgatatatgcagagaggtcttttgaccagacaatatctgaacaa

SEQ ID NO: 14874 - DNA, 382 bp, Glycine max
  unsure at all n locations
tacccatcacatgtggtactaggtggctgtctgtcgatggtgcacaacaagttttccacatccacaatgcgcgcataaacccaccatcccctgttgcccacctncaactgaactcacgtactcccacgtagcccatatcctcgtttctctccacccgggtccccatcaatcctcccaagcttncacaacatccaatcaaaacaacattcaaacagcacaagctatcacagccaagcaaaacagagcanaggcagaaaactctgctcaacacatcaaccaaaatcacagctnttctctcttaggaccacaagtacaattccttcgatccaattcgttaaccggtggatcgactccaaaattttactggaagtctatagtgcat

SEQ ID NO: 14875 - DNA, 239 bp, Glycine max
  unsure at all n locations
ctaagattggtataacatacgcaccaattatagaataaattttgagccaaaacaacaagcacacttncctttcactttttattttctagatactgatttttctgccaacttgtgtgaattttagtattttttccatgtatctaaatcacttggttctttctgtataacttgtttccagatgtctaataaattcagtaaacatttcagctataaattcanagtaaccaattctcagtaat

SEQ ID NO: 14876 - DNA, 278 bp, Glycine max
tatacgatatatgtcgaccaactttgcagaccttgtctttaccggagattgaatctagtccggactgatgaaaggcaagtttgaatacgcctacaacgctggccccaacagcaatagaagagccccagtggtgggcacatggaaaaaggaaggggatacccacgcggtcaccactgccccaacgtggatgataacgccccagaatgctcattactcataccaacacaaccacccgaacttctcgatccgagccgggagttccctcccaactcaagtag

SEQ ID NO: 14877 - DNA, 442 bp, Glycine max
  unsure at all n locations
ctatttagtcttctatgccatgctcgatcctgatgtgtgcgtacgactcgtattaactagattaacatccttgctcattattactgatgatacgatgcgagctgatgatctatcggacacatctttggcactcaattatggatatgtactataaggattacagctgtgcacgttgtgacgatgccgtgaagtgctagatggcttccctatgcgtgcatacaactaccgaagctgccactaatagttcggagatctcatcctttccgggctttacgatggacgactagctatagggttagcggacgttccgtacgcattcattccttggattacactctactgaacgacgtttgcgtcttctgtctatgggtgcgtacgacactatgtatatccagtgctgaagggcactatnttctcgcagttatcccctatattctggtgt

SEQ ID NO: 14878 - DNA, 270 bp, Glycine max
ctgaatgcaacagttcataatcaacaactttaataatctcacttggatactgagtttctgatgcttctatatatactgaagacatagctttgtctctatatagcacaagaaaaaaatttcttcatcctataaagagaaaatgaaaccactacaattagttaattatctaactcagagctactattatctttagctgtgcattaataattcattgcaagaagtcgaattttgaggtttatctggtgaaaaagggaaaggaccaattccctg

SEQ ID NO: 14879 - DNA, 324 bp, Glycine max
  unsure at all n locations
agctttatttatgaattgattatagccttagtttcactctggttattagtcaattcgattaagaaagaatatcccacagaacaatgtccgaatgattnttttttattgtttaatttaaatatattnttttattattatattattattttgcctctttctggttttaaacgtggttatggcatgacagatcggtcggattttattccaacatagattaaaagatattacaactctcatgatcggtggaaatatattttattgttgattacgcgagaaaatgacttaaataaatgactaacgcacgtcaaaagggggtacggaaag

SEQ ID NO: 14880 - DNA, 367 bp, Glycine max
  unsure at all n locations
tgcttgtggagcttctatggaggatggatctttgagcttcaatgatgtccttcaatggtgattnttcaccatggagatgcagttgaaggcaaaggagaagaagagaggggaggcaccatccactagggaataagccaaggaagaaggagcttcaccaccaagaattgccttggataagaagcttgaagaggatgctttaatggaggaaaagaaagagagaagcggngagcacganatctaaggaataaaagagggaaagaagtggaactctgaagtgtatctcataagactttcattcatcanagttacaacaagtgttacacatgcttctatttatagactaggtagcttccttcagaagctttct

SEQ ID NO: 14881 - DNA, 356 bp, Glycine max
  unsure at all n locations
agctnttatctatccaagatcatacaaaagtgttacaacagaacctaacggtttctaattatatgggccatcaaatctatcatgtgttgacggtaattgattagcccgtgaatttcctcggnggttgtacacacttcagcgatggcctttgctttgactagtagtcgcgggaggtcttgacttccattcaaggtcaaggcgaacctatccatccacatggtcgcttcttgatgtaatgcatcaatcaccctccctcttgcttccttctcggcgtacgcttgcacaaaatcttctaactagctttgttcatgggtcaaagactggttaactcttccttgtactgccctatgatagct

SEQ ID NO: 14882 - DNA, 349 bp, Glycine max
  unsure at all n locations
atataaatactaagcttcagaccaaagcaacacataatctaggtatccaaaactcctctatttaatggattntcaaggtttgagaagtgaaattgagaatggggtaaatttggagcaaactctcacctcacacgagtctataacatcaattgaaacttgttcanattggatttacacctaaaatttcgccgaacccaaaattgactcctcaacccccaattntaccctagaaatggctctttattcactttggtcatctgtttttctctctagcacagcccaaactttctnctaagtcctanatgaaatttcaagctaggattaactcacttttaacctcaaataccac

SEQ ID NO: 14883 - DNA, 333 bp, Glycine max
gaagctttcaatttttcttattcaatgcacttccagccactgcatagattatacttgatttggaacactgacttaataagaagagttaacacgtaaacgaataatgttatgtcgtctacataaaaatggtaaggaatataccttgtgttcacaacaaaaaaataccttgtgtaggacattatcatatacatgattttgtgtttctatgaatttaaaatggtcaattgcttctgctatgagtaagcaatctgatatacactgtgtcaaagccacccctagaccgtcacctattaactactaatatctgcaaaccttctgtacatacatagtact

SEQ ID NO: 14884 - DNA, 246 bp, Glycine max
  unsure at all n locations
aaaatnanacacttagaaatgcgtcaattangtgtacaagctcagggccctataaatgaaatacaaaattgatttaaacgtattacaatatctacaataaataaaagtctaacacctactgatctctattgatggcncttaattaatttttaaatacaaattaacaactgaatcaattgtcttataactctagagaatatcatgcgtcaacaatccttttacaaacaatcttgtatgcatatacta

SEQ ID NO: 14885 - DNA, 318 bp, Glycine max
  unsure at all n locations
agctttagcttatctgttgctgccccacaaagctccacggaagttgtctcggcagtgttcttccctacaagccctcttggtttctcattccaaggctttggtggtagccacatttacatctctcagtttggtattcttctttcggattntcagagctgctgatttggatctttctttaactgtntgggcttgctcgagttccaccctaagggcctgcacctcttcgtcttcctccggtgcctcaacttcctctcttttagcggttctcaaacttggaagccaatcctaacctttcacgtgggcttttaaccacttatg

SEQ ID NO: 14886 - DNA, 311 bp, Glycine max
  unsure at all n locations
tgagatgaggaagtgttgaagggtgaaacttcctgcttttattgttgaccacagagtggtacctggagatatgtcgcggtggtcaggagaccttgnggacgtcaggtggggtgctattgcccaaaaccaagcttgaccaatcccgacccaacccgggcatagtcggtcagtgagaacctgtgatgtacctaagcaggcgagctcctggcagtcaacagataaaaggaaaacaagaccacaaagcaaggaggcttgtggtggctggccagctgtgaattttgtgtaatatgtgagatatggcctctggtaat

SEQ ID NO: 14887 - DNA, 113 bp, Glycine max
ccttgaatcttcttcatcaatgatgttacttgcttcttgaagatcaatgacaacagaatggagaatgaggaatggtgatcgaagacgtcacttcacatataatatgagtcaag

SEQ ID NO: 14888 - DNA, 329 bp, Glycine max
  unsure at all n locations
ntgaattcaaaaatatgagccacaatggtggtgagactagctttaaatatgcgttctttggaccaatctctgttttntgaatttatcttaaaaaatacccatttgtttttaatgaaattggtctggaataaaacagataaaattctaaacaaattctatgttggatcccttgagagatgaggtcaaattagttcctatgtgtgacatgcaaggcgacttcactgttgtgcaaatagagtctagtagtgtgtagctntccttgattgtgagtctctatggtggtcaaattgaaatggtgtttacaatttattaaactagagagaaatttt

SEQ ID NO: 14889 - DNA, 374 bp, Glycine max
  unsure at all n locations
agcttctccttccttttcctataaataggggtaggagggaagaacataaatattcaaccctcttggtatctgagaatcacttanaattagtgagaaanattgttccatgaagaanatccaagccgaggcgcttccgtaacgcttccgagacgtttccgtgggtgatttcgcgaagaattcaaccgttcttcgccgttctttgtttgttcttcgtcgttcttcggtcttcaaccggtaagttccaaaatcgaactttcaatccattctatgtacccttagtggtccccacttgtttcgcatgcttttattttcatttcatttactttccgtacccccttttgatgtgcttcagtcatttatttaagtcattttct

SEQ ID NO: 14890 - DNA, 326 bp, Glycine max
  unsure at all n locations
tgccccgagaaggaatccacggaagaaatgcttaccacctctttagactgganagcggtttctaatgaatcctctgcggcctccacatacggcatanaggatgggcagctcaccaagatgtcttcctcgcctgatatgatgaccagatgcccatccactacgaatttcaacttttggtggagtgtagaggaaacaactcccactgagtggatccacggacgccccaacagacagctgtagggggggttaatgtccattatttggaagtaacttggcatgtgtgagggcctatctgtactgggagatcgatctctcccctaacctct

SEQ ID NO: 14891 - DNA, 356 bp, Glycine max
  unsure at all n locations
agcttaaactttatggtagacaatttacaggttttttagttgcatttatgtttagctntagtgttttcaattntagggtttacaatgtagtgtttagttaggtcttagagcccaataggggcaattcctgtaagaggggtgaagacccctcatttctgctggaaatcatgatgaacgcgctaagcgtgccagctgcgcttagtcggttcatcgcaactatcannattttagatttccaaatgatcgcactaagcccgaccatgtcgcgctaagcatgttcatccttctgatgagtttcaatgaagagctcactaagcgcatctacgcgctaagcgagagtagtgtttcagacactt

SEQ ID NO: 14892 - DNA, 410 bp, Glycine max
  unsure at all n locations
ctcaagcttatgcaccggaaatgtaattatgaaattgagatgcccgaagattcactatttcctagttaaccatgcattaggtaccatgttcaattattttttaaagtgaaacgggtttatgatcccaacatggttggctcgtggtgcctaacacatgaaactaagaatgtagtgtgaagtttcacgcttcccccttttttgtttttgttttgtagaggaaaacgcaaggatgagcaaacatganaacaaatggtatgcgattntgcagatcaaaaagtttgttgaacgcatatgcatgatgatgccatgactcatgcaaaatgtgaggctggaatatgataacggacaaatgcangatatgtccattatgatgttatgaagagatgcttatgcgatgcatgatatgaatg

SEQ ID NO: 14893 - DNA, 374 bp, Glycine max
  unsure at all n locations
agcttcaccgtatgtcgccgatcgaacatttcctaaccgacgtcatgcatatttcgttcagggattgaattgaanactcgttaggcgacatctgtcgtgaagtagcgaccgatatttttcagccgacattgcacaattctttttagaaaagctcgctggtcgataatggtctttttacggcagagtaagttttcttgttntggtgttgcataaaaaagttacaatgtacttcggctaggttnttcgtgcgagttcaaccgacattntgtttcggccaggaaaacattagcccacctctgcanaaaaaatatttgctaaccgtcttcatgcatatttcattcaacgaatgaatagaaaactcaatagccgacaac

SEQ ID NO: 14894 - DNA, 309 bp, Glycine max
  unsure at all n locations
tcaccggatgacgccgatcgaacatttcctaaccgacgtcattcaaattntcattcagggattgaataaaaaactcgttaggcgacatttgtcgtgaagtagcaaatgatacttttcagccgacattgcacaattttttttagaaaagctcgctggtcgataatggtttttttacggcagagtaagttttcttggtttggtgttgcataaaaaagttacaatgtacttcggctaggtttttcgtgcgagttcaaccgacantttgtttcggccaggaaaacattagcccacctctgcaaaaaaaaaata

SEQ ID NO: 14895 - DNA, 515 bp, Glycine max
  unsure at all n locations
aaccgcggaagggctgngnaccgcttatcntatagaatantaagcttgaaccttttaggtgccttaatccttgggtggacacatgagtntttattaatatatgtntctcgaatggtnngaaatggtngtaaatcaagccccggtcccaataagtaaatgacgcctaanaacaattttaagaagactttattttggatgtgctagggcccttttttttactctaaatgaaaatactataggtagactttttttcaaatacatgtgaactttttttgtcaacatgtgtcaccttttttgttttataaaaagtaatagcacataatattatgttagtgggcctaaagcttgaactctntagttgtttactcttggggcaccatcagtttattatatagttctccaaatactctgtcagataaaagatgtagaacataaaattttgtggtgctttcacaaatgcagatcanaattattttgaaaacanttacatattgctaatccatgataataaaatn

SEQ ID NO: 14896 - DNA, 430 bp, Glycine max
  unsure at all n locations
agcttgaccattccttacccaacccgggcatagtcggtcagtgagaacctgtgatgtacctaaacaggcgagcctcctgcagtcaacagattaaaggaaaacaagaccacanagccaggaggcttgtggtggctggccagctgtgaattttgtgtaatatgtggatggtggcctctggtaatcgattaccaagggtgggtaatcgattacaaggcttaaaatngaggacaggaggctaagatggtctctggtaatcgattaccaaggggtgtaatcgattaccaggcttgaaaacgaagtcaggaaacttatggagcctctggtaatcgattaccagcctgtgtaatcgattacacagaggaatgggtcactggtaatcgattaccaggcatgtgtaatcgatacacagtgtattattgcatatttcatg

SEQ ID NO: 14897 - DNA, 359 bp, Glycine max
  unsure at all n locations
gtaaaactaagctaaaaagtcttagatgggagtgggaccagnccatacattcgttacctgcaatgaacaacgaagcactcgagaaattcaaatttcataacttttcacacggaagtccgtttcatgcgcataatatatcttgaccctcgaaattggtcaccggaaagctctcgagaaattcaagtggtcataacttttcttacggaagtgcgattcaggcgccatatatatctangtgctagaaatngatcaccggaagctctcgagaaaatcanatggacataacttttcaatcgcatggtctgattcaggtgtagaatatatcgagacgcactanattgaacaatgaaagctctcaa

SEQ ID NO: 14898 - DNA, 151 bp, Glycine max
  unsure at all n locations
acctttcattctttaacatgtttacatacaaaacacgctcanaagtcacactgactatcaaaagggaaataagaagtgccaattaactctgtttgagataccacactgactagtgatgtggccaagatggtgngtattagtataatacact

SEQ ID NO: 14899 - DNA, 183 bp, Glycine max
  unsure at all n locations
tactcaagctntttggagtagaaacatgggaccaactcattntatttcanaatatgaagtcgtatctagtcaaggtctgagagaccatacaagtttcctaacgatttctaattatgtgggccattaagtctatcatatgctgacaatagccgagaagcccgtgaatctcttcgggggcggagt

SEQ ID NO: 14900 - DNA, 293 bp, Glycine max
tacaatgtaatgtttagttaggtctcagagcccaatatgggcaattcctgtaacaggggtgaatacccctcatttctgctggaaatcatgatgaacgcgctaagcgtgccagctgcgcttagtcggttcatcgcaactatcaaatgtctagatctccaaatgatcgcactaagcccgaccatgtcgcgctaagcatgttcatacttctgatgagtttcaatgaagagctcactaagcgcatctactcgctaaacgagagtagtgtttcagacacttacaaacatttcaaaatt

SEQ ID NO: 14901 - DNA, 228 bp, Glycine max
ggaaattgtattatatttcaaacttttagaatattatttagacaatgacaagatattattcttatcattataacttaatacgttagtaatttggttttaagatcaaaatataacgttaatatttgaatttttgttacatttatctttataaacaaaactaatgaataagagttctacgaactcctacacataatacatctcttgtttcttttacatatatttgccaca

SEQ ID NO: 14902 - DNA, 389 bp, Glycine max
  unsure at all n locations
agcttttggattgatcaagaagtgccttatgaatcctcccgtgcttatgccaccagtacctggaaggcctctcattntgtacatgacaatcttggacgagtcaatggggtgtatgctggggcaacatgacgaatccggaaagaaagagcgcgctgtttactacctgagtaagaagttcacgacctatgaaatgaattactcgttgctcgaaagaacgtgttgtgctttagtatgggcatcccatcgcctaaggcagtacatgctgagccatactacctggttgatatccaagatggacccggttaagtacatctttgaaaagccagctctcacgggacgaatcgcccggtggcaagtcctgctatcncgaattgatatagtctacgtca

SEQ ID NO: 14903 - DNA, 417 bp, Glycine max
  unsure at all n locations
tgttgaaccctataacaagaaattccaagagttgaaactcctatcaactcanagccctttggtaaccctaaccaagattaaaacctacaaagaaatcagaattggatagaatacacctttagtatgcagattacaacttcttcaagctntatcaattatcaaaccatgatgcagattgcaagatcttttctatgttgataatcatcatcactcttggaaaatcctcatgatatcttcctctcaataagtcacgaaattggaaaacaatttggaagcttagagactcgttgcanagaaagctatttataaagaatctactatataacatataatcgattacgaccattnntataattagtaaattcctaanagtagatatggatttctatctaagatcaatgtaatcgattacatata

SEQ ID NO: 14904 - DNA, 346 bp, Glycine max
  unsure at all n locations
agctttctatctgccccaccaacttcgcgaccaaagaagactctcttttgtacaattggaggaagaccattattacctccatagttatcaacttctataagccagaagttgtgatccgggtttttcaactntactcggccctgagaacaaagtgaccaaacaatgaaagataaggaatacattcttgcaatagtatccgttcaataaatgacaagaaatttcattcattgtaacacatctgacttcataagctaaaaaataaaacgactctggcaagcctgaatganaacaaatggggaagacaaggggcccatatgaaanaagtaaaacgatactcaatgaatta

SEQ ID NO: 14905 - DNA, 297 bp, Glycine max
  unsure at all n locations
tctccctttgagtntcttcattaactcctctattgttatttgcttccctctctcttttaatctgagtcatctctatgtcatactgagtgtacacagagacaaactctccaattgccatgctacaagccccagcaactaatcctgcaaaaccagcaagaagcatggcactgatgtctntcttaacagctccaacacccatcatcagtgaagcaacagaaaccaacccatcattagctcctaacactgcagctcgaagccactgggccctttgagagtaatcaataatgctactactct

SEQ ID NO: 14906 - DNA, 343 bp, Glycine max
  unsure at all n locations
agcttgtaactcttggcaatttctttaaaactagtcacttaaaaagttatgacttttgaaagaatcttcacaaacaagtcacttgaagaattgtgacttttggaaatgtatttttcagaatcagtcactggtaatcgattaccattaaggtgtaatcgattacacatcaacagatgtgacttcattttgaatgttgaaaatcttaacattntaaaacactggtaatcgattacatgattatggtaactgattacagctctgtgaatcagtttgaaaaaaatgctggctactggtaatcgattactaccttctggtaatcgattaccagagagtataacacttt

SEQ ID NO: 14907 - DNA, 227 bp, Glycine max
  unsure at all n locations
atatatgtgtgtgtcagacttcanaaagtatgagagagatattctaagagaacttcattgtcanatgctctctcaataactcttgggcaaatacttgcaaatctattgagagttcatctangaaaatcaaattgtatatccactctaaaggagagaaatctctctattcatctcagaaagtaagttgtaatcaagagactggtngtctcttgaatngtgagtttcat

SEQ ID NO: 14908 - DNA, 421 bp, Glycine max
agcttctaattcttgttgtatagaagatcgaaatttgttgttacttaagctgatgggtgttccagatctctcttcctagcaatattcctcgatttcaccaagatccctgagttgtcttcaaaatatcgatttgaagcttccaaatcttcagaatgtcagaacttacttgctgtgcttgccattaatttcttaaaacgtcagaactgttactgttgcacctatgcacattgttggacaaacaacctatattgtgctcacccctaaatagaagggagtgttgaaagccccacatgacgggttgccatgggcaaaaagggacatgtcgaagtcccatatcgactaaagataatgctgaaataaactatataagtggaaacaatcctcacctacagccggttttgtggattgattggctcaaacc

SEQ ID NO: 14909 - DNA, 357 bp, Glycine max
  unsure at all n locations
tgacaagatactagaaagaacacttttacattcatatctcatgtgttttatgtntacatttatgtaaaaacttactataatttactggaggcttgattctactgctcaattttcacacaagaatattctttgttaataatgaaaacatctactgtcatctttaatttatttttattcataacgtttacttacttaaatttaataatttataagatactctaactggaagttagttgcaatntatggttaattntacttagtgttgagtntatctttatcattaattgttatttcaacaatgacttgtaattctccctaatatagttagtgaagcaattccatttccatgtaaaactc

SEQ ID NO: 14910 - DNA, 294 bp, Glycine max
  unsure at all n locations
agcttgtnttcttttcccttcatctcttcggtgtggcaagcttgttttcttttgtgttaggaagtctcacatcgtctgcctcagtctttgtggtgccagttatatatctgttggaccaacttcacttaatgccaattgatttaagatgaaatctaacatgatatcagagcttatagtccgtcttagttttctctaccatgtnggttgaaaaagcagcagtacctgagattntcatccagttgtttgtctcttagaagagcacctacatactactaatctcattaacagttaatc

SEQ ID NO: 14911 - DNA, 269 bp, Glycine max
  unsure at all n locations
tatacttatattatatttatgtgtatgtacactaagttgtagttaacatttaatatctaaattntattatgtatttagtgtaatagacaaaaaggaagcacttagtgtgactattacgtgatgcactggatgtccactataatcttangaacttttatgaataattgggaaacgttaattatttatttcaaacaacattgattctgttataattggtattacattattaacttatgttgtattttatcatgccagattttaatgatgtt

SEQ ID NO: 14912 - DNA, 329 bp, Glycine max
  unsure at all n locations
tgcttgagtgtaacaatgactgtgaggttttggttgatgatccttccatgatttcaatcatgcttactagcttatttcagctatgactctaatgtgtatgctcctatctttgaaaagctgcatgcttgtgagaagtgattgatttaagcattccatgatattcagttcatatggttgaattcctttatgaatcagacaccattttcttttgattgaccactgtctttgtcacttgatgacaagtgaactgttctttctttgcttcaggacaagcaaaactgtaaatntgggggagtntgttagtcgccttatacgactaacatttgtat

SEQ ID NO: 14913 - DNA, 316 bp, Glycine max
  unsure at all n locations
tctgagaaccgctaaaagggaggatgttgaggcaccgaaggaagacgaagaggtgtaggctcttangacaaaactcgagcaagctcaaacagttaaaagaaagggtcaaatcagcagctctgaaaatccgannagagaataccgaactgagagatgtanatgtgactaccaccaaagccttggaatgagaaaccaagagggctcgtagggaagacatggctggaacangttccgaggggctctgtggggcagtaacagcgagcttaagctctggaaggaggaaagggaccaatcgcgagaagaccatttgatcttg

SEQ ID NO: 14914 - DNA, 373 bp, Glycine max
  unsure at all n locations
cccgggatccttaagtcacctgcggcatgcaagcttagggtttcttgtcgtgatttgccaccaacaaatgccccttgaccttgcaaaatttcttgaagctatgcaagtaagtgctcctaattcctctttccataaccctanactctttnntcaatttattatcgggtcttcattccttattnatattcgataantttttgggtgcttctgaaacaacaacccttattgctcaacgaatgtgtggtttgggaagcaatatttggtagcattttaagcgtttaaggtcactgaaatgtgtcgtttaagaattagaaaataagagaggatagggtggttttcttattgttatgttacatttatgtgatgggtctca

SEQ ID NO: 14915 - DNA, 319 bp, Glycine max
  unsure at all n locations
gcttgccgantagttttcgccgggaaaggattgaagtgggtttgagaataggcttatttgattatcctgctttgatgaataggaagcctaaggcaaatggagagaataagaaggagagaagaacccatgctgtgtctaccattcctacatggccaaatttcccacctgctcaacaatatcaatacttagccaatatcagcccttctcattacctaccaccctattagttaagaacacccaatcatccacaaaggccacccctatatcagccacaaaacctgcctactgcatattcgataccaaacaccacccttaacac

SEQ ID NO: 14916 - DNA, 368 bp, Glycine max
  unsure at all n locations
tctcgacccgggatccttaagtcacctgcngcatgcaagcctgtattaattttgataatcaagaacaacttgtcgcacatcttcggtgtcgatatccctcgacaaggttgagtagagagaccttcatcctatacgcaacgggcggacaaatgggcagtacttgatggccttatgtcaatggaaggtttctgccttactatcatgtccacatattgcactgtggtatgtgacatgactatacatatatagatgtgttacaccatgacacatttaaagctactccccagtggggcctttggatgaacggcattctctttgagagcatgacactaatctgaccactacattctgcaaatgcggcaaatcac

SEQ ID NO: 14917 - DNA, 350 bp, Glycine max
tgaagagagatccttgttctagtttaattgattaccaattatctcgtattcgattacatagtttagttgagaccatgtgttttcatgagtctctattttaatccattatcaggtgatcgtaatcgattactatgttcttgaaagtattccaaggagtgatcaagaacactttaatcaattaaatcaagaatctaattgattatattattcttgaaagctttctagattttgggaagaacactttaatcgattaaaatgggaatctaattgattacttcttcgagaaatcgattaccttggcaatctaatcgattacaagcagttataattgtttttataaatagcacctt

SEQ ID NO: 14918 - DNA, 374 bp, Glycine max
  unsure at all n locations
agcaacgatctgcatttacttattacacanggccacaggcgcacaagtgtactgaccacccactgactattcgcttgttatgtggttcacttctctgcaccaattatggtcatgcttaaatgtctctatctgaaaagagtgtctaacttcattctttgcatagtaaatatcccaatcacataatgcgcttctagcattttgctctaaccctctgtttatcattcttcttccactagaactccctgcccgtcaatatgctatactcccttatcgcagatctaaattcatctagagtatcaactccatcctaattccaacttctgtcaccaactcactctttgacatattgagataacttaacatcctctattatc

SEQ ID NO: 14919 - DNA, 325 bp, Glycine max
  unsure at all n locations
catctacctcttgaagaggcagaggtaagggcatattgatatgtggtttatgtanacgacggngagatcagacactattataaaatacactttcaacatcggttatttggggccttctacatcggtagtaaaaccgatgttgaaagcatccatgatgaatgtattgttgttaacatcggntttaaaaactgatgtcaacataaagaaataacatcagttttataaataaacgatggtctgaagaaagaactacagcaaaataagtgtatgcgtgacggacgttggcatctgttttctgtaaaggcccatgtgaatatgttatatt

SEQ ID NO: 14920 - DNA, 412 bp, Glycine max
  unsure at all n locations
agcttctccttctttctctataaatagggggaggagggaagaacaaaaacgttcaaccctctcggtatctgaggatcacttanaattagtgagaaaaattgtttccgtgaagaatatccaagccgaggcgcttccgtaacgcttccgatacatatccgtgggtgatttcgcgaagattntccaccgttcttcgtttgttcttcgtcgttcttcggtcttcaactagtaagttcccgaaatcaaacttttcaattcattctctgtacccttggtggtccccactatttttccggacttttattttcatttcatttactttttggacgcccttttgactagctttaatcatttatttaagtcatcttctcgccttatcagacataaaataatattccactgatcattcgtattg

SEQ ID NO: 14921 - DNA, 275 bp, Glycine max
  unsure at all n locations
aaccggtgagagtgtgatcttaaactgtgagtgatcgacctgctntgactaatagtctntgcatcaatctctgaattttagaatgaaatgtatgaatgaggacatgatgaaggccatgattgtatagacaaaccaattgaccaaaaagcttaccttgaattataattgtatcctttgcaccctttgtgagctaaattacattttcaaaattgaaccctgaacttgaatgaatatctccagataccttgtttagattctaggagagcagatagttc

SEQ ID NO: 14922 - DNA, 395 bp, Glycine max
  unsure at all n locations
agcttgagctttattttaccattgatgccaactataatgtgatggtactggtcaatgagcttaactaatggaaaactgagatacagtagtgcctacttcatcctcctaccctggcacttcccaccttgaatctaagcaaaaagaaaagaaattcgcattacctctgatagttttgaaaatttagtcaagaagcatgatattacagtctctntcaactggttgtcatccaattgtactgctgacattatcttcatagctgaaacatcatcttcttgagatccataaattatgttctctgattctctagaaacagcctgcagcctgacatcatcaatcaactcaagaaaaggatctacctgtggatttacaacactaattaatttaactgatcatta

SEQ ID NO: 14923 - DNA, 292 bp, Glycine max
ctgagctggccttagttgatcccaagcgggctaagaggtttgtctatatttcacaaaataaatagtgccggttaatattgttgtaattctaaataggtagatcaaaatggattcaattgccaatgtcttatgtttgagtcttgtggatggaaaaaacatagttggaggggagaaccccactaaatgtggccagccagtttctccaatgaagattagtaatcggcaaaaccgttagatactccataccaataacgtgatttgattaaaaaaatggattcaattttcttaaaaa

SEQ ID NO: 14924 - DNA, 247 bp, Glycine max
  unsure at all n locations
agcttttcatgatgtgagctnaacaccnacaagggcgcgggtactaagctctagctattcaccgaagatntcgcanagaagcttctcaagatagttttctcatgaaagcttatcaaggaagctatctagtctatacatagaagcatgcataacacttgttgtaactgtgatgaatgatagtcttacgagatacactncagagtgccacttctcgtcctcttttattccttcaactttgtgctccctc

SEQ ID NO: 14925 - DNA, 334 bp, Glycine max
  unsure at all n locations
tactcaagctaatcatgtgagtgtcgtaggacatctcccaattcaatttaatttctctcccaacacacatcanatagtgcactgaatgcatgtgaaattataaaactacccctaatacaaaactaccccanaaataatgaaaccctaatctaatatgtacaaagataagtgggctcatacttagcccatgggccaaaattctaccctaatgccttcttcagcagctctagcccaatattcttggagtcttctatacaatacccttggagggaggattacatcatatgtggatattattcttgatagtttaatatgccaatgatggacaaagtct

SEQ ID NO: 14926 - DNA, 371 bp, Glycine max
  unsure at all n locations
agctttgtactttcgttcaaccaaaataaaaactataaactgaaatttaaaagctgaaatagaaacataaatctaaagactgaagcataaacataaatctaaattataaaatgtactaaagacatgataataataaaacttttcaaaacacagggaaataaaaatcatgatcctgtcaatgatcctgcatagagtccatggcatgctcattcaaatccagtgcaagagtgcctgatgatgaatcctaaggaaggggcangtctaacactggtgcagatgactcangctgagaagaagacatgtccagcactacagtggaaggctctggtgtcacaggtggggtagttgctactggatcaatctcanaaatg

SEQ ID NO: 14927 - DNA, 312 bp, Glycine max
  unsure at all n locations
tgtaatcgattacacacatactgtaatcgattaccagagcatattttcagaanatattctcaacagtcacatctttntatgtggttcttgaatggctatcaaaggcctatatatatgtgacttgagacatgaatttgacaagagtttttntgaacaaaaaggtcttatcctcttaaaaagaanaatcgttttatcctcttacaaattccttggccaaaacacttgtgattcaataaggaattatttgagtgctcaaattgttcaatctatctctttcaagagagatttcttcttttcttcttcttcattctg

SEQ ID NO: 14928 - DNA, 300 bp, Glycine max
  unsure at all n locations
agctttgactatatattgctgctgggaagggtctgatctgtgaattgaatgggtgatgaacacatggtatgagaggatgaggaggcaagatttgagagcctgagttcaagaactgatgaatgtggttgaactgtcttggatcacggtccactganggtgcaatatatggagcatatgtggtgaacattgatggtgtagcagaagatgagccacacaataattgagagcccgatgaatgtaatgactaacaagattggatttgcacaccattgttgccactgcttggattaggatctactt

SEQ ID NO: 14929 - DNA, 347 bp, Glycine max
  unsure at all n locations
ctctcccctaacaaatgaaccaacttctttaagatantttatctacatccacagcaagatgctcgaaaacctcatacatgtcaagtaaccgaaaacatttttctggtgtgtgtgttcccattgccacggcctcaccataattcaagagatgcagcatgaaactctgagaaatttcagataagcagcattgataaaaggatccaaaatcaccaaggatttgctcacacaatcgtttctcactgacgaggtacacccgaacaatgatcttcatggctcgaatccatttctttatctcgttgttcaagcaatgccactccagttttatcacatccttcattcttaacttt

SEQ ID NO: 14930 - DNA, 399 bp, Glycine max
  unsure at all n locations
agcttgtgattacccatgatattatnatnggccatggaaacacaactgtttgccatcatcgagagattctctacaaactcttgttccaaacgaacgaagttaaagatagtcttttctttatgtgtaattaataacaaatatattgatcgaaccggtccaaaagttggataggtagctgcatacacgtattactcttacaattaactagaggcatggatttaacgtgccaaaaacaaatcacgcggcagataagtgggcccccactaaaggaatcttgagacatctttaagggtattgctangggcacccagcaacattgcaggtacacccagctatctttcagatacctccaaatacccctcaacgtattttttgtacaaaagctggttgattattttt

SEQ ID NO: 14931 - DNA, 318 bp, Glycine max
  unsure at all n locations
nttgcaagctggaatcatttatcctatctccgacagccaatgggtgagtcccgtccaggtagtgccgaagaaaaccggcctcaccgtgataaaaaatgagaaggaggagttgattcctactcgggtgcagaacagttggagagtctgcatcgactatatgaggctgaaccaggttaccaaaaaggaccattttcccctgccattcattgaccagatgcttgaacgcctggcaggtaaatctcactactgtttccttaatggtttntctggttatattaaatcactattgctcttgaggatcangaanaaaccatattc

SEQ ID NO: 14932 - DNA, 415 bp, Glycine max
  unsure at all n locations
agctttttgtctcctgtttgttnggaacttgcttaactcttgattccttggcatcatcaaaataatcttggaagtcattgcttccacatctaagtctattctatacatgccttgaaatgtcatgtatgtctgtcatttgtaacatataagagaaagaaaaacatgataaaaatgacagaaaatgaacgaaaaaagagtaccttttgttgatattgcacctccaattgcacatccactcaacaaagcaaccatttattttcttccccaatcctttntattaattttctgattagaaaacaaactaaggaactatagtagaacaaagcctagataataataanntatcatataataatgaaacaaaaccaanataattcccaaggtgtcttccctaatccttatgatttttttctaa

SEQ ID NO: 14933 - DNA, 340 bp, Glycine max
  unsure at all n locations
tactatgcttctgttgaacctcctccttactaatgaaccatgaagcttatgattatgatgctcataaatngcacataccttaagtcctcatgaacattccctacctcaaacctctccatcacctccctagctactccctcagcattggccacaccctcccctacaataactgtgtttttcctcctcaccaactcactcagcacactagttacatcattattgttaacatggtctanattaagcttcgtgaaggagccagcagcaacttgaccaaaaggtccagatgatggagacacattattactaccaccaagaacaacatgatggggcgtggtgatat

SEQ ID NO: 14934 - DNA, 424 bp, Glycine max
  unsure at all n locations
tagangaccccaacatatgcaggcgtgcatgtgcttgaagacgcatcatcgcgaatcgagccgaggctgttgagcaagcaatcaatcgggcttatcacaccaaacgaatatgatgatgagatggtcaaattctcacacttgtagactcatgacttataaataagcctatcttaactatcatgacttgtaaaagatagtcagagattgtaggtcgcaacatgtgtcaactcacatattcataacaactacccgactcttgaacatatcttgtaactcagagaaatacatgcaaagtcgtcatgctcacaagattgacccttagtattaaacttcgaatccgactaaactgacaacatgtaacgttagcactgctttctgcatatctaatcccacggaactagctacaccaagagacctccccacg

SEQ ID NO: 14935 - DNA, 483 bp, Glycine max
  unsure at all n locations
naagccgcgtgttctgataccctcggcannnacgnganantatnnaatactcaagcttgcttgacgagctactatggaggcgggatctttgtatcttatttangacctcnaangganattctccaccatggagatgcaacggaagacgaaggacaacatgtgtaatgaggcgccgtccacttgagaataatccgtggaggaatgagcttcaccaccatgatcagcgttggataagaagctcgctgaggatgctctgctggcccagacnaaacacggaaaaaaatacagaggtgggagcacgatctctatagacgaaacacgggaagaagaagactattggtcgggttctcagactttcttcatcgagtacacaagtgtacacatttccttttttatctagaccctccttgaaaccttcttaaatacttcttgtaagcttttcaaaattcttttaatacagcttttcgccacctttgtaattac

SEQ ID NO: 14936 - DNA, 403 bp, Glycine max
  unsure at all n locations
ttgctatgcttggataatgaatcatgaagctgagatgcccgacgaatcaccatatgctaattaaccatgcattatgtaccatgtacaattatntcgtgtgtaagtgaaatgggtatatgatcccgacatggttggctcgtggtgcctaacacatgaaactaagactgtaatgtgaagtttcacgctaccaccttctttgttcttgttgtgtctaggataacgacaagatgatcatacatgacatcgaatggtatgcagttgtgcacatcataaagtatgttgaacgcatatgcatgatgatgccatgactcatgcgatatgtgacgctgaaatatgataacggacaaatgcatgatgtgtccattatgatagtatgatgagatactgatgcgatgcatgatat

SEQ ID NO: 14937 - DNA, 233 bp, Glycine max
tatgctgcagacatttacaacatacctcctcaacctctgcagtttaatcaaccacagcagaacaattatgacctctccagcaacagatacaatcccggatggaggaatcaccctaatctcatatggtctacccctcaacaacaacaacagcagcctgctccttcctttcaaaatgatgctggcctaagcaagccatacattcctgcaccaatccaacaacagcaacagaccca

SEQ ID NO: 14938 - DNA, 427 bp, Glycine max
  unsure at all n locations
agcttgcttctatcttagggagaagagagacacanaaagaattcaggcgattaatcccttgtgaattctttttggccaagggaaaagagaatggaaaagatgaattacacaagttttttatcaaagaacttttcttggaagagaaagtgttgaccaaaacttttagatagatgaagagaaatgaatcagaaattctgtagaaagagttgaaagagatngaaagagataatggattganactcatgtcatggtcacatatntataatctcttgatgactcaaagtcaaagctggtaactcttggcantntatntaaaaactaatcacttataaagttatgactttngaaaaaatcttcagaaacaagtcacttgaagaatttgactntngaaatggtattttgaaatagtcagtggtatcgatacaat

SEQ ID NO: 14939 - DNA, 392 bp, Glycine max
  unsure at all n locations
tctgcatagctgtatatgacataacaatctctaatggcttatctcatctttccttcgatatctggaaagtgtgcgagtgttgtgcaaagaacaaagganagggattcaagagatggcaaatagattgttggcacaaaactatggagttgtgtgcaatttgaagcactaagagaaacaaggttagcgagatgtccaactgatttatgaatgctaaccaggttctcgcatccatcaagtatcaattntcttaaattcatggctctagacacatcaggaaattcagaaaccttatcacaaccggagatattcatgtaagtcaaatggtcaaactgcaaaacatacataanatcagataatcaattaacaacagtacatcaaaatcatgtcaatta

SEQ ID NO: 14940 - DNA, 284 bp, Glycine max
  unsure at all n locations
ggatgcaactgtgatcttatacccatatcagctagatcttgacgggtatcaagccatccttcgtcttgccttgaatgttaaagagcgtcccaatcacactgtcancaaacattttctccacatgcataacatcaatacaatgtctaacgtcaagatcacaccagtacggaagatantagaaatggacctcttcttcatatgcaactctgactttatccttcttttgggcttcccaatacactgttcaggtgtgaacccactgatatacctgctcaccagtcaac

SEQ ID NO: 14941 - DNA, 386 bp, Glycine max
  unsure at all n locations
agacatcaaccccaactcttgtgcatcagtgcagattcacttatttattagttgggttcatccttgttcctgtcactaaaggatcgaaaacttaccattctgttgaggggtctctctgatagtaacttgtcgatgtcttcgatgcgtacgtgtccaanagaacgaggggagaggatacccataaaaggcacttcgacgctcaagtaagggtttggctcaaagctatcaaggatgtcaagtgaatattcaagtaaaaaacaatccttttnacctgggagctctttgttcgctggtcaacgatgctaattggcaagtgcaccgagtcgcacaagtaatataaaacgatcagaaccgagtatcgaatccacaagggacttgtttcactc

SEQ ID NO: 14942 - DNA, 398 bp, Glycine max
  unsure at all n locations
agctntgcctttatttctnngtttctcatcancttcttccgaagctntaacctcattgtctctcacagtctttagacttgngagccaatccaatccttgtgtcccgactctcagccacttatgatagccgccgatgatcccattactgcttcccctaagctctctgtcctttcttcacgccgcatcccatgccttgagaactccttggagtaccctcgcgttgtggtcactgaaaccccgtgcgatgaaaggcgtgatgctttcgtctgatggcactcctctcatggngtagccaagctgtcttatggcgaggactggattataattaatacaaccccttgttcccatcaagggatcatttggacatccctcgcatgaagatagaatcctgattcttc

SEQ ID NO: 14943 - DNA, 324 bp, Glycine max
  unsure at all n locations
aagcttgaagctcagggaaaacttgaagaagttatgaagaagnnntgtctnctacattcctaactccttagagtgacgtatgtattggttgttatcttgatcaatgcatcttactacatttgacatctgctttgtatcatgcattatcatggatagtatgaagaaaagaattctaattagaaaaatttcttcaaagctaaaaactctctgtttaatttattagagttgccgtaattgattacaacaagctatatgaagcttatgaaggtaagctcgtatcatcttaattgattacaatagtattttaatcgattacagtgttat

SEQ ID NO: 14944 - DNA, 369 bp, Glycine max
  unsure at all n locations
agctngctatcttttatnnttcatacagtggaccttcttctagtaattatgacttaccgcagccgcctatccctcttccatttccacctagagcaattccaatacaaaaatatggaagaagcggaaaaagagatcttggagaccttcaggaaagtagaggtgaacatacctctgctagatgccattaagcagattccaagatatgtcaagtaggagttgtgcacccacaaaaggaagcctcagggaaatgaaaggattagtatgggcagaaatgtgtcagcattgataggtaaatctgctcctcacattcctgngaaatgtaaggacccaggtactttntgtataccttgcattattggaaacagtaaa

SEQ ID NO: 14945 - DNA, 403 bp, Glycine max
tcttccacgccaataggttccatctcagcaagtaaggccatattgactttatcaccatcagctgtaatcgaggaatctgggaatatctcatagtcatccagccttgcaggggcttgtctatttctctgaggtctcgttgatactgcatcatcatgaacaacattgtcttctgttcctacatccgtgtttagaccttcaattctggttctcaattcagatgtgccctacttatcactccaattccaggattgaccctcatcaaacttcaaatctctactcaacactagtttctgagtttgaggattaaaaaccctgtatgcaccagtagaatggtaaccgagaaatatgaagttctcactcttgtcatcccaatttctctttattgcgtctggaatatgcttat

SEQ ID NO: 14946 - DNA, 343 bp, Glycine max
  unsure at all n locations
agcttcgcactagtcttgggttgtccatacattaaccaaatgtgtgtcaatatcttcctagacacagaattcaccaacaacatactctagtgcctcgtttgcattttgtatcattataccattgtggtgcanaataagagtgatntcatcacaaatcctataggtaaacacaaacatcattatttgtattttcacaaaccttgtttatacacaacatcagtaatgaaaaagtataaatacaactttgagaacccaaatataaacctccaaatgaaacatcattcaaaaaaaaggaacaagaagccaaatgataaatgagcaaacaatgcacaaaaggaaatga

SEQ ID NO: 14947 - DNA, 395 bp, Glycine max
  unsure at all n locations
tgttgctttgtgtgagggaaccatantcttttgttttctctctgnctttnacaataagtatgtggtcaagatacaccacttgagtcatgaaacccgttccagtggagacaataattgaggttccaagggtgttagacatcatggttgcatggtangcaaacatctcactcatgtggttcttcaacacttgaccaatgttaggtggcattttaccacttggtatagtggcttttgtttgcaatgctactatgtgccttacttgcacaacttttagtgggaacttttcattaagctgttctctagacaacattattccgttagaaccttcttgaacaacaattacctaaattgatacctctattctggttagagtcgggtgaacaatcatgttgtct

SEQ ID NO: 14948 - DNA, 409 bp, Glycine max
  unsure at all n locations
agcttttttttaattgcttgtcttccataagcagagtcagtagtgcactctcacccatctccattacaagcctttcttcttcctgaacacacatggtcattaattcattgatagaccatttatctttatgtgtgttgtaggaaatcttaaatggcccatattcatgcggaagggtgttcaaaatgaaatgcactatgaaggactcagacatatcaacctctagtttcttaagttgagctgaaatatctcgcattttcatgatgtactcacgcacacctttcacactggtgagccgaagagagaaaacttcatgatcaaggtgctngctaaagtcttatctgaagtgatgaactggtcatcaatggccttaagcaagtctcggaccttttcatgctggtcaacagaacca

SEQ ID NO: 14949 - DNA, 609 bp, Glycine max
  unsure at all n locations
aaaataccggccagggtgacganngtagtgancgtctcananatnnnangactnangccctagactgtactactacaaacncgaagtggtatatacccgcccatagtcctatttacttctgaggaagtccgtcaaggcnctcgtttctcgctgattcanggtccaacnccatannnatcattnntaacacagcagaactatacgnctatganngctatgcaatacnnacacaactaccctcaattatttntcaaaaatattcaaattaattnttcaaaaatatgggttttaacctcacttgggcactntctaagtggaacttaaacctctgctctgggtttggcaccanatgggagcnccantnncacaaaatntcattctgcacaatgataccctcgttcaccccttttaagggggtcttaatagttggtgtgaatggcnnatagttcataagcctcaccagttcattcgcataacttcacttattccccatatatcatattatacattcataacaatgtttaccagacacaaccactacacanatcataccacanatatatatatatatatatatatatgtatatataacgcattatacatatattg

SEQ ID NO: 14950 - DNA, 346 bp, Glycine max
ccgggatccttaagtcgacctgggctgcgctttcatatgtgtctacaggagacttggtgtgcgacctctggaattcacaggactgttatcttgatttggctgctcaccaaggcaatgtgattgatgacctttgaaacgaactcaccaaggacggttgttgctttgctattgtggttggggtgttgacaagtacgagtgcttgccctacctgtcaaaactttataccttgactttgattgatccattgtgggatatggctaaggaaccgttttgatattggtgtttcagtgaactttctacttttattgaattcttgaataccttgcttgtcattagtgaatatcat

SEQ ID NO: 14951 - DNA, 326 bp, Glycine max
  unsure at all n locations
ttgtactcaaagactgccatagctgactttaccttctatttttatggngcataaatattaaccacaagcgagagtgaatattgaagaaatcaacatgactaagcataatcacaagctcccacaaatgcaagagtgaatatagaagaaagtcagcaagtaatttgagtataagagtcccaactagatagagggaagaaaatggatgcaggacagaatcaaatatattatttataatgtcatttagccttttttttatttaatttgctaaacactaaattatgctaccatactattttcagattccattaggagcgatcttagccatt

SEQ ID NO: 14952 - DNA, 422 bp, Glycine max
  unsure at all n locations
agctttttatttatttacccgcgctaagcgcaagggtggcgctaagcgcaacgtcgcgaattcagagcctacttatagcctgtcttgtgcaaaattagggtacactttgacacacanctttacagactnttagacaaattgtaggcagaagatagggcatagattctagagcacaccacaatgcctattatgggaaaaaagccctagaagcatcaagaggagcaacttgtgcattgaaacctaggttttgtaagattattattgtttgggtttctttgtaatggctagctaagcaccctagttggggatgtctaatgaacatctgatgtaaatacctaatatctaattgattatgttttctgtgttcaatgcttccttcaattcttaatggttgtatgcttttggtctgatcatccattcgt

SEQ ID NO: 14953 - DNA, 363 bp, Glycine max
  unsure at all n locations
tgccacccagctcgcccaagcgagctaggttgcttcctccagtagtctccgccttctagaggaattttcgggaaagcccaagtgggcctggttgctatttgcacccctnattttactaagtacacccctcgccttttttggtgattctttttccataacattacgaaactttacgaatttcgtaacgatgcttgttttctttccgtaatgttatgaaaccttacagattacgtaatcatcccttttttgccttccgaacgtttacggaattntacggattgcgcactaacacttccttttaatttccggcatgtcacggaacttcacggattgcctaacgatgggtgccaagtacctcgatgt

SEQ ID NO: 14954 - DNA, 304 bp, Glycine max
agcttgttctatttattatctacaatgctttattgaatgctttaaggcgaaggtagagacctgagtcacacatgtatcatcttcctgttggtgaatgcagaatcaccttgtaaagtgttgctcttcaacttgatatatgcgttaatggaagactagttactagtgcaacatattatgattgggaacaaatgtgtgcaaaatatataggtgttgttcccccaaagaatgcattggtgggatcaaagcataaactaacatgggtaaaagaaaacatgttgactctcccaacagaacccttaccaca

SEQ ID NO: 14955 - DNA, 290 bp, Glycine max
cctttccttgtggtgaagctcactacaagccttaagtgaaaaaccatgatattaccatatccttaaggaattttggagctttggaattgttttgggaataagtgtggggggttcttgtttcattggacaacattgtttggtgactatgcttcatgatgtattttgggccatacttgatgtacattgtatattgggtaaatggtggacatgctgaatgatatgttgtttctcaaatgaaaaaaacaaagaaagaaaatattcgaaaaaaaaaaaatttcaaaaaaaaaaaa

SEQ ID NO: 14956 - DNA, 252 bp, Glycine max
ttttggtggaaagaacattcgtcataatgtacgttactgtcgttaaaatgatcatataatatatatttataggtgatctcttccgttttccctaatatgtaatgtgaccttttctttttagctgtcttgtaagatgagcatacactgaatatcagtacttgtgtgtaaattaattatagagtatatgacactcgtctcttttggataaatatattaattactacaactctctacttaatgttgtaaaaactc

SEQ ID NO: 14957 - DNA, 414 bp, Glycine max
  unsure at all n locations
atcttttacatgactntgnnnctatatatggggcannatacgatgaacaaggatgtnctatgattggaaaatatccaaaagtaactacttgtcttaattatcaattagaggtgaaaaagcctaataccaaaatcatgtacataannttgaaatgaatntgtagcttattttatagaaaatataccatttaatatgaacatggttattaatgttagagataaatttttttgacagcattaaggactagagatattgatgcacgaattatcagttcttttaattaaaaatacatttattcaacactttcatttgttctctatgactttttcaatntttntaataccttaatngatatccaattttttttaaaatattntggttatattatgtagnggttctntattttattcttat

SEQ ID NO: 14958 - DNA, 305 bp, Glycine max
  unsure at all n locations
aatactcagcttaaacttcattgcatccagccactntctcttttcttcactttctcatgacctctctaaagcactcgggttctccatcatctgttaggatcacatactcattaagagaatacctcttagaaagttgtctttccctattagacctcctgataattggtaaatatgagctatctttgataataaaagtatattgaaaatatctttaaaaatatttatttaccagttattttttggcttaaatggtaggaattgatatttttcttatttacggcttgcagatatgaaaaggagggatt

SEQ ID NO: 14959 - DNA, 263 bp, Glycine max
  unsure at all n locations
agcttgccttatagaggtccaggaaggacaaggcagccgaaggaactagttccgcttccgagtatgacagtcaccgctttangagcgctgtacaccagcagcgcttcgaggccatcaanggatggtcgtttcttccggagcgacgcgtncagctcanggacgacgagtatactgatntccaggaggaaatanggcgccggtggtgggcatcactgggttactccatggccaagtttgatccagaaatagtccttgagttttat

SEQ ID NO: 14960 - DNA, 587 bp, Glycine max
  unsure at all n locations
aggaagttctgattgactgattactatnagcannnaccgcgacactatagaaatacctcaagcccttcttatccaaggggctcanntcttggtggggtgaaagcctcncnnttcttcncattgtgtcttatntcnncttanatggngatgngcngccctcncnntctcacnnctatnntttcnctnnttgtctntcnnncgctgcatttctcccattgggggnnngaaannatcacncatnntaaagggaaaccccannttgaagcctcannagaatcccagcccctccattagaaaagctccacaagccaagcttccattcagatgggctnntaaaaaattcgcggcttttactgcaaatacaaagaggaccgaaacanaaagccaaatggatcanatccaaaatctgtcagagattaatcatcaaaagaaacatanattgatgctaaatataagtatcatgatgcttaatatgaagtgaaagagaacataaattgatggagtatgacttcagatccccgtgacaagaccataattgaataaaaaccaactgaacaaaacaatttttatcatgtggatcaatggag

SEQ ID NO: 14961 - DNA, 279 bp, Glycine max
  unsure at all n locations
agctnngattattcatggatcgggttagtccgtttcacactgttacacgaatgtaatattttgatctacccccgccagccaaacaagttgattcacgggtctatttttttaaaaaagaaaaactataaatttaaaataaatatattnttttctcttaaaaaatagtcaattacactcaattatatatatatattaaaaaaagtcttaataaatctctaattaatactcaattacaaaaagtttaacacaactaaataaattttcaacataaatgtaaat

SEQ ID NO: 14962 - DNA, 410 bp, Glycine max
  unsure at all n locations
ctaagcttgtaccgaattcttcatcgctctaattatcagattgatgagattcgattaatataaatggctctggatgtggtatgaaataattacactcattcctttccaaccatcatttacgtcaataaactttcacattttgaaattctccaatttacaggctaggggcatgaattgcttacacaccagcacacctacaattgttcatcgagatctaaagtctccaaatcttttggttgataagaactggaatgttaaggtatatgattgaaaacttatgcaggttataatatttgcttattctttattatcgcataacataactaaagagtgccataaaaagtagtgcaataaaataataacaagacgatgatgatgatgtctngttggatgatagtttatgatggaaa

SEQ ID NO: 14963 - DNA, 379 bp, Glycine max
  unsure at all n locations
agctntntggttattataaaacaatgggcaatggttaaagaaagattgtgaaaaagaattggttggaagaatatcatatatgtatattgaatgtgtgcaaaattcatgcttttatagactcttcatgtctggtcaaagaaaccattggaagagtnatgacttttgagaaaaccatgttaagagttataactcttaaacttttcttcnaaactgttcactggtaatcgattaccacaaaggtgtaatcgattacacaatgcattttatgaanagttgtgactcttcacaattggatttgaattccaaccgtcagaatcatttgtaatcgattactaatatanggtaatcaattagactatttgaanatcattttggaatg

SEQ ID NO: 14964 - DNA, 370 bp, Glycine max
  unsure at all n locations
gatggaatacttacttgttggtgatgaacaacaacgcttaactgtttcaaaaaatgcaaaanatgatgaccctagggctgcaaactcgtaaatcccgtgggtatggcttttgaaaggggggtgtcataccctaatttcgtccggngacctttgcttgatgacatgcgacctttctttggtccttgtgaggtgcttggtacccatcattanggaatttgtgaaattctangacattgccgaaaaccaaaaaaatattgatgcacaatccgtaagtttccgtgacacaccagaaatcaaatggaagcatcgttgcataattaagtgaggttccgtaacattccgtaagtcaaaaaggggatgatttatgtat

SEQ ID NO: 14965 - DNA, 225 bp, Glycine max
  unsure at all n locations
ctgctagangttgcaacatgtatgcggaaattgctttccattttccacggtaaggtgggagatgatgattgaggatgtctctcagtaccgaacaagcctatcaaacattttcaggtgctcttcaaatcaatcccaaaggattgagttggatgtacataaatgagaaagtgtgtgtacaaatacaggaatgggcctacaaaaatggctgttggtggatggttgtgt

SEQ ID NO: 14966 - DNA, 289 bp, Glycine max
aggaacccccagctataatgcgttcttttgaacctctatgtcgtctggaggatgaaggcaacgagttctatatccagagtaagaacaatatgtgttgggtgtggtgaaggaaaccactacttacggtatcaataatcccatcgtgttacaaaacacatttcccttgacatctgaaaagccatcgttctcatgacattgtcctactttgtgtggatttccttgaagttgcacatgctgctgcagaaaagtatatgagaaaagtagctgttgaatttgggattcctctcta

SEQ ID NO: 14967 - DNA, 376 bp, Glycine max
  unsure at all n locations
aatttcacttacttgcgctaagcgcaatgtcgcgaattaagagcctatntaaagtctatcttctgtagaattanggtaccagctttacatctattttacacacctttatgataacttctacagaacggccagggcacagaatngcagagcagctgtntggatttcggcaagtgcaccggatcgcacaactagtataaaacagtaagaaccgagtatcgaactcttcgtgaacttgtgttatttggtaagctatttcagcaaattgatgtctagtgtgtaaagataagtgtgaatatgaacagggtgtaaaactatctatgcaaaaagaaagaanatcacgcgagagaaatgatgntgtaaaacaagtagaaacaca

SEQ ID NO: 14968 - DNA, 140 bp, Glycine max
  unsure at all n locations
ttccctagtagaatactagtaatgtttctactatcatngncatcgttntttcgtcattgatgtgccacttgagctgccangttctccacctttgggcgtattctttgaaagatccgtgcccccttttttgcacatgtttt

SEQ ID NO: 14969 - DNA, 518 bp, Glycine max
  unsure at all n locations
nnnggcttatgatagctagatagactggcannncnactgagncccggcgatgctgtatatatgaactggaaggcttgcatgctaaggtatacttcttttctcaccccaagtggcctangaggaaggctaccactatatagagccttcatcggcctcacacagacacactacactgtgtctcacagtccctctcatcaggagcaagatattgagagccaacccatcatagtgaaccgtgacggctctganaataagtacgaaactacgttgcttatgacctcagaagatgtggagaatacgagttggtgtacttcaagaggctcgatgatgaattcaacanagtgggacaagtttacaagtcaaaagtggacgaagtgatgaaggaagcttgcatgctcaacaagcanatgggatgcttgatagctttcacgatcaagggtgagaagccaagtttgtcgtatttgatcattctgtggagatgactcgtctggcttctgatgttgctcttcatctgcagg

SEQ ID NO: 14970 - DNA, 325 bp, Glycine max
  unsure at all n locations
tcttataatgaatgattagagtaagaatgactcctcgtgttagttttgtaattatctagtagtagaagataaacttccaatgtttgtcttgctgatttcaaccataacattttgtattgtgtgccatttttggctaaaagattattaattgtagtgcangtcttacttacgcatacagccgaatagcgatagtgttaagaatactaaagcaagtcgttttttaaagtacttgttagatataaaatcaatagcttaagcttaggagtcggtatgttctcgatcgtctcagtttgcttattaattggtatgttcttgatcgtctcag

SEQ ID NO: 14971 - DNA, 380 bp, Glycine max
  unsure at all n locations
agctttttctcatttctcattccagacaaacttctcattcttatgagtcagtttagttaggggtagtgccaatttagaaaatccctcaatgaatttcctataatagccagccaaccccaagaaactntgaacttctgttggagttgtcggttgttgccactccataaccgactccactttaattggatccacagcaaccccatctttagaaatcacgtgccctaagaactgcactttctctaaccaaaattcacatttcgacaatttggcgaacaatttcctatccctcaggatatgcaacacaattctcaagtgcttttcatgctcctccttattccttgaatacactaggatatcatcaatgaacacaaccatgaact

SEQ ID NO: 14972 - DNA, 282 bp, Glycine max
  unsure at all n locations
accctgatgaggatgtcccatatgttcttatactatactggtccatttgcttccaaagtgtcatggccttgcaggtgaagacccgcacaaacatctaanagaattccatattgtctgctccaccatgaaaccaccagatgtccaggaggatcacatatttctgaaggcctttccttattctttagagggagtggcaaaagactggctatattaccttgctcccaggtccatcacgagcttggatgacctcaagagagtattattagaaaaaattttccctac

SEQ ID NO: 14973 - DNA, 439 bp, Glycine max
  unsure at all n locations
agcttgttctttntatggaanggaggagtggttntctttgcttatcttgttagcaccgagtttggatcatgtaggaaatcgttagaatcccttgaacctaagcgagagttatgagtcaagtatatcaaagtggggaagatcttgttgaagaagaaaaaaaacttacattcgaaggtaggtaaatcatgtattctcgagagtcacgtgtggactangattggtagagtgttgaagtctcgaaacatatactttctttcttgaatcatctcatgtttgagacaatgtcggtcatgtggctaatcatgtttccttgtatttgcttgttcatttcaaatttcatcagtgtctcctatgctattacctaactccaaatagtatgtcattcatattctattatcattgagatgtcacatttgtgataaaacttaacttatgaaat

SEQ ID NO: 14974 - DNA, 325 bp, Glycine max
tgtgcctcttcatgtctagaatatgaatgtagcatatagatttttagacccttacgtgcttttctgatggcttcttcccgttctaagcttcaattggagtcttgtcttttacagacttagttggacatctgttgagtatgtaaatagtagtgtagattgcttcagcccagaatgtgttaggtagtcccttctccttgagcatcgatctagccatttccataactgtgtgattctttctctcggacactctattttgttgacgagactatgcgactggtagttgtcgctcaatgccttcatcctcacaaaatctttcatactcacg

SEQ ID NO: 14975 - DNA, 362 bp, Glycine max
agcttctatatgaagcctcttaatgaagcttctagagaagactacatggagctgactcggtagaaacgctgcccagccttcgttaaccgttggatcgtctcgaagtttggtttgcaacttcacaagacactttaccatgatttaaccgttgggatctttgagaaaatatctggagtgtgctagaagcttccgttcccgagagcatctcttatttaagcatttcagcctttgctttcttgtagcttaggaaaaatgccatttcttcttctttctttcttccaaatccatttctaaagttccaagtactttctccatcacccacagccaccattagccaccacaaaccatcattgttctccatt

SEQ ID NO: 14976 - DNA, 303 bp, Glycine max
  unsure at all n locations
ntaacctcatcgtccctcacagtctatagatttgggatccaatccaatccttgcgttcggactctcaggcacttatgatagccgccgatgatcccattactgcttcctctaagctctctgtcctttctgtatgccgcatcccatgcgttgcgaactccttggagtaccctcgcgtttgtggtcactgaaaccncatgcgatgaaaggcatgatgctgtcatctgatggcacttctctcatggtgtagccaagctgtcttatggcgacgacgggattataattaatacaaccccttgttcccat

SEQ ID NO: 14977 - DNA, 348 bp, Glycine max
  unsure at all n locations
agcttttgattattatattatataaccacacatagaatggtgagatgcctcanaatagattgccttatcagtaagagtaagtgtgccaggccatgccatattattctcccatttcaaaacaggtcgcttactgttggaaccaatgcataaaatcctctcctcagaaagttgaggaaactctggaatctgatatgatatctgtctttgacgcactctgcagtaatatcagtaccagttcatcacagaagttgtcataccaaagaatgtcttgaagttctgagagcattccagcactatcaagcaatgagcatgctgtacaacagacataaattgaaagatggaactaac

SEQ ID NO: 14978 - DNA, 274 bp, Glycine max
  unsure at all n locations
atgtnngnngatatatcttgatttcttataactcgccttggattacgaaaaaaatattaacattctattggggttcttacctgtcaagtntggaaaaaccagacaagggatcaactcagtcattgcatctatacaatcaatctttctcagccattgtcattttgatggctcttacctctaaccttcacacatactttcggcttatgaatgaacgtgcaaggaggcacctttcacttgtgctaaataatgatgaatatcaaatgaagtttctagt

SEQ ID NO: 14979 - DNA, 285 bp, Glycine max
  unsure at all n locations
tgcttttgattgactataccaagctctangaaccagggacggagaaagatctatatataggcttgctaagggtagagagaggaagactagagaattggatcaagtaaagtgtgttaaggatgaagaaagcaaagtcttagtgcatgaaaaagatatcaaggaaaggtggaaggcgtatttccaccaacttattaatgatggatatggatatgactctagcagtctagacacaagagaagaggaccganactataagtactatcgtcggattcagaaacaggaagt

SEQ ID NO: 14980 - DNA, 302 bp, Glycine max
  unsure at all n locations
ntacagcagatnttagtaatgacccactaacctagaattaatataacttaatgccattaacctagggaattaaaacaaactaaatggctgagtgtaactgaaattgttggcaaccaaaagtcacccccaacagccaacaagtcagccaccatttggtctcccaaaaggctgatgcctatgttgccaattgngcccttattacaacttgaactaaagcccttntagttgattaacccanaacatanttttggtcagccaactttacaaggattgtgccattatntagacaaactaaacactct

SEQ ID NO: 14981 - DNA, 419 bp, Glycine max
  unsure at all n locations
ttgcttcttatgtgtgacataaaatagtcacgataagatttgattggttggcaatacacatttaattatattatttgtatttctctcattatttcacttctcatatatgatccacacaaacatataataaagatctaagacaagcttgaaagatgatctgttttaagaaatctggaaggtgattattaagaaggaaaaatattttattcagattaattttattgtcactgagaaagaaaaaagggttatgtgtgtaaaaagtcctacacgattaagatatcattattataatcataagtgagggtggtaagttttaaaaaataattatnttatgatgaattanatgatgatctatcattgacagagaacgtaaatttattttacacatatgtatgaacatcaaactcatanattacata

SEQ ID NO: 14982 - DNA, 291 bp, Glycine max
  unsure at all n locations
acttctattggcatgactttngcagtttgaatatgatttataatcgggtaatgcatacctaattccctatttgaacttgtcagcccagccttctcagtcaaatcttcttgttatccaccactcttctccaattcgggcttccattctgaattcacccccctcttttacttcactaaatgtaaattcagtgctttatttcacacacatagcacaataattcaattaaataatagagcagcatacatactttaattcaaacatgacataacattacatgcagacatataattt

SEQ ID NO: 14983 - DNA, 135 bp, Glycine max
  unsure at all n locations
tttcngttttcttcgcgagcttctccgacagcccttggacccatttgctntcgaggtaggtggccttcttcttagctntggttatgttatgcactacattacggtaggttagtgtaacgttaagttagtggaacc

SEQ ID NO: 14984 - DNA, 328 bp, Glycine max
  unsure at all n locations
ctcaagcctgcattctatgcccagaaagtactcaagagtgctattttgcttaatataanaggnancatncaacttgttcacgatgaggttaatagcagtgttggaggaacccgtgatgattatatcatctacataaatgagattaagcaggcagcaaccatgttttgtgaatacgagaagagagggatcacacttggattgttgaaaaccaaaggagatgagagtatttgtcaaactctcataccaagcccttggggcttgttgtaaaccatatattgccttgtgaagtttgcatacaagagtggattcacccttgattaaagccttg

SEQ ID NO: 14985 - DNA, 359 bp, Glycine max
  unsure at all n locations
ttaagtcacctgcngctgcaacttgcctttatgattacagttgataaaatgacatatcctcaacctgaacacaacagctctcacttcagacctgccattatgctcacagataataagcataaaaccacaattcatacttcagtattacagtaagcctatatttaatcagagatcaataacatctgaaaggccttatatctaaaacgcatctcatgtggtttatggggaggtaccaatgatttggtaaataatttaagtgatgcagtatgttgatgtatatttaaacaagtactacaactagataaattactaatctgaacaaatggaattactaatcactactggatttacatgatcac

SEQ ID NO: 14986 - DNA, 394 bp, Glycine max
  unsure at all n locations
ataaaatattggtgtggcttatctttatattaatctcaaccaacacattgtgattgtggtgggaagaaaagaataatttaaagggagggtagcagcatggtaaggggaggagggcaataacgtaatttgagtggttgtgaaaattacttgacaggcaatctttgtctcatatgcaatagagttacacccaaggcagcacacaacacagccattcccaaagagaaacaaacacagttgcattgttgcaattgcaactaaaatccgcgcctgngatcgcaccttcatttcaaaacctgctccatttttttctttctttctttcgcttccgtagctctatctctaagcgtgcacgcgcgcgtctagtgcaattattagttagtttgattggaatggt

SEQ ID NO: 14987 - DNA, 342 bp, Glycine max
  unsure at all n locations
ccttgaatcttcttcatcaatgatgttctttgcttcttgaagatcaatgacaacagaatggagaaggaggaanggtgattgaagacgtcacttcaaagagaatatgagtcaagaagaaactcaccacaataggaagtcatggataagagctngaaggtangagaagatgagtgaagggagagggaaagaagagcacganatttatgcctcanatgaggtctaaactttgaagtataattctcaaatgatcaaagttgaaaaaaatgcacacacaagacctctatttatagcctaagtgttacacaaaattagaggaaaaattgaatttctattcaaatttca

SEQ ID NO: 14988 - DNA, 351 bp, Glycine max
  unsure at all n locations
atggtggtgagacaagcattanatttgggttctttggaccaatctctgttttttgaatttatcttanaaaatacccatttgtttttaatgaaattggtctggaataaaacagataaaattttaaacaaattctatgttggatcccttgagagatgaggtcaaattagttcctatgtgtgacatgcaaggcgacttcactgttgtgcaaatagagtctagtagtgtgtagctttccttgattttgagtctctatggtggtcaaattgaaatggtgtttacaatttattaaactagagagaaatttttttaagcatgtaaattagaaaaattatagaggttaccttcaaattt

SEQ ID NO: 14989 - DNA, 347 bp, Glycine max
  unsure at all n locations
catcttggtggtgaagctcctacttccatggcttattccctagtggatggcacctcttctcacctcttctcctttgtctttcgctgcatctccatggtggaaaatcaccattaaaggacctcattgaagctcaaagatccagccctcatagatgccccacaagcaagcttccatcaagtggtaatcagagcacaagagcttcaagtaggtgctccttanacctccattaattgttttgctntaccttctcttccattgttgnttcttcattnttttctccatgtatctcctcacatgtatngcgctaaatagttgtaacatgattctttaaattttccactgattaa

SEQ ID NO: 14990 - DNA, 271 bp, Glycine max
  unsure at all n locations
atttcttcttctactgagacagngtgttatatgaatctgaatatnagannnaaaagttattatggaattgttaatgctcgtgattttgacttataagtactgcatatatgtgtttatgttattataaaatggttgatattgaagttcaaactcaatcacaagtgatacaagctgatagtgagggtgatgctgatcctacttattcaccttcatatttaagtggggatgacgatatatacttggatgatgagactatagcatcgtttatgtc

SEQ ID NO: 14991 - DNA, 214 bp, Glycine max
gcatgttctcatgcactctgtcaagataacattagcccacatccgaaagataaaataaaagaaacattaatctccgatattgatcgaaaacatgctggttgacgtcggccaggaaagatgaccgatcgaggtctataaatataacgatcaccgtatgacgccaatccaacatttcctaattgacatcatccaaatattatccaatgattggata

SEQ ID NO: 14992 - DNA, 356 bp, Glycine max
  unsure at all n locations
cctcgaataaacatcgaaactcttagactttcatatggccataactntncacacggatgtctgattcgggcgcataatatgtcgagaggctcgaaattgaacaatggaagctcttgagaaattccaatagtcataagttttcacacggatgtccgaatcaggcttataatatatcgatacgagcgaaaataaacatcgaaaactctcgagatatcatatggccataacttttcacaccgatgtccgattcgggcgcataatatgtcgagaggctcataattgaacaacagaagctcttgagaaattcaaatggtcataaactttcacacgggtgttagattaatgcgcatcacata

SEQ ID NO: 14993 - DNA, 426 bp, Glycine max
  unsure at all n locations
tgctttcttattatnctctacccttctgcctcgtgtaagggttaatagaaggcactattggaaatcagataaaaattactattccctgataagtaatccaagccaaacatataagacttgttctgttacaagataaacctcttgccattatacttctcacccttttcttgcaccctaattaacaagcccctcatgtaaatggtgcagaaatctctcttctaaacgaagtatngctttgaacctcacatgtaagaaaagggggaaattccactttaatttactacccncaagttccaaagccatctccatttaaacgttctcttttctatnggttgtgtagaggaaagactgtngatgaacaatatatacattanaattgctataaggagaaactaagtatgcttaatattgcatgtcaaacaacac

SEQ ID NO: 14994 - DNA, 224 bp, Glycine max
ccttcatagccacaccaccaacatctatgctagtgttattgagaatatagaagtaggatagctgtggattagaaagcattctggtgtaagtgatgggattagcgttcttgacaactgaagactcattacccataactaatgacccagaagaaccagcttctgttgttggtaagcagtatgagaaaactcctccaaatgtggcattagtttgagataccaatgag

SEQ ID NO: 14995 - DNA, 445 bp, Glycine max
  unsure at all n locations
agctgttgnctttatatgtcgagtgtctcgatatatgacgagacttaatcagacatccgagtaaaaagctatggtcgtttgaatgtgcaacgaccatcaacattcaatttcgagcctctcgatatattacgcgactcaatcagacatcagagtaaaaagttattgtcgcttgaatgtgcaacgaccatcaacattcaatttcgagcgtgtcgatatattacgcgactcaatcagacatcagagtaaaaagttattgtccgnttgaatntgcaacgaccatcaacattcaatttcgagcgtctcgatatatttcgcgactcaatcagacatccgagttaaaaggtattgtcgtttgaatntgctcagagctttagcattcaagtttcagtgcctcgatatattacgggactcaatcagacatcagagtaaaatggtatcggcgttc

SEQ ID NO: 14996 - DNA, 213 bp, Glycine max
ttcttcgcgcgagctcacgcgaagttgtatttctgccgacgccggcattttgtctgccaggataacattagcccacctcggcaaaaaaaaaacatgattcaccggtattgacagaaagaaatgctgggcttagtcggccacgaaagatgaccgaccgaggtctaaaaaataagcgtgaccggattacgccgatcgaaccgctcctaatagata

SEQ ID NO: 14997 - DNA, 381 bp, Glycine max
  unsure at all n locations
agctttttatgtgatataggtgcagccatctccctaagagtcctctcacgaagtggaggttgagccatgttctcagtataaaaattagtagtggatgctcanaatcagaatatttagaatcaccctcaacagaatgctcagaatgctcaaaatgcacagaatgaccaggatgcacactatgcctaactaatctatgaaaggttctatctatttcangatcaaagggttgtaaatcacttggattgaccctagttatgcactatatgcagcaaataatgtgtttctcaacaagcacctaacaaggngtaaaactacagctatactcaaatgatatcaaaataagctgaaattntgtgaggaacacccttaaatcatgaaaag

SEQ ID NO: 14998 - DNA, 362 bp, Glycine max
  unsure at all n locations
tgtaactcttggcaatttgtttaaaactagtcacttataaagtatgacttttgaaataatcttcagaanaaagtcacttgaagaattatgactcttggaaatgtatttttcgaaatcagtcactggtaatcgattaccattaaggtgtagccgattacacatcaacagatgtgactcttcattntgaattntgaaaatcttaacgttctaaaatactggtaattgattacatgattatggtaattgattacaactttgtaaatcagtttgaaaaacaatgctggctactggtaatcgattactaccttctgtaaaaagattttgtgaaaacttcatgtgctactcaatgttttgaaaaactt

SEQ ID NO: 14999 - DNA, 438 bp, Glycine max
  unsure at all n locations
agcttattgtatcaaaattgcctcaatcatttccaaatatgcatgtgaattangacgcatcaacaagaatcaagccaaggctattgtgcaagccaatcaatgggcaaaacacaccanatgattatgatgatggatggctcanattctcacanaggtaaaatcatcactttcaaattgagctntcaaaactatcatgacatgtagagaagaatcaaggatttcaagtcacaaaatgtcaagaacttttattttcaaaacaattacccatttcttgaacatatcctataattcanagaanaacatgcaaagtcgtacgtgcacacaaaattgacccaaaatattaaactaaaaatccgacgaaactaataacattaacaaattaacacaactaacaaatcaacaaactagcaaaccaaagacactcccccccccccccat

SEQ ID NO: 15000 - DNA, 378 bp, Glycine max
tatttgaatcactaagtaaaatttatgatatccctgttaagtttatttgtgtaattcatacctaattattatccaatttagggcccattggcagctggttgttatgtgtcctacaagcaatgttgtcgtctggttttgttcattgtttaagaagcttgattttcgtatcaaagctgcaataaacaagttaagttttatattataagacatttaattcatttttaagttggatacataaatagtttttccctcatttacacgtccatatctttctatgcaatgcattcaagacattaaagactacttctgacggtaacattgatcaagctacacctcagtggattgagtaaaggtagtcatataattaatggtatttct

SEQ ID NO: 15001 - DNA, 381 bp, Glycine max
agcttttcgtctcggatttttccgactatgctcttgtgtggtggaacaagctacaaaaggagagagcaagaaatgaagagccaatggttgatacatggacggagatgaaaaagatcatgaggaagcggtatgttccggctagttactcaagggacttgaaattcaagctccaaaaactaacccaaggcaacaagggggttgaggagtatttcaaggaaatggatgtgctcatgattcaagcaaatattgaagaagatgaggaggtaactatggctcgatttcttaatggtttgactaatgatatccgtgatattgttgagctgcaggagtttgttgaaatggatgatttgcttcacaaagcaatccaagtggagcaacaat

SEQ ID NO: 15002 - DNA, 338 bp, Glycine max
  unsure at all n locations
tgaaattgaacaacggaagctctcgagaaaatcgagttgtcttttatattttcacacagatgtccgattcggggaaataatatatcgagacgcacgatattgaacaacggaagctctcgagaaaattgaatggtcataacatttcactcggatgttcgatccggggacataatttatcgagacgctcgaaattgaacaaccgaagctctcgacaaattagaatggtcgtaacttttcacgcgaatgttcgattcggggacataactcatctagacgctcgaaattgaacaacggaagctctcgagaaattcgaatggtcataagttntcacacggatg

SEQ ID NO: 15003 - DNA, 262 bp, Glycine max
  unsure at all n locations
ttgcttgatcttactagnnnntntctcaaccttatcgtctctaagctagcaacaagtatttttctcaactttatcttcaccagagctagcaacaattcatccccatagaggttttacgataaanacagagtgtctctcanatatagagatggatatacagatataagctcactatagagttacaagatgaaaatccaacaaaatcacaaaggaatctctacatttcttctttcttttcatttttccttagccttctattctg

SEQ ID NO: 15004 - DNA, 276 bp, Glycine max
  unsure at all n locations
aactcaagcttgcaattaaaggttgtaaagaaccaaaaggtgtaatattctcttccataatcagcaatgtcaatgatgtgctcattttgcattccatacaaaggatcgggaacggctntgttcttcaccaaggtcgctagaacactgttaagtgattgcgcggaatgaagtcaataaattaaagaggatgtaaaatactaaaattgtgaaatggaaaatgagattgtgattacgttccatgaacgagagcttgcatccatggtgaaaaggggcgtg

SEQ ID NO: 15005 - DNA, 387 bp, Glycine max
  unsure at all n locations
agcttcttgttatattatgtggcagaatcggacttctgtttgaaaagttatgaccatttgaatttctcgagagctntggttgttcaatttcgagtgtctcgatatattatgcacctgaatcggacttccgtgtgacaagttatgaccatttgaatttcacgagagcattcgttgttcaatttcgagcatctcgatatattatgcgcctgaatcggacttccgtgtgacaagttatgaccatttgagtttctcaagtgcttccgttgttcaatttcaagcttctcgatatattatgcgcctgaatcggacttccgtgtgacaagttatgaccatttgaatttctcgacagcatacgttgttcaatttcgagcgtctcgatatattatg

SEQ ID NO: 15006 - DNA, 258 bp, Glycine max
tctcgatatattatgcgcctgaatcagacttccgttacaaatgttatgaccatatgaatttctcgagagccttcgttgttcaattacgagcgtcttgatatagtatgcgccttaatcggacttccgtgtgataagttatgaccatttgaatttgtcgagagcttccgattttcaatttatagcttctcgatatattatgaacctgaatcggactttcgtgtgacaagttatgacctattggatacctacatagcattc

SEQ ID NO: 15007 - DNA, 132 bp, Glycine max
gctcaccgtgtcttaacagtagtgcaccatacgcttgtgaccatcaatatgttaaacccactatacattgttcgcagatgactactcatggaggtgattgccaacactgacctgtggatactcggatccttc

SEQ ID NO: 15008 - DNA, 686 bp, Glycine max
  unsure at all n locations
cgcctcccgctnacncnnatcntcacattcntaaantntanacatgctatacggataccaactggantatgtntantananaanannnnnnnagcgaggantatttgaaagcactgcgaacacgcgacactanannanactcatactnncatcacgtcggtcaatgctggacatttgttgacagtgactacacttggcaatctagactctcacaacacatcaatatctactgactccatgagttggtctacncagatatatgttgatcacagcacgcgagaatctaacacactatcctctgacaaacacactttgataatcatcaatttttctgtacgatatgccacacggaatgttgacaattagaactctctgacaacgtccgtataatcagcctcacaacttggtgactgtcaccagtagcccaacagacctgatgaagtccatgatctcctctgcccaccgatgtaacctctccacacgaaatctaatcacaagcaatgcacagcgcgtatactactagatcttccaacactctctgctatggcacatgcgatgtaatcgagccgccagtccaactggtgcatcaacggacactcgtccgcgacccgcanttaccatgttgctgtcggacacttatgatgtgcatagcatccacatgcacatatctcactacgagcgcaccg

SEQ ID NO: 15009 - DNA, 531 bp, Glycine max
  unsure at all n locations
agttaaatgaaccttagtacctcgaacaacaaactcagcatcatcngccgtaattgcctaatccgtatctactacaacctacattagngagtttctacttcattcggctcgggcgtcaagacaantcattcacattactgtcaacacggtgcaacggactctaaacttgtacacaggtctggctatctcggcacatatgcgccataaataatgccaacccagcgtcttgatcattgacaccttatgcatgtacttaattcgtctgataacatgctacatctggaatcaacaacaatagtacttttttagtataagttctccatatctctgacaatttagcgtggctgtcttccactccatgatgcctatacgacgcgctgccgttaactctaactcgtttagctcacactaatcactcaccatgacgcctgctcacacatgaagtaaacttgcacatactcttatgcctcataattttgatattcctagctgttcagacaacgtcgatcgaatcatctttcgctactctct

SEQ ID NO: 15010 - DNA, 347 bp, Glycine max
  unsure at all n locations
tcaagccctaaggcagagctnganagagttcgggtagtcgaagataagttcaagtccatagccatcaaagtctgataagagtatgatgaactaagggacgtctatatggccacagctgaagctttggaacgagaaacaagatggcccgaaaggatgaacactaccanagcaaagttttgaggggctctatatggcatcaatagtgagctcaagctccgaataggtgataggaatcatcacgggtcataggcatgatcttgaatgacgagctaaaggtttgccttacgtcgaacagaaatttggcccaacatgttagcgagactgaagggaatatgtgggccatcatc

SEQ ID NO: 15011 - DNA, 614 bp, Glycine max
  unsure at all n locations
acactgacgccacacntcacactactgtatatagttctatctctgtcanggcgatcgcgataaaaaacaaaaanagagatggatttgatccctggaactgcgaacatcgaaactccgcactactgatcatatcgcaaagatgggttgataaaaactacatatttatgcgactcattactgagaaangaaacatcgcacatactatgacctgacgacatgagcaccgaactaagcggtaacttgatggagtacggaatagaagctcgaaggacgctactcttgctcctctatatatctatgccaaacaagatcagaacgacctatgctatcagtaacggcatggaactatacaagacacatgaggttaaacacaccaaaccgaacttgctagttttcatgacaatcgacggtctctttagagaatcatctaccaatgagcgccatcacgtggaagaatcggagacactacacatacacgaagataaactaagacataacaattgataagaacagacgttgaacatcagacgagatgaatgttgctacgatactgtggaatcatctcagtgagcatcaatacgatacacaaccagacgtgagaggcgcgaaaggcn

SEQ ID NO: 15012 - DNA, 438 bp, Glycine max
  unsure at all n locations
tctttgggactatgaacaggcaactaactcctctatcanaatcatgctatgtgctcgcgactggtccctttcttcccttcgcaacttgagttcactattgctaccccatagagctccgcgaaatttgttccggccatactcttacttgcgagccctcttggtctctcgatcaagggctcttgcggtaattgcattctcttcccgtgacccggcacactccttccgaacgtgtgtagcagccaacttgaacttctgcttggcgagtattgcctttcctaactcgcttttgagagcttggacttactcgtcctcttccggtgcttcataattcccttcgctgacgactattaacttggcgagccaatctaaacctcgtatgcgaactttcagccattcgtggtacccaccaatgatgccattacgaatgcctctaagctc

SEQ ID NO: 15013 - DNA, 396 bp, Glycine max
  unsure at all n locations
tatgataggatgagatagaattntatttctaatgttcttcattaagtgttccttcctcaacagctaatttcaatcattatgcatngtattaattcagtccaatctaatctattgtggaatggtcatagggttgcccctttcttacctcaatgtggcttgagacaaggagatcccatgtctccgtatattgttgcgacgtgtatggataagtcatctcatctaatcctttaagctcttcatgcaggtcaatggaagcctatgagagctggtcgaaatggaccattcatctcacacttaatgtttgtggatgatcctttactctctggaaaagcatcaataagtcaaattaaatgtattcaacatggcttgacgactctctgtgatatgtcatgacaa

SEQ ID NO: 15014 - DNA, 423 bp, Glycine max
  unsure at all n locations
tattaaattaagtntattntaatttattataataaatgttatgatcaaatttatgatataagttctaataagatatgataacttattaaataagcaattgattagttaatctaacaacatctatgtattctcatgaattattatctatctaaaaacattntatttattattcaaaacattactttcacaaaaatcaatgtttgaacagaagtttataaacacagaanattataaattaaattgaaatgcattgaaaatataatgattttttataccattatttaatcatgtatatgataaatttgtttatttttataataaatattttaagtcatttataagatgaattttatttgattcatatagcgtanaaattaaattntcattanatatttaaaaactcacttcttaatagatatctag

SEQ ID NO: 15015 - DNA, 387 bp, Glycine max
  unsure at all n locations
gaatgaaagaagcggttgattctcgcaaaaagaatttttcaaggacgagaaatagttgaaggactttttcagttgacgggttaagtcaaatgactcctatacttgataacttacttctctctaaaattntccggaatgataaaatgaggtcacatgaacgtctatatttttacttgaaaacacagtcaatcaaatggctttttctttttctttttgaactgtcttgctttactcgtcgttntacggcaccctcaccaaatgtgtagcacgagtaatctctaattgaacggtcttggaagtcaacactcangagcgcatgttgcttgagcanacagagcaatggctngcactcacattcngatggaagttgaataagcaatgatgtgt

SEQ ID NO: 15016 - DNA, 261 bp, Glycine max
gtgatcaccttggcaatctgatgctcacaatcatccatatctatcactccatcaagtggtctacccagatattagccgatcacatcatgggagaatatatcacacttgcctctgacaagacactctcgatcatcatcactctttctgtctgatatgtcagagggaatgctgacaatgaataccctgactaggccttcgtaacagtcttccagcttggtgactgtcttcagtagaccagcagacttgttgatgtccatgatc

SEQ ID NO: 15017 - DNA, 509 bp, Glycine max
  unsure at all n locations
cgacactatagatactaagctgtctgtttatactcactctctcgttattgtgattggagttatatataagataaaatgtcaccaaatataatgagaaatctgtcttanataataaagattgaaaagaagctntggtcttgcttttccttttattcttctttcattntgaccacttgttctgtctatgtcaaatngtctaatgtaacaggctttctgttgggctggttgcacttctccaaggtgttgatgcaaatgatcactgttcctggtgccattatctgtcttgtgttccaacttcaaaatggagctgccatacagaggcagcatattgtcaggtaagcaattttttacctgaaagcctcttcatatgaataatattatcagatcctctgaattacttatgttcaccgacatnttatgaatgggtatctttaaccccttttcatgcaattgttatattgaatcattatatctctaaacaaattggtgatctctaaaagtataatcat

SEQ ID NO: 15018 - DNA, 390 bp, Glycine max
  unsure at all n locations
tgctcatgcatacgcatacacatgcatatttgttatcttgtgacaggggcaggattgttttatgcaatagtcaaacaccgagccaaatccaaaggcagagacgaatcgatgtaagcagtaacgcggccatgatttgctgcgcaatgtcatttcctgctttcaagtacttatggatgggcacaagtagaggttaggcccatgatcaacagatcatcgtcccatgtccagcttcagacaagcgagaagcgctactgggaggcagcctagtatcctttaaattcctagatattattgcttgtgtgtctntaaggggatggtcggatgccttgtttaccctangggcttcgagttagcgaacgccgacccatagagagcgcgtacctttgtttt

SEQ ID NO: 15019 - DNA, 417 bp, Glycine max
  unsure at all n locations
tagtagagtaccgataatgtgtctaccatcacgattatcgtctccctttntgcacatgttatgtagttgcatcctatccggaactatatcagaatagtactgatactgcctaacgaaggcaaccattaggtccttccaagtatggactcgggaaggttccaagttagtgtaccaggtaacagctaccccagtaagactttcttggaagatatgtattagcagttcctcatctttgcatatgcccttatcttccgacaatacatctttggatggttcttggggcaagtagtccccttgtacttgtcaaagtccagcaccatgaacttgggaggggtgatgatattgggtactaagaacaactcttctaggttagcaaaggcataatctatacctncttcaatggccctgagcctttcc

SEQ ID NO: 15020 - DNA, 423 bp, Glycine max
  unsure at all n locations
ttctctacaattgcatcacctctcaattatctagtgaagaagaatgtggcatttaactggggtgaaaaacaagagcaagcctttgctttgcttaaagaagagcttactaaggcacctgttctagctcttcctaacttttctaaaacttttgagctaaaatgtgatgcctctggagtgggagttggagctgttttgttgcaaggtgggcaccctattgcttattttagtgaanaacttcatggtgcgacccttaactaccccacctatgataaagagctttatgccttaataagagcactccgaacttgggaacattaccttgtttccaaggaatttgtcattcatagtgatcaacaatcacttaagttcattagagggcaaagcatgttanacaaaaggcatgcaaaatgggtagagtaccta

SEQ ID NO: 15021 - DNA, 332 bp, Glycine max
  unsure at all n locations
tttgagagggggtgggctactgcacaaaaaagacaatggatatttcaggaatggggaaaagggtctcgggagttttagctgangcgggagagtctgtattattatattattatttctttctctttcctttntatttaaacggtgcatttcattcgtcccacttgataaacattcgtcctcgaattatgatctatgactaaccttgagttcaaacaagtgaggatacttctcacgcataatgatttctggttcccaagtcatctcctctcctgctggccctcttctagccactttcactgatacaacatccttagaacgtatacgttcacacg

SEQ ID NO: 15022 - DNA, 439 bp, Glycine max
  unsure at all n locations
tcaacgggatcgacagacccttggcatcactctatcaggatattatcacttggtcacataccaaagtgtgacaattcattgccatccttcaatggggcgcacaattgatcccatagccttacgttttcttgctgtgcagaaagagacagtcaatctatgttntccacaaatggaaaaaaaagaagcatagaaaatcagatcataatcaatatcgcaaaaatatggatagaatgtcatgagcattacacaattttcatgattcanaaccttctgcattactagcatttcaagatgaaggttgcatgcatctgcatcccanatcatgttcatattaggctataagtgcatagatntctctttacataccactntcccaaatctaatctttcatgtttaggatgagaggcccttntatagagtcaacctcttgctntctcat

SEQ ID NO: 15023 - DNA, 459 bp, Glycine max
  unsure at all n locations
cgccacccagctcgcccaggcgagctcagctcgctcaggcgagcanggttgcttcctccagaagcaacagccttttggaggaatcttctggaaggcccaagtgggcctggttgctatttgcacccccattnttactaagtacaccccctgcctttntttggtgattcttttttcgtaaagttacggaaacttacaaatttcgtaacgatacttgttttctttccgtaatgttacggaaccttgtggattacataatcattccctttntgacttacgaaatgttacggaacctcactaattgtgcaacgatgcttccatttgatttccggtgtgtcacggaaccttacagatngtgcatcaatattttcttttgctttccagcatgtcccggaattcacaaattgcctaatgatgggtgccangcacctcacaaggaccaaacaaaagttgcatgtcatc

SEQ ID NO: 15024 - DNA, 460 bp, Glycine max
  unsure at all n locations
ggtcactcatcactgcattgatctctctntctctctctggttntggtctgtaaggtgagcttctatagaccccacagtgttaactgcagttaagcgtgtgtagtcatttgctacaacttcgtactattcagacagacgtatcatcttccttcttaattactacatcaacaatacaagtgcaaactcggtttctgatggaattttttcacaaacggaaaagttacttttacatgcattntaactgaaatgagacaaagtgttcagtagacgttgtcacgttgataagaacgaaagtatacagagagagaaggaaaatattaaacaaaaaaaataaagggcaggtcatatgtaatttttnttaacatatttactanaggtgaaaggtagtactctaattaaccagtcattntaattttcaccacttttcgcatatattattatggtgggctatgccgacctg

SEQ ID NO: 15025 - DNA, 362 bp, Glycine max
  unsure at all n locations
cgaggcaatgagactacatangcacatgacacgttcacattcgaggatccttgccggaaggcacaacgtgtttgtttgtcaactacacttggggcactccaaaacaaataaatgaccttttgtttgatgatacattacatcctcgtagatgttccacaaatattttgagaaggggaatgtacatgtaactaaaccctagagtccaatcaccaaccgacattagtaattggatgtgcatgtatccacgtaccatacggcgaatactagataatctcatcaatgtgattacttgattgcttcagaggagaatcacgcatctatctcctaatgatatatcattgcgtacgttgtaaacatgcacg

SEQ ID NO: 15026 - DNA, 462 bp, Glycine max
  unsure at all n locations
tcaaagttggccaatagtacctgactcttagaactcttatggccattggtctctccctagaatgcataccacanacaccttcatgtagttctcgaagaacatagtaagcctggtcttggtcaagacattntgagtagaggtgaggagaaacctctcctatatagtttgtcagtcactaaggtataccagacatcttgcattcttagttgtctggcttttcccttgtctattgtgagtgtctcatgttttaagtactcgactatctcttttttccatctcgaagggccttcctccacctgtaagcattcttttcccgagatgttgggttcgggaaccaaatggagtgtgaatgttnttagttaccaaggtttaggtcaagttgcaagttaagccaactcgtcggctttgtcattaacttcttagcttatatgaatcacctaaacttcctcanactcttccttg

SEQ ID NO: 15027 - DNA, 321 bp, Glycine max
  unsure at all n locations
acactatcaaactaagctanagacctatattaactttatatgtacaatatattaaacagtttcaataatttagaaccggccttcttattcaacctattgtataggattatagagatacaaaccaagtttctttctttctatattgctacgtgctccatacaatatataattaaactgtcatataattaccaataaaattgtcatataattaaaagtcattggaaattatgaaaattacgttaacaattagatttaaagtattatcctatttggtaaaatctttatacttacatatatcaaaatcaaatcaaataattatgg

SEQ ID NO: 15028 - DNA, 485 bp, Glycine max
  unsure at all n locations
gagatccatagatctaatccaaggtagatgtttcataaatgggatntcgttgcttgtgttgtttgattccagtgccacctattcctttatatcctgtttgtaagtagaaaaacttaagctnttctgtgtcttctttaaataaagatctagtggtggagacccctactagtggttntgtgttaacttcttatgtgtgtttgaattgtcctgtggagatttctagtagaacattcttgattgatttgatttgtttgcctttgagccagattgatgttattcttggtatggaactggtatcttccaaccatgtcttgttaaactgttttgataaaagtgtggtgtttgatgattctgtagtgagtaaagatatgatgtttatctctgccaacaaagttatgacatctntaaaggaagatgctcaagtgtacatgattctgtctaacctggatatagagaacaaggtttctatgtgtgaacttcctatt

SEQ ID NO: 15029 - DNA, 431 bp, Glycine max
  unsure at all n locations
ttgctgcatggaagggaaaaggtctgtatggtggtcagcagaggagcacaaaccacaaacccttgcaacaggtacagatttctgattcaaggccagctgggttaccaagttaaccaatgcatccagttttccttcaagcttcttaatttcagatgatgcagatgggtttgtagctacctcatgcactcctctaatgactatggcatcatttctggtgctaaactgttgggagttggaagccatcttctcaattaaatttctggcttcagcaggagtcatgtctccaagggctccaccactggtagcatctatcatacttctcttcatattactgagtncttcataanaatattggagaagaagctgttctgaaatctgatggtggtggcaactggcacatagtttattaaatctctcctagtactcataca

SEQ ID NO: 15030 - DNA, 309 bp, Glycine max
cactatcatactcagcttcggctattcaattgctccagattgctgcatagaagggaaatggtttgtatggtggtcaccagaggagcatataccacagagtcttgcgacaggtacaaatttttgattcatggctagttaggataccaggttaaccaaggcgtctagtttaacttcaagcttcttagtttcagatgatgcagatgaatttgtggctacctcattcacttctctaatgactatagcctcatttatggcgctaaactggtgggagtcggaagccatcctctcaattaaatttctggcttcagc

SEQ ID NO: 15031 - DNA, 436 bp, Glycine max
  unsure at all n locations
tccagtaaggatattgtaagaattgcagctgatgtagctgttgngatcaagtntaagaatgatcacggtgttgcatacagagatcttaatacgcagaggattctgttggataagcatgggaatgcttgcttgggtgatatgggcattgtcactgcctgcaagaatgtcggagaggcaatggattatgaaactgatggttatcgatggctagcaccagaggttngcccctaatcacactctnttcaagttagcaaagcaattgctgaaattatgaagaaaacaaatgtatcaggccactangctgcatagtcttgtttaattctgtattgcatctcgcataaatattccctatatttctccntgagtttctttcaatagaagaatanaattaaagacctaaattctttaagacctagactctgcaatctgcatcaca

SEQ ID NO: 15032 - DNA, 495 bp, Glycine max
  unsure at all n locations
nntgctgagaaaatggctcttttaatatttccacagaagataaatcagttaccctgtcgcctacaaaaaaagtatgtatagttgcaatataaatgaagcatctatcctacaaggacactatttcaaacatatcgtaaaaattaacagtaatgaaaaagacagattcattgctagacaaatgttagcctaacatcaagcaaaatggaagcacataatagccagaatacctagtaacagaagtggcatgattaatagaacatcaagcaatgtcaaaatacctatcatgcattgtgaagtaaacagttcagcagcctgagcaagatatttatcacacagagagtcatcacttgaatttccttcagcctccactaactcatgcctctcagaacgatcaccactcagaagaatatgactagccttggaaggtgaacacatatattagaaaaggatacagaatanaaatcaagatagtgacagtgacagcccttctaacct

SEQ ID NO: 15033 - DNA, 491 bp, Glycine max
  unsure at all n locations
ntntctcaggtttctctgcaaaggtttccaagcgttaaagtataggaatatagattggagccacaattctactgtctccgtgcgagatacatttctttatgaatacattatttctaagatcccaacagtgagaatgtgcaaaaatgacttccaaaggtggtgcccaaatttcaggataatccaacggttaacgagtctacgatcgtaatgttactaagacaagtttgggtatatgcggaatagagagaggttttgggagaagaagaagacagaatgaacttgggaggagcaaaaagcatagagacgtatcctangatgtaaactgacctagtatgtctctatttatagctacgggactcttaagctattatttattntattatttctctaaaaaaataattctattctactttttcatcagataaataacanattagaacatccatttatgtctacaacatcatgttactctatttattttctaatactat

SEQ ID NO: 15034 - DNA, 387 bp, Glycine max
  unsure at all n locations
gacactatgaatactaagcttgttatgatttaaggtgggatcaacaacaaattggctcagatgttgctcaacatatgtgtcgcaatctacccttcggcgggagggcgacgcgtgactcgcgggatgcgtgttccacgaaaggaatacgcgcggagtcgccaccaacgtttatttgaggaaaacgtcggataaaccggataagacgcgatctacgaacttttaagtgaaaggctctggagttgtatttacgcgcggggaaggtattagcaccccacacatccgtcacaagggacggcaacctttaatcgaatgtgcaaacttgacttttgattttacgttcccttttatgtccttatatcctttatacccttnttatattntattctc

SEQ ID NO: 15035 - DNA, 178 bp, Glycine max
tgtgctaacactattctgtacttgagaagaatcggaatgatcgatatgtatgaggacttggaattaggataaaatctaagtatctgaatagcatcaccacattaacaaataatataaatgtcatgttatggagagcccgataaaaacaaaacaaattaatgaagcctacactaataaa

SEQ ID NO: 15036 - DNA, 370 bp, Glycine max
tcacgatcgtcacgtgttgattcaactattgttattcgtggatatacgagacatcttgccacacaatgtcaggatagccataactcgcctgtgcttcttcttccatgccatatgtagcacagatgttgatcctgtcaagtttgatgaacttgaaaatgacgccgtaattatactgagccagttggagatgtattttccccctgctttctttcacatcatgattcacttgattgagcatctggtcagagatatcaaatgttgcggtcctgcttattagcggaggacgtacctggttgaacaatacatgaagatcttagagggtatacaataatctatatctccagaagcatctattgtgagaggacattac

SEQ ID NO: 15037 - DNA, 481 bp, Glycine max
  unsure at all n locations
tatggacgtgtatcttagcaacccttgacttgtagtcaaatggtatctaataaccacatcctaatatgttgggtttgtttgagttttattcctcggtgtatgtttctatgcaatgcttctaatgtgatgtctcgtatcacatgtaatatttcacattntctagaattgaactccactccttcaacaaaatcactcatttccccatcgtaatggataatagcctgaaaggcttgcttttgagtaaacattattttgggaatggactaatgacaaaattgagattgtactttggtgatatttgtgaatacactagtagacattataanatagatatagttgaatagcagtattatataccaatcaattatgaaacaactgtggacagtgtgaaattcacataatactgcctcangctctacatcatgtttgcactgatcaatccantgactcattggattcctaccttattttcacctctatg

SEQ ID NO: 15038 - DNA, 421 bp, Glycine max
  unsure at all n locations
aaaacttgtgctattcattcttttcatctcttctcccttttccanaaagaattcgccaaggactaactgcctgaattctttttgtgtctctcttctcccttttccaaaagaacaaaggactaaccgcctgaattcttttgtgtctcccttctcccttgtcaaagaattcaaaatgacacagtatgagaattcttttgattcttccctttccctaatacaaaagtgttcaaaggactaaccgcctgagacttcttttgtacccctattcacaaagtatcaaaggtttaaccgcctgagatctttgtcttaacacattggagggtacatcctttgtggtacaagtagagggtacatctacttgngtttgactgataacaagagaggttacatctcttgtggatcagttctagtagagggtaca

SEQ ID NO: 15039 - DNA, 576 bp, Glycine max
  unsure at all n locations
ctctttactctctcaactaatcttccgaccctcacttattgcgctgacaactatnnnanaannannaaagagaatattganacttgttcagtcgcatatcaaactcaactgtggcgctcgtacttagggttcgctttgattttcgcgctatttgttgcattctctactagcttacctcttatatgccatttttccggcgtggtcctcgtgctgtgttaaagtgctggtttttgaaaatgtcgtgatgtgtagtcggaaccgagctgtttcatttctactcgaccgacgtatgaagtgttcttcgttaactattagcttttatggaagaagcttttcctgagaaatttgaacatacggaagaagttcttccatatgattcattatgcagaacttcactcccaatgcatactctatccttcggaaatatctaatttattcttcctcctcctcgattcccccaactgtacccgctataatactcctataatgctcactcatcgtttttctacgtctgattatgcccatatcataacttatttcctaatacttctctcgatatctgcgcgcgcgctttct

SEQ ID NO: 15040 - DNA, 459 bp, Glycine max
  unsure at all n locations
tatgcgcatatttccctacgaacgttcacttgcacaagacatcctattatctaagaaaaatgcacccatatacaatcaaggtagcttcattacctagattatttacatgtacttccaaagtgtatttgttatttacatcatacacgccatcttgtcaaaatttacacacatgcatactcaaagcatttcggggtaccaaaaattgcacatgcgctcatcttggtatttctaatatctatacatatacaaacttcatgatgaatcttgactacctacgcaataaggtgctacatttcatgctctgtgttttttttttttttcaagtttttgctacctaaagccatatgcaaattcaagcatatcttcctttgctgactaanattgtattcaaattagaagggatatatttgtttggaatatgtttccttcacataacatgcaacacatctatatatatat

SEQ ID NO: 15041 - DNA, 432 bp, Glycine max
caacgaagacagatgagaatatcagtgaatacttctcttttatctccatattatgcctagacttgttaccctacaattgttctcgaaactaccactaaaactatccgttactttatataattcctctcatgggctatctaacctctattgttttatgacaaattatgagagatcacattttctttgatactaatatgatagcatgtgcatggtcaagaatatcatatacatcgataaaatatatgaaagaaaaataaattgatacgatttaagaacaagtcgcttgcttatgtatcaggtaatttgaaactgacacgcatggaggcaagagataacgatgaaattgttgactagagagtgaagaacatagtaagaatctcaatatctaatgtgtattatacagattcgatgcaagaaatgtgtattgatata

SEQ ID NO: 15042 - DNA, 472 bp, Glycine max
  unsure at all n locations
gctcatcaatntattaggaaggtacacccatcttaattttcattgccttacttcccttttcattntcctaatttgtattaagtgtggttttagtttctttatttttgaactttaataaatatggctcatttgttacttctctttnttacttaaaatctttacaaattagatttgattaaattgtttttctcagaactcattagtcaaaatatcaaaattttcacctaaatataaaaagaaattcaaaattttccttcttcacatcttaatttcacatctcataaaatttatgggaatttttcaacttatttcttacttctatgcttctaaaattatttcatctctagaaaaanaagtacacggaagaccaaatntactaaatntaaaggtanacttagcagaataanatcttntcgttgacataataaccttcctacagtttcagttctggcttctcttttgagtaagtcac

SEQ ID NO: 15043 - DNA, 157 bp, Glycine max
acatatgttgatcatgaatggatcatggccggatagcacccttcaccagcaaacgacattcagatggatgaggaagctcagcaggagccacctcaccaccgaaacccttttgagtctctaatgattaagagaatggatgctatccttcatctccatc

SEQ ID NO: 15044 - DNA, 438 bp, Glycine max
  unsure at all n locations
ntaatgaacttcaactttggcttgagggtatatcctccccaaccactatggtgatatttgctccacttaagagccaccatantttggaatcccttgtcctgcatccaccaatccatgattntgaaaggcttangtccccagtcaatgattntggatctcaaaagaatagggcagtggtctgaanaattcctatccaacacaaactgggtggtatcaggccattgaaccagcccaatttcagataagaaaaacctgtccagcttactcatggcacttccattaggtctgaaccaagtgaacattctgccaatagatctaacctcctctaaggccataagtgaaatccaagagttgaattcagcaatgctagaggagttgaccacattctgagatgaactcactctctcattntgatgtcagtggagaaaggtgatgaca

SEQ ID NO: 15045 - DNA, 470 bp, Glycine max
  unsure at all n locations
tgtgcttaacactnttctttacttgaaaagaatcggaaagatcgatatgtatgaggacttggaattaggataaaatctaagtatctgaatagcatcaccacattaacaaataatataaatgtcatgttatggagagcccgataaaaacaaaacaaattaatgaagcctacactaaaaaaaaagtcatgcatgattgcatgttataactattttgttataattatcttgataccatttaccaactgtcgctgttgtgcctaacaaccaagtgtcaattagtggctgtgaagatcaaccacacaacgaattaatgactaagaccttgcaacaagaaaaccaactgaaatgtttaaaaatgtgctcattcgatcttttaattagcgtntacaatttccattntcctacattatgaaatctgtactttagaagaacaattacaccaatacaaagaaaagtaaatcatgctgtca

SEQ ID NO: 15046 - DNA, 471 bp, Glycine max
  unsure at all n locations
nttcgcanagcttacggtaaaatctgggacctagccatggtagaagtctccatagaggccattgcctccctcgcccagtattntgatcagccgttgaagtgcttcacctttggggacttccagctatcacccatggtggaagagtttgaagaaattctgggatgcccactgggaggaaggaagccatatctttcctctgggttctatccctccatgacaagagttgccaaggtagtgaaaatctcagcacaagagttggaccatgtaaagcanaacaggaatggngtagtcggagtaccaatgaagtggttggaggaaagggcaaagaccttgacaaatcaaggcgaatgggcttcttttattgacatcttggcacttttgatctttggagttgcctctttccnatatggaagggtagtggacctacacgatgacgctttctcgctttcatatggcaggatagccagtcgt

SEQ ID NO: 15047 - DNA, 423 bp, Glycine max
  unsure at all n locations
tgtagcanattcgaacgacaataacatttcactcggaagtccgattgtgttccgtaatatatcgacacgctcaaaatttagaaccgaaggtcgcagcanattctaacgacaataacatttcactcggatctccgattgagtcccgtaatatatcgagacgctcgaaatttaaaaccgaagctcgcagcaaatgctaacgacaataacatttcactcggaagtccgattgagtcccgtaatatatcgagacgctcaaaatttagaaccgaagctcgcagcaaatgctaacgacaataacatttcactcggaagtccgattgagtgccgtaatatatcgagacgctcgaaatttaaaaccgatgctcgcagcaaattcgaacgacaataacatttcactcggaagtctattgagtcgcgaatata

SEQ ID NO: 15048 - DNA, 590 bp, Glycine max
  unsure at all n locations
ccaactcatccctnacatcatcaaatttaataattcgcctatatactannnnnnnnnaagaggggaatgaacctggactgcgaacattaaactagcttgctanagagatcaggatagataagcgactgagggaaccagctcctctcccgtatatgacattcaccattgtaggagcgctgagcaccagctacgcttccaagccatcgagggatggtcatttgtgcaggagcgactacttcccctcacggacgactacctatactgacttatatgacgagatagatgaactgagggcgagcattactggttacctncatggccaagttgactcagacactgtcctcgaattatatgcccatgcttgtcctaccatagacggcctgccagatatgcgactctcggtgatgggtcagtggatccctatcgatgccgatactctctgaacaatcctgggatagccctaatgtttgaggacgctcagcaatgcgaaactaccacatgacgaccngctccactggttcgatacagagccatcaccatatgcacttatacatcggcagatatgacagacttccgcaaatacagacccg

SEQ ID NO: 15049 - DNA, 133 bp, Glycine max
tatcttttactcgatgatgatcgttcccgtctataacgagacgctcgacaatgaatggtgaagctctgagccaattcatgcgactatatctttctactcggatgtctgatcgatgcccgtaatatatcgagac

SEQ ID NO: 15050 - DNA, 394 bp, Glycine max
  unsure at all n locations
tactcagcttctgatgtctanggttttctagagagagaatggtccacgttccacacatgtttgatatctctgttgtgtgaagactanccgagaatcgagctcgaagaggatgtcgacctgagagcataatatgagtctgcgagtgattgtgacgttctataggtggaggagacatccccaccactcgtatatcttcaatccatcatctttctactttctatgttgcaaagggagctttccagttatggagagctaatcctctgttggttctacctttgatgtacttgacgtaaatactctgtatatctattgcacgatgtcttgtgagtccactgtgctatcgaaacttcttattaccttgctgtgccttgatcacatagatgcatgtgtcttt

SEQ ID NO: 15051 - DNA, 438 bp, Glycine max
actcagctatgttgcaacattataatagatctcctcagcagcataaccaacaactatctgaattattatgatctttacagcaacagatacaatccaggttggaggaatcatccaaatttgagatgggcaagcctccacacaacacagcctgctctgctttccagaatgctgctggtccaagctagccatatgttcctactccaatacagtcggagtcacaacaaatactacaagcaactgacgctcttcctcaaccttccttaaaagagttagtgaggcatatgaccatccagaatatgcaattacagtaagagacaagagcctttattcagagtttgacaaatcagatggggcatatggctactcaattgatccaagctcagtcccaatatcttacaaatattcttgacaactgtgcagaatctgaaaatgtgagtg

SEQ ID NO: 15052 - DNA, 575 bp, Glycine max
  unsure at all n locations
ccccactcaatattcatgattcagactatatgtacactaaaannaaaaaaaagatagatgaactgatacatcgaatacgaactaagatactgccgaagcagagaaggatactgcatcactgcgctattaagattgtagagcgaacaaaccatcctagatgatctgctcgaccacatactatgcctacatgcagcaccgcaacaaaatatggacttggagattcatatcgaccttgtataatccatcatgggtctaagactgcttaaggcatgaccttgcctctgacttcttgacataccaatcaaatgtgcgcatcacctgagactgatactccatacatgctccctcgaatgtccaagctataccagccgcaactcgaatgacactgtactctatcgcaaaaatgaagaacgctaccatagatatgcgacgacaatatcgcaccctgcgagccatgcatatgctttgaaatgggaaccatacatatctgaggcgctgcacactctgaaataatgtgcgatgngaaaaggaatatacaacacataacttagggcggatttctcaaaactattgcg

SEQ ID NO: 15053 - DNA, 566 bp, Glycine max
  unsure at all n locations
cgaggacggaannactggataccttgataccccaccgatntangcgacactatagattactcaagcatgatccaagatatgtgatatgcatgtgctaaggggggcattatgaggttttgtcttattcggcatggctaggactctagtagccatggcttaatccaagatattagatctgcttgcactgataggggtgtattgaagttctcggagcggcatatccatccatacctccttcctagtcttgttaaagntgggcttgtccacctgcttcttggttaacatagcctcaactcgaacttgcgttctgataatgctcattcgtccatctgcctgaacatggtcgccttgtgctgccactcttgcataacgaatcgacgactccttgcatatgctatttgtgcacgtatccaccggtgcatcgaccactatatgcctacgtgcgggatatccaaagctatatttctgaaacatctcctgataccctgaagtggttctgtcttctctcgcatatgttgaccaacgtcatcaacgnctactgactgcgctggacaatacgcaactcg

SEQ ID NO: 15054 - DNA, 458 bp, Glycine max
  unsure at all n locations
ctcctactctcatgttagcatgcattntctttctttactcactcctcacgtatggtgttttagggataaacaccataactaaacgcgccgcatgggatccctatcgcaccagatccatatctataacgatgggtgatcaagaggagacgcatgaacagatgacagccgacatgtccgctctgaaagaacatatggcctccatgatggaggccatgttatgcatgaaacagctcatggagaataacgcgggcactgccgccgctgtcagttcggcttgcgaagcagacccgactctcttggaactacgcaccattcttcctcatacatagtaggaccgcgaagggacacactgatgcacgatggcagctctcacctgtgatacaaccgagcgggttacccttattgattgtcgncaactattaccacccatcttgcaaaatatgcgggcacattgttct

SEQ ID NO: 15055 - DNA, 447 bp, Glycine max
cttctatgggcatgggtattgctagtttgctcgataccacttccttctataactaggaacatagtggcatctgctgtaacgcttgtttcgacttagtggtcctatacatgatgatatgcccgttgtggattggcatgttgaacaagccacgcctgacatgtgtgaactgattaccacggtgcgacctccactggactcgctgattattatgaccctgctggatacctgataactgtcttgagatactctttgatatttgatagctgggacagtgtggaacggatgtacgaatattgcttacatcatgcagttatgtggactttgacagatactctgtagatacgcagaaattgcacaacgttgggcacctcgctaattggggctccaaccaggaggaatcactaagtgtgttgacaggtcacaccctgttactcttcttctaacatc

SEQ ID NO: 15056 - DNA, 399 bp, Glycine max
  unsure at all n locations
cattcactntcttctacatcatattctaacttgtccacacatgacattgagacagtctcgactcactgacagtcatatgagtcgtcatacaaccgatatagaacatatatcctaatgtcacatcctatccgagcgtggcgatcccgtgtcctctagcatgaggttcttgatagacatccacctattcatctgctcccccgaacacatgatccagatcatcacacgatctcaacacaacaacacacaggaagtgagctatcacattcctagctaatacagaatcaagacaattcaatatacttcttatatagttgagataccacttgctcaagcataactcacgtaacgttaccactgtcacatgtcaaaatcactcttcaattatcaaccacattacac

SEQ ID NO: 15057 - DNA, 219 bp, Glycine max
cgagatgaggaagtgttgaagggtgaaacttcctgactttattggtgactcacagagtggtacctggagatatgtcgcggaggtcatgagaccttgtggacgtcaggtggtgtgctattgcccaaaaccaagcttgaccaatcccgacccaacccgggcatagtcggtcagtgagaacctgtgatgtacctaagcaggcgagctcctcgcagtcaacag

SEQ ID NO: 15058 - DNA, 387 bp, Glycine max
  unsure at all n locations
tgtagaatggctagacatgatacatgtcagggtttggtttggttcaaggataaaagggatgccccacattatttccatgacacaaatgcaaagatgatgacttggaaatcttatgcaaaactggtcatgcatgcacctatgtggacgctcaagtgtcanatttttatggtcatgtgaagctagggctcaggattcatttcctctattttaaatcaacccaatgtttccaaaatatgctcttttatcaatttatgcatttatcctagtccatttcgtgcgtccggcgaaattntcacagcattcacgcttcaggtgtagacacgttatttcttcanaaatcggttatgatcaatgatattttttctcaaagaaaagttggaaatcatc

SEQ ID NO: 15059 - DNA, 447 bp, Glycine max
  unsure at all n locations
tgatggtgttgagaagaaatcacatgtttgtcatcatcaaanagggggagaatgtgaatgtatgtatacatgattntgataatgtcaaaagaagaatcaaacaaggctcattntgcttcaagattaatacaagattgtttcaacaaacaaagccttaattcaagatttcttcaagatcaagccttgcctcacaatgaaaggtttcaagtcattcaaggcacatgtaattgattaccaatacatgtaatcgattaccaatggtttgaaagtgtgtaatcgattacacatcatatgtaatcgattaccagagactttgaatgttgggaaattcaaatttaaatgaagggtcacaactgttcaagaaaaacaactgtgtaattgattacactaattctgtaatcgataccagagaggaatttaaggaatatcgcaacagcacatcttata

SEQ ID NO: 15060 - DNA, 299 bp, Glycine max
  unsure at all n locations
atcctatctccgatagccaatgggtaagttccgtgcatttagttctaaagaaaaccggtctcaccgtgatcaaaaatgagaaggaggagttgattcctactcgggtgcagaacagttggagggtctgcatcgactataagacgctgaaccatgttaccaaataggaccattttgcactgccattcattgaccagatgcttgaacgcctggcaagattctacaggcgctctattagagaatttagcacggcacctgattggaccgccccatttgagctaatgtgcgatgcatncaattac

SEQ ID NO: 15061 - DNA, 433 bp, Glycine max
  unsure at all n locations
tccattgttgaatctcgagcgtctcgatatatcatgcgctntaatcggtctctccgagttaanagttatgaccatntgaatttctcgaaagcttccgttgatgaatttcaagcgtctcgatatattatgcgcctgaatcggatctccgagtgagaagttatgaccatttaaatttctagagtccttccgttggtcaatttcgagcgtctcgatatattatgcgcctgaatcggacctccgagttaaaagttatgaccatctgaatttctagagaccttccgctgttcaatttagagcgtctcgatatattatgcgcctgaatcggacctccgagtgaagagttatgaccatctgaattgttccagagcttccattggtgaatctcgagcgtctcgatatattatgcgcctgaatcggacctccgagtgcaaag

SEQ ID NO: 15062 - DNA, 452 bp, Glycine max
  unsure at all n locations
gatatagataaagggagagcatacctttaatgctaaatagtatgatgaaatggtaccacgtacattgtctgtaacaactgttaaagtatccttgatactatgtcttgagtatagagataataacgacaagctcttatcagcccaatgcatgatataatttataattacgcagtttatttaatatcacccgtgatatatagctgattaataatattactgctaccagtgattgctttactagaagactattaagcttcatagattaataaaggttttgaatgacgaataacaggccataagctgaattaatctgttcattcttagaanacaaaagaaggtacatgaaccttacaattccaccatttgtgtgtcttcaccccttccaatcctacattggatctcatgacaaccttgagacatcttacatgacattcgcaccatgtctcagaata

SEQ ID NO: 15063 - DNA, 403 bp, Glycine max
  unsure at all n locations
ttgagccaatatcctgactcaccataaaccttgacccatggtgagaatgtcaatccttaccctcggaagcaaannaatgaatagaggggaaatctccaatcaaagaacaagagatggaatatttccaatgaaagcataaaaagaaaagaaggaaaattccccaatcagagagtgtgagaaagcaaaaaaagaatataaatgacattcccaatcaatgagtgtgagaaagcaataagataagaaagaagttcccaatcaaagaatgggagatagagaaaaaaggggagaaaagaaggaaagaaagctcctgatcaaggatcgaaagaaaacagaatacatgtgcataaaggtcttttaaccagacaatatctgaacaatacagatattgtaccaaatgaacaat

SEQ ID NO: 15064 - DNA, 332 bp, Glycine max
  unsure at all n locations
acgaatgagaaaatggngcaaatgaagagggtgagaaagagggagaaacccatgctgtgactgccattcctatactgccaagttccccacaatgtcattactcacactataacaaacctgctccttacccaccacccagatatccacagaggccatccctagatcaaccacacagactgtctaccgcacttccaatgacgaagaccacctttagcacataccanatgaacaccaacaaagaggaattntgcagcataaaagactgtatgtgtcaccccaaattccgttgtcatatgctatactngatcccatatccactcaatatttcaatg

SEQ ID NO: 15065 - DNA, 463 bp, Glycine max
  unsure at all n locations
tatanatgcatcactnttaatattctctgcataanaacttanatgatgttaatntaacaattatntactcanaaaggagaaattagaagagaaaaattacaaattcctttataatttaaccctaagatatactcataattagcagttatcatccaccttcccttaacacaaggtcagtaagtgttgacttgccaccagtcatgtgcctagagtagccactatccaagtaccatagtgagtctcttgcttttaggaacacctacaagacaaaatcaattagagagaggtggtacctaattgtggttaggtctaacgaggttaatttccacaattaattctttaggagtccaaacacatttatctctaggaacaccaaatctcctaacataacatttataggacgcgtgtcctctnttcttgcaataatgacaagtatttacattaagcttaagatgaactatac

SEQ ID NO: 15066 - DNA, 465 bp, Glycine max
  unsure at all n locations
gtgatcatgtattccgaaatatatggggataatacggatgcacattntatctatatacaattgtttgttgcttgcttgaatcttgatttcaggtattgtattgtcatcatcaaaaagggggagattgtagttgcaattggctttgatngtttgatgatgatcatgatgatgtgttgcaattgatgcatatgggcttttcaagattaaaattcaagacaatacttcaagattacaagtcacaacatcaagatgatcactagaatattaggaagggaattcctaattgaattagcaaaggtttggccaagtgatataaaataaaaagtgtttttcaaagggtntactctctggtaatcgattaccagaggatgtaatcgattaccagtggccaaatacgttttataacagctataatnaattgaattcgaaatttaaaagctgtaatcgatacacaattgtggaatc

SEQ ID NO: 15067 - DNA, 448 bp, Glycine max
  unsure at all n locations
tgcctgtccgatgcagccgtaatgatggcccgagttatgttggngaactgttacgaacccgggatgggtttaggcaaagacaacggcagcataactagcctgataaacgccaaaggaaatcgtgggaagtatgggttaggctataagcccactcaggcagatataaagagaagcatcgcgggaaggaagagcggtagtcaaaactcgcagttgagacaagaaggtgaaggaagcccaccctgccacataagtaggagctntataagcgcgggtctggnggacgaaggtcaagtggtcgcgatatacgaagatggtgttccgagtacattggatttggtacgaccaagccctcctgatttacagctgggaaattggcgagtggaagaacgccccggcatttacgcgacgagcataatgtanacctttacagttntaaaagctctatagt

SEQ ID NO: 15068 - DNA, 426 bp, Glycine max
  unsure at all n locations
taaccaanagtaaaagtgataattaaaagtacacagtgaatattaaagagtgtangatagaagaagacaaacacaagatttatactggttcagccacaaatcatgcctacatccagtccccaagcaacttacggttcttgagatttctttcaaccttgtaaaatccattacaagccaaagatccacaagggatgtaccttcccttgttctctttgaaaaaccaagtggatgtaccctccacttgaactgatacacaagagatgtaccctctcttgttcaaagtataacaatccccaagtagatgtaccctctacttgtaccacanaggatgtaccctccaatgtgttgggacaaagaattctcaggcggttagtccttcgaatctttgtaaaggggaaacaaaatatatctcaggcggttagtcct

SEQ ID NO: 15069 - DNA, 453 bp, Glycine max
  unsure at all n locations
tactaagcttgtctataccctcttgaaataaatggtagagntatgctgctcctcaaaggaaagattaaaggcattctataacacccctcccttcaagtatgaaaccattgatcaggttagaatgattaacaaagtgtaccctctaaccgaacatccaaattntgttgggtaaaatatgttttcggtaccaaaaaatattgtgaaattcaagcttagttagttataaaaatttaatagtttagtcctaacatttgagggcaagcaaagttgtgcttgattactagttggtcatgcgtttgaatctagaaatacgtaaggataagactgttaaaaatattcgatctatgttaaaatgtaaggactaaaaacttactatatataggaactaaatataacattntgaaatattttgtgggacaaacatattctatccaagaatntatttcatgcacc

SEQ ID NO: 15070 - DNA, 452 bp, Glycine max
  unsure at all n locations
tgtagagcattgattngatactgcttacctcataatgaggctcatgatgtttacaatggaatgatcgtttgctaccctgcagtgagacacacacggatacacacacacgacacacgtaggagactaacgctcgcggactcagacacatacagcaactcatacacacacactcacgcagagtgacgcacacattaagacatagacaaagactccaacacagtgagcgacagacacactcagaggtccacacgcaatgacacacacactgagtgacaaacacacagatacgcgtacacactcacacacatggacagacacacacactcgcacacgcataaagagacatacactcacacacacatagggagacagacacatagacacacgcagatgaagagacaaacacagactcacgcactcacacacagagtcacacacacataatgagacag

SEQ ID NO: 15071 - DNA, 466 bp, Glycine max
  unsure at all n locations
tgggttggatgttgaattctggttgttcctggtgcggatatgattgtacagcgggtgaaccaggggctgaagtctcttttggtgaggtagccatggaaaagcagagcgtttggaatggtttagcaaatttctgagagctgttgggggatgctgaatacgagattatcacgaatatataagtttgaatgaagaatgtaaaaggccgtgtgaagcaacggtcgaatttgctttggttcagtagtgaacgtgctattaatgttaggtgattcgtttgggcacgtcagatatcagtagttgctacaattcctctagcagacaaatgcccagcttgcccctcagttattcaaactgttntgcatccaatgcctttgtaaaatatctgctatttgttcctcagtggtcacatgctccagtgtgataactctatcatcaacaagctctcttgatatagtgatgtctgatgtca

SEQ ID NO: 15072 - DNA, 400 bp, Glycine max
  unsure at all n locations
tcttcagttatgtcaacatagtctcttttcaacatcatttaattgttgtactgatacattctactaatatatggagttggtcacttgtttgcctgaggatgacaaatactagaccataacaatgttagagccggtaaaggacaatggtcttttaaataagcatgttatacatgcacaaacaatcttacgttattataacacaaatgattgcatacattaaaaataggattatcttgaatctacctgaacaaaatgaatgtcatagatgtgaccaatgcatantttgcgaagcacagaagaatctgttggtggttgacttctaagaggaaagaacgtcatgcttntgtttagagacaacgatacaaggattacattataccttgatcaatgacatatctca

SEQ ID NO: 15073 - DNA, 469 bp, Glycine max
  unsure at all n locations
aattatgagacgaattcgagaccagcttaactttcatgggactcgacaatttcctctcatataattacgatttttctatcttatattntataagtacacagtttatgttggagataatttctattgtgaatttattatatcaaaagtacaaaaataatttgttatattgaaaagttntgtttctgtttcttcgactcatgtaactaatacacatgacagaaaaacataatcttcaccaagaccttaatatgttgctatctacaactagattaaagcatgatgacaaagtgttgctagcatattatgtgggtttgaaaattanaataatgattgaagtgaacatataaataggaagagataagaaggttcatgggatccatanaatagcgatcgttttcaaattctctatctccatgctcaaaaagctaattggcaactagatgacatttggcagaacaacgacacatgg

SEQ ID NO: 15074 - DNA, 366 bp, Glycine max
  unsure at all n locations
aagtttggttaanaataagtttaatgtaacttgatttatatctggattctgtttacgttcaacaggataacaagagaggaatgattttgggataaatttcagtttgattgtataaatcacgttcaactcaactcaaaagaatagcatgttaaacaagcggngcagttattatgacgggcggatcttanaaaatgagatattaaaaacaaccattttcacggaattactttattgttggtaacagattagacagggataaaactaattatgagatactaatttgaataatttctagtagaaaatgtcatagactaaaatattaaatacagataatgataatatacatatggattntgaaagataaat

SEQ ID NO: 15075 - DNA, 483 bp, Glycine max
  unsure at all n locations
tgaggagggtaaatgagaaaagatacatttataattggtgcctgctattagtagataatgctaccaaggcttgtggttaaactaatataatcactgtgtgctttttcttttctttaagcttctcgtgtgtagttactgcatatttattntaatttatgagaaatcttcatgttaaaacaagactaacttagttcatgcaagagaagatttttcatagagtattcagctccagaagcagagcctacgttntttataatattaattagagaaaaaaaaattgaacttttgaaaagcagtttcttataagacacttggtttacttataataattatctttcaaagtataagagagaatttgtgcagagaaaaccatattcagtaatcagtagaaagtataaactactatcaagaaaaatagtgcacattcggaaacacgaagtataagaaaagttcanatttagaatatcacatatccatttattc

SEQ ID NO: 15076 - DNA, 512 bp, Glycine max
  unsure at all n locations
tgaaaaattgaaaccctgaaacccgtcgaanatgcgacactactagatagtaagactcancttagttgacactgatccatgataatgaaccgaagtgtttaacattattattcaacaattgctactaatactatctgaagcctccccgttgatgtcatccgaatcatgctactaaaactataagaactaccaaaactaaggtcaacatgtcaatactctacaactaggcaaaccaatttacctttatttgtacagtgtattaacaatcctgtgagctctcatccaaatttcctgaatgatgagtgaactagctcttgtgattagtcatttatctacaacaggtacaacagtgaaaaccatcaatataagataaacgccatgccaaaaaagataatgagattacgacccaatgttgtacatatcttcacaatcattaagatacaggatccatatatcatggatgacacgtctcactaaacaatgatcatcacaaacttgataccgctcgaccn

SEQ ID NO: 15077 - DNA, 443 bp, Glycine max
ctgctgcgagcatctactgcagacctactcaaccttagcagtcgaatctttcacgacatatcattgatgacctctccagtaacaggtaccatcccgggtggacgaatcataccaaccttatatggtcgcagacttcacatctatctctacgtctacagcagccttatcttcagaatgctggtggcccaataagaccatacgttccttcaccgactagcatctacaacatctcttgagtccataacagcaacagtgagcccctcgcaccttccttgagaacttggtgcaatgactatgcaactgctgttcacggaaccaatccttatcagacttactactagatggcaattggatccagctaataacactgtcccaatctgcagatacttttaactgccgatcctgaatggataccatactttgtcagaagcatgcatgactct

SEQ ID NO: 15078 - DNA, 472 bp, Glycine max
  unsure at all n locations
ggcctcanagagatctaggaaggacgccgcggccgcagggtctagtgctgctcctgagttcgatagccatcgtttcaggagcgctgagcaccagcagcgtttcgaagccatcaagggatggtccttccatcgagagagacgcgtccaactcatggacgacgagtacacggatttctaggaggagatagctcgccggcgttggacgtcgctggtcactctcatggccaagtttgatccagatatagtcctcgagttttacgccaatgcttggcctacagaggatggcgtacgggacctccggtcgtgggtgaggggccagtggattcctttcgatgcagacgccctcagtcagttcctgtgatatccgctagtattggaggagggccaagagtgcgaatacggtcagaggaggaaccgggccgatggatttgatgaggaggccatcgctcagctgctatgcataccatgtcaa

SEQ ID NO: 15079 - DNA, 476 bp, Glycine max
  unsure at all n locations
tgtacgattataagaaacatcttcttcgaccttggtgatccttgactctatctcatcgaatcgcatgtccacttgtaactccagagcatcaaacctttcaccaacaaaggtttgaagaccatcgaacctgtccaaaaccttttgaagaagagaggaatcttcttcaccatgtaaatgtccttcttcatcaatgggttgagcaccctttttaacccaagagccatcatgctctttacggtaaccaaaggatgcaatcacagtagcaccgattaagaaggatctcttgattgaaacataaggttcataatcaagagggatgttatagtgtttatggaagagagtgactaggtgtggatatggcaatggagcatttaatcccaatgccttatgcatgcgatattggactaagtgtgcccaatcaatntgtcggcctttatgaaaagcccacattacaataagatcttcttcagaaacct

SEQ ID NO: 15080 - DNA, 458 bp, Glycine max
  unsure at all n locations
ctgtanggctaaagtctcacgaatgtcacgtgttgatgcaataattgttattcgtggctatacaagacatcttgccagacaaagtcaggttagccataactcgcctgtgctttgtcttccatgccatatgtagcanagtcgttgatcctatcatgtttgatgagctggaaaatgaggctgcaattatactgtgccagttggagatgtattttccccctaccttctttgacatcatgattcacttgattatgcatctcgtcagagaaatcaaatgttatggtcctgtttatttgcagtggatgtccccagttgagcgatacatgaagattttaaaatgatatgaatatctatatatccagaacatctattgttgagaggacattgcagaagngccattgaattctgtcagaatacatcgagaagctaaacctgttggccttctaagtctcagcatgatg

SEQ ID NO: 15081 - DNA, 271 bp, Glycine max
aacacaacttgagaatagagctgaccatgctgctgctgctacagaatatggaataagtgttgctcagtccctgacagagaaactatctacagtttctggactagatgctggtgtatgaagtggtgtgaagtccacagtttctggaactcatactagtagtatgggtgtggaacaggacaaggtggtttctgagaatgactatttggtggacatactgacgcgtggcgatgaagacaggtctctctctgaggtgatatcagatactctgcac

SEQ ID NO: 15082 - DNA, 484 bp, Glycine max
  unsure at all n locations
atntgctgcatacattccttttctggagggcgaattctctgnctactttttcaatttatacccacnanacatctcaaccggctcgagctagaggcggtcttcgacattggatgcgcggaagacaggctttgtggtagacttagggatggcccactgggataactgcccggggggaagggatacttcttcaatagtggcgcgcaccctattttacgcgagagccctcatgctctttaccgtgacctgtggatgctaacacatgagctcccactctaaaggatctctcgaccgtcacacaacgctcataactcagagacatgtcatactgttcacggtacacagttactacccgcggtattcgctcaggagcatgcatcccaatgactctgcatgccatccgccttattgcgcccgcaccttcctgcttctctantcgccctttacataaaatcctcctctaacctgtcacagcctcaaatttccc

SEQ ID NO: 15083 - DNA, 473 bp, Glycine max
  unsure at all n locations
cacanaatctaggtatccaaaaccnctcaatttaatggattntcaaggtttgagaagtgaaattgagaatggngtaaatttggagcaaactctcacctcacacaagtctataacatcaatttaaacttgttcaaactggatttacacctaaaattccaccgaaccaaaatttgactcctcaacacccaattttaccctagaaatggctctttgttcactttggtcatttggttttctctctagcacagcccaaactttctcataagtcctaaatgacatttcaagctaggattaactcactttaacctccaaataccactaaacccagatttggccttccaactctcaaaacctcactctttntccactcataacaccatattctcactnttaaacttaggttaactctacccttcatctctaacagttntccataagcaatttcagcacataaacatcacaagcatcatcat

SEQ ID NO: 15084 - DNA, 440 bp, Glycine max
acactgagaatgtttctcactatattaatgcttatccctatgactatattatttattccgagaaagaatggtcaacttgcaaaattccaaagtgagtttgctactattgcaaaattttggtgaaatattggctaaatctatttataaaactgtcttaattcttttatgcagacctgctatgtcaaaacacttgagcatttgtgatcgctgtgttgcacgatttgatcatcactgtggatggatggttagtaatctttgaaattcctcctctttatttgtggtggtctcatttaatatatatcatgtgtgtgtctggagatctactaaaagttgctttactcacagaacaactgcataagggagaaaaacacccagtatttcatggcttttctattatggtgagttctatattcttacatgagtatcatttcatggaatct

SEQ ID NO: 15085 - DNA, 460 bp, Glycine max
  unsure at all n locations
ntcaccagatcatataagataaatgcattcaggcaatctgcagacatattctcccatacgtcaaattctccgcctatatattcaacctttccatcactggcacgtggagtgaatcttcctccatggtgcaatattaaagttatattgtcattcattctacacaatcagaaaccacaaacattgtcatatattaggaaataaaaaacctaactcanactcaaacataggcacatcacacaacaacatgcaatgtcatctataaaaatagagcatcatanacgaaaataataaaggaccataaacctccctacaaagcacgaagacaatgcatatgaaaccccttgaacatataaaaccccatatgaatccaccaaaacaatgcatatgatatgaacgcataataaccaccaacctgactgccaagcgcgaacactcacaatcaccgacaaagagaatatag

SEQ ID NO: 15086 - DNA, 503 bp, Glycine max
  unsure at all n locations
ntgacaagacagtacacactgctgtcttcttcaacanaatanaatagggttatctactctaaagatacatctaataatacccataattataataattaggattaggtaaaataaaataaataacattattaggtgctcttgaactattatatttcgattagttttcacgtgatatataattaagagttattgattctttctttagtaacttacaaaatttcttctgtaaaaaaataacttaaattntttaaatgtgtcatataaaaagattgattcatatcatgaatacgtgggtggataaagatcacctaatagatttttctattcaagagtagtgagaaaatttaatttaagtgacctataacgtcttagttataagttntgtacttaattatcccaccanaaatgaatcttattttccaaagtgagtattattcaacatatgattaagggtatatgtgagtgaatatttataaaaaagtaactttgactcagtgagtttg

SEQ ID NO: 15087 - DNA, 426 bp, Glycine max
  unsure at all n locations
tgagttcatcttgtttaacttatctgtaacctatcgttgtttgttgtgtgaaattttccttaagcagttnttaactgtattaatttagtatttaatataataatttaataatagataataatctataggactaattatgtttttggttattatacttttttgcaaattaaacgtttagtttccaaaggaaatttataacattttttgtcctatatttttcctctatgaattattttagttttattgtcaaataaaacttataaattaataacattaaaattatattaacaatctaatgacttatcacgtctttaacgagtgtgatgaaacattcacatgtaatttatttttgagcaaaatatattgttaattcccaattaatcgatgttttatttttaagtctctaaacaaaaatttatctaattt

SEQ ID NO: 15088 - DNA, 426 bp, Glycine max
cgctgtagtgaaatactggtacattcggaaggccagaagcgttgtgtagtcctaagtcatgtgggtagtgctgcagaatatagagatttgcggaccctctttatgggttggtcagtgcaactaatttagctgctagggttgccaatttggctgctggaagcaattttgacgcatgcataatggagcgtcattggtgtttgatattattaggcatgttacctctcattctagcaaattggagcgtaatgcctctatttatacttatataggggtggggcattttgggtaatgtattcgacttatagcagtgctttataaccttcttagtcgtggatgtcatattgtggtcatagtaggtatacaatttttatttttttattcacatatctgcaaaaaaatcatgcaataactgaacttaggtcaaag

SEQ ID NO: 15089 - DNA, 487 bp, Glycine max
  unsure at all n locations
tgactcataccanacatgacaagtntagcatgctntcatcatatttcttcacaaataactatcataaggcataaacctagtaaaactacccatcatatctcccaaaacccaatacccacgaaaatttatgtgagaaaaagtctacccaaacctgaaatgtgaagtcccacaatggagaggtgcgcttcacgactccgaaaatggctttttttcgcgaattggagcaaaaatggtgtacaaaggttggagctttgatggagcttcaatggtgaggaagaagaaaggaatagcaacatgagaaagagagggagaanagcttctgaatnntattttttttgtggctgagtgaggagagagagaacgtggcttgtgtttaaaaggcttcctcttttttttttttttaacaaaagatgtgccacatgtcttcttttgagtggagcanaaagggttcattttttttttcttgatgtgactcatactcagtcac

SEQ ID NO: 15090 - DNA, 498 bp, Glycine max
  unsure at all n locations
nttcactcggagatctgattcaggcgcataatatatcgagacgcttgataatgaacaacggaagctctcgagaaattccaatggtcattacctttaactcggaggtctgatttaggcgcataatatatcaagacngctcgaaatgaacaacggaagctctctagaaattcaaatggtcataacttttcactccgaggttcgattcaagtgcatgatatatccagacgctcgaaattgaacaatagaagctctcgagaaattcaaatggccataacctttaactcggaggtccgatttaggcgcataatatatcgagacgctcgatatttaacaatggaagctcttgngcaattccaatggtcataactnttaactcggacgtccgattcgagtgcanaatatatcgagacgatcgaaattgaataatggaagctattgagcaattcatatgatcataactnttcacttggaggtccgatngaggcgcataatatatcg

SEQ ID NO: 15091 - DNA, 428 bp, Glycine max
  unsure at all n locations
gaggtacaagccctataggcagagcttgaaagagcccgggtagtcgaagagaagttcaagtccatagccatcatagtttgaaaagagtatgatgaactaagggacgtcaatatggccaccgctgaagccttggaatgagaaaccaagaaggcccgaaaggaagaacacgaccaaaacaagttttgaggggctttatagggcagcaatagtgagctcaagctccgaagaggtgaaaggaatcatcacgggtcaaaggcatgatctggaaggacgagctanaggcttgccttaggtcgaaaagaaatttgtcccaacagttaaagcgagactgaagggaatatgtgggccatcatcgataagtgcaaagagaagctaaatctagcggcgactcacgagcaaaggctagaggatgagtacgccaagatatc

SEQ ID NO: 15092 - DNA, 450 bp, Glycine max
  unsure at all n locations
acactatgatactcagctttagccnatggacttaccttgaattaattcctttgatagcccttttgagccttgtttccctttccttgatctgaagctcactacaagccttaagtgataaaccatgatattaccatatccttaaggaattntggagctttggaattgttttgggaataagtgtngggggtatttggttcattggacaacttgttatgttggctatgcttcatgatgtattttgggccatacttgatgaacattgtatattggttaaatgttggacatgctgaatgaaatgttgtttctcataggctaaagagtacataacaaaaataaaattcgaataaagaaaaagacaagcagtaaagttgagtgactaagatcttatatggcacaagaatgatgaaactcttggttctactcttcatgcttaattattatctttacttc

SEQ ID NO: 15093 - DNA, 391 bp, Glycine max
  unsure at all n locations
tactcagcttaggttgctcattgactccagattgctgcatataaggacaaagatctgaatggtgatctatagaagaacatagaccacagactcttgcaacaggtgtagatttctgattcatggcaagctgagttactaggttgaccaaggcatcaagttntctttcaagctttgtattatcagtagatgaagatgaatccatggccacctcatggactcctctaagaacaataatatcatttcttgcattgaattcgtgggagttggaagccatcttctcaatcaaattcctagcctcagcaggggtcatatcaccaagagctccaccactggcagcatcaatcatactcctctccatgttgctaagtccctcatagaaatattgaagaag

SEQ ID NO: 15094 - DNA, 895 bp, Glycine max
  unsure at all n locations
cccctccaaccagcgactccgnnctcntnnntcctctccgtncntcttgcggacacgatnanagncgacntncgaatncnttgnactgttacaaagngtacgaataaactgatgcacntaaactnnntnnncncaacgaacggcagtagnaganccgttggacgnnccccntttggtnanntacngcctnctatcgacatnncnccancanncgnnancnncanannacncnncgtcaccgnccgaccgtganncacngcangtnaanacgntgcgccactcntacatngttcnctacatcgtcgtcttattatgtcatatgtatagttatagtgacaacctctaactcanagcaacgcgcgggggacgaatactcgcgctgacttgactgatgacgcacagcacatgcaatatatctcgcaacactcctacaacagagttatgacagcaacacgtccacactgatactcagagatgaacgcgtgataccgccgtgagcgactctctcgtcanaagacacataccgccgacactcgtcgacgctggctatcgccgctacagtcgcgccgccaccacaacgacggtacacgacgagaacgaccgctcactnagccgtcatattgaagtcgagactacaagccgataacaccgagcacgacgcgatcggcggcangactgaatacaacaatctctaagtatcatacaanatattcctcaccgcagtcagcgcactgcgcgcacacgtgacagatgtcttatgatatcggcggagcgccactcgctctaatggatcgtcgcaacgcggctcaagcaagatgcacataccggcgtcgcgcgcatcgaggcantcacgataccgcgtcacagactacccgatcacgagcgcagaaatgcg

SEQ ID NO: 15095 - DNA, 676 bp, Glycine max
  unsure at all n locations
ctcccgacgtgcctctcncacntctcnactctnnctacactntagcacntactaganancaaaantnnncnnacnnnnccacccccacatgagagagtttgactgcctttgagaggccacgtgatacacaacctananacanancanctgacacacatcaatacagatcacactctcagtcgaccacncgcatcttttcttatcntatattagctaattctagcactgactatcgctaatattacgcactggctgcactcaantcagcatacaccacgatctgaactctcacgatttatcacatctgatacatcattgcactcatatcaacgaccnttgtacattcanaggagtacancgtctacacggcacctccgagagctaggtactctacagcgcgcaatatcactatagagcaagtaatgtcacacactggagatagtgcgtgcgcatcgcatctgcgcgagacgatcgattgattgaatcggtatatactacgacaacatgatcttagtatgaagtgaacgcgcgactcctaatagaatacatgtgtgtcactgcaccgtgacgtaaaggaatacgtcgatgaagatcgtgatgtagacaagaatatacacgattaggacagcgctgtatacgtcacatagtacataaggacgtgaatcgtgccttctcg

SEQ ID NO: 15096 - DNA, 593 bp, Glycine max
  unsure at all n locations
tacacgactaaccggaccatcctcntatccaccataaagtcatttttcagctagangtattatacacatacacaacncaagagaggnaancgtgagcccctggacgtaccntcgaanancacncngaacccgggaaacactagaggaacctgcaagctgcagcaatcactcgctgtataacatttatcaatacactacactaaaggagaacaagggataaatacatcagaaagatcatacacgacttggtcttggagggatatctatgaacataacatggaaggggacataaaaagcttttaagattggcaaaaatgaacacttggtctctcaatatactccaattttgattcggacgaccgaaaacagattcgaaataagagtccattacaagcgaaatagcataagtggctacactcccaatcaacggtgacggatactcaaaagattaggacacgagacatgtcacatagagagcgagaatgtacgcattaagcgtaaataagacagctgacgctatcaggacaggcgaatgcacacgcataacgaaactgaaaacgaatgcaagacatgaacggcacacgtagccaccg

SEQ ID NO: 15097 - DNA, 73 bp, Glycine max
  unsure at all n locations
ccccccctccctccttcaaaacctataactaaccannccccagtgttgactgacctcaccccacacccccttt

SEQ ID NO: 15098 - DNA, 500 bp, Glycine max
  unsure at all n locations
gcagagtacccgtgaagacatttgatacacggtgaaacacctcgtacccgggatcctctgagtcacctgcagcatgcaaacagagctcagttttatagcttctatgttaactgttcaaagtcgcgaatataacctcggatccctgtcgatacaaaactactaagaaatccatgcaagcatattacttccttgatgttacactgcacgagttcctacatgctactcttcatttcaccagggaaaatttgagcatatttctgactctattactatacccacacaaatcattttcacgacttatctcggtaacctgattcaaatccatgatcaggcctaccattacattccagaattccaaagcttcaattctctgacgacgctgtgctaaccttactcttgaatgtctaaatatgctaaatataatgccatcttctactgcatgccacaaaacatgctttcattttggcatcttaacatcctcggcggaactagacaatttn

SEQ ID NO: 15099 - DNA, 363 bp, Glycine max
  unsure at all n locations
cccccccactctctgtcatgttaggtcacttctataannancncccggcggtgcctgaactgtagcccanacgagnaccttcgtgccagcacgcttttatttgggatggccctgctatttttattttgggcacaagcggcttgcctactcctcttagaaaaatgacactattttctacggatcacaactttactgaaggaattgagcgggctaaaaacctttctgaagctgataaattcaaacatttggacactgctagcaggtaacctattcttactataccttataataaatcataaaactcatgttttctattctaggattttatttataataccttttaccacggtcgacacgcgcgcg

SEQ ID NO: 15100 - DNA, 457 bp, Glycine max
  unsure at all n locations
atcangatatgattaaagacttcataagtctttcanaagaatacaaacaacttcaaggaaaacataaagaaaagatagatgattcctcagaaatttccaccgccaccattgtgatgacctttgaatagtctaaatgcctaaagacaactttaagcgtgtaccctctgataatcgaaggaaantctcgtaaaagaaagtatcctaattctaattggaaagacacttcagaagttgaaaaatcaactgagagggcttacaaatgagtctactagactcaataaacatcatgattggcctaattaggaaaggtgtaatctattggaagaatgccacaagttcatagaattatgaaacttcgaggcaagtgaataactattganggatgtgaagattaacaaagccaaaatctcaatgataacttgacatatgaggtctcaaaagaactcagatcttcact

SEQ ID NO: 15101 - DNA, 174 bp, Glycine max
atactgcagttgtaccactttcatcatcatagcaatagaccctaccaatcctatggcctggtctatgcctaccacaccacaagcactattacctaattatttaataagttgctgattcacttctgctaggttaagagaaagcagttaaagttaaattgtggtaattgaaacaac

SEQ ID NO: 15102 - DNA, 331 bp, Glycine max
  unsure at all n locations
agctntataatggactttctcttcattgctactatcatcagtaatagtaacagacttctgtttcaatataacaagatcaagatccaaaacactgaggtgtaattggacttactcattccagtcagagaagttaagcccattaaaattggcacaaatgatacataagaattcagtgaattgggaacatgtattgcataataacattcacataagtgttttgagacataaaatacatgtcatacatatgacttattcagataatgatcaatgtatattgatgctctgctttgggtgatacagttgcagaagcaagcttcatgatgaatcaaga

SEQ ID NO: 15103 - DNA, 352 bp, Glycine max
  unsure at all n locations
caagtgttgttcgggctgcttctgcaatgttgccatttggacttgcttcnnggtntgcatgtgaggtctaacatgtcatgtgagggaagcctgtatatttggcaactctgtccttttctaacagttggagaatgcattgaagacaaactttatgttttgtctgttaatgcagttgcgtgtagtgcacacgtattactcttgcacacgtgtcactcgtggagtgggcacgtactanatacgtgttgcgtgggatatgaagttgtcatgtggtctcctcttgccaatgaccaccgacacctcgaatttctatcttctttctctcgaagtataagatctccctcacctacacagc

SEQ ID NO: 15104 - DNA, 74 bp, Glycine max
aaatattacacgccgccctcgcactttatcgagtactgtggtattcattaacaatctagcgacatggaaacccg

SEQ ID NO: 15105 - DNA, 610 bp, Glycine max
  unsure at all n locations
ctcactcgntcatatcnttntacattttntcnctctcgcggtnntctcntactctactnnnnnnacncnccnncncncccccncaccatgacgcnnctttgancctttgtatacgtgtgattagcacacatanaatcacacagcngacggctggcagtatgacntataaagagtaccnggacactgttctccaatatttctctatatagaaccacattacacttcactgcccgtctatcaccactacggatttggaaacccttgcgttcccatctaatacccttgagatagttcactatcgttagtgtagtaatcctaatatgccgccacgttcccctaccacattttgacagcctgatagcgaatgacgcctctctgaattatctacttcgccttgagcggtttcccaccgctgatgcggacattcagtcgatctgctctgtagcgcataatataacatacccgaactcacctactccgctgatgcaacttcttgcgtcgatggaaatgaaatctatattgatacaaactaattgttaaaagtaccgtgtactaactgattaatttaccgcataaatataattgtacttgcttagtatacagtatcccg

SEQ ID NO: 15106 - DNA, 338 bp, Glycine max
actcgcccggtccttaagcactgagctgcactttttttctatagcaatgattgggcatcatgcctcttatgacttacatcatttagcctactgtgaagtgaacctctctcttaattctgtcataaggtatgcttaagctccacctgcagctcatatctttctcattactggccttctaaaaatggaaaagctgtcaaattgggggaggcacgaacaattttaatcctccatatcattagcttctcaaagtgattgacctattcaatctcaataaagtcaatccaatccaatgccgacacctacattgcttgatgtaaagccaaatgtagaagtgtccc

SEQ ID NO: 15107 - DNA, 588 bp, Glycine max
  unsure at all n locations
aacagcgcctatctcctccntctctcaaantaataaataattttttttggntgccccnnnnnnnnnnnnncnnccccagcgacgngttgggcccttgaacccctagacacanccaccncacaancnannaanacacncaccngcgcaccagagttaaaaacgagacctttaccattttgttcttcgtcacacacccccaaagacaacgccaaggataccactatcagtcttcactaacaactcttgcatcgtatgtcgcccatctcaagcagagcgactagcttgggttgccatcctctgtgtgcaaatataccacacactggcaacaggcataaagttctctatataggcgcatcatctactgcgtaacacaactgactgaattcggaacacgacataattaatacaacgccggtgctactgaggtactatctacagacgttcaagacagagatcgtgtcttctaactttatcgcgcacgattaacaaacgcccatgcggcgtagaagcgaccaagtaccttcatttacctcagaacggaacacataggataagagcgcacttctcgagatatagatgatctccccg

SEQ ID NO: 15108 - DNA, 438 bp, Glycine max
tctataagatgttatctcattcatatagcggtgtgagacactagcgtctacttctcatcgaagcttctaaaacaaatcgtctcgacgcagtttttcaagggatcttgtcatagaaatatctaaatgaagctatcctggcgacacatttaagcatgtggaacacttgttgtaactctaattaatgagaggcgtgagagactctctttagagatcacctactctcccgctttcactacatcaattcctagacgacccctctagctcttactctgtgtctgtacttacctacataagagagtcctcgctcatctacatatcacggcactcccttagtggagaagctccttcttaattgtctctccgctaacggattgcccttacttcacggtttgtttctatctcccgctggattccatggaggaaaataactctgacgac

SEQ ID NO: 15109 - DNA, 350 bp, Glycine max
  unsure at all n locations
ctctcttgctctacggaacatgagtaatacacaaacaaccaaatatcttatgaaatntcagagatggtttgtaaccatactaaacctcaaacggtgtttgatccttcaatgctctggtgggaagtctattctgataaataacaacagtacttgctgcctctgcccataatttctatggcaattcttctcatcaacatgcatcttgcatctccaaatatatctattatcctctactaacccatgttgtgtggggataaaactgtaagttatgttcatgcctatcctacaaattgataattatcaatgtgtctcgggccttgcaacctaaattgatctgaaccgttcatctc

SEQ ID NO: 15110 - DNA, 394 bp, Glycine max
agcttcctcagagccttattctatgatgacaaacatttggaaagttagtctacacgataatgcttactttatcacaaaaatgatatgctaatctttacgatataaaacgaactcatgcacacattaatgtagtacatttatgaacatgcgcatgtgtaaaatatcctactatatatgtcaacatacgaggacattcatcacattctagttaccacacatatatacatctgtgaaaagaatacacatttccatgctcaatgcattgagcaaaaattacacctattcacatactatatatattgctatcacaaactacctacacatatgtgaagatgtatcataaaatttctgtatgtactccatatattatatcacactgaaagtaatacgtatg

SEQ ID NO: 15111 - DNA, 259 bp, Glycine max
agcttaattgataaatgtcatactgctgatcattccttttgtgtttcatcacacgcaatttgatcaatttatactgtgtaataattttggcactggtatcgatacatcctctgtaatcgataccagagaataatctcttgacaagacttttaatttaagttcttggcaaaccttttgttcatcattagaattccttctattatatcccttctaaactctaaacatctgatatcatctgattcttaattcttgctgataa

SEQ ID NO: 15112 - DNA, 417 bp, Glycine max
  unsure at all n locations
agcttctacattcaatttcgagcttttcgatatattacgggactcaatcggacatccgagtaaaaagttattgtagtttgaatntgctcaaggcttcagtattccatttcgagcgtctcgatatattacgggactcaatcggacatccgagtaaaaagttattgttgtttgaatntgctcagagcttctgtattccatttcgagcatctcgatatattacgggactcaatcagacatccgagtacaaagttattgtagtttgaatttgctcaaggcttcggtattccatttcgagcgtctcgatgaattacgggactcaatcagacatccgagtcaaaagttattggtcgttgaatttgctcagagcttctacattcaatctcgagcttgtcgatatattacgggactcaatcagac

SEQ ID NO: 15113 - DNA, 305 bp, Glycine max
  unsure at all n locations
actcggatgtcatattgagttccgtaatatatcgaaaagctcgaaattgaatgttgaagctctaagcaaattcaaacgacaaaanacttttactcggatgtctgattgagtcccgtaatatatcgaaaagctcgaatgtgaatgtagaagctctgagcatattcaaacgacaataactntttactcggatgtctgattgagtcccgtaatatatcgagatgctcgaaatggaataccgaagctctgacaaatncaaacaataataactttttactcggatgtccgattgagtcccgtaatatatc

SEQ ID NO: 15114 - DNA, 308 bp, Glycine max
agctttaataagttattccaaaacaaaatcaaccaagtcctcaaccaatccatatctttaaaccaagatctcatttattcaacttcattctcttcttcttcttcttctttttttatttgaacgtgaacaatagcaattgaaagcatttgaaaaataaagcaacaattaggcaatatatgtatatacatcaagcatggccaacaacaacatatcatccaatgaaacataccccccttcacacttattcccaaaacaattccaaagcttccaaattccttaaaggtagggtgaaatcatggtttttcacc

SEQ ID NO: 15115 - DNA, 213 bp, Glycine max
acaggctcaatttccatagctttatgtgattatagataatctggccctatggctctttagacaactatttgtgaccgatgccgagaggagccttctataatatctactcacaggtatatacatactcccctgaatcacctctcttttgtgtagcctaaaaatgacatgatgttaactgggagacctcccatttgatttcacctatcaccttca

SEQ ID NO: 15116 - DNA, 407 bp, Glycine max
  unsure at all n locations
aggtggtcttgaaaccctgatacctttgacaccccaanctaaaaactacaaccacttaatacgaaatttttaggcttaacacgtataccacggacatccggactggggttgcttgtgcacaacacacccctgtacccccaatcgatatactcagcccctcctcggtaccagctgacacccctcttgccactgtctctttggcatctccggtctacaaggatacacgagccgagcctactgcttggaaaaactctgccaacgtacgaattagccacaaaccctagtacttccaccagctgcactaacctcgctacatccgagacgtctaacacatgttcgacgactactcgtcatgctctaggaagtattacttaccttgttgctacactggacgcctggtccacatc

SEQ ID NO: 15117 - DNA, 702 bp, Glycine max
  unsure at all n locations
cgcagctcagtaccnnctccatcgtanttgcttctctcgtgagcgtaataantaagccgagacctctcncgacgcttcacntnnnnncnncccccnnnnacgagacggagattgatngccttnggancttgacnaccntttggtannacnnanacacnangccatantaatgggcatanagatangcgaaaccagngctcgcgaaacttattctcaactattctattcttcanatacacacacgcgctccatacgaagaaagcacgagtatataatgtgcantaacgcaataccatttngtctgcgtacgtgcaaattacatattataccatcgtggcatacatactcatcacgagaatcacaacgtagcacaacactcaacactcatatcgatactatacgagcatgaaacactctggcgngatgggaacatgtgagtcacctgacatccacaacatgcactctcacacaaaatcgtgatgcacatgcaacgcaatatcttaacgatgcgtatatgtgaatatgantgtagcgtgtctcgaggtatcgaggaatcctactagcgcaacaagcgcgtactccgatagaagtgactgccctgtgtctatgcgcgaagaccgtacgtaagcatgacacatcatacgacacatatcggagtaaatcaacgatcgcagtcgacagttgtaactccacaaatagccg

SEQ ID NO: 15118 - DNA, 452 bp, Glycine max
  unsure at all n locations
tgcaagcctgttgaaaatgtcttgttggatgagttaaacatacccattctggtntangggttttgtgataatggntgtgatgtttatatgctgaaaattgcccatggaaaactgttagagatgaaatgtagaagtaacctanggttggaaagtgagaatgtggtgttatgagtggaaaaagaatgacgctttgagaggtggaaagcttaatctgaattctgtggtaaatgganggtaaagtgagttaatactagctttgaatgtcatttangacttgggagaaagcttggactgtgctagagagaagacaaatgatcaaagtgaacaaagaggcatttctatggcatatgggtgttgagagtanattttgatccgtgggatttangtgtaatttcatttgagcaattatattgatgtttggacttgtgtaggtgagagtttgttacaattan

SEQ ID NO: 15119 - DNA, 544 bp, Glycine max
  unsure at all n locations
gaggccattgacgcttgtaacttgataccatatactacgcttgaatatacaatacactttgtgcccaccatgaagtccttcttaattatcatgctatcatggaacttcttantctnttctttgtagaacttggcattctcatacgctttcaggcggatctcatctaactcactcatttgcaactttctttcctcaccagcgtgatccatagagaagttgcaggtctttactgcccaatatgctttgtgctcaatctcaactggaagatgacatgcctttccaaagacaacctgataatgagacattcccatgggtgctttgtatgcaatcctatgtgcccaaagagcatcatcgagccctgtactcaatctttcttgcttggctgcacaatcttctctaaaattctcttgatctccctcttaaaaatntatgcctgtccattggtctnggggtggtatggtgtggataccctgtgacaacctcgtacttttaagcaatgatgcattgatntgtgcaaaatgggttcttgatacgtacgatgctn

SEQ ID NO: 15120 - DNA, 301 bp, Glycine max
aatgatagatctcatccagcgcaagttgttgcaacccacatacgcacactgctatataaacatgaaagctgcacgagttttctaccaagttcgggattgaagaatattttgtgagtcttggaacttgagtgttttgtgagccaccttgatgtcaccctaacatcaagtgttggacctgagtgtgtagagctgatctctattgttcagagagcaatctctggtgtgtctttgatttatttgtatacaccggagagtgattgagagggagtgagatggcgtctcatatctaagagtggctctt

SEQ ID NO: 15121 - DNA, 306 bp, Glycine max
  unsure at all n locations
actcgcatgtctggttgagtcccgtattatatcgagacgctcgaaattgaatgttgaagctntgagcaaattcaaacgacaataaccttttactcggatgtctgattgagtcccgtaatatatcgagacgctcgatattgaatgttgaagctgagagcaaattcanacgacaataacttcttactcggatgtgtgattgagacccgtcatatatcgagacgctcgaaattgaatggtgaagctctgagcagattcatacgacgataactttctactctgatgtctgattgagtgccgcaatatatc

SEQ ID NO: 15122 - DNA, 455 bp, Glycine max
  unsure at all n locations
accgcctccgcccacatcaccccacaatcctaaatctaaggccatctgccccccacccaagcgggagtgaccgtgacactgtgaaccgcggaccggagcccgagaaccgaagcagcgcncgatcacttgttacaatctacaattgacgcaagtaatcgggacacgcaaacctgatgggctaggccaaagcatcgagactagcatggaagcctcagaatacgggactgggctagctaaacccaacacgagaggaaaacaactgctgagatgcaatccgggcaaaggccgcggagaaacaaggacgaaggccgcgcccacagggaactcgaaaacggcccgggacagagagcggtgaaaatcaagatgtgtacaggcaggaaggacctcaccccccgaccactggaacagcaaaggaacccccacacaaaaaagctcccgggtaacccataaggccg

SEQ ID NO: 15123 - DNA, 604 bp, Glycine max
  unsure at all n locations
cccccatctctctcaccacnttntattagtaanaatagnatattcgcctactaaaannnnannnaannnncnccgatgaagatgatccattgaaacgctacacaacatacnaagcangcatacgcaatgagttggctcgtatataagtctatcagtgtactctttatttaccancacctattcagtaactagtagagtgatcatcatggctgtgtactatctacacaagagtctcgatgcaagccctgatagtaagcngatatatcgcgactaacatattcgattgaatggttctacatatataacatctttgcgtcaacattatggtactttcggacgatntgtagatattctcatgtgtactccatctttcttagcagaacatccattaatcgaacaatgtgacccacttcagttcaagctaacagataagatagtgaacatctactgtctcataatcgaggatatcactcagcagatacatccctaacgatgcacttaccacgtaacgcatgagatacctatataggatntgctctgatgccatcccagcgcccggagttagccaccgagacttatccatattgtcgcacgccgcaactcn

SEQ ID NO: 15124 - DNA, 446 bp, Glycine max
  unsure at all n locations
agctngaaccaccatcatggaatcacactccaaccataatttcttccacttcttttgctcagccatttcaatgactacactaactcccatgagtttagcaaattttatatcccaacataagcaataaagtagcctagaaaatttgcatgttgatttctaaaaattccttcacaaccaggagaaccaggactttgtctttagcataaccatttttgttacattaatttgatccacccatgtataggagggtacgagttcacctaattaatggttatactttttcttggatgtncttcaatccccatagccctacacatgatgaattcatattattttatgaatcanattaatccaattaatcaatttgatttgttttctaaactatcatatatataggagaaattaaatatatcagataactttgattacagtacatcatttataac

SEQ ID NO: 15125 - DNA, 605 bp, Glycine max
  unsure at all n locations
gatgcccttaaaagatgtctctttttttagttttagntttagaggcgcgggagaagggcgggagcgcggttttnccatcattacgcgcacttagatactcagcttcgaggtgtctcgttctattgaagacnatgggctaannnnnnntttgtaatatatagaccacangtcaactctcnttgctgacccataaaagtcaacttccttgcacnccacgccaagttggtcaattttcaagtactgaggatgagacattggcatgcatgatgcgtattataatattcatagattntcccatcaagtgcaagnnttcatatctataagagtagagnntatttggctaacttactaattngnntnctctactgttcttaatgcaagtttgattcactgtgtaatgaaagttcaatttcatctacttattttcatgaatctatcaatgtggnactttctgtcggngtcgtgccaatangatggctaaccaaacttatgaatgtggtngttagttagtgtgngcatgtatatacaacgtctacgtgcattcttgcaatatggacgtagagcagtgtgaaacgnnttcagngatananccacgttacttttgt

SEQ ID NO: 15126 - DNA, 457 bp, Glycine max
  unsure at all n locations
gtgaccattganaccttgantccttgaatacacggaaccaggtgctccgagtacctaagccaccgcttgttcattctccctctttctcgaatgggtcaagcggctcatcggaccagataaacatctcgctcccggggagtgcgagctatcttcagattggctgttagcatcacaaaccatgggatattttggtgttgagcagatctcgaatgcgtgggttgctttctcttttgcccccagcggccactgggccgctcgtcttaatacctgtccgcaaatggtgacctctatcgcacaccggtgtggcgattattggttgctccccggttaaaccccaaagttttattggccccaataaattcgcgaaatattggcacacttaatcctgtgcgaatgatttcctccccacccccaataatccatcggatactaaactgcaaccggtggcccaaatacg

SEQ ID NO: 15127 - DNA, 430 bp, Glycine max
  unsure at all n locations
ttatttatttgataaataaaatatttaataaaatcaaatattaaatatacataatgagtaataatatatacattctactttntttgaactacctaattttagtgtgtttcttgcattaatggttgtggaggtttgaaaaaaatgaattttcataaaaaatatcattttccccatttcttataaataatgaaaaaataattaatgatttagagaggtccatcaagtctcaactctaaacacatagtacaaaatgttgttctaacaaaaagaatatcaatacaaaccggaaaatcaaccccttcnaagcactgaatttgctctacttgcactccctctacttgcttgattaaatttaaatactttctcgggaagacaaatgcaatatgaaaaggctataaatatatacatattacttcatatcttcacgtca

SEQ ID NO: 15128 - DNA, 416 bp, Glycine max
  unsure at all n locations
tgcagcttttactaaatgtttggcccatatttctctatacttgtaacaccactcattgagtaggtgaggaaccatgttcctctcatgagatgacgcccgagaaatgatgtttatgaccttgccttacttcactaagctggcaccactaaaacatatggttttgttcgttatacaggcgttgagaaaaatcccatcgtttcagaacctcaggattagatgtcaaatccttttcaaggaggatggaatgatgcattcctaccccgcaaggcattggataaatactccaagtaatgggcagaatgcagaaagccctaggtttatgaccttaggaattcggccatggctaagtcgaccccttatcttgtaatattaataaggttcatttttgggcttgtttaaggtccttatgaagtggn

SEQ ID NO: 15129 - DNA, 491 bp, Glycine max
  unsure at all n locations
cccctccctgttgtatagttgtgatcttacaattccctctncnnccccgtttatgaccatgtacgtctaccgaactgcaacaagcgcaccgtgagcttcctgaatctatctaatgctgctatctacaactttaattatgaatcattagaaggacccttacactcatcccgctaatctaaggtattgagtgttgacaagcttataagtatatgatggctaaagtcttgtactgcgcaagttcgtcaagtaattcatctatcattgtagtctaagcaccagtctagccttgttattgatacttgataatgctttgctcgtaactgtagcactccacttaagaacttccacgtgaacttactcattgtggagcaaatcttacagcaattctcgagtagatttcaactaacatctcttgctgttaaagcatgactatccacaaccacacagacttagtggcttgtctctacacgctttgaaacatctatactact

SEQ ID NO: 15130 - DNA, 363 bp, Glycine max
  unsure at all n locations
agcttccatcatanggtaccctagaaatatangatntttcagctattgtattttaaggcacctagactagtttttgtattaagggtagttttgtaatttcacatgcactaagtgaatatttgatgtgtgtgttgggaaataaatttaattgaattggtagaacccccaatccaattaaattttagagggggaggtgaacattntcttactacaccccattgccacatcatatagtcacactttgtgcatgtccttcatgctttacatgtctcatgacacctaagcacaattagtggagaatcttggaattgatcttggattagtgggctgaaccataactganattcactaatcataattagt

SEQ ID NO: 15131 - DNA, 363 bp, Glycine max
  unsure at all n locations
cctacatggaaattatataaaaggtaacagcgaataagtaatacaaagtccaaaattganaagaatataaaacaagtttacttttaacaaacctatntcatataaagcactgcagatgtcaataacagagaaacaaattaccttttatatatctcagtatcagttgtgctggtagtgcanaagacaacagctgttatattgtctttctgcttctcaagaaaccgccgcacagttcctgaataanatgaccttagaagaatatatagaacaaatggacaatacanagtgtagaaacctaataataatatattatccatcagacatcagaaaacagttaacaacatagacaatcactatgtctat

SEQ ID NO: 15132 - DNA, 360 bp, Glycine max
agcttgcctgtccgatgcagcagtaatgatggcccgagttatgttggggaacggttacgaacccagaatgggtttaggcaaagagaacggcggcataactagcctgataaatgccaaaggaaatcgtgggaagtatggtttaggctataagcccactcaggcggatatgaagagaagcatcgcgggaaggaagagcggtggtcaaagctcgcgttggagacaagaaagtgaatgaagcccgccctgccacataagtagaagctttataagagcgggtctgggagacaaaggtcaagtggtcgcaatatgcgaagatgatgttccgagtacattgggattggtacgaccatgcccttctga

SEQ ID NO: 15133 - DNA, 283 bp, Glycine max
tccttcacaaataactaccataaggcataaacctagtaaaactacacatcatatctcccaaacacccaatacccacgaaattatgtgagaaagaagtctacccaaacctgaaatttgaagtcccacaacgtagaggtgcgcttcacgactccgaaaatggcttcctttcgcgatttggagcaaaaatggtgtgcaaaggttgaagctttgacggagcttcaatggtgaggaagatgaagagaatatcaacgagagagagggggagaatagcttctgaactttt

SEQ ID NO: 15134 - DNA, 444 bp, Glycine max
  unsure at all n locations
agcttcttatccaatgctcatcttggtggtgaagctccttcttccatggcttattccctagtggatggcgcctcctctcacctcttctcctttgtcttccgctgcatctccatggtggaaaatcaccatttaagaacctcattgaagctcanagatccagcctccatagaagccccataagcaagcttccatcaacatctcttctggatcagttcaagtggagggtacatccacttggttgttcaaagagaacaagggagggtacatctcttatgaatctttgcttgtaaaggtttttacaacgttgaaaagaaatctcaaggaccgcaagtcgcttggggactggatctaagcacgggttgttgccgaaccagtataaaactcttgtgtntgtcttcttcttccctacactctntaatttccgctgtgcactntaattatcgc

SEQ ID NO: 15135 - DNA, 257 bp, Glycine max
tgagtgtgctcacaactctattctcaagtacacagtgtaccatgtttattataacaggacttcttggagcttctgagaaactctgaaactcttgaaaactctgaactaactactcccaccctttactactactcttgagctctagagatctaagactgactactcctattttatactactactctgatgaactactactccccctgacaactgatcaaaagctctcaacttaagccaataagtaacttctctatgca

SEQ ID NO: 15136 - DNA, 412 bp, Glycine max
  unsure at all n locations
agcttgtcaagccctttagcttggacaagtgttgtacgggctatttctgctaagttgtccagagtggacacactntntgttntacaggtgaagtcagacgtattgcacagaanagatgtttgtatttgacaattctgccctattntgaccattggagaacacattgaaggcatgtgtttcattnttcttttgttgcaagtgagtgcaacacaagcacgctactcttgcatatgtgtcacccgtagagtggacacatactggagacgcggtgtgcggattagtggggttgcattgtggtgcaaacttccaaggcatcatttcagctcctgccagctaccgaagagttgtgcctccacttaaattatgtgtacgtttgatnntttatcaccaccactttgaatntctactctct

SEQ ID NO: 15137 - DNA, 382 bp, Glycine max
  unsure at all n locations
acaatgatcacaaaattcaagtntatctagtttatcaccacctaacagaatttgtttctcaagttcatgtaatcctctntcactaacatgacctaatctcanatgccaaagttttgttttatcaatcaatgtattactagctatcaatgcatgtccaacaatggtggaaccttcaagaataaacaagccattacttttattcttggtacccttagctatgattaaagatccatttgaaatcttaagaacaccatttaaaattctagttgaatatcatggatcatcaaacantgttatggaaataagatttcttttgagttctggaatggtaccttacattttcagtagatactctctattatcaaacatctttaatctcaca

SEQ ID NO: 15138 - DNA, 341 bp, Glycine max
ttcggcgattcagctcgtcccgggatctctaagtcacctgcagcatcaagcttatcctaacgtgtaatacaacaccgtcgatgaatatttgaatcagtttgtctgatttctgaggaactggtgcaatgcaattattgttgatctggtaagtgcgcaataaaacccgtaggcttgtatactttatgcaaaattgcttgcttttgtcctacccttcggaaaccatccacattgatgtgatcttcttttcacctacaagaatgagtaataatactctaatctgcagtccgaagcactggttacaaatatttacattattcttgaatacatgtcactggtcattt

SEQ ID NO: 15139 - DNA, 101 bp, Glycine max
acaactatatacgcaattacatgtacatactgatatatgtcatctactgatactagcaatcacactcttgcctatcaatctcttcttctcctcatacacat

SEQ ID NO: 15140 - DNA, 337 bp, Glycine max
  unsure at all n locations
agcttgtgaagaactaaactgtgagcaagctgaacccacattntgaaattcttgacaggagatatcttcatgtaaagtgtttgggtaggaagaatttattgtatgggttgagaccatgtaatttcagtcaatctctacatgacacattattaactctttctcctaaattgaaaaatgtagttaagtgtcacgtggagattgactgaaatcacatagtcccggatcatataataatttatcccangcaagtngtcttcaaaggccaatggacacaaaccgtcttagaagaacatctggttatgtcacacaagatcaacaagactattcccatcactta

SEQ ID NO: 15141 - DNA, 60 bp, Glycine max
gatattacgtatcttaccgctcacatgatctgtatactcacattgagtcctctgagggcg

SEQ ID NO: 15142 - DNA, 209 bp, Glycine max
gaacttcctgcttttattcgttgaccacagagtggtacctggagatatgtcgcggaggtcaagagaccttggggacgtcaggtggggtgctattgcccaaaaccaagcttgaccaatcccgacccaacctgggcatagtcggtcagtgagaacctgtgatgtacctaaacaggcgagctcctggcagtcaacagataaaaggaacaaag

SEQ ID NO: 15143 - DNA, 299 bp, Glycine max
  unsure at all n locations
cctacacctttatttacatgacaaggcaactagttgtgcatgctgaatgtagtgtatgactagaggcaatccatctgacttacaaacctttgatcctgagatagataggacatttcatagattatntaggcatcattntataccttttgatcatcctgagcattccattactggtgaatctgtgcattctgttattggtgattttgaacatcctgattntgagcattataattttgagcattctgattctaaatattctgatgttgaacattctaagaacatggcacaacctccaccct

SEQ ID NO: 15144 - DNA, 550 bp, Glycine max
  unsure at all n locations
tccccgccaccacgacacacaactacgaagacacgcgtgactgtggaccgctgccaccgtcccannancagacggccaactgaaccttggaaccttaaaaccgacgannacacgaacnccggaagcggaaaggccaacgcaccaccgtttatatatcgccagcgcacccctacaggaacgacggcacaataccgaaccccgagatcgacacgtgggcgcagcagcgggcgaacgacacagaacggcgaacgcgaagggaagagcgacgcataaagaaaagcaagggctacgagagcgcgacgcgcgacgcacagcacggaagtgccacacacaccggcaggcgaagaggcacgacgcgcgcacgagcgagaggcacgaagcggcgtcgcacgccaaagaggaggcgacggcgagccggacgcgacgaggtacaggaacacgcaaaagaggacacgcgggcagggaacgacgcgcgcgcaacgtgaaacacacacagagggaagaggcacggggacgtgaacagaacacggaaaagcggacgacacgaacg

SEQ ID NO: 15145 - DNA, 780 bp, Glycine max
  unsure at all n locations
acacctcaccgtcactcncacagacatctgtacnntaatacatctcttangcttgtattaatnntgctgcgttttaccaanacnccnnnnnaaagaggcggcgcgatttganncctttgtangncaactngnacnnancngncacnacnnaannacnnacncnacaacacgaaccccncaacgccncngaccaccacaccaccncactttattgatttttatctatagtcangcacctnataggaagcagatgcgggagactgtgttatagcaagactgacacctggacaacatagtacgtgtaatgtgactctacacaagtgactaccctgttgtatcgtcaagtagacagtacgcgtatgacacantgcacgactatatcagagagactagcatacgtcgatgcttgtgcattatctacgtagcatacatatatgtgcagcagtggaagagncgacttgtggcaatactatactcggcgatgcgtgatcaatcgatagaatgtcgcacatgacgggcgacacggacagngacgtcctatctcgtggataatacgngtgatatgagtaccctatggactgctncttctatgataccgctctatgacgtatcgattatcactagactgcgatatgataccacatcaggcacatcgtattctattacgggtggactctgacgtacgttctcgtgcgtgagcgcaagtgtagcgtcgatgatgcgtagcctganatagananctgcgactataatcggagtcggtacatatgtacgacagcg

SEQ ID NO: 15146 - DNA, 414 bp, Glycine max
  unsure at all n locations
agcttgtggactataccttcgaccgaacacggtcgtgtttctgtctaagcccggattcaagcgggctgtaacaccggctccgctatcctaacttgactggaggcggttgcggtggctttatcctctatggttatctgaagttntaacatgacctccgagatggaaaccatntgatcttttaaggccgatagatcggccttcatccgttcctgcacgccctcttcattatccattattctggatcgagtgttataagggtgccttggtgttttcttatgtatgatgaaattcctaaagacataaacaatggtgagtatgccacctcaacatgagtatgcaaatggatgatcagagcactcggatccaccccaagattttagatacgtaatgagtccaaacttctcatttataaaa

SEQ ID NO: 15147 - DNA, 295 bp, Glycine max
  unsure at all n locations
ccctgaacctaaatgattatctctagataccttgtttagattctaggagagcatatggttcanagcatatttaccccatatttgngggagtggaactgattggcatgcaaagaataaggtaaagcatcaacacacacaacaaataagttgtatgttaaanaaaaagagcaatcaaagaatatatgtgttgttgtaataaggtcaaaagcaaatgatagtgaataactagtgagcaagctaattgtattaaaaagatcacttggataagtctagaatttgtgctctcttagaatct

SEQ ID NO: 15148 - DNA, 363 bp, Glycine max
  unsure at all n locations
ctttaacaagctttgaacaatatacttggccttcatttaacttgctctgggcttggcggccacgctcaacaaaatactttcgacacctactgtacgttgctttgaccaaggctattatgggaatgttgcgacaatccttcaaaaccttattgatacattctgaaaagttggttgtcatgtggccttatcgacgtccttctctatcataaaccatcgtccatttttcctttgaaatgcgatcaatccatgttgctatggctggacttagtntacgaaatttttctaaattttgatcaaaaatgtgcttgcaaggagtgtangctgcataaaattatttatcaataacaattttaagtatatatg

SEQ ID NO: 15149 - DNA, 450 bp, Glycine max
  unsure at all n locations
gcacctccctaatggcattactnttaaatntaacaacaaggaactatttgcaacacttatgcaaagataaggactattntttacatttcanaaggatatggactaatttgcaaaatggttacaagacagggaccaaaattcctattcactcgataattaagtcataaaagtttaaagtatagggtattttcgtaaatgactatataactatcttacacatagaattntagtttaattagttggtgactaattaaagtatctaattatatgatgtagaataattacnatacagtggagtataacaccttaanaaaaattacagctcanactgacaaaggannatttgtgttgtgtcatcngtgcatgtatacatnntaattcagtagctatatattnttattcataacanttagcggtatatatatatatatatatatatatatatatata

SEQ ID NO: 15150 - DNA, 411 bp, Glycine max
  unsure at all n locations
agctgtcagcttaccgcttcaaaattttagatatcaactaactgttcagcttttagatacctttccacttttcaactagttntttagctagttttatcgaatatagtcataacaaaattaatctaaatagggaagagacaaaagaatcaaagaagatatcaataaatttaaatgaagagataaggaaagaagaatagaagtcttagggggtgtntgtgttcatggaatcttgatgaaatattcctaagaatatgaagatgagaatatatattctcatatntgtttcaaggttttttacaaaataatctcgagtactattgaatattgcgaatgttataatttctttctttaccatgctttcttgcatctatattctcatgagaaaggtgtgggaaaatgatattcccatga

SEQ ID NO: 15151 - DNA, 441 bp, Glycine max
  unsure at all n locations
ttcggcatcaaaaggaagctcgagaagcttctgccagaagtctgaggagagagggatggactcgtcaccgacgaagcttccgacgagatgctccgccgtgtccggcgttgacaacgccgaacccattgacttgttctgattgaagaanaaaatggttnttnttttggcggagttcaagataacggcattgcgcggaatcacggtgagatgcgaaaagggtttgaggtgggttttgaaaatgaggagagttggtgcagcacagacacaagaagaggaggaagaagcaagatatggcttcaaaaccaaggcttttgtttccttcccaaacaaactacttgtttgttcaatgactntntagttntggatacaatgcagtcaaatattattatgtcaagcagaactggcaactctcatatatatatatgtatatatatatatata

SEQ ID NO: 15152 - DNA, 480 bp, Glycine max
gcacacgctgcatgccaacttttagattattgtgtacccgacacatgtgacactatgcggcgagactgcgacggtgctaatctaacttacacggccacacaacaagaagaaataccgcatcgctcagttgccaccttacaacgtcgtcacctacgtccacaatccccttattcttattcatgctaaacaccgggtactcactcaacacgctcgatgctcccacaacacgcaatcgatcgagcattcgtacctcctacactatccacacgcggaaatacagggtaatgcataatactacgcgcataactcatacccttaccgcagccttccttactcatatagcccagatacagtctgcctcggtccaatataatacaccgtaggatcgaccccaagaatttaactcgcaaggtgcatagcacctattacttaccttctgaccgacgagagcaggactagaactgtcacaagcccaagacg

SEQ ID NO: 15153 - DNA, 447 bp, Glycine max
  unsure at all n locations
ccacgccccccgcggacatccaaagttgtcaaaacgantaatcancacaaaccccacccactgcgccggtgaacctgatccgtgaaagcgacaaacagccaacagggaaaccgagctgacagaccaacccacttgcttatctaatcacccagaggaaaccgggcaatcaatacaaaactcaaactgacccttgagctcagagcaagacaacggactatgtgaacagataaaacccccggcgcaaccacacacaaaaatgacacccaagcacaagacaccagcggagacacccatcaaaaggcaccccccacaaaccaccgcccctccaaagtccggcaccaacaaaggcccacaggagccgacgcgtgaccaaaacacagcccgagtcaccgacctcaaaagagaggaggaagacacaaatcgaggacacaaagagcactcaaaccg

SEQ ID NO: 15154 - DNA, 127 bp, Glycine max
tgatatcatcgaaatcttcatgatcccgactcgttggtggaggatgcatgaatgactatctattaatggggctgcgaattataatggacgatgtaggattggcgaatagcgatacgctataaatatg

SEQ ID NO: 15155 - DNA, 441 bp, Glycine max
  unsure at all n locations
cgcatgttttnggancatgaactatgatgactacccactgtattatcttgctcgactacccccgtgcaccggagaggattaaccnannttgaggcactccacttagaaacatccggcagagagggaagagaacccactggccctgctcacctaagatcgtcccgatgactatcaaccgacatatccgcatacccggctcaccacaccgtaaaaatctgttctttgcggaaatagggaagattgggcgctgaaagaggtaagacagtcatggcttggcatacccatttcggattggggattatgttcgtgccacatcgtcatcctccaagtcanagaccgaacttgatatgtacaagggaaacatgtcgaaggggcatttngatgattgcgaagatggggcgtatctgggacaaaattgtgtcattcttcagacagttgccg

SEQ ID NO: 15156 - DNA, 447 bp, Glycine max
  unsure at all n locations
agcttgcataatgaattaaatgtcaatatgtcaaagcaattgaagaagcatatgtaccgcataaagagcaaaggaaagtctcatggcattgtagagtgaccaagctgatgccctatgatcaaaacacaaggcagtgaccatgcattgaaagctttccaagaaacacattaagtcngtgctcaagtaaagaatnggaaacttcttgcttatgtctgttngaaacgagaaaacaagtatatgataatatagtgattctataagttcttatataaagagaacaagtggntaagataacttataacgatgctttacttgaatatgaaccatcctacctaaataagggtgctaccaattaaggacacataaagggcctgggatgcctgttgctntccaacagaagctagtctttccattttctctgtatatctccagagaatactttatttt

SEQ ID NO: 15157 - DNA, 338 bp, Glycine max
  unsure at all n locations
aatctattcatgtttccttngatgagtctaatgctattcctccaagaaaggatattntagatgatattgcaaaatctttagaacaaatgcatatntatggacaagattctaaagganaagggaaaggaagcaatgaagatcctctagaagaagccaaatcanatgatgaacttccaagagaatggaaagcttcaagagatcatccnncttgacacattattggtgatatctcanaaggggtaacaactagacattctcttaaagatttatgcaataatatggcttttgtgtctatgattgaacctaanaatntaaatgacgccataatagatgatcat

SEQ ID NO: 15158 - DNA, 257 bp, Glycine max
agcttctctaccaccctcattttcttcccctttggcaacatcaaatagtcaaagttcgtgggaatcaatacagataaaataatgaagtggacaaagatcaattataagtcataaccaaccaaaatcataaataagtcataacccaaatataattcaaacagtcataattccaaaccacatagaaatctaacataaaagactcaagtccaagtactaaaagataaattaagtgcagaaaatgataacttaactaccat

SEQ ID NO: 15159 - DNA, 540 bp, Glycine max
  unsure at all n locations
ttgcacatgatccaatcgttangcgcctatgatactcagcttcaanaagtcaaactacaaaccatttgttaatgaaataaccaatatactgcaacaatttatcaacccccaacaaacgggtcttcataattctctattagaccagtatgcattcctataacacaagcctcaatttgcaaacacaagtagatagaagctcacattccttgcaacattgacagttcataccaagactcagaannaccacaagccaccaantaattcaatataacactaaacaataattaagaaacgagcatccaccatcttgagttgagaaacaccctattcaaccaaagacggcaaacacttacaaatgcttctacctgatattganatcgatacgtanatagtcaccatcagaactcttgtaacaattacagatgtcgnggtgcctacagacaatactacttagttcctgaaacaagggtgcaagataacattaaatgaaacttaacaaccagatcanacttcaaattttgacaaacctaatagaagata

SEQ ID NO: 15160 - DNA, 429 bp, Glycine max
  unsure at all n locations
tgctcccaatattnttttntggatccacaactgctcctccctaaatatataaaataaaaattgacttanatataattntagtcttttaaatttggataattattcttttagtgtttttattttcagaaaagcatttttaaaaaatgaaattaaaaaattattttttttggttaaaattatcatatttaactttntgaaatcaccataaacacaataaacaaagaggaaattaaaataattttttgaanatntaaaagactaataaaaataaatntatttttaaaaaactaaaaaaataattacttanatttagaagactaanaacatatttaattacctaaatntacacagcagtcgtcgttgtgtaaattaccataacgcattngcagtaaatgaaatatgatgatataatatgtagcgtanattact

SEQ ID NO: 15161 - DNA, 439 bp, Glycine max
  unsure at all n locations
ttattgtagttgctntagaacttgctcttttaggcttcaattntcttagattaataatatataaacattcttatatactattttgttggtccttattataaggtccaattaactaattatcaaaattaagaaaattggtgaatttagttgagggcattaaagacattnttgtgaaaaaaataatacaaaggacattntangttgaaccttataataaggatcaagtgacacttgtaatgtggatattataataagcattagatggagtaccatattaacacccataanttttctttcactctttttctatcatgtaatatcaattaaccatacttgatntctttctcttctctctttatgtgtcaattagtggtcaatgaatgtntntntcatttcttaactcanattgaaaatagaaatatttatttttaacaactaa

SEQ ID NO: 15162 - DNA, 431 bp, Glycine max
  unsure at all n locations
aagaagaatggtctcagcaaactccttatttctagaaagaaattatatcaatagaccttcaatctttaatggagagggttatcactactggaaaacccgaatgccaattcttattgaggcaatagacttgagtatttgggaagccatagaaataggtgcatatatacccaccacagtagaaagaattaccatagatggttgcacatcaagtgaaagcataaccatagagaaacctagagatagatggtctgaagacgatagaatatgagtaccatacaatctaccagcccaaaacataataacatcttgcctgagaatggatgaatatttcanggtttcaaatngtaagagtgctaaaggaatgtggacactctacantaacacatgatggactacaaatgtatagatctggataacacactacccatgag

SEQ ID NO: 15163 - DNA, 557 bp, Glycine max
  unsure at all n locations
gggaccatgnnncttttcntttcagggtctgacctgaatacgtgtccccnanctgaagtgacttgtacagaccccgccacncnncgancanannnganncngannaggatgtgagangagnagctacgnnnngagaagggnggggctnaggggannnngaaanggnngaangnnnngannnnnggnnntnnggggnantggnaannactggtggccatacccagntatacctactatcaataacactcatatttgaaccctggntnggagagaaagaaaaagctanatggactaatatgacccattctagtttcaaatccgctcctactaccatanaanggtcattcanagactgagccagctatctgattacaggatagacttggggagatacctggtgtcacgacacctgngaaggaggatcttangtctggccagaatgatcaacatgtgagnnatgacactcaacaaagtggtcagacagatgttgtgcatggtggtcattangatctngcttcctgctgcatgtngctttntacgacgatacctaaccacgn

SEQ ID NO: 15164 - DNA, 563 bp, Glycine max
  unsure at all n locations
ttgaaacctttggaancactgttgagaccctagaaangccgcaccagtctgaagatatacagtacgcgatataggcttttattttatcgtggatgtacatcnatatgtttactacgagaggcgtcggactgggattatagcgctcatcgtatacacgctcactgtatatccatagcattatacacataaaaccgtcaagctgatcgaacaacggtgtgacacataagacagatcgtattgtgctactatgtgctatcacatcgtatgaacagtatcgcgtcaacgatacaatatgtagtctcagacgctcttcatctgtagatgtgcgtacgatcaggcacaagtacactgtctttccattgcatcaatcggaacgagaataaccatattacgtttcactgtcttcgactcacaactaatcgtatatatgttgtgagccgatgtctcgtgatctctatgatcgtgattctcatcacgctaacgaacatgattaatcaccaacatctacgcaacaaacatcctctatacccacgtcctatcgaaatgagatcgcctacctgccg

SEQ ID NO: 15165 - DNA, 167 bp, Glycine max
aatggagagaataagaaggagggagaaacccatgctatgactgtcgttcctacatggccaaatttcccactagctcaacaatatcaatacttggccaatatcagtccttctcattacccaccaccctatcagccaagaacacccaatcatccataaaggccacccct

SEQ ID NO: 15166 - DNA, 456 bp, Glycine max
  unsure at all n locations
tttgaagatttggtctcttgcagtgaaaagatccgtgtgggtcttgaaaaaggcaaatttagtcatcctgcttggaccaatgagaaaactggggccaataaagagggtgaggatgagggagaaacccatgctgtgacttgccattctgtgcggcccagtttcccaccaacccaaccatggccttactcaacccttcttcttaaccacccgccaattatccataaaggccatcccttaatcaaccacaaaagttgtctaccgcactttcaatgacgaacaccacctttagcacaaaccaaaaaacacccacccagaaatgatatttgtagtgagaaagcctgtagaattcaccccaattccagtgtcctatgctcgacttgctccatatctacttgatattcaatggtagccataccctagccanggtcatcaacctcatttcttcgagatacgacn

SEQ ID NO: 15167 - DNA, 564 bp, Glycine max
  unsure at all n locations
cgcnactatttggggccccngnnnnnaacttgatgaccgnatttgtatgtanccgnnncncnggattagtaatgcanntctnancncgcnggacnanggnggcgaaacgggcgaaaggacatatcatctattcccatttcacaagtcaggcataagcacaccatccccagtngccaacctttaaattgagctcacgtactcctgcgtagctcttattcctcgtcctctcagcactgggtccccatcaacccctccaagctttcacaaaatccaaacaattcaattccatttgtcatgaaactaccttacacaatgaanaacagagtagaggcagaacctttgcacaagaaatcattcaaatccacagaagttttctaacctcatacctncananatcctcttcgttagattcgtaaccatggatcgccnntgaactttactggaggtnnctatacagaaatctannatttgacccgngtgatctgctagagaatgcctagacacgagatgactacctttccnggactagcactgacaaccattntctgctaatggcannattcg

SEQ ID NO: 15168 - DNA, 334 bp, Glycine max
agcttcaacatcagactcacttcaggtgctggaattacttcacatggacttgatggggcctatgcaagttgaaagccttagaggaaagaggtatgcctatgtttgtgtggatgattactccagatttacctgggtcaactttatcagagaaaaatcagacacctttgaagtattcaaggagttgagtctaagacttcaaagagaaaaagactgtgtcatcaagagaatcaggagtgaccatggcagagagtttgaaaacagcaggttcactgaattctgcacatctgaaggcatcactcatgagttctctgcagccattacaccacaacagaat

SEQ ID NO: 15169 - DNA, 496 bp, Glycine max
  unsure at all n locations
ccagagatggagtccacggaggaaatgcttaccacctcanaagactggatagcggtttctaatgactcctctgcggcttccacataaggcatagaggatgggcagctcaccaagatgtcttcttcgcctgatacgatgaccagatgcccttccactacgaatntcaactnttggtggagtgtagagggaacaacccccactgagtggatccacgggcgccccaacagacagctgtanggngggttaatatccattatntggaaggtgacttgacaggtgtgaagggctatctgtactgngagatcgatctcttccctaacctctcggcgggtgccgtcgaaggcacgaaccaccattgaactcggctttaagtgggaagcatttgatggaatttctcanagtgctcttangcatcacgttaactggaaccatatcgatgacactttgctanacatggtcataccttactgaccttgcaagcttatatgcctctccg

SEQ ID NO: 15170 - DNA, 211 bp, Glycine max
  unsure at all n locations
acctctgctgncggtcgggccgtcgtcatattattatgtttacacatatattcgtatttctgctactcatactgcctattattcttattcacgcgcgcaaccacgtgtataaggcacctatttctggctaatacattaccaccgcgtcctgcgcttatatgcatagtgtttgatttatcctgcttcctgctacttcaatcctaaatcaccc

SEQ ID NO: 15171 - DNA, 409 bp, Glycine max
  unsure at all n locations
agctgtaagacatattgctgcatcgttatggatatgtcgcatgatcatcccatctgttgacgtgggtaccttggtgatcagatagcttctcctatctctgacggaacgactggaatctgtgattggatatcatagcctattgtgagtaattagctccaactcatgagatgatccctcagatctgggacatagcagacattctgatatgacacatgtcttacatctttcgaatacacgaagatcttacattttccttgtacaagaatcttagaattatcaccanatgagacattgtcacttactgattcatcaagatccacgaacatgcttctgttctacacatatggttgcttgcaccaatgtcaaaggatcatgtgttttcttggctaccttcattacctccacatgc

SEQ ID NO: 15172 - DNA, 101 bp, Glycine max
  unsure at all n locations
atgaatattttctacgaatgacaaatggttcacctaagttgaagcgacctactgactggtgagcccaattgagattgtgtggatataatcnacctcaggat

SEQ ID NO: 15173 - DNA, 398 bp, Glycine max
  unsure at all n locations
agctntataatggactttctcttcattgctactagcatcagcaatagtaacagacttctgtgtcaatataacaagatcaagatccataacactgaggtgtaattggacttactcattccagtcagagaagttaagcccattaaaattggcacaaatgatacataagaattcagtgaattgtgaacatgtgttgcataataacattcacataagtgttttgagacatacaatacatgtcatacatatgatttattcacataatgatcaatgtatattgatgctctcctttgggtgatacagttgtagaagcacgcttcatgatgaatcaagattgattcanagaagttttgacgataacaaaggtgacgacaaaaagcttcgtgatgatctcaagaatc

SEQ ID NO: 15174 - DNA, 328 bp, Glycine max
  unsure at all n locations
gtgttgttcgggctgcttctgtcaagtctgccaaggtggacatgctattggttatgcatgtgaggtctaacatgtcatgtgagggaagcctgtatattaggcaactctgtccttttctaacagttggagaatgcattgaagacaaactttatgttttgtctgataatgcagctgcgtgtagtgcacacgtagtactattgcacacgtgtcactcgtggagtgggcacgtactanatacgtgttgcgtgggatatgaagttgatttgcggtctcctctctgcagtgaccaccgccacttcgaaattctatcttctttctctcgacagat

SEQ ID NO: 15175 - DNA, 522 bp, Glycine max
  unsure at all n locations
ccaacacccaaccacttcacatctcagaagcggcgctgttctgactaatcgtataaccgcacacaccaccaacgagcggcgtgaaccctgaanacctgcgatatcggcaaacagcgagacccgagatcactgaggcaccgcagcatgcaactgttaaaacttggaaaaaaacacaagcggtcgccggcgccggggttgagaccaccacgaagagaagacagaaccgtgatgcataacgcaacaggcggcacaacggcagtaacaagaaggcatatcgacaagccgagggctcagcgctaacttccaagaaacacctgagtgcactagaaggacgtgagctgaacaccaccaattatacacggcgtgacacgaatgacacatcgaaacgccactccgacagcggggcccaaaggaagaaccggcgaaccgctgaagagagctagacttagtccagcgcactacatccggcacagaacgcaaagaccagaaatgaggaagagatggtccacatcgacacacaan

SEQ ID NO: 15176 - DNA, 579 bp, Glycine max
  unsure at all n locations
acactctcctcacnncntagataaacattntgctgcgttgaatttgaatnttctgtaacaacgaancnnnnccaacctcagacgcgttgaaccttganaactgctcaacacgcgaactacacaaactcatgctttgagacagcccacagcaaccaaaagtctttccctctcatctaatacactattgcaagcatatcaatagtgaagccccaaggggaatatgaagtgaagcttatagtattctatgaccaattaaggttagagatccatgcactgtacggctccagggcatatctatagtaaggatctctgctctgaatatttatgtcgtcgtgatcctaagtcaatactctttctaacatcttcaccgtataaagacctgaccagttgacttttataacatatcatcacagtacaaaactcatatcaagactcaatgatgctagaagtcaacatacattgccttactagtatacaaaatgaacctatccaactttctaattatatcataaacctagtatcccaaacctcctcatattcccatactttctaataagcattgcaatgaatggcataacn

SEQ ID NO: 15177 - DNA, 244 bp, Glycine max
  unsure at all n locations
agcttactcattcagttttaggagttttatgatgatacttgtgatgtttatgtgctgaaattgttgatggaaaactgctaaggatgaatggtagagttaacctaaggttagaaagtgagaatgtagtgttatgaatggaanaagaatgaggctttgataattggaacgccaaatctggatttagtggtatttggaggttaaagggagttaatcctagtttgaaatgtcatttaagacttatgag

SEQ ID NO: 15178 - DNA, 113 bp, Glycine max
  unsure at all n locations
ttccattattttattcaagctctgccacatgtccctattcgattggagcaaaagggcccactttctctntttgactgtgacccatactcagtcacaaaagtgagaaaaatctg

SEQ ID NO: 15179 - DNA, 577 bp, Glycine max
  unsure at all n locations
cccctcacatatcgtaccctctacctttaacantctagcacctgtgaatggtganctactacactcatcccaacaggactggttgaaccttgatccccctgaacggcgaatcactcgccccgggatccctagatcgaactgcagcatgcaagcttgttatagaactgacgaaaaatcaagaacaagcgtgtgcgcacatcgctcgagtatatgatatacactccacaatgtttgaagtagaggagagcttcaaccctataacgcaacgtggcggacacaagtgggcagtaaacttgaatggtcgacattgtcaatgcagaaagtattctgcgctgtactatccatgttcacacatgattgcagctagtggttacgtgagcaagaactacaaccaatatatagcaagtgtttatacaaacgaacgcattctaacagctcactccgcacaatgcgggcctctgtgaatgaacggctattctcttctgagacgctggaccttatcctgcccaatacattcgagcgaagtcggcaaatcacaaggtaagaatgaatggatgggtcacctctggcccgaccn

SEQ ID NO: 15180 - DNA, 286 bp, Glycine max
  unsure at all n locations
atttcactctctctgtgcaagggatatttctcttactgcatacattatnttgcaaatcccaacggtggttatgtgtggaaacaagtttctaacctggtgttcaaattttacgaatatccaacggttaacgagtccaacatcatagttttaatgggacaagttctggtgtatgtgggaaaaatagagcactgtgcgagggacattgctctcagcacatacattattntgaaaatcccaatggtggggatgtgagaaaatgagttctgaactctgtgttcaaatttca

SEQ ID NO: 15181 - DNA, 632 bp, Glycine max
  unsure at all n locations
tctcaactctctctctaantntgtcccattctcgtcntcgctctcatactatatgtcacttcatcgtgcacttatgctgtttactcttcaccatcgtcgcacgacgactgatcacatttgataccacgtctgatatcggcgaataccgctcgtccccgcgattctctatagtcaaactgcatgcattgcaactttttataaaaatattagtaatttctggtacggaatcatanaattttagctcgtgataattcaaagctgatataatggtgatcctagactccatagaactaagtaaaaggggtaattctaattactatgagaattaaggggatgacattttcgtaaatgcctatacaactacgttaaacaatggaattatcttgaattagttggtgacccaatataagcgtctaattttatgatgcatgataattctaatacggtagaagtggtacacctcaaaaaaatacatctatactgaaaagaaactttttgtcatgcacctgagcatcattaaattaactctagtaggtaatgtttctatcatagaattccatgcttatatgctacattagtggaacaatattctttagctaattgacagacataggaactgctgaacaaaattt

SEQ ID NO: 15182 - DNA, 450 bp, Glycine max
  unsure at all n locations
ntatggttatntctttcgccttgntatttggcttttattgcttagtactttttgtatggttgtcttggatgtntacaattattgtcttggttgtgttggctctnttaactntgattggatgattagacttgttggttatttatggttgaatcattatggataattgtgctatgatttattgtgcttagtcctttctcatacgttttggctttttatgttgcaaagggggagcaacttaagggagaattatcatgaactangcatanattccatcttaaagggagtaggggtgtgacacacatntatcacggatatcattatcttgtttcagatattgcatcatcaaaaggggatattgagaacatatatgattgngtttcatgatgccagatgacgcaatcaagtangaatcagaatgcaaaagaacatgtcttngtanatctagaagag

SEQ ID NO: 15183 - DNA, 403 bp, Glycine max
  unsure at all n locations
agctttctaaagttgtctggttntctataccttgaaaacaaaagtgtgatattcatctttttcattcccttctcccttttccaaaagaacaaaggactaaccgcctgaattcttttgtgtcccccttctcccttgtcaaagaattcaaaacgacacagtctgagaattcttttgattcttccctttcccataaacaaaagatttcaaaggactaaccgcctgagaattcttttgtttcccccttcacaaagtctcgaaagactaaccgcctgagaactntgtcttaacacattggagggtacatcctttgtggtacaagtagagggtacatctacttgngtggtgtgactgaaacaagagaaggacatctcttgtggatcagtctagtggagggacatccact

SEQ ID NO: 15184 - DNA, 285 bp, Glycine max
  unsure at all n locations
atctatacattccaatccactcaattaatacaatttcttattcatttcanacacaaacattcatttcatacaaaacaaaccattgaatatcatattcagtcagttcactgttcaaacatgcttttgtacaagctacaaacactcaaacaatagaaatttanaagactagaatntanaagactaataaagcataaactaaataattgataaaataaaacttttcataatttgcagaaattntaaaaaaaaaattgtgcggaatttaaaactcctggtcatcctact

SEQ ID NO: 15185 - DNA, 433 bp, Glycine max
  unsure at all n locations
agcttgagcaagtgcttttctttgtcttttacagctcagcctctaccaaatggacatactcctttgagggtggaggatcatacacttcaacaaccattgcaatangagcaatntcagcttcaacatgaaaatccaattcttcaatgataggttgtacatgatgagttaaagtgaatctggagtatggcaagaacaccatataggagaatgtgtgttcaaatacagtagagaactcccttgtncatatgcaaaccatgttganaggattttcttanatgaagcatgtatggtcaaagtcttaataacaatgccccatctcacaatgaactgaatttgcaagaggcttctcatcaagttccaaactagagcaatgatcctttagtctgtagaacctattcatggcataccaatccagacttgtaagctaaatctt

SEQ ID NO: 15186 - DNA, 259 bp, Glycine max
tacatgtgtctgtcagatgcatggaccatgtcgtcgctaaagtgctcatcgacaatggttcaagtttaaatgtgatgccaaagaccaccttggagaaacttccttttaatgcgtcacgtctaaaaccaagttcgatggtagtacgagcctttgacggtagtcggcgggaggtgatgggggaaatcgacatcctcattcagataggcccccacacttgcaatgtggttttcaagtgatggacataaatcccgcctacagc

SEQ ID NO: 15187 - DNA, 268 bp, Glycine max
  unsure at all n locations
agcttcattgcctatcaagccaacttacaacagcaagccccaagagactcagcataaggatgcacagaccaaagttgcgtatgtaaaaaaattgtatgaccaagtgaaggtgcaaattgcaaagaagaatgaaagctatgccaagcaagcccaaaagaaaaggaaggaagtggtacttgaacccggtgatgatcttggacatttgaggacaaatgtnttccaagatggagggaatgatgagaatcatganacaggccaaatacagtct

SEQ ID NO: 15188 - DNA, 399 bp, Glycine max
  unsure at all n locations
ttcttggtggtgaagctccttcttccttggcttattccctagtggatggtgcctcccctatcctcttctcctttgccttccgctgcatctccatgatgaanaatcaccattgaaggacctcattgaagatcaaagatccagcctccatagaagctccacaagcaagcttccatcaagttatgaccatttgaatttctcgagatcttccgtggttcaatttcnggcgtctccatatgtcatgtgcctgaatcggacctccgtaagaaaatntatgaccatttgaacttctctagagcttccgttggttaatttcgagcttctcgatatctgatgtgcctgaatcggacatccgagtgaannagtggacaatttaatttctcagagcttcgttgtcaattt

SEQ ID NO: 15189 - DNA, 496 bp, Glycine max
  unsure at all n locations
tgcgaagacttgagccgtggaaacccgttgaaaccnctgagacacagatactcttactcgcctgcgggatgcttacacgtgaggtgatatgtttcacgactgatccagtgctttctctagagttgtacagctcaggctctacgatacaggcattcactcactttgtagggatggagagacacatacgtctccatgcagctcctgtcctcccgtgacctattgtagctacatacactgaaacacacatcttggatgatgtggagtcatagccgatatattgatgccggtatgcaagacccacccctgctactgtgcttcataccgctagacccctttgcttaggaaacctgtgatatgtctcttatatgcacagtgtgccaaggctcatacagagaccttaacgtgactcggatcaggagcctgatcaatgtcacataagacgtccctaacccataacttatctagaaccaaacaagtagcctgtatcatcgtaccg

SEQ ID NO: 15190 - DNA, 502 bp, Glycine max
  unsure at all n locations
cacaccgctcttcactctctacatcttgcggttcgctgtcaaatctaanactacnnncannnnccannaagcgagcccgttgaaccatgataatcacaccattanaccaacctccgacgcgacgacaagaatcacatgtttgccatcatctccaagagtgtttttgacaatgcactcttcatgacgtagtgatgcaaagaagaacaactagctcatacgctcacatagtcagattgttcacaacacacctgagtagaatctcaaaacacccagctacatgaagggagcatcttcatgacatgcagcgacacatagggtgaaaggatatcaaacactcatcgagacattccaagacctgagacgaacacaagttaagacggccccagtaataaaactgtgatgtacccgttccgcaggaacaacaaaatctagatatccgcgtccttatagtattggatgcacatagcagactgactggccaatcaagaacgatcgtgcgacg

SEQ ID NO: 15191 - DNA, 570 bp, Glycine max
  unsure at all n locations
ncgagacggcgagtctcattcatattaatctggcgngacganttgaaacaacnananntnagtaaaaacaaccagatcncncnnnnnnaagaagaggangccgtgagccccttgaactaccgtcgaancacacncggaacccggagatccgctagagacgacctgcaagcatgcangcctcaccttctggttctcctctattnatgcgcatgagaaaacacgctctatcttcgactcccactccaacaatgcctccgaacattcttaccttaaaaggaggaacgttgagttaatgcccccaaatcggctaagtctaagaacaccaacatatcctcatttgctacttacctcctcattatgacctctatcaccattcgaccaacctccatggaagcacatccgtagatcataacctcacaaagtcgataaagctgcttcgaatgcaacccactcatctagatgatcccgcacccaacaacagccaacgaatacacacctggtgaggataatcctcacccgcaatgaacccaatatggtatgttatgaaactcagcatacccgtaaaccatc

SEQ ID NO: 15192 - DNA, 407 bp, Glycine max
  unsure at all n locations
cccccctctttcatactatactatagcaattacnccnnttcncagagcgttggctgaacctagaaacactactgatgaccgaattgcaattcaaggctacttttcaatacatcagccataagttaaccttaatgcacagtcctcagaatcatggaaattacaactgttagtcatggctaaagataaaactacatgtaacgaacctcataatattgactgattggatggttgtcatcggcctatatatgaaggcaaatgacaccaacctaagattatatgcatacttgtacaggactcattaatctaattcaacctgaagaacaagacctataaatacaagtataccgaccagtgtccacgtgtttgatgatgctgatgcaagagtcttatatcaatgccactacacc

SEQ ID NO: 15193 - DNA, 491 bp, Glycine max
  unsure at all n locations
accgaaccaccacctaccgacaacagaaccaaaagaanataccnncaagggaggtgagcctgaacctaaancccgaccgaagcctaagaaccgcagcggcagccgcaaacttttgaattattacgactaccaganacgacggccgaggcgaaaagacccgccgggacaaaacccacagagaaacaccacaacgctagactagaaccggggccacagcgatagaaggatgagaaccctacagaaggaggcgaaccgtacccaagtgcaccacaaggaaaagaacagcccacaagcaaagacgacccaccggatgcgcggaccgaccaaagacacatggaagaagcgtgcacaccaagaaaatgcaatactaacggggcaccgaacagcgcgacgacgtgcaaccaaagaaacataggcacaaaccggagagaaaaaggagacagaagtcagacaaaagccaagcaacgcaacccggccgccaagtacacacc

SEQ ID NO: 15194 - DNA, 662 bp, Glycine max
  unsure at all n locations
gactacgctcancnttccnctctatctctgtatcaannaggtgtaccgttacgaaatnngnctcctnnncancnnnnnnnancccgacgagcggaattgatccctttgacaccgtgcgctatccatacatcaagcagntctacgatangatagcatctataactatcagcaaactggtactcgtttttttctatcttatttatantcacacttcgtcgaacgtctgatgtgtgcgctcttgactgatcatactcaacgcagctcatcctacccatactcactacaggtaatcacgtgactcgctagtctaagatataacagactatgatacttcctattcactatacaacgaacaatcgtgggactctctatctcacaatacacatcattcgccgctagtttatagaatattcataattatgatcctgatcggatagaagatccacagttctcggctcatatataatctctcctaagtacgatcgtctgaatatgacactgttgagatagatgnactcatcttctgatcgactcttacctgactatgacctctagagatcttctaagaccgcgattataagcactcgcgtccgtatactagtggtctgatatcgtttcgtcgactttctgacagcactgatcgttgttctctacaaagagcg

SEQ ID NO: 15195 - DNA, 172 bp, Glycine max
agctgctgctgctggacatgtttaagacttgtcagtgctatacataacatcatagagtattatgatattccattccatgaaccttctataagatcagagatatctttgtataccttatgtcaccggtgactattgctgatgcatgcgccttgcttgaactctttaatcttgc

SEQ ID NO: 15196 - DNA, 257 bp, Glycine max
tagctaggatattgatagcatgtactgtaatccatttatactttggaacttaagtgctctggtgatgaatatcataccacaatcgctataatattccaacacatagatctcttattgaaagaatatggatacaatttttaaaacgtgaacaataagatttggaaatatatattaccatattgacttgattaattcgttaccggcaaatataaaactgtactattgcaattataattgtcacagcgtaagacttgaat

SEQ ID NO: 15197 - DNA, 143 bp, Glycine max
  unsure at all n locations
cgcttgtataatgttctgacatgacacatancacggtttggattggtgcaatggtaaaacggatgctctacattattttcatgtaacaaatgcgaatatgatgatcttgaaactctatgcaaaatctggcatgcatgcaccta

SEQ ID NO: 15198 - DNA, 526 bp, Glycine max
  unsure at all n locations
ctccgccttcccctacatctccaaactacgtagatcgcataactgactcacnncacccaagtggggggtgtacatgaaactcaantncacaaanacacaacaggacacaacaaccctcttgcatccgaccagctttttcgctctgatgttccaactgcactgagtgcttacaataatacactatgtctcttgcatcagatcatccaaattgtcctggaatcggctggagccaaactcgtcgaagaagctacgcccaatgatatgcatgaatctgctatgtctctctctcccagtcattgctaacgagactaggatctactgcatatatacagtttttgcagcttaaatgcattcctagaatgataatgcatacgacggccagtagctcatataaccacgctggtaacaacagagattcctgtgtgtctaatataaccagaggatgtcgcccacgcatctgcagctatattcgggacactgcatgactaaataagatgtggaaccatatcatgaggtcgtgcaaacc

SEQ ID NO: 15199 - DNA, 490 bp, Glycine max
  unsure at all n locations
ccactcatgcactcaccaccctatgtacaagcttcgcgatcgacgatggcctatantacagagacagtgaacctgaaccttgaaccgcgaacacgggcccggaacttgaaagccgagcatgcaacttttaatattcccctgaaaagagcgggaaggcgcggaatcagaaaccacggccactccctaaacagtatatatgctaggagaaatggacggtctagagaccgcgcgtagagggagaacgatactcacccgcaaaaggagaaccaacctagagaatcgcatctcatgcaagctctgattagacacacaacaccagcacagatggcaaaaacgggcaaatcaacggaaagggaaaggaaagactacagcataggatggacgaaacaaagatagatcacgcgatcaagtgacgacacaatgcatcatcggacacggcagcttaccttaccaagaagtcagggtccactgaaataccaacacatgaagc

SEQ ID NO: 15200 - DNA, 701 bp, Glycine max
  unsure at all n locations
tcactccgcctctccctnctatantccaacaaatgagatacgttctnagtttcggattcganngnnnaaaannnncccccncacccgctgagcgattgnacgcattgatacccgatcgaaacatccgacaatatantatactncaagcntactngtacagntttatgatntgggacacgagctatatctaccctactgctacngngcttttactgattgtcatgcaccgataattntgctgaatcccgagatctagatgtcaccataggctatagaaaagtgaagctcatacacattatagcatcgaatgcacgtctcgtgtgtacgaacgagtngtatcgaatcagaatcataacattgtaggacgtatacacttcacatatcgcggattgcatgccactatgagagacaagcgtcagaccgactataatagtcagacattagcgatcatatgatctttaagcacacacaacatatatcagcgccagagacatcaatgagctatgtgtagactatgttatagacacttctataacattcaaactagacaattacgaatactacgacagtcgagaatgggaagacaatatgatatgacacaatactccacgccgaacaagatcgacgtaagatcatcatcgcataaatatcgacatactcccgacgtcgcatacgatagaaactacctcaactcccgatcc

SEQ ID NO: 15201 - DNA, 306 bp, Glycine max
agctttgtatgtgtgttatccaccatctttccatagaaaggttgcggttaggggcgacactaaagcccctccaaagtgctctgcatgggtataccaccaactgcttgcctcttatcggcatatccgaggaaaggctcgaagtcagctagattgtggtagggaatatcatgtgtctcccccgtgggttgagagacatgtacatgatgaagttgtcggctcttaatgagtatgggagcaaagtcaatgacatacctatttggagtgtacgccatatctggtggtgtatggttgggaggcaagccatat

SEQ ID NO: 15202 - DNA, 559 bp, Glycine max
  unsure at all n locations
ccacgcatcccnctnattctttanttaagtaatcgttgtcataaaacacaccntcnnccncaagagtgcgatttgaacatgaaacnctgaaangcacactaanaactcagcgtagaaccttacatacctccnaaaatagcctcagttctaagtttctctttcatgatgtatagctctggctcacatgaagctattacagaaaggataattattgcaattacgttagatgaacctgcgtggcgacctgataaaatctcattaaggntaattatagggtctctattgcatataattccgactgtacaagacaacctccaatggctaatagtttacaggtccatagaagccctcatatgaactacttgatatatcggctttaatgttatatacctagaaactagataattttaactctcatgttccctgtactcattgaatgcatagacctatatgtgacacatatctatcttattaccgataaattgtgatgatatatgcttctatgtgacgcacctatagtcttagtgatgcttaactaatatactatattgtctacccg

SEQ ID NO: 15203 - DNA, 391 bp, Glycine max
  unsure at all n locations
agcttgtataatggctatacatgatacatgtcaagggttggtttggttcaaagataaaaaggatgccccacactatttccatgacacaaatgcaaaaatgatgatttggaaactnttatgcaaaactggtcatgcatgcacctatgtggacactcaagtgtcaaacttttatggtcatgtgatgctaaggctcaagattcatttactccattttaaatcaacccaatgtttccaaaatatgtgcttttatcaatttgggcattcctccaagtacatctcgagcatgcgggaagattncacagcattcacccttcaggtgtagacacgtatgtttcacaaactagctatgatcagcgaatatttctattaaagaagaattgggaatcatctc

SEQ ID NO: 15204 - DNA, 258 bp, Glycine max
  unsure at all n locations
ccttctcgctaagccaatcttgtggcttatcgagcgtccgctaagcgcaacactcctgngctaagtgcgaggaagaatccaaaagaagatgagatgaacaggttcgctaagcacactgcttcatctcactaagtgcaccacttcagttcatcctctaagcgaganagctgcgataagccagaaatcactaatgtgcgctaagcggttcatacgtgcgctaagcgcacgagcacgaacaaggccacctatttaagcctg

SEQ ID NO: 15205 - DNA, 520 bp, Glycine max
  unsure at all n locations
atgagtacaancttganncccgtttggatnccancagttganttacagttngaatactaccggcgaanccgaggatcgtctacagtcttcctgcgagcatgcacgctgttatgcaacttcttattgaatgtttgtgcttcancggatgaaccatgcagcctatggcttcatgaacactaattactgagacatttctggttgccgaggtgagaggtggaggtgcacattacttgaggaagcccttcttgcttgccgaattctttgcgttacaagacaacactacaacataggtgtttgaagacacccatcatacatgcgcatttctatgggaatcgctgaaggtccttgcacattgttgagcttctacagatcgaacatctgttctacaactcacacttaactcttgctgtcctttatatgttgaaatcatgtatactgagagcatgtcaggatggaacacaatgctcttggaaacaaattcaacgtaaagggcaagagaagtgtttaacctgtctgaatc

SEQ ID NO: 15206 - DNA, 505 bp, Glycine max
  unsure at all n locations
gcgacatttgacccttgaacatgagtacatcgaacatcnanactcatcttctcattgatccagctatgatgaacatacagcctatcttattcatatctcnctctttttacactggcaccagacacttgatcataggcctctctaaacaatgcctaacacgatacaaaggaactattcaccactaaatacgctgagtctcacatggtggtatgcaaatcatgttacactccactcgttcatactgagaaatttaccatccatagaatgcgctgataaccctgatcatatgacttataggagcttgattggatatttaacgatctctatacacgaggaccaacatctatttgctacaagactaacttgaatgttgttgccttcaacacgcatcgtcttccaacactacgtggtcagggacaccatcttcaacacagattatttccatacgatcactagggatactgaccatttttgtagcttaatacccgcatactttaaaaacact

SEQ ID NO: 15207 - DNA, 431 bp, Glycine max
tatgttgttacctttgaagaaggtcttcccatcccacggatggtttacaagttctactttctgacctctgcgaagcatttcttccgttaagtagagcttggatccattgggtaggttctatcaagaattatcttgatattaagttcccttctgatatgcaaagttggaggataagtattgcgtttgtatgaacatctatagaaagaagcctgcctagctcagtcaactcatcaagtagataactttgtgtctgtaagggtaaccaaaaaaaatctttgtatgggccgccatagaaaaatgttcttttgccaatagacctttgaaagattgacttccgttagatagatccatgctacttctttaagacgaaatgctcaaactattaacgtcatggcatacgtgtgctatatcattccattggatatgcagtt

SEQ ID NO: 15208 - DNA, 485 bp, Glycine max
  unsure at all n locations
ctatggaagtnggatctttgagcttaataatggtccttcaatggtgatttaagccatggagttgtagcgaaagataaaggagaagaggtgagaggaggcgccatccactagagaataagccatggaaggagaagcttcaccaccaagagagtgccttggataagaagcttagagagggaagcttcatggaggaagataatgagagagagtggcgtggaaattgaggagaataaggagagaagttgaactttgaagtgtgtctcacaagtttctcattcatcanagttatgacangtgttacacatgtntctatttatangctaacacatgagaagcttccttaagaagcaaggaaggtagattccttgngaagctatggaagaaagcttcttgagaactagagggggctactccacccnccaatagctanctcaccccatgccaaataaatgaaatacattgggaagctccttggaagcaggaag

SEQ ID NO: 15209 - DNA, 346 bp, Glycine max
  unsure at all n locations
agctntaaagattttgtttgaaatgtggtgtcaattcatttatgtggtgtgctcatggtccattggtgaaaatcttttcaatatttattcttcgtatgcacaacattatataactatttatcaaaattccacaattatggttaagctatttatataacttaatattaagtagccatagtttcttctaattaattcgagcttgaattaatctagatcctaaaacactcttgtatttaaatagctcaaattaatttgaataccatgtgcaatttttggatctagattattcagctntaatacaagagtgctctaggcggtgaagactctcaatcaatttcaatacatg

SEQ ID NO: 15210 - DNA, 302 bp, Glycine max
  unsure at all n locations
tacacattaagtntatcctatgcaacacaagttagttacaatgaagttattattattattatatggtcaaggtattattttattatcacaaaggaatgtagagagaaaaaagacaatggaaagagtgacataagaaggttgacaaagtgagcgcatagccaanaacaaaaatgtgaaaatggtaacactccgaacgttaataacaccatcacatcaccaatgcctactctttctccctcactccttctcttctacaaattgccataaataanatctcgcggcaaatcttttctctattcatt

SEQ ID NO: 15211 - DNA, 490 bp, Glycine max
  unsure at all n locations
agtcgaccctgcangggcatgcaagccttactttgagaaagtatggaacggtagtctntcttcgtgaaagttacgagggtggggcctattcacacnnccctacaatatactaaagcttctaccttcatgcccagaataccatgaataataccaatgggcaaacttgcctttgagaacgcgaacgaatagtcacttctctctgngaaagcaagggaagaagaactcgctttgaaaagctaagagatggggggggagggtacnagcggtctccatttacttacggacaccattcgacacccgagttaaaagctattgccattgaactctctcaaagcttctaattcaatacgaacgtctcgtatataccggactcatccgactccaagtaaaagtaatgtggtcgattttctcatacctacattttaattctagcgttcgattattcggacacatcgacatccagtaaaatcatgtcttgattattataccc

SEQ ID NO: 15212 - DNA, 332 bp, Glycine max
aacagagatatctattctatagatacatataattataacaatttccatggctctttatactgtttcagcactgctgcttgctaccacgtactgtgttttagctatggtaaccaagttaccccatacaagtgagcaataacctattatagaccttctgtgagtgatagaccctacccagtcaacattagcgtatgccttgatggttcatactgcggtatctttgtgttacgagaagacatatgcatatgcccttccttctcaagatccgatatactacctttaggtagtcttgatagggagaatgtgtgagatgacttactaaacttacccca

SEQ ID NO: 15213 - DNA, 398 bp, Glycine max
  unsure at all n locations
agcttatccttatggtctgcctncggacttcacccctcgtgccaccccagaagatntaagtcaagcccctacttttgaggggcaactcccaccttatgaagactatcccgggccagacgatggggaaggagatacccatcttggccccctcctccacctcaaagatccatccccgcatgaactaccccagccgaacatagtccgccatatcccggcctcacccacgcctgtgaaagaatctgttccctttgcggagagtagggaaagattgggcgcttgaagaaaggttganggcgtcaaggcctcggaattacccattctcggattggcagattatgtctgtaccaacatcgtcatcctccanatcaaggaccagacttgataatacaagggcaaca

SEQ ID NO: 15214 - DNA, 143 bp, Glycine max
  unsure at all n locations
acacacccattctaaaactaagctcaccttcttgagaagcttccttgagaagctagagcttagctacacacacccatctaanaactaagctcacctccttgagaagctttcttgagaagctagagcttagctacacaccccta

SEQ ID NO: 15215 - DNA, 416 bp, Glycine max
  unsure at all n locations
agctntcttgttatattatgtgtttcaagaacaaaatgaanaataaacaaacaattaaacaaaaaagaataattgtgtcattcttttagagagggtgttggcagtaaagaaantttttcatgtttaagaatcttgggaatgaataaaatttgttgattgaacattaaaagtctctagataagttctctaggaatgacaaaattacacatattcttatcgattattttaattatttattatattatatattctaataaaaaataatatgatattcttattataaaaaaattaaactcgaaatggtaagattctcacttcttttatgagaaagctcttggtgaacattaattagaaaattctcccagaanagtaatttttattacatatgttcatgaattttttaattatgttcttct

SEQ ID NO: 15216 - DNA, 469 bp, Glycine max
  unsure at all n locations
acacatgttcaccattttttntatacaagaaccttaaaataggaaataaaaataagcatttttgtaactatttgtaaaaaaacagagaatganaaataaactaactntcttggtgtcaatgataaactctcagtttgataaactacatctgctcaccagtttttaaacaagtctttaaaaaatataaataggaaataaaataaaaatgatgccatctttgtaaatatttataaaaacagaaaatggaaacaaaaatatttttaaaaatcacatatgcccatagctactaagataaaggctcaatggttntgtatatctgctangtataagaaaaacttnttattatccgctntttctaccaagcaataagtagaaacaattagcatnctannattacatcaagtctctttacaattatgaaatattaaaaatctaatccctctggtctctctctctttctctctctatc

SEQ ID NO: 15217 - DNA, 418 bp, Glycine max
  unsure at all n locations
agctngaagttgactaatttatctattagagctantttttaagctntgatctgacctaatatgaaagttatttatttgacttgttatataaaataccaatatgcatgtcaacaaacccataagccgaaataggctaaccggcctaaataatccataagggctcatttactaacttatttaatattttgtaaagttacattgataatataaagacttaattataaaaatagtcttcttatttttttccaacttactaaattagtctcattatattntaattcactattagagtctttnttcaaattgattatttgtgtcctcagaacaaaatttagacgttgacgattaagaagaaacagtgaccaccatgtgtcattatctaattggttggtagaatgatgaatganaattaatgatc

SEQ ID NO: 15218 - DNA, 78 bp, Glycine max
aagtacctgtgtaatcaataggatgtaactttatttgtgacccatgaagaccttaaaaagggtaagttatcaataaac

SEQ ID NO: 15219 - DNA, 385 bp, Glycine max
  unsure at all n locations
catcaagctgaagttttgttgaataatctanacatcttttctgcatgtgctcgtatggtacttctttgatatagtgcgaaagtactggagctactctttaccattgaggttgtctaatgttgttggacattggtagtcatcatatgtttagtttctagacgtgtctgtaattgtaaatttaccttgttttgccaacataaattatcatctgatttctataattgcctgcttactcttctgatatatgctgagctactagtatttatatcctctatttgagttcttgagaattacatatgctcctgttcgcttagtctgaagatttcattttgtggctccataagtcatacatttgaatcncttggaacacatgtatttgttacac

SEQ ID NO: 15220 - DNA, 314 bp, Glycine max
  unsure at all n locations
ccccaatgccacaagatataaaaaagatagttatttccaaaatgtcaagatggngtgagatnatgattgtgatgcaatcccaccccccaagggcactggatagaagactccaagaagattgagccagagatgcaagagaaggccctatgattctcatgagccttanggtagatttcgagcccatgggctaagtacaagcccacttatctgtgtacatattagattaatggttcattatttctgggngttgtatttatggctccataatgtangtagggtaccctagaaatgtaggatnnttcacccttgtattt

SEQ ID NO: 15221 - DNA, 343 bp, Glycine max
agctttatcttatattgtcagatgcagcattgaggatcagagatattaactatggtccagatgtgctcatggaagaaattgaaaaatacaagacgtatgccgagaggttggagccctttattgctgatactgtgcttgtcatgaatgatgccatataacaaaagaagaagatttttgttgaaggacgacaagctaccatgttggacattgattttcgaacttatccctttgttacttcttctagcccatcaacaggcaggatatgcactggtctaggtattgctccaaaggtagttggtgattaatatgagtggtacgtggatatttatctatttctttttta

SEQ ID NO: 15222 - DNA, 460 bp, Glycine max
  unsure at all n locations
ttcctatgatttcatatctaatcaagaagtccctttccaaacaagagaatcaatagcaaacaaactgtgcctattttagaagaaaccttaatcaagtaaataaaatcaaaatgagcgttataatttcattataaagtagtcaaagaaaccatataccacgtaatgccaaagacgctaccaagtgatcttgaataattnntttcctttaaccagtgcacgatgttgaagataatgttcagaactntgagggcaaaacagttaatagccaagccaagccaagcttatatatgtntatanntgtaaacaaaatcanaacaaagctggccgataaattaaagaagtacgtcatcttaaatttgaaaccggatatattgtanagtgatcgaccaccaagctctagtntaatagtaaatgaagtactataactntacagaaaatcactntgaatctgtacaattat

SEQ ID NO: 15223 - DNA, 433 bp, Glycine max
  unsure at all n locations
agcttgtatgattattgtgtacccatcacatgtggtactangtggcggtcgggcgatggtgcacaacaagctttccacatccacaatgcgcgcagaaacccaccattccctgttgcccaccttcaactgagctcacgtactcccacgtagcccatatcctcgtttctctcaacaccgggtccccatcaatactctcaagcttccacaacattcaagcaaaacaacattcaaacagcataagctatcacaaccaagaaaaacagagcgaaggcagaaaactctgctcaacacatcaaccaaaatcacagcttttctcacgtaaagaccacagtaacaatttcttcgatccaattcgttaaccgttggatcgactccaaaattttactggaagtctatagtgcataagcctacattntgaccgttgggatctact

SEQ ID NO: 15224 - DNA, 500 bp, Glycine max
  unsure at all n locations
ttgctngctctanatctacattgatgttggtatttattgtaggaggttgtatgccatttttgttntaagggtagcatttcttggtaaaactaactttcctaatgtttgccttcgcacgatatggccccgaggaagcttgtctcaaagaggtccaggaaggacaaggcggccgaaggaactagttccgctcctgagtatgacagtcaccgctttatgagcgctgtacaccagcagcgcttcgaggccatcaaggggtggtcgtttctccgggagcgacgcgtccagctcanggacgacgagtatactgatttcctggaggaaatagggcgccggcggtggacatcactggttactcccatggccangttcgatccagaaatagtccttgagtttatgccaatgcttggcaacagagganggngtgcgnacatgagatctgngtangggttagtggatccgttgatgcgacctatcggccagctctggatatccgtagtgtn

SEQ ID NO: 15225 - DNA, 399 bp, Glycine max
  unsure at all n locations
gcaacgcatgaagagtttaatcaatttaagagaaatgatgtatgggatttatctcctacaccaacctctcacaagtcaatcggaaccaaatgggtgtttcgaaacaaacttgatgaatctgacatcacattaaagaataaatcaagattggttgcaaaaggatacaacctagaagaaagaatctgctatgatgaaacctatgctctagctgcaatgttagaagctatacgattactactctcattcgcttgattatgaatttcagactntgttagatggatgtaaatatgtcttctcaattatgcattgagaaaagtgttgtaatcaaccacttgattgagctatnaacatctaccatgttaaaacaacaaatgtctttatgttgaacatcacaagtct

SEQ ID NO: 15226 - DNA, 577 bp, Glycine max
  unsure at all n locations
caactcccccccttccttttaatgatctatatgttaactntcccnncannccgagggttgatctgaaccccatagcacctaanatctcagcttcgtagtgaatcggtgcagcactcccttagagtcttttacgatgtggatgctgagccatgttctcggaatgatcacgatcataaagctcataatcagaatgcctctaattataatgctccctatcacgatgttcaaatcacctataacagaatgcccgattctcacgttattgaatgctgcaaatgatcaataagtatataatgatgccttactaatctatgagatgttctatctattctatgatacaagggttgaagatcaatagattgcctctactcatacacttacattagcatgctcacaactagattgccttgtcatgcttaataacggtgtatgtctgaactacagcaactcctaaatgatattctaatgacttgagattctgcagcgtacccttatttgatgtgaaatagccatacacattccaccaaaatttaagtctacttgtaagctaaaatgcaggtaggatattaatgatacn

SEQ ID NO: 15227 - DNA, 288 bp, Glycine max
  unsure at all n locations
agcttgtgactcttggcaatntcttttaanaactagtcacttaanaagttgtgacttttgaaaaaatctttagaaacaagtcacttgaagaattgtgactcttggaaatgtatttttcgaaatcagtcactggtaatcgattaccattaaggtataatcgattacacatcaacaaatgtgactttttcatttgaattttgaaaattaaaatgtttagaagctctcgtaatcaattacaagtggtgtggtaatcgatacaagtgttgtgtaattgattacactagttta

SEQ ID NO: 15228 - DNA, 472 bp, Glycine max
  unsure at all n locations
tggccttgtngctatcttcatgagccttagatctcagcttgctgttagtgttctaagagagaaggtcangtccagagagttntagagattntgctatgtaagatctgcnaaaccngagcttgaagcggaagctgtctgagagcttgagatgagtntgtgaagtggtgaaaatcctagaggtgaaagagacatcctcaccacttngatntnnttgtatctttttgcatgttcttctcntttgtgtaatgaagcttcctgttatggcangctaaatcctctgtggatcttcttgtangactngatgtaatatcttctatctattaatgatgtttgtgtgtctctgactctagctttcatctagatgcattacctgacatgcgatcatgcttgtanggtatcacagtgaactgtctatctatgactgatngcaggctagtgcatatatacagatcggacatatttatgatatctg

SEQ ID NO: 15229 - DNA, 309 bp, Glycine max
  unsure at all n locations
agctgtccgcgaagagatctaggagggacgccatggctgataggaccagtgccgctcccgagtttgatagccaccgtttcaagagcgccgagcaccagcagcgcttcgagtccatcaaaggatggtcattccacagagagagatgcgtccagcttagggacgatgagtacacagatttttaggaggagatagctcgccgacattggacgtcgctggtcactcccatggctaagtttgaccctgatatagtcctggagttttatgctaatgctnggcccacagaaaagggggtgcgagacatgcagtcat

SEQ ID NO: 15230 - DNA, 249 bp, Glycine max
  unsure at all n locations
tcttcttctattgtccatgtcttcttctggcttaattcatcagtgngctatccttctgtgtgcagcatcattgtgatgttcccagcctttgatgacagctatccaggttctgctatccagtgatgtgaggaatgccaccatccttgctctccagtattcatagttggttccatctaagattggtggtctgttcactggtcctacttctttctccatgttcatcagaatatatctccctagatctactct

SEQ ID NO: 15231 - DNA, 247 bp, Glycine max
  unsure at all n locations
ggtgtactgttaatacatttctgaacgctncttatattatgctaagtagtgtgtggataaaacaaattaaaattcaaaggtatatataatagatggaaatttaattattttaactaatttattntatatattatttgaataaaataatttaaaatttgtttttaaaataatttgatgatgtgtaaaataaaaataacattctttaaaaaaatgggtggattaattatgtggtcaactcatcaattca

SEQ ID NO: 15232 - DNA, 204 bp, Glycine max
  unsure at all n locations
atgcagacagaaccaattcaaacacatatcgaattcagttaggtgcgctaacctatggttnggcgtcaaatattcagaanagacgcagaagctacttgacggagcttcgatcttacgcgcatcanaatattacgttacccgtaacaaacatacagtagagagagaacagagaagcatacctagaaatcgcagagagataacaaa

SEQ ID NO: 15233 - DNA, 331 bp, Glycine max
  unsure at all n locations
agcttctcattaatatgccaatcaacttcctcaagtgttacattntgaagggtatttagattctcttggaagtactctaaaattgtttttgtttccatcttgaatatgtgatggaatcttacctaattcataacctggagcatntatagttttctctaatatttctaattgcctgcataatcaaagctccaatctttcaagagctcacttcctcttgagatagagctctatcatttaagccagccttcaaagcattcagctcctttttaatattctggacttttctagcattagcttcaccatttgaaaactccaatgctttatacactgt

SEQ ID NO: 15234 - DNA, 523 bp, Glycine max
  unsure at all n locations
agtcnctttgccccttcgaacttgcacccatcatcaagcgaccttagatactaagcttcagaatgatctgcataactgacattttctcatagtgcctggtgcctttgctgaacgatctcaccattcttcctttcttttggggtctgcttactactatacccctggtttgctattcgacccctacccctactattatctntcattgcctaacagatacatgccanacataagcttgaactactttatttttgggaagaggctgcanatactataccaagacatgctgtcgaagtcttcgttcttatctatagtgtgaaacttatgaaactangagtggtatgtaatcatatgtatgcantagactagatgatactatcaggaatttgtatattcatttaacgatatttgagcattgtttgatgaagcttacctcatcaaaatctagatacggttgacatggagactaagacatcaacgtctacttatgctattcgatcngaagttactttgctacacaacattg

SEQ ID NO: 15235 - DNA, 403 bp, Glycine max
  unsure at all n locations
anatgcaattcatggggctccgaaaaatggttgaggatggagaatcgcactaagaaatcactacgcatggctcccaactcgtgggtggaggacgcatgaacgaatacgcaattcatggggctccgataaatggttgaggatggagaatcacactaagcaatcactacgcattgcttccaactccgtggtggaggacgcttaacgataacgctatcatggggctccaaaaagggttgaaatggagattacactaaccatcactacgcatggctccaactcgtgggtgatgcncatgaacgatacgcattcttgggctccgaaaatgctgaaatggaaaatgacttacaatcctacgcatggttcaactctggtggggactataaccaacccattatgggttcct

SEQ ID NO: 15236 - DNA, 267 bp, Glycine max
  unsure at all n locations
gagagagaganagagagagagtggcttatgatatngaacgagatatatgagagaagttgaactntgaagtgtgtctcatatgtttctcattcaacanagttgggacaagtgttacacatgtntctatntatagcctanggcactaacgttgtgaatntcattctcatttcatgtgaacctaanagggatattccaagaatatgccaaaggcattatagtatattccctttaaatgtcacaagcatggaagttgtggctctagcacat

SEQ ID NO: 15237 - DNA, 300 bp, Glycine max
  unsure at all n locations
agcttcgcacttgataacggagaacacatgagcagcgctaggcaatgacattcatggtgctcccgaaaaaggtggagtatggaggattgccttgagggtccgcacttangcaatcatgaaactcagctccaaactcgaaagtggaggacacgtgaacagccctaagcaataacattcatgtgactctagaaaaggatgagaatggangattgccttgagggtcctctcttangcnatcatggaacatagcttcaaactcgaaaatggaggacacacgaatgacaatgcaattcattcatg

SEQ ID NO: 15238 - DNA, 210 bp, Glycine max
  unsure at all n locations
tactctagtcaatcacatttctgtgaagttcttctttgttcatccctttnttgcattntgcttattcttgttcaaacaagaaactcatttcttgtgagtaaatctgatcttggcacaacaaactggtgcggtgaacgtggataattttgggctcgattcaagaaatgggctcggccaagtatgaggttgaaaaattcatagggaaaaatg

SEQ ID NO: 15239 - DNA, 431 bp, Glycine max
  unsure at all n locations
agcttagaaaggccgttagagataaatcaacgatggagaatgtaatgttaaaggatgagctaatgaattgtcagacgtcaaatganagtttgaaagagcaattgagcaagacaaaaaagaatatgttgataatcattgatcaatataaagaaaaggtgaacctagctgctattcataggcaggtgctgagagatgaacaggcgatggtgtcatcctatcaggttgaaagagaggcaagggaagacgtgaaagttattgcatgaagaacgcatgaagtggatggataggtttgctctcactttgaatgaaagtcaagagcttccatagctgttagccaaagccaagactgtggctgacacatactctactcccgatgaagttcatagtcttttcaattactgccaacacatggtcgaactaatgacccacat

SEQ ID NO: 15240 - DNA, 436 bp, Glycine max
  unsure at all n locations
tcttcttaatgaaaccgttaanaaggcactctntaacatcctttgaataagcttaatgttnntgtgagcaacaaaggctaaaatgattcttataacttcaagtctagcaacatgaacaaaggtttcagagaaatctataactttntgttgattatatcctcaagctactaacctagctntgttgcatactacttttccttgttcatccaacttgtttctgaagattcatcttgttccaatggtgctcttgttntctggcattggaacaaatgtccagacattcattttgttaaactgattcagtttttcttccattgtgattatttagtcattntctatcanagctntgtctatagttntaggttngattcanacacatgngtcttaatgatatctagtttaactccttcntctaatctcagatatatgatcttat

SEQ ID NO: 15241 - DNA, 412 bp, Glycine max
  unsure at all n locations
agctttgataaccacacgaatagcgaattcacattcacttagaacatctgatgaacatatagctgtaatggctccaacaaagtctctcgaaagagttgaagcattcttgtatctataagtgctggtttccaagctttcctttggtatgaaccttgccgaaaggcactgaaaataatccaatctctgtgacgcaggccataattgagcttgactcttgccaacttggcttgatcttccaacaaataccctatcatctttctgtcaacagtgatanagtaggctaaatatctgaaatgaaattctatattntgaatcagcatgttttcatctatgaattgatggaacagaaaataacctgaactggactgcatttgattcatctagatataacttttcatcaatctctaagcct

SEQ ID NO: 15242 - DNA, 291 bp, Glycine max
  unsure at all n locations
ctacaccatcaggactcgagaggaaattgcaacaatcttacacaagaatctcaggaaagcacaggagaggatgcagtngtatgctaacaagaatatgatagacaaagaatctgtagtgcgagatcgtgtatatctgaagttacaaccatttaaacaacaatcaatacctaacttagtgtttcacatattagccaattgacattttagctagaagaataaagaatagaggcaacatgctggttacagaagtgctaatacattgtcaacataccacaccagaagaagctacat

SEQ ID NO: 15243 - DNA, 449 bp, Glycine max
  unsure at all n locations
agcgatgctctagagatcctctacaggcatgctgcctgcgtccagccgcttgatatatttgatggactcatggtcactatgaatgacaaattccttgggataaaggtagtgttgccatgttttcaaagcccgtactaaggcatacaactccttatcataagttgaatagttaagggtaggaccacttaacttttcactaaaataagcagttggatggccttcttgcatcaacacagccccaatcccaacatttgaagcatcacactcaatttcaaaagaattttgaaagtntggcaacgcaagtataggggcattagttagctnttgcttaagaacattgaaagcttcttcttgtttctcttcccatttgaaaccagcatttttcttgagcacttcattgagaggtgctgccaatgtgctaaaatccttcacaaatcgtctataaaaac

SEQ ID NO: 15244 - DNA, 426 bp, Glycine max
  unsure at all n locations
aaagagaagttctgaaactcatcacgttgtctaaaaaggccttgaggtggatccaagtgctctgatcattcattagcatattcatgatttggtggcatgctcaccactgtttgtttctttagggaactcaccataactaanaaagcgcanaggcacccctataacacctgatccaaaagtaagatggataacgaagaggaagtgcaagaacaaatgaaggccgacatgttggccttaaaagattagatggcttctatcacggaagccatgctaaagattcanaaatcaatagaagataatgctacggcagccgtttccaatacagctagggaagcggaaccggtgctacagcccgtaataaacttgngccgagataganatgtgacgggtttcaatcggaggtatagtcctcaagcctacccttat

SEQ ID NO: 15245 - DNA, 357 bp, Glycine max
  unsure at all n locations
agcttgaatgtccatctccttctctntcactcttcattntcatgactaggaaggattcaagtttctagctcaacccacactattttctttgcttcattgagtcaacaaagagttaagggagtagtatttcatttcttaggacccgtactatgttgctaggaactcgaacttcatttacatgatgattntgtatgtttagtacaaatcccataactctgtaattgtggtactgtgaatactgcgaattgaatttgtgaatttggatcaatctgagncattgccctaanacctaagaagctacatgatatgctattggattgtgtacttggaaataattttaagttaagcaatatatga

SEQ ID NO: 15246 - DNA, 214 bp, Glycine max
  unsure at all n locations
tattgcattactttccttaattntttaaatactgctcaaggggttcccacgaactctaacagaataaaggtcattcctgagtgacccactccaccaattataaaggaaatttggggattccatgacttaacaaacttttacaaaagggttgtcccatattnttctataccttgagcacccctcattgagttggagaggaaccatgttccctcat

SEQ ID NO: 15247 - DNA, 505 bp, Glycine max
  unsure at all n locations
nttgaaaccttgaatccccttaacnccgtggaaaaagcgagntntcgagatattcaggctactaatgctgcatgttgttaagaatcttcatcacatatatatatgtgaatgttgagggactgaaaataccttagatatgaatgatatagcaaaaatacctcacataatatatatatgtatgtttgggtagcaagataccttggatatgcatgtatataactaanatacctcacaaatatatacacatgtttaggtagcaanatacctatatatatatatatatatatgtgtgtgtgtgtgtgtgtgtgtgtgtgagtgtgtgtgtgtgacncccacttatatatcagatatcttcttagggtctagtaaactatatatattgtatgatcgctgcttatatcttgattatcatatatccatatttggtatcatctcttctgtacgactttaactaatatattgacttcctatctcttgactcaacttcaagactcattttttctcg

SEQ ID NO: 15248 - DNA, 270 bp, Glycine max
  unsure at all n locations
tgtgcttggatcgttcatgatgagcangtntgaaccaatacttatagcanatntattatcacagaataacatcatagagggcacatcaacttcaaagtgaagaagtaacttgcttaaccaaacaatttcactagtaacagaagacaagacacgatattcagcttcagtggatgatttaaaatagtgggttgtntcttagaatgccaagaaagaagttggttcccanaaaacacaaaagtcagaagtggatcttttggtatcaacacaact

SEQ ID NO: 15249 - DNA, 422 bp, Glycine max
  unsure at all n locations
agcttatgcatggaatatgtaattatgaaattgagatgcccgaagatacaccatttcctagttaaccatgcattatgtaccatgttcaattattttgtttttaagtgaaatgggtttatgatcccaacatggttggctcgtggtgcctaacacatgaaactaagaatgtagtgtgaaatttcacgcttcccccttttttgtttntgttttgtagaggaaaacgcaaggatgagcaaacatgataacaaatggtatgcaattntgcagatcanaaagtttgttgaacgcatatgcatgatgatgccatgactcatgcaaaatgtgaggccggaatatgataacggacaaatgcaggatatgtccatttatgatgtatgaagagatgcttatgcgatgcatgatatgaatgcattntacggaca

SEQ ID NO: 15250 - DNA, 432 bp, Glycine max
  unsure at all n locations
tactcagcttttatccaggctcatcttggtggtgaagctctntnttccatggcttattccttaatggatggcgcctcctctcacctcttctcctttgtcttccgctgcatctccatggtgaaaaatcaccattgaaggacctcattgaagctcanagatccagcttccatagaagctccacaagcaagcttccatcaagtggtaatcagagcacaagagcttcaagtaggtgctccttaaaacctccattaatttttttctttgccttctcttccattgttgnttcttaattnttctccatgtatctcctcacatgtcttgttctaaatgttgttaacatgattctttagagtntccaccgattaaacttgctatagaagttagattngattntctatggttcanatttcttgttcttgttcttgaaccatg

SEQ ID NO: 15251 - DNA, 393 bp, Glycine max
agctttacgtgtgtccaagcgcagtatcttctgcgtttttatcacaaactgataaaccatccacaaaaattgatatttggtgtaaatttgttgcattcatataataatgctggacactttcggaatgaatgagcttatgagcatctgctaaatatgactgcagtgtgttgcatatctcaatggatgacagttctgtgctgttatataagaactgtgcagtaattattctctttaattgttactaaatttattatcttttccagctatataattatatatttatggtgatgatattattttatcattaaaacatgcattcaatcttggatcttgcatccacgttgcccaccttagttataggtagttcacttctccagcctattactaaattct

SEQ ID NO: 15252 - DNA, 172 bp, Glycine max
tcacaaaagcttgaaggcatgtaacccactatcttctcatagtagaacaccggtaatgtgtctactatcatttttatcaatctcctttccatcattggaggtgctactttgagcttcaaatccctccacctttggccgtattctttgaaggattcattctcttctttcacat

SEQ ID NO: 15253 - DNA, 427 bp, Glycine max
  unsure at all n locations
agcttaacatacatgttagtttgtgaggtacatctgntagcttatatatctgtttgccaattttaagctgaaatctaaccgttacaactgtctgagactgtagttttaaaagttattcgatcttatgtttgagtgggatagctagatgaagtcccttgtatgaccgaagttgttttcattgtcaacgttgcaattgatgccttttctatgtttcatgcagcatctatgcttaactggagtttgatatctttgcttgatttgatggcatttcttttcattcagtacactgcttctagaaagggtgagaagcttgctcttatccttgctatgtattcttaaatacatgaattttcatgccttgtacttacacctaaagaaaccagaggaacaataaagggaattggtgatgcccatctcaaatttatta

SEQ ID NO: 15254 - DNA, 259 bp, Glycine max
  unsure at all n locations
ttctggacatgttgccctcattgaatactagatatcaatatgtcaaaaccattttaaatcataccatacgctgtcaacattgntctaaatcctttacagctcatgatatggngaaccacaatgtgccaccaggatactgggcaccatttaataaccagaaagagccttcaaaacatgcatcgtctaaagaagcatcaaaaggctatggtggaaaatcttctggtagagaacaggagggtgtatccatgtcaaaatgctc

SEQ ID NO: 15255 - DNA, 319 bp, Glycine max
  unsure at all n locations
agcttgctacacaaataacctgtgattgtgtcaatctcctgtgattgtgtgtaggaacaaggaagtangaactattagcctatgtgacatctggtaaataaccagattgagatagtttggtgtggccatgactatagttctaatagcagccatgatattaanagtccctttttgcaacctaaattcagtttagttaaaaaacattcagttcccttctccctaattttgatctcatgtttccacttttttctcaatctctcttcatatctgatttatttaatgattcactctctcatacctgtctgactgtngaatttct

SEQ ID NO: 15256 - DNA, 332 bp, Glycine max
atctagtcaagttcttagagaccatacaagtttcctaacgatatctaattatgtgggccattaagtctatcatatgctgacaatagccgagaagcccatgaatctcttcgggggcggagtaggtgtctgccatcgccttggccttggctaacaatcggcgaagttcttgactcccgttcaaggtaagagcaaactgatccatccacatggttgcctcttggtgtaaagagtcgatcacctttcctctagcctctttttccgcgtatacttgggcatattcgtcccgaatcctatgctcgtgggccgcggctagacctaactcttcttggact

SEQ ID NO: 15257 - DNA, 437 bp, Glycine max
  unsure at all n locations
tcatgttgctttctctatctctaaccaaaacttattcaataatttaaccttaanaatctacgtgtttctaaagaagtgctattggttcaaatttatatgttattggtctctaccaaagaagtgatccctttttttattcccaaaatgtctttcccacggaatcatgattccattgaataaaatgcgtaataaaatcgtgatttcattgcgcaattatttttgcaccccctcaacacaacaaaatcgtgatttagttgtataatgtacaatataatcatgattntgttcgatatttttttatcactctagatataacanaatcaaaaatcccgttgttttttttgcacccacttaacacaacggaatcttgattcccgtatactattnttttaananaaaataaaaatacattttaagtttttattgattgacactac

SEQ ID NO: 15258 - DNA, 536 bp, Glycine max
  unsure at all n locations
tgggacatgaccccttagttctgtgcactattaatactcaagctaagctccttcactgcncanggctctaatatttgaagagtatccttgtggaaccttcacccgacanagacactgannaaaacttatcttctnctttntggacanagtatgagaagctggnnggcaagtaaatttcttcccatcagaccttggatgcaactatgatcgtatccccatcttagctagatcttgacgggtatntgtcgcanatgcccttntgcgggcgtgtgaggcgaggctcacgtgtgcgctttcanaggangaaagatgcgcggagtcgccaccaacgtctatgtgtggaanacgtctganaaaccanaggataccggtcaaaatganattctaagttcgggaatngtattacgtntgaggaagggtatacacctctcacgttngctcaangggacacagctcatttttagaatngtggaatngtgtactttactttatttctnnttatatttaggtcacaaagcgggctttgtctactaccn

SEQ ID NO: 15259 - DNA, 417 bp, Glycine max
  unsure at all n locations
agcttatgtngcttcttgtgtcatatgacatttcactcctggtaataaccttccctgtccttccacattaacattaaatgcattntgtcctacttgtcttttccctttagcacaaaanaaaaaccttattgaccctagaactgctcccatagctattggtggtgccggtgtcggtgaatcaactccaagtgaggtttatgcatccttctccctctgtagccttcttctccacccacctcaccttctagccattccattgcttttgagccacccccctctacagtgtcgtctgacaactgctttgatgcttcctcataatccttaaaacaacatcttgcatcccatgtctatggntcttcttacaccatggttaccaccaaanagcctcctttcacactgactctttaaataaactac

SEQ ID NO: 15260 - DNA, 64 bp, Glycine max
gtgggatgacaccgactgggatgacattctcttgcggtattgcatatgtggagggtgaacgtgt

SEQ ID NO: 15261 - DNA, 393 bp, Glycine max
  unsure at all n locations
agcttcanacttgcatcanaggagttgagcaggtaaaaaagattcgtcttcaaactcttagaggtgactttgagcgtttgtttatggaggagtccgagtcaatttctgattatttttctcgagtattggccgtagtcaatcaacttaaaagaaatggtgaagatgttgatgaggtgaaagtcatggaaaaaatacttcgaactttaaatccaagctttgacttcattgttaccaacattgaagaaaacaaggatttatagaccatgactattgagcaactcatgggttccttacaagcatacgaagaanaacaaaagagaanaattaaacanaaggaggctacngagcaactactacaactcaacgtaaaggaagcatactatgcaaattaca

SEQ ID NO: 15262 - DNA, 366 bp, Glycine max
  unsure at all n locations
gcatgctagtcaacctttaccttcatctgttttacaggttacaggttgcacactttatggtggagctcatgggtcaggcttctgtattcccactgaagaaacatctcatgaagttaattacatgggaaaccagcctagacaaaattntaatgcaggtggattttctggatttcaacatggccaaccttaccagcagcagaataaatggagaactcaccctggtaatcagttcaataaagaccagggtgggccacctaacaggccacaacaacaagggcctagcttatatgagagaacaacaaagctggaagaaactcttgcttagtttatgcaggtgtcattgactaatcataagagcacagagtc

SEQ ID NO: 15263 - DNA, 402 bp, Glycine max
  unsure at all n locations
agctntcaatgcacaaattctaaataattatatgaagactntgatcaatttcaattatgatattaattnttttaaattatatataaaaacctagacagcaagaaaaagagaaaatacaaaatcaatatctctctaaatttctccttactttatttcatcaattcatattaattagaaaaagtactcgatttatagggttcacgctcaacacaatagcatatcaatttcacaacaattggtctggcaaacatatataattcactggaataattataagggataaatgaaaatggaaaaacaccccaaaactcattccaattgatatctctaaagatccctacacatgttctcnactaattccaattgtgaataactcatcccttacctctaaacgggatcacg

SEQ ID NO: 15264 - DNA, 211 bp, Glycine max
gtgagctaagttggaggtgggcaacaggggatggtgggtttatgcgcgcattgtggatgtggaaaacttgttgtgcaccatcgcccgactgccacctagtaccacatgtgatgggtaccccataatcctacaagcttgagatgaggaagtgttgaagggtgaaacttcctgcttttattgttgaccacagagtcggacctggagatatgtc

SEQ ID NO: 15265 - DNA, 394 bp, Glycine max
  unsure at all n locations
agctntgaggctatctatggaccattaacttctaataatattgcagattcccaagagggtctggaacggaggaatttgatacaagccaatgcaaaaacgattagactatcaactatctttgcaactcttgatagacgtctgataggggagaatgaacaacaagctattaagtggctacttccttcaagatcattgccttcctttattccttttcaaaatgtttctgttgaaccaaacttgaacgtctgattctaccctagtttcagaggacatcaaatcttggaatggaaaacctgcaacanagtttgaagaagaaaagtggatgttgggactcaagttcttgatcctaagatgaaaaagctcaaactaaagaagctaaatctacttaatctct

SEQ ID NO: 15266 - DNA, 277 bp, Glycine max
  unsure at all n locations
ctgatctttagcttaatgaggcctttatgggatttaccatggaatcacggagataaggaaagaggagagagatatcactaggaataccatggaaaggacttcgcaccaaaatgcttgataaactcgaaggtgttatggagaaanaaaagaaaagaagagggaccaaatgagagaagaggaaagtgcttgatggttataacttatttaagtcaaaggtcctcttttatgcagactctgactctgactctgactttgactttgaatttgactctgacta

SEQ ID NO: 15267 - DNA, 307 bp, Glycine max
  unsure at all n locations
agcttgtatgattatggtgtacccatcacatgtggtactatgtggcggtcgggcgatggagcacaacaagcttttcacatgcacaatgcgcgcataaacccaccatgccctgtagcccacctccaactgagctcacgtacttccacgtagcacatatcctcngttctcataacaccgggtccccatcaatgcgtccaagcttccacaacattccagcaaaacaacattcacacagcacaagctatcacagccaagcgaaacagagcataggcagtagaactctggccaaacaccaaccaataatcac

SEQ ID NO: 15268 - DNA, 460 bp, Glycine max
  unsure at all n locations
ttgggccattgatncccattcatnanncnacactatagantactcaagctntgcatgtcangtagttctngaaaaagaaaggtccaagttcttgagagttttangangatttgctgtgtgaagatctgcagagaccngagcttgaagcggaagccgttctgagagcttgagatgagttagtgagtgcgtgtgagatcccagaggtgaaggtacatcctaccacttgaatnttcaatctttcatctgtcttctcttgtgtaaggaagcttttgtatggaagctaaatcttatngatttcttgangtactgatgaaatcttctatcattaatgatgttggtgtctctggcatatcttcatttatatgcttactgacactaatgctcttgtaggcacacatgaactgctatttatactgtagcaggctatgctcatacagatcagtgcaattatgattgtgtt

SEQ ID NO: 15269 - DNA, 446 bp, Glycine max
  unsure at all n locations
agcttcattagatgttgcatttcagtatcagttcctctaatggaagaacgatatgcacttcttgcattataaatntgtttgattgtagtgcaacagttggcattgtgcttcttcaacgtttgcaggatgttttttggtttcaccatagactntgtcatatcaacaataattntcttttcatccttggtcaatttcccaacgtatggatgtccaactaaggacttggccaattcatgattgtgaatcccatagatcaacttcaccatccaaccttccnctccatgcattggtttcccacgaagcctgaagggacaaccacatttcctactctcagtgtctcttctaacaaattctttctttctacacttatactgaccactcctttcacaaccaattaacacaaatgaaagtcttcctctactaccagtatgtgtgtcagacctcat

SEQ ID NO: 15270 - DNA, 239 bp, Glycine max
  unsure at all n locations
cctcatcagcanaaccaacaactgcagaataattatgatctttcaagcaacanatacaatccaggttgaagaaatcatccaaatctgagatgggcaattcctccacaacaacagcagcctgtccctcctttccaaaatgttgttggtccaagcaagccatatgttcctcctccaatacagcagcagcaactgcagcagtcacaataaagacaacaagcaactgaggctcctcctcaatc

SEQ ID NO: 15271 - DNA, 424 bp, Glycine max
  unsure at all n locations
agcttatgcatggattatgtaattatgaaattgagatgcccgaagatacaccatttcctagttaaccatgcattatgtaccatgttcaattattttgtttttaagtgaaatgggtntatgatcccaacatggttggctcgtggtgcctaacacatgaaactaagaatgtagtgtgaaatttcacgcttccncctttcttgtttttgttntgtagaggaaaacgcaaggatgagcaaacatganaacaaatggtatgcacatttgcagatcanaaagtttgttgaacgcatatgcatgatgatgccatgactcatgcnaaatgtgaggccggaatatgataacggacaaatgcangatatgtccattatgatgttatgaagagatgcttatgcgatgcatgatatgaattgcatttacggacacg

SEQ ID NO: 15272 - DNA, 337 bp, Glycine max
  unsure at all n locations
tcttatccaggctcatcttggtggtgaagctctntattccatggcttattccttaatggatggcgcctcctctcacctcttctcctttgtcttccgctgcatctccatgtgtgaaaatcaccattgaaggacctcattgaagctcacagatccagcttccatagaagctccacaagcaagcttccatcaagtggtaatcagagcacaagaagcttaagtaggtgctccttaaacctccattaattgttgttctgtgccttctcttccattggtggtgcttacattttctccatgtatctcctcacatgtcttgttctaaatggttgtaacatgattc

SEQ ID NO: 15273 - DNA, 401 bp, Glycine max
  unsure at all n locations
agctttattcaaactatttaatccattaatgtcaaagaattgggtcttgaanaagcataacaagactttctctgattgcgttaaagatacaacctttgctgatgaaaatggttcagaaacattaagaaagctagcatatgggcctaaaggaaatgttattacttggcaaggatacgacattatacagtatttcttttacacaaaagcacatgacgacaaaagtacaatgcataacagcgaggtcaccctaagggctgaatcttaacactgtgcaagtgtgcatgatgacaatccttgcgtagcttcatcccttactttgtgttcattgatgacatttgngagcttaactatgtcataattattgcatgtgtcttgcaatgtatatgtgcggaccgatgatg

SEQ ID NO: 15274 - DNA, 328 bp, Glycine max
  unsure at all n locations
tcctctctaagcttcttatccagacactctctnggtggtgatgcttcttcttccatggcttattctctagtggatggtgtctcctcttacctcttctcctttatcttccactgcaactccatgactgaaaatcaccattgaagggccttattaaagctcanagatccagcctccctaanagcttctcaagcaagtttacatcatgagatatcatgtagaaccactccatgtagtctgctgcacactgtccaagtgcaacacatatctgacccaccaatgcaaggtattcagaaaactgaattcatctatcatcgatatactagagatg

SEQ ID NO: 15275 - DNA, 427 bp, Glycine max
tgtcttgcaagcttctactaagtctttctaaagtaatcaacttcaacatgctttgaagctgtgaagaagtcgtaagagtgatgaagctgcactatatcaaaatgagatatcaatttgaacttcatcaagggaattcatcaaagtatggactcattctcagtaaacatcagatgactattctaatgattcttcagaatgcccatgatatatgtccatcagaatgtgaacctcaaaatggtcttgtctgctattacatcatgacagctggaaagtgaacctacttgctctacaagtgtattagttgtatggagcccactacaatgattttcttggagctctaaaggcattgtcgaggcatggagacaagtgaaccttctaatctacacaactatgctgattctgatgagaattatgtttacctccacct

SEQ ID NO: 15276 - DNA, 437 bp, Glycine max
  unsure at all n locations
tctatacaagtngaggtttctctttacctgaatagtatagtgtacaatttgatgtctntgtgtgtagcataagccanaaggaatttgatggctccaagttcttctattggtgttaaagtttcttcatatcaattccttcttattgattatatccttgagccaccagtcttacgttgattctaactatctctcctttttcttgttcttganaacccatttggttccaattactaactaattcttaagagatggtacaagattccatactntgttctttgtgagccgactctattattcttccatagtagcaacccaagaatcttcactcaatgcttcatcaatgttctttggctcaattattgagaagagtgtcatcatncctttctctttgttcaaagaagctcttgtnttgactccagatgttatttctctaatga

SEQ ID NO: 15277 - DNA, 512 bp, Glycine max
  unsure at all n locations
gttgacacgtttggaaaccctttgaanccccttntacttacggcgaattcagctcgtacccgagatcctctaagccacctgccgcatgcagcttgttgtgagaaatntgtgagattaattaccccccctcttaattattgagccacttgtgccacaaaggtgagaatcccaaagtgtgttcaagtctgtaaggatttataaagatagggaaatctcaagaggttgcttgngacttgacataacacgtgaagggccgaccagataaatcgagttgcaattctctcttccctatcttattaatttattgcaatcaactttgtcttgcacatttaaagaacactattananttgattggctgcttcttcttctatatgtacaaaaagagtggangggtctgctgcaagctgaggtganggtangatcaccactggtgcagaaagctctgaaagtaccttcaaggatagcgcgggagtggcagcacctacctgtctcacctgtgtctnactttgcn

SEQ ID NO: 15278 - DNA, 279 bp, Glycine max
  unsure at all n locations
tacaccaaggttgatacataacatctagtgtagccaattccatgagagttcgattgttatcaaccattataccaacactaantttttcagaatcacaagcaataagaatatcgttagaaatagaataagcaatgaatntagtatgcactatactactatccaaaactacactatcatgcacaactacacttctactcttattacttatacttaacctatgaaatgtctcatctatctcaagatcatatggatgcaagtcacatgatttggacctagtca

SEQ ID NO: 15279 - DNA, 236 bp, Glycine max
  unsure at all n locations
agcttatccgaggatctcatggaggtagattctcaacgagagctcctatgttgtagacacacatactaatactgctggggtcaaagccacctgctccataattatcagagggagatggataacagacacggagagaatgganatggtatcttgattgatgtattattgctattacaattgctcatctatactaacttccctactaacagaatctatcttcttatgctcagggaata

SEQ ID NO: 15280 - DNA, 271 bp, Glycine max
tatcatccatgacactagaaccacagacactgaatgttacatacctaacctccccactatcttcaatgacttcaaagtcaggcatgttatctacacaaggatagtcgtcatgtacagtagcatacgatagacatccatcccttagacttacaccactctcatacatactgctcttgtcatcacatgatctcgagcaatacgaagactcgtcgatgtcataatcttgccgaggcacaacatatattttaggctcatctactctcttacttac

SEQ ID NO: 15281 - DNA, 413 bp, Glycine max
  unsure at all n locations
atgttgatcgagtttaaatttaatggttgtctttatttaantgggtaccaaattttatattaaaataacattaatatattttttattaattatgggtggttcattggaaaaacaaataaaatattttaaaagtttgcaaaaaaataacatccgttggcctaaaaccgatgtagaaagcacattcaacatcgattttttcaaaaaccgatattgtaaatgcactttctacatcggttttggccaaaatcgatgtcataatcacattcaacatcggttnttcaaaaaactgatgttgaatatgactttcaacattggtttttacagaatcaatgtagaaaatatttcaaaatatacatttcaacatcgattttctaaaaccgatgttattntttacaatacaacatttggttttt

SEQ ID NO: 15282 - DNA, 166 bp, Glycine max
gctgtactgacctgaaccaccataatacgttaaggtctgagatttattcacattttctgagacattggaggtaaaattcttacatccccacactcgaataagcatgaatgttcacggtaatgcttacactttgtgattgagatgccatatactctactaacatttc

SEQ ID NO: 15283 - DNA, 385 bp, Glycine max
  unsure at all n locations
agcttgtaacagttagatntagtataatttacgtttaatactatataatcttcttacttgactgtttgtacaagattacttttcttcccgtgatcaacatggatttcttttaggagatatatataaagttgatttatttgttaaaaaaatcctaaattcgattatgatattgatttgaaatatttttcattaaaaatgataattaatcttttttaccaataaaatttattttataccttctggttaaactatttgattaagatagatacattattaccacttatataaatcgtttttatcttaaaaatcatatatttttgtgagtaaatgtatttttaaagagtaaataataatatatgccaaaaatatataatactattctcta

SEQ ID NO: 15284 - DNA, 124 bp, Glycine max
acatgaaattgaggcactggtttgcattttctgtctatggaaggaactcatacatgatcttgcttctattaagcattaaaactctgtctttaactacaatcatgcacagtaaattttatataat

SEQ ID NO: 15285 - DNA, 412 bp, Glycine max
agctttgagctaaatcaaacgacaataactttttactcagatgtctgaatgaatcgcgtaatatatagagatcctcgtaattgataacggaggctctgagaaattactaacgacgttaactttttactcggatgttcgattgtgtctcgtaatatatcgagacgctcgatattcagaagagaagctgtgagcaatatctaacgacaattactgttcactcggatgttcgaatgaatctcgcaatatatcgagatgctcataattgataacggatgctctgggataattgtgacaagaataacaatttactcggatgtccgaatgtgtcccatattatatcgagacgctagtaattgaagatagaggctcgtagcttattcaaacgacactaacttttactctgatctcctat

SEQ ID NO: 15286 - DNA, 352 bp, Glycine max
  unsure at all n locations
tcttgcttgaggagcttctatggaggctagatctttgagcttcaatgaggttctttaatggtgatattacaccatggagatgcagcggaaggtcaaagagataaggagaggggatgcaccatccactatggaataagccactgaataaagagcttcaccaccaagaattgccttggataacaagcttgaagatgatgctttaatggacgaaaatactgagagaaggggtgacacgaaattgtacgaatacaagagggaaagacgcggaactttcgaagggtttcttataagactctcattcatcaaagttaccacacgtgtttaccatgcttctatntattgactaagtagc

SEQ ID NO: 15287 - DNA, 392 bp, Glycine max
  unsure at all n locations
agcttctacttgcttggaattttccagtctatctttcttattttttcgcctacattcttcttcaagaatagcttaagcaacatcattaaaggttagacaagtgacattattattatttgttatgttgataatgagtttatcatataaatctggtagactctaaagtagaagctctacccgtttgttttcttctatgttaaaatttgatgagggaaattgngaaaataaagtattcaggttttcatgtggtatgtcacccaagtggactcactcgttcgaagagtgcagagtttcctcttcaagaatattctagtctgaagtgacttgatctcatacaatttgtggaaagtatcccanatatccttcacgttntccattgttaagtgcaaatt

SEQ ID NO: 15288 - DNA, 394 bp, Glycine max
  unsure at all n locations
aatgaaagcgttgacagtgttaacatgctaaacatagaggtggcatctttgacggctactactgattcagtgacaacaatggttgcagcaaaggaggaagtaaagcagggtgttgcagatgatctgaactctacacattcaacaccctgtgaatggtttgtctatcatgatgacaagagtgctacaaggtgtatcgctattcaggtagggaaacttaattgagtacatactattgctctttgaactataattgtacttgttggttgcaccttgcaagtttgttgtaatntgcgagaatttgcaagcttaaatatgataaaatcataatcatggtggttctcaacattatctggcattgagagaatttgtgagctaaatatgataaaactgacct

SEQ ID NO: 15289 - DNA, 366 bp, Glycine max
agctctgttcaatagtgggatgaggcgtgtattttctttgtaacacactttgataaaccaagcaattctttttttttttgttatcatttagtagctagctttctgccttttatcgccagcatagctagcaacattgcaagcttttagaattcttacaagttaagcacgcctacaaaaattaattcacatactagatacttctacgagttaactattccattgcatcatttgcatgcaccttctaatgttctgagtgtcgcgatatgttaactatttcaaaactttaaatttctcgttctattattacattagaaatcttaaaatatgtataaatgaattctgtaagagtgtacaaataagctatta

SEQ ID NO: 15290 - DNA, 322 bp, Glycine max
  unsure at all n locations
tgtcggcctgattgngcccaccattgaagaagtccttgaccttgaaactcatcgagctcatcttcctccccacttccacgcctccgattatcagacgctctccatcttctctaatctccgtctttctttatgcaaatccagagagtttccaaacaacgcccaaggactctcgaaaggcttttttttctctctctctctcacttgcatcattataatttaatatatgctattgtggcccattaccctctctcacttcactcttcactctcattattccctacccaacaacaatgatcccagaacactactgagactcatctct

SEQ ID NO: 15291 - DNA, 494 bp, Glycine max
  unsure at all n locations
tgatagaggggnnnntttgaagccatgacttgtatacggcgaatacagctggtacccgggatccttagagtgatctgcagagtgcaacccaggcatgcgagctagggtgatgtngcacgtactgatgggtaccatgaggtgcacgcggcggtttgacccatgcgtggcgttgatagacagcacgggtagctgcgttcttgctttatgccacacgaagtaccgatactttttgcattcgaactcgtgaaggagacgtaatagaactgtactatgttcaatcctaacttgattctttatccagcgaacactaagatgcgcaatctggacgacatgtgacctactagctgctcatagtacaacactcgccacgtgttaacatactagtgatcatctctctctcgacatcggagagccaaatgtgctgcaagaatttcaacgtgtcgtatacttaaggtttcacctctttgtgaactatcagagatgatgcatcgaaa

SEQ ID NO: 15292 - DNA, 289 bp, Glycine max
  unsure at all n locations
gaatataaggctttntaattgtcatcattccaacattccctcactaatgacaatcatatgagaaaaagaataagaacgaanatttctaggcaatganaggtattcgcaagaaataganatatantttgctttcagattgtgatacgtaactcatccagataagtaacttttgtttgattaagtaacttttaagtgcagtaatttgtttttaaaacgttttgccttccaattcttggtattgcgaaannttattttcaaaatgtttgtacagtaaattacataactactc

SEQ ID NO: 15293 - DNA, 398 bp, Glycine max
agcttatataatacaacaatgaatgttgaataaggtatattccaatggaatttctaattataaattataactggatcaacctttgttattcaagtttttatgattcttatgttttcatttttttattttcacagttactttcttcattaacttctgcctttgaatttggttcagttgctgatttagctttaattgtattgttgaaaatgggttcctagctttcgattgcggagctagtttaatgtcaaggtaagttataatttcatatcttcatgccaatgattttcttttccctttcttacagtgcatactgttatctctattttactctttttaattaggattcagtcctattcttttattggatttcgatattcatatctacgtacttctaacaa

SEQ ID NO: 15294 - DNA, 401 bp, Glycine max
tctagactatctgtggtgcaagtaaacgcaaagtaaatatgtgatagatagtgattactttatgtaggatgcacattgcaatataccttctaaatggatggtaacttacagaaactaccaaaatccattgattacattttattggagtgtgtgattatctttaaaaaaaaattagagggtctgcctttatcagtacccacaatacgtatagactacaattattgtcattctccattttgcaaataagatggccgtcgtatcttgacatagagatattgatataaatatacaacatatctatatatatatttgtatctacatatatatatataaactcatatgcgatgagattatacatatttatatatatatatataatacagtcttatatatataaatat

SEQ ID NO: 15295 - DNA, 401 bp, Glycine max
cttgcaagcttgtgttccttgttaattattggtattagttgttgtttatgtgaatattagttgttaaatttcaattgaattatgttatatgatacacacatgttaaagtagttgcattactattagactctcttatacattaattggtttatatgaactgggagaatgattatataattagaaaaacaattatagataaaattgtctaagtgagatttaaatctaacatgaaagatgaaattagaaagcttgaccattgtgtcaattaatgtcattggtatattgaaatatgacttataataaatgaatatatgctaataatcgaaatatgacttatacactgtgtgtttaaagtgttgttgtttatttttgcacttctgagatattattatgatctttat

SEQ ID NO: 15296 - DNA, 292 bp, Glycine max
  unsure at all n locations
tatacaganatacatattntccagcaacatcttgatggcactacaacaatacaacatacatcacatggaaatattagattacagccagacacaatgcatagatgctactgtgtngngtgctntgctacattgccacatgaatttctggtacaggaactggttggaggggatcaaattcaataaagaatgtccgaatctccatccgagcaagttcaaccaccaacttcgtaagatcaacaggtcctcctctcaccaccttcagttcttcagtggagccttctactttcaatct

SEQ ID NO: 15297 - DNA, 368 bp, Glycine max
agcttggatatgatgcttcaatggaggaaaagaaagagggagagaaagagagaggtgggagcacgaaattgaatgaagacgaaagggagagaacgtgaactctgagttgtgtttcacaagactctcattcatcaaagttacaacaagtgttacacatgcttctatttatagactatgtagcttccttgagaagctctctttgagaaacttccttgagaagctcttttgagaaaacttccttgagaagttagagcttagctacatgcacccctctctatcatagctcacctacttgagaactttcttaagaaatttctaaagaactatagctaactaccatacctttctatagcttagctacccccatg

SEQ ID NO: 15298 - DNA, 553 bp, Glycine max
tcacgcgtatcgaagccggctgatatataatctcatgtgccacacctcctaagagtcgcgagagatgatccttgaagtgcaacctagtgtacgcacgcataactactcatcggagatggtagtcacgaggcttcatatatagtcctgtgatagcgttactgtgacgaatagattatgccttcgtgaaatgtttgcggggtgcatcatatccggaatcagattacacgaggacggatacgggctagcgatggcataccttcaggacgttctacattaggacaccgctatcgctcgcagatatgtgacgcgagcgaatacgtccggagcgagacattcctagacaatatcgtgagcgggtatttagattggcgcatggccttaacctacagttagcatctgtggaatgtttgtggcgtagtaaagcggtggactaggcaagggcatcaccatgaacgtggatggggacgaatacgacctacgtcaatcgtccgggtaccaagcaatatctccctttataaggccaggaactgctcttgacaaactgtaaagaagg

SEQ ID NO: 15299 - DNA, 398 bp, Glycine max
agcttgataagtatttaagatctgctggaattcgtgattcctgcgaattgtattgtttcttaaattgggaaaatccttgttggaccgtttctgggaatatctctgggattggtccaaagaagtcccaccattgcataaaccaattgggaaaatcgtaaattgtgttggtcttgaaatatatcagccatgaatgcttgaagcgggtattttggtgccaaaacaccttattccaagcatcaacgtaatcccaatatgtattacctaccggatcaaatggaactgaaaatctctttcctttgttcaagtctgaaccaaagtgtcttggttgaagaacttttagtatttggatggctgagtgtgtgtctaatgtctggtcttttgatctctgaaatgttgat

SEQ ID NO: 15300 - DNA, 397 bp, Glycine max
  unsure at all n locations
ttagccttaggttgttctatgntgcttatgttgatgctcctcctatctctaatagtttgagacctcagacaaagatgattcttgatggctcatcaagaggtactattatgtctaagagccctaaggaagaaattgtaatcattgactctatagaagccactgattatcagagtcaccatgatagggctctggttcaaaggaaagttataatggagccagatactcacaatgtaattctagcttagaatatactctcgactcaacatatagaagccttaacaaaacaaataggccaacttccttaataatctgagtagggtggatcacagaagacataccaagctcattaagtacaaaaagttctaagatgacccattgtttagtacctggtgattgc

SEQ ID NO: 15301 - DNA, 360 bp, Glycine max
ttgctgctgcatgcaagcttatcatatggcgtcgatgaataggtttctttgttgctctcaggatccttgatagataccgtcttatttcttttatgcactattgtgcccttatgacctaatggactctctttgacagtccaatagaccacagcatatatattttttctttgattattactattattatttaattttcacatgttctcttctaattctttcttttattttcttctcattaagctctttcatgacttcttacacccttttttcaagttatctctgctttttgataatactttttgttctttttcactttatatatgtctctctttttagatttttctctgctttcgttttaca

SEQ ID NO: 15302 - DNA, 211 bp, Glycine max
  unsure at all n locations
tgtagtataaagtgtatattgccncacatttgtttcaagcctgtgttatcgtacggccggccctgtatgatatgtgacngagataaaagcgattgtgtgcaccccacatccaaatgccccaaatgtccgtcccagaacaacacgttctcaataggaaattacaataattataacgacggctgatatgaaatgcgtttttgaacgatttctg

SEQ ID NO: 15303 - DNA, 337 bp, Glycine max
  unsure at all n locations
agcttatgcgcatatttccttacgaacgttcacttgcacaagacattctattaactaagaaaaatgcacccatatacaatcaaggcagcttcgttacctagattatttacatgtacttccaaggtgtatttgttacctacatcacacacatttcctttgctaaattcacatacatgcatactctaagcactntggctatcgaaaattgcatacgtgcatatcctgntatttctaatacctatacatacacaaactttatgataaatctngactatctacacaataaggtgctacatttcatgccctttttcaaagttttgctacctaaagccgcatg

SEQ ID NO: 15304 - DNA, 374 bp, Glycine max
tgtaaagcattgatttgatactggcttcctcatcatgtggctcatgatagtttacaattaatgatcctttgctaccctgcaatgagacacacatagatacacagacacgcacacatagagaccaacacacagacacgaactcagaacacacacacacacacacatatagatacacacactacacacacacagagtcacacacacttattgacacagacatagactcatatacactgagccacagacactcacagaaacccaacccatagacacacactctgtgtcttaacacacacatacactaatccactctcacagatgggcagacctcaccccataaagagacaaatcgttcacatacacacacaacacta

SEQ ID NO: 15305 - DNA, 425 bp, Glycine max
  unsure at all n locations
agcttggaatgatgcttcaatggaggaaaagaaagagggagagaaagagagaggggggagcacgaaattgaaggaataaaagagggagagaagtggaactttgaagtatgtctcacaagactctcattcatcaaagttacaataagtgttacacatgcttctatttatagactangtagcttccttgagaagctttcttaagaaaacttccttgagaagcttctttgagaaaacttccttgagaagctagagcttagctatacacacccatctaaaaactaagctcacctccttgagaagcttccttgagaagctagaccttagctacacacacccatctaaaaactaagctcaccttcttgacaaaatacatgaaaatacaaaaaaaagtccctactacaaagactactcanaatgccctgaaa

SEQ ID NO: 15306 - DNA, 372 bp, Glycine max
  unsure at all n locations
agactatagtctaaaactctgaaggataacaatgacactaaccaatttgccacaaatttaattaaaaagccataatggtgagtaagagtttccaattactgcagtgaatttagagacaagttttggttcattgttgaatgcatanggcatgactatagtctataactctaagaaaaccataagaactgaacaacaaactgaacaagaaaaccataagaactgaacaaacttataaaatataacatgatttataaataatcttataccttaactatgtgataaaagttcaatccttcacctgtangcattgggaaacattntntattattaattattanattcaattaaaccacatctcaaggaacgggtata

SEQ ID NO: 15307 - DNA, 424 bp, Glycine max
  unsure at all n locations
caagcttgactctaaagagcatcatctatcatccaaaatttgtacaagaattattgtgcttgtcgttggtttacccttcaacatgctggaacaactcgtttctttttcaacaaaataaaatgactagattgtattaatacaaggtaaacaaccttatttcacacatgcttctcaagcatatttgactgtagttgtgcatcatgttattagaatgagcatgaaaaagcatgttgtagatgaccagtagaaagtctcagcttgactattaacacgttccatgacatcagtggcaaggattattctaaaaaaagaaagaatttgaaatntcattntttattctttactttaattntaatgtaatatctctattagttaatctatttaatagaatagaagttataaaatctacgtaattcacggttaa

SEQ ID NO: 15308 - DNA, 335 bp, Glycine max
  unsure at all n locations
gtattaattattattgttaaccttccagtatatatatttcgatatcatcattcatgttggtgtctttcctctgcgggcatggcgattttgtcctaatttcttttagaatgcatttagattcataattttacttgacgaaagcaatttattagataatttacatctctttaatctaanatcgattgtttgaatgttcttttataaagaatctaaattgttataattctacacaattaacaatatagaattttaatttccttctaacaagtgagaaattgacattctcttcttgatcaaagagccttaaaaaatatgtgcgtaatttctttaatacc

SEQ ID NO: 15309 - DNA, 405 bp, Glycine max
  unsure at all n locations
agctntatcgcccatgtaagttaagatgtactaactgctgccatcgggcgactagagcaccctggtcgtgtccgtgctgctgaaggtcagtggtgaggaagtctgagatgttgatgctcgtgttcctgtaaccactctagaagttcagttagtggggtagacacttaacaccttccttggctgacacatcttgtaaagccttttttagaacaagtatttcactttgttttttttaatacttattaataaaggatntgttacaaattatgttttcactgtcattcgcttaatgtttattaactgtgtaggataaacagggatcggcgaaacctatagattatggatcctgacattgatcccctgtccctgatgacattgaccatcccacatcttttccttaagttg

SEQ ID NO: 15310 - DNA, 346 bp, Glycine max
  unsure at all n locations
tgatatatgccaaggtgccggtttggccagcggttcatggataaatgaatgtctgacattatttccatgacacacatgcaacaatgatgaattggaaatattatgcaaaactagtcatgcatgcaaccatgtggacactcaagcatcaagtttttatggtcatgtgacactagggctcaagatncattttccctctataagtcaacctagtgtttcccaaacatgatttttttttatcaattcatgcattcatccgagtccaatttgggcgtcggggaaattatacaacattcacccttcagtgcatacacatttttttttcaaaactggtgtatgatcagtgaat

SEQ ID NO: 15311 - DNA, 417 bp, Glycine max
  unsure at all n locations
agcttcacatggagctacatcagaatggtcttaaagtgtgggaattgtggcagtgctaaggtaagtcccacttgagaggagaaggtagaaagattgcttgagaagaaaagctctcttaatatctccttttcgttggactagctcatctaggtccctatatggaaggagttcaaccttgtcccccacttccatattaagcccactaaggaacctagctatgcttgttttttccacctccctaagtccagctcttaaaaggagtagttccatttgttgtctatattctttgacactcatacttctttgtctaagcctttggagcttgtccataagctccctttcatagtangagggaatgtgcctcttcctaagggcattcttaagatcatttccatactttactggangatccccatg

SEQ ID NO: 15312 - DNA, 411 bp, Glycine max
  unsure at all n locations
acgattgatcgngacccagtgctgagagaaacgaggatatgggctacgtgggagtacatgagctcagttggaggtgggcaacaggggatggtgggtttatgcgcgcattgtggatgtggaaaacttgttgtgcaccatcgcccgaccgccacctagtaccacatgtgatgggtaccccataatcctacaagcttgagatgaggaagtatagaagggtgaaactttctgcttttattcgttgaccacagagtggtacttggagatatgtcgcggaggtcaagagaccttggggacgtcatgtggggtgctattggccaaaaccaagctggaccaatcccgacccaaccctggcatattcagtcagtgagacctgtgatgacctaaccgtcgagctcttgcagtcacagataa

SEQ ID NO: 15313 - DNA, 381 bp, Glycine max
  unsure at all n locations
agctttgacttgagtcatcaagagattataaatatgtgaccatggcatgagtttcaatgaatgatctctcatctatcatctatctttcaatctatctttcaatatcttctttcatctctttcaacagatctttctaaattatttctcttcatttttctaaaagtttttttcaacactttctcttccaagaaaagttttttgttcanaaacttgtgctattcatctttttcattcacttatccctttgccaaaagaaccaaggactaatcgcctgaattcttttgtgtctctcttctcccttacaaaagattcaaaggactaaccgcctaagaattctttggattcttccctttcccttaagaaaaagattacaaatgacta

SEQ ID NO: 15314 - DNA, 481 bp, Glycine max
  unsure at all n locations
ctataatactcagctttatcaagagttttactctctggtaatcgattaccagtggcaagttntgttttcaaaaagctntcaactgaatttacaatgttccaatcaatttcaaaatggtgtaatcaattacaatatattggtaatcgattaccagtgtgtttgaacgttgaaattcaaattcaaatgtgaagagtcacatcctttcacanaaatgctntgtgtaatcgattacaatgatttggtaatcaattaccagtgataaattttgaataaaaatcaaaagatgtaactcttccaatggttctcaagtttttctaaaggttataactcttctaatggttttcttgaccagatatgaagagtctataanagcaagaccttgacttgcatttaagaatcattctaacaattatacaatcctttatacctttgaactctttgacatcttcttttctcttctttgaaaagtttctaaagttat

SEQ ID NO: 15315 - DNA, 335 bp, Glycine max
agctttgctttatttgtacggcctcccgtacttgaagcctagttgcaggcagtgttgctgcgcacaagaccccgagtctgaaaacagtgctcatttcatctgagtaaatggcttacatgacatattcgtctagcaattcctcaacatatacttcaatcaaaacgtgacgccactcccattcagaaagagatgagtgttggtctccataatatgcttgtttaccagttgtcagttccaataggactaccccaaagctaaacacatcaatcttttcactaactcgtgatgcttgaacatattctgcaattcaaatatgaagaatcacattgagaata

SEQ ID NO: 15316 - DNA, 258 bp, Glycine max
  unsure at all n locations
tctagctacaatctacaacctgctagcaatttgagaattggatctatcaggaggtttcagacaatccatttcctcctcatcgatatccctgaagcactgatctaccatntcttcgctaaccagctctagctgtgaaggttcccactagttaattaataaaataaaacacacaacatgaagggtaaaataatcatttatataacataataatctaaattntgtagaaagcagatacgatangagaactatcttttaatt

SEQ ID NO: 15317 - DNA, 98 bp, Glycine max
agcagctgttttcaatatctatcgtctcgacatactgcgggacacaatccgacaccctactcttcagcaattggcgactgaattggctcatatcttct

SEQ ID NO: 15318 - DNA, 485 bp, Glycine max
  unsure at all n locations
tttgagcncttgaaaactgacgncnttgntgaatctangcctgtgacananngaccncggaaanatcgggacggtaagattgagtagccgaacgaattacttactcattagagaataactgtcaacgcngatggaccattggacaccatcactaatctagacccttgtaagtgaagacatacactctggagcgactcaaaccactatggctttacactcggacggactatagagtgcgagaataataccagacgtgggaacttttgagcacacatattgagaaattatacaagaataacttttacatggtggcgcatcgagtctgctaatatggtggcgtcaaaataaatactggactcagtacaaattaaagacttattattctttgtaagcgaagaaattgtagaagacacatgtcgtataaaaatgactctattattaaacgctcttgtttgaatgagatgcatggttgtttaatcgaatta

SEQ ID NO: 15319 - DNA, 310 bp, Glycine max
  unsure at all n locations
agctctagattaacaacatgacatcatcacatcataaaacacaaaccttcgattaacaataaatatggtccattaccaatctaaatctaaattgaatgaaaatcaaaacctaaacaagtgcatggcaatagagagagttattaattaattgaatgagggaaaacctaaacgaggataggtcagttccgaattgaacaatcagtggaagctaagattaaaatgttactggcaatttgcaagttgcaagacgacgacgctntggaggaataataatcataaaacaaagcgagcaacagttaagtgaataaac

SEQ ID NO: 15320 - DNA, 313 bp, Glycine max
  unsure at all n locations
ctcacgcttcatgattcacgtatattngatacaagatntcttaccccacctaaccgttacttttcatcacacttgacccacttggagtagtgaacttatcctttttcatgaccgaatttaanaaataatgaaccacatcttaatgatcatcttttccctctctcaatctgtgggaagactttctagaagatngacataatttaaggcaagaggagctccggcatttagccaaatccaactcgtgagtgtccatgaagcttccgcgttgcattttctttttttctttataagaaacaatanaatatatatatca

SEQ ID NO: 15321 - DNA, 407 bp, Glycine max
  unsure at all n locations
agcttgtgatatttgttaatgctttcttactaattatggttatttgactttggtattaatttattntataataaactcaccccttgtaattntgtaccgtgtggttggtacctgtgatgatcgcgaacctttgttcgtgggagcagaatgacaacagtagagtatgagaagtgaggttcttttgtggagctgctaagccgacgtgatgacgttgggattatcttgggagagagttgtgttttttaatcaactcctccatagctggttccacgattctttttgttgacttaaagaagtaaataacaaatttaattatatgtatgaacaaatttacttttcattatgtgaatgatatgtaatgaggtattatacatatatatatatctatgtatatatatatatatata

SEQ ID NO: 15322 - DNA, 407 bp, Glycine max
  unsure at all n locations
ntcacaagttatctcataactcanagccttgtggcacaacacaatagctcttgcttcatgtgtttaccttcttgctgtgtctattccattgtggacaagtgcatcaagtgaagtatgtggatgcctcccgagttattcgccttctggtagccaaaggctctaatgaagtatgtngataccactgtcgtccaggaagaccttgttagaattaatgtctcatgtgagaggcatgtgactttatgtaggactaataaataaatcattaataattaacgactaaattgttattgtgtaaataggagaaacttctaaacgtaactgttacttgatggaagtagtgggtgtanaaggggttaatacccactaacttgaaacaaagtcccttctgacacaagtgtctctctatc

SEQ ID NO: 15323 - DNA, 372 bp, Glycine max
agcttttctcttgtggagacggcgacaaatatcggttgggacatggaaacaaggaaacgtaccttcaaccaacttgtgtctctgcacttatcgagtataatttccaccagatagcatgtggacacaccatgactgttgctctcactacatctggtcacattgttactatgggaagcaatgaatatggtcaactatgaaaccatctggctgatggaaaagtacctatcctagtacaagacaagttggtgggtgaatttgttgaggtaatatcatgtggatctcatcatgttgcttgcttgtcatcaagaagtgaattgtatacttgggggacaggtgccaatggaagattgggacatggagacatagaggata

SEQ ID NO: 15324 - DNA, 462 bp, Glycine max
  unsure at all n locations
tctattctaaataacccctattctaagtgttatatatttgttacatcacatctcatgatgattntgaatgtatctaaatatgcaatagctcaaacaaactaagtgcaaaagtgtcaaattaatgcttatacatttctcttanaaaatggtaaaaataaaaacattaatatttaaagttggacgataaattaaacttcagcagatgggttaccaaagcattatttacagtaactttaaggtcttcctgattgtggagacttacatcatggaaggctagcaaattgagccagacattcctaccactcataagagatactcgccgttctgatgtgttacctccaaaaatgacaaacactttttcgagatccttcacggcgagaaaaagaacttgtacgctgtagagatattgacctgcttggaagctgacctgatataccactaactgatgcaagatttggaaat

SEQ ID NO: 15325 - DNA, 331 bp, Glycine max
  unsure at all n locations
agctttacagcagaatttagtaatgacccactaacctagaattaaaataacttaatgccattaacctatggaattaaaacaaacttaatggctgagtgtaactgaaattgtggcaaccaaaagtcacccccaacagccaacaagtcagccaccatttggtctcccaaaaggctgatgcctaggttgccaattgggcccttattacaacttgaactaaagcccttntagttgattaacccaaaacatatttttggccagccaactntacaaggattgggccattatttagacaaactaaacactctaaaattgaaataaagtggtgtcattt

SEQ ID NO: 15326 - DNA, 317 bp, Glycine max
  unsure at all n locations
ntacagcagantttagtaatgacccactatcctagaattaatataacttaatgccattaacctagggaattaanacaaactaaatggctgagtgtaactganattgttggcaaccaaaagtcaccctcaacagccaacaagtcagccaccatttggtctcccaaaaggctgatgcctangttgccaattgggcccttattacaacttgaactanatgccctttagttgattaacccaaaacataattttggtcagccaactttacaaggattgggccattatttagactaactaaacactctataattgaaataaag

SEQ ID NO: 15327 - DNA, 359 bp, Glycine max
  unsure at all n locations
agcttcccaagttnttaagttcttcctcaaaactgtcctaagcaaagttcccaaagtcctattaacaacttccgtttgcccatcgatttatgggtgacaagtggttgaaaataacaatttagtgcccaacttgctccacaaagtcctccaaaaatggcttaagaacttagagtccctatcactaacaatgctccttggcaaaccatggagtctcacaatctccttgaaaaacaaatcagccacatgggaagcatcatcaacttttttacatggaataaaatgagccattntagaaaacctatcaacaaccacaaaaatggaatctctaccattgctttgttttggcagccccaaaacaa

SEQ ID NO: 15328 - DNA, 279 bp, Glycine max
  unsure at all n locations
tgccacccagctcgcccaggcgagcaaggatgcttcctccagaagcaacagccttctggaggaatcttctggagggcccaagtgggcctgcgtgctatntgcacccccacttttactaagtacacccgctgccttgttttggagtttctttattcgtagagttatggacactcacgaatttcttagcgatacttgttatctttccgtaatgttacagaaccttgtggnatacataaacataccctttatgacttacggaatgttacggaaactcactaa

SEQ ID NO: 15329 - DNA, 422 bp, Glycine max
agcttcatgtcttagtcatgagtgctagacttgtctgacattaatgaaggatgattaccataacaggaagggtcgacgtaattgaacatcttttgaagttttcaacaactatctttcgtataaacattacattaactacactcgcataatatatttgactgtttttatagttgttaggtccgcaaatttgattaagtttaagacatgtgtacaactaattatggcttttgtgggtcctttgttatgactatgttttgttcatgggttgggtacttcttccctttacattgaatttagtttgttcgctgatagaaaaacacattgtctatataactaattatgattgccaaattaacttaattatccatcatgtgcatgagaatatggacaaaacataaatattgcgtattgttatatgataa

SEQ ID NO: 15330 - DNA, 398 bp, Glycine max
  unsure at all n locations
tattgctaaatgctaatcaatcagcaattctcacagaaatcatctgttcctgacaatgttagaaaccatcagaccatggccatatataactgtgcaagcatgatagaaaacaaattataaaactattagaaatgaatgaggaagtttgacaaaataataagacaaataccttttcattgtatatacgaagcctttctttgactactgctntagtatcatctgaccgagtaatgagctttgacatacagtgtgcaggaggaagaagtggagccatgaccattccaggacgcccattctcactcttgatgctaatggaggcaatattaaaaattccttcacattgattacaaattcttctaccaagggcatttgcaagcagtgcttcttcttggagcttc

SEQ ID NO: 15331 - DNA, 238 bp, Glycine max
agctcagatttgcatgatagttattaaggttgcacattgctttgaaatcaggaaataccatatgcattattaaagcgaaatactactcataattataggaaaaatagctgcatgattgaacttacgagacttactatacgtggtttggtagtataggctctgcttataaaattactgttattttgataatctacagtaacttttaatattgagtcattggctttcgttaccgtagggg

SEQ ID NO: 15332 - DNA, 502 bp, Glycine max
  unsure at all n locations
ccgaacaccgtgccgcgacccttaccgggacacccccgccccccatgaccttgatcagcctgaanccagctgtgcatgcccttaccgactgacacgggatgagnacncngtctccccaccgggattgggagaacgcaacacacatttttattgacggaaaccgactgggatcatagaagcatgctagcttcgtgacttacatcaaggacgccacttatgagtttgcgacagcaatgctcttaaccaataatacatagtatgctaggaatgcgctatcaggagggataataacgcgtccgttatttggtctcattagacagaaggcggtgtacgtattcacgtaagaggaaagcctcattgtggaacaacataggtggcagaatgaaacctggaattcaagctttaggcgactagcacaaatacacacagcactcgcggatgaacatgctcggccataccacgacggagggaaataaccccaacaacgagtcggggcaacccn

SEQ ID NO: 15333 - DNA, 413 bp, Glycine max
agcttagactcagttcagcctaccatcctcagactgatggccaaactgaacggaccattcagtcgttggaggacattttaagagcatgtgtcttatagcagaagggaagctgggagggttttcttccattgaaagagttcacttataacaacagttttcattctaccattggcatggctccctatgaagctttgtatggtagaaggtgtataacacccctatgttggtagagcccggagaatgcctcaccttacgaccagaagtggtacaacataccactgagaaagttaagttaattcaggacaggatgagaactgctcagagtacgcagaccagttatcatgataagaggatgaaagatctggaattcgacgttggtgatcatgtattcttgagagtcactccatggaatg

SEQ ID NO: 15334 - DNA, 320 bp, Glycine max
  unsure at all n locations
tgagatgaggaagtgtagaagggtgaaacttcctgctnttattcgttgaccacagagtggtacctggagatatgtcgcgggggtcaagagaaccttgggacgtcaggtggggtgctattgcccaaaaccaagcttgaccaatcccgacccaacccgggcatagttagtcagtgagaacctgtgatgtacctaaacaggcgagctcctggcagtcaacagataaaaggaacaaagacgacaaagcaaggaggcttgtgtggtggctggccagctgtgaactttgattgatatatgggatatggcctctggtaatcgattac

SEQ ID NO: 15335 - DNA, 422 bp, Glycine max
agcttgacataaaccccaatattctttgttctacctaaccactactggctttgaacaaatctacaacatttgctggaggttttgctcactgactaaagtatgatcatctaatagacgaatgtatcatttaacacttttagtcttttctttcaatgtatacaaagtgttttgagagctttgtatctttataagaatttacagaatgctttacaagaaaaaatgaaagaaaaattcacataaatagttcgttttctgtgtttcttcaaatatatattcttcatcttcaagtatccattgtctcacaacagttgaattcttcactcagatctttatctgaagtctggagtctattggagcatctaatgattgcattaaatgcacttatctcttaatgaaatgtccatgttgataggatggtgtgt

SEQ ID NO: 15336 - DNA, 449 bp, Glycine max
  unsure at all n locations
gctattacgtgacactatgatactcagcttatagggagtgatgcctatgctagtgtgataactattattataagctaaatttataagggataaaaacttatcccaacttacaccttcatcaagaacacatactctaagcatgtcttcaaggttctagatgatcctctntgattgactatccatttgaggatgataagcagtgctaaaacttagcttatacccaaaagctcgctagaatgctttccaaaatctaagatacctatctaacactatagaggtaggtatgccatgaagcttaagtatctccttattgtaaatgtctgctaatttgtccaatttgtaggtctccttaattggtaagaagtgagcagacttggttagcctgtccacaaccacccatatgacctctagacccaaacgaagttttggaaaactgttacaaaatccct

SEQ ID NO: 15337 - DNA, 385 bp, Glycine max
agcttcacttaccatcacacataaaaataagatttggataaagtagcatcaattattcaatcaatatattatataaaacacaaatattaattgtacttgttagtacacgtgtgttacgctctggtaaaaggatgatccacttttttttaagtttaaaattatgataaaaaggaaggagaatatttttgattcatgccaattatattgatataatcatttatgtaaataaaaatagtaacaaaaattaaatgtgcatttatgataattaaagaaaccaagcagaaaattttaaattacatttaattatttaatttattattattatattatataaatgcttatttgaaactttgtaaatgcttttctaaaatttaaattcttaaaa

SEQ ID NO: 15338 - DNA, 323 bp, Glycine max
  unsure at all n locations
gattcatgggttcgagctatgcatgatgaaattattgctttagaaaggaatcatacatgggtgcttactganttacctcagaataaaaatgtgattgtgtgcaaatgggtgtacaagatcaaacataatgtgaatggctctattgaacggtataaagctcgcttggttactaanggctatacacanattgaaggctangactatttagatactgtttctctagtagccaaaattactaaagttcggcttttgttggcactcgctgctttgataagtggttatcagacagcttatgtaataatgcaaactcatttgatcttatg

SEQ ID NO: 15339 - DNA, 388 bp, Glycine max
  unsure at all n locations
agcttggttatgcagcanngtgtgttttgttgtgcatgtccttttgtttttgacatcatacaccgtggacatggcccatacgagtggacatggtccaacctatgttgtcagtagcagtcttcgcagttntgtcaacaataaaaagtataatgcaataaaaaattgtaaaaatactatttgaaacataacatggaatataacaagagtttaatacctatgcattgatagtataaaatagattntccactatcatccaatcataaattactgtttgaattactttaagataattattttaaatgttgacacatttaccatgttagtgcatatatagcgttctaggttgccaagaatggtggagttgactggaatgaactcatgagttctg

SEQ ID NO: 15340 - DNA, 438 bp, Glycine max
  unsure at all n locations
tcatgatgaatcaagatngattcatttagttctgatgataactaagatgatgacaaanagctcanaagtcaagaacatttcatgataacaaagatgatgatctcaagacatcaaagaatgagttcaagattgaatcaagtacacttcaaggttcaagaggaaatttgatttcaagaatcaagattctaggtacaagcttccaagaatcaagatcaagattcaagattcaagattcatgaatcaagagaacacttaatcaagataagtatgagaaagtcttttcaaatactaagtagcacatggatttttctcanaatctgtttccaaagagttttactctctggtatcgattccagattattgtatcattactttagcgaaatggttttaaaaactttaactgattacaatgtccattgatcaaatgttgatcaatac

SEQ ID NO: 15341 - DNA, 274 bp, Glycine max
agcttcatatttgaggtctaaggcaacattcggggtcaaatacccgtgtcataacataaagggctgaggggtatttcgggttctatagaaaagaaacatatttttgaaattccgatcacgccaatgtgaccggtgttcggtgaatgccgtaaaaacaatctcaaggttataaaaagataactcttaaaatgtctcattctctatggattttcagaggaagtgtaaaaacaccccattacagtacccaacacataaaagacactaagaggagctc

SEQ ID NO: 15342 - DNA, 209 bp, Glycine max
  unsure at all n locations
tagtagtgaatcacttattgtgaggacaagtagctatgacattaaatttaattgccattcttgttgcatatntctaaccatgcttttgattttgctgagctaaaaagttgaatgtgggcaccaccatacttagntgattgaagcacatgaacacaataattgttgaatgaacgggaatgcatgaagagtgtgtatgtaactttgctttg

SEQ ID NO: 15343 - DNA, 375 bp, Glycine max
  unsure at all n locations
agctttgatgcaacatttggagaggttaatgaaacaacgagatgatgcgctccatgagaggttggatcaaatggagaatagagatcataatgaagaagaaaggagtagaagagggaatgatggtgttcctagacaaaactgaattgatgatattaaactcaacattcctccatttaaaggaaagaatgatccagaggcctacttggagtgggagatgaatatagagcatgttntctcatgcaacaactatgatgaggaacataaggtgaaactngccgtcacggagttttccgactatgttcttgtgtggtggaacaagctacaaaatgagagagcaagatatgaagagccaatggttgatacatggatggagat

SEQ ID NO: 15344 - DNA, 428 bp, Glycine max
tggagaggatgcttcaatggaggatatgaaagagggagagtaagagagaggggggagcacgaaattgaaggaagattaagggagagaagttgaactttgagttgtgtctcacaagactctcattcattaaagttacaacaagtgttacacatgcttctattgatagactaagtagcttccttgagaagctttcttgagaaaacttccttgagaatcttctttgagaaaacttccttgagaagttagagcttagctacacacacccctctcataactaaactcacctgcttgagaagtttccttaagaagatcctaaagaagctagagcttagctacacatacctctcttatagctaagctcacctccttgagatgagaagctagagcttagctacacaccttctataatagcttagctcacccccatg

SEQ ID NO: 15345 - DNA, 394 bp, Glycine max
  unsure at all n locations
agcttctaatgctaaaatatacatttaatcttttatgttntctatgatattctatttgatatgttatttttttttaaaagctaagggtcaatttagggtaattgggagtttctgattttttattttcaaatgcaattttgataacaaaatgcttttagccacaattgagctaaaataatttgactcattatttttataacttttacattcattctcaaaaccaagataaatattgcgaatctagttttaaatttaaaagaatgcacactctctatatttgacatggtcctttccattgctatcattgcacaaccaccatctccatcggcaacgacactactcaccaccacaaccacaacatcatcatgactatcttcactaccaccaccgttga

SEQ ID NO: 15346 - DNA, 350 bp, Glycine max
  unsure at all n locations
tatagaagcaaaaatggacccgaactaccaaggtctacatataataagccaccanaccagtgaaatatataactgaatataaaaaagtgcaacantttggagaaggtaaaatggttcaagaggcatactgctagcattatgagtagcatntgcaactttatataattcttcgtgatcatcatcangttcacgtggatagtcgcatttcatatactgtgagagaacataatcaaaagccaatatacataacgaatatttacagactacatgttaacctagaaataaattataccacaataaaaataataaattaatgattgacaagtatatgangataatgaaatatacta

SEQ ID NO: 15347 - DNA, 376 bp, Glycine max
  unsure at all n locations
agcttagtggattatggggcacccgtcatatgtggtagtactatgtggcaatcgggcgatggcgcaaatcaactctcccactttcacaagtcaaacataaacacaccatccccagttgcccacctcttaactgagttcacacactcccacgtagcccttatccacgttcctctcagcaccgggtccccatcaacccctccaagctttcacaatatccaagcaattcaatcccaactatcatgaaactaccctgaaccgagaaaacagagtagaagcagaaaactctgcccaaaacacatatcaataccacaactttccctactcaaataccccagtaacattctctntatttcgattcagtaaccattggatcaac

SEQ ID NO: 15348 - DNA, 203 bp, Glycine max
  unsure at all n locations
aggctcttactccttcaattntgcatctcaaagtctctgaccaaatctatgacttgcatacctttaattctttcatttacttcgtaatcattctggaagaaactccagatntcatatgttgatctgatggccatgattctagggaagaattcttttgagaccaccacaaaccaagtagctcttgcctttgactatcgtgcttt

SEQ ID NO: 15349 - DNA, 328 bp, Glycine max
  unsure at all n locations
tagcttagtttatgttagtctaaacctaagagggctgtctaaattaaacctagtcgaacaagagggatctgaggatgaagcttggattgattcagtctaactagggatcgaggtttagtaatctaggctacaacatagaacacaaaagcataatttattagataaacatctttatatacatcagttggttcgttagaaagatctaatatctttacctactgctgtcaatcttacttacttgcatttgtattgttttaacctanactantttaatactgtcctanatcataattatcaatgtttctttaacaatgccttatttctgaat

SEQ ID NO: 15350 - DNA, 402 bp, Glycine max
  unsure at all n locations
tcttatccaaggcacattcttggtagcgaagctccttcttccatgacttattccctagaggatggcacctcctctcacctcttctcctttatcttccgctgcaactccatggtggaaaatcaccattgaaggacctcattgaagctcanagatccagcctccataaaagctccacaagcaagcttccatcaagtggtatcagagcacaagagctttaagtaggtgctccttaaacctccattaatnttntgctttaccttctcttccaattttgtttcttcatttttctccatgtatctcctcacatgtcttgtgctanatgtttttaacatgaatttttagagtttncaccgattaaacttgttatagaagctatattttgatttctatggttcaaatttc

SEQ ID NO: 15351 - DNA, 363 bp, Glycine max
agcttctatataagctgaaccattttatcaataaacacaagttgagttttattcagaaaattagagtttatctcttttatcttagtgagagtgattctcctaaattcttgagtgattcaagaacaccctggctgtatcaaaggactttcacaacctttgtgtgttgccctcgctggaaagagtgattctttccttcctatcatctccacccttgttctttcaaaccacaattccagaaaatccacctctgcccaaaattatctcgtgaccataactcccattttacacactcaaattaagtgattcttgatcctaaattgaatttcaaaacgagatctttcacctcgttttggaatcacctca

SEQ ID NO: 15352 - DNA, 303 bp, Glycine max
  unsure at all n locations
tataatatattgatacgctaganattaaacatcggaagctctcgaganattcacatggtcatgacttttcagacggatgtccgattatggcgaatcacatatcgagacgcttcataattgaacaacagatactctggagaaattcaaatggtcataactgctcacaccgatgtccgattcaggcgaatcacatatctagacgctcaaaattgaacagaggatgctcttcgaaaattcaaatggacataacttttaactcggatgtccgatcacgcgcatcacatatagaagctcttgaaaagg

SEQ ID NO: 15353 - DNA, 426 bp, Glycine max
  unsure at all n locations
agcttcatgatgaatcaagagtgattcaaagatgttttgatgataacaaagatgataacaaaagatgatgacaaaggtgatgacaaaaagctcaaaggtcaatcaaagaatgagttcaagatattcaagatagaatcaagaacacttcaagattcaagaggaaagttgatttcaagaatcaagaatcaagagaccaagatttcaagaatcaagattcaagagatcaagattcaagactcaagattcaagaatcaagagaaggcttaatcaagataagtatganaaggtttttctcanaaattgagtagcacatggattnttctcanaacatgtttaccanagagtttttactctctgngtaatcgataccagattggttgtatcgattaccagtagcanaatggatttgaaaaagtttcaaatgat

SEQ ID NO: 15354 - DNA, 416 bp, Glycine max
  unsure at all n locations
ctangatcannattttntctctcaactattcttcattcttcttccttttttcacttctgttcttcctttctcttgcacaaatttcacggcttgtccattggtgatgatcatggaaggctaaacacttaattaatccaaggatccactataagtaaggctgaatttgagttctggtttagtatttataatctttgtgaatgttcatcttttcttcaatcctaatttttattttcatgattatgattatgattaggattgaaaatggattaagttatggattcatttcctaattttcaaaattaatcacagattgtttggatgattntccaacttaatttgcgatctcaaacaatntaaggattgatttgattgaactatctctaatngcattgactgaactttcacactctgagcat

SEQ ID NO: 15355 - DNA, 410 bp, Glycine max
  unsure at all n locations
agcttggttcataaagaaaggtgagcataatgcttatgtatgttttgaatcaaatttaactgaagttccccataatacttggtggattgattatggatgtatgactcatgtttctaataagatgtagggattccttacaacctgaaccataaacccaaatgaaaagtttgtctttatggggaatagagtgaaagttccagtggaagctgttgggacttatcatttaatcctagacactggatttcatttagacttatttgatactttntatgtacctagtatttctagaaatttagtatctttgtctaaacttgatgttgctggatacctctttangtttgggaatgnngtgttcagtttgtataaacgtacttgtatgaatggatctggtacgctttatgatggttata

SEQ ID NO: 15356 - DNA, 350 bp, Glycine max
  unsure at all n locations
tcagcttgacaaacaatanattaggttttatggttagtaaattataaattttggctaataaagaaaatganagatgaaaactaanatacctaaatatcctcccatatcaaatccttctgagtagcagggacttccttccaagtgttgtatgtcacgtcgaccttatcatgagcgataatccccaaatatattcttaatttcttcttgtgcggactatcgtccttcccggtcgcaggatcgatgtggaccaccgatctctctgccccaggtggtctagtggccaaagatcgtagtcgtgtggctttgcgtgttcgcttcaaggtagatggaaactctgatgctactatagc

SEQ ID NO: 15357 - DNA, 380 bp, Glycine max
agcttccgatatgggctatacgaaagggaaatgggtttccagaatggtttatctagaattgtggagtaagcttccggaatatccattctgaaagtgttatttcgcagcatatttgtaatccagaacaccaattttggaagtgacattgtttgtaaacgtgttccggactaatatagttttgtctctagttgtgtagcttatgttgattgcgttgtttagtaatgtcaataagattttaaatttcaattttatggttgcaatatgtatatgttacacgtcatcaaacatataaggccaagaaaaataactaaatatttgttctaaatatgaatttatttccagcatatgtttttgtcatagatatcatctacgatgaattg

SEQ ID NO: 15358 - DNA, 390 bp, Glycine max
  unsure at all n locations
tatgccattaggaggcttcacccctgtgaatgctgaaaaacagctcctgtgtctgaatttgagtcaccaaagttgtaaattgctgggaaccaacattagctgaagttagaggcattcccagctgaaacttgaatgaatgtgcatgctacacagagatngaaccacacaactacataaagcagcctcctacaattcatggttgtggtagcaatcactataagtcttactaagaaaatatgtttcttcaaaggtttcctctaccactcaataaatatggatcatgaagtggcgttcttagacttccgtgaaggcacttactattcatgccaactctgaagaagagagattatatcaccgaccatttttctctcatagaagtatttcacataa

SEQ ID NO: 15359 - DNA, 411 bp, Glycine max
agcttgtatgattatggggtacccatcacatgtggtactaggtggcggtcgggcgatggtgcacaacaagttttccacatccacaaagcgcgcataaacccaccatcccctgttgcccacctccaactgagctcacgtactcccacgtagcccatatcctcttttctctcaacaccgggtccccatcaatcctcccaagctttcccaacatcaaagtaaaacgacattcaaacagcacaagctatcacagccaagcaaaacagagcaaaggcagataactctgccaaaacaccaaccaaatcacagcttttctcacttaaagactccaataacaattccttcgttccggttcattataccgtggaatcgactcgaaaatttactggaagtctttagtacataagcctacat

SEQ ID NO: 15360 - DNA, 298 bp, Glycine max
gatgcaacatccggagaggttaatgaaacaacgagatgatgcgctccatgagatgttggatcaaatggagaatagagatcatactgaagaagagaggatgagaacagggaatgatggtgttcctagacaaaaccgaattgatggtattaaactcaacattcctccatttaaaggaaagaatgatccggaggcctacttggagtgggagatgagaatacagcatgttttctcatgcaacaactatgaggaggaccagaaggtgaagcttgccgccacggagttttccgactatgctctt

SEQ ID NO: 15361 - DNA, 399 bp, Glycine max
  unsure at all n locations
agctntcaacaaaagtcttcacaaataatcatcacacagcagaaacctagcaagactacccataatatctcccaaaaccccatacccacgaaaatcaagagggaaagaagtccacccaaacctgaattttcgaagtcccactcgtagccacgcacttcacgaccccgaaaatgccctcctttcgcgatttggagcagaaatgagtaccaaaggttggagctntgttggggtttcaatggagaatgagggaggagaaaatggcaacgtgagagagagagagagctgtctgaataagtgtgggggctgagtgatgagagagaaaaactttttgggtttaaataaaaggatttccctctttttttttctattaatttattcaagctctgccacatgtcccta

SEQ ID NO: 15362 - DNA, 434 bp, Glycine max
  unsure at all n locations
tctntgagcacagatcctgactcaccatanaccttgacccagtgtgagaatgtcaatccttaccctcggaagcananaaggaagagaaggaaaatttccaatcaaaggaaaaaagagaggaaaggaaattcccaatcaaagagtgggagaaagcaaaaagaatagaaagaaaattcccaatcaaagaatgggagaaagaaaaaaaaagagaaggagaagaaggaaagaaagctcctggtcaaagatcgaaagataacagaagaaatatgcagagaggtctttggaccagacaatatctgaacaatacggaattgtcaccaaatgaacaaaagaaagaaaaggaaaccataaccttaaagtggtcttctccctttgattaccaaccacaatcatgtgcatcggtgacttgttcgcctcgcgtcaaacaaaaacag

SEQ ID NO: 15363 - DNA, 190 bp, Glycine max
  unsure at all n locations
agcttagtgtgagaganattgactatgcggagtgtcgcaacctacccttcagcgggagggcgacgcgagactcgcgggatgcgtgttccacgaaaggaatatgcgcggagacgtcaccaacgcttatctgatgaaacgtcggaccaaccggaaagacgcgatctacgaacttttaagtgaaatgttcggg

SEQ ID NO: 15364 - DNA, 461 bp, Glycine max
  unsure at all n locations
gatcttccaccatcgtcgccaccatctttgtagttcctctcttatcttaatattattagcactttgattactagccgggtctttggctataatattattacatttgaacaatttagtatttctttatttgcatggagtgtttgaataattatcaattatgttatatgactatgtgatttttctatatatctgatctattcatgtttcttgcttcatgattggtttatatttttccatgattgttgcgtgaatgcttagttgtatttgtatgtttcaaacttgttacgcactttggctttntggtgatgctcaacggggagagaaatagggattaaatcaagaactcacatgagtaatcaacttaattgtaagagaagctaaattctaaaacaatggggagaatggaaattatgtgagtgatcgactatgaaaagtgtggtgcgtggtgtgtgtgttgtgtt

SEQ ID NO: 15365 - DNA, 323 bp, Glycine max
agcttcaacaaaattcatgaaggtaacatcaccaacttcaacttacttgatcgaaggtaacgatgctgctgcacggcaacggtccatttgtacccaatccatctaaacaatccaacaagacaagaggaaagcaaacaacaatacatcagaaccaagcattgaaacaaacatataagaaaaaaaattaagagagtaatgtttgattaactgcttaacataggacaatattggagaaactcacaatttttggccaattgccttgtatggaggagctggttggagcagaaaagcgtaagcacccacatgagtcatagatgtatgaa

SEQ ID NO: 15366 - DNA, 379 bp, Glycine max
  unsure at all n locations
attgaataaacacttaattnttgtctgattgcatcttatgttaatcaaaactatgtctacaaccatgtttctgggtttaatttcacgacaatgtggacccttcaaatgcagaggctatagtaaaaaaattccagatggatggacgttatcttagagatgtctggtaaattctctgattattcatctgtctgggttttggcacccttgctatttggtgtgttaagttcaagattggttgaaggatatttgataccctgctatcatgcgagtttgggacaccaatgatggaaggctgaaatttctttgagaaaacaaatcgttnttgtggacatttgtgtggatntcttatatgtttctcttaatattctctcttatcatg

SEQ ID NO: 15367 - DNA, 376 bp, Glycine max
agcttatcatagcacaagaaatcagcccctgcatcattcaatttggattggctgacacatattgataaatagaaacaaagaaatccagaatcaagatattataggctgacaaaatactgttgatgtagacacatcaaaagtttaaactccataaaatccatcctgctatttcttttattacatgtagctcctttgtaaacgaaaaatgttttatatgttctccatttcctgcattgttctcaattggttttcctttgacggaacaagctgaaagcctttgtaagagcgacatgcaaaacatgtgcatagaccaagacagagtttgaataacaacgaaagtcatgagtgcattataactgttggacttgggaaaaca

SEQ ID NO: 15368 - DNA, 337 bp, Glycine max
  unsure at all n locations
tgtacaaaatagataganattattacttcctccgtctcatgataaatgttntctaagaagaaaaaatgagtcttaataattgttattttagttnttttaatgtaatattaacaataaagttagttntataaagttattattattattattttctttcatttatatattattttttcttgatcttaataaanaaatctaggagaaacttattatgggatgtagagagtatttttcttctatatatatngatattttgactttttttctcccactanaactntaatatttttataaattcaatattattaattatgccttcgagtcctttttataagaa

SEQ ID NO: 15369 - DNA, 303 bp, Glycine max
agctctgagccaattcatacgacaataactttttactcaaatatctgattgagtctcgtaatataacgagacgctcgaaattgaatggcgacactcttataaaattcaaacgtcaattagtatttactcggatgtctgattatgtcccgtcatatatcgagacactcgaaatcgaatgttgaatctcctatccaattcagatgacaataactctttaatccgatgtctgatttcgtcccataatatatcgagacactcgataatgaatgttgaactctgagccaattcacacgactataacgt

SEQ ID NO: 15370 - DNA, 274 bp, Glycine max
cgacctataaactcgctaacattcacttcgagcctacgattttctggctcttcacatcgaaaaagtattgcgttgatttgctagagttcacattcatttcagcgttcgattgttgggactatagatatcgagtaaaagttattgtcgtttgaattgactcagagcttcaacattcaatttcgagcgtctcgatatatgacgggactcaatcagacatccgagtaaaaagttattgtcgttcgaattggctcagatgttcaacattcaatatcga

SEQ ID NO: 15371 - DNA, 351 bp, Glycine max
  unsure at all n locations
agcttgtatgatatgtggagcccaccttaacaatcttcttgggagctttatgaggcttttttgaagggcatgaagaacacgtcgaagtccaacatggaaacatcttgagctagatctcttagtgagaaacctataattctgcttcaaccctctctttgagagtgacccacttcagtatttatgcttacaaatctataatattcctttgatagaagtgtgagatttaattcttgagtggaatccccttttttgaggtgaagaactatattttgtgcaataaaacacattctcttttctgtatttaatccagcaatggctagcaaagctaanatcaagtggtgttgctggtct

SEQ ID NO: 15372 - DNA, 459 bp, Glycine max
  unsure at all n locations
tgaggtcaagaacattgagattagtggtattgaacttgaagaagctgagagtgagataaanaaaaactattaattaatttgttgtgaacaaaatagatttataaaagagtagcttggcttcctactagtctggaatgattattcaatagcttggttttaaattgtggtctacaaccgtaattgtggccacaacattactagtacatagttgtccacaactgcatcaacccataattgtggtgtggaattcaatcacacaaaatgccacaagcatccacaacacagctacaatggaattataatagaaccacaatggaaccttgcactattctattcaactttnnttgttaaaaaaaacatattcagattgaaaccttctattataacttgtaagtgtcaatgatcaaatgtgtgtgacaatatgggatgttgggagagacccaaatctaaaatgaatga

SEQ ID NO: 15373 - DNA, 347 bp, Glycine max
  unsure at all n locations
agcttctatcttccattatttaaagagcagtaaccaaaagggtaatagtttggattactgagaattgaagcacaaccaaagctcaaaaatggtgtggtgtgcactaaaattcttgacattctatacaaattcttctgtccatttttgtgtatttattcatgaataactgctgtcatccgcaactttgaatgtgagagagacaagatccttttatttccaattgtcctaaatttaagattcaaccacttagaattcatgtcactgcttgattcacatataaaagataaagtcagtcaaagacatcttcatttgaatctattccaatgtngttaattaaaaatcaatta

SEQ ID NO: 15374 - DNA, 360 bp, Glycine max
cttgaaagactaccagaataacatatgctatctggaatcttccttgagaggttgttggtggagaggtccaacacagtgaggttactatgcttccctagctcctcaggaatctcacctgttaatccgttagaccatagctgaagaacctgatgcctatgcaaagatgcaacaccctttggaatcttcccagtgaacttgtttgagaaaaggtggagaatcttcagcctctggagcttaaccacacgctcggaaatctcacccgaaagagagttatcacttagatcaagagacatcatctttttgagctcgaagatagatcctggatttgaccacttatttgttttggagagaagagatctg

SEQ ID NO: 15375 - DNA, 354 bp, Glycine max
  unsure at all n locations
agcttgtgactcttggcaatatctttaacattagtcacttaaaaagttgtgacttttgaaaaaatcttcagaaaaaagtcacttgaagaattgcgactnttggaaaattatttttcgaaatcagtcactggtaatcgattaccattaatgtgtaatcgattacacatcaatagatgtgactcttcattttaaattttgaaaattaaaacatttagaagccttggtaatcaattacaagtattgtgtaattgattataccatgttaaaatgatttgaaaatgtttaaacacaagctgtaactcttgaaatttgaatcttaatgtttaaaacactggtnatcgattactaccttct

SEQ ID NO: 15376 - DNA, 227 bp, Glycine max
  unsure at all n locations
ntactcataatccttcatatgagcaagaggtgttgtgcttctcttgagcctactgctgcatcttcttcccatcattccctagcccatcaaaaaaaccttatgctcaaggtgttaggtgcagataacagaacctggatcccaaatgacagtaggtgtaagaatgagttcctacagattgttgcggagatagagccatttggcaatgacaagaatgatgaagacgatga

SEQ ID NO: 15377 - DNA, 417 bp, Glycine max
  unsure at all n locations
agctntgcgcacaatggcggttctgattggtcatcaagaggaaatatatttgcaaaaagtggattttattgataaaaacaacatccattcattaaaaagcttaaccatgaagcaaggaggcagagggagaaacaaaagcttcgaaagccattgttgaagaatatccaatttttggagctctagccaatccgtttcactgtatttctcttccattttcttccatttcattccaccttttatatttgtaagtctctcatganaatgagagactaaaaccacctgttattagaagctctgcaaaccaaactctctttaatgtaattactctaaactatctattaatatgatgttgatattattgctctttcgtgtactcattcacatngttgtggtctgatcatccattttcatgaacta

SEQ ID NO: 15378 - DNA, 394 bp, Glycine max
  unsure at all n locations
ntaactcangtagagcacaactaatcatcaacatatcacatatagcagcagcaagctcacacaaccattgaaaaactatgcacactaaaatcaaacaatgtccaaaaaatagaaaaaatcaacatgcaaatgtcaaagaaatatagtttaatagaaaagaaggaaaatgttagaaatcctgngttgcctcccagtaagcgtttctttaacttcactaacttgacgcataacaccctcacgagtcatggagttggatgatggtggtcaatctctcaatattgtgaccattgtaaaccttcatcctttgatcattcatgacctagctatgcttccggttggtagaagaggngtccatcaactcaactgctctataaagctttacatccttgatggt

SEQ ID NO: 15379 - DNA, 372 bp, Glycine max
agcttgactatgaaagcagaacctgaaatttttgtaggttatagctcaacttcaaaggcctacagaatctacctaccacagagcaacaaagtaatcgtcagcagggatgtcaaatttctggagtcagatagttgggactggaaaaatgattagaggtctgagtttcaggaagagaatgaagatgttgatgaagaacctatcagaggaaccagatcactttcagacatctaccaaaggtgtaatgttgctgtgatggagcctgagggatatgaagaagctacagctgatcaaaaatggagaaatcaatgaaagaggagcttataatgattgaaaaaaataaaacatgggagctggtggacagacctaaccaca

SEQ ID NO: 15380 - DNA, 454 bp, Glycine max
  unsure at all n locations
agatactcagcttttatccaggctcatcttggtggtgaagctccttcttccatggcttattccttaatggatggcgcctcctctcacctcctttcctttgtcttccgctgcatctccatggtggaaaatcaccattaaaggaccccattgaagctcatagatccagcctccatagaagctccacaagcaagcttccatcagtatcgtcttatatggacgtatcatctaagacacaaacgcacagatacagatcataatctgataatacatatatagatcaacctttatcanttngtattgttgcatctatacaaataataggatnattatttctctttaaacataatgtatntgagttacattaccatttttataaaaaacattaaaatatcatcaaaatttagataatagtattaaataattctaaaaattaaaatattttttatgcctttga

SEQ ID NO: 15381 - DNA, 329 bp, Glycine max
  unsure at all n locations
agcttccactactantttggccactaatcaagcatggaataaagtcataaaaatacagaaaaagaaaacttgcaggggaaccatacgatttcggggggaaaactcacacacagcaccgatgtgatacacattgcgggagaaaagtcaaatgttactgcggagagtgatgagaaaaggcaacaagagatctagagaatgaaattgggatctcaacgctgggtagaagcaatgtgtgtaatagtaaaagtaaaacgttattctgaatttcaggggcattttctcagcaaacaaaatcagaatccaaaatacagtacacatggaaagagttc

SEQ ID NO: 15382 - DNA, 415 bp, Glycine max
  unsure at all n locations
attacggacctaatagactcagcttgctctcnacaacttggttagctagactagtttcttggtattgaagtcaagtattgtcctgatagatctattatgatgacacatatgaaatacattatggacttgttgcacaaaacaaanataaccgaggctcagcctatctcctctcctatggttcctcctgcaaactctctaagaatggcagtgatctctttcatgatcctaccttatttcattcagttgatgggcactccagaatgccccttgacccacccagagattagctactctgtccacaaggtctgccagtttatggctcaacctttagacactcattggactgctaggaaacatattctgcactatctagagggtactgggtcttatggtcttcacttaacacctgctgctc

SEQ ID NO: 15383 - DNA, 401 bp, Glycine max
agcttggatttcatttgtttgtacatatattataggctgtgttccatttcagtatgtctgggagagggaatggatcaaattcattaaatgccaatacaagcacatccacaggtgcaacaagcagaagcaaaaatgcttcatgaaataagactgatattgggtggaaacatgggatagatgttttatggaatggtaaaaaagttaagagcaaatattgcttatagatcaacaatgggagaattttcatattcaagcatcatcttgttgggactagatgggattttgaaccagttcatgtgtcgtggcagacccgcacactgttgtctggtagaagaagagcgagacggtaagccttggtatttcgatatcaagcgatacgttgaaagcaaagagtacccact

SEQ ID NO: 15384 - DNA, 405 bp, Glycine max
cttgatattagtgtatgtcttaattggttttcctaatattttcataagttctcctctaccattcactggatatcttccatttgacctatttttctcactggagcatctctgtcttcttatcatattagaaaacctccttacacaagtttccatcgtcttgtctcctgtagttcaaccctaactttatcttgaatacaattattcctaatcttgcattgtatgttctcccatccacctctgaattctcggctatgccacactctgtttttggtctagctggcacttgactgccatagtgcaatattcattccatcgttattgctgtcatatagcacgaagagaattctaacatttgggacactctttatacactctacctgagatttaatttttcacatttgatct

SEQ ID NO: 15385 - DNA, 390 bp, Glycine max
  unsure at all n locations
caagcttgggtctcctcttgacattttggattccttaagagtgcaaaacgttattctagagagtgatggtaaaactattgctatgaacatttaatcggtggttgttgacaactcctagttggggagcttcattcaaagttactggatgagtttagtacaaaatccaacttttatagctgcttttattangagacaagctaatggaataactcatgatcttgctaaggcaactccattataccctagtctctacacttttgtgtgaatgtatgtatacaggttttaatgatgtcaaagaccaagattgcttcaagccttanatcaagatcgagaaactaagatcaagagttagataaagagtttatttgttaaaagaatctcacattggat

SEQ ID NO: 15386 - DNA, 375 bp, Glycine max
  unsure at all n locations
tgtgacactaccncattagttcttaagaaggtattggtagtcatagtcataattgagttntggtatttaccaagtacagggagatattcatgtaatatggtagttaaggatggagtttgccagaaataactagttgaaatttgtgacactatcccattagtttcttaagatattggtaatcataatcatgatagagttctggtattctcaagtacaagagatattcatcatgaggtanagcatcttttgttatttattgagttcactaagttacaagttatagacttatagtctgtcagtatgccttctgttagcttataacaagtcanaagcctagcactagctcatggactcatatganatcaaaaagttctt

SEQ ID NO: 15387 - DNA, 195 bp, Glycine max
aacttggtgaacgaggtattgggcctgtatacaacgtatgcgagcaatgtaccatctataattaagaaaagacaaagcttggaaattattattattcactacatttaacagtcttttccacaaatgttgtgtttaagggacacttccagatggactagaggtcgctgttaagacgctttcgcacacatctggaca

SEQ ID NO: 15388 - DNA, 274 bp, Glycine max
  unsure at all n locations
gcttggacatcatgtgatggtnttctctaatatcttcacaaaatattgtgcatatgattgaacttataagatcatctctaatgcaggtgcttcatgggttgcctaaaattaagtgaagttacttaacaaaattttactatttgagcaaatgatctggcgctgcaatgcttaagtgatatgcttatataaacaattaattgcttaacttcaatttatcgattaatgaagcatgttttaattacacaatataatgtgggtcaagttcacaacacac

SEQ ID NO: 15389 - DNA, 291 bp, Glycine max
  unsure at all n locations
agcttctattctctatacaagaatgaagctctgataccacttgttagacaagtggcctcagatatcttaagaagggggggttgagttaagatatcacaaactatttccncaattaaaattttatgtcactttctattcaagtgataaattcccttaacaatgaatttcttatatattgattcggatagagcaatttgaatatgattgtttaacaatcatcaataaaggagtttaatggaagagagaatgcatactcagaattatactggttcagtcacacccttgtgccta

SEQ ID NO: 15390 - DNA, 330 bp, Glycine max
tccataattccttaaatgcttcagctggagcctcctgcagtatatcctttctaagcacactataagcactcttaaccgagtaccttccactgatatcagcctcccacacccactgatcctcaatgacattctgaattctgatcccctccacctcttgaataaatgcaaccgcctgatctatctcattgtcaaatagtggtctcctccacttgaagtcccattcccatcctgttcctttgaattctaccatatcctgagataattggtcgtgctgaaccgatatattgtatagcctttgatatttctttaataaacaaatgtcttccccta

SEQ ID NO: 15391 - DNA, 381 bp, Glycine max
  unsure at all n locations
agcttataataacaaaattgccttaatcatttccaaatatgcatgtgaattaagacgcatcaacaagaatcaagccaaggctattgtgcaagcagtcaatggggcaaaacataccaaatgattataatgatggatggctcaaattctcacaaaggtaaaatcatcactttcaaattgagctgtcanaactatcatgacatgtagagaagaataaggattcaagtacaaaatgtcaagaacttttattttaaacaattacccatgtttgacatatcctataattcaagaaaacatcaaagtttacgtgccacaaaatgaccaaatattaactgaaatcgacaaactacacataacaattacacactaataattacaaaccac

SEQ ID NO: 15392 - DNA, 280 bp, Glycine max
  unsure at all n locations
tcaagccaaggccagactntcatgcatgcagaggcttcttcatagaaaatgccanactccctttgcaaatttgatttcatgcttaaataggtggccttcttcatgctcgtgtgcttagcacacgtatggaccgcttagcgcacgttagntaattttgtcttatcgcgcttctctcacttatcgaatgagctgaagcggtgcgcttgatgacctgnagcagtgcactcagcgatcctggcaactcatcttcttctggattctttctcccgcttagccactg

SEQ ID NO: 15393 - DNA, 333 bp, Glycine max
agcttgaatgtgtgtaacccaccatttttccatataagggttgtggttgggggagaaattgaggcccctccaaagtgttttgcaggggtataccaccaactgcttgccttttagtgccatatctgaggcaaggctcgaagtcagctagattgtggtggggaatttcatgtgtctcccccatggtttgagagacatgtgcatgatccgattgaggttgttggctcttaatgagtatgggaatggagctattgacattctcactgggagtgtatgccacatttggtggtgtatagttgggaggcaagccataccgctggaaggcgtgcttgtttg

SEQ ID NO: 15394 - DNA, 458 bp, Glycine max
  unsure at all n locations
tgtagagatttcttcattatgtttaatcgattaccaattattcataatcgatttcacaattctgttgagaccatgtcttgtgttcatgagtctctgctttaatcaattaccaggttatcataattgattgcatcgttcttgacagtgttcccaggagtgatcaagaacactttaatcgattaaatcaagaatttaatcgattacattgttcttganagctttccaggttttgggaagaatactttaatcggttaaaatgagaatctaatcgattacttctttgagataatcaattacattgaanatgtaatccattaccaagcggtataactagtttttctataaattaccaccttgtgttctcacttttaacagcgaaaatgaatgagctttcacgactcacattctaatccttggttctgaagtttcaaaggtaaagtgagttgtgatatctcttg

SEQ ID NO: 15395 - DNA, 338 bp, Glycine max
  unsure at all n locations
ttgaagatgatcaataacaatgcctataggttggaccctccagaagagtatggagtcagcaccacttttaacattcttgatttaattccttttgcaggtggagctgatattgaggaggaggaactaacagatttgaggttaaatcctcttcaggngaagggaatgatgcaatcctccctaagaagggaccagtcactagaaccatgatccaagaaaatgggctatagctgctgaagaaagtcctatggttctcatgaacctcacggtagatttctgtgcccatgggccaatgatgggtccaattatctttgtacatattagactacgatgtcattata

SEQ ID NO: 15396 - DNA, 315 bp, Glycine max
tgagatgatgaagtgttgaagggtgaagcttcctgcttctattggtgaccacagagtggtacctggagatatgtcgcggtggtcacgagaccttgtggacgtcacgtggggtgctattgcccaaaaccaagcttgaccaatcccgacccaacccgtgcatagtctgtcagtgagaacctgtgatgtacctaaacaggcgagcttcttgcagtcaacagataaaatgaatacaagaccacatagcacggaagcttgtggtggctggccagctagtaattttgtgtaatatgtgagatatggcctctggtaatcgat

SEQ ID NO: 15397 - DNA, 321 bp, Glycine max
agcttaatagtcttcaccttacaggtcggttttatgagattgagttaggtccttggctcatattctaagatggtttcaaagtctatcctagatacatcattgggacacttgcattgctacactccaagctagtagccctgagcatgaagaagagagttagaaagtcgtcttaattgtggtcacccttaccacgccttagttgcagcctcttagagggccaccttaattgcaacctcaatggtagtgtttagtctcacatcaactagagatatggcttaaatagagcttaataaaagttgagtagtcatcaccttacaagtc

SEQ ID NO: 15398 - DNA, 382 bp, Glycine max
  unsure at all n locations
actcagctttacacaggatgatcatagacattatagcagtataacacccacagattacaagttaaacttgaatagagtaattccaattaactctgagaataaatcatgatacacataagagacacacagtaggaatagagaaagtgggggatatgtaacacaggtataacacaagtagtgaaacatctntaaatcaatttcctcagcaagacatctttggcaaatagtacacaaaaataaattttggtaaaaaatattccaattaggaacaattaattactcaagtattttacaatattcacagagtggttaaaatgtaaccatttagtgatagtaccaaccacttgagtggttatttttcaaaataaataaaaccatcttt

SEQ ID NO: 15399 - DNA, 342 bp, Glycine max
  unsure at all n locations
agcttggaacatacaatctgaattntaggtcctcttaaggacttagtcaaaatatctgctggctgatcattagaaccaatgaactcagtgacaatctccttggacagaaacttctctcgaatgaaatgacaatcaatctctatgtgcttagtcctttcatgaaaaactgggtttgaggcaatatgaagagcagcctgattatcacaatacaacttcattggcagctcttcacaaaacctcaattcctgcagaaactgtttaatccacatgagctcacaagtaaccatagtcatagatcgatattcagcttctgcactggaccgagcgacaactgtctgtttc

SEQ ID NO: 15400 - DNA, 466 bp, Glycine max
  unsure at all n locations
tggttggacttccagaatgttgcgaaactntacggattacgcaacaatgtttgctttgacttccggagtgttgcgaaactntatggattatgaaacaaagctcactntgacttccggagtgttgtgaaactttatggattacgcaacanatctactttcgacttcaagagagaccacacaaagttcgcaagccgaccgccagtgtccctggacgaaattagggtatgacagttgtccctctttacttatcttttattggagataaaagggaagtaaagataagacactaatttcgttcgagccgaacctcacctgaccgaccactagcccaacccgcgaaacctatcaatcagaaagagcaaaaaggtagcaggaacattagtacaaacctcagtgtcgtggaagcagtaaaaccgggatgtcaagacgtncccgcatgctatcgaactaatcatctctgttaaca

SEQ ID NO: 15401 - DNA, 403 bp, Glycine max
  unsure at all n locations
agcttanatatcacaattcttgatatgcagatatatatggcacagatgagaagcaatctatcagcctctgtcttgactaattcctttntttatgattataagctgcaatcaaaactaaaatggacatagcttccttgtgctcttaagagtagcgtgtgtttggttttacgatgagaaatatcaaaattgattttgcctcttataagaaaaacatgatcttagaaaagatagatgttaacaagtctcatattgtctgcctcaattattggggagaaatttatatatttattggataatttcattntgtcttaattggttntaaactganaactaacataatataagagtttataacctatcttagttctcatcttatatattatatattagaaatataacaata

SEQ ID NO: 15402 - DNA, 192 bp, Glycine max
  unsure at all n locations
ctgctgctgtgcttctcggtctcttctccgacgctcttatgacagctaacatgtctttccggaaagaccgcacatgtggtcaacgaccacctgtgccctacacatcaccanattcatttcaactcattactttatatattatcatcaccatgcggcaatgatgttgaacgagatctatgattcatacagcac

SEQ ID NO: 15403 - DNA, 427 bp, Glycine max
  unsure at all n locations
agcttgaataacccaattgtatgtctctgtatcaggcttcatgtaatctgttatgtaacaaattaaagataatttaccttgcatagaattaataatgaagaaagagaatttaacaatttagaaaagagcatcccacctccacaacacacagaaacaaaaaagaagaaagataccataagaattgaaacataattgtgaacccagtaagagtataagaaaaagaaacgagattcccttaaaatggtaaatgaaatctttataagtaaacaaatataagcatcagaaaaagaagaaagaggaagagaaagcagatgtggagggcaaaccttctccatattccatgttctcaaatgttgcaaaagctatttcaggtattccgcaggtagcctaatgaatntgtaagaaataatattaagaaaacataatg

SEQ ID NO: 15404 - DNA, 403 bp, Glycine max
  unsure at all n locations
ctttacagaagttagatacaagaatatggataaataataaattcattttataaaatatttggtttaaaaaagtaagacatgatgtactttaaatgaagtaattggatattcatcatctacataataaaatagttaaatacattaattatctgatttttagtatatttttaatgaaatataataaataatctataaaatatatatacactatcatctaattataaactctctcacacacacacacacacacatatatatatatatatatatatatatatatataataaaattatttgatgtttataataattatattaaaaaatatataaacaataatctttattaattaagagtgtnaaaaaatttacacataaacattaatatcatagattcattatataaa

SEQ ID NO: 15405 - DNA, 405 bp, Glycine max
  unsure at all n locations
agcttctatataagctgaaccattntattaataaacacaagttgagttntattcagaaaattagagtttatctcttttatcttagtgagagtgattctcctaaattcttgagtgattcaagaacaccctggctgtatcaaaggactttcacaacctttgtgtgttgccctcgctggaaagagtgattctttccttcctttcatcttcacccttgttctttcaaaccacaattccagaaaatccacctctgcccaggattatctcgtggccataactcccattntacgcactccaattaagtgattcttgagcctaaattgactttcaaaacgagacctttcacctcgttntgcaatcacctcatttggagccatgtagcttcagttattgccatttctatatttc

SEQ ID NO: 15406 - DNA, 369 bp, Glycine max
  unsure at all n locations
taaaaatactgcgcaatatcggctggaaaatatcagtctaagctacttcacgaccgatgtcgcctattgagtgttctattcaatcccttaatgaaatatgcatgatgtcggtatggaaatgttcgatcggtgtcatgcggtgatgctntccttttaacctcgatcggtcatctttcctggccgacgtcgactgtcaattntttcgatcaatatcggagagaattatgttttggccgagatgggctaaatttttcgtggccgaataaatgggaacatgccagtttcggccgaaataaaatgtcggttgagcttgcacaacaatacctatccgacctacattgtacattatttcatcaacaccaacacacg

SEQ ID NO: 15407 - DNA, 414 bp, Glycine max
  unsure at all n locations
agctttacatgtgcgggtttaagaatcgaaggccaagtcaccgcgatatacgaggatgactccccaaggagatcggatttggtacagctatgtcctcccgatttccgactatgaaattggcgagtggaggaactcccggacgtttacgcgacaagcataatgtatccttttgtaattttaaaactctacggatgggcctaggctttagagtttccttttgttaagcattatgtcttttgtttttgaagttataatataaagatctttcttcatctgttcctgcgcctctacccattctcattcatttgcatgtttatttctttacgcttaanaatgctagatccgatgacgagtccctcgaaggtactaatacccgggacccagccgtcaatttcgagcaagaagcgggtcgga

SEQ ID NO: 15408 - DNA, 418 bp, Glycine max
  unsure at all n locations
tggaaggatngatggngacacggngttgagaaaaacgaggatatgggctacgtgggagtacgtgagctcagttggaggtgggcaacaggggatggtggatttatgcgcgatttgtggatgtggaaaacttgttgtgcaccatcgcccgaccgccacctagtaccacatgtgatgggtaccccataatcctacaagcttgagatgaggaagtgtagaagggtgaaacttcctgcttttattcgttgaccatagagtggtacctggagatatgtcacggnggtcaggagaccttgnggacgtcaggtggngtgctattgcccaaaaccaagcttgaccaatcccgacccaacccgggcatagtcagtcagtgagaacctgtgatgtacctaagcaggcgagctcctgacagtcaacagat

SEQ ID NO: 15409 - DNA, 355 bp, Glycine max
  unsure at all n locations
agctngtccacaaaaaatagggttttgaaagtttatcatttcagtttcttaccaagtaaaatggatcatttttaaggtccaacgacttaaaatgatcacctttcaagtaaaaagaatcacttgattcacgcataagaaagaactacataggtctgatttcctctttgatggagggtacgtaggagcaaaagccccgcttttgtcgacctcaaaaaataaaaagaaataaagntaaggtaacacaatttccacaattctaaaanataggctgttgtccttcaagacaaacgtaagaagtgctaataccttcctcaaccgtaaatacaactcccgaacttagaatttcatttttgat

SEQ ID NO: 15410 - DNA, 425 bp, Glycine max
tctctgaagggcatggttatttccagtttcctggaaatatctaagaatcttgccaaatggcggtccttctccttcttggaaggtaccatacgatatggtactttcgaaccttcattcacagctttttctcttttattctctctagcttgttcacttctactcctctcttcattcttattgttttcatctatttcaattttttcattttctttttctttttctaattctttttatttttcttggtcatttaattcttttttcttgaccattatttcgttttctttttcctaatttctttcacttctcatatcatctgtcttttcatcagtacctttcttttcaataactttcttcttggatctaacactatcctcatcctctgccctcacaaacctcttactctttgcatcacagaattgcattcc

SEQ ID NO: 15411 - DNA, 386 bp, Glycine max
  unsure at all n locations
agcttagcttaaaattaatttanaattcttacaagtattgcaaaaattatctacgaattatggattgaaatcttgtaaattaatgaatccacttttaccaaaatttattgcttcttttcttactctaaatgtttgcataaacttttataatatttacataacctttangtgatatattcaattattcattataattnttttatctagaggatntataacaacaactcatgtacctttatttaactaattgaactanatttcttgacatccattatacatttttataatataaaactaatagcagtaaaaatatattatcaactattcagtaacaattataaactgccttttnngttccctaattntgttttttttaaaaaaatctt

SEQ ID NO: 15412 - DNA, 308 bp, Glycine max
tgaagacaagactatacgaggtatctttcttgcgtatagcaatatctctaagggctaccgtgtctacaacttgcaaactaagaaactcgtcatcagccgagatgttgaagttgatgagtacgcttcttggaattgggatgaagaaaaagtggagaagaacgttcttatacccgctcaactacctcaagaagaagctgaggaagaagacccaggtgaaccaccttcacctccgccactacaactagatcaagaactatcatcaccaaagtctactccaagacgagtaagatcttgtggggacatatatg

SEQ ID NO: 15413 - DNA, 366 bp, Glycine max
  unsure at all n locations
agctntctaagagcacgagataagaaacccggaaactcaagctacatattctatttgatggcttaaggtattatcgacgaatacctgttaacaagattcttgataactcaggttatgtagttcctcggaatgttggtggttaatttctcttgggttcaaaaatttataattgaaagaaccatagacgggtggcacaagatggtttaatttatttcanatccgtaagcatgaagaacacttgcatagtttcgttcttaattaccangtaagtcgctgcattgcaaacttgtcanagagaaatgcagactgcatttgcaaaattanacggtgactggatcaccaatcacaattnttcttttctttttc

SEQ ID NO: 15414 - DNA, 440 bp, Glycine max
  unsure at all n locations
tagcaggatgaagttgaggtggaatttgttatgtatgaaactgtgcaaaaggtagatgtcatgaagttgttacaacttgtagatttgttaataatattgtagttaactacagatgatcttaatctgattgctttggaagtgtattgatgtcaacacaattggtcatcatatacacagtagaggtataatcatgctaatttactgggttacatgaagtttgtcatgttcaaaatatcacatatgcaaattaatgataccttgtagacaatagcctccgaaattgattatcatgattcaaaattaaaagttacaccattacactgtcataccatntaaccgacagaaagtatttaatacaaagtcacactatacttgaaatactccacatctgcttaagacactangtataacattgcatgaagatatatgcattcacataa

SEQ ID NO: 15415 - DNA, 338 bp, Glycine max
  unsure at all n locations
agcttgtccacaaaaattcattaaaaaaggatttgaaaggggccctatacccgggttcatgggaatctaaggagtggaggtgaatctatgatcatgctangtctccgacttgcttgataatagtgaaacctcatctagagctttctctctttataatatgttgtcgccggtattccataccgccacaatattattatattgagtgatgatacctctagaaaagggtcatgtgagttatgaatngttgggagtagttattagagacccctatatattgtcctatatgttcccaaataggggcatggagcgaacacgctccgtgccaattgttctcatgc

SEQ ID NO: 15416 - DNA, 349 bp, Glycine max
ccttctccaggtggtctttggcatcacatttaaacttgaaccattgtcgttgagtaccttcgcgacgacatggtccatacatctgactgacacatgtagagccttgttgtgccctctcccctcaatgggaatttcttcttccgcaaacgcgatataattattggtggttatatgattaacaatgccttcaaaaccctcaactgagatgtcgtgtgctacatgtgcttcgttgaggacttttatcaacagtgcacgatgaggctcagagtttatgagcaattcgagtaaagagattctcatcggaagtttattcagttgctcaactactttaaactcgctttgttggatg

SEQ ID NO: 15417 - DNA, 342 bp, Glycine max
agcttatgcttttacaaaaaggttcatcaagtcaagttgaaatatggaagtaaccgtcttgcaaaattggggcaaaagatgaatcgagtcatatcactgcttcgtctactgccaaacatatttaggattgttgatgtccttgttacttccagtttcaccttgacaaagatgtcatggaccatgttgaaaatctaaattgattcaaccccatatcctgcgtaaaaattcgcaatacttcaactgtacatcattcgcatacatccatgcttttcattggttgcattgctcattgcattctttcctttgaaaataaaataaaataaaataaaataaacttaatca

SEQ ID NO: 15418 - DNA, 501 bp, Glycine max
  unsure at all n locations
ntgagacctgcattgcggcctgctgatcgcgtccttcacactcagctactacaaaagcttggtgctaagtttctagagagtataagctctgtgacagaacaatgtggcgttcacttcgggtgaaagactatggccagcctttgctttacttcaagaagagctcaccaacgcgcctgttctatctcttacagacctttctaacacatttgagcttgaatgtgatgcctctgcagtgggagttggaactatattgttacaaggtgggcaccctattgcttatcttactcgacgaataaactgcaacccaagaggtgtggccatgctaacaagtgtctgtgtacaaggagaatatatggagggtcgctagatgggaaatcccttaatatttgctttatttggaaagggcttccttctagctacctctcggagagacacttactcttcactcttcttaccattaaggtggtcttcttctgggtgatgtctcactgatcctccctt

SEQ ID NO: 15419 - DNA, 362 bp, Glycine max
  unsure at all n locations
agcttgtatattaattggcatacgaattcatcttctactgaggtcgcgagtatccaaattcatctcctattgattntgagtataatcccagtacttaaatcttaataatatagtttaaaacataatattcatatttcatctctttaaagttagaagtaatatttaaaattaatagatagagcagttatgtatgtgtgtgtttggttcatgagattagtgtgttatttatccaacattntaatctcttcgatgtttctaaatcantaataattgtctcaactgcatggatgtacttaaaaacatatttgttatattataatatcaacaatattaacatatataattgagaattaaacaattta

SEQ ID NO: 15420 - DNA, 349 bp, Glycine max
  unsure at all n locations
tctccttccttttcctataaataggagaaggagggaagaacaaaaatgttcaaccctcctggtatctgagattcacttacaattagtgagaaaaattgtttccgtgaagaacatccaagccaaggcgcttccgtaacgcttccgtgatgtttctgtgggtgatttcgcgaagattntcaactgttattcgtcgatctttgttcggtcttcttcgttcttcggtcttcaaccggtaagttcccgaaatcaaactcttcaattcattctatgtacccttagtgtcctcattagtttcgcgtgcttttatcttcatttcacttactcttcgtacctcctttatgacgtgctt

SEQ ID NO: 15421 - DNA, 224 bp, Glycine max
agcttatatattactttacccccggacgaccagtaaacctgcctcaatataaattcaaaatcttcataagtatattgaatgtagaattaccactaaacgcgtacattaattaatgtggaattatatcaatttagagatttcaaattataatcctagatatgcagaatcccattaaatatgaactgccctacatcacctagaaacttttttatcacccatattat

SEQ ID NO: 15422 - DNA, 320 bp, Glycine max
  unsure at all n locations
ntggattngatacaagagggcttagcaactagagagacctatgataaggactaacaaggatggtggcagaggccgttgactttttgatatattggtggattattagtatattttgatgcattatgcacaattattgttgctttaacatattttttagtttatgttgtggatgaattaccttttttttttgcggtcacatctgtttaaacaacacgtgccttagaacaagaactatttttttattgattcttaaacaaacattaacatgaacaacttaaaaagcactaataatactaaattttgttaaaaccatcaacgta

SEQ ID NO: 15423 - DNA, 397 bp, Glycine max
  unsure at all n locations
agcttgtgacttgcataaactccttttcagtggatgacaatagaagctaaaagttaccaagcatacatcaaactgtttcaaaaagtccaactatcattttattcttaataaatgggagttaccagtataaaataaactatggctgcaaaattgtacttcaaaaaaatataaaatataacctgatcaaagacatcaatatagactttgtgcagagaatgagaactgcagaactgattaatctcatgatgaatcttgtcatatatccatgtcttatcataatgtacaccatagttgagcaatgtctcaaagacaaattccttatggagttgattcacaacctanaagaagaatatgcatcactgctatgaaaatattgaagatgtgaaaagaaaacact

SEQ ID NO: 15424 - DNA, 384 bp, Glycine max
  unsure at all n locations
gntgtgaaaagagannaaactgaaaacttgccttttccttgattngcataagaagttcatcgtaggtaccagcagtctctccatgtttctcanaaggtaagagttcataatgcaggggaaagggtaaaaccttcaagacttcaaagaacacatcanaggagaagttgagaaattttttgaattcattgacactatttgttggtgggattccaatcctcaactntgctgggggctctgttgtgttaccaggccattttggttgctctaatttagaaagcccnctctctggcatccaatttccaatgctcctctctgtttgctccacaacattgaacacctcaagaattgatggctctaggttgtctttaaccaaatggaaattac

SEQ ID NO: 15425 - DNA, 414 bp, Glycine max
  unsure at all n locations
agcttccttatgagttgcgattacagttgcgaatggttcagtttcagtgaagaggaaggctgaactgcgaaccgattcggccatggttgcgacgaagagatcgggttcaatcggaggttctgcgagtgcattttctgcgccgagatggaacaacaccggaggattgtctcataaagcgttgatcttcgatggaaggagaaaaatcggtgcggaatctgccgccggatctaggagcagctnttcgttggggagcggcctgtgcggaggttgctaccggagctccgacgaaatttggtgacttcttcacacattgttgtgaagtcggttgaggccttgccgacgacttcgacttcgagaacttccggtgcgagtaaggtggagacngcgaagaagccggtgagtaagccaacatta

SEQ ID NO: 15426 - DNA, 310 bp, Glycine max
  unsure at all n locations
tagctaaatatggatgttataacattgggaatcatagtcggtattatcatcctcttccttagaaatggttgctacttcttcatcgaaggcacttgcaactcacgctcttaacactaacactcttcaatctctctctattnttcaattccatggcattgggtagaaaaaagagtgtgcaattagcatttttgcttctcctctttttgtgtttggatctgggaatagcgcatcaacatcagggtcattctcattcccattctggtttctgtgcatccgatgcccatcatcactgtggagatgaccatctcca

SEQ ID NO: 15427 - DNA, 416 bp, Glycine max
  unsure at all n locations
agctntgatgcttgtgttgaatgcattaaaggtaaacagaccaaaagcaataaattaagtgcatatagggctactgacatcttggaattgatacatacggacatttgtggaccatttcatacacctttgtggaatggtcaacaatattttatatcattcatagaagattactccagatatgcatacttgtttcttatacagganaattcacaatctttggatgtgttcaaaacatttaaagttgaagttgaaaatcaactcaacaaaagaataaagtgtgtcagatctgaccgtggtggtgaatactatggcagatatgatggttcaagtgaacaacgtccggngccttntgccaggtacctagaggaatgtggaatcatcctacagtacaccatgtcggngtcacctagcatgaa

SEQ ID NO: 15428 - DNA, 339 bp, Glycine max
  unsure at all n locations
tctcatcatgctgcttctgaatatccctatctgttngcactgtcagcacccttggttcttccaaatcaataccaccatgttgttgcctcaatggctctacttgtacttgatcactttggacaaaacgcattatggtaaggctaatcccgtgatgttccaccattctccatccatagcacaatgcctctctatcatctggtcctccanagaacaacactgctacatgatgagatactngatttcccgctagatggttagagccacttaagcctttatccactaganattcgaccgagcaagggtgcattgctagcacatactgggtgatggatctgtatg

SEQ ID NO: 15429 - DNA, 359 bp, Glycine max
  unsure at all n locations
agcttccttttgaatccgagcatgcatttctcacctcatcaatcatatctagctcanaagctcagctntcaatgttaagtgcttcttcaaagtgagctcttctagttgagggttcaccaacctcaactggaatcatgacattagtaccattagtcaatccaaaaaaagtatagtaccatttattgtggattgtggagtgcaatggtatatacccctataatatacaagacaacttctcaacccaaagaccttttgctntgtccatccttttattcatctttgtcaagatgaccttgttcgttgttgctgcttgtccattggtttggggatgttcaatagaagataccaaatgtttgatg

SEQ ID NO: 15430 - DNA, 368 bp, Glycine max
  unsure at all n locations
tgtatttaanaatgttntanaaatacctttaattaatatttgaatttttattcctttattaatatatatgtgaggggtagagggtgtcacatttatggcttgtacttgtaccatatgccattctcggttttcttcttagaatcgcacatntattttccttttggtcttgtttctatttagttatatatggctcaagttgaagtccaatttgcaattgagaatagactttcatttttgttctgatctcacaatctgcatgcattgttaggatcccttgtattttattatccgcttaagtgtttagagtgaatcatcataaatttattctatttgtaagaaatggtttagttgattaagatcagaggatg

SEQ ID NO: 15431 - DNA, 385 bp, Glycine max
agcttcttatgcaaggaaactcttggcgttgaagctccttcttccttggcttattacctagtggatggtgcctcccttctccttttctcctttgccttccgctgcatctgcatggtgtataatcaccatagaaagaactgattgaagctcagagacccacactccatacaagctccacatacaagcttccatgatctaggaaacacttgatttgtggccaaatcctgagcttgaattaatcttgaagcaatgcttcgttgttgaaacaaccttgtattaatcttgaagcaatgcttaacatttgaatgtttgttgaagtaatcttggaaaaaccttgtttattattctttggcatcatcaaatcatgattatacattcacattct

SEQ ID NO: 15432 - DNA, 492 bp, Glycine max
  unsure at all n locations
ttgaccccctgnatttggagcactagtattcccggcctgccgatcacgcgctgtgtagcactggggatgctcttgagattcaacttctacctcacagtgatggaactcacattgtgcagaacctacgcaagccgttgaagtcctctggaagaatttacggacggagcttggttaactgactaaccttctgccttatcttgatcgtgaaaagtctgcctggaggctctggactctaactgaaattgatcatcgtggatggcctattgctcacttactctgttaatgaacgctgacgacgaaccgtaggtgcttgtggcaaatgtgcttttgctgcgatataggatgaaggacatataggttgcgtaggacaccacaatttggaatgacgcaaagctgttgctctttgaagactactcacgcacacttgcatattatctacctgtaatgcattgagtgtgaagatctagggtactgtgttgtagatttcctgcn

SEQ ID NO: 15433 - DNA, 395 bp, Glycine max
  unsure at all n locations
agctnttgctacattagcttctttgcaataaacgtgcattaaagtagtgaaggtagcaacagttggaatgatttgcatctcaagcatcaaatcaagaacccaaatagcattttcaatcttctttgaatttgcaagccctctaacaatagcgctcatagcaacattgtgggagctgataccaagtgttttcatttcatcttgcagtttcattgctccttttatgtttccaactctacacatgccattgattaaagtgatatattgtttatttgtaggaacagaaccactttccaacaagacttgcaaaacacgatgggccttatgaaaatcactagttctaatgagtccattaaaaaggcattgtatgtatctacattangaataaccataaactg

SEQ ID NO: 15434 - DNA, 371 bp, Glycine max
  unsure at all n locations
ntcacaaaatccagacaattcaattctatttgtcatgaaactaccttacacaatgaagaacagagtagaggcagaacctttgcacaagattcattcaaattccacagagtttttcctaacctcatacctccaaaaaatcctcttcgtttagattcgttaaccattggatcgccttgaaacttttactggaggttcctaatacagaaatctaaattttgaccgttgggatctgctagagaatgcctagaacacgagatgtactacctttcccgtgactagcactgcactaaccattttctgcataattggcaaaatttgctgcacaatttgacagcttttgctgcataatttggcagatttcgaattctagc

SEQ ID NO: 15435 - DNA, 405 bp, Glycine max
  unsure at all n locations
agcttgcttatgcaagtataagaatagcacctagtgttgaanacttcaatatgtcttccaaatcccacaaagtttccatgagtttatttcttcttttctattttgagtgtgaccaagtgagctcacaatggtaaggtangagcgttgcttgttttgatggaatgtatttggtaattaatgtggaataatagaagttaataatatgcatggtcatgttgccacttgcattgttgagttggcaagtttcatatgaggtccaccgctggtagaattgttgaaatttggccccaattaacactcgtggtgatacttataaattgttaccggttgaattgataggtggctcaccgttcatagattaatagaggcttctcacatgacttctgngatagccatcaagtgatg

SEQ ID NO: 15436 - DNA, 356 bp, Glycine max
  unsure at all n locations
gacactatagaaactaagcttnaattgtaaaccttctccgccgttacacatacaaagcttcaagagaggaagaaaattaactatctcccctctctagggtcaccattaatatggcccctcaagtgggtaaactcactcctcatacacacaaattcatcaacatcatcaccataaacacaatcgaattatgaacattaattngctataatgtcaaaggtcggataccctcatacctaaaaccaaagtgcgaattataactcaacatcatataatagaagcaatctcatcatagaagcaatctcatcatagaagcaatctcattatagaaacaagagtaaattacacatacctcccct

SEQ ID NO: 15437 - DNA, 312 bp, Glycine max
  unsure at all n locations
agcttcttggttggtaagaatagggagcctatcaacatcttacagtatgctgatgatactgttttttttggagaggctgtgtgggacaacattcatgctattaaggccatcttaagaggatttgaattagcttctggtttgaagattaattntgccaaaagccaatttggggttattggtgatggtgttaattgggccatggaagcagctaataacctgaactgtcngtagctggaatgtcctttcctttacttangcatacctattanggctaatccctctagccagctggtgtgggagcctatcatcact

SEQ ID NO: 15438 - DNA, 386 bp, Glycine max
  unsure at all n locations
ntatgaacttgganaggaacttgaactatactatagccttctcgtgctggtgtatcttgatattaggcagaggcaattctcagggaacatcaagctcactttcggataaggttcatcaagttgaatggaaatcttttagcaccctcatcttgttcttggacttaaacctcatgcagagggataagggtataccattataatgattgcatagttggtcatatagggttaattgaaagtatataatttctctatttttttcacgacagatttgtttaataattataaatggattcatagttccttcttgactntcagcttctacagtgcattcatatcaagtgataacattctcttttatgataataacatgactcctacttggaata

SEQ ID NO: 15439 - DNA, 407 bp, Glycine max
  unsure at all n locations
agcttcataccaaagcaactcataatctaggtatctaaaacccctcaatttagtggattntcaaggtttgagaagtgaaaatgagaatggtgtaaatttggagcanactctcacctcacacaagtctataacattaatctaaacttgctcaaactggttntacgcctaatattccactgaatcaaaatttgactcatcaacacccaatnttaccctagaaatggctcttgtttcactctggtcactcatattcctcatttgcacagtctaagctttctcttaagtcctaaaagacatttcaaactatgattaactcactttaacccccaattaccactgaatccagatttagccttccaactctcaaagccttactctttgttgcactcataacaccacattctcac

SEQ ID NO: 15440 - DNA, 373 bp, Glycine max
tctacttatgtggcaaggcgggctttcttcactttcttgtctccaacgcgagctctgaccactgttcttccttcccgcgatgcttcttttcatgtccgcctgagtgggcttatagcctaatccatacttcccacgatttccttgggttattatcaagctagttatgccgccattgtctttgcctaaacccattccgggttcataaccgttccccaacataactcggtccatcattaccggcgcatcggacagacaaggttgcccaaagagggagtccacgatgaaatgctgaccacctcataagactggacagcggtttctaacgattcttctgcggcttccacataaggcatggaggatgggcagcttacca

SEQ ID NO: 15441 - DNA, 371 bp, Glycine max
  unsure at all n locations
agcttcatgctgctcaattgctccaggttgctgcatggaagggcaaaggtctgtatggtggtcagcagaggagcacaaaccacaaacccttgcaacaggtacaaatttctgattcaaggccagctgggttaccaagttaaccaatgcatccagtttgccttcaagcttcttagtttcagatgatgcagatgggtttgtagctacctcatgcactcctctaatgactatggcatcatttctggcgctaaactgctaggagttggaagccatcttctctattaaatntctggcttcagcaggagtcatgtctccaagggctccatcactggtagaatctatcatacttctctccatattactgagtccttcat

SEQ ID NO: 15442 - DNA, 342 bp, Glycine max
  unsure at all n locations
tcttgaggaagccttntaatgaagcttcttgaggaagctacatgaagttgcctcggtaaaaacgcttcccagccttcattaaccgttggatcttctcgaaatttggtttacaacttcacaagacacttgtccatgatctgaccgttgggatcttcaagaagatgtctggagtgtgggctaagcttccgttcctggagcatttcttatttaagcatttcggccattgctttcgtgtatcttaagaanaacgtcatttcttctcctttctttcttccaaagtcatttctaacatcccaatcactgtctccatctcccacagccaccattagccaccacaaacca

SEQ ID NO: 15443 - DNA, 348 bp, Glycine max
  unsure at all n locations
agctttgatggtggaggatagacgaacagcgctaggcaatcaaatcatgggtctccgaataagattttatgtttgaggatagatgaatagtgctaggcaatcaattcatgggactccgaataagatttgagggtggacgataaacgaacaacgctaggcaaccaattcgtggtgctccatactcaatggtggaggacgcatgaacaaaactagggaataaattgatgggtctccgaataagatntgagggtggaggatagacgaacaactctaggcaatcaatccatggggttctagactcgatggtggagaacgcatgaacagcgctaggcaatcaagtcatgggtc

SEQ ID NO: 15444 - DNA, 371 bp, Glycine max
  unsure at all n locations
ntgtgtggagcttcaatggagaatgaagaagaagagaatggcaacgtgagggagagagagggctgtctgaaatttctgttttgctgagtgaggagagagaaaagctttctggtcttaaataaaaggttttcctctttttctattattttattctagctctgccacatgtccctatttgattggagaaaaaaataaagggcccactntctctttttgactgtgacccatactcagtcacaaaagtgagaaaaatntgacctttgaaacgctaaaatcctgcctcggtttgcgtgccgtttctctgattccagattctcgcgtttctctgcgtcccgccgggccagttttcgaaagcaagcaatatatatatc

SEQ ID NO: 15445 - DNA, 370 bp, Glycine max
  unsure at all n locations
agcttgggcgcatgcaattcaaagaggcataacaaatggattatcaagagtatcagaggtcatcacacttgtctcgtgccgatgcttagacaagatcatcgccaactcgacaaacacgtcatagcacagatcatccaaccaattgtcaaaacaaacccaactgtctccatcaagacattgattgcagagatcaaaacgttcatgaattataccctatcctacaagaagacatggttagcaaagcaaaaaacattggagatgattcatggaaactgggaagaatcatatgccaaactgccaaaacttttcggagctttgcaatcttgtgttcccgggactgtggtcgctgctcanacagaatccttgtatg

SEQ ID NO: 15446 - DNA, 418 bp, Glycine max
  unsure at all n locations
ctgaagaaaggttatgaaccttacgagcattcactcanattctctatgcacaaacatatccgtaaattcttgtaaagtttagaaaaaatctcacaacacattgattatcttgagagaataggctaagtgttgggattaatattgtatattcgtttgtaagacgctcatggagttagtcattgtgcaagcacaaacaacanatctttcttatttgtatagagtcaatagtgacttagtagaacaaagaatactaggttgattcaagcttgcagtatagcttgatttgtcagagcaacacatgttagagataatggcacgtggaactataaaccaagaaggatgaattgttccaaattgctttagaaccaaatgaaaattttagaagatagcttcattaatccaatgatttaagagtatt

SEQ ID NO: 15447 - DNA, 371 bp, Glycine max
agcttgaacattatctccttttgggttcgcaggttcttccatgcacggaatccagtgatcatctcgattacaatgcacccaagagaccatatatctaacgctggttcaatctgaccaacgatcgattctggcgacatgtaaaaaggtgtccctctaaacttgaccttcccatactcagcatttgcatcttctctagtcttggacaacccaaaatcagcaatcttcagttgataccttgcatgatcatcagatgaaggaaagagaaggatgttgtccggtttgagatcacaatggacgactccttttcgatgaatgcaagaaagccctttgagaagcatacgagtgtagactcttacttcactatccgatat

SEQ ID NO: 15448 - DNA, 417 bp, Glycine max
  unsure at all n locations
tcatcatcaatccaagaagaaagtgataaagatgattcacatganatagacgatgatgatgatcttagtctttntgtaaaaagattcaacgaatttttaagaaacaaaggaaatcaaagaaggtcaaatttcaaatcaaagaanagggcagaagattcgtcctctattccaaaatgttatgaatgcaatcaaccaggacatctgagggttgattgcccaattttcaagaaaatgatagaaagatctgaanagaaaacttctaatgataagaaagccaagaaggcctacattccttgggatgacaatgatatggactcatctgaagattagaanatgaagttgtgaactaagtctgatgcccaaggattatgaaagcaatgaanaggtaacatcttctgacaacacttatgtatttca

SEQ ID NO: 15449 - DNA, 425 bp, Glycine max
  unsure at all n locations
agcttgtcaaacactatttgtttctcgtgaagggacaacaaatggcaaaggagttagagctttagtagtaagaatatttgcttattagtctggagatggatcatggtacactaacatgcttttatttagtacctttctgcacataaaaagtgcccaattttgtatgctttgtcctggagtgacgaacaagattgtgcgagagactgtactaaggttgtcacagtagatctttggagtcntgaaaaactcagaagagattgaatccatatgatttcagcttcagtactcagcctcagtgctggactgngccactaaattctgtttcctgggccaccacaaaattaaattggggtcaagatatatacaagcacctaaagtggacatcttatcattcatctatatatgaagcctagttntcatcacag

SEQ ID NO: 15450 - DNA, 312 bp, Glycine max
  unsure at all n locations
tgtctcctatgcagtgacactatcctcagaatntataaaaatgttgtgacagatcctaatgcaaaggaacttgcgaaccccaccactccaaacacaatctccacaccattgctgataactcatactacaagaaaatatgatttgtagattctccacaccattgctgaaaactcacactacatagagtttccgaggctggaataacattcctacgagccanattctatttagagggaatgtgatcctaaagcgctntccatgcaaagccttgaatctttaaagcatcttcttcacctttcaatcctccccaca

SEQ ID NO: 15451 - DNA, 416 bp, Glycine max
  unsure at all n locations
agctttgtggctgaggacctatataacagcaccagggttttagtttttagagtttttggagaggagaataattntagggttttgcaattccagtttttattactgttcatgcacactgttcacgtagaataaaattcgttttctgcaattgcgtttctgcttcaatctacaatttcattttctactgattaatggaaggctaagtctccagcatttttttctcttaaggatcaagcacagctctctttgaggttttgttattactattgaattttgatcagtttctccttttcaccaattactctgtatttgttgctattaatccatgcatgcttagtgcttgattaattgtctctgcgcttaatttatgttcatgcttaatgatcagtttcgttcatgattaattggtgtatgtg

SEQ ID NO: 15452 - DNA, 456 bp, Glycine max
  unsure at all n locations
ngcaattaacatgaatggccttcctaatattacaggaatgtcagtatcttcacaaatatccattaccacatagtctatcgggaagataaaatgtttcactctaaccagcacatcttcaattactccatatggtctggtaatggagcggtcagcaagttgtaaagtcatcttagtgggcatgatctccaactctcccaaccttntgcacatggagagtggcattaaattaatactggctcccaggtcaataagagcctttcacacagtgacttctccaattgaacaaggaatagttacactcccagggtcttgatgcttgngtggaaggatcttttgaatcacaacactacaatttccttccactatgatattttcctggtgaatatacttatgtttccttgttaacatatccttcaagaacttggagtagagtggcatctgctgtaaagcttctcc

SEQ ID NO: 15453 - DNA, 379 bp, Glycine max
agcttcatgatgaatcaagattgattcaaagagttttgatgataacaaagatgatgacaaaaagctcaaaagtcaataacacttcatgataacaaagataatgatctcaagaatcaaagaatgagttcaagattgaatcaagtacacttcaaggatcaagaggaaagttgaattcaagaatcaagaattaagatcaagattcaagactcaagattcaagaatcaagagaagacttaatcaagatgagtattaaaaagttgtttcaaaaactgagtagcacatggaattttctcaaaaccttttaccaaagagtttttactctctggtaatcgattaccagattattgtaatcgattaccagtagcaaaatgtattaaaa

SEQ ID NO: 15454 - DNA, 435 bp, Glycine max
  unsure at all n locations
ntagagagctgcgcttcttcattgccttcaaatttctgtctgtatctgattcatcaccaggttttccaggagagaagactttgagaagcccttgaaccaggcttggtgcaaagtccttgtacctttgatgaagcaaagaacagatctttccaaaaagaagcaaatgatttaaggtaacatcatataaaatatagaaacagcttcaaatgtgtagaaaccagggggactgcaaagcccatacctgaactgcagcttgtatatcagaacttctaagcttggcatcacatatagcagccacagcttcactgacaaatntgcttaagttgacacttcgcaactcgtccatcagagcttcacgctgctcttcattaatctgcttcagtttcttaataacagcagtggtgcgcttaatgctagaatccaatgtcccttaaa

SEQ ID NO: 15455 - DNA, 313 bp, Glycine max
  unsure at all n locations
agctttntattgtcagtagatgaagatgaatctgtggccacctcatggactcctctaaggacaatagcatcatttcttgcactgaattgttgggagttggaagtcatcttctcaatcaaattcctagcctcagcaggggtcatatcaccaagagctccaccactggcagcatcaatcatactcctctctatgttgctaagtccctcatagaaatattgaagaaagagttgctcagaaatctggtggtgaggacagcttgcacacaatttcttgaatgtttcccagtacttatacaagctttctctaataagtt

SEQ ID NO: 15456 - DNA, 200 bp, Glycine max
  unsure at all n locations
gttcgtacagcttacggtataatctgggacctgcccatggtagaagtctccgcagaggccagtgcctccctcgcccagtgttatgatcagccgatgaggtgcttcatctttgnggacttgcagctatcaccagtggtggaagaanttgacgagatcctaggatgtcctctanggggaatgaaaccatacctcttctcagg

SEQ ID NO: 15457 - DNA, 382 bp, Glycine max
  unsure at all n locations
agctnttttctcttgctctgttacgtctctcttaacaaaaactctgagaactctctatntttcgccaacttcagtcttttaagggaattttntatcctaaaggcttgcttagcgccattttctcgctaagcacgagttagtggattttcgcttagcgagctagatgcgctgagcgtgagaagagacaaatgactcgctgagcaagctgatggcgcactgtgcgcatgcatgaatggaagattctcttctagattcttgcaactcgctaagcgaactgagtgcctcgcttagcanatggtactcgctaaacgcatatgcctcgcttacaagacaccaactgcttcaaccttctcttcttctcatgctttggcctatactgagt

SEQ ID NO: 15458 - DNA, 416 bp, Glycine max
  unsure at all n locations
tcggtaccaactaanataacaaatatcatactagaagtggtgttgaatagtgtattagataaaaatgaaattnttttcgcaagttgtttttctcanaacatatatgcaaaaaccaagttactgatagtatctccaatgattaaaaccagttttgatgggaaaaaaaacatttatgtccagtgaatgataaaacaaattttttaaaaaggtttttcaaaacaacacttatgtgaaaaagtgtgtcatgataagtttaagaaagtactaatcaaatagctaaagagataagtggaaacgattagtttatactggttcgcttaaacatagctacgtctagttctccttgacanaccagtgaagagtccactaatcgaagcttggttacaaacaagaatttgactgctgtcttgctacaa

SEQ ID NO: 15459 - DNA, 279 bp, Glycine max
  unsure at all n locations
agcttcggttgttcaatttcgagcgtctcgatatattatgtgcctgaatcggacatccaagtgaaaagttatgatcatttgaatatctcaagagcttccattgttgaatttcgaacgtctcgatatattatgcgcctgaatcggacatccgagtgaaaagttatgaccatttgaattgctgaagatctttcattgttcaatttcgaacgtctcgaaatattatgcgcctgaatcggacatccgaagttaaagtatgaccatntgaattgtcgacagctt

SEQ ID NO: 15460 - DNA, 400 bp, Glycine max
  unsure at all n locations
ntcgagaaattcanatggtcataacttttcacacggaggtctgattcaggcacataatatattgagacgctcgaaattgaacaacggaagctctcgagaaattcgaaaggtcataacttttaactcggatgtctgattcaagcgcataatatatcgacacgttcgaaattgaacaatggaagctcttgagaaattcaaatggtcataacttttcactcggaggtcccattcaggtgcatcatatatcgagatgctcgaaaatgaacaatggatgctgtcgagaaattcaaatgatcataanctttcacttcgaggtccgattcaggctcatcatatatcgagacgctcgaaattgaacaccgaagggtgtcgagaaattcaaaaggtcataacttttaac

SEQ ID NO: 15461 - DNA, 333 bp, Glycine max
  unsure at all n locations
agcttgacagtattacaaatctcaatatacgttgccaagtgtgagtatggatcttcatttggtaaaccatcaaacaaactgctctgtattagctgtatcaatgaaggtgggtaagttaagttttgtgcctgaacctatggccgcacaacacttgagatatattgcggcaccgaagtacttgagtaatcttccaaggtcactcattgaggttgctcttcagccatgacttcgacttcaaattcttctgtttgagattccctggatgtangtgaattagaagatgatgactcagaaaagtgatcctcttcaaggattgatngctattgtctgtcg

SEQ ID NO: 15462 - DNA, 414 bp, Glycine max
  unsure at all n locations
tacacaaatattcattaatccaacacacactcaacanataatcatcatttgtccatagttcctatcaatcatgctcagtatgatgcatgcacctgacctcaactctcanatggaaatgtggtaccatccctaaggaaatagcctaagggtgcccacacgacactctcacttatgaaaactaggcagtaagtgttgaggtcaccctgtcatgcacagtcaactcccccctcccnccacagtgatcagtctgagtctcaagggagttccaaaccgagtgacatgcccccaagtacaagtatttntcctcatgaaaaactacgagtacttactaacaaagtttgtactatnttcatgcaatatgaagtatgaaacatnggcaccatcaatgcactgaccgtggataattaaatattc

SEQ ID NO: 15463 - DNA, 333 bp, Glycine max
  unsure at all n locations
agcttgaggactataccttcgatcaaacacggtagtgtttctgtctcggcccggatttaaagcaggttgcagcaccagctccgctttcctaaccgtactggaggcggttgccgtggctttgtcctctatggttttttggagttttaacatgacctccgagatggaagccatttgatcttttaaggccgatagatcggccttcatctgttcctgcacgccctcttcattatccatttttctggatcgagntgtataggggtgccttggtgtnttcttagttatgatgaatatcctcaagaaatacaaaaggtgagtgtcataccctaatttcgt

SEQ ID NO: 15464 - DNA, 382 bp, Glycine max
  unsure at all n locations
ngaagtcagatagcccttaccactccttatgtatagtctgtcgccaatcatctagctgtgtgaataacctcggcattcgacagattttgctggaaaatatatgtgttcctcctccaccaagtaagtgattccaaggtgactcatatacgacatgctcgcaagatagattggccttcaaccaactctttcaatcaccacaagaataaaaatcactaccatgattgattcaaatgaagaattgtcaaattaattgcacatatacacaatatctaaacatatgaaaatgagattcctcatgatcttcacagatactacacatactgcttctagagaaacctatcctcctcctcttcgcattcatcaaccttgattcatggaaatc

SEQ ID NO: 15465 - DNA, 341 bp, Glycine max
agcttctagtctcaattttgagcgtctcgatatattacccgattcaatcggacatccgagtaaaaagttattgtcttttgaatttcctacaagcttccgttttcaatttgcaacgtctcgaatatattacaggactcaacttgacatccgtgtataaagttattgtcaattcaattttctcagaacttcggatctaaattttgagcgtttcgatatattacaggactcaatcggacatccgagtgaaaagttattgacacttgaatttgatacgagcttccagtttcaatttggagcatctctcgataaattacgacactctgtcaggcatccgagtaaaa

SEQ ID NO: 15466 - DNA, 439 bp, Glycine max
  unsure at all n locations
tctagccaaatggacttaccttgaattaattcctttgatattccttttgagccttgtttccctttccttgttttgaagctcactacaagccttaagtgaaaaaccatgatattaccatatccttaaggaattttggagctttggaattgttttgggaataagtgtgaggggtttttgtttcattggacaacttgttttgttggctatgcttcatgatgtantttgggccatacttgatgtacattgtatattggttaaatgttggacatgctgaatgaaatgttgtttctcanaggctaaagagtctaanaaaaaaaaagagaaaaagaaaaagcataaagttgagtgaataagatcttaaatggcacaagaatgatgaaactctggggntctactctcatgttaaattnntaatcttactttcttttaatttttttta

SEQ ID NO: 15467 - DNA, 322 bp, Glycine max
  unsure at all n locations
agctntgatttcctttgttccggaaacctttcttttctcatgtgcacccaaacccaatctccgggttcgaagacaaccttctttctccctttgttggcttgtttagcatagcttttatttttcctctcaattttatctttgactctctcatgaagcgtcttcacatagtccgcctttgcttgaccttctttatgcttaaaaatagaaacattaggcataggcaaaagatcaagaggagttagtgggttataaccataaacaacttcanaaggagaacaattagtggtgctatgaacagctctattgtaagccaattcaacat

SEQ ID NO: 15468 - DNA, 337 bp, Glycine max
  unsure at all n locations
tgcttgtggagcttctatggaggctggatctttgagcttcaatgaggtccttcaatggtgatttttcaccatggagatgcagcggaaggcaaaggagacgaggagaggggaggcaccatccactanggaataagccaaggaagaaagagcttcaccaccaagaattgccttggataagaagcttgaagaggatgctctaatggaggataagaaagagagaangtgggagcacgaaattgaaggaataaaagagggagagaagtggaactttgaagtgtatctcataagactttcattcatcanagttacaacaagtgttacacatgcttctatttat

SEQ ID NO: 15469 - DNA, 358 bp, Glycine max
  unsure at all n locations
agcttgttcacaaaaaatagggttntgaaagtttatcatttcagtttcttaccaagtaaaatggatcatttttaaggtccaacgacttaaaatgatcacctttcaagtaaaaagaatcacttgattcacgcataagatagaactacataggtctgatttcctctttgatggagggtacgtaagagcaaaagccccgcttttgtcgacctcaaaaaataaaaagaaataaagttaaggtaacacaatttccacaattctaaaaaataggctgttgtccttcaagacaaacgtaagaggtgctaataccttcctcaaccgtatatacaactcgcgaacttagaaatttcatttttgatcg

SEQ ID NO: 15470 - DNA, 415 bp, Glycine max
  unsure at all n locations
tctctgaaaggcatggttatttccagtttcctgganatatctaagaatcttgccaaatggcggtccttctccttcttggaaggtaccataggatatggtactttcgaaccttcattcacagctgtttctcttttattctctctagcttgttcacttctactcctctcttcattcttatttttttcatctttttcaattgtttcattttctttttctttatctaattctttctattnttcttggtcatttaattcttttttcttgaccattatttgntgtatcttttcctaatttctttcacttctcatatcatctttcttttcatcagtaccctttcttttcaatagactttcttcttggatctaacactattctcatcctcttgctccacaaacctcttactncttgtcatcac

SEQ ID NO: 15471 - DNA, 406 bp, Glycine max
  unsure at all n locations
gatgtgcactatattgcactcagctcgcccgggtctttaatcactgaagttcagctttcacttcggcaaaaccttcacttaacccttcacaaagacatcttttccccaggaatcacttaaactcgctcctgtgacttgctctccaccgtttaatctaccgaaagcatttgggaagaccctccatgagagcctccgagtcgccccattttatgcgattggactgtggctcttgattgcacaattacgtggaccttaaagattataatctcttcctcgtgtcaccccacgcacttgccttatggggaccccggcatcatcaaatgtgtgcctcaacttagtcaaactatcatgtggtgctacatcaggaacaacaatttaaccattcctgcatttgagatcacgtaan

SEQ ID NO: 15472 - DNA, 81 bp, Glycine max
ttggcccctgccggtcttagcaccgagctgagcttgaatgattatcaacgtagcgttgatttttacaactccccattttag

SEQ ID NO: 15473 - DNA, 341 bp, Glycine max
gagaaatgcccaagagaaacgtccgattgatttttttgttttattttactaaaagatatttttttattattatattattattttacctcttttttggtttccaacgtggttacggcatgaccgaaccgtcggatttcattttaacagaaattaacggatattacaattcaaatgatcggtggaaatttattttattttttgattaggcgagaaaatgacttaagtaaatgactaaagcacgtcaaaaggggatacggaaagtaaatgaaatgaaaatacaagtacgtgagacaagcggggaccaccaaggtacatagaatgaattgaaaaagctcgatttc

SEQ ID NO: 15474 - DNA, 272 bp, Glycine max
accctctttaatctgtatcatgagatcaaaatcgcatttttacaaatatatacttaatgtctttgctgataaggggctgttcataacccaacttctctcgaacactgatctcctttattttaacgcccgccacaaacatgaaaaactgttatgaaactaaccatcatttccagaaaaaactatatctattcatttagttatacacacaaggttaagaactggtctaaggggaggttactgaaaaaacgtaaattttctttccctactaatga

SEQ ID NO: 15475 - DNA, 307 bp, Glycine max
agatgaaccactggttgattatatagcatatgatgaaggacattatagtcctttcatgtaagttgctgggtgtcctaaacaatttccaaaaattgatgtatataaactaggaggtccaataaagatttcattttttaaattgtaataaattttaaaaaatttcacattgatcaaaacctctgttgcttttttttttaccagttggcacgaagttcattcgaaagcggtgactaatttctcgttaatgattcgtgaatatatgatggttagattaaaaaatatttatctaaccgtaataataaaattg

SEQ ID NO: 15476 - DNA, 463 bp, Glycine max
  unsure at all n locations
anaacgagaagtaatgcgaagactaatgggcccgactatctatatcctatctcggaagtggaactactagcccaccgcctacgaaggatgtggaggcctaactggcaactaacacatcgtgactgggtgactgacaccaagacaaacacatatggcagaacaaaacacccccgtcatggaccacctggctaatgaccaccgagactgaccaaaaagtcaaacccactcgcactcgaagtgagaacgcacccaccactgcagataaagccaaatcgacaaaggcacatatggaccaaaacacgctcgtcgaaccgcaaaggaagcaatcccagctccacgcaacaaaagagggtcgggacacaacatgaaacggggaacctgactagttacaccaccagaaaaaaaataaatggaaaccggaacaccgaacctcgagcggccaacaacccaaagggaaaaaacg

SEQ ID NO: 15477 - DNA, 318 bp, Glycine max
  unsure at all n locations
cacaaacaacacataagccgtaaaccagtttcatgacaatttaaaaacaacaaaaatatacttaaaaaaaataaaaaagccaaaagaaaggtggcagatgttcaatcaatggcgttaaatgatcccccctgctgatttcaacaaacagcagtcaagtcaactctgataagaaaagtggaacagagatttaagagaaagagaccatactaccaccaaataaaaaattggaactttttttttcatgtaacatctcttcatatatttttctaattggtatactttantttactgtgcaattttttttttatcaaaatccct

SEQ ID NO: 15478 - DNA, 587 bp, Glycine max
  unsure at all n locations
cgcacacacacaaagtcacgtcgtccagccaccccacacccgcgacaccaaacgcaaaatagaacntacaanagtannnntntnnntntggagcacataaggaacncagccngncccgngaactctaaagcgacatgcagcagccagctaaacagacagcgtgtggaaggaacaaggccagtattatggtgtaaccaacacaagccgcacaaccaagggagaaaggagacacccccactcattaccgaggcaaacccaatagcagatcaaccagatccggtacaagcgacagagctaaagaagcacggcaaaagccaacgaaaaaggagccaacggaaacccccaaaacaaatgcacaggcgaacggggccgcactaatcaatacacgatcatagaacagcaagataaaccaaaggaccggacgaacatcggcgaaagcacccccaaactaacaaagaaccaacacaaacaaaacccacccacgaaccaaaggcggatagagagaaacaaaacatctaccgaaggagagaaagaacaacatcgagcccacaggcaatcaggggaagaaacaggccaacacaaaaacc

SEQ ID NO: 15479 - DNA, 427 bp, Glycine max
ctgtagaatctagaattgtctatttgctatgcagatcgatagtattgcatttattagtgggaatttgattcttttgaccataaaaatcttccacagtaagtaaaatatgcacggatcatgtgcaagatcattttcaatacaaataggaaattggagaggtggaattggtctatatagctatagcattcaatccagtgatcaaagtcactttcaaaatgtatgtcagattctaattctaaagtttctgatttacagttggaatgccacctatgaaagtctaatggggaccaacagccctttcacctgccaattcctcttggagtaagtcctgcattcattggattgtcacctctcatatacacaaggttcgcatctatatctctctttaattattgtcataaagccccactcatttaattgctatcaa

SEQ ID NO: 15480 - DNA, 262 bp, Glycine max
  unsure at all n locations
ataaaatatacgctctatttttttttacgctcgagagatagtgagtgtgactacanacctagaatacaggactcttcttgagctgcatgtgcccattgatatgtgacttttctaatggccctactcatctcttatctgattctttttttcactctatagctgatttttctgacctattcgtttttacagcaactcagctctcaaatttaacttaccacaggggttatattggtggttaatgactatatattcatctttttgc

SEQ ID NO: 15481 - DNA, 331 bp, Glycine max
  unsure at all n locations
acttggaccccatttctaccaactacaaaccctaagaaaactatattatctacacaaaaggtacacttctctatatttgcatagagggtgtttttcctaactactgaaagaactagcttgagatgtcctaaatgatcatctaagctcctactgtatactaaaatatcatcaaaataaacaactaccaatctacctatgaaatcccttaagacattatgcataagcctcataaaagtgcttggtgcattagtgagcccanaaagcatcactagccattcatacaaaccaaacttggtcttgaaagcggatntccactcatcaccctttttca

SEQ ID NO: 15482 - DNA, 223 bp, Glycine max
gcaccactgccggatcttacctggctcactgtacgttgcaacgacactttttttgccatcaaaatagctaccgcaactaatccgtaaatccatgttcgaaaagcaagagggacacttcccaagacctggagtcgtgtctcttacgataactcccttgacagcaggtgcaaccctccccaaatttggttcgttgacttatactaggcctataaatgtgaacttt

SEQ ID NO: 15483 - DNA, 491 bp, Glycine max
  unsure at all n locations
gccacctgaacctnatgagacctgcatacggccatgataccacttgtctaattacattgtgttgtatttatggaggaggttgtatgtcattcttgttttaataatatagtcccactggtaaaactaactttccaaatgtttgccttcacatgaaatggccccgatgaagcttgccttaaagatgtccaagaaagacaacgcagccgaaagaactacttccgctccggagtatgatagtcaccgctttagagtgctgtaccccagcaccgcttcaaggccatcaatggatggacgattctacgggagcgactcgttcagcttatggaccacgaatatactgatttccaggatgatataaggcgccagctgtgggcatcacttgatactcccatggccaagtttgatccaataaatatcccttgagttctataccaatgctttggccaccagaggaccggcgtgcgtgacatgagactcttggatacgggccg

SEQ ID NO: 15484 - DNA, 491 bp, Glycine max
  unsure at all n locations
atgcacactatcatgtagngcgaccttcagctcgtactccgggatcctctnagtcacctgcggctgcagcttgtgcacaagaaaatgggacaccattctttattctcttctctaaccaagcccatacataatggcttatgggaactcccttcaccgaatggatgactgagaatttggacttccttgagaaaagcttgctccatgaaatccaactgcgacaaccaagcctcaaagaaatgctagttataccgtataganggtgaagacttatttcaagacgcctttcaacacccttattgaattcctatctaaaacgatctgaatatgtgtatcagatatgctataggatatgtgaatgactcacggtggcgtcctaacacccaatgctcaggtggaactattgccgatatagaaaaattgtcaaatggaaaagtgtgagaatgcctatttcgcacgcttcacttgcctccgaaattctctcatattccccg

SEQ ID NO: 15485 - DNA, 481 bp, Glycine max
  unsure at all n locations
caaacttgtccaagaagaagctctgatacttatttttatatctataggctcagatatcttaacaaagggcggcgtggattaagatactcgaacttctcccctaataaaacaacaatcaaaattcgacccaactaatgaaattcctttaactgccaacgtatcgcaaatcatatattcanattggaaacaactctgtatattgcaaactacagccactcattcaactacacgagaattaaagtgaacaaatacaggacacaccgctatcattctggatcggagcacaccttgtgcctacgtccagtcccctagccactccgcttggaaagtaccacaaccatggaactgctttctcacaggtgtaaacacccaaacgacaacccattctttctgtgtttccaatatgcattaacacgagatgactcacactctactatctgcttcaagagaatgagaacataataacagacataactctccg

SEQ ID NO: 15486 - DNA, 522 bp, Glycine max
  unsure at all n locations
cttgtgcacactatgtaggcgacttcagctcgtacccgngatcctctgagtcacctgcggcatgcaagctatcatganaagatcatctacccctatgattgttgttatcgctctaacncatttcgaaatgattagtgataaaaagttgccaacttngctcctgtctaatagatccctttacattgggaattggaggtcctcatgggcaagggtcaaagactaataagatgaagcaagcattgcatagcctaattctaaagatcaaagaaataagaagacccaatgtgaacctaacggttgcaacccanttgggtcactttcctactaatcgatgaagatgctttgatgccaacttgaagaatcacttctggaagcccatttataaaaaacaaccttcatgggttagtcgacaattttggtgactactaaattgggtgatcaatataactagtcaattcctgcacctatttgaatttctacattcttttgctgaattctgggaattgattttctaccacccat

SEQ ID NO: 15487 - DNA, 412 bp, Glycine max
  unsure at all n locations
gcctggtgtagaacttgagttaaagagctattattggtagngtattatactnctaacttatagaagttagtgaaacttagtggtttgtcaataactgaacatagtctcggtggttgagacgaactagtataaatttcttgtgtcctattttctccttttttatttaaactgacttacagttagaatttgacctttactttagaaaaattatgtttggtttacaaagatctgaacctatcgtctgatctatcccacaaaaatctgatatttgtttcttaagttctacttcatcaaatgatgtttttgttgtatttcaagaagattttaagtttagtaaaaatcacaattcacctcattcttgtgatatatatatatatatatatatatatatatatatatatatatctctata

SEQ ID NO: 15488 - DNA, 134 bp, Glycine max
  unsure at all n locations
cactcactcgtaccggatcttaagtcactgcggctgcagcttcatcacattgatgaacgtgattgtatgcttgtcagtgngagacaacgtaaatttctgcgcttctctatctctgactggcatacgtctgctga

SEQ ID NO: 15489 - DNA, 335 bp, Glycine max
  unsure at all n locations
ccatgctagcataagtgagacaaaagctggtgcaaatcataactctgatatctcatgggtcgaatggatgaatgcatgaaggaatgcatataacacagatgcaatctaggaatgcaggagtccagcgaattcgtccccttcttagacacaacgtctaagggtagcaaagtgccgcacgtacgttntaagaaagcacaccgaccctccgttggtttgttacacaatggatcaagacagaacccatatgcgatgcctatgcaaaagacacaatgcgagaatgtacacaatatgacaatattcacttgacatacacaaaaaggtatatgatacttatg

SEQ ID NO: 15490 - DNA, 379 bp, Glycine max
  unsure at all n locations
atttatattgccttattgcaaaatanattatcataaatatcatattgggccctaaaaaaagctatagcccttaactaagtntgattcgcctcttattaagggtaaagnctatctattnttatnccttttgtctcatgtatgaataacaatgattttatattatatttacataaagttggtttctcattggccataacccgataactattaatgccaaatatactttttgaactttatatgaataagtaataactataattaactaacttcaaagatgtatcaattgggactagtgccatgaatcaagaatcctttaactggttgcaggtgaggctttaaccaaccaaatgcggaggctaacaacaatgagtgaatgttg

SEQ ID NO: 15491 - DNA, 444 bp, Glycine max
  unsure at all n locations
atgctattcgcactcagctcgaccngatctttagtcactggggagcaccttacctattcgccttaccagcttagaattgggaatccattccattcctggtgtccggactctcagcccttatgatagccgcgatgatccattacttgtttccctaagctctctggnctttcttaacgcccgaatccatgccttgcgaactctttgaataccttcgcgtgggcactaaacccgtgcataaaggcgtgagctttcgttaatggcgctctctatggggtaccaactgtctatggcaggatgggatatattatacaccctttgtccatcanggacatttgacatcctccatgagatagatttgatcttcttctctacgaggaccattacaaccccccatgcaccagagtggtcaatcgcttcttttcaccacacagacctgtacgtaac

SEQ ID NO: 15492 - DNA, 359 bp, Glycine max
  unsure at all n locations
acttctgcttattgtgaccacattggtacctggagatatgtcgcggtggtcaggagaccttggggacgttaggtggggtgctattgcccaaaaccaagcttgaccaatcccgacccaacccgggcatagtcggtcagtgagaacctgtgatgtacctaagcagacgagctcctggcagtcnacagataaaaggaacaaagaccacaaagcaaggaggcttgtggtggctggccagctgtgaaacttgattgatatgtgagatatggtctctggtaatcgattaccaagggtgggtaatcgattacaaggcttaanaatgaagacaggagactaagatggtctcttgtaatcgattacca

SEQ ID NO: 15493 - DNA, 207 bp, Glycine max
tggtcgtcattgtcaatgcggaaggattctgcgcttcactatccatgttcacacattattgcagcttgtggttacgtgaacatgaactactaccaatatatagatgttgttatacaacgacacatttaaaacttactcgcaaatgggggctcttggaatgaagtgctatttcttcttctgatgacgcatggacacttattcctgacc

SEQ ID NO: 15494 - DNA, 389 bp, Glycine max
  unsure at all n locations
tagttgatcaagaccgaatgaaatatgtgggccatcatcgatgagttctataaanagctagacctagtagcaactcatgagcaaaagctagaggacaagtacaccaaggtctcagtcttgcaagcaaaaagggaagcaagggaaagggtgatcgattcattgcacagagaagcaatgatgtggatggacagattcgcatttactttgaatgggagtcaagatcttccctgactgctagccaaggccaaagcattggtagatgtgtactcggcccccgaggaaatccacgggctcctcaattattgcgaacacatgatttgattaatggcctacataattangagtcactaaggcaattgtattgtgctttgactttggctagatacacc

SEQ ID NO: 15495 - DNA, 442 bp, Glycine max
  unsure at all n locations
tgtccattttgcactcactcgtaccggatcttagcactgagctcagcctttcaggatctgggagaaccctcttcttgttatccctaggaagggccccctctccctctccttgccttcctgctctcatgtgaaacacattgaggactcttgagctcaagatcaccctcatagaactctacaaccagcttccttaagtggtatcagaacacaagagcctcagtaagtgctccttaaacctncaattattttttgctttaccctctcttccattggtgttcttcattttttctcatgatctcctacatgtcttgtctaaatgttgttacatgattcttagagtgtcaccgataacctgctataaactagatngaattttattggtcaaattcttgtcttgtcttcaacatgatntggttaggtaagttccttaggatttgctggg

SEQ ID NO: 15496 - DNA, 432 bp, Glycine max
  unsure at all n locations
catatgtgataattgactattntgacacacaaagaactcctaaagtgtccagatgcaatctaatcgattaccacatgtggtaatcgattatctcaaaccacaaagtcttccttctgctaaaactagcttatgtaatttattactaaaactgggaatcgaataatccgatgattcttgccacatttcaagttgaagtgagttatgttgcttgttctaacactttgtaattgattactaaactttgtaattcgatacattgtgttgaactcattgcttctaagaaactttgagaccaattcattaatctaccttggttgctttctactaagcatgaatataagagaactaattacccatcatgcctagtctanaaacatccaatataaatgccacatcttttaaatcttttttggcattgtaaaatgattaaaa

SEQ ID NO: 15497 - DNA, 357 bp, Glycine max
  unsure at all n locations
ttccattgcaccactcgccggatcttacactgagctcagctttcatagtgctggggccaaggctttttttgcatggcctatccggagaattctcagacacatctaggctccctgaatgacagacaggtatccattttgcctctccaatagaaacttaaaattatttttgacttagggttcttgggacaacatccgactcttaaatccttaagacttactgcagacttaactggcccaatgatagctatctgaaactttgacacctctcngatttgatgacaacttctaatgaatagtgcacattcctaagtcctcacagtgagtgactgtctatatgaatatagtgatgctaataaa

SEQ ID NO: 15498 - DNA, 417 bp, Glycine max
cgcttgaacccttcttagacgcatcgtataacactcagctttacagctgaatcattccccatttgacaccaggtgtgagccagttctagggtcctaaaagacagcctcacatgatcaaaatgaaagatgacttatcccacaaagtccaaacaactggcgatctgcttgattatagaaactgacttagtaccaaaaaaatattttccctggctttcttgatcaaatgcttgacgctggcagaagctcattctattttcgaggctttatgtattacaattctatgctttgaggacagaaaaaacatgtcactgcctttgcactttgctattgaagaagccttggctatcatgcccttgaccttcgcggtatgctacatttcatgattttaagactgctaatggttatggtgattctgtg

SEQ ID NO: 15499 - DNA, 410 bp, Glycine max
  unsure at all n locations
ctatccatatgcactcactcgaccgggatcttaagcacctgcggctgcagcttggcaatcaacacataacttagcgattttattntccgtatatatcaaactcgaattagaacagagctgtagaaaatcaatgacgatacttttcacgatgtccatggatccgtatatatgcgtgctcgtattgaaacaaatctttgacaatttaacaacatactatgactgatgtgtgatgggccgatatcctcaagctcaattcaaacaaagcttttcaaattcacgacatactttttcggtggtcatggtccttatatttagagcctcaatgaactaaccttacaattcacgacaaacttttatcgttgtccatggccccacattcgatcgctcgattaaaccgaccttgtacaaat

SEQ ID NO: 15500 - DNA, 404 bp, Glycine max
  unsure at all n locations
tgcattcggaatagcgaaagccccactccatcattaggattattacctgacatctcaaacaaacaaatcaaacgtaactagacaattatagttgctgtttgaatacctcacccactcaagtgtatcacacaattatggcttttctctaatgaaacactcttgccttttaccactctaattccccttgagttcttaggcaattcaagagattatggccacaacaaagaacaattcaccaatatgtgtaaggtaaggctagacaaggaaaaggttaaccaagaaaaaggctaacaattgttttaggcacaaatgaaggaaataaaattcagaatttatgaattcaagtaacaatccttcatgcaaccaatatattaccttaaagagtntttttttttaagttcttc

SEQ ID NO: 15501 - DNA, 120 bp, Glycine max
  unsure at all n locations
agcactcagccgaccgggatccttaagcaccgcggctgcagcttgtcggtacgacgtcatgtgaaagagtgatttattttgacatgccattgnncaaaatcacctctggccgagacacat

SEQ ID NO: 15502 - DNA, 485 bp, Glycine max
  unsure at all n locations
cgcccgcgtgacccccgattgatgcctttgcanaccncgaccttaganactcagcctgcgatctagcaaatattagatcagtggtnaaatgatagtatatttccagcacttatggtcggaattggtggtctttttaattagaacacattttatgcatattttgccatgccatttaacttttaactggagaatatagaaaatgcagtttccggcagaccataaaatttctatanaagtaacatgcatctaataatntctagcacaatatgaaagagtcaccacttaaaacccaaaccgagggtcaagaatactaaaatacagcatttaccttcattcaatagacagatgaaagtgcagatccattagagagagcattggagaaaatattctttttttaaaaaaaaaaaatttagactacacaacttaaagaaatagggcagctaagatacctcagacatgaagcttgctcagtttaatgaactccg

SEQ ID NO: 15503 - DNA, 452 bp, Glycine max
  unsure at all n locations
cttgagggtggatgatagacgaacagcgctaggcattttatcatgtgtctnncgaatagatttanggtntgaggatagatgaatattgctanngcatcattcatgtgactccgataagatttgaggtgacgataacgaacaacgctaggcaaccaattcgtggggcttcattactcatgggtgaggacgcattgaccaaactatgggaataaattgatgggtctccgactaagatttgagggttgangatagacgaacaactttatgccatcaattcatngtgttctagactccatggtggagacgcatgtacagcgcttagcaatcaattcttgggtcttccgaatatgattcgacggtggaggatataccaacaccgctaagcattcattctgtgggctccaacctgatggtggagattcttgaactgccttngcatcatttctgggtcg

SEQ ID NO: 15504 - DNA, 470 bp, Glycine max
  unsure at all n locations
gtagacccccttggtttgatcacgctagctantaccngacacttagaatactcagctttggtggagctcatggagatgacatttacagaatggtttcctgaggagagagaggctgtctaaattcttgtttctgatgagagaaaaatagctttctgtcctaaataaaagggtttcctcttttctattatttaatctactctgcccatgtcctattgattgaaaaaaaatataggcccactttctttttttgactgtgacccatcctcagtcacaaaagtgagaaaaatttacctttgaaacgctaaatcctgcctcggttgcgtgccgatctctgattccagttctcgcgttctctgcgtcgccggagccatttttcgaaagccagcatatatatatcaaacnctcagaataaaacccgagcgtggttcaaggtttggttcgttaattttaagtccacgcaaaccatgatt

SEQ ID NO: 15505 - DNA, 424 bp, Glycine max
  unsure at all n locations
ngcccaaagaaaggagccaccgaagaaatgcntatcacctcaaaagactggacaacnggntgcaaacgacagcggcgccgctcccacaaaaagcatanaggatcggcacgccactataagactccccgccgagacaaaaccagatgccccccacaccaaaacaaccttcggaggagcggaaagaacaacaccaccggggacccccggccccaacaacagcggaaggaggggaaaacccacatccgaaaagaccgacagtggaaggccactgacgggagaacaacacaccctaaccaccggcgggagccgcgaagggccaaccaccaatgaccatggtctaagcgagaggcctcgaagggaactacaccaaaggcggcgagcgccccggtcaaccggaaccaaacccgaaacacactgcgcaccc

SEQ ID NO: 15506 - DNA, 397 bp, Glycine max
tcaccctgactgtgaccctgatcggccctaaaccactgttcagccatctgggggtaaccctcttctgctaatcctaaggatgggctcccttttctatcttgcttcgtgctcataaactcacaacaagcttcatcaagtggatatacccaaagctctatacggctcttaactactaagcttgcttaccttacagtctggctaatgtgtacagatcttaaggccccaatacctgttaaactgatttgatgttatgacaaattttgtcttgccttgaacatgaattgtgtgagtatccgttcctctcagttacgtcttgttattgtttgcggctgaacctacacaataaaatcttacacaattataaagaataagaaaacttcatggattcctttgctcg

SEQ ID NO: 15507 - DNA, 318 bp, Glycine max
  unsure at all n locations
tgagtgagctaacttacatttatttgcgtagcgctcactggccagctttccagctggaaaacttgtcttgcagctgcattaatgaatcggccaacgccaacccctctgtngtcgctcgggctttctaccaattatcatgtttaacagcgtatcgatcgagattttggcctttcttccgcttattatccattattccaggcttgcaactcagctgttaacgtgcccatanctgtcttaaataattacgcccccctccgccctttccagaactgggggaatattaacattctgcaacatggaacccctcaacggttatcg

SEQ ID NO: 15508 - DNA, 126 bp, Glycine max
  unsure at all n locations
ccacagattctgccttcttctattttcagagtggggatgcctctaacagcacctctgtcaatgattntcttcatgcctcttaagtgcagatgtccaaatctttgatgccatattctgacttcatct

SEQ ID NO: 15509 - DNA, 402 bp, Glycine max
  unsure at all n locations
cttgcgaaatgatttctatacaaaagtttttttataaagcgactaacagatataaagggtgttatacccttatttcgtctggggactatcatttgttaatcttttgattcttgttagtcgacttacagtgttgaacgccagttacggtgtgaaacagaaaatcattcagtgttttgatcaaaaatgcaaaaaataccaacaaagggaaaaatggtcttttccttggtttccttgaccctagctcgctcangctagcctctagcttgcctgtgccaccgaataacttcatggtgaaaaaaccaactcgccagggcgagctcattgcttcagcactaagtnttagcttgcctgngcaagctgcaactgctccaaagtgaccctttgcttataaataggcgttct

SEQ ID NO: 15510 - DNA, 175 bp, Glycine max
acatacttattgtgacaatctcagttgagttatgaaactgccctgagattatgtgatatgacctgaacgttaggtcagctttctatggatggattattggcattgcgatgcatgatataatagctatgagggaggaattgtgttcatgtattgatattacggctttgctctcctg

SEQ ID NO: 15511 - DNA, 276 bp, Glycine max
  unsure at all n locations
ccactgggggttgtgttggtcatctcaacatggaactttcctttctgtatgtagaagaatgtcccttttcactctatttatatatctaaaccgtatatggctataattgagaacagcttttcttcatctcagccaatttcatcactgtggagctcttgtagtgagatgtatntgtcctggtaataaaactcttccgcactctttaagttttctttgtcaaaaatcaaattntaccaattatgtcaagctcgtaacttatttgtgctctctgtctat

SEQ ID NO: 15512 - DNA, 505 bp, Glycine max
  unsure at all n locations
aatatgtcgatccacctctaagggcacttcagctcgtacccgggatcctctgagtcacctgcagcatgcanngctanagtatgcccgagtcattcatccctatgagaatgttgtgaatattggcgatcagaattgccattccttggattataggggttgaccaagctcatgcctttacaanaaggttcatcaagtccagttgaaatatgggaagttaccatctttgaaaattgggggcaaagatgaatcgagtcacatcactgcttcgtctactgcccaacatattaaagattggtgatgtcctcgttacttcccgttcacccttgacaaaaatgcattgaccatgctgtaaatctaattgattaacccctatcctgcgaaaaattccaatacttcactgacatattcgatacatcctgttttcatggttgatggtcattgattcctccttgaaaataaataaataaataaaatgacttaatattgtttaataaaaaaaaacccg

SEQ ID NO: 15513 - DNA, 402 bp, Glycine max
  unsure at all n locations
ttctttaatgcatctcatctaanaccgagttcgatggttgtacgagctttcgatggtagtcngcgggaggtgatatgggaaattgacatccncattcaaataggcccccacacttgcaatgtgagtttccaagtgatggacataaatcccgcctacagatggtggtcccctcgatgcttcaccagaaactgaaattcgcagttggtggactcttgttgatagtgtcnggtgaagaagatatgttggtaagctgccccttctcgacaccatatgtagaggcagcggaggaatcattggaaacaactttccaatctttcgaggtggtaagttgtgcctccgtggaaacaagcccattgctaccttgtttctctaatgcagccctgatggtggcgcgggtaatgc

SEQ ID NO: 15514 - DNA, 476 bp, Glycine max
  unsure at all n locations
atgctcattagaactcactcgtctcggatctattacgcacttgngcgtgcagcctgccaaggttaggaatctggataagcctacagtttcttcttatatgactctcagngaagccaagatactttaaaagatactcacgttgagcctggagatggttttcaaagaatacttagggggagcctatagaggctttgagactagtagttataagagcctatgggaagcttcagaaaatnacaataacatacttggtgcttgtgtaatggaatctacagtgtgggctatatatactcagggtggggtaaccatataattatgtgagtatttattctttttaccatttctgattgttcgtttctattttcgttacgaaacatattttccatactattatttgatatagttctagaagttttcttaatgattttcaagatataaacacgtttctttttcaaaaagaaaacctaacttccttt

SEQ ID NO: 15515 - DNA, 438 bp, Glycine max
  unsure at all n locations
tgatagaaataatactacatctttttctaatgttttacaaggtagtaatatcatacaaaataactttagaccttacactgaaattgattctcatatgttaaatgaaatgtttctaccaatacggaaaattcatgatgtcaaacttcttttttgatattcattgtgtcctacatcgtgatttgcacattactgaaaattgcaaaaggaatcggttgactataaaagaatgagtatgtttcaaaatacaaagtagattaaatgaagaacaaactttgcttagatcacaacggttatttcaacaatntctagtagatggttacattatgattgagtcagagagggtgtcttttataagatacaaccaatctanactacgagtggacaaatatgctaattnggaaaattcagaatctaacaatgaaaaccatggttctgata

SEQ ID NO: 15516 - DNA, 243 bp, Glycine max
  unsure at all n locations
atatatatggctaatttagaatttctataacataatgttactttttatgagtttagaaagcttctaaatccatattattatgaagtntttttgttaaatctgactcttaaatntaaaatttattatgagcattatttctatttaagagatgatttaatataatttcgtattacttgaggacttattaatattatatatattcgataatcaaagtttattatatttatacttcctggatctggt

SEQ ID NO: 15517 - DNA, 376 bp, Glycine max
tacccttgtgtgtggcacatgatgtgtgacagtgatgattttatactttgtatttgtgagaataactagttcggaggttgatcattttcatggagacctcatggattggccagcttggatatgaaaatgcaatccttcttgtgttgttcttcgctacttttatttatattggtgaatgacttaaattttacgtagtttatctttacaaagttgtttatgcttatatgtaggttttgaggaaatttgagttattatggtgtagtgtgtgtgtgtctatatatatatatcatgtcctgttttaatttggagttgggcattttagcctttgggacttcgaaaatgcaaaagttataagtattctataatcaattaattg

SEQ ID NO: 15518 - DNA, 388 bp, Glycine max
  unsure at all n locations
attgccatatggcactcactcgtccgggtcttnagcaccgcgctccgctaattgaattcatgaggaaaaggattttagtgcttgaaattgaggagaatgagagagttactttgagtgtgctacaagactctttctcaaggtggacaagggtccatggtcttttttcccgggcctacattccctgatctagaggattccagaattccaatcattttactattcagaattgcccagctctacctattaaatatgccaggctctacatattcttaatcccaaaataaaaggtacctgtcatggaaagattccccagaatttcagatttccaaggctttctatcctggaactgagggggactcccccctccatcctagccccagcaaatcac

SEQ ID NO: 15519 - DNA, 354 bp, Glycine max
gcgcataaacccaccatcccctagttgccacctacaactaagctcaagtactaccacgtagcccatatactcgtgtctctcaacaacgggtccccatcaatcctcccaaagcttccaacatccaagttattcaacattcacacaacacaaactatcacagcccataaaacagggcaaaggcagaaaactctgcccaaaacaccaaccaaaatcacagcttttctcacttaagaccccagtaacaattcttcgtccaattcgtaaccggggatcgactcaaaatttactggaagctctagtcttaacctaattggaccgtgggactactacaacgtcagactattctgactactc

SEQ ID NO: 15520 - DNA, 364 bp, Glycine max
  unsure at all n locations
ttcgccttggcactcagctcgaccgnatcttgagcaccgagctcagctgttgattgtgtccttaacggacttgtatgtaaatgctaactcattcagttcaacttactgactgcttggtctatttatgtcatccctctgaagatatctgccctatctatcaaatgttgctgcgcaaatcagagacagtctcaaagtaagtctcactatcaatatatgtcagtctttaagtcagtgactgaacagctgagtactgagattgatcagagactttccatagtcacatgcgtgtgattatgacattatttaagatattattctatggagaaaatatggctattccgttggtggaactgcatgccttgac

SEQ ID NO: 15521 - DNA, 377 bp, Glycine max
  unsure at all n locations
nggtaacaagggccgcacaaataanattttacacttgggaattaaattcaataattcaatccaaaaaaatccattatccaatggcttgggcggggataccaactaccaagtccttagaatccagaagaagaaaaaactccttaaaaagatttatcggtggaaatgggaatattatattttttttttcagtggagaccgggatccccactttctttttggtttgggggccactggtggaggcttctttttatttttcaagactattttttagggcatattgttaagtgcttataatccatcgataccaggaataatgatttataatttttaacaaggtggtaaagagttaaattntaactttttgagggatgaaataa

SEQ ID NO: 15522 - DNA, 195 bp, Glycine max
  unsure at all n locations
cttgaccactgcccggtcttagcactgcgtgcactagattgtatctttacttgatttgagatatttgttgactgtacattcactttatagtgatgatcatatgtatatgtaaatgattgttgctaaattaggtacctaatcattgaatcacacataacctattaaaaataggcagccattgttgatctnaatcaa

SEQ ID NO: 15523 - DNA, 433 bp, Glycine max
  unsure at all n locations
tatgaatcttcaaaactctacaaagaaagagtcaagacctattatgataaaaagttgttgaagaaagacttcaaaccgggacaacaggtgctactttttaattcaagatttaaattatttcctaataagctgaaatccaaaatggtctggaccctttgtcatcaacaaagttcgatcttatggtgcaatagagctatatgacccacaatctcaggaccctgatagagcatgggtagtaaatggccagtggttgaaactgtaacatggtgaagaagttaacaggcacacaacaccttacattttatcaaccattgaggtaaaagcatcaagctaatgacgttaaagaagcgcttcttgggaggcaacacagttctaatntcttttattctgttntaatacattccataatgtggaacttacttcataatcatta

SEQ ID NO: 15524 - DNA, 459 bp, Glycine max
  unsure at all n locations
tgtgctctctcatgtaagcgactncagctcgtacncgggatcctctgagtcacctgaggatgcacttgcataaagcattgtaagataaggttgctctgtctgccttgaggacaacccctcacagtaggcatcataatcgaatatgccatattggagtgtcactggngaagaattcaagatgatgcatttgtagttgttctaaataagttagggttaaatcttttttcttaatacctaatagaatcttagtacattagttaaaaattaaaaaagaatattttattgtgatgtaataattttcttataattaaaatctacaaaaaatattatgttgattattaataaaaaattacttataaatatttttttaaaaaatctcaaatcaatatttgactcatcatccacccttagtnggataattcttttttttcctaaattcaccaacaattgttaattttt

SEQ ID NO: 15525 - DNA, 312 bp, Glycine max
  unsure at all n locations
agatatttaaacaattaaaaaataagtctccctttaatggatttctggatttatagctgtgtgtgtggtttaagattgtccaaaaatgataatttataaagtttttgaagttctagctagacactcaattaaaaaatttacacgattaaaaactcgattaaaaattaataatntaaaaacttatttatagaaagttaaccttaattgaatagtccatcctcgaaccaaactgatattgggtagaattgatcaactcgatgaattgatatataaatatatatttcatcgagaaaattctaccaaaacaatttt

SEQ ID NO: 15526 - DNA, 115 bp, Glycine max
  unsure at all n locations
acttatcacctcaacagatggcaactgaagacccatcgtcttatagacctatgagagctggtatangacaaaggttttgggatagttttaccttagtggattaccccacatactt

SEQ ID NO: 15527 - DNA, 557 bp, Glycine max
  unsure at all n locations
cagctcataactgtagtggtatcacgtcttgtattacatctacgctgatctgctgcacnccncacaggagcaccaccatttgaacccgtgttggacccgcttgtataacgcgacacgtttgaaactctagcctggccgccctggatctacttcatcaattgttgtttttgctttttaaagcagacaccagccccattgagaaagataatggtgattggagatggcactttcaagagaagaatgaatcaaaaaaaactcaccaccattaggaaccctggataagaaccttgacgtaagagaagatgaatggagggagaaggaaaaacggcgcatgaaatttagtgcctcttaaaaagttgaactttgaaggttaattctcaaatgatcaaaggttgaaaaatgcacacacatatcctctatttatagcctaagtgcacacaaaattggagggaaattgatctctattcaatttactaaaatcgaattgaattgggagccaaattcactatatgatagtgatctaactatgtcaccccctatccaaacaagtcagttcg

SEQ ID NO: 15528 - DNA, 367 bp, Glycine max
  unsure at all n locations
ttcccttgagcaccactcgccggatcttagcaccgagctcagctcaaataggtcaggcacattcggtttattctgtcaacataaggctagggattcggttataaaaaaactatttgaaatccatccccatggacgngtcgtgatgctaaaacatctaagtataaaaatactctaaatgctattcttatgtttcaaagagtgtatacccccatacgtcccacacttaaacctaaagactcaactcttagaaagctaaagtaagtacctatgaacttaatggagtcgagattttcatgaactcagagatctagattactctataaggtctctgtgggggcacggacacgtgctacgggcacggttggtg

SEQ ID NO: 15529 - DNA, 300 bp, Glycine max
  unsure at all n locations
taatagtgaatcacttattgggaggacatgttgctatgacattaaattnaatagccattcttggtgcatatttctaaccatgcttttgattttggtgagctaaaaaggtgaatgtgggcaccaccatacttagttgattgaagcacatgaacaaaaaaattgttgaatggaagggaatgcaagaagagtgtgtatgtaacttgtctttgtgtatacttaatctttagtctgaattttcttttgttttgagtccttactttttttaagtagctttaactggtttagtagttttaattagtc

SEQ ID NO: 15530 - DNA, 487 bp, Glycine max
  unsure at all n locations
gtgatcctacataagcgacttcagctcgtacccgngatcctctgagtcacctgcggcatgcagctgtgctgtntatcanaacaactaagtgcgttctactattatatgtgaatcaataaccagcatagattcaaaggtactatgttggcttctaaatagcgccttcnttaaccgtgcttggtggttggaacgccacaaagtaacaangccgcatcccgccatattgatnnttcctccccggggaaacatgagtggaaggagatcttcatcaaggaatcatnccaactcttgatataggctttgagggatcaactgggctttaattccatccctctactgggatcaccacgctagtcccgtcacctgagtactggcttgaagaatcgccgctgacggcagggcacccttatactcaccatatgttggtgtgcaaacccacccgctgtaaggttcattgatgcaaaaaacaatatgtccagcctgctaa

SEQ ID NO: 15531 - DNA, 302 bp, Glycine max
  unsure at all n locations
taaagctagtgtctttgttatattntttatggatcttggcttaagagagtaagactctttctaccttatgaattagaattaaaaacactttttattgatttattttaacattataacatgaatgagatatatatgacacattaatgcctgaagagagagaagaatacgtgaaatctattcctgcaacaacttctaccatttgggtgacatccttatcagtgtggtttcttggttttaaaatgacataaaagcatatactttgttggtttatcacttgatctatttgttacttcacaaaatca

SEQ ID NO: 15532 - DNA, 156 bp, Glycine max
tgcagctaatactactgcctccccactaattatgtacataaagtttttatgaaatctattctatcactaaaactgcttgacacatgagacttaaagaagatcgtatccctttgacttatgtgaccttaagtttagtttagtcttaaaaaataaaaa

SEQ ID NO: 15533 - DNA, 374 bp, Glycine max
  unsure at all n locations
tgatcatgtcatcaattcgaagatggttattcagcttcttttcaaactgngaaaaaaataaaacttatagctcagacagctgtataagaaagaagctatatcttgaagtcaacaactgttgatatttaactaaatacatacctgaataatttttactttgctcattgcaggctcaatgactccggcctccaagttgtttctgattatcccttgcgaaaggtccaaacccatactggggaaaaaagagaaaaataataacaatatttagcgagatggaaaagaatgccaaagcttatcaagcatcatttcatatgtattctccattggtacttttctctaatattcattaacatattcacatgttggaatgatac

SEQ ID NO: 15534 - DNA, 176 bp, Glycine max
  unsure at all n locations
tatgttctcaagactggactaatacatttgctgcccaagtntcatggtctngcaagtgaagatcctcataatagtgaaatatatctaacttcaaagcttataaatatanttacatgtagcgaatatatataacacatcacaacacaattacatgttatacccaatatatatatata

SEQ ID NO: 15535 - DNA, 421 bp, Glycine max
  unsure at all n locations
tataagctntgagtgggaaatgatagtgagactcaacttggataccaaccttgtgctacaacaattgtagcaagacctagtatccataatgagagaaaattgtttggttaaaaccttgcatcttgtatgaaagatgttctctctttaggtttgggttaagtcacaagattaacttgttggatcgaatggcctcagaacaattaagaagggggggttaaattaattattcttaaacctttactaattaaaaattactcttttaaggcttttactaaattgttaagagaatgaggactagaagagaaacttaacagaaagtaaaagcagaaatttaatgcacaacggaaagtaaaagagtatggaaaaatgaaacaaacacacaagagtttttatactggttcagcaacaacccgtgcctaca

SEQ ID NO: 15536 - DNA, 152 bp, Glycine max
cactcactcgtccggatccttagcactgagctgcgcttgaagtattcaatgattttaataacttagagaagaaagaatatgcttcttagaacaaaagtctggctcttgattacatgtacaaaaacttagctgcttactgtgtatatatctgt

SEQ ID NO: 15537 - DNA, 420 bp, Glycine max
  unsure at all n locations
tattatcatacaaaaacttttaacagttacaacttttaatatttgattttaaaatcttcaaaatagtttggcacagatagaataatcataatcagttaggatgctccatcacaattaanaaagaagacttaatggatggagcaacgtgaataacaacaaattataaattcaaagatgtgtttttttgtttcattaaattagttacaatagtacacttaaaaaaaaagttacaatagtgactaaataccgccaaatttaaggatcaaaatgttagcttactcattttcttgataaaaatcgttgacttttaaattgaataaaatattaaattaatggaagaatntgttaaatntgtttgaatttggattatctttacaatagtgattaatataaaatcaagattttataacaatgttttac

SEQ ID NO: 15538 - DNA, 222 bp, Glycine max
cctacgcatctaacgctatgccatgggattcgttaccacttttatccaatggctgacgcctacggatgcctcctaaaaatgccttatctttcaatctctccgctccagatatgctagcgtgtgtacccaatcctacatggcaatactttcactcctatactgtttgaaatgtataacccaatgagctagatatactatgtccaagatcacctcaatacctat

SEQ ID NO: 15539 - DNA, 324 bp, Glycine max
  unsure at all n locations
tgtattacatcggtttttttataaccgacttagattcaaagatgttgaatcacgctnttgtagtagtgtcaacatgagctcgtcgttccttatccttcaatgtgacttgtatagcaaggatagtcataagcgtaggtctggtaatctgaacatgggaaccatccttagaagatgtagggggaggattgtttgtgaaatgaggtgcgatttggacagttggggtttggtttttttcttggccattgttagggttaggagtttttgggtctttgataagaaaagaggttattttacaaagagatttatgggagagaggagagagaa

SEQ ID NO: 15540 - DNA, 167 bp, Glycine max
ctcgtttgttaacttttatacccctgtgactgctaccatttacttagtcattctcgttacttaaaataaataatttcacgacgttgattgattatcataacttcgtaaataattcgaccgtcgcggccgaccacgtggaaatcaaagagtaaaaaaaaattaatatc

SEQ ID NO: 15541 - DNA, 452 bp, Glycine max
  unsure at all n locations
tcttacatagtccgctnttgctggacctttatgcttaaaaatagaaacattatgcatagacaaaagatcaagatgagttagtaggttaaaaccataaacaacttcaaaaggagaacaattagtagtgctatgaacaactctattgtaagcaaactcaacatgtggtaaacaagcttcccaagtctttaagttcttcctcaaaactgtcctaagcaaagttcccaatgtcctattaacaacttctgtttgcctatcagtttgtgggtgacaagtggttgaaaataacaatttagtgcccaacttgccccacaaagtcctgcaaaaatggcttaagaacttagagtccctatcactaacaatgctccttggcaaaccatggagtctcacaatctccntgaaaaacaaatcagccacatgggaagcatcatcaactnttntacatggaataaaat

SEQ ID NO: 15542 - DNA, 451 bp, Glycine max
  unsure at all n locations
ngccttgttnggccgcatatgagcaagggttcgcgaagaacaatggtatgtcntcttaccggctaatcanggccttttggcttaacagacggcaaanaagaatggttataccggatacccactccggtatctccgcccgtcacgtgtctcaaatgtcagtatgacagatcttgtgagcgccaaagatgacgttaatcttcgcgtggtcacgggttngtcggccgcgattgacgaaagggcagaagaccatgtcagcctcgcatgctatcaaggctttcgtctacagacaggcaaaaagattgttataccgatacccactcggtattctcgccgtcaccgtgctcaattgtatattgacaacttgtggcgccgagatacgtaatctcccgtgtaacgggctgtcggcgcaatgctaaggccacanacattcagtcttcctgctttagcgttt

SEQ ID NO: 15543 - DNA, 367 bp, Glycine max
tggcagcattacaaatctcaatatacgttgccaagtgtgaatatggatcttcatttggtaaaccatgaaacaaattgctctggtttaactatatcaataaaagggggtaagttaaattttgtgcttgaacctctaaccgggtaacacttgaaaaatattgcagcaccgaaatacttgaataatcttccaaaggcactcatcgagggtgctcttcaatcattactttggcttcaaattctgcttgttgaaaatccctggatataggtgaattaaaagatgatgacacagaaaaatgaacgtcttcaaggattgatgcaacttgtttgtcgtgcaaaagctttctttttctctctgtggtggttcttct

SEQ ID NO: 15544 - DNA, 252 bp, Glycine max
  unsure at all n locations
ttgcacccctcgccggtcttagcactcgctccactattactatcctgcatcaccctattctatctatttgcctatgaggtanaactagacctaactctcatcttctctaattcgggagatacaagaagtaggggtgtcttcaaaatgagttggttctcttgattntctatgccaaaaatgaagtttgtgtgttaaacataaattggcttaaattcctaaatgagtttttaccaagtttgataaacaatttaa

SEQ ID NO: 15545 - DNA, 382 bp, Glycine max
  unsure at all n locations
aacatttggaaagtttgtntaccaagaaatgctactcttanaaccaaaatggcgtacaacctcctccaataaacacaaacatcaatgtaaatttaaaacaaactcatgcacatacttccttacgaacattcactcgcacaagatattcttctaactaaaaaaaatggccccatgcacaatcaaagcaccttcgttacctagaatatttatatggactttccaggggtatttgctacctacatcacatgcacttccttggctaaatttacatacatgcatactcaaagcatcttggctaccaaaaattgcacacgtgcacattcttgtatttctaatacctatgcatatacaaacttcgngataatcttggctatctacacaa

SEQ ID NO: 15546 - DNA, 495 bp, Glycine max
  unsure at all n locations
gatcctattcgcactcactcgtaccngatcttaagtcactgcggctgcagcttgctcaagaggtcacgaagacaggccgncgattgactanntcccgcccngagtacgacagtcaccgctttatgaacgtngtacaccagcagcgcttcgaagccatcaagggatggtcgtttcttcgggagcgacgcgtccaactcatggacgacgagtatactgattttcatgaggaaatanggcgcccgctgttggcaccaactggtacttccatggcccagtntgatccagaaatagtccttgagttgtacgcccatgctnggccaacagaagaaagcgtgcctgacatgatattcttgggttagggtcagtggatccccttcgatgccgacgctttcaccagcttctgggatttccatggtttgaagaaggccagaatgcaatttggccaaggatgaccggtcgatgggttcataagaggcatccccacttgtttttact

SEQ ID NO: 15547 - DNA, 355 bp, Glycine max
  unsure at all n locations
ttataagcgcnggtctgggagacaagggtcagtgttcgcgatatgcgaagatgatgttccgagtattttggatttggtacgaccatgcccttctgatttctaactgggaaattggcgagtggaggaacgccccggcatttacgcgtcgagcctaatggtaacctttacggttttaaaagctctatagttgggcctacgctttaaaagttttccttttgttaaggctttgtgtcttttgtttttgaatctataatacaaggatctttcttcatctgttcctggtctctacccattctcattcatttgcatgtntacttctttttctgaaacggcagatccgatgacgagtcccccg

SEQ ID NO: 15548 - DNA, 240 bp, Glycine max
  unsure at all n locations
acagcagaatttagtaatgacccactaacctataattaaataacttaatgccattaacctanggaattaaaacacacttaatggctgagtgtaactgatattgtggcaaccaaaagtcacccccaacagccaacaagtcagccaccatttgggtctccaaaaagctgatgcctatgttgccaattgagcccttattacaacttgaactaaagcccttttagtgataacccaaacatattt

SEQ ID NO: 15549 - DNA, 226 bp, Glycine max
aaataacttaaagccattaacctaaggaattaaaacaaactaaatggcctgatgtcactgaaattggtggcaaccaaaagttacccccaacagccaacaagtcagccaccatttggtcttccaaaaagctgatgcctaagttgccaattgtgcccttattaccacttgaactaaagcccttttaagtgattaacccaaaacatatttttggtcagccaactttaca

SEQ ID NO: 15550 - DNA, 413 bp, Glycine max
  unsure at all n locations
aatggagaatngcactangcaatcactacgcatatctcctatactcgaggtggangacacatgaacgaaaaacacattcatggggcttccaacaaaggngtngataatggagaattacactaagccatcactacgcatagcttccaacttcgaggtggaggacacatgaacgaatacgcaattcatggtgcttcgaaagattgaaatggagaattcacttcgcatcactacccttgctccaacgcaaggtggagaccataacgaaacccattctgggctcaaaagattagaatgaaaatgtctancaatcctctcatatctcaactcgatgtggagaacataacaatacccaattatgtgttcgaaaaatccaatgagaatttcttacaatccttcctactccaactgaaggg

SEQ ID NO: 15551 - DNA, 259 bp, Glycine max
  unsure at all n locations
tgaatagttcgttcaatctgaccatctgtntgaggatgataagctgaactaagcttcagctttgttcccaaagcttcatgtagacttgtccaaaatcgcgaagtgaaccttggatccctgtcagatacaatactagaaggaatttcatgcaaccttactactttcttgatatacaactccacgtagctttccattctatacctcatattcactgcgataaaatgagcagatttggtgagtcgatctactatgacccaca

SEQ ID NO: 15552 - DNA, 376 bp, Glycine max
  unsure at all n locations
ttgcacctatatggcactcactcgaccggatccttagcactgagctgcgctgctaaaatagaagacaacgtcattgaacattcctccaattgaacctcgttagacctgcacacacgctttagctcaagatggcattctcggaagaccatncacttaggacacagttctgcctcaagagaatattcccggcgtggctcgtgttacccatgccattcaccaactatctcatttatccagctgccaagaggggcaaatcacttgtgaggcatgatctttatcggtgcctaacagttctggattccttatgctgagaggccagantgcagttggccaaaaggatcggccatgggttgttaggagcatccccattgtggtt

SEQ ID NO: 15553 - DNA, 398 bp, Glycine max
  unsure at all n locations
tctcccccaattttctattaataggggtttatgtgaagtgaaaaagggttcagccccttaggcccttctctctctttcgaatttgcttggaaaaattgtntccgtgaagaaaattcaagccgaggcgcttccgaaacgtttctgtaacgtntccgtgaggaatttcgcgaaggttttgaccggtcttcgacgttcttcattcgttcttcacccgtcttcgatcttcaacgggtaagtacctcgaaccaagcttttcgattcattctatgtacccgtggtggtccacattgtgtttcgagtattntattctcgtttcatttactttntatacncccctttgacgtgcttaaccattttatttaagtcatttcttgcttaacctaaaataaaataaattt

SEQ ID NO: 15554 - DNA, 90 bp, Glycine max
aatacttgtcaccacttgaacttaaatatccctatagactcatataagtccaatcatatataatgtcttaatttagatatttctattaac

SEQ ID NO: 15555 - DNA, 403 bp, Glycine max
  unsure at all n locations
cacatgaagttgtgacagtgatgatcttaaactttgtatttgtgagagtattctttttggaggttgatcatttccatggagacatcatggatgggcaagcttggatatgaaaatgcaatccttcttgtgttgctcttcggtacttttatttatattgttgattgacttacatcttacgtaggttatctttacaaagttgtttatgcttatatgtaggttttgaggaaatntgagttattatggtgtagtgtgtgtgtgcctatatatatatatcatgtcatgttttaaatatggagtcgtgccatttagcctttgggacttccaatgcaaaaagttataagtattctaatatcaaataattgaagagtttaaatgaattaaatgaatgtcttcacttaattag

SEQ ID NO: 15556 - DNA, 357 bp, Glycine max
  unsure at all n locations
agcttgtcactgttatacaacacactanaaaactagccttgtatttattataggatatttttaangatagaaactaagaagaggattcttggtactataaaaattaaataagtaatttaacttaataaaattaaataacgtgtaggtaaacttgattcaatgtaattatttatctagatgcaatatcattctttaactacataaaatattggattttaatcaattattagattagttattaactttgtttggatttttaacttattttatgacttctaaaattatttttaattgaatagaataaattaacattaagtagcatcttattatttgataaaacaccgttttattcatttc

SEQ ID NO: 15557 - DNA, 426 bp, Glycine max
atcctatccttgcggagtggccagaaagtattattatgtcatcattcctatcgagtatttactgattcgttaatttaattttatgtatattgaaagtgtgcttgagttgcgaaagaccatctattattccttaaatcagttttacattggtaattcggattgtatgtgtgttttggttgccctgagcctatatggaatttgtaatcatgattttgaagatttgaagttagataagaaatcgtgaattgatttttctttgcttctatcttggattattagatgattatcggctcttctgtggggatcttggtaacgaggtgaatgatgatgttctctcaaagcattttcaccgtttcctttctttaacttggcacgagtaagtggattcctcatctatctcgagttctcattatgtttagttatgat

SEQ ID NO: 15558 - DNA, 412 bp, Glycine max
  unsure at all n locations
angattgatggggacccggtgttgagagaaactangatatgggctacgtgggagtacgtgagctcagatggaggtgggcaacaggggatggtgggtttattgcgcgccttgtggatgtgaaaaacntgttgtgcaccatcgcccgaccgccacctagtaccacatgtgatgggtaccccatantcctacaagcttgagatgaagaagtgttaagggtgaaacttcttgctttattgtgaccacgagtgtacctgagatatgtccngttgtcacgaaacttgggacgtcaagtgggtgttttgcccaaacancttgaccatccgaccaccccgcctattcggtcatagaactttatttcctaccggaagctctggcgcactattaaggaaccaaacccaagcaggtgttttgg

SEQ ID NO: 15559 - DNA, 411 bp, Glycine max
  unsure at all n locations
taacatcagaccacttccagggtgctagaactacttcacatggactngatggggcctatgcaagttgaaagccttggaggaaaaaggtatgcctatgttgttgtggatgatntctccagatttacctgcgtcaactttatcagagaaaaatcagacacctttgaagtattcaaggagttgagtctaagacttcaaagagaaaaagactgtgtcatcaagagaatcaggagtgaccatggcagagagtntgaaaacagcaggttcactgaattctgcacatctgaaggcatcactcatgagttctctgcagccattacaccacaacaaaatggtatagttgaaaggaaaaacaggactttgcaagaagctgctaaggtcatgctccatgccanagaacttccctataatctc

SEQ ID NO: 15560 - DNA, 103 bp, Glycine max
actcgccggatccttagcactgagctgcactgatgtcccattatggtatttgagaatttgaataatctgtttatgtatgtgctctaatcttcttggattagat

SEQ ID NO: 15561 - DNA, 415 bp, Glycine max
  unsure at all n locations
ttgtggatttggtcttcgccagtgaaaggatcgatgtgggtctgataagaggcaaatntgatcatcctactaggacgactgagannactggggcaaatgaagagggtgagaaagagggagaaacccatgttgtgactgccattcctatacggccaagtttcccaccaaacccaacaatgtcattactcagtcaataacaaacctcctccttacccaccacccagttatccacaaaggccatccctaaatcaaccacaaagtctgtctaccgcacttccaatgacgaacaccacctttagcacaaaccaaaaacaccaaccaagaaagtgaatttgcagcgagaaagcctgtagaattcaccccaattccagtgtcctatgctgacttgctcccatatctactngataattcaatg

SEQ ID NO: 15562 - DNA, 138 bp, Glycine max
tgcatcactcgccggatcttacacgagctcgctttatttttaagacaggcatgagatcttctgttccttgagagctatgtcttcttcaggaagattttaatgatttcagattctagagatcactatctggaatgactc

SEQ ID NO: 15563 - DNA, 336 bp, Glycine max
  unsure at all n locations
nggcttagcgcgaggataagaccgcttagtgagggttgcaaatccggaaagctataactctcactaagccaggctctggctggcttagctaaaatgatgcatattaagtacagaggagcatgcgctaagctgataaggactcacttagcgctcacattgccgcaaggaattcaacttagcttccatgactggcgcttagcttcatggacctcagttttggtcgtacggaatttagcttggtgacaataggtcatgcttagccaaagataagctatcacttatcgatcaggctaaagcttagctgaattcagatcgaattgaagttggcttagctca

SEQ ID NO: 15564 - DNA, 321 bp, Glycine max
gggcacattgggccagctgccggtcttgagcacggaggtggacttcaggggttctagaaggcttagatttctttctatatgagcatgtgacactggtggacttgaggatggaagctatgagatcctcaagtcactcttcctcttatcttaattggctccctcttttcttctctggctcttcagctttcagtattggggagtctctctgttatctggagggcgcttacctttctgctcgtgttctgggaaacctaggtttgactagacaccctagcccagactctcatcctgtacatgtctccaacttctacaagggaattt

SEQ ID NO: 15565 - DNA, 384 bp, Glycine max
  unsure at all n locations
tatagacactcaagctnggagaggatgcttcaatggagganaagaaagagagaaggtgtgagcacgaaattgaaggaataaaagagggaaagaagtggaactttgaagtgtatctcataagactttcattcatcaaagttacaacaagtgttacacatgcttctatttatagactaggtagcttccttgagaagctttcttaagaaaacttccttgagaagcttctttgagaaagcttccttgagaagctagaagttagctacacacacccatctaanaactaagctcacctccttgagaagcttccttgagaagctagaacttacttcacacccttatatagctagctcaccctctgacaaaaacatgaaattacaaaaaatc

SEQ ID NO: 15566 - DNA, 401 bp, Glycine max
  unsure at all n locations
gttctccactccagtacatctcctaaccatagaatattcattaataatcttactctcccnnnnnnnngattagccttgaccagctgccggacttaagcacgcgctcacctaaaaatgtatagtgcatttttcttcttatattgccatgaatattgcataccatacttgcatttccatagaaagaaatatcaattatttacatttgtatcaatactaatataccaacaaatgcctttaatttatcgaatgttctccaaaataaactttaacaaacctttgtgggcggaaataacagacttcgcgctaagcacaccactacatgtaactttatgctcgatctgcctctgatctcaacctagcccaattgcaaaacatcttttattttttcaaaaaaacctatt

SEQ ID NO: 15567 - DNA, 381 bp, Glycine max
tgaatgaatagatcctcttttctatcaagcattttatcgctatgcaatgggtcccttttagtccaattaatcaatattctgtggcagcattttgttccccacacggatattcctcttttagttactgatgcagaatttccaaaatgtacaaagcgaaaagatgaatttactttcgcataacaaaaaatccggaaaaaaaaaaaaactgtgtggacagattcatatatgcacaataaaaacgacacgtgtagataaaaacattataaatcccaaaatcacaaatcaaaatcataatcaaagccacaatcatttgggtgcacgccactgctcgttaacgggtatttattaaatgacaattatgaagaaactaaaaatataatt

SEQ ID NO: 15568 - DNA, 601 bp, Glycine max
  unsure at all n locations
aacaatgaaaccacacgaacagcacaacatacacctaaccacacctacggcgaacacagaagtccgccactaacctnnnnnnnnnnncgcgcaccatatgagacancnnccgnnccgggaccaaaagcaaccgcagccccacctaatcctgcaacaagaaacaaccgggtccaagacattatgccacacaacgcgatcccggacagcggtcacaaaaggcacacacatgagaacagccgtggcccactcaccaacacctcgcgaaccaagacatcaactaccgaaacaatataacccaagaatacgaatcccaagacaagcaaacaagtcggcgcaacccccggaaaagcagcccaaacggaacccaagtcacacgctaaccggacctcccctcaaagtggcccactataagatataaataaaaccaacgcatcccgagcaaaaggaccacacccaaacatcgcaggggactacggccgcaagcacaaaagatgcataccgggaacataaaaacaacaactcacacccctcaaaacaaacacaaacaagaggatgaaacacccagcccgggagagaacacaacccaataccgccaaacgcg

SEQ ID NO: 15569 - DNA, 251 bp, Glycine max
tagctataaacaatacttacttagcttatcaggtattaattattttcataaactagaaaatgcattagtccggacacctaattattggatattcaccataattaagaaatggtggttttaaaattttaaaggtttataatcaagcaatattggtaactaaataaaaatatcacacacggtcattggaacatcagggtatgcgcgaaaatataacatacctgaatatcttgtgcttagataacatttattaa

SEQ ID NO: 15570 - DNA, 437 bp, Glycine max
  unsure at all n locations
tcaaactcaaggcaacacttcctcggtccaatgtctataaacttaagttcacccttggtgagcactttctngttctaagttccatcttcaaaggaactcgangtacacaanggtctgtccctgaccatcttctttattcctaagttttatctgtctaggaatacgagtatttatataacccaanggctggccttggtacagattccttcanaaaccacaggtcaccctttggtcctacttcctgtaaaacccaagcattccctaagtccaattacttccagcgaccatgacgaacaccatcaaacgtctaagtccacaacacaactccaccaaactatttggaaagccttcaacaagtggagtctacttcttctcaaacctcaaaaaaaacttccaagtaaacgaacatcccaaatagtgcaaacctcatcaatccg

SEQ ID NO: 15571 - DNA, 455 bp, Glycine max
  unsure at all n locations
tcaagctggcactatgtatntgaatataagaatgttagtcctgtattgtattatnttcacttctccatcttatagatattgccttaatataaaaaactaaaaagacaggagaaatcactttctctcttctagcttttacattttttatagaaagaaaatgtaagaaataatgattaggagtaacatttgaattntgagttcctccaaatgccataaggaaaatgaaaacatgaactttcgtggttgcgtgtatagaagactatatcacttattgctaatgctagctgtatgtaccatgagtcgaatntctattccaagcttcatcctcctttgacagtataatataaaatcaaagggtgcacagtgcattaaatcattangtggttcattcaataatattacgatgtacgacttgtaattttcctaccgtcaagacgggtctttctcttcttaaa

SEQ ID NO: 15572 - DNA, 566 bp, Glycine max
  unsure at all n locations
accccatcaaacacatgaccgcaccttaccgcccccacgaacgcaaccaactcacacaaaaacacnnnnnnnaggcaccttgagcaccaccgaccggacccaagcaccgcagctgcagctgcaccactcgccaaccagcaggtgcttcttcataacaacagccacggaggatcctctgggggccaagtggcaaaggtccatcacaccccatttaacaagcaccgccgcctttaggagaaatatttcgcacagaacagcaactaacaaaaatcgaaaacaaacaccgctaactatccggaaaggcaaccgcaccccttgaggagaacagtatacatacctcacctgtgacactaccggaaaggaatggaaccccacctaataggaccaaccacgccctccaatacaatnccacgcggaggcaccggaaaccccacgagaaagagcaccaatcacattcctctaggtatccagcgcccacccggaaatcaacaacacgcccaataatggtcgcaacacccacaaagagcatacagaagacgcagcactcaacaaaggcacagaccaaa

SEQ ID NO: 15573 - DNA, 349 bp, Glycine max
tcagcaccactcttaacatttctgatctaactccttttgcaagtggagctgatattgaggaggaggaactaacacatttgagggtcaatcctcttcaacgggaaggggatgatgcaatcctccctaggaagggaccaatcactagaaccatgagcaagaggctccaagaagattgggctacagctgctgaagaatgccatatggttctcatgaaccttaaggtagatttttgaacccatggaccaatgatgggtacaattatctttgtacatattagactacgaattcattatactcggtccttgtatatatggctccatattgcaagtatggtgccctaaaatatatg

SEQ ID NO: 15574 - DNA, 392 bp, Glycine max
  unsure at all n locations
gttgtcatatatggacactcactcgtaccgagatctctnctcacctgagcatcagctgagtgaaacggaaaacaccttctctctgtgtgacaaagtgtcctgaattgtcgggtagaacctggactcagtggggtatgccaaaccaccttgacatccaccacccggctatctcatgaaactggactactaacagcgagctctgcagtcaccattaaaaacataacctcatacatgtgcttggtgtggctgcactttgatttgagggtttggaattggctctgtatcattccatggtggtatcttttctagctaaattgaacaggagtaggggccctgaatcatacaagggtgatcatccaagctaaatgaacttacttaatgctctgattacg

SEQ ID NO: 15575 - DNA, 444 bp, Glycine max
  unsure at all n locations
gcttctacagcaagttcccaatgatctattgcatgantattcaacaataacacaaattgaaactgggttgcctcccagggagtgcttctttaacatcattaagcttgacgcttntaccttattgggcgaatcaatgaacagtgtcttgtgtcctgataaactccttnccatgatacaattttaacctttggccatttcaacccatgttctttccagattctgagattgtgggtcatatagctctattgcaccataagatcgaactttcttgataacaaaaggtctagaacatgtggatttcagcttaccagaaaacaacttccatcttgaattaaacagtagtacttcttggtcccatttgaattctctcttcacaacttcttatcgtgatacgtcttcacctattctttgataagtcatgaagattcatatgctggtaatcac

SEQ ID NO: 15576 - DNA, 579 bp, Glycine max
  unsure at all n locations
acactcaactccgcacatcacacaacntactcttntataatacatactatactactcacaatcggtaattaatagtaagaaatatacncaaannnnnnnnaaaaattacacatataaggagcancactcgncccgggaacacaaagcgactgcggcatcnagctnggcaaagcaacngagaaaagcagacgggtttattacttccgatgtcggtattgcgcttctagtcgaggccaatatatttcgacgacgacatcaaccaaaccataaagaacttgagggtcatgaccaaggcaacttaacaaccccacacgctaaaacaaggggaaatagaaagctgcactatgatgaagacgccaacaggaaaagataaaggccacaggcaaagcactacagaacaactattgtagtgaaagccccaaccactggaaagccacgaaacaaagcaatagtataaatcaacttaatggcatattaggccaacctgcttgaaccccacgtntacttatcttaaggtcaacgcacctaaaagaataggctttgtagtcaataacagatctctagcatatcaacaaaacc

SEQ ID NO: 15577 - DNA, 519 bp, Glycine max
  unsure at all n locations
gcatgggaggacgcattgagacctttgatgatgactatagcagcaccgcgcacaanagacgacgccagcatctagatttctcctgagcccgacacccatattctaaggattannctgaccatncgcaggagcggtcagcggtcaaattccaaccttgagggtctctatacaccatgcgccggcatccgacttacagctgagatgatatgaccatttcgagaggcgatagagatcggtttccaacgccgacagattcgatacaccatacaccgtcacacgacagacaagtgataagctatggacatttgagaaagacgagagcgtccacatttcaatcgtcagcgaatataattaccatggacccgaatccgacgtacgagtgaaaagtcatgagatttcgatactctagagcttccaatgttcactggctagcgtataaatatctcacgagtctggaatccgacagttcaagtgataacctatgaacacttgcatacttcacagcttccgatgtatacg

SEQ ID NO: 15578 - DNA, 540 bp, Glycine max
  unsure at all n locations
acaacgcacccaataagtctgtatgtacaactcgctctactataacttctagtagatatacatcataaactcatatcaatcatcaatacnnnnnntnnnttattgacatattagcgacttcactcgaccgggacctctaaagtcactgcaagatgcagcttttcctgagcttcaactntagccctacggtgtttctatgttgctcatgtgctctcctatctcaataacagccatctatgggcatacttctttgatgtttacaatcctttttgaatgcttgcacttaaacttgtagagtaaatcaatgtgacttgactgttgctgaaactcaccctaacattcctaagcgaaatgggcccccaaactgatgaccatttaagcctgctcagtaaatgtctgaaacaatggaaatacctttatttccactgtgtcccttttctaaaacaaacctgaagattaaaattttttaacatcaccacaaccctcatattcataacacttggttattgatatttaaaagattcctccccaaaaaaaaga

SEQ ID NO: 15579 - DNA, 414 bp, Glycine max
  unsure at all n locations
gttagccttcatcagcaagtaccaagaagaatantatctagccatggcccacgagcacaaagtggcgagtgaatatgctcgagtgtacgcggaaaatgaggctagaggaagggtgattaactcgttacatcgagaggcaatgatgtggatggatcgatttgcccttactttgaacgtgagtcaagaacttccccgattgctggccaaggccaaagcaatggcagacgcctactctgcccccaaggagatccacggactcctcaactattgtaagcatatgatagactaaatgggctatataattaacaaccgctagggagtttggattgtcactcagatcttgactagatataactttctgaataacatgagtttatgccgcttgtntacttccaaatcattgcgaatcaaatc

SEQ ID NO: 15580 - DNA, 101 bp, Glycine max
  unsure at all n locations
gtgtcttangactaacaatggcttggaattctattctacnaaacccaatgaattctgtaagggtgaagacattgcangacaacgtactgtacgttatactc

SEQ ID NO: 15581 - DNA, 450 bp, Glycine max
  unsure at all n locations
tctttganagaaaatggaggagaaagtattttaatagcatgtggacgtggaagaggacgtggtcgtggccaatgaagaggaggaagaggagatcgtgataattttgacaataatgaatggaggagccatcaatccactanaagttgtggaagaggaagagaaagaggtagaaacaattatgataaagcatatgaaaggaggtatgataaatctaatgttgaatgttttaattgtcataaatatggccattactcttgggagtgtagaacaaatgttgaagagaaggtcaatcttgttgatgataaagaagataaagaagttgaagagccagcactactactatcnacttataatggtgagaaggaagacaaatgcttatggtatcttgacaatggagcaagcaatcacatgtgtggatgcaaagagaaatntgtggaacttgatgagaat

SEQ ID NO: 15582 - DNA, 486 bp, Glycine max
gtgatgctctgatcactatcttccggcacctcagctcggactcgggatcctcagagtcacctgctgcatgcagcttgtcggaaaatgcaagagaaaatatctatgtgcatacttgattctaatggtaagctcttgctgcctcggaatatatatatatatatatatatacctatatatatatatctatatatctatatatacatatatattatcgcgacatcacatgtattggtccgggttatggagaaaatacaacgccaaccagataagaattcctcctcttcttcaatttttttcataaaagcttttgcaatgtcctttagagacaaaaggttgtcaacctccctagtcgctaaaaaaaaaaaaatctttatttttctgcacgaaactctacaaaaataacgcttgcctaaaaagtcgaatacatttctcaaagggagagtaatcttcttctccttgtaaaattactttcttccacaaacagcc

SEQ ID NO: 15583 - DNA, 208 bp, Glycine max
tggaaagtgtgggctgctgaatgccccaaagcagcatggtctcctccgcagcagatttctctcaaccaaccatggaccgaaccttaccatcgtaaggacccaacttcaccattggtgccactcgttgttgttggccatggagtcctcgctctctctgtctctcggattcaattgagtttataattagggtttaataatcaatttcctt

SEQ ID NO: 15584 - DNA, 230 bp, Glycine max
acctaaaccacaaatagaaatagtcgtagctaatgaccctctgccaagttaacatctataaaaataagacttggcctatgctgtgagcacacaataacttttttcttcaaaagtcttatggctgctatcggaagcgactggcaaaaatttattacaccaagtaagtacttatctggccataaaccccttgagacagtcacaaaaataatgatgacggaaaaaaaactaca

SEQ ID NO: 15585 - DNA, 429 bp, Glycine max
  unsure at all n locations
ttattgatnntagttttgccggcganaggatcanagtgggtcttagaagagacaaatttgattatcctgctttgatgaatagaaagccttgggaaaatggagagaatgagaaagatggaggaacccatgctgtgactgccgtttctacatggccaaatttcccaccagctcaacaatatcaaatactcagctaatatcaacccttctcattacccaccaccctatcaaccaagaacactcaatcatccgcaaaggccacccctaaatcagccacaaagcctgcctgccgcacatccgataccaaacaccaccctgaacacaaatcanaacactaaccagggaaggaattttccagaaaagaagcttgtagaattcaccccaattccaatgtcgtatgctaacttactcccatatctactcaataatgca

SEQ ID NO: 15586 - DNA, 229 bp, Glycine max
ctgaataagatcatttacaaatatgtcttctacttaagtgctacttataatactacttaggaaatcatatcatatattttatcaagatatacacacctgtcctattatatgacaattctgctcctactttataataactatacgtaaaattatacttagacatataacgcttgtcctatttgtttttaaaactaaaacccataccaatttgtccaagtaaaaatgtcaa

SEQ ID NO: 15587 - DNA, 401 bp, Glycine max
  unsure at all n locations
tctacaactggcaaactaagaaactcgtcatcagccgagatgttgaagttgatgagtacgcttcttggaattgggatgaagaaaaagtggagaagaacgttcttatacccgctcaactaccctcagaagaagctgaggaagaagacccaggtgaaccaccttcaccttcaccacaacaacaagatcaagaactatcatcaccaaagtctactccaagacgagtaagatctttggtggacatatatgaaacctgtaacttggccatacttgaacctggaagctttgaagaagcgtcaaagaatgaagtatgggtctagggcaatggagaagagatacagatgatcganggaaacaacacatgggangtagtaaatcgtccccatgaanaagatatcattggg

SEQ ID NO: 15588 - DNA, 317 bp, Glycine max
ctgccggtcttagcactgcggctactttggaacctgctggcttaattttttaaccaactgctggaatttactcgtttttaccgtgattctgaattgattgtgtaacgttagtccaccttcccgtggattggaatatattgtgagggaaaggattctaaatatcagtgagttaattctctcgctttgcgttgaattttcgacatcgagatattgagattaagaatgtaaatgtctattattgatgtgataagatgacattaaagaattgattgattcctttctgcttttagcttatttattaaaatattctatgaatg

SEQ ID NO: 15589 - DNA, 459 bp, Glycine max
  unsure at all n locations
gtatgaatcatttcaattatctctgctaaacgtcgatgttttacangaagttccctggaattatccatttcaaaatgaagttttcaacttttttattggcatatagaattttctggtcaagcaaagaacttgtgcccatgcctgtgcctgtgtttatatgcacacacacacctgtgtgtgtgtgtgcgcgcgcgcgcgtgcatgcgcgcnagagagagagagagagagagagaattctgtgcttacttcaagccaagtaactctgcagtcgcccttgacaccaagaacaccagagctggtctcatcctcttcccaccagcactaaaaatctgctcagctgcagacatcaaaacaggattntctgctccaacaatctatcaaagaatcttcatcagatacattaaaagttaggcaacanaaatctagtcatcaccgtttgcaaagcanaagaatctaaaa

SEQ ID NO: 15590 - DNA, 69 bp, Glycine max
ctaatcttctttcttgttcatcatcaagtaattttttttgtgcttttctttttttgagccttttttttt

SEQ ID NO: 15591 - DNA, 232 bp, Glycine max
atgaaactcaaggggattctggtgaaaatgatggagatcagatcgctccttttgctaggcagctcacgaacacaccagctaaaaagcttattaggaagcacaccaagaagttgcagtctaaagcacaaaaagggttgctctaaagtcacttccatgttattggtttttgactacttaattcattatgatttgtgaataaattttaattatttggataagattaaaaaattag

SEQ ID NO: 15592 - DNA, 460 bp, Glycine max
  unsure at all n locations
tgtgcacatattgcgactcactcggtcccgggatctcttagtcacctggaggctgcagcctgtgcttcatattctgggaaggtggccttatggtctctatgactggacctatacatttgctggccaaggttcattgtcctgcaagtgagatcctcttatagtgaatatttttacttcaagcttttaattattacatgtnccgatataattacacatccaacaccattacatgttatacccaatatatatatatattttatattagccagaactatatgaatatcttcactcttgcaaacggttaccattaatatctcgatgataatgtttacattattactggccctgaagaaacctctacgatcattatttgcggggaatccgtaccatttaatgccattataacgttaactttttttgccctgaaggaccttattttaattattacgctgaatcgttc

SEQ ID NO: 15593 - DNA, 325 bp, Glycine max
  unsure at all n locations
agtgggaaatgatagtgagactcaacttgtataccaacctttgtgctacaacaatggtagccagacctagtattcataatgagagaaaattttntggttaaaaccttgcatcttgtatgaaagatggtctctctttaagtttgggttaaggcacaagatttacttgttggatcgagtggcctcagaacaattaagaaggggggggtaaattaattattcttaaacctttactaattaaaaattactcttttaaggcttttactaaattggtaagagaatgaggactanaagagaaacttaacagaaagtaaaagcagaaattaaa

SEQ ID NO: 15594 - DNA, 273 bp, Glycine max
  unsure at all n locations
ttgaaggccatttctctctttgcaacgtactngctgttaatctgtctctatctcataaacccactcttccctaccaatctcctatcactcttcttccttaattttcactcatctaattactatttctgacgacaccctatcctatctcactattcttggtattcttctcttcctcttctcctctcgagccctctttcctcctaattgcagtgcgaccaattgtaaagctacttggatagtcaaccttcactcaactcgaccctaaaaaaaaaa

SEQ ID NO: 15595 - DNA, 306 bp, Glycine max
gaaagctaacaccatccattagacctacctctggtggtccacaaatcactaattataccagaaccaaccgacattctggttcaaacagatcataaaggccaaaagaccaaccaagacatgcaatggccaaaaacagcagaggcagtatcatactatcatcaattacactcgaagaaattcacagaagacccacatattcagatccaaactttacacgactaagaaagagatcaacctttgcaacccaaccatgtcaagatctaaccaataccaactcaaattataaaaaaataaaaaaaaccaaga

SEQ ID NO: 15596 - DNA, 421 bp, Glycine max
  unsure at all n locations
tgacnccttgcattgctctggttatttnntaatatatatatatatatatatatacggatatatatatatatatatatatatatatatatatatatatatatacataantttatatttatttattcataaataaaaaccatagtctttaatattttattctatcgtgaaatatattcatatatttatgagagaaggcgataatcatatttttattcgaggtattttatcttaaagagtgaggatatcacatgtttcttggaacgttttactcgctccagcaataatggggtgcaccatctctggaaaaataatcttctctaaaaaactatccctcttaatgatttctggggggacccaccttcatattcaactggaaaaaatttcatttttatgacccaggtcttttaactataagccgtcg

SEQ ID NO: 15597 - DNA, 299 bp, Glycine max
tacatagttttttggttgtgcatgaatgggctcaaaacaaatcattttcaaagaaggtgcattttttaatcgacctcatttgtttgagggtgaacattcttctttttggaaaaaaaaaatgaattttttttaaacaaattatcccagtgcatggaatgccactattaaaggtcctttcattcctataaacaaataaatggtgaattagtacctaaagaatgggatgaaatgaatgatgactagaaaataaaagtgccaaatgatcaaaaagctaaaaacatttaaacttctggtttatc

SEQ ID NO: 15598 - DNA, 341 bp, Glycine max
tgtccttttggcactcactcgtccgggatcttaagcactgagctgcactgtgattgcttacgagaagacttgtggttaaaaagcaatcgactctgcttgtaatgcaaaaaaaactaggaatgaaagggaaagtggaaccatgcggatgcatcttcaccagttcccccccacatgtatactacataacacctctctaccccgcctttgacaagcttctaatacccagatgtcccattcatgcacatactaccatcaaacctccagaagatttgccaaaaaactggatacccatccggcctttactgtctgccccatagatgggccaacctgttgtctattct

SEQ ID NO: 15599 - DNA, 316 bp, Glycine max
  unsure at all n locations
gacttttccatatacacctgaacaatatggtacacctgaaagaaagcatagacattggacaaaaactggtctcactcttgtggcttcagcttctctttcttgaaatttttggggagagtcattcaacactgcagctactataatcaattatcttccttcacctgcccttaacaatatgagtccttttgaaaaattgtttcataaanaaccagattataaagtcttgagagtgtttggatgtgtntgtatcctctattacgaccttattaataacacaaacttgactttcggcacacatgtgcctattcattggtat

SEQ ID NO: 15600 - DNA, 203 bp, Glycine max
cttttgcatcactcgccggatcttatcacgcgctcactacatccaccaccggctatcttttaaacgtatggctaaagcactctgcgtcacaatatagacaagacccaacaggagctgttggggttgcactggaacttatgtatatggatatgcttgtatcatacaagtggtatcatacaggctaaggaacttacttaatgctt

SEQ ID NO: 15601 - DNA, 405 bp, Glycine max
  unsure at all n locations
atggcttattccctaatggatggcgcctcctttcacctcttctcctttggcttccgctgcatctccatggtgaaaaatctccattaaaggacctcatttgaactcaaagatccagccttcatagaagccccacaagcaagcttccatcacattcctacacgggcaaatttcccatcagcccaacaatgtcattactcaaccaataacagtccctctcacccaatcatccataaaagccatccccaaattaaccacaaggcatgcctgcttaccaaatgcacaatgcccaaacaccacctatagcgcaaaccaaaaaggaattttgtagcanaaaacttgtatgattcaccccanattccggtgtcatatgctaacttgctcccatatctacttgataatgcaatg

SEQ ID NO: 15602 - DNA, 750 bp, Glycine max
  unsure at all n locations
acgcacaccactgccaccacgaaccnaccacctaacgtgacactcncacagctacacgcaccacgacgacgaacgacaccatataacannnnnnnnnnnnggtgtgaccgatctagcaacgcnaacnnnnannngnngatacatgcacaccacaagctgcatgcacgccgcgaagcatggtagagcnacgcagactccatatatgcttgtgctttctacacacccgcgaacaacccacacccggcggcgcgcgcgcgcgaacgcantacaacaggacccccacgccancacagacaangcaccccacactacacacaacaagagaggngcgacgaccacgacacacacgcacactcgtcgactcacgatgcacaccgcacgacaacactatctatatcgcgcacaccaacacatatcactactactgtggcacagaccgggngaaccacacactcctatgcctcggcacacacaacactacgccggacctccgcgcgcacccacacgcagtaatgcacgccgccaacgaacccgataggcaacgacgccgaatcaccgaaccgctgcttacacgctcggatcacccgcgcgcgagacacacacctancacgagagacaagcccggctaacccacacaaaacataccgacgaggcgtgaacagaccgcggcagacgacttactgcacactccactctagctacccacaatgcagcaacggggcccacaccgagcacgcccacacggagccg

SEQ ID NO: 15603 - DNA, 426 bp, Glycine max
  unsure at all n locations
accattaattgtgccctgctgtgaaaatattttctctttgtgtgtcgtccagtggctgcatctgactttccaagaaccttcttaccattagcatgtcaccttgcatggcttnnctctcaagctcttttttcacgtcttcttcttcactaatttcagaataactggtgactttccatggggaccggacgaagttgcttctttcttcctggagctgtnggtccattctagtngaaattggtggatgaattcctttgtgctgcaactttcctcttcacctgctgttcacccggactgtctatgcagcangcatccaattcacgtcttntgtattcaacatatctctatggaggattagacattaaaaaagagccttgtgcctcacttctttcttgtggtctactaagcctcccattattgagactctcc

SEQ ID NO: 15604 - DNA, 389 bp, Glycine max
  unsure at all n locations
tgacatgaggaagtgttgaagggtgaaacttcctgcttntattgttgaccacagagtggtacctggagatatgtcgcgggggtcaggagaccttggggacatcatgtggggtgctattgcccaaaaccaagcttgaccaatcccgacccaacccgggcatagtcggtcagtgagaacctgtgatgtacctaagcaggcgagctcctggcagtcaacagataaaaggaacaaagaccacaaagcaaggaggcttgtggtggctggccagctgtgaaacttgattgatatgtgagatgtgggctctggtaatcgattaccaagggtgggtaatcgattacagagcttaaaaatgaagacaggaggctgagatggtctctgtaatcgattac

SEQ ID NO: 15605 - DNA, 105 bp, Glycine max
  unsure at all n locations
cgagtaattactctatattagtggtagttagttagttactttcatttgtacaaacagaatatagtacttattgtgcaagcttcctcntttctctctttttctctc

SEQ ID NO: 15606 - DNA, 421 bp, Glycine max
  unsure at all n locations
tcttccctttcccatgaccggcattgtcaaagatcctacacatgttggtcaggtgtacaaagttatggataccatgacaattcaccatcatcttcacttctagttggaggccattgataaacttcacacatttagacctctccctagcttccccctgataatgaggaaaataccttaccaggttctcaaacctagctgcatactctgccaccgacatgctcccctctttcgactctaagaactccatctctttcctatntttcacgtcttctggaaaatacttctctagaaaagtgtgtctgaaagtccccgatgggacaatagcaccacctgctccctccaaacgtggacgagtgttctcccaccagtactctgcctcatctgccagcatgtgattagaaaacaacacctttttctagtc

SEQ ID NO: 15607 - DNA, 413 bp, Glycine max
  unsure at all n locations
nngttcacgaagccatcgtcaatatgctcattttggtatttcttactgggttattatgcatggaattcatctcttagaagaatatgaattcagagaagcttgatttcttctagtgtaccggcccttggtctctggtacctaagtttgctacgaatagcacaggtgaagccacatattgccngagaacattgngaaaagttcctcggccaacatacatatttaaatttattcctatataaaataagactcatacgtnttattttcttcctatttcttaaacttttctcactttttttttttattttaccctcagatcaattaaatgataatacctgctgactcactctgaggagttaaactatgatttatccgacccaccactaccagtccaggttcacaaacctttcttgtgg

SEQ ID NO: 15608 - DNA, 412 bp, Glycine max
  unsure at all n locations
taatcttcatgatataccaagaacaagacatactggaatattggtganaaataaaatcataatctaaaagccttatggaactaacctctgaagcaggactaaaatgtgtcccagtacttgggaaacaatctctacatctgatttatcaacttggctgcctatgactgtatacatgaaaaaagtgattgaaaggtttagcaaatgtatttattctattaatcaatacacagcatanagcaaaataaatntgtttataatttaaccaaacatagaaggtacaattagaatagtggatcaaatggaggacagcctgataatattgttcaccacaagaaatttcattgcaagattattggaatcaaataaatcaactcatagttntaactataacagctaacaaggtcaaaatact

SEQ ID NO: 15609 - DNA, 421 bp, Glycine max
  unsure at all n locations
gtgcactttgcactcactcgaccgggatcttagagcactgcagcttcagccttacaatggatggttttggcatggaaaatcttatttcttatatataacctattagaataatgatgatacaatgttttgacactatatatttgtntgcattttaattttgttccactaatggaagttgatgtccttcacattaatgtcaccattgaagagcccatgttgctctatgtcgtgctcatttgacttttctaattatgtgatcttgatgccttcaagaattatatatatttttatgtaaaagtggtttttggatcctttgaccattatgactttactctaatgtgtcatattagctaataactaaccatgactgtggatatgagcgtttatgtttttttagcactatctttgtaattatcaaata

SEQ ID NO: 15610 - DNA, 427 bp, Glycine max
  unsure at all n locations
tattcaaaatacagggcatcctagccttatataagcagatgtttaaacagaananaaaataacagaataaactttcatatggattntagtcacagcccaacaattcaccaccttgaactaacattcatataagacacaaactgcaccctccaagcatacacgaactcaaccctaacaatcaacattgagcaagcttaagcagtgatcaaacttgctctttggaactggctttgtgaacatatcagcaagattgtgcagagtgttgatcttatgaactttgattcttctttctgaccgaatgaagtgatatctaacatctatatgcttggttctatcatgataaacctgatccttggccaagcatatagcactaaggctatcacagtagatgttagcatattcttgattaattccgagatcatttatt

SEQ ID NO: 15611 - DNA, 273 bp, Glycine max
actggtttaagtgggccagattctaagagggggggggtgatagatatcgaacttttccctattaaatcattactttattagttgattcctatgcatctttaatttaatcaatgggcacttgattgatttagatataatagggataggaagaatgactcgttatcggtcgccacctggctcgtcgccacaccgtgaagtcctctgaatcttcagttaaccagcccctctggtgaatttcaagaatcgcctatcttagaggagaaagacactttg

SEQ ID NO: 15612 - DNA, 397 bp, Glycine max
  unsure at all n locations
ntgatttcctttgttccggaaacctttcttttctcatgtgcttccaaacccaatctccgggttcgaagacaaccttctttctccctttgttggcttggttagcatagcttttatttttcctctcaatttgatctttgactctctcatgaagcttcttcacatagtccgcctttgcttgaccttctttatgcttaaaaacagaaacattaggcataggcaaaagatcaagaggagttagtgggttaaaaccataaacaacttcaaaaggagaacaattagtggtgctatgaacagctctattgtaagcaaattcaacatggggtaaacaagcttcccaagtttttaagttcttcctcaaaactgtcctaagcaaagttcccaaagtcctattaacaac

SEQ ID NO: 15613 - DNA, 469 bp, Glycine max
  unsure at all n locations
gtctacttgaactcactcgtctcggtcttnagcaccgagctgcactgtgctccgccactatcatcacaaagttgtttgacctatgggcggggcacatgatctacagcttggtgcatggacaagactatgaacatccatgcagcttgggtgatgaagttgaccatatattcatggatctaccgtncaagcaatctacaactttcaaaagatgccacttcaccgagataatggcgacccgtgatgttgttatttgttattcatacaggttctggtcccacttctctcaactatgcacaacctcccaccaccgtactcgtgatacagtggacacatgattggccatccatagaatcttttgttaatgctacggcctnagaantagcaattcttgcttctttcacaaacaatcccacttaatcttatactactgttgccttttgcaacattcacacttcaatgttttgttggg

SEQ ID NO: 15614 - DNA, 415 bp, Glycine max
  unsure at all n locations
tgactgcgcttagaatatccaaagaaaattccttcatctgtttttcatcaaattttcctaagtcttcttttccattgtttattacaaaacatttgctaccaaaaacatgaagatgtgaaatgtttggttttcaaccattgaacaatttatatggggttttctttaaaatgggtcttattaaagccctattcatgatatagcatgcagtattaacggcttcagctcaaaaatattttggaagaggggtatcatttaataaggttctagcaatttcttccaaagacctatnttttctttcaataactccattttgttgaagggttctatgtgcagaanagttatgttcaatgccatgcttttcacaagataaatcatattctttattttcaaactcacccccatgatcactcctaat

SEQ ID NO: 15615 - DNA, 475 bp, Glycine max
  unsure at all n locations
gtcgcctttgaactcactcgtacccgatctctgactcacctgcnnggcatgcagcttctnnggtaatggtaccaataccaataccaattttccattntaaataggatatctggtaatattaaatattggatattagtattattggtattacccatgttcatagactattggttttcattgagaatggtcaatctggttccttggggaatttgtgaattatttcttttgtgataattgacacttggctgggcttaatttttgactatggactacaccctgtggttagtgatagtaagacttgaggaacatttgagaatcagaatcttagttttttttaatgattgttgtgtaggtcattgctattgatgtagacctgacttcctataaataagttttttttttttaatattgtgtngctatatataataatattattattacttataggttctgcgactgtgactgtacatctaat

SEQ ID NO: 15616 - DNA, 458 bp, Glycine max
ctgtccgatgcagcagtaatgatggcccgagttatgtttgggaaccgttaccaacccggaatgggtttaggcaaatactaccgcggcataactagcctgattaatgcccaaggaaatcgtgggaaatattggttaggctataaacccactcacgccgatataaagaaaaaccttccgggaaaaaaaaaccgtggtcaaaactcgccggtgagacaagaaagtgaaggaagcccgccctggcacataagtagaagcttgataagcgcgggtctgggagacgaagggtcagtggtcgcgatatacgaagatgatgttccgagtacatttgatttggtacgaccattgccctctgatttccagcttggaaatttgcgagtggaggaacgccccggcatttactcaacgagcataatgtaacctttacggtttaaaagctctatagttgacctaagcttaag

SEQ ID NO: 15617 - DNA, 196 bp, Glycine max
atagacttcaatgccccaaactatgtgtatgtaatgtcaacaatttaaattgctctttatactcctcacacttcacgcaattcaccaactttcagacactactggaaatatataacatgaggtacttaaacttgtgaccagccaagacaatgtacactagaatatctggtaagcttgctacctatatacccaccta

SEQ ID NO: 15618 - DNA, 330 bp, Glycine max
aaaacgacttatgtggggatctctctgaaaccatttcagaaaattaaatacattcttactcatttcttatgtgagcacataaatgaattatgaagttttatttatttttgttacctattaacaaaattgtccacttgatatagcttcagcaagaccgcttctatttttttagttttttaaatagtgccttttgtgagaaagtggaaaatgatcttgtttttatcccaatgaagcgtgggtatagcaataaatatagctgctctaagtactctatggagagagtgtggctgtcatacaacaacaacgccttatcattttctatatttcttt

SEQ ID NO: 15619 - DNA, 421 bp, Glycine max
  unsure at all n locations
agccanatagacttacctngactnanntnnctttgatagcccttttgagccctggtntncctttccttngttttgaagctcactacangccttaagtganaaccatgatatcaccatatccttaanggaatttggagctttggaattgttttggaataagttgtggggtttntgttcattggatacatgntttgtggccatgcttcatgaatatttnancnctacttgatgacatccatattggtaaatgttgacatgctaatatgaatgtgttctcaanggtacagagtacananaaaattattataaaaaaaatcgaaaagaaaaaanacagtaaagtgagtgataagatctaatgacaataatgatagactcttgtctatcttatgttaaaaatacctacttctttatatctaagctc

SEQ ID NO: 15620 - DNA, 393 bp, Glycine max
  unsure at all n locations
agatgatgacaaaagagctcataagtcaagaacacttcatgataacaaagatgatgatctcaagaatcaaagaatgagttcaagattgaatcaagaacacttcaaggttcaaaaggaaatttgatttcaagaatcaagaatcaagtttcaagattcaagttccaagaatcaagatcaagattcaagaatcaagagaagactcaatcaagataagtattaacaagtgttttcaaaaactgagcagcacatgaatttttctcaaaaccttttaccaaagagtntttactctctagtaatcgattaccagattattggaatcaattaccagtagcaaaatggttttcaaaaatgacctttacgacggtgaaatcgtaaaaccatactcggatgact

SEQ ID NO: 15621 - DNA, 439 bp, Glycine max
  unsure at all n locations
agctaaaagcaagtatctcagtattttgatggctctactatgcgcaccctaacgaattggtgggacacccaacaatttcgtatttttccatttgcctttcgtatgagatgaatcgacacgaatcatcttgatccatatgagatgatctatataagtctaattcaaggttntttttggtgtttctaataattgggacgaattaatttaaaattaatgggcccaacaaaaatcacacctactttcaagttattagcccaacgctctacccactgagctaatgagtcattacattataacaataaatatggtggtatacataacaacttaaattctaatgttatttatgggcatgtaatttaaataataatttttggcaataattttgtataactcatcaattattaatctggttatgtttaaaaataaaaaaattactatt

SEQ ID NO: 15622 - DNA, 503 bp, Glycine max
  unsure at all n locations
cccccattgacnccatttgatagactcgctagctattacgcgaccattgaatacctagctntagcctgatcgttaagcgatagctcaagtcatggctaagcgtgatctattggcaacaagcacaatttcttaccaccattattgaagtctacgacgcttagctccaggctggcagcttaaccagattcattacaggcatgtgagcgctaagtgagtgcctcttaactaagcacatgctgctctgtactaaaatgccttattctaactaaactggccagagccaggcttagtgagaagtgcaacattttctaatctgcagaccttgctaagcggactcaccctcgcgctatactgagtttctgtcaataaaaaatgatgttgaatttgaaacgtcagctaatcgcgcggattcgctaagcacaggtcttgagaaacaaacgtacttctgcttagcagacatttcgctagtgcaagtgtcaaaatcgcttggtaagtgaacttcg

SEQ ID NO: 15623 - DNA, 497 bp, Glycine max
  unsure at all n locations
tgatgctcatatttangcngactcagctcgtacncgggatactctaagtcacnctgaggcatgcangctngcttctacagtagagacactcatgtatctgcttctgtccatggngggtggcccgccgcttgtgaactaaatgctgtatataccacttcacacccaatggccaacccaattaactttgcccaaagtgggcagtggtgcggcccgccgtnctaattgtgcgtcaaccttgcgcctgctaagaagtgaatacttcttcatgaaaagctcggtgatcagccgtcggattaccttgcttggggtgacaagaactcttatacttgcagaggcccttgatantgccggaaccccaggccctgtggactttctgggctataggagcctatatgcccattcttcaacaataaatggctagcattcactagcacgtgaagttattctttagatggatcaccaatgccttagcacggaggcggattgagtgccacaag

SEQ ID NO: 15624 - DNA, 366 bp, Glycine max
ttctggttgttcctggtgccgagatgatggtacagcgggtgaaccaagggctgaagtttcttttggtgaggtagccatggaaaagcagagcgtttggaatggtttatccaatttctgagaactgttgggggatgctgaaaacgagattatcacgaatatataaatttgaatgaggaatgtaaagggccgtgtgaaacaacggtcgaatttgctttggttcagtagtgaacgtgctattaatgttatgtgattcgtttgggcacgttcagatatcagtagttgctacaatttctctagcagaacaatgcccaacttgccccttcagttttcaaactggtttgcatccaatgcctttgtgaaaatatc

SEQ ID NO: 15625 - DNA, 314 bp, Glycine max
tcaacccttatattttacggcacctatactaagttttgtattgaggctagtttgtaatttacatgcattaagtgaatatttgatgtgttgctggaaataatttattgattgggaacccatcattatttaagggaggacttgtggtccccatgcaatattataccttggctgctatgctaatgcctacaactagccacctatgagaatcttgacttgatcttgattatgtgctaacatttttaaattaagtattataatattgaattttggtcaaaattggctttcaatttatttcaaattcagtgaaatttaat

SEQ ID NO: 15626 - DNA, 420 bp, Glycine max
  unsure at all n locations
ctctcttggtggtgaagcttcttcttccatggcttattctctagtggatggtgtcttctctcacctcttctcctttatcttctgctataattccatgggtgaaaatcaccattgaagaacctcattgaaactcaaagatccaacctccatagaagcttcttaagcaagcttccatcagtaggcttatttggctagtggctaaaagaaaaaagggctaaatcatctcaataaatgcatgtgccacaaggaatgacaagaaaagcaaggaataacctagagtaatctagcacgagggtgaaatcacacattatagaacatgaatggtataatgcnatccatcctacaaatccccaaaaactcacaaggaagttattcatcacacatgatccaccctcacaatttcaagcttatttatcactt

SEQ ID NO: 15627 - DNA, 418 bp, Glycine max
  unsure at all n locations
ntgcattgcangcttgtctgnnncgcgattgacanangggtgcattattactatgttagtctctacnggctatcaggctctttgtcttacagacagcaaaaaagaatggttattaccggatacccactcnggtattctccgcccgtcagcgtgtctccaatgtcagtatgacagatcttggagcgcaaaatgacgtaattcccgtggcacagcttgtcggcgcgatgacaaaagcgccaagagatgcagtcttccatgcttcagcatttgtctacagacgcaaaangaatgttttcggataccctcggtttctccccctcacgtgctaaatgcatataccatctgtgacgcgaaatacctaatctcacttgacggcttgcggcccatgacaaggcccaaaacaatgcttttcatgttt

SEQ ID NO: 15628 - DNA, 407 bp, Glycine max
  unsure at all n locations
tggcagtattacaaatctcaatatacgtagccaagtgtgagtatggatcnttcattggtaaaccatgaaacaaattgctctgtattagctatatcaataaaggtgggtaagttaagttttgtgcttgaacctctagccgtgtaacacttgagaaatattgcagcaccgaagtacttgagtaatcttccaaggtcactcatcgaggttgctcttcagtcatgacattggcttcaaattctgctgtttgagattccctggatatatgtgaattagaagatgatgacacacaaaagtgagcgtcttcaaagattgatgcaactagtttgtcgtgcacaaactatctttttctctctgtgttggttcttctaaaagtggcttcaatttctaaatccaatgaaaccaattca

SEQ ID NO: 15629 - DNA, 132 bp, Glycine max
tcagctcgaccgggtccttagcaccgagctgcgctttcaccgtatgggatgagatcacctgtgggacacaatggggaccgaacaactacgtctttttaacaaacctttgaacggctacaaactgggcggaaa

SEQ ID NO: 15630 - DNA, 101 bp, Glycine max
gccacccatcaaatgtgagtttgtcacacaaccattcccggagggtgagggatgatgtgtcttcatgcaccggaagcgaaagcttgagacacaaatcaaca

SEQ ID NO: 15631 - DNA, 428 bp, Glycine max
attgtcgatcacattggcactcactcgaccgggatcctaagcacctgggctgcaactttatctacgcaatgaagtgtgtcaattattgagataaatttactctaagctataacatcagggaaacataactttcttaagaccacaatgactacacctattgatccttaatggatcacaaaacactcctaagtatttcctattctggtatgtgcacataaccattaaacaatactccatatctaattctaaatccatcttgatctcttattcacttgtgcagcttctgttattaagttatgagataaataatgataaaaaattgaaagactctctaaaaacactcactatgaataataagagtaattggtaaaaaacaaatatttgtgattgttaaaaaacttattaccccaaaatcaataattagtaaa

SEQ ID NO: 15632 - DNA, 409 bp, Glycine max
  unsure at all n locations
ctttaccaacaacttcaccatanaaaatgcataagaacacattctcttccttttcaattggaattttctttgtttgcttcttccccataaaccacatttaaccaggttatacaataataacatcgatttgaagatacctactctccaaattacaccctaaacctgatatgaaacgttagtatcaaaagactagtagtaactcctactgtatggatatcacatcccaaaactgatcctgcttttggaaaataatatgcatgattaacaaatagtaattccctcatatacattcaaagggatattatactatggaaaaatattgatttagtatcctgcttttggataataatattcttatacatccaacccttcatctgaattatcacttatcagccatcttagttcagtt

SEQ ID NO: 15633 - DNA, 497 bp, Glycine max
  unsure at all n locations
ttgcatataagcactcactcgtaccgggatctcaagtcactgcagcttcaacctgcgagaaccatattgatcaatgatggattatctcttggtaaaattgacgatgatacatgtgttcagcttatatactatcaactgttgatgcccatcttactaacaaacaatacaattaaactggtactggttctcactcgcattacagagaacaagctgtgcataactaaattgatatgctgagaatatcctccagagatataattatgtgtcaatcattgatcttttgggggggtgtgttgctgaacacaacaatcactctggcctcacngacacatatcatttcttgcaggcagagataaaattcatcacaggcaacgggtctaaatgaattgcaagcattccaccacatgaacatgattttcacacttatattgtgagacagatgctactttttgcctataaaaacatcccatttggtatcaaaacttattacgactatn

SEQ ID NO: 15634 - DNA, 358 bp, Glycine max
atgatggtgaactatcttcttcatacatttctgaaaatttacatctgtccttttccggcgttattgcctgagaattaagaaaataattaccactctcaataatttgatcagctaactttaatttaaaaaaatctaactgcgtgtttcttgttttttaaaatcttgaaatcaagaattaaaaataataatcatccactcatccttttttaaaaatgaaacagacaaaaaattgactggagaaagtgttatatatctaaatccgctgacgaaatttgactaaaaattaaacagacctgatcaacgtcaattaacggctggccacctttcttctttcttcacatgattagattagagagag

SEQ ID NO: 15635 - DNA, 395 bp, Glycine max
  unsure at all n locations
ttgcttttgactccctgccggtcttaatcactgagctgcagcttgcccatttctacacggttttggcataattatacgaaaagcccctttcattcaggggtcgttcttaattttcacctcctccaggggtttgtactaattaaccatttctgggtaattacatactgcttcttaagctttggggccccaaattggcatgggcatttggctttttatactttcctacccacttatgataatctgctattcacataagggctctttatgcttttttcagttttgttctaaaccgatcaaatcaactatttccttgtgctaaatggttcaataaacgatttttttgatatgttcttactacatgcactttatattatttttggaacatttgcacaaan

SEQ ID NO: 15636 - DNA, 443 bp, Glycine max
  unsure at all n locations
tctacttatgtggcagggcgggcttccttcactntcttgtcttcaacgcgagctctgaccactgttctcccttcccgcgatggctcttttcatgtccgcctgagtgggcttatagcctaaaccatacttcccacgatttccttgggtttttatcaagctagttatgccgccattgtctttgcctaaacccatcccgggttcataaccgttccccaacataactcgggccatcattaccgccgcatcggacagacaaggttgcccaaagagggagtccacggaggaaatgctgaccacctcaaaagactggaaagcggtttctaacgattcttctgcggcttccacataaggcatggaggatgggcagcttaccaagatatcttcctcgcctgacacgatgaccaagtgcccctccactacgaatttcagctnttggtggagtg

SEQ ID NO: 15637 - DNA, 518 bp, Glycine max
  unsure at all n locations
ttgctcatatggcgactcagctcgtaccgngatccttnagtcacctgcggcttgaagcttccaatgtttcagccttggaatatatttattgaaatatcatatanggatagatataaggagtgtcttatggacctaccatggcttggaattctattctatcaaacccaatgaattcttgtaaggtgaagacattgcaagacacctactgtccttatactctgccgcagaatagagttgttgaaagaatgaaccaaaacttggtattcaattcanggtcgaataannatttctanggtgaagtggtaacacatgttatctcgtgaatcggtcatcgtccactggcatagatttcaagatacctattgaaggattgtctaaccaaccttgtgaatactcatagctgaagtgtttgagtgtccaccataatatcatgtatgagaaagtaagctggaaccctaaagccaaaaaagtgtcttattgcctattgaaaggagtcaaagattataatctggtgccct

SEQ ID NO: 15638 - DNA, 445 bp, Glycine max
  unsure at all n locations
tctttgacatataatggacgagaaagtagtcaaaaagcatgttgacgtggaagatgacgtggtcgtggccaaggaagattatgaagaggagatcgtgataattntgacaataatgaatggaggagccatcaatccactagaagttgtggaagaggaagagaaagaggtagaaacaattatgaaaaagcatatgaaaggaggtatgataaatctaatgttgaatgttttaattgtcataaatatggccattactcttgggagtgtagaacaaatgttgaagagaatgtcaatcttgttgatgataaagaagataaagaagttgaagagccagcactactactatcacttaataatggtgagaaagaagacaaatgcttatggtatcttgactatggagcaagcaatcacatgtgtggatgcaaagagaaatttgtggaacttgatg

SEQ ID NO: 15639 - DNA, 87 bp, Glycine max
ttcaccacttcgctatctgttggggagttgtgcttggtaggctaagacgttgagagactgctctaagcagtgtgtaattagtctgga

SEQ ID NO: 15640 - DNA, 210 bp, Glycine max
ttgttcttttataaaatgagaagttctgaactcatcatgttatctaagaaaaccttggggaggatccaagtgctccgatcatccatttgcatactcatggtttgggggcatactcacccgtggttatttctttaggaatttcattcataactaaaaaaacaccaaggcacccctataacactccatccaaaaaaatggataatgaaaaag

SEQ ID NO: 15641 - DNA, 195 bp, Glycine max
tggcactcactcgtccgggatccttaagtcactgcggatgcgctgaaagattaaatctgtggattctgatcctgcaatgtatgttcttaatggaaatcttgtgaccgttctggatatcttgggatggccaagaagtccacatgcaaaaccatggaaattgaatggtggctgaattatacctgatgctgacgtttt

SEQ ID NO: 15642 - DNA, 364 bp, Glycine max
  unsure at all n locations
ntagccttaagttgttctatgttgcttatgttgttgctccccctatctctaatagtttgagacctcagacaaagatgattcttgatggctcagcaagaggtactattatgtctaagagccctaaggaagaaattgtaatcattgactctatagaagccactgattatcagagtcaccatgatagggctctggttcaaaggaaagttataatggagccagatactcagaatgtaattctagcttagaataaactcttgactcaacaaatagaagccttaacaaaacaaataggccaacttccttaataatttgagtagggtggatcacagaanacataccaagctcatcaagtacaaaaagttct

SEQ ID NO: 15643 - DNA, 499 bp, Glycine max
  unsure at all n locations
atatgcacacctcagacactactncagctcgtacccgggatccctaagtcacctgtgcatcagctcacacatgtcttctcattgcttcttccctatctttttgatgcaatttgaatggactccaactcttcctgcgtttagatgtctcgcanaagagaccagatgccagagcctgctcaagccacaagtcaaatgcctcttcttcttctccatcatttcagcatcaaaatcccacgggaatctacttcagttgcaacgttggcttttctccaagccaaccatgtttacatggaaactcggtcgatgggtatatggcctgcagccattccctgcagaaataaaaaagctgtcggttcataatggagtaaaaatgatgcttcttatcataattctctattttacacagaaataccactacctacataagagacaaaaatggacccactgaatttattgccagataacaaaattcctatatttccctctgataaaggtaaat

SEQ ID NO: 15644 - DNA, 289 bp, Glycine max
  unsure at all n locations
acttcttgtgcaccatggccaacttttcaatctttattctctttttattctacttttctgatttaacttttctttatctcttcttcctactctttagaatagaagtgtggcattgtatctgatctccatctcttcgccaaactagcatcgcaatcaacattggaatcagggatggaggatcttggcgactttctctgtgaccaccaaatctttgtgtnttaagtctccaacgccgtgtgggaggaataagtggttgaaaaaacggagaggatagtggagaagaccctca

SEQ ID NO: 15645 - DNA, 63 bp, Glycine max
tacctggtaggagtgtgatagagtatgagctcttgatgataatttcagaaaggtgatgtactg

SEQ ID NO: 15646 - DNA, 328 bp, Glycine max
gaatgtcaatccttaccctctgttatctgaaaagaatagaagggaaatttccaatctataaaaaataaacagagaaggaaaattcccaatgaaagagaataaagaatagaaaggaaattcccaatcaaagagtgggagaaagcaaaatgaaaagaaagaaaattcccaacctaagaatgggaaaagtaataaaaaaagaagacactcccggcaaagaaactataagaaatgtgcaaaaggtcttttgaccagacaatatctgaacaatacacaatttgtcccacatgaacacaaaaggaatgagatgaaaccacgacctaaaatggtc

SEQ ID NO: 15647 - DNA, 364 bp, Glycine max
tgcctttgcaccactgtccggtcttagcacgcgtgacttcttcaaccatgatctttgttcgaaccatattttgcgcccaagcctattacaaacccatatcaccagcaacattccgtatattactgctgtccaaatgtgctgatacttgaggtacaccttcctacccacccagatacactacgcaatttagtggaatatatgaactcaatggagcgttcagcggcttgaaaaaccactcaaatgcacattgccacattttttagtgttaaggtgacccttatttgctattccacaggctctactttgtgatcaaatttcaaatttgaaaaacttgtcttcatgccaacagaacttttaacttctt

SEQ ID NO: 15648 - DNA, 313 bp, Glycine max
  unsure at all n locations
tatctnggattcgaagaggaatatgatctcaaatgtgtcctcagagttaccaaggatgtcattgccttcactagaagcgtatctttgcatccataaacttgccttctctcagagccttttacttctccaaggacgaaaaattgctacatgatacattgttgttgaaatccataattcgtttatctatttgatgagattttcttgctgcctaattgtgtgtgtgtagttaattaattattgaattcatgcaatttaattggtctagtttaggaatactatgtctaatatgctctagcctttctggcatgtcatt

SEQ ID NO: 15649 - DNA, 481 bp, Glycine max
  unsure at all n locations
ntgactaaaccaatggcatggacactggaaaagaatttactctattntcaaaattgtactaacttgtntctctgtctcanggaattatgccaaggaccaacggtacaggtggcttctgtttctttattttattcaccaaaataacttgagtagtttgaatgacaccagccaccgaaacttgacctttgagaacacatcttgtcacaccactaggattcgcctactcagcattcaaaagatcttcattacgtgcctgtcattcattatatccagttcctccattcattgtgtctaatctttcccgacgacaatagtctccattcacttccggcatatatttggcaattggatatttgcaaggttcaaaggagttgctngccaccgattcattgtgcaacccgcttactatatgtaaaaagcacttccaaagtccaaaccaggtcaatcttccttatggaattaaccttttttattgtcctcg

SEQ ID NO: 15650 - DNA, 393 bp, Glycine max
  unsure at all n locations
tcatattccagcaaagcataatcactgtgaacgatnaaattttgctttcaaataattcaagtaattacatattcgagattcacactcaactatagattttaatagaacaaccttacatatattaatacacatgtttgggcgtaaaagtgactattattattattttaaatatataaatcaaactaaccatgcattgatntgaatgaatcccaaagttttgtatgagtgcaaacaaagccttaattgaaatgcttgattttgaagggtatatttgagtgtcaacgtcaaataaatntataacacnattgaccttttttcaagggttaattatctnnttttatccttatagttgcaacaactttctttttgattcatacaagctaaaacatctta

SEQ ID NO: 15651 - DNA, 454 bp, Glycine max
  unsure at all n locations
ttcttgacccctttggcactcactcgaccgggtcctaagcactgagctgcagctttatcaggcattctgggataactcttcttctggttatccctagtggatggtngcctcccctctctcttcttctttgcctttcgctgcatctccatgggtgtaaaatcaccaattgaggacctcattgaagctcanagatccaacctcatagaagctctacangcaagcttccatcangtggtaatcagagcaccaagagcttcaagtaggtgctcctttanacctcccataatnntttgctttaccttctctcccattgtgttcttatttttttctcatgatctctccatgcttgtctaatgttgtacatgatctttaagttccccgttaacttgttaaactaatttattttatggtaaattcttgtctgtcttacctgattggtgattaggtcttggag

SEQ ID NO: 15652 - DNA, 426 bp, Glycine max
  unsure at all n locations
tatgtggttctggaattattgatcatcatatgtgataattgactatnttgacacacaaagaactcctaaagtttccagatgcaatctaatcgattaccaaatgtggtaatcgattatctcaagccacaaagtcttccttctgctaaaactagcttatgtaatttattactaaaactggtaatcgattaatccgatgattcttgccaaatttcaagtagaagtgagttatgttgcttgttctaacactttgtaattgattactaaactntgtaatcgattacattgtgttgaactcattgcttctaagaaactttgagaccaattcattaatctaccttgtttgctttctactaagcatgaatataagagactaaatcacccatcatgcctagtctaaaaacatccaatantaatgccacatctttt

SEQ ID NO: 15653 - DNA, 293 bp, Glycine max
  unsure at all n locations
actcgccggtcttagcacgagctcagctattaagtgcttctagttaaatgacttaaaattcaagtctcaagtacatataaagggcttaatanataaaatctacgactactatagctatctataacatatcattctcacaactctttgctggtatatataatcctgctttgattgattcaaactgttcgcctcaatcaccaacgcggagtaattggagacaagccgtagatatagataacctggatggcatactggggacaaccttatgggtcttcgttattatcttacattta

SEQ ID NO: 15654 - DNA, 441 bp, Glycine max
  unsure at all n locations
tggattntatgatagggattttgccgagatattgatgatagaaaaagtacctcccgatttggatttnttatgggtgatcgngttttacatggagttctaagaagcaagggcttgtgacactttctacctgtgaagcccaatatgtagctgcaacttcttgcaccatgtcatgccatttggctaaaaagatcgttgganggaacttcaattgtgcaaaagganagcacaaagatcttatggtgataatagatctggacaagagcctggcaagaattccggtgttccatgaacgaagtaagcttttagatacacggatcatttctttgaaagtctattccaagaaagaagttaattgcacatgtaaaacttaaatcaagtgccgatatttcacccacccctcacatttgagattttcaaaatagcaaccaaacttgtggggcg

SEQ ID NO: 15655 - DNA, 410 bp, Glycine max
  unsure at all n locations
tgtttaagagtggttaacacaccctacaactcacttgtnattacataagaggaacccatgtttcgcatgaatcccacaagatgctcacacaccacccaattggaccgatccatccgaattggccttcacccaattattctcatgcaatcctaatctcttagacactcccaccttcatcaatagtggaaccaaattgcgaagaacttacaacaccaacaacccacctcatagcctgctcaaccacacttgcaacatcaaattgcaccatcttaaacacaacaccattgaactccatatataggtaagcataacttggaataaattacaccaagaaatattgtcttgcacccatctgtatccatagtattaggctcaatcactactataaaatatgcttggtacatcgacta

SEQ ID NO: 15656 - DNA, 302 bp, Glycine max
agcttcttatcctatgctcatcttggtggtgaagctccttcttccatggcttattcccgagtggatggcacctcctctcacctcttctcctttgtcttccgctgcatctccatgttggaaaatcaccattaaaggacctcattgaagctcaagatccagcctccatagaagccccacaagcaagcttccatcaagtggtatcggagcacaagagcttcaagtaggtgctccttaaacctccattaatttttttttgctttaccttctcttccattgttgtttcttcaattttatccatgtat

SEQ ID NO: 15657 - DNA, 473 bp, Glycine max
  unsure at all n locations
acgataaataaaagatacaaaacaaagaaagaagagaaaaagaagagaaataatttanaattntnttgagacattgagancaaannttatngaaaagcannaaagggagggnntgaagagaaaaagggagaaaagaaaaaatttttatatataaagaagaaaaaagaaagggggggggggaaaagaataaacagagaaataaagaaaatgaaaagaaaaagaaggaagaaaaaaaagaagatgaaaggaggaaaaggaagagagagaaaagatgagaaaaaaaggaaaagaagaggaaaaagaaggagaaataaaaaaaaaagaaagagaaaaagattaaagaaaaaggagaaagagaaaagaaaagaagaaaaagatagaaaaaaagaaaaaagaaaaaaagagagagagaacagaaaagtaaaaaaaaaaaagaaaaaagaaaaagaaaaggaacaaaagaagaaaaaaaa

SEQ ID NO: 15658 - DNA, 247 bp, Glycine max
agcctaccctatttggcacttcttggacttccattgttcctaactcaatcactgttaaaggcctgctgattgagtacaaagtgactcgcaactattaggtgagtaattaatcactcctttgcatgtcatattttaatatcatagaatatcttatattgaatttcatgttcaatccacgaagattcgagtaccatgttctcatttatgaaatctgcaggatgcacccatctgaacatggaaaggaata

SEQ ID NO: 15659 - DNA, 270 bp, Glycine max
agccttgagctttttcaaacgacaatgaatttttactcggatgtgcgattgagtcacgtaatatatcgagaagctcgaaatggaataccactactctgagcatattcaaacgacaataacgttttactcggatgtctgattgagtcccataatttatcggaacgctctaaatataatacccaagctttgagcatattcatacgacaataactcttttactcggaagtcggattgagtccccttatatatccagacgctctatattgaatg

SEQ ID NO: 15660 - DNA, 525 bp, Glycine max
  unsure at all n locations
agtatacctcggatacagacactaagcttgtaagctatgtctagctnacccgatttgctcaccctttgaagttgatggtatggctgtggagtctcacttgtgtctgtatagatacanaacaaaaggcctatagctgatttctctgagagattgggaggagccagatngaactatcgcacctatgaacaagagttctatgccattgtgagagctcttgatcattggaatcattatatgcgttctaatcactttatatagcattcagatcatgagtcatttgaagtatatcaatgggcagcagaagttgagtccaaagcattgctacatgggtcgaatctcttccatcttttaattactcttctaaatacaacggatgttagagtaatgtggtggctgatgcactctctanggaggtatgcttcaatatacattctttacactccgttagctcggtttcgagactttgaaggattataataaacacaatgtcggtattggtgaaatacctctaattgtgagaaggat

SEQ ID NO: 15661 - DNA, 294 bp, Glycine max
  unsure at all n locations
agcttgcctctattatgtccacgaaggattatgcggtcgaaggaactatttccgctcctgagtatgacagttaccgctttaggagcgctatacaccagcagcgcttcgaggccatcaaaggatggtcatttctccgggagcgacgcgtccaactcanggacgacgagtatatggatntccaggaggagataagtcgccggcggtgggcatcactatttacccccatggccaagttcgatccagaaatagtcctcgaattttatgccaatgctttggcaacagaggacggcgtgc

SEQ ID NO: 15662 - DNA, 82 bp, Glycine max
  unsure at all n locations
acctnctcctccatggtngatacttcatggtctccatgatctcctacatgtctggcctaatgtttaacatgatcttataatt

SEQ ID NO: 15663 - DNA, 245 bp, Glycine max
  unsure at all n locations
naagctnttnggttctgtattgcctaaaaaatntgcaatgtagggcggctatgtgtcttcgtgcgagctcaaccgaagttgtatttcagccgacgcccgcatattgtctgccatgaaaacattatcccaccttggcaaaaaataacatgattcaccggtatgacagaaataatgctggccttagtcggtcatgatagatgaccgatcgatgtctaaaatagaagcatgaccggattacgccgatc

SEQ ID NO: 15664 - DNA, 269 bp, Glycine max
  unsure at all n locations
agcttctcagctatcttgcttcctcactagcagntgctagtgctatcatctcacattccatagtggactgagctaagatagtctttttctttgacttccaagagacagccccaccagctatgctaaatatatagccgctgggtgctttggaatcatctgaaagagtgttctaatctgcatcgctgtatccttcaagtacagcgggaaaccctttataatgtaatccaaaggctatggttctattaaagtgcctcattaccctttcaata

SEQ ID NO: 15665 - DNA, 276 bp, Glycine max
  unsure at all n locations
agctntcttatttttctggttntccaaaccttganaacaaaacttgtgttattcatctttntcattcccttctccctttgccaaaaagaattcgccaaggactaaccacctgaattctntttatgtctctcttctcccttttccaaaagaacgaaagactaactgcttgaattcttttgtgtctcccttctcccttgtcaaagaattcaaaacgacacaatctaagaattcttttgtttcccccttcacaaagtttcgaaggactaactgtctgag

SEQ ID NO: 15666 - DNA, 233 bp, Glycine max
  unsure at all n locations
catcaaaggtaattgaaaacttgggaagaatggttacctcatgttgaattatcttataatanggtagccaacactaccacttctttttcctactttgagcttgtttatggttntgatcctctatcttctcttgatttaactcctttacctaatgattcttctattttgagtaaagatgggatttctagagccactcttgttaaggatcttcatgaatgggtgagaaatcaaat

SEQ ID NO: 15667 - DNA, 195 bp, Glycine max
  unsure at all n locations
tttgttgcaagcattnggtctatctaaagagtggagtcttcatgctgcaaatcgatggtttctgagtggaaaattctacattggttaagcatgtaattctgcagcatttgcgaagcacattcaaattaattgaagtcatgtacgagcactgtagctcttacaaaaataagcactgcctcgtatttaatgcacaaa

SEQ ID NO: 15668 - DNA, 354 bp, Glycine max
  unsure at all n locations
cggtactttgtgtagtcttccttacgtagttcccgaggagcatttgactcgtatgggaacttgctggaggtgtngccatgggtcctatccattattaanataagaatcaggaaacacatagtaattacaacaacatgtaagtatcanattgtanataagtagaattgtaaaatgtaaaatagttaattttttgagttaaacattatttgagtatataccaccgttaaatagtcgtatactcccataaacactcatcatgaatcgtacgaattgcatgtacatcattgtcttcattttcagcatctatggaaggcatctgtggggaaaaagtgggcatgtcattaacatcaagtg

SEQ ID NO: 15669 - DNA, 267 bp, Glycine max
  unsure at all n locations
gcccgttggcgtgcgttccaaacgagccctcatggacttcctcgatcatgtgatttgcctccctggcatccacacaccgcatgagtgtcatgtcctgatttctcttatacagtatgcttccactcatgaagaaaccggctgccaaccttctcaatgtcctcttatcattgtcggcaatctcgggcgggtattctntgcttacgacatatcgcttgatgtcgaaataccaatgctctccgtctcgttcctcttctacttggcaacaac

SEQ ID NO: 15670 - DNA, 268 bp, Glycine max
tcactctgtttccactcataacaccatattcttactgtctaaccctaagttaaccctacccttcatctctaacagttttccataagcaatttcagcacataaacatcacaagcatcatcatataaaaccctaaaacagaatgggttagcttgactcacaccaaacatggcaagttcaacatgctttcaacaaattccttcatagataactatcatgaagcagaaacctagctaaactacccatcatatctccctataaccaataccca

SEQ ID NO: 15671 - DNA, 531 bp, Glycine max
  unsure at all n locations
agtgctgcagntcctnctanntgccaaaacanantantnaagctttataagagcaaaaacccccttantcatnntncaagatatgccatgtgtaatatnggacgcatcaacaangaatctcttctctttgtctattgngcangcaatcaanggggcangacacaccagatgattataatgatggatggctcaaattctcaccacgtaaaataatcactttcaaattgagcttttcaaactatcatgacatgtatagaagaatccacgatttcaacgcacaaaatgtcaagagcttctattttcaaacaattacccatttcttgaacatatcctataattcaaagaaaaacatgcgaaggcgaacttgctcacaaaattgacccacatatttaactaaactccgacaagctaacaacattacatatttacagaactttaaaacctgcaaaaccaagaacactccccccatactaaacacccattgcctcatgtttccattgaataattacaaccttactcatcatgagaacg

SEQ ID NO: 15672 - DNA, 302 bp, Glycine max
agcttaagatgatgaagaagaaggtaaatgtttgcgggaatagtgacttgtacagatgagtcactatttagttttatatgaaagggtgaagggcattttggccctttcacccgagttgctgggtgtctcaacaaaaatattgggtgccccacacaactctcgtggttcggatggtttcatactggccaagcttaaaatatgagctaataacttttttgtgcctcatgacttactaattttgttccattatttttgcactatctgaattattaagaagtcaaatgagtttttcttctatatat

SEQ ID NO: 15673 - DNA, 297 bp, Glycine max
  unsure at all n locations
agcttccatcatgtggtattagagcacaagagcttcaagtagtgctaaatgttgtttcttcattaatgataaaattaatgaagaatntaagtagcacaagaactccttaaacctccattaattttcagctntaccttcccttccattgttgtttcttcatttttctccatgtatctcctcacatgtctagtgctaaatgtttttaacatgatcttttagaatttccactgattaaacttgctatagaagctagattttattttttatgggtcanatttcttgttcttgaaccataaa

SEQ ID NO: 15674 - DNA, 503 bp, Glycine max
  unsure at all n locations
natgtagctgtcgtagttactgcaactcnaagcttgctaagatgattcctaacgagccagagcttaacttcacacatctctttatacctaacctcacncctgatatgagaataagaggctagnctcacacccctataatagctaagctcacccctatgccaaaaaacatgaaaatacaaaaaaaagtccttacttacaagactacccaaaaaacccttgaatacaagggctaaaccctatactactagaatgggccaaatacaaggtccatatgaaagaaaacctattctaatatttacaagataacaggctcatacttacccatgggctcaaatctaccctanggctatgagaaccctggggcctccntggatctctgcacaatctacttggagcttctatcaatgaccttgnggggtggatngcatactatgtnggtnataattatttaataatgaatttgacaaaaaatacatgttgtatgatttgagacatggtagact

SEQ ID NO: 15675 - DNA, 285 bp, Glycine max
  unsure at all n locations
agctttgcagatttggtcttcgctgggtaaaggatcanagtgggtttgaaaagaggcaaatttaatcatctgcttagacgaattaganaactggggcaaatgaagaaggtgagaatgaatgagaaacccatgctgcgactgtcgttcctaaatagaaaatcccttaccagctcaacanacatcattactcagccaatatcgaaccttctcattcctcaccacccaattatccataaaggccatccctaaatcaaccacaaagcctgtctaccacacaaccaatgc

SEQ ID NO: 15676 - DNA, 277 bp, Glycine max
  unsure at all n locations
tttatgcaagctgcatgttatgtaatgatcatgagaatngtcatgttaggtgcttttgctatgctgttaaaacttgccctggttctgttggtcgagccaatgggaaaattgtggttaattggatttcttgatggtttggactatggtctggttggctttaacgagtttgatgcttccttcaattaattttatagtacacctgttattttctcctgtctatctatttgcacatggagtgtngaatgaagtctggatgattgcagaatagcaatataat

SEQ ID NO: 15677 - DNA, 285 bp, Glycine max
  unsure at all n locations
agcttgtgaattgatagaccatnttgagtgacattttacatgagtgtttgtgtcaatttcacgtatttttcttggcataattcacgtttagatctagtttcatgtgcataaagtataaatgtttgatcaagtgaaagagtcggaatcaacacaaatctatanagaaactgatgactctacactataccatggccatagtattgtaccacaatcatggtgaccacaatgcccataataagatcaccactaccctaaagatcaatgcctaccagttgatcacaatcg

SEQ ID NO: 15678 - DNA, 245 bp, Glycine max
tttagcttctccttcattttcctataaataagggaaggatggaagaacaataatgttcaatcctgctggtatctgagattcacttaaaaatactcataaaaattatcttcgtgaagaaaatccaagccgaagcgtttccgtaacgcttccgtgacattaccgtgggtgattctgcgaagatctacaaccgtacttcgtcgttcgtcgttcgcctctcgtcgttcgacgatcgttcttcgtcgttc

SEQ ID NO: 15679 - DNA, 247 bp, Glycine max
  unsure at all n locations
tgcttcacttatggtaaggaggatntntccacttcttgaaccttaacctttttgtctagcacaatttatgtataaaacaagtataaggtcttttgtaggattaaagttactttggatatgtnggatcaagtggcctctgaataattataaaagagggttgaattaattattactgaacctttactaattaaaaatgtacccttcttatgcttttactataatgttaaaaagtaaataacataaatgg

SEQ ID NO: 15680 - DNA, 498 bp, Glycine max
  unsure at all n locations
tgtgctgtacgttnttacgngaccctanatactcagctgatgactgatcaattgattcnnagaatttgtgatacaaagatatgacaaaaactcatttttcttatcttcttttgtttacaaagatgatgatctcgcgaatcaaagaatgagttcaagattgaatcaagaacacttcaacgttcaaaacgcaaattgatgtcagaatccagaattaagtttcatgattcaagttccatgaatcaagatcaagatccacgaatctagactcaagagaagactcactcgagatatgtattaaaaagttgtctcaaaaactgagtccaccataatttgtctcaaaacctttttccaagagttttactctctggtatcacttacagatttttgcatcgataccattgcaccatgtttcaacaagcttcacctgatttacaatgtccatcgatttcaaatttgtatcgatccatggattgcttccgttcactgggttgaagtgcg

SEQ ID NO: 15681 - DNA, 452 bp, Glycine max
  unsure at all n locations
attccttgacacaatctagctatgtctctagaggtttgtggatcgactacattntcttccccaacctaaccatggattggtttctttacttcacacattaaatttattaatttggcctttagtgattaaccaaccatatttgaaaagataatacttgtaatagaaatattatttatgtgtataatatagcatattatttgtatttaaaaaaaaaccatagtatttgttacttatcaaaatattttatatatcatatccttattaatcttaagaagttatattctcaccttataaaatagaagtatattaatattaattggattatacattntatcccacnttntaattgcatattctatcttatttttaaaaactgtgatgtactccatcattatcattatagtcaaaatagggtaaattaaaaatataataaagtcagtaacatcaattgt

SEQ ID NO: 15682 - DNA, 292 bp, Glycine max
tagctgaatgaatgttcacaccacatactttatatgccaccagctgtattattagcaggctgcaccgcccaagaaacctctacatcctcccataacgcctgacacatagctttatctatcatttctttctttgtttcttgaatacacagcatatccacagtctccatctttctgaatcttctaatggctgaccatttcaaccccctccctaagcccctgacattgctggaaactatatgcattgattcctttgtctgtctcccctccttatcgctccttctttgtccctttc

SEQ ID NO: 15683 - DNA, 297 bp, Glycine max
  unsure at all n locations
agcttcaggttgttcattgactctagaatgctgcanagaaggacagagatctgtatggtgatctgcagaagaacatagaccacagattcttgcaacaggtgcagacttcttattcatggcaagctaagttactaggttgaccaaggcatcaagttttccctcaagctttttattttcagtagatgaagatgaattcgtggccatctcatggactcctctaaggaaaatagcattatttcttgcattgaattgttgggagttggaagccatcttctcaatcaagttcctagcctcaac

SEQ ID NO: 15684 - DNA, 246 bp, Glycine max
cttagatgaacctaatgcagtattcaacttacacattttggctgatcttgtatttaacataaattataatattatatattccttctttatggtataaatgcttgttcacaacgtggcagtgtgtggtctacaacatgacagtattgtaacctgcctggcatattatagatgctaataatacatcatgcagaaattttaattactataatttatcgtacacaatattgatgaatacgtacttattta

SEQ ID NO: 15685 - DNA, 261 bp, Glycine max
  unsure at all n locations
agcttctcatttgtacggngactcttcactggtgatccaccagctgatatgagaatgggaaactanagaccccaagctgataccctaccaagcctatatcaaggaatagtgctggttctttgatgagatctccttccatcatgttccccgagaggaaaatcatattgcaaatgcgcttgccactttggcatccatgtttcagctaacaccgcacagggacctaccatacattgagttctggtgtcgtggcagacccgcaca

SEQ ID NO: 15686 - DNA, 282 bp, Glycine max
  unsure at all n locations
agcttatcatattctattgcactgttgttttttagacaatgattgatttattcatgagtctgtgttttaattgattaccatgtgatatattcgattacttctatttctataagtatttcagaagtgatcaagaacactttaatggactacattgaggatctaatcgattacattgtgcttgagaggtntccagtttttgggatgaacactttaatcgattgataagataatataattaactacttcattgaaataatcgattacattgtatatttaatcgat

SEQ ID NO: 15687 - DNA, 246 bp, Glycine max
  unsure at all n locations
agcttgtatactgccatggaagtcccacaaggaggaacaatgctgaagagcttgttgaatgaaatggtggtgtgaacgagaccggacagatgaagaacangcatatgaagcgggccctgcaaggttgtgggccgcaactgtatgggtaccaaaagcggaagtggtggcggagggggcgatggaggcatcatggctggcggatgtggcacgatcgtgggtgcggtgagcgtgggtgatggagttgac

SEQ ID NO: 15688 - DNA, 279 bp, Glycine max
  unsure at all n locations
agcttgtatagttctctaatttatggtcattntgaattaaatttggtaaataaatcttgttttattgttaacactgtctctataacatttccattgaatttaatgatgaaatctgtgcattttcaagtgaaaaagaggctaagttntgaattgcaaaaaacaacaattgggctaagcttagtagttgggctaagcgcatatccaccatgaaaagcgctgctacagcgtgcttagcactaaagagaatctggcagagcatcaacatcaaagccgcgcact

SEQ ID NO: 15689 - DNA, 344 bp, Glycine max
  unsure at all n locations
gtcttgtgaatagcatcgagtatcatgttaggatctagggtttgaggaatggtatttcttgccttagtccaagtgggtgcaagaccccctaccatggtggatgctagcctttctgggcaccccaagtgcctgagaatgctcatagaatgatatttgagtagttttccccttggttacaaattaatgatatcccatatgatgattagggtcactcctctaccctgcccctaaatacacccgtactagagatatgttgctatgagagatgttaagggtaatggaaaatccaataacgcctgagacgttangtgaatgccaagaacctttgacaacaccaagaggag

SEQ ID NO: 15690 - DNA, 273 bp, Glycine max
  unsure at all n locations
agcttatcatctatcaaactggagaaagagttcttggggtcaagacatgagaagcaatcaagtataatgctacttccttcactaaagcggtgatccatctccacacatattttatcaatagcaacataaaaaatctctgcacggtaatgatgaagattagtgatagtcctcccttctgctcttgaacgaccccgaactggtatttcgtcatccatatntggtaccagaatacttttagcaacacanaatccttggacatcggcaaaaaaatta

SEQ ID NO: 15691 - DNA, 265 bp, Glycine max
  unsure at all n locations
agctntcataagtgaaatcaggtgcaaccatctccctaagagtcctctcatgaggtggaggttgagccatgttctcagtatgaaagttagtagtggaatgttcaaaatcagaatattcagaatcaccctcaacggaatgcatagaatgaccaggatgcacactatgcctcactaatctatgataggttctatctatntcaagatcaaagggttgtaaatcacctggatttcccttagtcatgcactatatgcaacaaataatgtg

SEQ ID NO: 15692 - DNA, 124 bp, Glycine max
  unsure at all n locations
gctatggggaagtaccttgtcatttgaggatccttaatttacgaatctccattcagttgtctagtgataaatttggagctgctccagcacttaaagtatttggttcctactctttnttctaatc

SEQ ID NO: 15693 - DNA, 272 bp, Glycine max
agcttgcctcattgatgtccaggaaggacaaggcggccgaatgatctagttccgctccggagtacgacagtcaccgctttaggagcgctgtacaccagcagcgcttcgaagccatcaagggatggtcgtttctccgggagcgacgcgtccagctcatggacgacgagtatactgattttcaggaggaaatatggcgccggcggtgggcaccactggttactcctatggccaagtttgatccagaaatagtccctgagttttatgcctatgct

SEQ ID NO: 15694 - DNA, 460 bp, Glycine max
  unsure at all n locations
gaaaaaagatcaaaaataaaaaaagaaaagaagaagaaaaaaataaaacaaactatttttttggcacactagagcanccttttttttgaaaccangggggagttattaaatgaggaaaatagaagaaaaaaatattttttttaatgaagaaaagaaanaggggggggagaggaaaaaagaatataaaaaaagtaaataaagaaaaaaattgaaatagaaagaaaaaaaagaagaagaaagtaagaagaaaggaaaaaaagagaaaaagaaggagaaagaaaagagaaaataaaagataaggaagagaaaaagaagagatagaaagaaggaggagaaagaaagaaagaaaaggagaaagagaagagaatgagagaggaatatgtaaaagagagagagaaaaagagaaaaagaaggagagaaaagaagaaaaggaaaagggaggaaaaaaagaaataaagaa

SEQ ID NO: 15695 - DNA, 251 bp, Glycine max
tgtaactcaataatggaatggtgggacacatcacaaatgatagtaccactttgttaccatattacaattagagttttatgttcaatacgaaacgaatagagacgaaaattctacgaatttgattttgactcgacatgatgtgatttgctaaaatgtgtggatatgatatattaaatcaatagcatcaacccgttttaaggaagaatatctgaaatattagaagacattaacactaataatatcgaagatat

SEQ ID NO: 15696 - DNA, 288 bp, Glycine max
agctacaacattttaccacttccagggtgctggaactacttctcatggacttgatggggcctatgcgagttgattgccttggacgaaagatgtatgcctatgttgctgtggatgatatcaacagatttacctgagtctactttatcatagaataatcatacacctttgaagtactcgatgagttgagtctgagacttcacagagaataacactgtgtcatctatagaatcaggattgaccatagctgatattctgaaaacagcatggtttctgaattctgcgcatctg

SEQ ID NO: 15697 - DNA, 285 bp, Glycine max
  unsure at all n locations
agctntgattgtgtctagaagaaatcacatgtntgtcatcatcggacatggggagaatgtgaatgtatgtatacatgattttgatgatgtcaaacaagaatctaacactgctgcttcaaatgataagcatttgcttcaagaataattcaagattgcttcaacaaacatagccctgttttaagattcactatagaccaagccttgccttaaaacaaagtgctttcaagacatgcaatgctctggtaatctattaccagatgacagggttgataaatagctgttgaa

SEQ ID NO: 15698 - DNA, 241 bp, Glycine max
  unsure at all n locations
agctnttaccatttatttntactctctgtattattgattaccagtttactgtaatcgattaccagtatcaaacattgttttcaaaagctttcaaactgaatttacaatgttccaattaatttcaaaatggtgtaatcgattacaagaattatgtaatcgattaccattgtgtcgcaacgtgcccttntatgggcgagcgatagcgaagctcactggtgcgctttccaaaggaggaaagatg

SEQ ID NO: 15699 - DNA, 269 bp, Glycine max
  unsure at all n locations
agcttgaagttttatataatgaacctttatctaagatggtaacagatacaggtgcaattaatgatgatgtgaatagacaaacganagtatagttgactcttttgaaccttataataaggtgcttcttgaattatactttcatgtataggtaaaagacaacagttgtgcacttgacacagacaagtcaatacaatatgtgaaatttctaacatgtgcaattgtgatactaataatgttgtgttgatattctatcacatgtagcaattact

SEQ ID NO: 15700 - DNA, 132 bp, Glycine max
agcttcttatctctatgcatacttggtggggaagctccttcgtccttggcttattccctactggatagtgcctcccctctcctcttcttctttttcttccgctgcatctccatggtgtaaaatcaccattga

SEQ ID NO: 15701 - DNA, 281 bp, Glycine max
  unsure at all n locations
tcatgcaagcttaaatttatattgcnaatcctaatcatgcttaacctagatcacccactcttaagcctgaaatccaacaatcacatattcttggtagacacttttacttaatcacaattcacccttggctaaatcgtaaacatttgtagaacttcaaaattattgagttaaacctcaaaatggattcttaatcaaactcatttcaaattagacatcatataccatacataccaatcaatttacaccccaaaacagtattttcaagcatcaaccacctaaat

SEQ ID NO: 15702 - DNA, 292 bp, Glycine max
  unsure at all n locations
tttcatgcnaagcttttgggtagagttgagttggtgcttgatgagtgcaaatgcctctctttattgtaacctcaagtatgtggtaataacttcctgttatatttaatcatccctccctaagaagaaatattatacataagattacttgcgtaagaggtttgtctggtctttggactaatatctctgaattttggtaacttatatgcagagacatgctccctttatatcctcacctatgtctggtcagttcaaacttattacattgngtatattattgtctctatgtctctat

SEQ ID NO: 15703 - DNA, 342 bp, Glycine max
  unsure at all n locations
gtattgatgtttcacagtctcctatcttacttaacacggttgttagtgttgcccacatgtccaaatcaggaaagctcagctntgcttcacggagtccattcataattccatttatgtacatgatctccataaccatgggtaatgctggattatcatcggttataactccaatcaagtacttaagggtttttgaggcacgtaaggctgcacttttggttgtaaaaatattcagagaanggacagtattgtgagctgcataaagtgcatccatcattccttgatacaatattgtctccattagtttttgtagcttagcattgtagccttgttcttcatcctcac

SEQ ID NO: 15704 - DNA, 275 bp, Glycine max
  unsure at all n locations
tctagctnttgattggaacgagagaatcagatactcacccgtcgggagaattgaacacccacctttgtacttttatatatcgctgaattgtgtcttatattattcgcaaggaatatacagctctgtaatacctgataatctatatgcttctcatacacgatatcaattaatttgcttctcataaaggatatcataacctacactgctcgtgagcgtaatgaaaaagactatgtgcatgagatcacatactcgctgcagctggatcatccatcatt

SEQ ID NO: 15705 - DNA, 273 bp, Glycine max
  unsure at all n locations
agctngaatgatgtatagatccttgattcttcaatggccaccacaatgtgatcaaactttgatatcaatgttctaagcaccttttcaatcaccaattgttccttaatttgttctccacaacacttcatctggttggtgagtgtgagaatcttggtgagatactcaactactgattcagtctcctccattgcaagaagctcatactatcttctcaatgtctgaagtntcaccttctttatcttttctgcaacttcatgactctttacaagaatg

SEQ ID NO: 15706 - DNA, 171 bp, Glycine max
  unsure at all n locations
gaacaacaacattctaagtattggatcaacataacataaatttgagttttcataanaacaatattctaataaatgcttttatttaagtaatgaacttctaaacatgagaaaatgtggattgacattatgttcacattatcatatcaaacatttaatcatgaatgtagtgac

SEQ ID NO: 15707 - DNA, 318 bp, Glycine max
gggatccttaagtcacctgatgcatgcaagcttactggatgtgaacaacttatcattgtcagaaatgtgtccgcattgattggtaaatctgtatgcgcaattgctgagtaatgttaagatccaggtacattcagcataccttgtattatatggaatagtaagctggacgatgccatgctatatttatgagcttctattagtgctatgcctcagactatatataatactctatctctaggtcccttgcagtcgactgatgtggtaattcatctagcttatagaagtgttgactatcctgttggtctcatagaagatgtc

SEQ ID NO: 15708 - DNA, 298 bp, Glycine max
  unsure at all n locations
agccttgggtgatcttgtacaataacaagacatgttagattgtgacttagcactntaatcctcttagcatagtgcttcagcaattntggtacccaaacttttatgttcaggtttgatcccatatttttcaaaaaaaaaataatggttgaatatatgttattaaaatcaatntatatatcacttatctggagtatgataaattnttcaaggcttaattttatctttttgtctcattcattatttattttatttaatnttatcctcctaataataaaatctttaatttgattgcttaatt

SEQ ID NO: 15709 - DNA, 294 bp, Glycine max
  unsure at all n locations
agcttatgactttataacaagaganatgttatggaagactgtggactataaaagtgtgcacatggttcatatacagactacacaagacatactagtgcgagaactccaagtggtgaaactaaggacttcctattaggatagggttacatcaaggctcaactctaagtccttgtttaatctaatcttggacgttcttatcaatgacacacaaaagataattcctaattgcatgctctttgctgcatttttttcttttttatcagcaaaaatagacaattatattaataaagtacc

SEQ ID NO: 15710 - DNA, 285 bp, Glycine max
  unsure at all n locations
agcttgagatgtttgatggngacccggtgttgagagaaacgaggatatgggctacgtgggagtacgtgagctcagttggaggtgggcaacangggatggtgggtntatgcgcgcattgtggatgtggaaaacttgttgtgcaccatcgcccgaccgccacctagtaccacatgtgatgggtaccccataatcctacaagcttgagatgaggaagtgttgaagggtgaaacttcctgcttntattgttgaccacagagtggtacctggagatatgtcgcgggggtc

SEQ ID NO: 15711 - DNA, 295 bp, Glycine max
  unsure at all n locations
ttattattcttatcatgttcacattaaattcaacatgattntttgcttaaatcctatgcttgtgcgcatgaatgccgacaaatatttattgcttgaatgagaagcatttagtgtgggaaaagtactgtcaataaaagtgaaatttaatttgtcaatcaaggtccaattggaccacacctctgtcattgtgaatatggcaaagaaatgaagcttccagtgtccgttataaaaacaggttaatgttgtttcgttttcgttgtcttcgttagaggcataaattaatgttagagtgtgt

SEQ ID NO: 15712 - DNA, 292 bp, Glycine max
  unsure at all n locations
ttttttcacttcatacatctttttcttctgaaaatatatttgaaaattntaacaacattaatttaagtattcatattaatatagtattggttaaaaaattaaataaacattgatttgaatgcaatttacaaattattagatatattatcaatccttaaaccaaataaaatataaattaaactacattatactatgatatatnncaataattctattaatattgatcactattgctaacaatngatttactgctatatatttgatattgataccatataatactaattaccta

SEQ ID NO: 15713 - DNA, 213 bp, Glycine max
tataattacaaaatgagaacaacatgtattttctcattttacagaaaacagattgttatgtatagatagttatcattgatgtataagtactaatcacctaaatttagaaataattttattctggatctttctctgtcgcattcttctttttcttcaacaacactatcatcaacatgagacctcagaactacaaagttgtcaccattgcacact

SEQ ID NO: 15714 - DNA, 280 bp, Glycine max
  unsure at all n locations
agcttatgacgttatgaactcaatatgcattgttattntntatcaatattcttttcattctctaatccccatacttgacatcagacgaaaaattgtgcatcctccaaaatatgtccatatgaaagaacacaacacaactaaacatgaagatactcacgagagtccatcttgaatcgaatggtgagtataatggttgcactatatgtcagtatatggtggagatataccaatgagaggaagagagatgccaatgctatacctaatgttctcatgaatgaaa

SEQ ID NO: 15715 - DNA, 237 bp, Glycine max
gaatcaaaagaattctcacactgcgtcgttctgaattctttgacaagggagaatggagacacacaataatgcatacggttgtcccttgttcttttggaaagagagatgagagacacccaatgattcttgcggttagtccttggcgaattcttttggcaaatggagaatagaatgacaagataaatagctcatgttttcaacggttagataaccagaaaacttcagaaagcttttggt

SEQ ID NO: 15716 - DNA, 270 bp, Glycine max
  unsure at all n locations
agcttgaatgaccatttgatagccatgttggacatgccaaagggtgccataagtaggtagttttgcttttgaatttttagacagaaatggataaagtagagggacaaatagtccattttgaaaaaacttattgtcaacctctttcagatatgaatatacctgattcagaagggaagaacttgcatcaatatctcaatttcaattgaaacatgggtttgattcacactccatgttctgagaaatatntaccatccaaanaaaggagagata

SEQ ID NO: 15717 - DNA, 126 bp, Glycine max
actcccccttggttttgcaatgattccttatatgagacatttgaagatctcatatttttcatatgtaaccaattgcctcataaagaataaataatttttcttactaatttatcttttatctttctc

SEQ ID NO: 15718 - DNA, 247 bp, Glycine max
  unsure at all n locations
tctgcttggttcgaggtacttacccgttgaagatcgaagaacgatgaagaacgaatgaagaacgtcgaagaacgattgacacctctgcgaaattcttcacggaaaacgttacggaaacgtttcggaagcgcctcggcttagattntcttcacggaaacaatctttccaagcaaattcgaaagagagagaagtgcctaaggggctgaaccctntccttcttcacttcctcccctatttatagcaaaat

SEQ ID NO: 15719 - DNA, 269 bp, Glycine max
  unsure at all n locations
agctntgaatgcactattcaatggagttgacaagaacatcttcagactgatcaacacttgcacagtggccaaagatgcatgggagatcctgaaaatcactcatgaaggaacctccaaagtgaagatgtccagattgcaactcttggctacaaaattcgaaaatctgaagatgaatgaggaagagtgtattcatgacttccacatgaacattcttgaaattgccaatgcttgcactgncttgggagagagggatacagatgataagctgg

SEQ ID NO: 15720 - DNA, 297 bp, Glycine max
  unsure at all n locations
agctatcttaagttttctggttttccaaactcttgaaaacaaaacttgtgttattcatctttttcattcccttctccctttgccaaaaagaattcgccaaggactaaccacctgaattctttctatgtctctcttctcccttttccaaaagaacgaaggactaactgcttgaattcttttgtgtctcccttctcccttcgcaaagaattcaaaacgacacagtctaagaattcttttgtttcccccttcacacagtttcgaaggactaactgtctgagaactntgtcttaacacatt

SEQ ID NO: 15721 - DNA, 296 bp, Glycine max
  unsure at all n locations
agctggaagcataatgtaatcaggttcttatcatcaaaataagcagctttaaggcacacatcatctaagagctaatatcaaattgaagctagttataacccctaagtttagaaaagtgcacgtatgagctttaattaagcatcatagataaagtaaattaaaacttcatggagaaaaatgggaaagaggtgaggtgaaatntataacgaaccatcctataacaaattttccaaccattattatggaacaaaaagaanatgagactttcaaaacaatattatatccttagacaaaat

SEQ ID NO: 15722 - DNA, 290 bp, Glycine max
agcttaagaatttacactctggagcttcatgatataatgaatgttgtcaagcttttaatttctccaacttctagtgttacacctctaaacccctctgttttaactgttgtggggagtggtatatgaaccgtacggtttggtttgattgttgtgaaaatcatgcaaagaggaaaatgaaactggctgtctaaatggccattgatgtcatattctaaaatgcattctgaattctgattctaaagcttcattgtgtactattcacaatgcatatactatgcctgctgtgcatt

SEQ ID NO: 15723 - DNA, 300 bp, Glycine max
  unsure at all n locations
agcttctaaactttatacaagaatgaagctctgataccacttgttagacaagtggcctcagatatcttaagaagggggggttgaattaagatattccaaattacttccccaattaaaaatctatttcactttctactcaagttataaatntccttaacaatgaacttcttaaatattaattcaaataaaaacaatttgaatataaatataaagcaataataaacaaaggagtttaagggaagagaaagtgcaaactcagaattatacctggttcggccaaacccttgtgcctacgtcaag

SEQ ID NO: 15724 - DNA, 260 bp, Glycine max
  unsure at all n locations
naagcttggttcctagatcttcctatctantttttctttgttaaatattgtgagccaaagatattttccttgtgtgtggaaaatctgcttactaatgtaattatgagttagcaggaatgttgtgccatagtttatacttcattgttcttttttttttttttttttttaaattattaagataatagtcaacaagcatgttatgggctcagattcacgaaaatgtcctccatccttgcacacanttggtgtagacactatga

SEQ ID NO: 15725 - DNA, 272 bp, Glycine max
  unsure at all n locations
agctntacatgtatatactcatcagagtagtctncactctccacataaaagaaagtaagtttagttacaattcttttccccacatcttttcctgaaactttgtatatttttcgtgtatgtttagttactaagagggaaggatcaagacctgaagctccatctgtgaaaagtattaaaatctggagacttcagtggttttcagcacaatgtctcacagacacattggatagaaaggacangttcaaattttcttggctcatacaatgctaaat

SEQ ID NO: 15726 - DNA, 282 bp, Glycine max
  unsure at all n locations
agcttatctagttntaatgttaagcctatcgaanattgtctggacctgcatacttgacattcttgatattgtcttatgcacgaggagtgtgttaagaataaagatctcccacattgcctgtgaattcagacaaaatactccttatcttgggtttaaataacatccacaaccacaattgtggctacaataccaatgtattntgactcatcacaatgcaaccgcaaccgtaattgtgatcgcatcatctgcatctttcccgaatatataggttgtttaactcac

SEQ ID NO: 15727 - DNA, 285 bp, Glycine max
  unsure at all n locations
agctttcaacttatgtcttcacaaataatcatcacacagcagaaaactaacaaatctacccatcatatctcccaaaaccccatacccacganaatcaaaggagaaagaagtccacccatacctgatatttcgaagtcccactcgtagccacgcacttcacgactccaaaaatgccctcctttcgcgatttggagcagaaatgagcaccacaggttggagctctgttggggtttcaatggagaatggatgagaagggaaaaagcacgtcatgaagatggagagctg

SEQ ID NO: 15728 - DNA, 266 bp, Glycine max
  unsure at all n locations
agcttatccgatcaaagttcttgttctgcttcctttgcattgccttgtgagaatctgcagcattctaacattgctntcacttctatgcctgtctataggtggagtcggcatatcaaacatgatcttgaagattcaaaggaatgaatacatgggatttngataattttgcaggaatgatacatagagcttttcaagtatctttttatttgcacacattntctgtttgttgtttgccaccaccaaaccacctgagaggggatgatatg

SEQ ID NO: 15729 - DNA, 76 bp, Glycine max
ttaattatttcacctacacatcaatattactaatcatgtaaatacaaactccctacacaaactatctggtcctata

SEQ ID NO: 15730 - DNA, 234 bp, Glycine max
gcatgtttctcttaatggctaagatgatgaatcggaagggtgggtcgtcatcatcatccttagtcttcgatatagtgaagtgaaaatgtgagatacccagtattacgttcacatcgcatagtgtgaaccatccatggagaatgtttgggagatgcccactctacaacataagcaaatgttgattctctgttattttttatggtttattctcttatgttgtttggttatttggtg

SEQ ID NO: 15731 - DNA, 254 bp, Glycine max
  unsure at all n locations
agcttatcatattccctttcaaccaagttgaattctcaaaatgagtcttgtttatcaaaatagagagtaccctgaagtaaagtcggtctcactatacaaaatcattgccaagagtctaaaactttacaaacttatagaacataagatttagaanaagaacaatgaatattcacaacagcttcagatggttttaccacggcaagcgggtccttaaagaactagccttggtcattacttgaataatgaaagacaac

SEQ ID NO: 15732 - DNA, 368 bp, Glycine max
agcttgaaaaccaaaaaagcacaatcaactgccacaacaaaatgaaaccccacattaccattcttattgatacttttatatggttagccaagtggacaaaatgacccaataatttgataagaaccttcgaacaatgtcaccgcactgattaagaacttactaagaagagcaacaaactaaggtagagctcataccttgttaactggaagcgtagaaagctttgagctttgagcaccctcgactattccaagagcagtgtagggttttttcgacccacacagttccaacagcagtgtagggttttcttcgacttttcttcgataggaggttctgtgggttctatccagcgagttttgatagtatcgaaa

SEQ ID NO: 15733 - DNA, 406 bp, Glycine max
tatttgatgcatcatgactcttgactgcacagttccacattactcaccaagaccacacagattattggcatccacattaatgtggttgacggtgcatgtgagtgaacaatgtgcagttgcacacatcatagacaaatcttcattgcatcatgactcttgaccgcactataaagcatggttgtggtttaataaagcatcatattattaaagaaaatttaaaataacaattgaaaagcatggaacaatgacaaatacatgataaagactaacaaattattaaaatcaatacaacaaagttgttaaattattcattataatttcagggaattctccagcttctgctctatctccacccaacttaggtcattaacataagaaggtgatgatgaattatgaatatcaattt

SEQ ID NO: 15734 - DNA, 354 bp, Glycine max
tgcttgaagacaagactatacgaggtatcttccttgggtatagcaatatctccaagggctaccgtgtctacaacttgcaaactaagaaactcgtcatcagtcgagatgttgaagtttatgagtatgcttcttggaattgggatgaagaaaaagtggagaagaatgttcttatacctgctcaactacctcaagaagaagctgaggaagaagacccaggtgaaccaccttcacctccaccacaacaacaagatcaagaactatcatcaccagagtctactccaagacgagtaagatctttggtggacatatatgaaacctgtaacttggccatacttgaacttggaagctttgaag

SEQ ID NO: 15735 - DNA, 406 bp, Glycine max
tcatctactatatccctttttttacataaatatcttgcaaataaaatggaatatgaatttatcaaagacctcaacacagatcatgatgattggtttctaaaagtgtgtattgttcgattgtggaatatttataacaagaaagatgagcaacacccaatgttattggaaatgatgttgctagatgaaaatgtaactaataacgaatgtcgaattgctcaaaaacaaataaaattaggaaattttgtagcacatgattaacctcagtcgaactcaaaaatatgattcaatatggttcctacgttcattcacttataaacacaaagggggaattttatcgaatagtttgtgagcgattacaaaggaatgcgaaaacacaaaaacaaaattcaagaaacaaaacaaaata

SEQ ID NO: 15736 - DNA, 351 bp, Glycine max
agctatggttttcggaaatctacactccctgttgtcttttggggaccagtttctcatgaacaggggcttgaccaggaatcatttgtatgggttggatatggaattcaggttgttcctggtttgatggtgctttggtggatgatggagatgatggtacagagggtgaaccaggagctgaagtttcttttggtgaagtagccatggagaagcacagcttttggagtggtttcgtgaatatctgagaagtgttgaggaatgctgatgataaccagattgccactaaaatatgagtttgaatgatgaatgtagatggacgtgtgaagcaacggtcgaatttgtgtttgcccagta

SEQ ID NO: 15737 - DNA, 409 bp, Glycine max
ctcagcttcacaagcaagcttccatcactttctctccctctccctccactcatcttctcctaccttcaagctcttacccatggcttcctatgttggtgagctttttcttgactcatcttttccttgaagtggcgtctccaatcatctttcttccatctccattctgctaccgttaaacttcaagaagcaagggactccattgatgaagatgatccaaggcctatatgctccacattgagttacattacgaaaaatacttgtttgaaaatgtaaacaattacaaaacatattatatatatttatatattttaaattacacacacacacacatattcaagttttacttaaactaaaaaatacttaaataatgtatgtggttactagaatatatttacaaactaactaattc

SEQ ID NO: 15738 - DNA, 357 bp, Glycine max
agctttaaagtgactcacatacttcttaatcgtttgattatgaagactttttcttacaagtgaattgtgtctcttgagttgcagaagaacacctccttagtcttgtaaggttttttgtggaaaagattaatcaaattgtaaatctctttactcatttttctatgtatggctttacacgtcttttggttatgcatgaatcacttagggcatgctagaatatggttttctagtttgggctaagagtaaggttttcttaagcttgtattcacatatgaccctagtgttgggtgatgtagctccctttggagcttgtatgccttggatcttcttcatcgatggagtcctttgcttcttgaa

SEQ ID NO: 15739 - DNA, 399 bp, Glycine max
tgaagtgaaaattacaacaaatgtgcttaaattggaattggagggtccaaattgaagttcttttatggagaagataaaaaaaattgcaaagaaaaaatcagctttagccaaacagcttttggcataaactgaatttatacaaaagtgcaaaactgcaaagctgcaatatctctttaagcccaaaattttgacttaaataaaccctcgcttaagttgagatttttaggattgtataaatagatattcacgctaatttttaaggacacatgttcctcactttttaaaaacatctcctttattaaagttcttctccaactctcttcttccattgatcttccacctttcttgcttttggatgctactcatggagatgggtagctaagtccttcgttgttggga

SEQ ID NO: 15740 - DNA, 367 bp, Glycine max
  unsure at all n locations
agtcttgtagaacgcctggacatgatatatgtcagggtgttggtttggccagcggttcagggataaaggaatgtcccacattatttccatgacatgcgtgcaacaatgatgattcaaaaattttatgcaaaactagtcatgcatgcacctatgtggacactcaagcatcaagttttgtggtcatgtgatactaatgcttaagattaatttttcctatttaagtcaacccagtgtttccaaaacatgctcttttataaattcatgcattcatccgagtccattttgggtgttcgggaaaatnttcacagcattcacccttcaagtgtatacacattttgtcaacaaaacccttttgtgttttgatcgg

SEQ ID NO: 15741 - DNA, 400 bp, Glycine max
tcaagtgctaatataaagtatatatgttggcatttgataaatactattaccgatagtgatggccaaagaattaccactacatcccacaatactatttttattatcataaaacatgcatgctagatgtcgtaacctaccctacaaccggacgatgaaaggaaataagacaaaagcacgttcatctcctatggagaaaacgagtgagagtcgccaccaacgtttatttgaggaaaatgttagaaaaatcaaaaagaggtctacgaatttgaaaagaagggttcaagagttgtttaatcgagtgtgcaataaaaataacgtgactacaaaattaattatttttcccaagaacggtgaatttcttttcttttaatatattatttttatttatttaatatttttt

SEQ ID NO: 15742 - DNA, 342 bp, Glycine max
gtatctatcgcttgaacatagaactgccacatctcccatcataatgatgcataatctataaccaaatactcttactaagggggtcattcataagcatctactatggcacttctagaatgcgactgattataatattctctagaacagcatcgtatctggcttctgatcctgatctgttactggtaacgttgatatcttcagcataccaacaacgtgtactataccatcaaaaagtatgggtttttagacctggctgcttctgcattacatgcaggtgtagaaataaattcatatgaaccagcgccctaccggaagctatcagttttccaatacctctgatat

SEQ ID NO: 15743 - DNA, 366 bp, Glycine max
gttgatgcgcctttcgatccccaccaaagtctatcccacatacgttgaagatcgtcctttagagttgtcggaagcacgtatatactcatggtgtaatgaaggaattgatcgagcacaagatgtaatgagaacttccttaccagctgtgggaagatacttccccaatctgtgatatgatgcatttccaaattcgatcctctacataattggaaattgctttctttgctctgcacatgataaatgagaggcccaagtattttccagaccctatgattgtatagacaccggaacataacatgattgagtgcctcaaagattgctgagtattgttgctacacaatatatatgacgtgtctaaggtgatca

SEQ ID NO: 15744 - DNA, 318 bp, Glycine max
atcttcatgctctcaaatatgacaaactatttgtctgcccttctctaaaattgctgatattgatgcacctgctcacgagatattatagtgtaatgctgcactggccacttcgcgggattggggtagtattatcatacctctatgtaactttcttcaacatcacctaaaatgacttgaagaagctccattgactgtggactttctggtgaaggatcaaaaatgaaacattaccgaatgtataaatgataactccgttccatgttatacttcataccaaaatcagttaccctattactaaatatactctggattctcttt

SEQ ID NO: 15745 - DNA, 260 bp, Glycine max
caacacagaacatgaaaacggcgggggcgaaacgagaaccgctcgatcgcgcaacatttacgacaagaaagaggagcaacccccaacgttattgcacatgatgtggaccgacgaaaacgtcgcaaacaaacaaggtctgatcgcacacagccaaatgaaagcaggaaatttggccgcgcatgattagcctcaggaggactccacaataggagacacaatggttggaacccccattcacacatacacacaaaaggggaatc

SEQ ID NO: 15746 - DNA, 101 bp, Glycine max
taaactaaactctgtaccccaggtgtcaaggaactgatttggactatgtagacagtaacctcgtaaacattaagcatctgtgtctcccacaatggctcaaa

SEQ ID NO: 15747 - DNA, 364 bp, Glycine max
ttagatgttaggtgatgcaatcctactttgcaaggtcattggatagaaaactccaagttgattgggccttagattcaagatagagcccttaggtacttataaccttatggtaaatttctggcccatggtctaagtatgaacccacttatgtttgcaaatattatataaaagcttcattattcttgggccttgtatttacggctccctaatgtatgtacggtaccctaaatatataagattcttcagcccttgtgtttaagggcacctaaactagtttttgtattaggggtatgttagtaattccacatgcactaagtggatatttgatgtgtgtggaatgaaattaaattaattgagttggttc

SEQ ID NO: 15748 - DNA, 314 bp, Glycine max
atctttcagcaaattcaaacgacaataacttttttactcagatgtttgattgagtcccgtgatatatcgagacgatcaacattgaattttgaggttccgagctatttcaaacgataataactttttactcagacgtttgattgagtcccgtaatatatctagacgctcgagattcaattctgaacctcatagcaaattgaaacgagaataagtttttacttggatgtctgatggactcccgtaatatatcgagacgctgtaaattgaatgttgaagctccgaccaattcaaacgacaatactttttactcggag

SEQ ID NO: 15749 - DNA, 384 bp, Glycine max
tcaacattcaatttcgagggtctcgatatattactgtactcaatcggacatccgagaaaaaagttattgtcatttgtatttgctcagagcatcaacattcaatttcgagcgtgtcgatatattacgggactcaatcggacatccgagtaaaaagttattgtcgtttgaatttgctcagagcttccgtattcaatttcaagcgtctcgatatattacaggactcaatcagacatccgagtaaaaagttattgtcgtttgaatttgctcagagctttgggattcaatttcgagcgtgtcaatatattacaggactcaatcagacattcgagtaaaaagttattgtcgtttgaacttgctcagagcttccgcattcaatttcgagcg

SEQ ID NO: 15750 - DNA, 316 bp, Glycine max
agctttcgtaagtgaaatcaggtgcagccatttcccttagagtcctctcacgaagtggaggttgtgccatgttctcaaaatgtgcaaaatcagaatgctcaaaatcagaatgctcaaaattataatgctcaagatcaggatgttcaaaatcaccaataacagaatgcacagattcaccagttatggaatgctcagaatgatcaaaaggtataaaatgatgcctaactaatctatgaaatgtcctatctatctcaagatcaaaagggttgtagtcagatggattgcctttagtcatacactacattcagcatgcaca

SEQ ID NO: 15751 - DNA, 405 bp, Glycine max
gaccttagaatctcagctcacatcagacccttccgggtgctggaactacttcacatggacttgatggggcctatgcaagttgaaagccttggaggaaagaggtatgcctatgtgggtgtggatgatttctccagatttacctgggtcaactttatcagagagaaatcagacacctttgcaactgtcaagcacttccacatctttggaagtccatgttacattttggcagatagagagcaaaggagaaagatggatcccaagagtgatgcaggaatattcctgggatactctacaaacagcagagcatatagagtattcaattccagaaccagaacagtgatggaatccatcaatgtggttgttgatgatctgtctccagcaagaaagaaggatgtcgaagaagat

SEQ ID NO: 15752 - DNA, 126 bp, Glycine max
ttcttgggcagatgatagcagtcacccgtcttatgcataacagccctattgcatcgttgatcctttaataggttggggttattacttgccttctatatacaaaaacaagccgacatggcaacatat

SEQ ID NO: 15753 - DNA, 281 bp, Glycine max
  unsure at all n locations
tgtcaccccatcaaagacttagtcttgtatgcatattctagtattatcagtatgcactaatcaacatttgaaaatggctgcgngtatcccacggtccgtattgaatcccacaacacactaatagtgactggttatcaattgaaatgagtgtttagctataaatacaacatatatcttttccagcgagctgatgtttttgtttacacgtgacgaagtcggtgttcaagtactaatgaccagtacttttataggagactatacagttgtcgtcataattataa

SEQ ID NO: 15754 - DNA, 479 bp, Glycine max
  unsure at all n locations
ntagaggccttnatagaactgtggcgctttgattgcattcgactcaccatangcgcgaatnacacccctccgtgcccgcgtgactccttttttagtctactctgcatgcatgcatatcttaagctatccgagatctgacgtctatagacagttgttctgatgcgtcaatcgtttataccgactcactgattatacgacattcatgactaactcgttacatcgatggcgtagctaaagccaatagtgtgcggataagatgcgaacctaatatntcagtatgctgatcattagcattggtgcacttcctaaccaagtgagaaactcttttagaccatctagcattttgttattttcatgctgatcacaataaaagcgctgcttgatgcaagcattctaacattaaaaattttagcatgacggattgtgtcatatatataacacccttctgaacctttctacctacttaataatggggttcg

SEQ ID NO: 15755 - DNA, 515 bp, Glycine max
  unsure at all n locations
ccctaccatcncactctagctacatgattaggttatcgaaaatccgacaaaacggtcattgtccctaaccgccacaacgaaactganccttgaaactgatacctcgctatcaggaccttacaatctcagctagatctccatcaacttttgacttgtgaactttgaaccaaaaactctggacatactgctgggatcgcttccgtggcataagattcccatcaggtattaagaaaatcgtgaagaaatgaatctacaaaataatctcccatctatgtctatacacagttaatgaaatttgcgtatgagaaacaggacattatttcgttcaatatataaaatggataccagcacgcatcgcgcgaacacattgtagcacactatctgtccccaaatattcaggatctagatattagcgataaaattccataaaaagaacgcttcataagcttaatgcataataatgattaactgagtctaataataaaaccgtaacacatccagatagtctctaaacg

SEQ ID NO: 15756 - DNA, 423 bp, Glycine max
  unsure at all n locations
cttgatcctttgancctgaggcattgaaanccatgcgangccgctcacggacgccctcccgggtacccgaggaatttgtanggggcacgctttgcaagctttgtcggggagaacaatctcgcacatatctacgtgttgagacacctctcgatcgataaaggctacatgacacgcgcgtttctctctctctcccatagccgtacggtcgacaattccagcatttttgacactgtaggtatattccattgtcagctatagcggcggctgctcatacaggtttaaggacggacggctaccagcgtacctacctccatacaagtggatacatggtgtgaataacatactagaggggacactgccggcgaaaccccgcctaactccggctctacctcaatggcctcatactacgccctgagcattacg

SEQ ID NO: 15757 - DNA, 365 bp, Glycine max
tttcttttcatttgagattcaacattttaaatttatattggtggtggattgcagtatgactatcaggtgacacagtaatattaattaatagataaaggatgcaaatttaagtattaatgagatactaacctttatttacataaataataacaagtaatatgaaacttttgaaaaactaaaagattaaaatataaattttaaaaatattaataattaaaataaattgttttatacatataggtttaaaatgaaaactttagaaaacataaaaaaattaaaatgaggattttaaaaacataaaagatctaaaaaaactttgaaaacttaatacatctaaattaaaacaacactaactatgatggatc

SEQ ID NO: 15758 - DNA, 404 bp, Glycine max
tatccttgatggaaataaattatttatcatagttgtggatttcttgtggattccgaagccttatctgttggtaaggctgctgttggaaacttattaggtggaatcggctacttctatggccagtcaaagattgctctttcaagaatccttaatgtaagttactttattttgttttttatagtccttattgaagtgtatgccaccccttaatagtgcataacttgacatgtgattatcataaatgtgaaaactttgtttcttgtgtttgattttctgttgataaagaggagattttagagacgagaaaaagaaatacgagaacagaggattgctaaccaacaaagaggattctagccaaattaaaaatttcttcagttgcatccataaatgaattaatgcttact

SEQ ID NO: 15759 - DNA, 54 bp, Glycine max
  unsure at all n locations
tcatccgcttattatcacttattcangcgttaacaccatgcgtttatgtcacct

SEQ ID NO: 15760 - DNA, 135 bp, Glycine max
  unsure at all n locations
gtgcggtatttcacaccgcatatggtgcactctcagtacaatctgctctgatgccgcatagttaagccagccccgacacccgccaacacccgctgacgcgaaccccttgcggncgcatcaaatataactacgtan

SEQ ID NO: 15761 - DNA, 361 bp, Glycine max
agcttgttgcttatgttgaaaagcacgaccacggaaactggcattcagtgcctgccaaagcgggtaataaaacttttttgtattcctttttactcaatctatgaattgaggttttaaattgcggttgcaaatacattttagatttgtgatgatccttgatattgtgggacattgtagacaaatgcagtcgatcgataaggttgcaattgtagttgcaatgtgaatgcagatattcctaattttgtttgttacatacatttatatctaggtcttcaaagatgtggaaagagttgcatgctgaggtggatcaattacctcaagccagatataaaaagaggaaactttatcatggatgaagacc

SEQ ID NO: 15762 - DNA, 401 bp, Glycine max
tgggtgatgggcggccgaatcaccttgctaggtgtgacggggactccgaacgactggcagagtcctgtgatcaaggcgggaaatcccagggccctgttggacttatccgggtccagagggtgcctggtaggcgccatacctgcaaatatatagatggcatcagtgattagctgagccacgtgaatgctcatccgtgtcaggatggcgtacaccagctgacacttcggcagggggaggtcagaattatgatcgctgggcaggatgttgctaagcagcaaagtcatccatatctgagtcagggtggtcatgttggtgcgcatgatccgcacccgtcttccggcagcagtccgggcaaaatcttgccccggtatacatagcaactgggtgatggcctcctcatc

SEQ ID NO: 15763 - DNA, 349 bp, Glycine max
atcttgttgcttatgttgaaaagcactaccacggaaactggcattcagtgcctgacaaagcgggtaataaaacttttttgtattcctttttactcaatctatgaattgaggttttaaattgcggttgcaaatacattctagatttgtgatgatccttgatattgtgggacattgtacacaaatgcagtcgatcgataaagtagcaattgtagctgcaatgtgaatgcacatattcctaattgtgcttgccacatacatttatatctagggctgtaaagatgtggaaagagttgcatgctgaggtggatcaattacctcaagccagatatataaagacgaaacttcatca

SEQ ID NO: 15764 - DNA, 400 bp, Glycine max
tgggtgatgggcggccgaatcaccttgctaggtgttacggggttgccgatcgactggcagagtcctgtgatcaaggcgggaaatcccagggccctgttggacttatccgggtccagagggtgcctggtaggcgccatacctgcaaatatatagatggcatcagtgattagctgagccacgtgaatgctcatccgtgtcaggatggcgtacaccagctgacacttcggcagggggaggtcagaattatgatcgctgggcaggatgttgctaagcagcaaagtcatccatatctgagtcagggtggtcatgttggtgcgcatgatccgcacccgtctcccggcagcagtccgggcaaaatcttgccccggtatacatagcaactgggtgatggcctcctcat

SEQ ID NO: 15765 - DNA, 316 bp, Glycine max
  unsure at all n locations
agcttgtaggattatggggtacccatcacatgtggtactaagtggcggtcgggcgatggtgcacaacaagttttccacatccacaaatcgcgcataaacccaccatcccctgttgcccacctccaactgagctcacgtactcccacgtagcccatatcctcgtttctctcaacaccgggtccccatcaatcctcccaagcttncccaacatccaagtaaaacaacattccaacagcacaaactatcacagccaagataacagagcataggcagataactctgccaaaacaccaaccaaaatcacagcttttctcac

SEQ ID NO: 15766 - DNA, 400 bp, Glycine max
tgcttgtggagcttctatggaggctgtatctttgtgtcttaatgaggtcctttaatggtgattttccaccatggagatgcagcggaagacaaaggagaagaggtaagaggcggcgccatccactagggaataagccatggaagaagaagcttcaccaccaagatgagccttggataagaagcttggagaggatgcttcaatggaggaaaagaaagaaggagagaaagagagaggggggagcatgaaattgaaggaagaaaaagggagagaagttgaactttgagttgtgtctcacaagactttcattcatcaaagttacaaaaagtgttacacatgcttctatttatagactaggtagcttccttgagaagctttctttaaaaaacttccttgagaagct

SEQ ID NO: 15767 - DNA, 352 bp, Glycine max
cttcaacttctgaccacttccagggtgctggaactacttcacatggatttgatggggcctatgctagttgaaagccttggaggaaagaggtatgcctatgttgttgtggatgatttctccagatttacctgggtaaactttatcagagagaaatcagaaacctttgaagtattcaaagagttgagtctaagacttcaaagagagaaagactgtgtcatcaagagaatcaagagtgaccatggcatagaatttgaaaacagcaggttcactgaattctgcacatctgaaggcatcactcatgagttctctgcagccattacaccacaacagaatgggatagttgagaggaaaa

SEQ ID NO: 15768 - DNA, 398 bp, Glycine max
taaacattcaatttcgaggctctcgatatattactttacttaatcaagcatcccaaaaaaaagttattgtcgtttgaatttgctcacagattcaacattcaatttcgagcgtctcgatatattacgggactcaatcaaacatccgagtaaaaagttattgtcgtttgaattggctccgagcttcaacattcaatttcgagcgtctcgatatgttacgagactcaatcagacatccgagtaaaaagctattgtcgtttgaatttgctcagagattcaacattgaatttcgagggtctcgatatcttacgggactcaatcagacatccgagtgaatagttattgtcgtttgaattggctcagagcttcaacattcaatttcgagggtctcgatatattac

SEQ ID NO: 15769 - DNA, 155 bp, Glycine max
cgttatgacgttctcacttcctctggccataagaatcggatgctggataagcgcctgcaccggtgcattatgactgggctgactttcctgatatgagcgatgcgctcactgccctgtattcctgtccggaatcctgcgggcctgctgcgaagtga

SEQ ID NO: 15770 - DNA, 336 bp, Glycine max
tgtctgttttatgccttgacttccttatgtcgttgtgcctacctcagggctgtatcatacgctgaagaacctaccaacgtgcaccaagccaggaaacatcaaagcttgagggaagcagtgacctgctaaataaaggccttagagtcaggtcatcctcgctacgttgtccccactcacccatgagctcgtctaaggggttgatactgggtctattcaagcaagcggtcctctgactgtagagtcttctattacagaagcctgactcgatgcctagaggctctttgggtagagagaatcaactacgggggaactttctctcttgtaataaaatgacca

SEQ ID NO: 15771 - DNA, 238 bp, Glycine max
tagcttatccttatggcctgactccggacttcacgccccgtgccaccccggaagaatataagccaagcccctactttcgaggggcaactcccaccttatgaagactatgccgggcgagacgatggggaaagagaatcccatcttggccccctgctgcacctgaaagatccgtcctcgcatgaactaccccaaccgaacatatgccgtataccccggcctaaccacacccgtaaaagaa

SEQ ID NO: 15772 - DNA, 389 bp, Glycine max
  unsure at all n locations
tctagattagtgtaccagatgaccgcggctccagccaagctatcttggaagaagtgcatcaacaacttttcatccctagaatgcacccccatcttgtgacaatacattttgagatggttcttaggacaagtcatccctttgtacctgtcgaaatcaggtaccttgaattttggggggatgacaacgtccggtactgagcaaagatcctccatgtccgcgaatggatagtcgccaaagccttcaacagctctcaatctctcttcgatgagatcgagtttccttttttcttctgctgccaggggtggcccttctacggacaagaatattggttgtgctgggaggtttcgaggttctcccgtgaggttgggctgangtaatgtgttgggtgt

SEQ ID NO: 15773 - DNA, 352 bp, Glycine max
  unsure at all n locations
ctttatgcaagtcaattttcaggaggtatctcggagaggatcttttccgggcatatttgcgcaaaatctcttgaactaggaagatgttgtccatcatctttctgttcttaatgaaaccagtttgagtttctccaataatagtctcaagcactagggctatgcgattgaccaaaattttagacacaatcttgtataacaaattacagcaagatatgggtctaaaatggttaacctgngaggcctgatcatgcttatgaataagcgcaataatagcatggttgagctgctttagaatttttctagttgtatagaattcattaaccgctgcaaatatatcatcaccaatgatatt

SEQ ID NO: 15774 - DNA, 391 bp, Glycine max
tcaggttgctcattgattccaattgctgcaaatttgacagagatctgtatggtgatttgcagaagaacatagaccacagactcttgcaataggtgtagatttatgattcatggcaagctgagttactaggttgaccaaggcatcaagttttccttcaagctttttattttcagtagatgaagatgaattcgtggccacctcatggactcctctaagaacaataacatcatttcttgcactaaattgttgggagttggaagccatcttctcaatcaaattcctagcttcagcaagggtcatatcaccaagagctccaccactggtagcatcaatcatactcctctctatgttactaagtgcctcatagaaatattgaagaaggagttgctca

SEQ ID NO: 15775 - DNA, 143 bp, Glycine max
tttctccttacgcatctgtgcggtatttcacaccgcatatggtgcactctcagtacaatctgctctgatgccgcatagttaagccagccccgacacccgccaacacccgctgacgcgaaccccttgcggtcggctatatatct

SEQ ID NO: 15776 - DNA, 480 bp, Glycine max
cccccacaactattagaacttttaattgcatctgcaaatcaattcaaaagcgctactgaacttaaactggccatgagccttgaccacctaggccaattttactccggccccgggttctctttagacacctgcagcttgcatctctggaaacaatgtaccctggggctgaggataacatcttctttttgagatccatctaaatgcttgcaagactcagtgaattactatcttccagtagccgcaatggaagacaacattccggtatcaaactctgtgtcacttgcagaaactgtgcccatcatggcccgggaagaacatgatgaatctctagcatgcacttaacatgtatctttagggtaagctccccgaataccacctgcattcccttggttaatttgaaacgtcccttgctttattgctgggaaattttactgaaagaaaaatcaagttttaggaatacttgctttaaatatttttggt

SEQ ID NO: 15777 - DNA, 387 bp, Glycine max
tcctgtaagcttcacagtcaagcagtcaagcttttttataaattctcatttaataaatgtttatcgaataaggcaagtttggataaacttctcaacaattacttataggagaagaaaataaaatgaattgaacttcacttctttcataagttaaaatcaacttgtgcacttcgacttctataaaagttctctcatccgacttctccaaaaagctgagatgcattatgtttattattttcttctcttacatgctacaagggcttattaagaagtttatctaaactgacccaaaggatttaattaagttatttccttctcgaccttcttcttgcggtgctagaatttcaattctggaagctctgtttgatttgaaatagcataaggatg

SEQ ID NO: 15778 - DNA, 368 bp, Glycine max
  unsure at all n locations
agcttcatgatgaatcaagattgattcaaagagtttcgatgataacaaagatgatgacaaaaagctcaaaagtcaagaacacttcatgttaacaaagatgatgacttcaagaatcaaagaatgaattcaagattgaatcaaaaacacttcaaggatcaaaaggaaatttgatttcaagaatcaagaatcaagtttcaagattcaagttccaagaatcaagatcaagattcaagactcaagattcaagaatcaagagaagattcaatcaagataagtattaaaaagttttttcaaaatctgtgtagcacattaatttttctcanaaaccttttaccaaagagtntntactctctggtaatcgattacca

SEQ ID NO: 15779 - DNA, 406 bp, Glycine max
tgtaagagataccaaacataattggaatgtgctacctcattgccattctttagttcaccttaaaaaaatattagatagtgcataatgacatttgttaaataacaagtcaaatgtacaccaatgcaacttgaaaaaatttaaataataattatacacaaaaaagcattgtctaggtacgtaccattccgaagcattttttttcttcaaatcttttaattggattaatatattttgccttttatgtattaattgaagattagctgagctgaagactaaaatctatatattacgaaatagcaaaacataaaaggtgaaaatattgataattaattttgtcaactatcatatatcaatcatgcatgctatgatccatggattcatcactaaaccagccttgtccaagttg

SEQ ID NO: 15780 - DNA, 367 bp, Glycine max
agcttctcggctcatgctgggaacgcctctagttcaacacccgtgcagcctaaagcacccacccagagggaagctccccaagttccaactccaaacacgactcgaccggccggtaattccaacacgacaaggaacttccctccgaggccattgccggaattcaccccgctcccaatgacgtacgaagatcttctaccatccctcatcgccaatcatttggccgtggtaactcccggaagggtcctcgaaccccctttcccgaagtggtatgaccctaatgcaacttgcaagtaccatgggggtgtcccggggcattccgtcgaaaaatgcttggcccttaaataaaaggtccaacatttaatggatg

SEQ ID NO: 15781 - DNA, 431 bp, Glycine max
agcttgcgagttcaattacgagtgcctgtatattgatgcgcctgaatcggacatacgagggaaaagttatgaccatttgaatttctcgagagcttcctatgtttaatttggagcgtctcgatatattatacgcctgaatcgaacctcagcgttgaaagttatgaccatttgaatttctttagagcatccgatgttcattttcgagcgtctctatatgtgatgaaccttaatcggacctccgtgtgaaaagttatgaccatttgaatttctagagagcttacgttgttcaatttcgagcgtctcgacatattatgcgcccgaatcggacatccctgggaaacgctatgactatttgaatttctcgagagcttccgttgtgcaatttcgagcgtttgaacatattgtgcgcccgattcggacatccaggggaa

SEQ ID NO: 15782 - DNA, 362 bp, Glycine max
  unsure at all n locations
agctttcaacaaatgtcttcacaaataatcatcacacagcagaaaactaacaaaactacccatcatatctcccaaaaccccatacccacgaaaatcaaaggggaaagaagtccacccaaacctgaaatttcgaagtcccactcgtagccatgcacttcacgaccccgaaaatgccctcctttcgcgatttggggcaaaaatgatggccaaaggttgaagctttgcttggagcttcaatggaaaatgaagaagaagaaaatggcaacgtgagggagagagagagctgtctgaaaagctntctggtcttaaataaaagggttatctctttttctaattatttatttaagcaatgccacatgtct

SEQ ID NO: 15783 - DNA, 396 bp, Glycine max
tccatcaagaaataggagaaaataatggcacatcacacgctgaatgaattaattcaaaaagaagaaacatatagtaagattaatgtacttgttgcgataaagacttgaccagatgtgtcggccaagcaaggaaggtctaaattgcctaccccacttaggaaacctcatgagtgggtacaggaactgaagcatctgcatctataacctcctccacacttacctttacttggccaggcaacaaaggagtgttatgaacaatagtggatccctcataaactctccccagggcaaccaggcgggcaggatctacttcgatgtacaagccgcacctatctgagtcacctatctcaggatcgtttcctgagggatcaacacaactcccctttgtgcttactc

SEQ ID NO: 15784 - DNA, 155 bp, Glycine max
tatcttgtggagtatacatatttttcaaacatgggctatgttggaatgtgaccactttgagttccctggaagcggcactatgctatctgagggcggaaagcttatgttcatgctctaaaacaacttcttccagtgcctttgtaatctggggacgt

SEQ ID NO: 15785 - DNA, 400 bp, Glycine max
tcctagctttgaacaatcttaattaatgttagtgactttaaatggaccttgcaagtttgctgtcctatattttttgattgacgaatgtagaaagtagaatgtaataatgctgattccgtcctcacgtacgttttctctcttgcgtattgactattgatgatatatatgacagaatgacacaaattaaaatggcttcatggaacgtacgatgccaactaaaaagttgtgaatcagttcactatgcagaaggcatatcttcctcggccctcggaacaaaagtattagactattaccatattttatttttgcaattcctttatgtgttatgtatttttcattgcttaattaatttatcgtcaagtgtgtgtatatatagagttggcttgtgaggccatccaca

SEQ ID NO: 15786 - DNA, 366 bp, Glycine max
  unsure at all n locations
agcttgttcttttagtaattataattaatactacctccatccctaaatacaagactcttctttgagatttgtttgaactgtaagcttgcattaattatctttatactaaaatacccttaattactttacaataactgcattctcattcttataaggattggagaagactaacacacattaattaggcagaattgtatttgatacggtgatatgaaatatataagatgcaatactggtaagatacatatttagaaatgtataaaaattcataaaatataataaatagttagttgcaattctaaaaatgcaaattcaaaacatacttctgagacanttctaacaagaaaaagtttatcataaattact

SEQ ID NO: 15787 - DNA, 402 bp, Glycine max
tcacgtcatcacctccgccgttcggaaatggcgcctttacctgttaggatacccatttgtaatcttcacatatcacaagagtataagggacctcatgccgcaagtgattcagactccaaaatagcaaacatatttatctaagttgtttggctatgattatacgatcaaatacaagtctggcacctctaacatcgttgccgacgctgtatccagaattacggccatagaatccattcagttatttgcgttatgcatgccacacttcatattcatggaccaactttgccaatcattctttaccaatcctgattatgtttaattgcgacaacaaatccaacaaaccccagaagcccatcatggtttcacaatccatcaagaactcattttcgataagggcaaagt

SEQ ID NO: 15788 - DNA, 348 bp, Glycine max
  unsure at all n locations
atcttctcgagaaattcgaatggttataacttttcacacaaatgtccgattcggggacataactcatctagacgctcgaaattgaacaacgcaagctctcgagaaattccaatggtcataacatttcgcacaaatgtccaattctgggacataatatatcaagacgctcgaaaatgtattacggaagctcttgggaaattcaaatggccataatttttcacatggatgtccgatttgggaaaataatatatcgagatgctcntaattgaacaacgaaagctatcgagaaatccgaatggtccgaacttttcgcacggatgtccgattcggggacataactcatctaga

SEQ ID NO: 15789 - DNA, 574 bp, Glycine max
  unsure at all n locations
ccgccaccacncactccnactcttntcantactanattaatgtccaggaactcgagttaagcaatgtacatctcancncancccaagnacgccagcaaaattgaaccctttgattcgctgagacaccatgngacactgtagcatgctcgagctacacagacatagatacgagaacgtggctcctcttcacttgcatcattcatttagatacacacttgaccaataatattaggagaattgcataatagcacaatggctagatagacacgtgcaaatggacgccacctgcaactagccacaactgccataatatttatacacattaaagcttccaataggcacatgccattgctaaccattgggcccttacaacaacttgaactagaccaacatatgccgccttatatgaataaaccgaagaatatctgatggtgaacactctatactatgattggcccattatttacacatactaggcgctcttatagttagacaatgtggtgccatataatatctatatcatgcgtgccatgatccatggacaaccctgtaattctctcctggacacttgggc

SEQ ID NO: 15790 - DNA, 312 bp, Glycine max
agctttgctatgtataacaatctcacctctatactgggaggaaccagtggtctcttccctttcaactctctagttaagaagtccagtttcttttcttcatcccattcactgtacgtgcccatatccaaataccttgtaattacatcaatggtttcagcatgtctgcttgattcctgtcacactgctagtttcaggccacaactgattatccaaacaataatgaacaaaaaactttgaaacatacctgacgcaagtcaagcttcattaacaccatgccaaaagtagcaactcttcgatcagatcagctagtcg

SEQ ID NO: 15791 - DNA, 397 bp, Glycine max
cggacgaatccgaacctaagttgctgatgtgtatccactaaaaaccagacactatcctactttgtctttccctttctctctctctctctctctctctctctctaatccaacgatcctagcctctcttacttctcgatctctacccttcgtcgtctctatttctactcggaacccttcttgcccttgcccttcctcctctcacctccatgacaacctcgatgacaagttgttcgccttcccctctttctttctccctccaaatctaggactccgacaatgacttcctcctcatcaagtcggaccttccacctcctctattggctcaaccctgacactgtgcaccactgtctcttcctccgatggatgcctctacatcgacaaccaggtttgcgagggt

SEQ ID NO: 15792 - DNA, 296 bp, Glycine max
ttctttaaaaacaaatcctttcttttacttatcattctcctcatgttgaatcaatctcatcaattccatctcatgtacctgtaactgtccaaacaaagtacaaagagacatgttagatagaactcgtgattcacttatggctgttaccctgggttgtgatttcctgcttaaacatctcacaactttattgataagatcttcattcggaaatatttgctctaaagatgcatgatgattaattatgtgtgtgaaccttttttgcatgtactggatgctattgtcataacatgcccttt

SEQ ID NO: 15793 - DNA, 380 bp, Glycine max
tctaaggaggtgagcttagttattataggggtgtgtgtagctaagctttagcttcttaaggaagttttctcaagaaagcttttcaaggaagctacctagtccataaatagaagcatgtgtaacacttgttgtaactttgatgaatgaaagtcttatgagacacacttcaaagttccacttctctccctcttttattccttcaatttcgtgctccccccttctctctttcttttcctccattaaagcatcctttagtgaaagtgaagaagcaaaaggggaagaatctagtgaagaaatctacccccaagaagaaggacaacctttaatggttaagggggagtgtaaggaggtaagtgtctcctccaagagactagctaaga

SEQ ID NO: 15794 - DNA, 227 bp, Glycine max
acaacattcaagcaaaacaacattcaaacagcacaagctattacagccaagccaaacaaggcaaaggcagaaaactctgcccaaaacaccaaccaaatcacagcttttctcacttaaagaccccagtaacaatttcttcgatccaattcgttaaccggtggatcgacttcaaaattttactggaagtctatagtacataagcctacattgtgaaccgttggatctac

SEQ ID NO: 15795 - DNA, 394 bp, Glycine max
ttctgcaagacatacaaaaaaatatgggatctagctatgatagaagtctctattgaggccattgtagcccttacccagtattacgatcaaccgttaaggtgcttcaagtttggggactttcagctagtaccaaccgtggaagagtttgaagagatcttgggatgcccgctaggaggaagaaagccataccttttttctaggttctatccctcctggcgagaatagccaaggtagtcaaaatctcggcacaagaattggaccgagtaaagcaaaatagaaatggggtggtcagaataccgaggaagcacttggaggagaaagcgaaggctttagcggatcaaggtaaatgggctttgttcattgacatcttggagctattggtatttcaagttgt

SEQ ID NO: 15796 - DNA, 416 bp, Glycine max
agtcgatcctgcagggcatggcatgctgttatctcactcattacgtcacagtctgaggacctgggcggtatacaatagtcataaccagatactctgtagcgagcgtagcgttttactcttactattcgtcgaacaattatgcagcgcctcggtagcatcccagtgctacagcctgatggcacacagaatgagtggcgtgtaaacaccatgagatcagcactgagcgacagacgatgcaatcgactaccgcacaatcaatgtattgctaatctgtttcgcctgcatcatgcctacgcagaaactctatgtgaccgcccccgcgaagaaacccgcatctgaaattcctaattaaatgtgctgagtgaatgattcggataactattcgcgcacttatgttcagaatagttcagaatatt

SEQ ID NO: 15797 - DNA, 392 bp, Glycine max
ggatgcctcctggcgctcgaacaaggttgcctgtttgctgatataaaatataacctatagcgatccattgcataaggcactcatggaaagtattgaacgtggtgactgcgttgatggtgtccctctaccatttgaagctgttgaagtcgatcatcgtgaacctggaactaatgggacccataacgctcatcacgatcatacctcatgtgatgtgctcgcactagactacgatgtggcgacctttgacagtattgaatgaatatcagtgaaacagtatgctagacaatgctacgcgcgtaatcggttcacattgttttgatgcataatgtcaaaatcctacgctactactgtactaaccgagcttacgaataacaatcattttaaagaactaa

SEQ ID NO: 15798 - DNA, 324 bp, Glycine max
atctttgcagatttggtcttcgccagtgaaaggatcaatgtgggtccgaatagaggcaaatttgatcatcctactacgacgactgagaaaactggggcaaataaagagggtgaggatgatggagaaacccatgctgtgactgccattcctgtactgtcaaattttccaccaacccaacaatatctttactcagccaataacaaaccacctccttacccaccacccagttatccacaaatgccatccctaaatctaccacaaagtctgtctaccgcactttcaatgacgaacaccacctttaccacaaaccaaaaacaccaccca

SEQ ID NO: 15799 - DNA, 391 bp, Glycine max
  unsure at all n locations
ntctagcttttcattggtgtattatgatctccttttggtgctctaaattatgggagtatgctcaaatatatagggcaattttggtttgttttcttgcttgattaggttgaattaagggtgtgtatgggatggccctaggcctataatgcatttttgaacaatgggacatgccacattgtccccgttctcttgctattgacgcctaaacgcgcgcccaccaagtgttcggtgaaatgcctcaatggcattagcgcgtgacttttgtaaggaaacaacccatggggcattttggtttgtacacattttctttttttggaatatgtattcattcctgaaaaaggctagagtaatngccccgcatatatcctaggcctaggaactaaaattttat

SEQ ID NO: 15800 - DNA, 154 bp, Glycine max
atctttatggtgaatcaaacgtgattcaaacgagtgttgatgataaacatgatgatgaccatagcgatgacaaaatgctcaaagatcaatcaactaacagctattgtgaatcaagaacaattcaggagttcaagattagaatcaagaagaattc

SEQ ID NO: 15801 - DNA, 384 bp, Glycine max
tgttggtcttctcataaagatctaccccttggttgtaattctaggccggttaacttctctgctccttgttgaattggttcttcggatgattcctccaacttaagccttgtatgaaattcctcccttggttgaatcccgacggtcctccttggttgtatccttcgaatccgaggcgattctgagctcccatgtagtttacttccctggaagaatcttcttgtgctatgcattgccctggctcgtgtgctcctccacagatgtggcatccccctatttgcatggctgaagaataagagggacttaccgcttatagttgttgtagaagcttactgagtgtctccgttatggactctatctgtcgtgctaatagcttgctttgggcca

SEQ ID NO: 15802 - DNA, 361 bp, Glycine max
agcttgtggatgctgatataataatttcctctgacctaatattacatagaaggaaaaaaatagagatggatattcaatatatagatagaagaaaagaaaacacaatcattttctactttctagtttttctaccaagctagtaaaatggaattgtttcaatccacatctttcatagaaacaaactaaatttgtcactcagtcaatagtaaagaggatacaaagtataatttaattgatgacattgtcatactgttagtccttcaaatgtattattattgttgatcacgcaaacttgttcatcaagtggttccccaacacctcgactatcatcatggagaatacgccttgagtagtaaacatt

SEQ ID NO: 15803 - DNA, 406 bp, Glycine max
ttgtgggtgtaaccggcaccccatagaactggcagtgacccgtgatcaaggccagaaatcccagtgctctattggacttctccgggtccactagatatctgggaggtgcgatccttgcaaattggtaaatggcatacaagattagctgggccacattaatactaaattgagtcaagatggcataaaccagctggaactttgggaagatcaaaattatgatcactggggagaatgttgctgagcagcagtgtcatccagctggctgttcgcaaccgacaagtgtaccggatcgcacaagtagtataaaatggtaagaaccgagtatcaaactctcggggaacttgtgttatctggcaagctatttcgataaataggcgtctagtatgaaaatatgattgtggttatg

SEQ ID NO: 15804 - DNA, 360 bp, Glycine max
agctttgcactgtcatggatcttctcatggcaatatcgttacagcaagactgaaaagacaaaccaatatccatcactacaaagacacgcatttgtaaaatggtggacacaatttgactcatccaaagcggatccagaacaagtgaaactctggttccaatcccatccagaattcctcaaagcagctaatccagaaacttctgtgtttttgaaccaaaagtctcatctggcagcatttttagcaggatcgaaatcaaaggaggtcttagctaaaaatctaaaggaagttctgcaaatgttacagcaggaagaagaaggttcatcctcaaagaaggaagaaacaagttctgctgaagaagaa

SEQ ID NO: 15805 - DNA, 401 bp, Glycine max
tgtaatactctatggaagtgaagactaacagtttcaccagagtgtttaaagaaaatggacatcatatggtttatgacattatccctactatgtaaagaaactttgctacttgttcttaattgttgctcgtcgtgtatgtcgaactccacttcaatctcttaatatggtgcatagatttgagaattgttgaggacccatatgaattacatcacaacatcgatcattgtcgcaaatgtatttcattatttcatctctaactctctccccgtgttctcttattctagaaggtatttgtgttcttctttgattgtttttcaatgcacaaattaaccatatcatgaacattacttgcatgatcaccatttgaactagaaaaaatatttgaatttaatatcttcact

SEQ ID NO: 15806 - DNA, 364 bp, Glycine max
agcttcggaagaaagtgatgaggtacaagccctaaaggcagagcttgaaagagcctgggtagtcgaagagaagttcaagtccatagccatcaaagtctgaaaagagtatgatgaactaagggatgtcaatatggccactgatgaagccttggaatgagaaaccaagaaggcccgaaaggaagaacatgaccaaagcaaagttttgaggggctttatagggcagcaatagtgagctcaagctccgaagaggtgaaaggaatcatcacgggtcaaaggcatgatcttgaaggacgagctaaaggcttgccttatgtcgaaaagaaaattgtcccaacagttaagcgagactgaaaggaatatgtgg

SEQ ID NO: 15807 - DNA, 389 bp, Glycine max
ttaaaagattggctaagattttgttaacacataatcacttagactatgaaggagagctggagttgctgcacatgatgtccaacgttatatcaaggaatgagatcgggctgcacaatgctcaacgctagatgaactgtcacatgaagtattgaagctgcacgatccacgatgtctaatacaatgtcctgacatgctgcccgataatactggacttgctgctcaatgcaagatataagtcaagtgctgaactgaagttgcatgatccacgacgtctgatacaatgtcctgacatactgcccgaaaatactggagtcgctgttcaatgcatgattacagtcgagtgcaaaattgatgctgcatgatccacgatgtcagacaccatgtcctga

SEQ ID NO: 15808 - DNA, 359 bp, Glycine max
agcttctttcatgaatattttgaatattaccacatgcatacgagaatagcagttagacaatattacattattccttgttgtgaatatgtttgacccaaatggttgtgatgacaatgctacatggctatgtgtgtatgtgtattccattaacgactgatgttttgctatatctaaatgcaagcgctgatattgtgatattaatgttaatgatgtgtggacggttacacttagaacaatgttatgtgatcaatcccagataggaagagtgtaaatgtgaggattattatatcaagaaatgtgagttaacaagatgaagtattgacaagggtagtaaaatgagaacaagatccttagataat

SEQ ID NO: 15809 - DNA, 398 bp, Glycine max
ttatggggggacactgaagtcagttgggaagcacatccctcattgaatacagcaggtggtatcttatgcatttagagtgagaaatcttttgtgctagagaggaaggtcattgggaatggatttatactgctgataggaatgtggcttcaagaggccgtgcgagttcacattgtcaacatttactcgccctgcgatattcagaataaaagattgttgtgggatagttttaagcagctgaaaagccccacatctgggggtctttggtgcatagtaggtgatttcaatagcattaggcagccaacagagagaatgggtgtatgccacagagctgtggaagacggtacctctagggagttcaatgattggattgcggagttggaggtagaggaagcaccatg

SEQ ID NO: 15810 - DNA, 364 bp, Glycine max
agcttggatgaactcttaacttatcggcctacttttatgcaacccatttcagaatagcttgcatgtttttgaaaatcttaccacaactatgctcctccagaaagattttaatttgaaatcttttttgtaactttggttcaagcacaataactaactctcctaagggtgttcatagcgcttattatttttaatatattatcataatgtaaaatctattgactaaacttatataattattatgctatattatttttcattaaaatttgtttaacatatttttgttgaaaattattaattttttacttttatttggaattattaaaaaaaataatataatcaaccttttttgtaacataatagtaaa

SEQ ID NO: 15811 - DNA, 394 bp, Glycine max
tagcaaattagaatatttatacctttctggaaacttcctagtgggccagttgccatcatcattgtttgggctaactaagcttagtgatttagattgttccgacaataaattagttggcccaatgccagacaaaattagtggactttaatttctaatttaatttatctggatttgtctggtaactccctgcacgaaacaatccccatttatctggatttgtctgggaactccctgcacgaaacaattccccaatggtgcttttctttgtcatcgttgttacgcttatctctttacggaaatcagcttacaggaccaattggtgaattctcttctttttccttgtattattgtgatctctcttataacaagctacaaggtaatatcccaactcaat

SEQ ID NO: 15812 - DNA, 314 bp, Glycine max
atctttctgcctgcttgtacctgcaatttgatttagatgaatatccagacaatgatgcatctatataggccacatgtcaatatccattacctgcacataattccgctcacatatgttgttaatatgaacaggaatcgatgcatctgttcctattccattcttctccatcagggatatcagctcactttcagtaaggaaatctggaggactggtgctcccctgcagaatttgtggtgttagctatgtgtaatacacacagaactccaatgggaaatgaatttcaaccttatttcttctccccagaaatggttata

SEQ ID NO: 15813 - DNA, 397 bp, Glycine max
  unsure at all n locations
tgtgcaatgtctgaaattgcgagtatttangaatatgaaaataagcagaattaagaatcgatgtataacgtcacggggttgaatgaataaactgaattaatattataaaatttggttttgtacttttattgtctacataaaattacaacaccaaatttttagaggatgcgatgtaaagaagtttttgaattttgatggacgatgtaaagaagtttgttttattaagttgttgaaactcaaatgtttgcattgtaaaaattgtcaaaactcattgttattaaacttttacttaaattacttggtaaacgaaaatgtataaatggttaattgtttccttaataacgaaattctatttgttaaatttaatagtatatttattgaaggaaattgtattact

SEQ ID NO: 15814 - DNA, 255 bp, Glycine max
tatcttatatatgaaatattgctcatgtgttaataggggtatgtgtattaatattcaactatcttctagtaaataaataacgatcatatttgggtgtggccttcctaactaatatttgtatcattttgatattgcaaattttctgtatttgatcaggaaagagattcgtgtatgcatatattaagtgaaggtacgatatctaagacaaaattggcaagaaatcaactaattagtgcatggctttatttggcgact

SEQ ID NO: 15815 - DNA, 375 bp, Glycine max
tatcttattatctgagattggatattatgtataagtataaattatattctaattattaaagtcatatatgtattagctaattgaagatgaccttgagaggctgaaactgtgcagagactagttcagcatctacccacttaattcccaacttcggaggagttgaaaatggggaagttgaaattgctcgcagagtggagggactatttcgctcaagcatggttctgctacattttctttttcatgcttataaattataatcatataccttctttttatttaagaatgattgtggggggtgtgatgtattgtatatacgataacacgcgttcaagtctctaaggaatatgagaaacatttagccgaatatttaatatg

SEQ ID NO: 15816 - DNA, 347 bp, Glycine max
agcttctatagaaggttcgttcctaatttctctacaattgcatcacctctcaatgagctagtgaagaagaatgtggcatttacctagggtgaaaaacaagagcaagcctttgctttgctaaaaaagaaggctctctaaggcacctgttctagctcttcctaacttttctaaaacttttgagctagaatgtgatgcctctggagtgggagttggagctgttttgttacaaggtgggcaccctattgcttattttagtgaaaaacttcatggtgccacccttaactaccctacctatgataaagagctttatgccttaataagagcactccgaacttgggaacattacc

SEQ ID NO: 15817 - DNA, 394 bp, Glycine max
  unsure at all n locations
tgtagaatggctagacatgatacatgtcagggtttggtttggttcaaggataaaagggatgccccatattatttccatgacacaaatgcaaaaatgatgatttggaaactttatgcaaaactggtcatgcatgcatctatgcggacactcaaatgtcaaatttttatggtcatgtgatgctagggctcangattcatttcctctattttaatcaacccaatgtttccaaaatatgttcttttatcaatttgtgcattcatccgagtccatttcgggcgtccggggaaatttcacagcattcacccttcaggtgtagacacattttccaaaaattgattatgatcaatgaattttttcaaagaaaggttggaaatcgtctcttttcaaaagcatg

SEQ ID NO: 15818 - DNA, 346 bp, Glycine max
agcttgtagaatggctagacatgatacatgtcagggtttggtttggttcaaggataaaagggatgccccacattatttccatgacacaaatgcaaagatgatgatttggaaattttatgcaaaactggtcatgcatgcacctatgtggacgctcaagtgtcaaatttttatggtcatgtgatgctaaggctcaagattcatttcctctattttaaatcaacccaatgtttccaaaatatgctcttttatcaatttatgcatttatcctagttcatttcgtgcgttcggggaaactttcacagcattcacccttcaggtgtagacacgttttttcttcaaaaatcgg

SEQ ID NO: 15819 - DNA, 390 bp, Glycine max
tggattgattcagtctaactagggatcgaggtttagtaatttaggctacaacatagaacacaaaagcatgattgattagagaaacatctttatatacatcagctggtttgttagaaaaactcaatacctttacctattgctatcaatcttacttgcatttttactgtttttagcctatacttagtttaattatgttctaaataatcaattatcaatgtttctttcaacaatgctttatttatgaatttaaccctgtctaatactagttccctgagtttgatactcagattcaatcgttttaattttaaatacttgacgatccggtgcgctttccggcaaatcggatttcccttgaacatatttgtataaagaaaaagtggaccaaaaagt

SEQ ID NO: 15820 - DNA, 355 bp, Glycine max
  unsure at all n locations
agcttaatataaaatatatgtttttttcttatgagaaacttattaaatccatattggcggatctatttcctcctttggagactgaaaattcttataaatattaccgtttactataatgacataataagaaaaaacgtctcacaatgttataaaacacaaaagataaaaaaagacaaccctttgaaaaagaagagaacaaattaaaaaaaaaaaaaagagagagctacattacaataataacacacttacaataaatgcttataacactntgtataatttgtttttctttatcacataacttgtcttatttaatactctggttacagagaaacatccttggcagagacagaaagga

SEQ ID NO: 15821 - DNA, 391 bp, Glycine max
tggaggacagctttgtttgaagcaagtaacttccctggccaccatattaccactcgctccgggtatgtaccaacaattcctttcatattttttacttgttttttttttcttgttgagtttctaaaacgtttcgatccattgctatagaatgatttcttatttttatttaaaattgacttaaatatgtttttgagatttattattcttaatctgatctccaagataaaatttatatgtttttagtccctcaaattttaaacatgttatttctagtggttcaataataaaaaaatataaaaaaaagtcaagtttaaaccataaaaaaaagtcaaaaagaaacttaaaaagtattttacaaatttaagacctcaaacttgagaaattaaaaata

SEQ ID NO: 15822 - DNA, 259 bp, Glycine max
atcttgtccagacactacattgattgaacagtataatacaattcgaagaagaaaatatgaaaaagcttagatacagctccttggtttttgatgttgttttccaatcagaattggagtttcactctagaagtccacataatatagatgtgcattaaaggattctgtagattattgaaatgaaactccaattctaactgataacagcaccaattgcacctaaagaactgtatgcaatgtttgtccaaaaaatataccttga

SEQ ID NO: 15823 - DNA, 389 bp, Glycine max
ttcatgacttgcaatctttctatagaatggtgacttatacgaaaatgccacaaatctatagggatgacattacattttggatgggtaatggcggagcatatggatcttgaatgtgatggtttcaaggtaagctgataaagcccatgactcacttcaactgtaccaatcttcgctttggtgttgatatcctgcaaaacacaagtattagaggagaagattaactcgtagctgtttgtggaaatgagtttggatatggatatgagattaaagctaaaagaaggtatgtatagaacatctttcaatgtaattgaagaggtgagatggacggttcccgagtgggtggcatgaacttcgtgtccatttggtaacttaactagaatgggtttaat

SEQ ID NO: 15824 - DNA, 323 bp, Glycine max
tgcttctttcatgaatattttgaatattaccacatgcatacgagaatagcagttagacaatattacattattccttgttgtgaatatgtttgacccaaatggttgtgatgacaatgctacatggctatgtgtgtatgtgtattccattaacgactgatgttttgctatatctaaatgcaagcgctgatattgtgaaattaatgttaatgatgtgtggacgggtacacttagaacaatgttatgtgatcaattccagataggaagagtgtaaatgtgaggattattatattaagaaatgtgagttaacaagatgaagttttgac

SEQ ID NO: 15825 - DNA, 384 bp, Glycine max
  unsure at all n locations
ntatggggggacactgaagtcagttgggaagcacaaccctcattgaatacagcaggtggtatcttatgcatttagagtgagaaatcttttgtgctagagaggaaggtcattgggaatggatttatactgctgataggaatgtggcttcaagaggccgtgcgagttcacattgtcaacatttactcgccctgcgatattcagaataaaagattgttgtgggatagttttaagcagctgaaaagccccacatctgggggtctttggtgcatagtaggtgatttcaatagcattaggcagccaacagagagaatgggtgtatgccacagagctgtggaagacggtacctctagggagttcaatgattggattgcggagttggaggta

SEQ ID NO: 15826 - DNA, 215 bp, Glycine max
  unsure at all n locations
agcttcaaggtcaatggacaccagctgaaaccattccccacaaatccctccttagtggatgtagtggtggaggagacctccttaattcaccctacgtctcttccgccatgacttanggagttttctttcttctctctccttctttacttttattgatcttatgattgtgctacattgaggacaatgtgttgtttaagtgtgaggggggggggggg

SEQ ID NO: 15827 - DNA, 400 bp, Glycine max
tctgtaatcgattaccagaagcaaaaatgactttgaaaagctttcaaaaagtttgaattttaattttaaaagatgtaatcgattaccactattgtgtaatcgattaccagtgacagaaggttttgaaattcaaactgaaaagacatgactcctcaaaaattaattgtgtaatagattaccacagatctgtaatcgattagcagtgagaaaatttcaaaaataactctgaaaagtcacatctcttcataagtttttgaaaagccaccaaaggcctataaatatgtgacttgtgttcgaaattctggagagttttttagaacctcattgtcttattctctcataagaaaaccttgggccacacactttcaaaacaattaaggattcatataagttcttcaag

SEQ ID NO: 15828 - DNA, 317 bp, Glycine max
  unsure at all n locations
tgtcttggttcgaggtacttacccgttgaagatcgaagaacgatgaagaacgaatgaagaacgtcgaagaacggttgaaatctttgcgaaattcctcacggaaaacgttacggaaacgtttcggaagcgcctcggcttanattttcttcacggaaacaatttttccaagcatattcgaaagagagagaagtgcctaaggggctgaaccccttccttcttgccttcctcccctatttatagcataataggggaggtggttgccgcccagctcgcccaggcgagctcagctcgcccaggcgagcagggttgcttcctcc

SEQ ID NO: 15829 - DNA, 400 bp, Glycine max
tgtaatcgattacacacatacagtaatcgattactttagcacattttcaaaaaatattctcaacagtcacatctttttatgtggttcttgaatggctatcaaaggcctatatatatatgtgacttgagacacgaatttaagaagagtttttggagaacaaaaaggtcttatcctattaaaaagcaaatcgtgttatcctcttacaaattccttggccaaattacttgtgattcaataaggaattatttgagtgctcaaattgttcagtctatctctttcaagagagatttcttcttttcttcttcttcattctgaaaagggattaagagaccgagggtctcctgttgtgaaagaattctaaacacaaaggaagggttgtccttgtgtgtttagaacttgt

SEQ ID NO: 15830 - DNA, 351 bp, Glycine max
agcttatcacattagggatagtttaaagtttaaaccaccaaaacatattgcattttataaatattaaaactaactctcaactcatattttagttgttaaaatagtcatataacacattaatatttttactaaaaataacatatctataaattaacgaacctgtgaagcttggtaagtttttctaaaaccgtacaaccaaagctactaaacccgaaagaaacattgcaaaaaaaataaataaataaaccctgacattttactaaataaactaggacaggtcataccttaactagaataagtcataaacatttaatgaacgatctaataacttatccctagcttttttttttt

SEQ ID NO: 15831 - DNA, 401 bp, Glycine max
tttaaactttgaggaatcatgaattcgaacagactctaaatatttttccagttttgctttttcttggatattttcctggcaatacagtacaacaaaacataaagcaacaagcaatttccatccttgtagagacatgtctttgttaagtggtggaatcaatttgacacaacaaaagcagaactagacaaggttaaaatctagtttaaagctcatccagagttccttaaagcaactgatctaaagacttcattgtttcttaatcagaaatccaagctagcggctttcctagaaagatccaagtcaaaggaacatttgaccaagaacttaaaagaagttcttcaactacttcaactacacatagaaaatacaaatacctgaacacatcctatgtgtaggtattc

SEQ ID NO: 15832 - DNA, 363 bp, Glycine max
agcttgagagggttatggaccgaacgatagaatgtcttatccaaaataaactgtatgtagatagctgaagtcttctttttggctcagaacgatcaattgctgtgataagtcccttaactcctgcctgacaaagatcttgaaacctccggccacttgcaaaatcttgaaaatatttgctaatcacgaacaacacaagccggagattgtgctgcaaccgacatcacaatggtttcttaatctcagtataactaatactcattccaaagaatatcaacaaacactgcaacaattaaaccattcatatccaaagagacaaagagagagaagaaatatgaacggagatgtcatatatcactgatcttc

SEQ ID NO: 15833 - DNA, 398 bp, Glycine max
tatcagaaggggaatggtaaaataccacctcaagctgatattattaaggtggcaaagtgtttcttttgcaagaagaagggacacatgaaaaagaattgccccgggttccagaaatggcttgagaagaaaggtaaatcaatctcattagtatgttatgaatctaatatggttagtgttaatattaacacctggtggattgattctggatctactattcatattgcaaattctttacagggtatgcaaaacctaaggaaaccagtgggaagtgagcaaagcattttatcaggcaataagctaggctcacatgtggaggccattggaacttgcattttgactttaagtagtggctttatttcaaaattagaaaggactttttatgtaccaagtttttcccg

SEQ ID NO: 15834 - DNA, 368 bp, Glycine max
agctttgagaagtagtctattgcttttctctcatagccattcatggcaagtgatattataatgaagttccaacatgataatcctgttgttgtgggtgatgcccgaaacacttgaataccctttacgatagctccacacttgcagtacatgtcaataattattgtgagaacaacgacattcaactcaaaattcccctttttacataatcatgaacccactccccatgttgaagtgcacctaagtgagcataaacacttaacaaactcatcactgtaaattcactaagctgaacccttcgtctctgcatcttgcggaaaagctccaatgcctccataagccgtttattccttacatatccactaatcata

SEQ ID NO: 15835 - DNA, 403 bp, Glycine max
tatagaatatataataaaagaacaatgacaattgtttagtctattcatgtttcctttgatgagtctaatgccattcttccaaggaaggattttttagatgatatttcagattccttagaagatacacatattcatggaaatgactctaaagaaaaagatgaaggaagcaatgaagattctcaagataatggagttagaacaaataatgaacttccaagagaatggaaagcctcaagagatcatcccctcgacaacattattgctgatatatcaaaaggggtaacaactagacattctcttaaagatttatgcaataatatggcttttgtatctatgattgaacctaaaaatataaaagatgccataatagatgataactggatcattgccatgcaagaagaac

SEQ ID NO: 15836 - DNA, 347 bp, Glycine max
tattttctcccctattttgctataaatagggggagaagtgttgaagataagggttcagcctcttaggcacttctctctctctcgaaattgcttaagaaaattgtttccgtgaagaaaatccaagccgaggcgctttcgtaacgtttccgtaacgtttccgtgagtaattacgcgaagattctcgaccgttcttcaagattcatcgttcgttcttcgttctcttcagtcttcaacgggtaagtacttcacaccaagcttttcaaatcattctatgtatccgtgggggtccacattttgtttcatgtatatctattctcgttttcatttactttttatacctccctttg

SEQ ID NO: 15837 - DNA, 246 bp, Glycine max
atctagctttattgtacagttttgatcatgacataagttttgctttccataagtcgccataacaatgactgatactagttctagattagtcgaacaaactatcacaaacttatgtcatgatttatgattttgttggcgatcatgcacgtctcgagttgactactttgctctttgtaatgagaaatatttcgtataacctatcaacctcattttagtccagtcacactattaaaccattgcttttgg

SEQ ID NO: 15838 - DNA, 390 bp, Glycine max
tcagatgagtctattaatgaatcccctattcgattttatttatagaaaaatgaaatcgttcataggccttaaattaatagtttaagctttgcgggagagtttgacgttgaaatggtgtcatagtctagtgttaagttttgttggactctcttcttaggtggagtaaagattcaaatgagaaggttcattttgtctcacttatttaagtggagagaggtcaaattaaggtgagaaggacttaattatttgtgagggaaaaacaatggtcaaacattgtgagagaaaagataggacaaatcattttgatttttgcacacccaccggagaacatttttcacattataataacaaattcgttcaccgttggatcagactgatttttggacagta

SEQ ID NO: 15839 - DNA, 449 bp, Glycine max
  unsure at all n locations
tggctataagctttgagcctgatnactgaggcctggaacaccaggctatatatctagcacccgggatcctcttagttgtttgtaagctgctttcttccataaagggtttcatatcctagtacttagtacatgtgctccttgaaccttcctgtaattctatgcttttcacagtatatacatgtatatgtcctagactctcttctcgccgttttatttgcgcatgtctagggaatacatgtggataacgtagagtctttgatagtattccgcgcgattcaactcagcactacgatgccttcatcagaattatttatgagttaactgttattgtattactgttcatgcttgagtttgattagctaaaggtcccgtagctttatcttatcttttacctagacttagattctcactccacgaagtcctgtcgtcagtctttctgcgaatacgcc

SEQ ID NO: 15840 - DNA, 373 bp, Glycine max
tcgagccagaaacctgtcacaccattttcctcgttttgggtgagaacgtcaatccttaccctctgaagcaatatacagagagacggaatatttcctatccattgaccacagagacgatttgacatcctcaatctcatagagggagatcgcatctcgaaatgatagaatattcccaatcactgagtgggacgcaagaataactcacatatgagaatcgcatgaaataactctcctgatcaacgatctaatgaatacagaagaaatgtgcataaaggtcttttgaccatactatatttgaacaatacataatggtcatcaattgaacaaaagaaagaaaacgaaaccatgacctattgaggacttatccctttga

SEQ ID NO: 15841 - DNA, 491 bp, Glycine max
  unsure at all n locations
ccctctcgcctcnccacgggctgggtatcnattatactcgcttattagacacacctcaggtacaaagaactgaggcaatacaattgatgcattgaaaccttcgacgcttaagcgtatataacgcgatctctggagcctcttgaaagcccgttttctgccaactaacgccaggaacgagtaaacctacaattagagaacatcatgccactatatatggcatataacaccgagacgatggctgagggataacggagagcgcaggaaacgaaaatgtaccgcaatagccaccaaaaaactcaccatcccctctacaaaaaagaagatgcccccgccccgagagggcccctttaggtcgcgatcacgcctgacagtagcctgcaaaccaatacaccataaccatccttaggaacgaccaattcaagcacgcgccttcacaaacgcaagcaagacgtgcagtaagaaaaacaaatagctatctcgtcccaacaccc

SEQ ID NO: 15842 - DNA, 544 bp, Glycine max
  unsure at all n locations
ccgctgccaccanctctggtcatacttngaaaatgtaagatgcacgtagacggtacattgtgactgcacactaancacacagacagcnacgcaccttgaccccttgatccgtggnaacntcagagacctatagacaactcaagcgtcccaaggaaccaagccaaacaacattaaaacatttgaggactgtcacagcgcaaacaaacacagagcaaaggcagaacacgtcgccaaaacaccgaccaatatcacagctgttctcacaaaaagaccccacagaacaaatcgcgcgagacaaaacatgaacacgacagatcgactcgaaaatacttctggaagtcgacactacataagcctacgatgtgaccgttgggaacgactatcaaacgaccagaactcactatgagaaacaccaacggagacctaccgcacgcgagcatttttggcgacaagcgagagccctgccacgcaccactcgacagcaaaatacacgctgaatgcaaataaatgacgtgacacttgccctcaaccaaaaacgcataaa

SEQ ID NO: 15843 - DNA, 291 bp, Glycine max
ttcttttatgctcatacagttgcatgtttggagtaggtctatgacataccattttaatgagacatctactatgaaggctcctttaattgattgcttactgttctatatccctcacactcttcggtattatatgcactcatgattccaatcccagacactttctaaaccacaaccatttattctactcaactgaccacaacaccatattataaatgtcgaattctaactaaaacatgccatatattaatgtcctagatactcataagctactatgaagaagttcttgctatg

SEQ ID NO: 15844 - DNA, 376 bp, Glycine max
ttagtcttgatgttgttcatgttgctccccctatttttaacaatcttcccctttttggctttgatgatgccaaactcgaatataacattgaatgcatttagagggtctgagtcttgagattagagacttgcttttcttaatcaatcttgaaaattattaacacttaagaaaggatcaattcatatcatcatcatcatcatatatcttactatataattttactgatgctaatgcaatataatgtagtgcagtactagttcatctcccaaatgcttatataatacaatgcacgcaaatattcaatacatatgcagcagttcatatatatctcccttttatgcacatatgcagttcatctcccctttttggcgttaac

SEQ ID NO: 15845 - DNA, 317 bp, Glycine max
agcttatgtctggtcaaatacagatttgagcatacataatactcccaacaactgatgcatacgaaattacttccatttgtttccgttccagatcatttctaggacattgagcgagactaaatttttctcctttctgaattggaatgggaaatgatgagcacttttccatcctatataactctagtactttattgaaatatgcttcttgagacaagcctaacaatccttgtgatctattttggaatattctatttgtatcacatacgttgcctcacccatttccttcattcaaagttactaaaaagaaccttttagtc

SEQ ID NO: 15846 - DNA, 387 bp, Glycine max
tttagttctgcttacttattttttaattgggtcatatggttgtactgtgtgtttgtgtgaacatcaattggttctgcttacttgttttaggtcttggtatcaatttgttgtgtgataatggctaattccatttaaggagttagagttatccacctcgctgatgtttgatggaacctgtcaacatgatgtggcctgccctgactaactcgtatgtctgacgagccaacatcagcgtgggaagggttggcccattagcctgccatacatatattttttttaaagaaaatctaaatactaataggtgtctacggtttgggttgtcactttggatcttcttatagtatagaacaacataggcatttgctattatttttatattattttata

SEQ ID NO: 15847 - DNA, 342 bp, Glycine max
  unsure at all n locations
agcttaacgctcgggaggattttgtctcacaaaactgataacgttaattgcattatatatatatatatatatagggaatctacattgtgggtaatgggggccattggaaagtaaaatttacttgaatatatcgaataaatatttttttcctctataaaaaaataaatcttgccccaaccggatagctttttcataaggtaaatataaataaatgtaaaagataaaagagaatacattgatattaatttatccttttaaattgtactatttttattatcaattttaataaaacttatataattgtttgtttgagaaaatattagactatgntttacttaaaaa

SEQ ID NO: 15848 - DNA, 386 bp, Glycine max
tattaggccttttcttattatacctcttgtgaattcactttctcaatacacttatttctctctccacttatccaccaaatcactgatcaataactatttcatttttgaaagattcaattatttatttaaatgtgtgaaataattaatgtggataacagtataattgacaaaaaataattaatgtaaccttaaactttaaaaatgatagataactaaaaaatgatttttttttcaaaaaacccgacaattagaaaaaccaagggagtataactgaaagagatttttttttgctaattgtgagagtttttccatgaaacacacgtcaaaaaaaaatactgagaataagaaagaataaggtgtgttttgtatctaacttaaaatttata

SEQ ID NO: 15849 - DNA, 366 bp, Glycine max
agcttattgtttatggattgccaaattccacatcatttgacattattcttaaacaaactagtttattagaacaaaaaataaagaaaaaatgtatgggctggttttatctatttatagaagattttgagtgaaattataagattttaaagtttatgaaatcaatagtattctggttgatgccaatagaaaccaggtaaaaatcaaatcctttttatctcaacaattataaagtccttgcttcaaatgaaggaaagcattgctctgcctattgttaatttttgttttactgtattgtaatgtttttttctgcttgcatgtgaaatacattcaagttttatgtttttgggttcttatttttacattcaa

SEQ ID NO: 15850 - DNA, 403 bp, Glycine max
tccatagtcgatagttggttgagtaagttacttgaatttagattcactagctggtcgagtaagttacttggattcaatagagaatatgatagatttaaataaggacataaagaatctttatcgtttaaccgaaaaataagataaaggacatatttttctcagattatattatatttgaagggaaattaagatcccaacatctaatttcacctctataaaataggttaatcaaggtttaggtattttaatctgattccaacctacatatatttgcttacctctacattgttaacttgagcgtcgaagtgccattgtaggtacacctcaccactgttcgtgaaggagctcaccactaataaaaaatacactttcaacatcggttatttacggcattctacatcgg

SEQ ID NO: 15851 - DNA, 363 bp, Glycine max
agcttcatacaacttgttgtaattgattacaatgaggctataatcgattaaaatagaaagtttttgcctttgaagaaaattctctaactaagaaacttttcttcacacaaaccatgataatgcatgatgtaatacaaatatcaaatgtactaagatgtaacaaccaagataacaaccaatacaaatgccactcaatggagttggggatgtaaaaaccaaaacttcttcaagctttagcccttaggttgttcagaagctagctagttagttaagttgaacatcctttagattgctagctggttgaaatcaagcttaacgaggtggatatagataaataataggaggaaaaaagttgtataatat

SEQ ID NO: 15852 - DNA, 405 bp, Glycine max
tcatgatgaatcaagattgattcaaagaagttttgtcgataacttaggtgatgacaaaaagcttcgtgatgatctcaagaatcaaagaatgagttcaagatgttcaagattgaatcaagaacatttcaaggttcaagaggaaaattgatttcaagaatcaagattcaaggttcaagcttccaagaatcaagatcaagattcaagactcaagattcaagaatcaagaaaagacttaatcaagataaatatgaaaaagttttttcaaaaactgagtagcacatggatttttctcaaaacctgtttaccaaagagtttttactctctggtaatcgattaccagattattgtaatcgattaccaatagcaaaatggatttgaaaaatttttcaactgaatttacaatgt

SEQ ID NO: 15853 - DNA, 362 bp, Glycine max
atcttcggtctccacctagcattttcctcaaaaattttctcatttttttacctcctccttgaccattgtaggctcctcaacccaagtctcctccacaagcaagccctttatcaagttgttccttctttttcaattgatgatggaatgaaaaaatttagtgttgcaatgaccctcctttagccatctatctcttgacttttggcataaaagagattcattataattagcaactctccaaaaatcttattgtaattttagtcacttctttaaatcatcttcactaagaccatggctctcatcaataatacctagctcatttagatctatctcaatatgcttcaacttggtatttatcgaacaaa

SEQ ID NO: 15854 - DNA, 397 bp, Glycine max
tcattcaagacttttaccagcaaagctcgatgatgctcagagctcatgagcagttccaaaagagagactctagctggggttttgttgagttactcaataactttgaactcactttgttgaataatgcggaggaactcgctggcctcctagagcgatacctctttcttgtcacaaccctctcttccctcagaaagacctttcatcggaacatcctcacccgaagtggggatcactttgacatttggtccttccgtcatccttgccttccccttagcatttgagggctacgtcggtaggtcagggggtgcaaatacgcgaccactgtgggttatgccgctcagccccgtgatattggttactttggccgacatcgagctgatgtcggtagctccttcct

SEQ ID NO: 15855 - DNA, 363 bp, Glycine max
agcttttgaagagaaagatgaagaagacccaactgtaacataacggctagtttgacctattgggtttatatattgaaaaaggacaatgacaaaagatgagagagaaggtatgagacaaccaacacaatgcaaaaacaaagttcatatcctctccatcctccatgatcttcctatgtgcaaaaaaaaaaaaacaaatcgtgtaaattatagtcaaagctacaatgaagatccaatccattagtgtttcttagttgtaaaatcctctcaaacactttctccttgtatgtaatctgtatgtatgccaaattaatcaagtgaattaagtttgaatgtgaaagaagtgatagaaaaacccatgaaatg

SEQ ID NO: 15856 - DNA, 400 bp, Glycine max
tcattggataatcttttgtagcatgccaattaggataagggaattgttaagggcatctaacatttttgttgaggcacctaataatttttggaaatgtcgaaaatacccttatggtattttctgttataaatagtaggaggagtttttcatttccgcaaaatcttcatcacttagtgtaagttgcttctgataagatcggtttcgaagcgtatttggtcttcgactgtgtacgtgcgttgctgaagagtatacggtaaattttggttggttttcgttgctggagaagaagaggtacacgaaatacatatagattgtcaatccatatgggttatacgaatcagcaatccatatgactcataaggatcagcaatccatatgactcatacggattgtcaatctg

SEQ ID NO: 15857 - DNA, 363 bp, Glycine max
agcttatgctgcaaacatttataatagacctcctcagcagcaaaaccaacaatagcagaagaattatgacctttcaagcaatagatacaatccaggttggaggaatcatccaaatctaagatggacaagtcctccacaacaacaacagcctgtccctccttttcagaatgctactggtccaagcaagccatatgttcctcctccaatacagcaacattcacaacaaaaataaataaccccccctaattcgttactattttattactatctgttatgaacgtttggttgaccattgctcgttaggagatgacctatgatcacttcctagatactgcatttttaatgtttatttgatttgggtgc

SEQ ID NO: 15858 - DNA, 402 bp, Glycine max
  unsure at all n locations
tgtaggaatatggggtacccatcatatgtggtactaggtggcgttcgggcgatggtgcaaatcaactctcccacatccacaaatcaaacatgaacccaccatccccagttgcccaccttcaactgagctcacgtatccccatgtagcctttatcctcgttcctctcagcatcgggtccccatcaacccctccaagcttccacaatatccaagcaattcaatatccaaacatcatgaactatcctaaactaagaaaacagggcagaggcaaaaaactctgcccaaaacacattccaataccacaactttccctactcaaataccccagtaacattctcttcgttccgattcgttaaccgttggatcgactcgaaagttntactggaggtccctagtaaataag

SEQ ID NO: 15859 - DNA, 350 bp, Glycine max
atcttcttttggaccttgaacaggcaactaactcctctttcaaaaccatgctatgtgctcgcgaatggtccctctcttcccttcgcagcttgagttcattgttgctaccccacagagctccacgaaatttattccggccatactcttccttgcgagccctcttggtctcttgttcaagggctcttgcagtagttgcattctcttcccgtaacccggcacactccttccgaatgtgtgtagcgtccaacttgaacttctccttggcaagtttcgcctttcctaactcgcttttgagagcttggacttcttcgtcctcttccggtgcttcaaaactatcttcgctgacgact

SEQ ID NO: 15860 - DNA, 395 bp, Glycine max
ttcctacaagtcctaattggcattttatactatgatcaactcactttagactccaatttacactaaccccaaatttagcttctctaaccctcaaaatctcacacttttctacctacaacattgtcattctcacatttaaccctaagttaactttccccatcatctctaccagctttctatcaacaatttcagcacacaaacatcacaaagcatcatcataaaaccctaaaacagaatgggtaaatttggctcacatcaaacatgtcaagtttagcatgctttcaacaaattccttcacaaataactaccataaggcattaacctagcagaactacccatcatatccccccaaaacccaatacccacgaaattcatgtgagaagaagtccacccaa

SEQ ID NO: 15861 - DNA, 283 bp, Glycine max
agcttgcgatcatgggataccctccatatacagatgggtaacctgatcgccttaacaacacaacggcctgtactagagatgtaacgagggaactgaaacaatacacactacgtgtgggcccacatgtgtgaaacttatcccgatcgtgtactctccatgagacttttctgtacctttcataaattaccctgtcatgcgttcgttaatcatcaccagtacactatccctgttataactgtgtccagcttggaagccatctttacctaccttaaacctgacgtcg

SEQ ID NO: 15862 - DNA, 196 bp, Glycine max
tcgcggtgcagcggccaaaggctatgtttgtagcttttgactaatgtctaccgggtaacttgattttttctataatccgatgctgtcgtgtaaaaactcgagagaagattgagccaatggctgatcaagaggaaattatcctttaacacctcaaggcacatgctcgacactgacctttgcatatatccacatgctg

SEQ ID NO: 15863 - DNA, 344 bp, Glycine max
  unsure at all n locations
ttcttatatagaccatcaccaacattntaacatttggctctagaatatatatgatttcttggcttggagatgaacaggaaagttagaatatataatataactcagaagtaattaccttactttgctggaggtcatgggttcaaatccaaaaacagcctctttgcatatgcaaaggtatgactgagaacaatatacctccctccataccttcgcatagcaaggagcctactggcaatggcatatgaaagttntaattaacattacaggcaaagaatactctcctgtgtgctttcatgattttatatttagatcgactataaacattcgtaagtttaaaaatcaat

SEQ ID NO: 15864 - DNA, 388 bp, Glycine max
tgaagtgagaaagtgtggaagagtttttcttccttcttttattcgttgaccacaaagtggtacctggagatatgtcgcgggggtcaggagaccttggggacatcaggtggggtgctatttcccaaaaccaagcttgaccaatcccgacccaacccggtcatagtcagtcagtgaaaacctgtgatgtacctaaacaggcgagctcctggcagtcaaacgataaaagaacaaagaccacaaagcaaggaggcttgtgtggtggctggccagctatggatcttgagtgatatttggaatatggcctctggtaatcgattaccaagggtgtgtaattgattacaaggcttaaaaatgaagacaagaagttaagatggcctatggtaatcga

SEQ ID NO: 15865 - DNA, 162 bp, Glycine max
atcttgtcctgaaggcccctttcatagttcgaaggaatgcccctcttccataggggcttcttaagatcattgcaatactctactacacgattggtagtctgggacaacgactaacttttgtgttaaaacatggataattgtatcaaactcttgcaatttatg

SEQ ID NO: 15866 - DNA, 392 bp, Glycine max
tcaaatatgttcaaaagcgtaaaacttccatcttcttccttcttctattcccttaaatcctcccacaatacccccaagctcctcctccaccaccactgactaccagtgatcgccacaagctgctttagcttgccatcggatcactgcacggaggagaatagcttgatcggagaggaatcttaaaaactcaactcgaggataccgtagagaatgaagcctacaatccttccttcatggtttctgccagggaatcatgattctaagccttctccttgttagatagagtctatctttgcatctcttgtgacttgggaaccatcattggatgtttctatacttcctttgagaaaccctcgaaaatgagacattgtaaaagttatctattcataaca

SEQ ID NO: 15867 - DNA, 436 bp, Glycine max
  unsure at all n locations
gtggatcataaananctgaggccttgannncctgggcacataagctagacccggggcccgggatctcttatagcacgcgtttcatgacaactgggctgattatggggaactctgtcagcagtgagtactaacgtggccagaatagcgaattgacgccacaacaatggtgctacaccattcatatatgcacgcgataaaccgcccattccctgatgccaactccaactgagcttactggactccacgtagacgctattgtctaggataaaatgaacgtgactccatctatgttttaaggttacttaagattcagagggacctctgtcttattaagaccagctcttcaaaactagctttataaatgcatgtgggaaactcttgtagacaacaaaaaaatacaggttttttctttaagacaccggagaaatccttatcg

SEQ ID NO: 15868 - DNA, 392 bp, Glycine max
cttagaccgtcgtcgtagccatcgtgcccctcactattcttcaacccataccagtccacccactcccacctttgctaccccaccacccaaactttctttccgtcgattatcaccggaggagatagccatcaagcgagacaagggtctctattattattgtgacgagaaggggttaacagggcatcgctgccacccccgcatccacctcctcatcgcagacgaagatgtggatttgtccctatcaccatgcccacccgaatcccaattccatcaaggggttcttctccaccgttgccttccgacgactctccgccttaattaagcttgaacgcgatgccaggaatgctagctcctgaaacctttcgtgcgtatggcaccgatcagcatcacaa

SEQ ID NO: 15869 - DNA, 541 bp, Glycine max
  unsure at all n locations
tctctcactcctcatgctatcgcatgttatatgttaatcctctcatagcattaacctaatgccacgtgtcagactcttccanntttagaacctggaatccttagccattgaaacctgcgaacccataggcgaatagagctccggcccgcggatcctctaagtcgacctgctggcctgcaatctttgcaaaaatagaacattaatgtgaaaagggttattgtgttactgacacttgaacaatacaacacacttacctatttctccgggtcttgttatacgatggtgtctccaataccaaatgctatgagatgatctattttaggccccaatgttggtctagctaatatgcaataaaaagagttacataattggtccactttttatttaataaattattatttgtgatatctatggggcacatttctctcccccaagaaagttgaaatgaacctgtaatgtgaggaggattcccattaattaacgtggaattaataacctccttataccactcacacttattgtgattgattgttccatagag

SEQ ID NO: 15870 - DNA, 386 bp, Glycine max
tggctcctctgtaattgttaactgcaggctaccttatctcttcgcatagtgacattttatgctacgcagcttcctggtccaaactaccattgccgagaggtatacttatttgagaatgtgtgctttttaaacaaacatcacgtctcttaaaattaactgtttcttctttctggtgactgtgagtggtaaactatgcaagctggattcttttcaaataatcttttgatttaactccacttcatgtatcgtgcaggggtctaaacttgctacactgcctcatccagatagtgtctttgaagtcctcttgattaattgttagtatactattgttcttgagttctttagctatgactcctttttggttgatatggtgctcatttggtttt

SEQ ID NO: 15871 - DNA, 334 bp, Glycine max
tatcttgccaactttgaacttcttccaagattccaaccagaaaaatcagcctcagttaatgtatgatattacatgatgcttgctttaatttaattttgttttgtttagtttctctatttgtagatttcattgatgtcacttgggaaaatatgatatgatgacatgacagagttattatcactttgccttgttttatgagattttagattaatgaagtattcaatttatgttcttaatgtaaggtgtgaattaatctttgttccttgcaatgtttcaagacttcctttattcatcatcccttccatttggtggtttttcaagatatactgtaatg

SEQ ID NO: 15872 - DNA, 385 bp, Glycine max
tgaggtatttgtgccatagtaggccagatatttcttatggtgtgggcttgataagcagatatatgaatgattcgaggacttctcatatggctacaacaaagagaattttgagatatgtgaagggcacacttgactatggattgctattctccaaatcatatcataatcaaagaataaggttaattgttttttctgatgcaggagtggtgatgtagaggacaacaaaagcaccactggatatgtcttcaaattacttggatcaacaatctgctggagttctaagaaacaagaagatgttggacattcaacttgtaagtcagagtacatggttgctgtcttatcagcttgacaattagcctggttggagtcactctttgcagaattg

SEQ ID NO: 15873 - DNA, 360 bp, Glycine max
  unsure at all n locations
agctttggcaatcggtcggctgacttaaatgaatcaaaggaaattgatggaaaatttgatttctaatgaatttcaatctataataaagaccatgtaacttttacttttgtttctgtatataatataataatgatggatgactatttgatgggttcttaaagcctgatgaagttgcagctttctatttgttttattgaatagttatacagaaataatccttcaatttctctgtctctctctttgaactcttctagtgtgtattagttatagctagatttaatcaatctgtcagcattgaagaattgtaatttcagactttgatctttgaactgaaaatcatctgcattgnttgtttgtttg

SEQ ID NO: 15874 - DNA, 400 bp, Glycine max
tgcccagagaaggagtccacagaggaaatgcttaccacctcaaaagactggaaagcggtttctaatgactcctctgcggcctccacataaggcatagaggacgggcagctcactaagatgtcttcctcgcctgacacgatgaccaaatgcccctccactacgaatttcaacttttggtggagtgtagagggaacaactcccactgagtggatccacgggcgccccaacagacagctgtagggggggttaatatccattatttggaaagtaacttgacaggtgtgatggcctatctgtactgggagatcgatctctcccctaacctctcggtgggtgccgtcgaaggcacgaaccaccattgaactcgattttaagtgggaggcattgaatggtaatttct

SEQ ID NO: 15875 - DNA, 354 bp, Glycine max
agcttgaaggcatgtaactccacccatcttcttatagtagaacaccggtaatgtgtccactatcattgttatcatctccctctccatcattgggggcactacttgagctgttagatccctccacctttgggtgtattctttgaaagattcatgctccctcttacacatgttctgtagctgcattctattcggagccatatcagaaatgtactaatactgtcaaatgaaggcaaccattaagtccttccaggaatggacccgagaaggttccagattagtataccaagtgacagatgtcctagtaagactttcatggaagacatgaatcaacaatcttcatctttcgtgtatgcc

SEQ ID NO: 15876 - DNA, 399 bp, Glycine max
ttttctgcaacctctctcctctaaaaattgcacattgcatcctctacctcaatcttgcatccttcatcaaatcttcactgagcatctgcgattcatgtaagtttctaacttcccttattcttttctattattgatactttaggatagcaatttaatttttagggttagattgtaagtagaatagataaaaattaggactttgttaggagttgtaagtggtagataatgttgactgtgttgcatgtttgataagggcctattagaggcctacaagaggaagtcgaaagacttcttcgtctgcatttttcctggaaaacgtgatgaactcgctaagcgcgtctaatgcgctaagcgagttcattaattaagccttgaatgtatacatttccagacgaactc

SEQ ID NO: 15877 - DNA, 362 bp, Glycine max
agcttaaccacagttttcagttacacgtcagaatttttctaacccgaccacagcttacagaaataaatttgcagtcaagcaaatgggaatgagacaattatatttatgggcagggcagggttggtcttttgtgaagtactagtgtattattacttacaaatcaacctctatgtagtagttgtacttaacacctttagacacgtggacaattctctttcatttaatttgcgcatacagcatacttttttccttcttttttttctttgtatctttcattttcattaaaccacctcgcatgagtcacatctaacagtaaagtaaaacgaaaatatagcagacaaaggggtagaatggtccattag

SEQ ID NO: 15878 - DNA, 399 bp, Glycine max
tgagtacacgaagaatctgaagtataaagtctatattctattgaactcgaccaatgacttgattcattgggatggtccaatgaactcgcgggtacatatttatttaggtattgctttattaatatttataaaacaaaataaaatgaattaaacaagttttcttagaagatgaattaaagagataaaataaatgtaatttatattataaattaaaatactttaaaactcttgaggttgagagtgggattttgggccaaaaccgggggccttccgcaacgaatgaagcccatgttgctgaggaatgagcagtagtaacaagtatgaagagatagataatccataagcataactgaagatgtgcacggtggtttcaagttcaatccttgtgggatggctttc

SEQ ID NO: 15879 - DNA, 359 bp, Glycine max
atcttgtgcctctctttttcgctcacttgaacttatacttaagcatatacttgctttatctcctaactcacatacttacttgagcgttagagtcctttgttttgcaggtccccctcctatcctcttgacaaaggctcttctcaaagcccacgtgcaaaatgcagaagcccacttcagccacatccaccctgatgtgtgttagctcccgattttggtaagtacatttggcatccaccatggggccgcagtaaaacatatcctgcggtctctcgtcaacttttgtcaatagatccagacgagcatctggatgccttccgagcttagctcacctaggcgagctggttacttcacctctaagt

SEQ ID NO: 15880 - DNA, 353 bp, Glycine max
tcaaaatgttacggaaaaagaatcagcaaaaaaagtgcaagggggtatagggggtgcaaatagcaacgaggcccacttgggccttccatgaagttatccaaaaggcggtgccttctggaggaagcaacctagctcgcttgggcgagctgggtgacaatcttctacttcctttgcctatgaataggggaaggagggaataactaatctgttcaaccctcctggaatgtgatattcactcaaaattacggagaaaaattgcttccgcgaagaatatcctacccgatgcacttccgtaacgctttcttgaccttttcgtgggtgataatgcgaagatcttcaaccgtacttcatcg

SEQ ID NO: 15881 - DNA, 361 bp, Glycine max
  unsure at all n locations
agcttccattgttgagtttttgcttcccttttcacgctttagttcactccaacaagtaagtattcaatccttgatgttttcagcttcccattggtatattttcttcatcttttggtgctccaaattgtgggaatatgcttgtatttgtggggcagttttggtttgtttttatgcttgttttcttagagttaaggatttgaatgagaagaccttangcctatgctgtattctgaaacaatggggcatgccacattgtccccatcctcttgcaatttatgtccaaacatgcgctcaccaagtgctcagtgaaatgccccaatgatgtatgaatatgattttgtaaaattgggagagtgggact

SEQ ID NO: 15882 - DNA, 396 bp, Glycine max
tctggtgggacatcttgacttgctttccaatctgacattcacttctagattctgccttcttctattttcagattgggaatgcctctcacagcacctttgtcaatgattttcttcatgcctcttaagtgcagatgtccaaatctttgatgccatattttgacttcatcttctttggaggatagacatgtggaggagtaactggtttcttgaggtgtccataggtaacaattgtcctttgatctgctgcccttcattagaacttcactcttctcatttgtcaccaagcattctgactttgtgaagtttacattgaatccttcatcacacaactgactgatgctgatcaagtttgcagtcagtcccttcaccagcagtactttgtccagactaggaagt

SEQ ID NO: 15883 - DNA, 343 bp, Glycine max
ttcttcttatccaaggcaattcttgagggtgaagctccttcttccttggcttattccctagtggatggtgcctcccctgtcctcttctccttttgcttccgctgcatcttcatggtggaaaatcaccattgaaagacctcattgaagctcaaagatccagcctccatagaagctccacaagcaagcttccatcaagtggcaatcagagcacaagagcttcaagtatgtgctccttaaacctacattaatatttttgcttaccttctcttccattgttttttattcatttttgctccatgtatatcctcaaatgccttgttctaaatgttgttaacatgattct

SEQ ID NO: 15884 - DNA, 386 bp, Glycine max
tgttaaaaacggaagaaaatgaaacctttaatgatcttactgatgacgaaagcttaaaaacaagaaaggaattaaaagtctcggattcgaaaacttacctgttgaagaacgaagaacgaacgaataacgaatgaagaacgacgaaaaaccttcacggattcgctcacagaaacatctcggaaacgttacggaagcacctcggcttggattttcttcacggaaacaatttttttcacccaaaatagctgaaatgcatagctaggcggatctgggatccttaccctttcgcctatttataggaaaaagggggaggaggttgtcgcccagctcgcccaggcgagctgcattgctatctctagaagcaaccctgcttccaaaatactcta

SEQ ID NO: 15885 - DNA, 422 bp, Glycine max
ttgagcttgacattgaggccttgatcacttaggcgattctagctcgtacccgggatcctctgagtcacctgaggctgcatcttacaggaaacccttcgcattgtataatttatttcccccatgaacccagagctgtcttggtcaaactatgatcccgaattcgttaaccgttggatcattgtgaaatttggatatgtcgttcgaaatataattgggcccgctataaccgttgtgatttgcgagatgatgttcgtggaaagagaaaaatgaatcctatgaagataggctaaatggaggcttcaatccctcttacgtttctcttatgttggggaaccctatctgagcagtcagaggagacactggatgactcttatggaactgctcaatatgttttatctctggctgaagacacgccactccct

SEQ ID NO: 15886 - DNA, 398 bp, Glycine max
tctcaacgccctaaaccccagaaaccccaactaataaaattattccaaaaaaaattaaaaaaaaataaacgcataaaaaccctaatgcaccagaaaatttcaggaaaaaaaaaaacctaccaacacaaccccatctttgcacttgatcccaataacagtcctgcaacaaagtttcaaatctaagatcactaccaatacaaaaattacaaaatcatttaaaaaaaaaaaacatactcataattattaaataaactctttttttcaattttaaaaccacgaatttaaaagtataataataataataataataataataataatgataagtaccaacccgctgttgtcgacggctttagcggcatactcgatctggaaaacgcggccatcaggggagaaag

SEQ ID NO: 15887 - DNA, 332 bp, Glycine max
agcttgtaagattatggggtacccatcacatgtggtactatgtggcggtcgggcgatggtgcaaatcaattctccacatccacaaatcacacataagcccaccatccccagttgcccaccttcattgagctcacgtactcccacgtagcccttatcctcgttcctctcaacgccgggtcctcatgaattctcccaagcttccacaacatccaattaattcaacatcccagcatcatgaactaacacagtcaagaatacatggcagatgcagaatactctgcccaaacacaaacaatatcacaattttcttacttaagacccagaacatttct

SEQ ID NO: 15888 - DNA, 393 bp, Glycine max
tgtataattccccaatttatggttattttggagtttatttagtaaatgaatcttgttttatggttaacgctatctctagaatattttcattggattgaatgatgaaatctgtgcattttcaggtgaaaaagaggctaagttttgaattgcaaaaagtagcagttgggctaagcgcttattcaccgctaagcgtagcttcagagtgcttagcgcaaaggagaatctggcagagcatcaggatcaaagctgcgcgctaagcgtgagatcagtgtgctaagcgtagtaggtgccttcagccaggctaagcgcgagactggcgctaagcccaattccacttactcgcgctaagagcgaaggtggcactaagcgcaatgtcgcgatttcagggcctat

SEQ ID NO: 15889 - DNA, 348 bp, Glycine max
agcttcttattcaaggcaattcttggtggtgaagctccttcttccttggcttattccctagtggatggtgcctcccctatcctcttctcctttgccttccgctgcatctccatgatgaaaaatcaccattgaaggacctcattgaagatcaaagatccagcctccatagaagctccacaagcaagcttccatcaagttatgaccatttgaatgtctcgagatcttccgtggttcaatttcaggcgtctccatatgtcatgtgcctgaatcggacctccgtaagaaaatttatgaccatttgaacttctctagagcttccgtagttaatttcgagcttctcgatatctg

SEQ ID NO: 15890 - DNA, 391 bp, Glycine max
taaagtatgcccgagtcattcatccctatgagatgttgttgaagtattggcgatcagaattgccattccttggattatagggttgaaccaagctcatgcttttacaaaaaggttcatcaagtcaagttgaaatatggaagtaaccgtcttgcaaaattggggcaaaagattaatcgagtcacatcactgcttcatctactgccaaacatatttaggattattgatgtccttgttacttccagtttcaccttgacaaagatgtcatggaccatgttgaaaatctaaattgattcaaccccatatcttgcgtaaaaattcgcaatacttcaattgtacatcattcgcatgcatccatgcttttcattggttgcattgctcgttgcattctttc

SEQ ID NO: 15891 - DNA, 345 bp, Glycine max
agcttggttcgaggtacttacccgtggaagatcgaagaacgatgaagaacgaatgaagaacgtcgaagaacgattgaaacctttgcgaaattcttcacggaaaacgttacggaaacgtttcggaagcgcctcggcttagattttcttcacggaaacaatttttccaagcaaattcgaaagagagagaagtgcctaaagggctgaaccctttgcttcttcacttcctcccctatttatagcacaataggggaggtgcttgccgcccagctcgcccaggcgagctcaactcgcccaggcgagccatgttgcttgctccagaagcaacagtctggagggcccaagtgg

SEQ ID NO: 15892 - DNA, 386 bp, Glycine max
tgggaggattgatggggacccggtgttgagagattcaaggatatgggctacgtgggagtacgtgagctcagttggaggtgggcaacaggggatggtgggtttatgcgcgctttgtggatgtggaaaacttgttgtgcaccatcgcccgaccgccacctagtaccacatgtgatgggtaccccataatcctacaagcttgagatgaggaagtgtaaaagggtgaaacttcctgcttttattgttgaccacagagtggtacctggagatatgtcgcgggggttaggagacctcggggacgtcaggtggggtgctattgcccaaaaccaagcttgaccaatcccgacccaacccgggcatagtcggtcagtgagaacctgtgatgtacc

SEQ ID NO: 15893 - DNA, 218 bp, Glycine max
ccctgctacattccatgctcaatgtcacttttgacccttgctcgggctgggaatgggctcattaaggtttaaaattctttttacggaccgtactcatatcgaaatgatacacaatgtccattccaaactgtccttttcaacacaaatgttctgaaaactttgaagggccgatataagacgcctcaaaccatattgagggataatgattgggtgtaact

SEQ ID NO: 15894 - DNA, 382 bp, Glycine max
tgtgcattcaatatcctgatgagggtgttccatatgttctcaagactggactaatacatttgctgcccaagtatcatggtcttgcaggtgaagatcctcataagcatcttaaggagttcgatattgtctgttccaccatgaagccccctgatgtccaagaagatcatatctttctaaaggcttttcctcattctctagagggactggcaaaatattggttgtactaccttgctcccaggtctattttcagttgggatgaccttaagagggtgttcttggagaaattcttccctgcatctaggaccactaccatcagataagacatttcaagcatcacgtaacttagtggagaaaacttgtatgagtactgggaaagattcaa

SEQ ID NO: 15895 - DNA, 348 bp, Glycine max
tgcattctactacttccaacaaaaactcttcatttacttggcatctcttcaattcacaattattcacttcacacctattgacaatcgtgctcactttaaaagcaatgatcaaatcaatcgtcagttatgccattggaaacaagcaaatattaaataccacactctagaaaacgctataatctaccttctcctacaaatcctctttcacttttctgtccagactccacttccacaccatccacaaaatgaaccgcacatctttaacagcatcaagtgaagtaagtcattcctactctcctcttcacgccagcaattgttttttccttttctcaaaatctacacttaatc

SEQ ID NO: 15896 - DNA, 385 bp, Glycine max
  unsure at all n locations
nttcgattcattctatgtacccatggtggtccacattgtgtttcgtgtatttttattctcgtttcatttactttttatatccccttttgacgtgcttaagccattttacttaagtcatttctcgcttaacttaaaaataaaataaatttccaccgatcgtttgaattgtattaaccgttaacttcggttaaaatgaattccgaccgttcggtcgtgccgtaaccacgttggaaatcaaaaaaagagataaaaaaataatataataataaaaaaataccttttagtaaaataaagcgggaaatcaatcggacgttttctctttgggatttctcattcttaatcgaattgactaataactaaagtgaaactaaggctaaaatcaact

SEQ ID NO: 15897 - DNA, 346 bp, Glycine max
agcttagccatggcagttggagagcacatggccttctaaacccccacaatagaatctcatacattcaaagctaaatgtcacttttgatcctttatgtttttgagtttgggtacattaagttttaaaagtctttttttggtccttactatttttgaaatgttacatttaggtccttttttgaattctccgtttacgacgctagtgttctgttaactttttaattcagatataatacttcacaaaatatattgggggataatgcttgagtgtctctatctatgacacactcagctggagcgtttatatgtattagatgacacaaaggtcaacaagtgcaaaagagagc

SEQ ID NO: 15898 - DNA, 400 bp, Glycine max
ttatcaaaaatcttttctctttttctctcgactattcttcattcttctccttcttttcacttttgttcttcctttttcttgcacaaattatgtggctcttccactggtgatgatcatggaaggctaaacactcaatcaatccaaggttccactccaagcaaagcctaatttgagttttggtttagtatttctaatatgtgtgaatgctcatctttttcttcaatcctattttcgattttcatgattatgaatatacttaggattgaaaatgaaatagtttagggattcctttcctaatttcgactttaatcacagattgttttagatgatattccaacctaatttgtgatctcaatgaatttatggattaatttgattgaaacaactctaatgacattga

SEQ ID NO: 15899 - DNA, 354 bp, Glycine max
  unsure at all n locations
agcttgtgaagattacaaaacatcttatatagcttgaaaatttatatgagcattgtccgttacctaaaatttatatccgtcaatgacttactaggaatcggatgtgttaaataatcaaatataaatcttattaatattcaaaagagcactataacaaattatacattctttttcttgtattgcccattatccacccaacaatatacaagacaaaaaattatctttattatgtgactcacaagttatcatgtgttatttacttggtctatactttaatgtgtatcanatacaccctattgaatcgaatccagatgttcaatcaaagagtatattattgttacaacttatacatta

SEQ ID NO: 15900 - DNA, 404 bp, Glycine max
taatggcagagcctactattgcttttccctttggcggaacaacttccaaatattactcacacatttcctcccaatcatagtaggttgcaccagtgattggcctactgtccacccttatgccaagctgtagtgctacatcctccagtgtaattgtacattctccaacagaaagatgaaaagtctgtgcctctggtctccatgatcaattttgaagtggcgtaattttgccacatcagcaaactcagtatgagcaagcaacaactcaattaaagggtgaggagcgggcatcaaatgagaatacaaaatgattattgctacttgtccctataaaacaaaagatacattttcataattgtcacgacaataaaaggttataatatcaattaattggtacttaccatgtt

SEQ ID NO: 15901 - DNA, 363 bp, Glycine max
atcttcataaggccttgtatggtttgaaataggctcccagagcctggaacaagagaacagatacttttctcttacaagttggattcatgagatgcactactgaatatggtgtgtatgttaaaagagaaagtctttcagacatcctcatagtgtgtttatatgtggacgacttgttgataacaggaaaagatttcaatgctatctcgacatttaagcaagagatgaaatctgaatttgaaatgtcagatcttagagaattatcatattttctgggcatagagttcaagaggacaaaggctgggatttttatgcaccaaagcaaatacacaactgatgttctaaagaggtttcaaatgtttgact

SEQ ID NO: 15902 - DNA, 401 bp, Glycine max
tgccagcagcaacagatttcttgagatgaacgaggacaagcttcttgtaggttgcaggcaactccttgtgcttcccttcgatgtatttggttatcgcgtattggctcgaaccggttctctctttcagactcgcaatcgcctctgctatcatctacagaataatcaaattaaatacaattggaaaagaaataaactaagagaattgattttgaaggagagtattttgggaaagtaccacggcgaagggagggtgggagaggggcttcttggacgacgccgttttcttggccttgggttgcgatgcggtagacatgatgatggcttgattgaaactcaaaacgaaaaaggagtaaccgttgttgaaattgaaacaagagatagatagaaattctgagagagag

SEQ ID NO: 15903 - DNA, 345 bp, Glycine max
  unsure at all n locations
agcttcaacatcagaccacttccagggtgctggaactacttcacatggacttgatggggcctatgcaagttgaaagccttggaggaaagaggtatgcctatgttgttgtggatgatttctccagatttacctgngtcaactttatcagagagaaatcagacacctttgaagtattcaaagagttgagtctaagacttcaaagagaaaaaaactgtgtcatcaagagaattaggagtgaccatggcagagagtttgaaaacggcaagtttactgaattctgcacatctgaaggcatcactcatgagttctctgcagccatcacaccacaacanaatggcatagttg

SEQ ID NO: 15904 - DNA, 403 bp, Glycine max
tgtaggattatggggtacccatcacatgtggtactaggtggcgttcgggcgatggtgcacaacaagtttttcacatacacaaagcgcgcataaacccaccatcccctattgcccacctccatctgagctcacgtactcccacgtagcccatatcctcgtttctctgaacaccgggtccccatcaatcctcccaagcttccacaacatccaagtaatacaacattcaaacagcacaagctatcacagccaagcaaaacagagcagaggcagagaactctgccaaaacaccaaccagatcacagcttttctcacttgaagaccccagtaccaattacttcgatccaattcgttaaccgctggatcgactccaaaattttactggaagtctatagtacataaccct

SEQ ID NO: 15905 - DNA, 347 bp, Glycine max
agcttgtaggattatggggtacccatcacatgtggtactaggtggcggtcgggcgatggtgcacaacaagctttccacatccataatgcgcgcataaacccaccatcccctgttgcccacctccaactgagctcacgtactcccacgtagcccatatcctcgtttctctcaacaccgggtccccatcaatcctctcaagcttccacaacatccaagcaaaacaacattcaaacagcacaagctatcacagccaagcaaaaacagagcaaaggcagaaaactctgctcatacaccaaccaaaatcacaagctttctcacttaaagaccacagtaacaattccttcgat

SEQ ID NO: 15906 - DNA, 383 bp, Glycine max
ttgagaaacatgtaaccctttggcatcatcaaaacattcagcttgatcctttgtctacaatctccccctttttgatgatgacaatcctgaaatcaagacaagctatatacaagatgatagcccgttcacatagcccttactccccctatcttttggcatgtatgcctaactttaatgattttaattgatttctaacccaagttctctccccctttggcaacatcaaaaagaataagcaagacaatcaatagataaacagagtcaaacattaaaccaaaataaatccatacattgtcataatcaaccaaagcaaagtctagaaatataataatagtgcaagattacgataactagagcaacaaagagccaaatacacggtgata

SEQ ID NO: 15907 - DNA, 188 bp, Glycine max
atggattggaacctcaattttattgtctctgtgcgaggggcatttttttctctacaaacattattttgcaaatcccaacggtgggaatatgcggaaatgagttcccaaagtggtgtccaaattttatgatgctccaatggttaatgaatatgggatcatagttttacttagacaagtttgggtgtatg

SEQ ID NO: 15908 - DNA, 394 bp, Glycine max
tcagagctagggagacatctctaattctagtcagtttgagccttagattagggagatgatggatgagaagaacattgtttggtgataattggaatagaagatcaaaagagatgatttacaaaagcctgtttggggaattgtagtacattataaaaccaacacaaacatgttaaaatgatttttggcttgagaaatcatacattcttattgtattgtttgattggaatccacatgaaaaagagcgtgtattgagttaaagaggaaagttggctcaggagtcaagactagaagtgtttgtggttcaacttgctaatttggaatggattttagataaaaggtcatccaatccgaaaataaaagtacagcttagtttggatttatttgaatacaatat

SEQ ID NO: 15909 - DNA, 335 bp, Glycine max
agcttatctagttttaatgttaggcctatcgaaaattgtctggacctgcaaacttgacattcttgatattgtcttaggcacgaagggtgtgttaaaaataaagatctcccacattgcctgggaattcaaacaaaatactccttatcttgggtttaaataacatccacaaccacaattgtggctacaataccaatgtattttgactcatcacaatgcaaccgcaaccgtaattgtgatcgcatcagctgcattttcccgtaatataaaaggtttttaactcacctaaatgtaaccaccatcacaaccacaatttaaacaatggttctataaaacat

SEQ ID NO: 15910 - DNA, 393 bp, Glycine max
tggttacctccttcttcaatacatcaagaatcatcgggttgagtcttctttgtggctgtcttactggtttagccccatcctctaaatttatctgatgcatacatgtggatgggctaataccaggaatgtccgccagggtccagcctatagccttcttatgcttcttgagaacagataacaacttctcctcttgctcatcagcaagggaggcatatataattactggaaaacttttgcttttatccaagtaagcatattttaaatttgatggcagaggcttcaattctggtgtgggcggctggataatggtagaaagagatggtttctcagcctgtacctcataaagaaagtcagaggtatgtgtacttcctgaaacatggttaattctatctg

SEQ ID NO: 15911 - DNA, 349 bp, Glycine max
agcttatgcctcatggccagttgactgtgggggctcacatcaatcctaaattagctcctcattactatggcccttttaaggtgttggagaaagtcggagcagcggcctacagactttctgaatctgcaaggatacattcggttttccatgtgtcactattgaaaaaagctgtaggtgattacaatgttgaggagacacttcccttcccttggagttggttagtgacaatgcagcaagtatggaaccagaggcagatttataattagctccgcctctgtaacattaagcaccatctttttcctaagaaatttatatactgggtttctagtctgggtattttgctttcatg

SEQ ID NO: 15912 - DNA, 394 bp, Glycine max
ttagctctcaacccaaactctcctcacaaaatctgatttcaggcttaaataggtggcattgttcgtgctcgtgcgcttagcacaattctggaccgcttagcgcacattagtgaatttcggcttagcgcgtgcctttctcgcttagcggatggactgaagtggtgcgcttggcaaacctgtacagctcatcttcttccagattcttccttgcacttagccaatgagtgttgcgcttagtggacgctcgctaagctagcggattggcttagcgagaaggtgaaaaaaccacttttcaaagcttgcctaattaacctgaaattgagagaaaatgattattaaacacataaaacagaattactaagtatttattacctatctttaactaaaagaactt

SEQ ID NO: 15913 - DNA, 333 bp, Glycine max
atcttgagatgaggaagtgttgaagggtgaaacttcctgcttttattgttgaccacagagtggtacctggagatatgtcgtgggggtcaggagaccttggggacgtcaggtggggtgctattgcccaaaaccaagcttgaccaatcccgacccaacccgggcatagtcggtcagtgagaacctgtgatgtacctaaacaggcgagctcctggcagtcaacagataaaaggaacaaagaccacaaagcaaggatgcttgtggtggctggccagctgtgaattttgtgtaatatgtggattatggcctctggtaatcgattaccaatggtgggta

SEQ ID NO: 15914 - DNA, 400 bp, Glycine max
ttgagccaaaatcttgactcaccataaaccttgttccagggtgagaatgtcaatccttaccctcagaagcaaaaaaagaagagaaggaaaatttccaatcaaaggaaaaaggagaaggaaaatttccaatcaaagaggaagcaaaaaaaggaaagaaggaaaatttccaatcaaaggaaaaagagaggaaaggaaattcccaatcaaagagtgggagaaagcaaaaagaaaagaaagaaaattcccaatcaaagaatgggagaaagaaaaaaagagaaggagaagaaggaaagaaagctcatgatcaaggatcgaaagaaaacaaaagaaatgtgcagagaggtctttggaccagacaatatctgaacaatacggaattgtcaccaaatgaacaaaagaa

SEQ ID NO: 15915 - DNA, 341 bp, Glycine max
  unsure at all n locations
agcttgtaataatcaattattgtttggatcaatacaatcgattataggcttgtaataatcaattattgtaatataatcgattataagcttgtaataatcaattattgtttcaaagacaagtttgaattgatataatcacataaggcttactctcatattcaattattggcttgataaaagtgttccatagaggaatttgacgaataaagaatatctaaaagaaattttaactntttttgaaaaccttaattatatttttaggtttcaaaatatttttaagccaatctagttcaattttgaagccttaatnattaaacgacacttagaactttcctcgtttt

SEQ ID NO: 15916 - DNA, 383 bp, Glycine max
tcacacatttcttcaatggcggactgggaggtgttagataaattagaattgttttccgatggtggtgaaattcaaatgggatggctgtaggagaaggctgatggtggtgacctaatttagggggttgagaaagaatgcataggagttgatgtgatgcaagatagaggaaacacatctctaggttgcaaaaggttgtttggagggggttcaggttagggcagaaaggtctgaccaaatagggattcataaatcaaggaagtttagggataaggagaaaggaaaataggtgattagggcagcagacctacaaagctccttcactaacatggaaagagggctagatatgtactatcacatacctatagcaaagaatggggagacaa

SEQ ID NO: 15917 - DNA, 374 bp, Glycine max
  unsure at all n locations
ntgtaggcatcgaaacctgggccttttgatcccttaagncacttagggctattgcactcggtccgcggattctctatggtcgcccgcagcctagcatcctttaaagtgggtaccacgccattgtcttgagcctgagacttgtcaataaatattctaacaggtttaagcgcaaatatgacccattttcgccattctccggaaagaccttagactgtcacctgggttttataaaactggcccttgacttggaggatacaatttagaccaaaccagtagctaatccaaatggatgttgcgtgcttttccggataaacgttttaagtaacaaagttccttattcgcagggacaaacttttttgtgtgctagaaggcct

SEQ ID NO: 15918 - DNA, 379 bp, Glycine max
tcccgcatccgtacttggaaggatctgattactgccttttttatgcaatatcagtacaattccaatatggctcccgatcgcactcagctacagaacatggttaagaaggaaagggagacctttaaagagtacgcacagtggtggagagacctggcagcacaagtgctcctcccatggtcgagagggagatgattgctatgatggtagacaccttactggtgttttactatgagaagttggtaggctatatgccctccagcttcgcggacttggtatttgccggggagagaatcgaagtatgtttgaagagagggaagttctattacgtctcctccacaagtaccaatactaggaggatcgaagcaactggggcaaaaag

SEQ ID NO: 15919 - DNA, 347 bp, Glycine max
atctttttgaacgtcatgggaagatcacaaaggtggttcttccaccaccaaagtctggacaggaaaagaacagaattggctttgtacattttgcagacaggtcaaatgctatgaaagcactgaaaaacactgaaagatatgaattacaacgtaacatattgtccagccttttgtggttattttatgtgaatgttggtcaataatatttaaggtttgttctacgtttcaggtcaacttttacaatgctctctggcaaagccacaggctgatcaatagtctggaggatcaaacacacagaagccaggaccaggattgcttccaagctatccaccccatgttggttatgg

SEQ ID NO: 15920 - DNA, 384 bp, Glycine max
taattcgtttgtaccatcttattttcttcttctacaagagctcatggagaagtttattcaaacaggacctttattttagctgttgttgctgttattaatgaatacttctgctctgcatttttaggtttcctgcacgaattcagaggctcaggttgatcgtggggtgcagaagaaagagactttcttttgacctgccttctaagctttagtaaggttgtcaccttaatgttgagttctgggaataacttgaacagtagcagcagcaacagtgggataacttctttagatatgccacccttgccccagtgtttaccactagattcacttacagtacgcaatagaaaatatacaggagagctgaggagggttcttggtgtgtctgct

SEQ ID NO: 15921 - DNA, 324 bp, Glycine max
agcttctgtcctttgctaactattggactgaatctcggtccgggcaattaaaaagatgggactgtacctgccgaggaagagggcttcttcgagggcgcagcggaggctggattcctggtggcccaagccctcgcaagatccacagtgttttccggggcagtcgatgcgggtgccccaatagaggtacttttcgaagggctgttgttgtcgtcgctgtaagaggttggctttcgagacggtggtggaaagaagagaggagaacaggaagagaagcgcaatcgctgtcactgctgccgcgaggagcagaattcgggatctcgcgga

SEQ ID NO: 15922 - DNA, 439 bp, Glycine max
tcaagaataatggcctcagcatggtggctggaaatactacaatagagaaacctagagaagagtggtctgaagatgaaagaagattagtgcagtacaatttaaaggcaaaaaatattattacttttgccctaggaatagatgaatattttagggtttcaaattgtaagagtgtcaaggatatgtgggacactttacaagttacacatgagggaacaactaatgtcaaaagatctaggataaatacttcaactcatgagtatgaattatttaggatgaagacaaatgaaagtatacaagatatgcagaaaagattcacacatatagtttatcatcttgcatcattaggaagaacttttcaaaacgaggatctcataaataaagtgttaagatgcttaagtagagaatggcaaccaaaggtaacaaccataacagaatctag

SEQ ID NO: 15923 - DNA, 402 bp, Glycine max
  unsure at all n locations
agcttattatatgattagatcttatattgtaaagtgtcactatgaatcttcgtgaaatatgctaaaaaagtctatatgatagtcattaataattttctagatgcttttntaagggaccactaaaagcttaagttaaacgaagacacatcatgaatgatttgttacatctttaacaaaccctagcacacaagagccactctagcttcgaagcctaaataatgcgcatgtccttctatcatgtgctgatattngagtttggttaaaaatagtgaaggctattangtaaacacacgtgaatgatttcatattacatctttaacaaaaatacgacgctcaagctaaagacatgtttctatatatctgnttacactggaatttggtaacaaccgctagtctaagtaa

SEQ ID NO: 15924 - DNA, 433 bp, Glycine max
tatataatactcacgctgctggccgaaactatggatcctgttaaaataaaattgtttcacaaatcgacttcagataaatcagatgagatacacatgcacaggcacaataaattctaaataaaatcattctttttacatctatttcaagatgaaataaatgatattctgaacaaactaaacatgcaagaggcataagaagtctaccacacaacattaaaggagtgtttggcaattggtagaagtgaaaattggaggaataagaatgaaactgagtatctggggtttagacttatgttgtgtctgaactcgtcatcaattttcactccactttttccttttcgcatatatacaaagcacgccgagagtatcattataaacaaaatcatattaccccttatgtgtctatctttcttagaatatgagctacttaacc

SEQ ID NO: 15925 - DNA, 442 bp, Glycine max
agcttgtatgagtactggaaaagattcaagaaattgtgtgcaagctgtcctcaccaccagatttctgagcaactccttcttcaatatttctatgagggacttagcaacatggagaggagtatgattgatgctgccagtggtggagctcttggtgatatgacccctgttgaggctaggaatttgattgagaagatggcttctaactcctaacaatttagtacaagaaatgatgctattgttcttagaggagtccatgaggtggccacgaattcatcttcatctactggaaataaaaagcttgatgccttggtcaacctagtaactcagcttgccatgaataaaaaatctacaccttttgcaagagtctgtggtctatgttcttctgcagatcaccatacagatctctgtccttctttatagcaatctagagtcaatgagcaac

SEQ ID NO: 15926 - DNA, 435 bp, Glycine max
  unsure at all n locations
tgtgactctnggcaatttctttaacaaaaccagtcacttaaaaagttatgacttttgaaagaatcttcagaaacaagtcacttgaagaattgtgacttttggaaatgtgtttttcgaaatcagtcactggtaatcgattaccattaaggtgtaattgattacacatcaacagatgtgactcttcattttgaattttgaaaatcttaacgttttaaaacactggtaatcgattactacattctggtaatcgattaccagagaataaaactctttggtaatgattttgtgaaaacttcttgtgctactcaatgttttgaaaaactntttaatacttattttgattgagtcttctgttgattcttgaatcttgagtcttgaatcttgatcttgattattcttgaatcttgaatcttggaacttgattcttgaatcttt

SEQ ID NO: 15927 - DNA, 442 bp, Glycine max
  unsure at all n locations
agcttgtatagttccncaatttatggtcattctggagtaaatttggtaaataaatctttttttatggttaacgctgtctctagaacatttccattgaatttaatgatgaaatntgtgcattntcaggtgaataaaaggctaagttttgaattgcaaaatgtagcagttgggctaagcgcatatccaccgctaagcgcgcttagcacaaaggagaatctggcagagcatcagcatcaaagctaggtgctaagcgcgagatcagtgcgctaagcgtatcaagtgccttcaaccaggctaagctcgagactagcgctaagcccaatttcacttactcgcgctaagcgcagcgtcacgatttcagagcctatttaaagcctgtcttgtgtagaatganggtaccacctttaccacctttatgacattnntatgacagcttctacag

SEQ ID NO: 15928 - DNA, 447 bp, Glycine max
accttaaaactcagcttcacaagcagcttccatcacttgataggttagatccttttatcttcttcgaagggacataagtatatcttggttgctgctgagtatttcaccaattgggtggaagaaattcctttgaatgttgatcaaggggatataataaacttcatagaacaaaatattatttttcgatttagtatcccataaacacttataacaggtcaaggcaccatttttattgatcgaaaagtggttcaatatgtcaattctcaaaatattaagttagtaacttataccccttattatgctcaagcaaatggtcaaggtgaagccatacacaagaatttggtaaggttaattaagaaacatggccaaaaacctagaagttagcatgaaagtttagaccaaattctctatgcttatcaaaattcaccaaaagggggccactattgt

SEQ ID NO: 15929 - DNA, 441 bp, Glycine max
  unsure at all n locations
agcttattgacttccaaatataagtctttaaactgcacattgagctactcttctaccaagaaagcttttatacataaacatttggctgaaatattcccaaccaataaaaacatgaagtttcacttgtgttgtcaaaacttgaacaatagcacaatcaaataaaaacatgaaattttacttgttttgtcaaaactacccaataaggaagataaatcttctcctcggtgagataaactaaattagttgcgtaatcaactgcaactgcttaatcgtgatacgtcttgttggtgagataaacctaattgagtatgctaacagggtgtgaatataaaagaaggagaaacatgagggataatgcataccgtaggcaccaattntctccaggcagcaacatgttgtgggaatgcaaaaaatcaaaatgaatgagataggctaatggag

SEQ ID NO: 15930 - DNA, 433 bp, Glycine max
tatcaaacattagtcataaagtgataaggaggtgatttcttcaaatagatcattagcagaaaagaataataattgttcacacttcacaggaaacaaaagctatgaaaaggactgaaaatttaaacagcagaatgagtttgtacctgtacaaacttggcaaagccagacccaagaggggatccaatgtacagagccattgaagctccatttagcaaggatgcgtatactagccatggccccatcatccgtccaagattagtgggccagcacactacatcacctttacgaacgtccatgtggcaccatgcatctgcagcagcttttagagagtaatattggtccatggaattgcctttggatcacctataccaccaaatgaggtacattatattagcttttggctagcttcatatggtgagtgaagtcttggtat

SEQ ID NO: 15931 - DNA, 439 bp, Glycine max
  unsure at all n locations
tgcttgttaacatatgccaacatgtattatatgtcactatagcctacacctaaattatggaaaatagtttaattcatttaatattatataaaaaatntaaagcaatcattaataattaaaataaatntaagaataaaaaaataataattcagaataaaaaattaaaataaatttctttattataatcataaatatctatttaactacccattaaaatttaaaacaatcataagtaattaaaataaatttcattaataaagtcatgaccttaatatattataaatatctatctaattaaacatataaaaacatcaatatattaatattataaaataatgacaagagaaaaaacttcataagagagaatgcactcttcatatatntcacaacacacataatgtaaatgtagcattctctacatattctcgttactaattag

SEQ ID NO: 15932 - DNA, 429 bp, Glycine max
tccaacatttactcgacacgtatcaaatacagatttttaaaagtctttaatctgattaacctcaatgaacgtgcaggcatttcacgttggcatgcgtgaaatgctgcacaaacatatgagattaaggcttgggatctcaaatttctatgttaataataattatgtcaacaaggcagctatatggagggtacgtgacgagaggatgagcaaagacacttgagatgataagttgtgccttctatgtcaattgtcaactcctttttaattctattgaataataaaaagaaaagtctaaaatgataattacttataataaataatgtctacgaacattacaagctgagattacctctcaaaaataagacatgttaaaattccacgcacaccttaatggcaatatatacttttatgttgtttgattgctatata

SEQ ID NO: 15933 - DNA, 413 bp, Glycine max
  unsure at all n locations
agtcttgccgcccagctcgcccaggcgagcaaggttgcttcctccaggagcaacagccttctggaggaatcttctggagggcccaagtgggcctggttgctatttgcatccccctttntactaaatgcacccccctttctattttttttgtaattctttttccgtaacgttacgaaactttacgaatttcgtaacgatacttattttccttccgtaaggttacgaatccttacggattatgtatttactctttnttagctntcgaagaagttacagaaactcacggattgcgcanaaacaccttttttcgatttccgccacattacgaaatntcacggatcgcgcaagcctgcttccttttgatttctgagacgtctcgagacctcatttattgcatgtcatctagtaataat

SEQ ID NO: 15934 - DNA, 424 bp, Glycine max
tctactgcaataagagttagttgggtcttgctatttagtagaaaaggttgctagagagtatatgccacgatttaattatgacatacaatagatatttgagtttttctcttaaaacttgtcacattgtcacaatgcatattagtactaacattatttccagctacttgtgaaatatctctagtggtaagaaagacagaccttactatgtatccatgcctctcacgtataactcatgatattatatagatatttttttgaaggtcagggcttaaaagcctgaacactatctcaattgtgggttttatcctcctcatattgtagttaggcctggatagccaccacatacgtcaaggggaggcaccaccacttcaaggcgaccaatagtattcttggcagcattgtctggtatctcccgactttatca

SEQ ID NO: 15935 - DNA, 431 bp, Glycine max
  unsure at all n locations
tgcttgtaatcgattacacacatactgtaatcgattaccagaggagattttcagaanatattcttaacagtcacatcttttcatttggttcttaaatggctatcaaaggcctatatatatgtgacttgagacatgaatttgctaagagttttcagaacaaaaagatcttatcttcttaaaaagaaaaatcgttttatcctcttacaaattccttggccaaaacacttgtgattcaataagaaattatttgagtgcttaaattgttcaatctatctctttcaagagagatttcttcttctcttcttctttattctgaaaaaggattaagagaccgagggtctcttgttgtaaagaaatctgaacacaaaggaagggttgtccttgtgtgtttcagatcttgtaataggaatttacaagatagtggaactctc

SEQ ID NO: 15936 - DNA, 433 bp, Glycine max
  unsure at all n locations
tgatcaaaacaattatctaatcattccaatccactcttatcatacagttgctcattcaaatcattcgcagacactcgttgcatacaaaacaaaccactgcatatcaaattcaactaattcactgttcaaacaagctttctgtacaatcaatcaactcaaagtactaaaatttaaataactaaaatttaaagaactgaaacataaacattgaaatttaaatgactgaacataaatcataaaataactgaaataaactaaattgttcaaaatgcacaaatttaaatgtcttgctcctgtgcatgctcattgagatccaacacctgagcagctagtgaatcctgagggataggctgctntagctcagatgctggtgcagatggcatggaatcatcangtatgggtgctggagatggctctggaatctggtctgtgg

SEQ ID NO: 15937 - DNA, 417 bp, Glycine max
  unsure at all n locations
tattttgtagctntcaggacttcaaaaaagccaaagatttccccatcctagttctaaatttcaaatgctatgaaagcttaatttaaaatatgtgtgcaccttggatcacaatgtgtgcaatttctaaaatggggttcaatttaatataacaaatagcgatgtacataatgtttgtacacatttatatatgtgtggcataatgaattttactcgtacagcttcaggataacatggcaaggttcaggctcataanagttatagcaccaaacttgtcggtatgccttatacaaacataaggtgaacccgaaataaacccaaaaagcattccctatgtcttgcttattcagcttgtttagttcatttggatattggcaaccttttcaattaaggaattctatagtgaacaggacatatctg

SEQ ID NO: 15938 - DNA, 431 bp, Glycine max
  unsure at all n locations
tgtcgtgacttcactattttgtttttaaatattatattgtaattttaaaagaatatacgttattatatgttataatattataaatgttaactcttttaataaattataagtgttaaagttaatattattttagggttttagaaatttaaataagttattagataataatattttagagtttagtcttttaataagttataagatttaagttattattattttagggtttagtcttttaataagttttaagttacatttgtattttttgacagatggctagcgaagaatccataataagagataatgttaacgatttcagtgacgatgagctacaatatgatgttcacaaacatgtagaaccaaggaatcaaagtgagttgtcttcatattttgaaactattagtagccaactntcagaaatcaagagtact

SEQ ID NO: 15939 - DNA, 436 bp, Glycine max
agctttaggctaatataaacgacaataactatctactcggatgtctgatcgagtcccgtaatatatcaagacgctcgacattgaatgttgaacctatgagcccattcacacgacattaactatttaatctgatgtgtgattgaatcccgttatatatcgagacgctcgaaattgaatgtggaagctttacgcaaattcaaactacaatgactttttactcagatgtttaatcgactccagtaatatatcgagacgctcgaaattgaatgttgaacctatgagccaattcatacgacaataactgtttactcggatgtctgattgagtcccataatatatcgagacgctcgatattgaatgttgaacctctgatccaattcatacgacaataactttctactcggatgtccgattcagtggtgtaatatatcgggac

SEQ ID NO: 15940 - DNA, 763 bp, Glycine max
  unsure at all n locations
gccccgacagagcgacacanagcacagtccagatagactagcaaccgggaccacgacgagccacacncaccncnccccccagagcgagcgcanattgagaccatcgcaanacccgnggcncnanacaaaaaacgccgacgtgacacganacgcgagganacctctgcatacagacggcgaatatatatatctacatcacgccccactcactcacgacgatgaagtgagaactatacgacacgaacaccatctcacactcagacacgaggactccaataccacgtagacagaacatggacgtctaacnagacacacagccgaatgncacgagccagtcaagatcacgggcgccacaccatacggcgatataggcacggacacacacgagagagggcgcacacacgacacactactcgcctcacgcgtacatctgcagaccaccgccgcangacgaagtaatatgaaccagcacacgaacgaaccgccgcacacgcactcaccagcatgcagcgtaacgcgagacatccgcacaccacgnagcacaagataccgcaccacgcaccactacgtcgcctcaccacaacggagccacaaccaagacagactgcggtgagaagcacagcacgcaatcgcatccagacngcacgcgacaacgcgcaagcgtcagccacgtcgcgatgaccgcacacaacaccacaangaccatacaccgcganagagcgacaccgacacgcatacangacaacacgaccgctcacgaccg

SEQ ID NO: 15941 - DNA, 379 bp, Glycine max
  unsure at all n locations
ttttcttgtggaggctntagagaatattggttgtaagagtttttggaggctttangaaagataaactaccacggttgggtgcttggtcttaattaagaaagtctacaggtgtatgtattaaagtagcctaggttggggtgaaccaatacaattccttagtgtgttgtttccttccttagtgcttcttgtttatccttgttattataaacttaaagtttgtttttgaaaagccttgttttgaaaagtataactgatatttgatcaaaaggttttcataaaatagttttattattcaaaagcaacacatactctaagtaaggaaagtcanaactaagatcaaaagaatttcataaactagttttgttattcaaatggaaat

SEQ ID NO: 15942 - DNA, 426 bp, Glycine max
tcactactcctatgtattcttctcaaactttactcattctctgcatcctttcttcattgtcataactcattcttctgatttgatcaccaagtttaaacatcttcgccatgagccttgctgtgtttgaagatggtggaggagcatctccacttgtagaagccatacctacaaggatagttagtgcacaagtaataaaaaaataggacctcaccactcaacctagtgtttcactcaagttcactcgtgtatcactttttcaaggatttttcttttataatatgcactcttgccttttaccactcttgctcctcttcagttcttaagcaaaatcttcaagcttaaaatcaagaagtattcaatgtgaaatatgtcataaatcaaaactcaactcaagaagccaagaatagaaatactctaagacaaaac

SEQ ID NO: 15943 - DNA, 425 bp, Glycine max
  unsure at all n locations
tagcttgcccagagaaggagtccacggaggaaatgcttaccacctcanaagactggaaagcggtttctaatgactcctctgcggcttccacataaggcatagaggatgggcagctcaccaagatgtcttcctcgcctgatacgatgaccagatgcccttccactacgaatttcaacttttggtggagtgttgagggaacaactcctactgagtggatccacgggcgccccaacagacagctgtagggggggttaatatccattatttggaaggtaacttgacaggtgtgagggcctatctgtactgngagatcgatctctcccctaacctctcggcgggtgccgtcgaaggcacgaaccaccattgaacttggtttaagtggaggcattgaaccatatcatgacactttggtacatatggccata

SEQ ID NO: 15944 - DNA, 434 bp, Glycine max
cttgagccaaaatcctgactcaccataaacctttgcccatggtgagaatgtcaatccttaccctcggaagcaaaaaagaatagaagggaaatttccaatcaaagaaaagaaaaggaaaatttccaatgaaagagaaaaaagaaaagaaaggaaattcccaatcaaagagtgggagaaacaaaaaagaaaagaaagaaaattcccaaccaaagaatgggagaaagtaaaaaaggaaggaagctcctggtcaaagaaaccagaagaaatgtgcagagaggtctttggaccagacaatatctgaacagtacagaattgtcaccacatgaacaaaaaggaaggaaaggaaaccacgacctaaaatggtcttctccctttaattaccaaccaaaatcccgtgcgctatgcgaccttttttctcgccccgcactaaacaa

SEQ ID NO: 15945 - DNA, 437 bp, Glycine max
  unsure at all n locations
agcttgcttttggagaggttccatcaaccgccctaattccttgatgctggtggtatctaggcctttaaccttgacttggtaaaacctcttgccggtttgattagtccccatgcttactaaagtgagacaaaaagctggtgcaaatcaaaactccgatatctcatgggtgggatggatgaatgcatgaaggaatgcatatgacacagctgtattttaagaatgcgggtgcccgggacattgtctcctttttagacacaacgtctaggggtagcaaagtgccccaatgtatgtatttaaaacggtgacccggaccctacattgattntgtctatagaggggatcaagacagaacccctatgcaatgcatatgcaaaaggcgcaatagcatganaatattcactgaacataagcaagagggtatatgatatttatgcatg

SEQ ID NO: 15946 - DNA, 425 bp, Glycine max
  unsure at all n locations
tgcctcgaagaggtccaggaaggacaaggcagccgaatgatactagttccgctccggagtatgatagtcaccgctttaggagtgctgtacaccagcagcgcttcgaggccatcaagggatggtcgtttctccgggagcgacgcgtccagctcagggacgacgagtatactgatttccaggaggaaatagggcgccggcggtgggcatcactggttactcccatggccaagtttgatccagaaatagtccttgagttttatgccaatgcttggccaacagaggagggcgtgcgtgacatgagatcctgngtaaggggtcagtggatcccgtttgatgccgacgctatcggccaactcctangatatccgttggtgttggaagagggccaggaatgtgagtatggccagaggaggaaccggtctgac

SEQ ID NO: 15947 - DNA, 435 bp, Glycine max
  unsure at all n locations
agcttctgggaaaaatccacgagttntcagtatcaaaactcctagtgtttcattggaattaggagtaacctacagtaataacaaattatctcatgaatatatcattccaaggctcattatttctcacgaaacttattcaccattagaaacaaagaggatttacctttctccaactatgaccaagaaattcattcacagctatagcattctgtccatacatcagtggtgaggaccagtaaccccacacaaaccatttgtgcacattctctggctcanagaacagaattatcatgataaaggttcattacactaatcaactntgaagttacattaccattttcttacctcgcgaaatcacaaatcctcccanaaccagaactataagtaatgcanaacttccaacagtatntgcaactataacatcccttccgaatg

SEQ ID NO: 15948 - DNA, 438 bp, Glycine max
  unsure at all n locations
tttggcaaaggaagaagaagaagaagttcaaagagactctttggttgaaaaagaatatatgaaaaagttgtgtaaaagttttgcttttatagactcttcatgtctggtcaagaaaaccattagaagagttataacctttaaaaaaaatagaaaaccattggaagagttatatcttttgatttttattcaaaacttgtcactggtaattgattaccaaaaccatgtaatcgattacacaaagctttttatgaaaggatatgactcttcacaattgattttgaatttcaacgttcagatacactgataattgattaccaatatcttgtaatcgattacaccattttgaaatcaattggaacattgaaaatttagttgaaagctttntgaaatcaaactntgtcactggtaatcgattacaggaaactggtaatcgattac

SEQ ID NO: 15949 - DNA, 440 bp, Glycine max
  unsure at all n locations
agcttgtacggtgatcttatcgtgataaactnttttgctttggtattctaagttgaaaactgtatcaagataaacctttntgaattttgccaagtttctgacataattgggggacaggtttaattgagctaggacttgttaatggcaattgatttataaaaaatgttcttatttctcattgcttgggaatgagaaataatgtatataaaactgttagtgttcaaggagacaatgagacatttaatgctactagaatagaaagtagaatcaactgacattttctanaggtgatctggtaattgaggagaatttcatgatggttcangaaggatggagccttgcagaaagtttntgtgtccgatgcattgtagctgctccttatgttgttccatacaggtacttaagaagttcatccncatcatgtatgatatccccattat

SEQ ID NO: 15950 - DNA, 435 bp, Glycine max
  unsure at all n locations
ngcaaggtgaactatggggctggacatgcttctatgttgtcttggctgcagttgcagttggatcttcatactatcatctcaagccagacgatgctcgccttgtgtgggatcgcttgcccgtgagttcaagctaacttcaattttattataaggcaaatgctaaccaatgcccttccaatgccccaagaccattggttaagaaaataaaaggagaaagatttttattggtttacataaaattacgctgttcatgatttttttttattttatgttctcctctgattttcatattaaatactttatccttttagcaagacccttgtacaaatcgtttcccttttccccctttttttcagcctcattttagtttccaaaactgattattcgctgcagatgaccgtcgcttttacatcaatcatggcaatattcatcatt

SEQ ID NO: 15951 - DNA, 443 bp, Glycine max
  unsure at all n locations
agcttgttggcacatctacgtctttaaatttcctgcagtcgacatttagaaagactatttgttcagagacagaanaagtcttttcctccaagcttataaaaataataacccaattnttccagaagcaggaaaaataggataaaatttgatagttgtttattaaattacaggtgcaatattctattaagaagtgatgaaaataagaagcaagataattgtttcttgcaatttttgaatcaagcaaagggtgttatatgagtgtctttcttgttaactatgggctatggcaaaggaaaagacatgtaattgtaaatggtcaaaggcttcactttatataatcttgccaaaatatggaaatgacattntgtatacagagcatatatagtgtcttgggtatatnnttggaagntattanaaaaagtcattgttattgctaaatgttt

SEQ ID NO: 15952 - DNA, 437 bp, Glycine max
  unsure at all n locations
tattnttctctccttagtattttggcaaaaatgagctctatataagtttataagctttacaaatttcaaaagcctgataataggcttgccacacaaataagaaaaggtgaccattaacaaaaaggatatcaaatcttctctcagtaatattttgcagcatttggtggaaaaataatacagccaggagctaacccagtaataactaataatatcaatatgtaatgatgtgtatatgtttgcagatgaattctaaaagcagacgtcatcattttcttatagaaaagtaagtagaaagtgagatggaaaaaaaaaggtcagatggtctcaggagaagagatgatttgtttgatgtattatgaactaaggaaagggattttccacaggcatatacacaaactacagaagcacatgtccagaggtcagctaacgatccacat

SEQ ID NO: 15953 - DNA, 400 bp, Glycine max
  unsure at all n locations
tgcttaacaaaaggcatgcaaagtgggtggaattcctagagcaattcccttatgttatcaaacataaaaagggaaaaggtaatattgtagtcaatgatctttctcggcgtcatgcattactttctatgcttgaaacaaaattgattggtcttgaatgtttgaaaagaatgtatgaaaatgatgaatcttttggagaaatttttaaaaattgtgaaaatttttcagaaaatggtttctttagacatgaaggctttcttttcaaagaaaacaaattgtgtgtgcctaaatgttctactagaaatttgcttgtntgtgaagcacatgaaggaggtttaatggggcattntggggtccaaaagactctagaaacattacaagaacattnntattggcctcatat

SEQ ID NO: 15954 - DNA, 431 bp, Glycine max
  unsure at all n locations
tgtgggattgtgtgatagtgattntgccggagatgtttatgatagaaaaagtactaccggatttgtattttttgtgggtgattgtgtttttacatggagttctaagaagaaaggcattgtgacactttctacttgtgaagccgagtatgtagctgcaacttcttgcacatgtcatgccatttggctaagaagattgttggaggaacttcagttgttgcaaaaggaaagcacaaagatctatgttgataatagatctgcacaagagcttgccaagaatccggtgttccatgaacgaagtaagcatatagatacaaggtatcatttcattagagagtgcattaccaagaaagaagtagaattgactcatgtgaaaactcaagatcaagttgcggatattttcaccaagcctctcaaatttgaagagtttcgaa

SEQ ID NO: 15955 - DNA, 432 bp, Glycine max
  unsure at all n locations
tgcttttatatttgagtacctgaaaaatgggagcctagaacagtggctgcatccaaggacattaactcctganaagccaggaacattgaaccttgaccaaagattaaatatcatgattgatgttgcttctgcaatacattatcttcatcatgaatgtaaggagtcgattattcattgtgatttaaagccgagtaatgtacttcttgatgatgatatgactgctcacgtgagtgattttggcttaacaagacttctttcaactattaatggtgccacttctaagcaaacaagtacaattggaataaaggggactgttggctacattcctccaggtatgttctaaactcccaaaaaattgtttctttgatttcttcccttttgatgaaaaactgatatnntactaactacaagtatggggcaatnnttctatat

SEQ ID NO: 15956 - DNA, 434 bp, Glycine max
tcacacaatttatttttttttatcaaacttgagttttggaaaaccaattactaagactttcctaactagatgatttaaatgatgcatgttaatatgtgcagccctatgatgccacaatcatgaatcatctatcttactcaccaagcaacttagctcatgaaaagatacatgttcaacattcaacatatagatattacctattctcttactgatctggacaactttaccggatatggcttcacttataagacatcaatttctattgaactctattttgaaccctttatcacaaagttgactaatgcttagaaggttatgctttagtccatccacatataacacattcttaatctgagttttatgttgattccctatatcatgagaatcattatttttcctttgttgttgtctccaaacatgaccatagtttggac

SEQ ID NO: 15957 - DNA, 444 bp, Glycine max
  unsure at all n locations
ttgcttatgcaatatgatagttggtatctttgccttcaagttacatacacgtgcctacaattgatatggtcatacatccatcanatatctctaattaaaatgaaattatgcggttcattacagataataaaatatttactttttatatgagaaaatcaaatgctgatattatgaatacatatataataaactagagtaacacccgtgctatgtagaagtaggggaagaaaaaagtttcaaatagttgctccatacttttaattaaagagagtgtagagtaataaaaaaaaaattggtgtgtaggccaatacgatttttatttttttacagatatcaaccataaataaatgtatgtaattaattaagctagcaacatttgtctggttcanagtagtcctgaacattaaattcttctacaattattgttggacatttattcttatg

SEQ ID NO: 15958 - DNA, 427 bp, Glycine max
tgcaatgtaatcctgtcaccgcttatacattgtattgtgtgatgctatctgcagaagttcacagatgaacacatttattttctaacataattcacgaaagattgaaaaaatatgatgagaagtggaaagaatcaaagaaattcattgaatcggaattgtagtgcttatttcaccttctgatttgcactttgcatctctcgttgtgctcttccaaggtcctctgacagagtactatgtgacctctcaatgtcaagcctagcttctctctctttaacaagagactccactgcagccttgtatttacaaagatgataaatagcttagagttcatcatatgacatttcctttcaccattcttgttctcttccaattgactaaaaattctttcttaccgactgttccatttcttccttgatcaagttttctt

SEQ ID NO: 15959 - DNA, 346 bp, Glycine max
ttgcttatatctacttaaaccaatatgaggttgggctcttatactaaagccacttagaacctttggttgctacctacgagagtccttagatatcaatcactgtgggcagctcttgccctcatggcaccttcattggatgcacccaaggatgccacacgagcctcctgatgatcgtgttgatgctaaccacatcaactaacttagccatcacactcaccagatctgcataacacattgacacatattctattggacttctccacagaatggagattatgatgggccatatgcccccatgtactactgttggggctataagcagattatctaagcatatagattctat

SEQ ID NO: 15960 - DNA, 431 bp, Glycine max
  unsure at all n locations
tgagctccttcaactgctcaaagctcttaatattttattagtatccttgnggaaccttcacccgacgaatagactgacaaaagcttattttctcctttttggacaaagtatggcacgctgggggcaaataaattctcttcccatcagaccttggatgcaactgtgatcgtatgcccatataagctagatgttgacgggtattcaagccatccttcatcttgccttgaatgttaaggagcgtaccaatcacactgtctcaaacatttttctccacatgcataacatcaatacaatgtctaacgtcacgatcagaccagcacggaagatcaaagaaaatagacctcttcttccatatgcaactcttacttttatccttcttttgggacttcccagatataggatgtaagtgtggaacccgctcatatacctgc

SEQ ID NO: 15961 - DNA, 441 bp, Glycine max
tgcttctcttggaccttgaacaagcaatcaactcctctttcagaaccctgctatgtgctcgcgactggtccctttcttcccttcgcaacttgagttcattattgctaccccatagagctccgcgaaatttgttccggccatactcttccttgcgagccctcttggtctcttgttcaagggctcttgcggtaattgcattctcttcccgtaacccggcacactccttccgaacgtgtgtagcagccaacttgaacttctccttggcgagttttgcctttcctaactcgcttttgagagcttggacttcttcgtcctcttccggtgcttcaaaattctcttcgctgacgacttttaacttggcgagccaatctaaacctcgtatgcgaactgtcagccattcgtggtacccaccaatgatgccattacgaatgcctctaagct

SEQ ID NO: 15962 - DNA, 431 bp, Glycine max
  unsure at all n locations
tgtgcaaatcagatcactcctacattttatctctttttgcattgtatgttagtctcgtcctttgtcacgggaagccggaatgtccatatcaccttcttaattgtacacatggggcactgcgcccccaaatgcgcgagtaagaagagataattttccgggctctcgtgtccgtaaaatgcattcatatcatgcatcgcataagcatctcttcataacatcataatggacatatcctgcatttgtccgttatcatattccagcctcaccttttgcatgagtcatggcatcatcatgcatatgcgtccaacaaactttttgatctgcaaaattgcataccatcntgtttcatgtttgctcatccttgcgttttcctctacaaaacaaaaacaaagaagggggaagcgtgaaacttcacactacattcttagttt

SEQ ID NO: 15963 - DNA, 415 bp, Glycine max
  unsure at all n locations
tatttgcattntaagacaaatcccccccaccccgaaggctgattctcaatccagcagtcccttaccaccttgtggtaatgcttgttattaagccatccatcanagaccttataaggcttaggaccccaatcaatgctcttagatttcatgaggatagggcagtgatcagagtagttcctttcaaggttgtgctgcgaactgtctggccacttagaaagccaaccatcagagacaacagctctatccaatttgcttttacaggaaccattangcctaacccatgtgaactgcttacccacactangaatatcttccacctccatgatagcaagccaatcattgaaatctgacatgatgctggactctgaattccatgatngcttccatctctctgaaggtgcctaatacataaaat

SEQ ID NO: 15964 - DNA, 432 bp, Glycine max
tgagcaaaaccaaaggtaccgtctctttttcatatttgttttggcatcaaccaaagataaatgattggtatctagtcgtcttcatattggtcctttatcatatgatctgtccttttctttaaagtagcctatattgaagtgatgctatgattatggtccgttagttgtaagatgaagacttgcatcaagaaaagcgttttaagataaagattttctgttttagttgtacgtagagaaacaaaagttacaatattacttaaatgagaggaaagaattatgcttcacttcagcaagaagactcagtgtatgtttgacttaatattagtaaacttaattatgaataaaatcgattttgtaaaattaatttagattaaaagtgaaatcatctttattatggatcactggtttaggtggttcatttaggatcacttt

SEQ ID NO: 15965 - DNA, 425 bp, Glycine max
  unsure at all n locations
agcttgtagatccccttgcaggactttntcttgttccatattgaccaaaacaatacattntgaanaatattaaacaaacctgtgctacacatagatgacatgtgttggatacctacaaattatattatgtattgaaacaaaggtcatttttatactctgaatccttaatataacctcttatacccttttctttaaaatttacttagcgagtattttttttccagtgatcaagatgattatgaggttgtacaaaaagtgggcagggggaaatatagtgaagtttttgaaagcataaatatcaatagaaatgagcgctgtataatcaagattctgaaacctgtcaagaaaaaaaaggtactcctttctttgcttgtnttatcctagtttactcntacctgcgactgtgaataagccagcaatgatgc

SEQ ID NO: 15966 - DNA, 427 bp, Glycine max
tgcagaaatatgtgatcctcttggacatctgtgggtttcatggtggagcagacaatgtgaaattctttcaaatgtttgtgcgagtcttcacctgcaagaccatgaaactttggaagcaaatgaatcagtccagttttaagaacatatgggacatcctcatcagggtattggatgcacaagttttcgtaggtgaaatcaggtgcagccatttcccttagagtcctctcacggggtggaggttgtgccatgttctcagaatgtgcaaaatcagaatgctcagaatcagaatgctcaaaattatagtgctcaagatcaggatgttcaaaatcaccaataacagaatgcacagattcaccagtaatggaatgctcagaatgatcaaaaggtataaaatgatgcctaactaatctatgaaatgtcctatcta

SEQ ID NO: 15967 - DNA, 395 bp, Glycine max
  unsure at all n locations
agcttatatatggaatacttacttgttggtgataaataaaagcgcanaacggaatcgaaaaatgcgaagagtagagatcctagggctgcaaactcgtaaattccgtgggtatgggctttgaatggggggaaaagaagtttttgaatgcaaaaacgtccccctttcgtcatttttttatattttggtgcaggggttgctcgcccaggcgagctaacctgcacttttttttttaggggaaacataaccatggcccccctctctttacaggttaacgttcgcctactcgaacttacttaagttagaattaggcatcgttttacttatttaaaacaaaaaatagtagttatcattgtgaattcaaggatactgtgctgtcttgagtgacttctctgttg

SEQ ID NO: 15968 - DNA, 440 bp, Glycine max
  unsure at all n locations
ntatgtgatgaacattggttaatggcaatgcatgaagagtttaatcaatttaagagaaatgatgtatgggatttagctcctaaaccaacctctcacaagtcaatcggaaccaaatgggtgtttcgaaacaaacttgatgaatctgacatcacagtaaagaataaagcaagattggttgcaaaaggatacaaccaagaagaaggaatcggctatgatgaaacctatgctctagctgcaatgttagaagctataagattactactttcatttgcttgtattatgaatttcagacttttttagatggatgtaaaaaatgtcttcctcaatagatgcattgaagaagaagtgtatgtagatcaaccacttggatttgtgcattatgaacatcctaaccatgtctacaaacagacaaaaggctctatatggtttgaagcaagcan

SEQ ID NO: 15969 - DNA, 436 bp, Glycine max
  unsure at all n locations
agctattataaagggaaagaaaataatcaatgtataaatgaaccaaacaagtcaaactcaagcttcatacttttaacaagccaagtacaagttttaaatntacttcattntaaataaatgaccaaaacttagcatcttctacttttgcaaaccaagcatcaactttaatttcttggcttgacttgatactttgacaatgcccttaacaatatacattactccaatttgattgaacttaagtgttaatattacatgtaatataatttcacttgcacacaccgaanaaaactcattgaccaaatggcagcacctgatattacttctagaatataaggtttatntgcaaagttaccatttcaatgcatcttatcctanagactgctttcaacatcacacacacacacacacacancaattaatcaaaacaatttacctt

SEQ ID NO: 15970 - DNA, 435 bp, Glycine max
tgcacttcttcgctttccttagggacttcagcctctttctacttgaaatctttagttcgggagccaagttatcccttgcatccgagccttcaaccatttatgatatccaccaataacaccgttgatgcttcctctaagctccttatcctttctttgcaccacattccatgcttttcggactcgtcgaagcatttttgcattggggtcattgaagccacgtgctatgaaaggcatgatactctcttccgatggtgcccctctcatatgatagcctagttgtcttatggcaagtttgggattataattaatacaacccctcgttcccatcaaggggacatttatgaacccttcacatgaggacaatactccgacccttccttccttccatagggggaaccaattaacgaacgcccctaccatacccaccaagagttg

SEQ ID NO: 15971 - DNA, 441 bp, Glycine max
  unsure at all n locations
agcttttattatcaaagtaattggcatactaaaaattaccaacaaattattaatttataaaattgatagcatagtaccattatgagacgagctgctntagagcttctgaccaccatccactgtccttcagaatagaaaagccattcacgtgcacgactctgagatataacattcaatcatgaaattcaaacagaattactgcataatttgatgccctaggtgtaaactgcagatagatataaaaaaaggaaatcagatatcctgtggaatcagctccataaatgcatattgatgcacattgcaatccaaaaaattaaaaaacaaaattagatgagaaaaacaatatatgaagaacttgagaaatactagatactctatatctgtcaagtaacaaaccattatccctacctctataataaacaaataatccgatcctagatg

SEQ ID NO: 15972 - DNA, 428 bp, Glycine max
  unsure at all n locations
ngaacatctcttaattagttcgtgcaaatccgtggatcagatatttgtggcggatgaaaactcgggtcaccatcatcatttcagaatatctgctccaactgaactggtgagcatttcaaattgctttaatttgttctttcttatgttagacttattagcattctattgtgaacctcaagcatattatcaactgtgtgatataggttccgattttccccaacttggagacatttgtgatttctcacatggacaacttgaagtcaatatggcccgaccaactcactgaaaattccttctataaattgaaaaagatggaaatcacatcctgtaacaatctcttgaatgtgttcccatgtcatgtgctagacaaattacaaagcctggaatcactgaatntatggaactgtatggcactaaaagttgtatat

SEQ ID NO: 15973 - DNA, 428 bp, Glycine max
  unsure at all n locations
nttaatgactaatgacactacgcacgctgggaacgacccgctgagtttactgcgagctgctcggacgaatactaccctatagacactagttgcatgagaggcattgaccgatataccatgaccttcagaatagatgagcactcgcgctgatccacagtgagattctatgttaatacaggagaggatgaccgtattactgcgctctttaagcccctgagcgtatacggaacattcttgctggattccgcgtcctgacatgctgtggatacaagtcgatatggtccctatcttccacgaagctgagcggtgcattgcatatactaatgtggtgaacaccccaaacgcggacgcgtttaaaagtactcgaatgcttctgcgtatgagctaggaattccaaccttatagagctattgccgtcgctagcgtcg

SEQ ID NO: 15974 - DNA, 264 bp, Glycine max
  unsure at all n locations
tatagaatactgccgctngagcgatgctcctgaatcggacgctacgaggtgaagtttttatccttggaacttctcaagagactgctctgtttaattttgagcgtctctatgtataatgcgccggagatgaacacaaatgtggtaaattgatgagcatttgaatacctacagagcatccgatgatcgttaacggagcgtcattatatgcgatgagcctcaaacggaccgacattcgataagttttgaacattcgaatttcttgag

SEQ ID NO: 15975 - DNA, 409 bp, Glycine max
  unsure at all n locations
agtctgtatgaactcttagcttatcggcctacttatatgcaacccatttgagaatagcttgcatgtttgtgaaaatcttaccacaactatgctcctccagaaagattataatttgacatattttatgtcactgtggttcatgcacaataactaactctcctataggtgttcatagcgcttattatttttaatatattatcataatgtaaaatctattgactaaacttatataattattatgctatattatgtatcattaaaatntgtgtaacatatttatgttgaaaattattaattatgtacttttattaggaatgattaaggaagataatataatcaaccttttttgtaacataatagtgcatagtgcctcacttgatatataacattatttttaagaatattgcta

SEQ ID NO: 15976 - DNA, 432 bp, Glycine max
ctaagcttgccatagaatatgtatacctttcggaccaactattgggccagtagccatcatcattgttggggctagctaagcttagtgatctacattgcaccgacgataaattacttggcccaatgccagacaaaattagtggactttaatgtctaatttaatggatctggatttgtctggtaactccctgcacgaaacagtccccatttatctggatttgtctgggaactcgctgcacgaaacaattccccaatggtgcttttctttgtcatcgttgttacgcttatctctttacggaaatcagcttacaggaccaatgggtgaattctcttcttttcccttgtattattgtgatctctcttataacaagctacaaggtaatatcccaactcagtgtttcatctacacaatctcactgtgttgagactatca

SEQ ID NO: 15977 - DNA, 396 bp, Glycine max
  unsure at all n locations
attttctcaaggaggtgagcttagttatgagaggggtgtgtgtaactaagctctagcttctcaaggaagttntctcaaagaagcttctcaaggaagttttctcaagaaagcttctcaaggaagctacctagtctataaatagaagcatgtgtaacacttgttgtaactttgatgaatgaaagtcttatgagatacacttcaaagttccacttctttccttcttttattccttcaatttcctgctccccccttctctctttcttttcctccattaaagcatcttcttcaagcttcttatccaaggcaattcttggtggtgaagctccttcttccttggcttattccctagtggatggtgccttccctatcctcttctccttttgccttcactgcatc

SEQ ID NO: 15978 - DNA, 427 bp, Glycine max
tcattaagaggcttcctccagaagcttcattattaggcttcctccacaagcttcattaagaggcttctagcacactccagacatcttctcaaagattccaatggtcagatcatggaaaagtgtcttgtgaagttgcagaccaaattttgagaagatccaatggttaatgaaggctgggcagtgtttttaccgaggcagcttcatgtagctttctctagaagcttcattaagaggcttcctccagaagctttctcgtggtttctttgagaagctttctcaagaggcttctttgagaagctagatccttatctatccacacccctctattaactaaattaacttccttaaaaataattatggatgaaaataacgtaacaaataatcaaacatcaaacataattactaataatatatagatatatatatc

SEQ ID NO: 15979 - DNA, 417 bp, Glycine max
  unsure at all n locations
ttcttgtatagttccccaatttgtagtcattttggagtaaattntgtaaataaatcttgtttatggttaacactgtctctagaacaattccattggatttaatgatgaaatctgtgcattntcaggtgaaaaagaggctaagttttgaattgcaaaaagtagcagttgggctaagcgcatatccatcgctaagtgcagcttcagcacacttagcgcaaaggagaatctggcagagcatcaacatcaaagttgtgcgctaagcacaacaagtgccttcagccacgctaagcacgagactggcgctaagcccaatttcacttatctgtgctaagcgcanaggtggcgctaagcacatcatcgcgattcagggcctattaaagcttgtctgtgctaatagggtacactttacaacatcta

SEQ ID NO: 15980 - DNA, 435 bp, Glycine max
  unsure at all n locations
tccacaacatccaagcaaaacaacattcaaacagtattgctatcacagccaagcaaaagcagagcaaaggcagaaaactctgctcaaacaccaaccaaaatcacagcttttctcacttaaagaccacagtaacaattccttcgatccaattcgttaaccgttggatcgactccaaaattttactggaagtctatagtgcataagcctacattgtgaccgttgggatctactagcaaagatcaagaactcattctgtactactctttccacagccaaccacacacaagcattttctgcaccaagctaaaatcctgctgcacctattttgacagcaaaattctgcataagtgcagatttcgaaaatcacacttcccctcatccaatcttgctcanatcaaatcctacaagtcccaaatcatgtatcaaacatgtcta

SEQ ID NO: 15981 - DNA, 427 bp, Glycine max
  unsure at all n locations
ttgcttcattggagcttgtaggcctaggatcttcttcatcaatggattcctatgcttcttgaaagatgaatggcagtggaatggagaaggaagagagaggagatgccacttcaacgagaagatgagtttagaagaagctcaccaccataggaggccatggataatagcttggaggaagaaggagatgaatgaagggagaggaagagaagagcacaaatttttgtgctctaaaagagctctgaaatctaaagtttaattttcaaatgatcaaagttggaaaaatgcacacacataacccctatttatagcctaagtgtcacacaaaattggagggaaatctaaatttctattcaaatttcacttgaatttgaaattgaatntgtggagccaaattttggagccaaaatttcactaattattgatagtg

SEQ ID NO: 15982 - DNA, 430 bp, Glycine max
tgaaggtaaactagatgccttggttaacctggttacccaattggccatgaataaaaaatctgcacctatcgccagactttgtggtttatgctcctctgccgaccaccacacagacctttgcccttatgttcagcaatctgaagcaattgaatagcctgaagcttatgctgcaaacatctacaatagacctcctcaacctcagcagcaaaatcagccacaacaaaacaattatgacctctccagcaacaggtacaatcccgggtggaggaatcatctcaaccttagatggtcgagtccttcacaacaacagcaacaataacaacaacaacaacaacaacagcaacaacaaccccagaaacagcaaccaattgagactcctccgcaaccttcccttgaagaacttgtgaggcaaatgactatgcaaaacatg

SEQ ID NO: 15983 - DNA, 378 bp, Glycine max
  unsure at all n locations
tgtttgaacaaaagaagtggaatcatgcaacaaaatgtgaaacaatactacaagatgcctatattacctttcacttacccttntctcaaattggtgtggtattggccatcactcaaaatgactcttcattcatcttccgattcgcacgatcccaaatgacaagatgtgaatgcatgcatgcttatgattggaagttaagtgcaacaattaaacaagtgttatcatgttcaattttacttaaacgcttacgacaccccattaattgagccaaatggctccggattcagtgggcaagatcgagagtgtatgttcttaagaagtaaaagacacaacacaggaggttaagatgcanatcattaatccacatttattaatgct

SEQ ID NO: 15984 - DNA, 414 bp, Glycine max
  unsure at all n locations
tgaaggtgtgtagccaccatcttttcatagtagagcactggtaatgtgtctactatcactgttatcgtcaccctttccgtcattgggggcgccacttgggctgccagatccctccacctttgggcatattctttgaaggattcatgcccctttttacccatgttctgtagctgcatcctatccagagccatatcagaattgtattgatattgcctaatgacggcaaccattaggtccttccaagaatggactcaggaaggttccgagttagtataccaggttacagttgccccagtaagactttcttggaagatatgcatcagtaatttctcatcttttgcgtatgcccctatcttccgacaagttcttggggcaagtagtccccttgtacttatcanagtccgacaccttgaa

SEQ ID NO: 15985 - DNA, 436 bp, Glycine max
  unsure at all n locations
ttgtctttgtggaaacttcatgtgctactcaatgttttgaaaaactttntagtacttatcttgattgagtcttttctgtagaagcaagcttcatgatgaatcaagattgattcaaggagttttgatgataacaaagatgatgacaaaaagctcaaaagtcaagaacacttcatgttaacaaagatgatgatttcaagaatcaaagaatgagttcaagattgaatcaagaacacttcaaggttcaaaaggaaatttgatttcaagaatcaagaatcaagtttcaagattcatgttccaagaatcaagatcaagattcaagactcaagattcaagaatcaagagaagactcantcaagataagcattanaaaagtttttcaaaaactgagtagcacatgaaattttctcataaccttntaccanagaagttttactct

SEQ ID NO: 15986 - DNA, 430 bp, Glycine max
tatgcgcatatttccttacaaacgttctcttgcacaagacattctattaaccgaaaaaatgcacccatatacaatcaaggcagcttcgttacctagattatttacacgtacttccaaggtgtatttgttacttacatcacacacctccttggctaaactcacatacatgcatactcaaagcattttggggtaccaaaaattgcacatgtgcacatcttggtatttctaatacctatacatacacaaacttcatgatgaatcttaactatctacacaataaggtgctacattttatgctcttttcaagtttttgctacctaaagccgcatgcaaattcaagtatattttcctttgctgactaaaattgtattcaaattaagaggtatacattttttggtaatgtatcttctttacataacatgcaacatat

SEQ ID NO: 15987 - DNA, 434 bp, Glycine max
  unsure at all n locations
tgcttatagccttgggcatgaggggggatgatggaaagccaccttaattgtgatcactctttagccagaaagggctacctacggaggggttgaccaaaatggctattttaagtgtcgtagagtgcactacaaccactggaatgcagctcttatgcgattgagatctcacattcactagaggtatgacttaagctgtgtttataaggattgggttgttctcatcttacaggttgattttgtgggttgagttagaccataaacccaaattgtaatacatgaggaggacaattggatacggtanggttatactatntacaacatatggagactgattctagtaaaaaggtgttgtcttcttgtcattanggtagcttcccacatttggcttcaatgtanacgtcttggacatcntgcctttggtattcttatgtctt

SEQ ID NO: 15988 - DNA, 421 bp, Glycine max
tcttttggaccttgaacaggcaactaactcctctttcaaaaccatgccatgtgctcgcgactggtccctttcttcccttcgcaacttgagttcactattgctaccccatagagctccgcgaaatttgttccggccatactcttccttgcgagccctcttggtctcttgttcaagggctcttgcggtaattgcattctcttcccgtaacccggcacactccttccgaacgtgtgtagcggccaacttgaacttctccttggcaagttttgcctttcctaactcgcttttgagagcttggacttctttgtcttcttccggtgcttcaaaattctcttcgccgacgacttttaacttggcgagccaatctaaacctcgtatatgaactttcagccattcgtggtacccaccaatgatgccatta

SEQ ID NO: 15989 - DNA, 274 bp, Glycine max
agcttgtcgatgctgaagaagatgatgacggcgacctcatcttacctaaaaggagatagctcgtgagcgatattgagaatctcgatagaacactatacaaccctatcatgcccgactatctagttcttctaccaagctagctacacggaatcgctacacatcacatcttatatatacacaaactatataagtcactctctctataagaaagaagatacgtactatacctaaaccgatgacacacgtcatactgttagtccttcaaatgcattat

SEQ ID NO: 15990 - DNA, 454 bp, Glycine max
ctttgcggtgtgtagaccggccaccctcatatgtgctagcgcctatactctcgtgagtcaatggcacaacactactcctcacgcgcatcatatgtgggacttgctccgcactcactctattatatcctgccatgtgctgatccttgcataacgtaatatgccgtaccagactagctgttccacattaatactatcatagagtcaagatgacgtatcccaacttgcactgtgcgaagaccacaaatgcgatctctgactataatgttgctcactcgcagagtcatccagatggcctgcctctaccgatccgagtctccgctactacaagagagatcaaccgttgagacccgaccatgtcactatctaggcacttgcgttctctggctagctatttcgataaataggcgcctagtatgcacatctgaggggggctctcaacacgtacatcatctat

SEQ ID NO: 15991 - DNA, 423 bp, Glycine max
  unsure at all n locations
agctttgagcagattcaaacgacaataactttttactcggatgtctgattgagtcccagaatatatcgacacgctctacattgaatgcttatgctctgagcaaattcacacgacaataactntttactcggatgtctgattgagtcccgtaatatatcgagaccctcgaaattgaatgttgatgctctgagcaaattcaaacgacaataactttttacacggatgtgtgattgagtcatgtaatatctcgagacgctggagattgaattctgaagctctgagcagattcgaacgacaataactatgtactcggatgtctgattgaatccaatgatatatcgacacgctcgaaatagatcatgatgctctgagcatattcaacgacataacttgtactgggatgttgaagagtctgaatatatc

SEQ ID NO: 15992 - DNA, 438 bp, Glycine max
taacaaaaggcatgcgaagtgggtggaattcctagagcaattcccttatgttatcaaacataaaaagggaaaaggtaatattgtagccgatgctctttctcggcgtcatgcattactttctatgcttgaaacaaaattgattggtcttgaatgtttgaaaagcatgtatgaaaatgatgaaacttttggagaaatttttaaaaattgtgaaaaattttcagaaaatggtttctttagacatgaaggctttcttttcaaagaaaacaaattgtgtgtgcctaaatgttctactagaaattctcttgtttgtgaagcacatgaaggaggtttaatggggcattttggggtccaaaagactctacaaacattacaagaaacattttattggcctcatatgacaaaggatgtgcagaaattttgtgaacattgcattgtatg

SEQ ID NO: 15993 - DNA, 443 bp, Glycine max
  unsure at all n locations
agcttattacaagaaattagtttgtaagaaataagtntgattcagagtaagtctcatcgaataatattttgttttaacttgtattagtctattntagaatattaggttagtgatattaaatgaaacaattttactattttcaaacatttgataatattgtgttaattatattgtatatgtgaatgaatcatgatataaaatagtaattctaaggaaaaaaataaaatttaaataagtaatttattggtccaaactgaatcaaaccgttcatgaatgggttgggttgggtttaaaaaaattgtgaaaatcaaaccgaaccaaatcgatgaaatttgattgagttgagtcttgaattttgccaaaaccagtccaaatcggcctacaaacacccctaaaaatagttatcanagaatacaacttattataaaattgatccttgaaca

SEQ ID NO: 15994 - DNA, 341 bp, Glycine max
  unsure at all n locations
ntgcgtaatcgattacaaggatttggtaatcgattactagtgataagttttgaacaaaaatcaaaagatgtaactcttccaatggttttcaggtttttctaaaggttataactcttccaatggttttcttgaccagacttgaagagtctatnnnagcaagaccttgatttgcatttgaacaacacttacaacctttacaaacaactttgtcacatattattttacaacctttgaatctctttgaacatcttcttgaacttattcttcttgttgttggatcgagtggcctcaaaataattaataagggggggttgaattaattactcctaaacttttactaa

SEQ ID NO: 15995 - DNA, 59 bp, Glycine max
agccttagattggactgtaccgatgaatcgctggtctgtacgacaatgaactgtatggc

SEQ ID NO: 15996 - DNA, 464 bp, Glycine max
  unsure at all n locations
ngtcgtagggtacgtgggtgctgcgacctccacacttgtattatattatcgtggctcagtggtccaattgggcgctccataaaggtaatacattgaatctctgacacttggacacattcgttcagcagcaagacttgtctaccagaagaaaatccgaatcagatgcacaatgggaatcccaaaaggggatttgggacaatttgaaccacaaggtggaattgtctccaggataattctaacgcatcttgtgaatagtaataccagagacctccctgcctccaagagtaactctggacacttagacaagaatcttatcccgcttggaaactccgtcaggcagaagatgctacgcacactaccttctgagcgccatcctcgtctgacaccctcaaaatttgaacgagaggggttgtggaatatatcccccgcgaccatatacatcagagaggtgtccaagacctatt

SEQ ID NO: 15997 - DNA, 440 bp, Glycine max
  unsure at all n locations
agcttctacttatgtggtagggcgggcttccttcactttcttgtctccaacgcgagctctaaccactgttcttccttcccacgatgcttcttttcatgtccgcctgagtgggcttatagcctaagccatacttcccacgatttccttgggtttttatcaggctagttatgtcgccgttgtctttgcctaaacccatcccgggttcataaccgttccccaacataactcgggccatcattaccgctgcatcggacagacaaggctgcccaaagagggagtccacggaggaaatgctgaccacctcaaaagactggaaagcagtttctaacgattcttctgtggcttccacataaggcatggaggatgggcagcttaccaagatatcttcctcgcctgacacgatgaccaagtgcccctccactacgaatntcagcttttgg

SEQ ID NO: 15998 - DNA, 431 bp, Glycine max
tgtactatatgaaaagataaaatgatacaagggcaaattagtatttcttgaaaatgatgaagatgttgcctttgtgcaattttttaaagctcgccccaggcatttgtttaaacatgagcttgaagtgctcaaacacaagtttgggcgcacgactctcgatggccatgccatacaaacattctatagattgcagtagtattgctttggcttggaacctaaaaagaagccacctattggttcttatcatcattaaattgagtgttgttatcagactttgaaccacttcacttctgcttcactcaagaaactcccttccatgatctattcatggcaatgggatttctatgctacgtctaatcacaccttctcttttatgatgatattttcattctctcgcttcttcttcacccatcatgtagaccccatcattg

SEQ ID NO: 15999 - DNA, 374 bp, Glycine max
tagtttggtgaccactagctccctatgatcacgcatgatgcttagaggattagttagttagtctaacctcctcaaggttggacatgtatatatagacccaaagaatacacaataaggtacgctttcaatcactccatacatagatgcacaaaacaccttgggcttgactgacttaatcgtctgagtcctttttgcaggcactttcttcaacattggagtatgagatcggagattccattaatatgaggaacaaaaggagagaggtagacagctcatcagaagtcagccacaactcaccagaactcagtctgaacatttaactcagccacaactcaccggaactcagccaaaacatttaactcattcacagagcg

SEQ ID NO: 16000 - DNA, 449 bp, Glycine max
  unsure at all n locations
gaccttaaatctccgcttgcggtactttaactttctcaatgtacaaacattttttcacattgaatttattatacatagtatatatttccattcagccttttatataataaagttggcaattgacatatatatttcactttttttatgatatggagagtcatgagatgttttgattattgattttattctgggtacttttggtatcattccttaagactattgaagtgtggaaagagctgcatactaatgtggattaactatctaaggcctgatatcaagagaggctatttctcaagtgaataagaggaaattatcattaagatgcatgagttgctggggaacaggtatatattcgtcgattcattcttcagattaatggcattaatgatttgtcttaattaataatagaaagttcgaacagaatattagtactangttattaccatgaa

SEQ ID NO: 16001 - DNA, 387 bp, Glycine max
tatcttatcacatatggagacgcctgaaattgaaccagagaagatctcgagaaattcagatggtcataacttttcactcagatgtccgatgctggcgcatagtatattgagacgctcgaaattgaacaacggaagctctcaagaaatgtaaatgatcataaatattcactcggatgtccgattcaggcgcatcatatatcgagacgctcgaaattgaacaatggaatctctcgagaaattaaaattgtcataacttttcactcgcatgtacgattcaggcacatcagatatcgagacgctcgaaataaacaacggaacctctcgagaaattcaaatggtcataacatttcacactgaggtccgattgatgcacatcacatatggaga

SEQ ID NO: 16002 - DNA, 413 bp, Glycine max
tcaccggatgatgccgatcgagcatttcctaatcgatttcatccaattgttattcagggattgaatagaataaacaatggccggtgtcggtccttatatggccccgactgatatctttcagccgacattgcgcaatttcttttacaaacgctggccgataatatttttttttttttacggtagaggaagttttttgttttggtgttgcctaaaaaattaacaacgtaggtcggcaaggtttttccgtgcgacctcaaccgagggttcgttccgaccgacactggcatgttgatatctcatttatgaggccaacaaaacgttggcacaccccggcataaacaaaaaaaaaatattctcgaatattgatcgaaaaacatgatagctgacgttagcatggagagatgaccgatcga

SEQ ID NO: 16003 - DNA, 434 bp, Glycine max
  unsure at all n locations
agcttggataaatgttcaagctatacgttgattaattattaaataaataaataaagttttatgaaatattaattatgcaatacatgaattataaaataaagtaacaatttaacttacataaaagagattcataagtaagaaattaagtcaagttcactacataatgtacgttgataatagatattatatcttagtagacgtaaatatgagtcttggatatgaaattatattaatatttttttaaaagagattgagcactcaataatcctactcaccttgagtagaattatctctatgaaagatacatgtgatctctanaacaaacagccttcagaagatatacatcatgcatgagataatcatatatttaagcaacatcctttcaaacacaagcttattaaatggttgcttctcatgttatctcatccactaaa

SEQ ID NO: 16004 - DNA, 218 bp, Glycine max
cgcgttgcttatagactgcagggcattgtaaactcttgtgttccccgcatccggggaaatcagaggctcagatattcgtaggcaacccggtgatggatatatatatctctctatatagagtgtaattgatagtagtgtattaaatacgaacgtagatcaaatacatatgattattatgcccgagtgttcatctatatatcagaggatgttatgtatca

SEQ ID NO: 16005 - DNA, 439 bp, Glycine max
tcttataagaacaaaattgcctcaatcatttccaaatatgcatgtgaattatgaagcatcaacaagaatcaagccaaggctattgtgcaagcaatcaatggggcaaaacacaccatatgattatgatgatggatggctcaaattctcacaaaggtaaactcatcactttcaaattgagctctcaaaactatcatgacatgtagaggagaatcaaggatttcaagtcacaaaatgtcaagaacttttattttcaaaacaattacccatttcttgaacatatcctataattcaaagaaaaacatgcaaagtcgtacatgcacacaaaattgacccaaaatattaaactatagatccgacaaaactagcaacattaacaaattaacacatctaacatattaacaaaaccaacataactagcataaccaaagaatactccccc

SEQ ID NO: 16006 - DNA, 429 bp, Glycine max
  unsure at all n locations
ntgccgatttagttntctctgnaaaaaggattgatgtttgtttgagaagaggcaaatttgattatcctactttgatgaataggaagcctgcggcaaatggagagaataagaaggagggaggaacccatgttattgtgactgtcgttcctgcatggccaaatttcccaccagctcaacaatatcaatactcagccaatatcaacccttctcattacccactaccttatcagccaaggacacccaatcatccataaagaccacccctaaattagcgacaaagcccgcctatcgtacatccgatatcaaacaccacccttaacacaaaccagaacaccaaccagggaaggaattntccagagnagaagtctatagaattcaccccaattccggtgtcgtatgctaacttactctcatatctactcaataatg

SEQ ID NO: 16007 - DNA, 201 bp, Glycine max
  unsure at all n locations
tagctttcttgctcatacagttgcatgattggagttngtctctgacgcaccattataatgagacattttctatgaaggcgttcttaattgactgctcactgtgatatttcctcacactcttcgcgattatatgcgctcatgaattccttcaccgacaccttgtagaccacatccacttattctactcaactgacctcaaac

SEQ ID NO: 16008 - DNA, 370 bp, Glycine max
ttaatctagatggcgtgcatgtcgctccccctatctttatccatcatgcccttgagggctttgatgatgccacacatcgatataacattgcatgcattgagagggtctgagtcttgacattagagacttgcttttcttagccgatctagataattgttaacacttaatagcggatcgatccattgcatcatcatcatcatatgtcttactatatgatcgtactgatgctaatgctatatgacgtagtgcaccactagatcatctcccaaatgcttatatactacactgcaagcaagtatccaatacatatgccgcaggacatatatatctcccttgaatgcacatatgcagctcatctcccctttttggc

SEQ ID NO: 16009 - DNA, 414 bp, Glycine max
  unsure at all n locations
agcttgcttttcctttgtcttttggatcttcaatacctttttcacaatcttttgctcttcaaccaagaaagctcgaatgattctacagaaccagagacaaaagtaagcaaggtactccatcaatttgcacaaagaaaattaaacatactgtagattaagaagattgagaaaaacaaacctctctctaacagcactgccagacaacacaccaccatatgcacggttcacagtccttcggttnttgggtaaccttgatctcttatattctgttggccttaaatgtggaatctgcaattgccaagcattaataaccattatgttataccgtgtatcattcatacataatcctntaccaatcatagaaagaaaaatctagttgtaggaaccttgaacatcataatcttaactnttaag

SEQ ID NO: 16010 - DNA, 431 bp, Glycine max
  unsure at all n locations
tacacattcgtggagaanaacagattcaagtttttctgtattggataagtcagggatctcaataaggtttcgacaaccacaaaggctaattatctttaaattagcaagattctgtgacaagaaagatgcatcacattgttcagaaattgttaaaatcataaccatgagccttaactgaaagagaaacctaagcatgactcttgcgaatgagcttcacttgaggcagcacaaaaccagttaccattgacaactctctcatgtacctttacaaattgaaagaaaaattagcatgtatgcaacattcatacctgaaccccgtcccaaggctttttaagcttgctatcaggcatgtggagctctacaatntgttcagcacanaagttagacggcaaagacttgagatagaatctatcccattcaaggtacatcaa

SEQ ID NO: 16011 - DNA, 437 bp, Glycine max
  unsure at all n locations
tagcttgtgatttcacttgatcatacaaaaaatccatggataaaatactattactattttgaagcttgtgattccacttgatcatacaaaaaatccctaacaagcttgtgatttcactttatcatacaaaaaatccatggatatccccataggtgtgaatttttttgccattcccattcttgtgtacttatatagtattaaaaacccatgtgggtcaacttaatgatgaaagttttaaatagtttgtacgaaattgtagattcaaatctcatgatgattaatatacacacaaaagaaaataatattaaaagttactccctccgttccattataattatcgtgtaaggagataaaatttatcctanaataattgtcattntggctnttcaatntagcatttaatattttttcacttatatctcttatatagtaatgat

SEQ ID NO: 16012 - DNA, 423 bp, Glycine max
tccatcaagtggtatcagagcacaagagcttcaagtatgtgctccttaaacctccattaattttttgctttaccttttcttccgttgttgtttcttcatttttttctccatgtatctcctcacatgtcttgtgctaaatgtttttaacatgattctttagattttccaccaattaaacttgctatagaagctagatttgattttctatggttcaaatttcttgttcttgttcttgaactttttttttgttttctaagtttcctacatgatgcctatgatgaagttgagttgtggtgctgagttgtggctggatttgtgaatcaaaataagtcttaagctctcttgaattgtgttattcaagataattgagcataatcaaacacaaattgtaactatccaagctttaagcaacataaacactac

SEQ ID NO: 16013 - DNA, 439 bp, Glycine max
  unsure at all n locations
tatgattaactagactntgaacccttgcattgcacgggttattttaaattatatatatatatatatatatatatatatatatatatatatatatatatatatatatatatatatatatatataattntatatatatatatttataaataaaaaccatagtttttaaatattttatactatgtgaaatataattatattattaatgagagagtggattaattatatttttaattgagtgaattttatcttacagagtgagtatattaaatattttgtgtgattgtttattcattcaagtaataatggtgatgcgatatctcttgaaagatatatatacatatataaaattatccattttaaagatattttgtagtgagacacatatatatatattaatatggagagataatattaattcttagtgagcacatgttctctg

SEQ ID NO: 16014 - DNA, 434 bp, Glycine max
tttgtggaaaggattgatcaggttgtctctatctttactcttggttttcgtgtacggttttacatagttttttgtttgtgcatgaatgggctcaaaacaaatcattttcaaagagggtgcattttttaatcgacctcatttgtttgagggtgaacatttttctttttggaaaaagagaatgaattttttttaaacaaattatcccagtgcatggaatgccactattaaaggtcctttcattcctataaacaaataaatggtgaattagtacctaaagaatgggatgagatgaaggatgacgagaaaataaaagtgcaaaatgatcaaaaagctaaaaacatttaaacttctggtttatcttcgggtgaattctttcgtactgcaaggtgcaaaagtgcaaaggaaaattggaatatgcctgaagtcactcatga

SEQ ID NO: 16015 - DNA, 417 bp, Glycine max
  unsure at all n locations
agcttatacaacttgttgtaattgattacaatgaggctataatcgattaaaatagaaagttnttgcctttgaagaaaattctctaactaagaaactnttcttcacacaaaccatgataatgcatgatgtaatacaaatatcaaatgtactaagatgtaacaaccaagataacaaccaatacaaatgccactcaatggagttggggatgtaaaaaccaaaacttcttcaagctttagcccttaggttgttcagaagctagctagttagttaagttgaacatcctttagattgctagctggttgaaatcaagcttaacgaggtggatatagataaataatacgaggaaaaaagttctaaatataaaattctattaaacttttaaattataaaagatattaaaagttaatataatacaag

SEQ ID NO: 16016 - DNA, 436 bp, Glycine max
tcatgatgaatcaagattgattcaaagaagttatgactattacaaaggtgatgacaaaaagcttcgtgatgatctcaagaatcaaagaatgagttcaagatgttcaagattgaatcaagaacatttcaaggttcaagaggaaaattgatttcaagaatcaagattcaaggttcaagcttccaagaatcaagatcaagattcaagactcaagattcaagaatcaagaaaagacttaatcaagataaatatgaaaaagttttttcaaaaactgagtagcacatggatttttctcaaaacctgtttaccaaagagtttttactctctggtaatcgattaccagattattgtaatcgattaccaatagcaaaatggatttgaaaaatttttcaactgaatttcaatgttccaattgatttcaaaatgttgtaatcgatta

SEQ ID NO: 16017 - DNA, 156 bp, Glycine max
agcttttatgattatcgaacgacaatcacttctgactccgatgtctgatagcaccccctagtacatcgagacgctctgaatcgaatgttgaagctctgaccatatcttgacgacgataactctttattcggatgtgagatggaatgctgtaatata

SEQ ID NO: 16018 - DNA, 253 bp, Glycine max
tcatcattcactttcgaaagtctcgatatattacggtactaactcacacatcccacctaaaaggtatcgccgtttgaatttgctccgactttcaccattccattgcgatcgttctgatgtaatacgggactgaaccatgacatcctagtaaagcgatgccgtcgtctgaatacactcctatcttcacttttaaatactgatcgtctcaacatattacacggactctgtgagacattcgaacaataagttcttg

SEQ ID NO: 16019 - DNA, 367 bp, Glycine max
  unsure at all n locations
agctttatagagcctgtgtcgtcagcaagaagttcaagttcatagccatctacgtctgatgagagtatgatgatctaanggacgtatatatggccatcgatgactccttggaatgagaatcctataatgcccgaagtgaagaacactaccataactagttgtgaggggctctatatggcatctatagtgagttcgaacgccgaataggtgataggaatcattacgggtcatacgcatgatctggaaagacgagctaaaggcttgccttaggtcaaaacgaaatttgtcccaacatttagagtgaaactgagaggtatatgtgggccttcatcgatgactgcaattagtaactaatctatcggcactg

SEQ ID NO: 16020 - DNA, 418 bp, Glycine max
tgccgcccagctcgcccaggcgagcaacgttgcttctctttgaagcaacaaccttctggagggcccaggtgggcctggttgctatttacaccccccttgtttactaaatgcacccccctttctatgtgattgtaattctcttccgtaacgtatccaaactttacgaatgttgtaacgatacctattttccttacgaccggttacgaatccttaccgattatgtattgactcttttttaactttcgaagaatatacagaaactcactgattgcgcaaaaacacctcttttcgatttccgccacattactgaatttcacgaatcacgcaagcctgctacctttcgatttctgagacgtctcgggactccatatattgcacgtcatcagaggataatcctcggactaaattatggtatgac

SEQ ID NO: 16021 - DNA, 94 bp, Glycine max
agcttgtcttaatcttgtccaccaccagatcttgagctgcagaacggactaccattaataacatacgtacctactgacgagagggtaatagaac

SEQ ID NO: 16022 - DNA, 431 bp, Glycine max
tatagaatactgccgctatattgatgcgccgtgaatggacatacgagtgaaaagtttttaccatgtgaatttctcgagagcttcctatgtttaattttgagcgtgtcgatatattatacgcctgaatcgaaccttagtgtagaaagttatgaccatttgaatgtctttagagcatccgttgttcatttttgagcgtctctatatgtgatgaggctgaatcggacctccgtgtgaaaagttatgaccttttgaatttctcgagagcttccgttgttcaattatgagcgtctcgatatattatgcgctcgaatcggacatgcatgggaaacgctaggactattcgaatctctcgagagcttccggtgtgcaattgcgagcgtctgcatatattatgcgcgggaatcgcacatacaggggaaacgttatgacca

SEQ ID NO: 16023 - DNA, 428 bp, Glycine max
ttctaatgtgtcataagagaaatgtggacgagagagctgtgaggtctatacgcgagatgactgtgaatgttacaaaaaatagggaatttgaggagggatgtatgaatgatggatagcgaatgctgagaaaacgaacataatacatgaatgactggccaaaagttcacgacaagacaaatagcgataaataggtagttataaaaggaggaaggaaatttcgaaaatccataaatgaaagatacaggaaggctaacagaggtatatggtcaacgcacaagagacagagatggtactagaacagaaaacaaagcggatacaccaaaaaatgtcagacacatgggaaaaacgttgactatgatactatgcaaaaaatgagcaaatgatagaagcaaaacatgtgagaaggatctacatcgcgacgatggccg

SEQ ID NO: 16024 - DNA, 417 bp, Glycine max
tgtcgaaatgactaaaacgcattcttgcattgattgttctaagtcttggaacccttgtgacacttgtcattttgctaaacaaaagaggatgcctttccctgacaacattattgtttcctcccaatattttgatttgttgcacatggatatatggggctcttatgctcatccttcattacttggtcataaatattctcttaccatcgttgatgacaaaaacatatatacatggattattttcctataattaaaaccagaagtgtcaaatcatattaaacactttatatctatggttgacactcaattctctgtcgcagttaatagcattagatcacacaatggccctgaattttccctgaaaaatttctatgattcccaaggtatttttcatctaacttcttgtgtggagacacccca

SEQ ID NO: 16025 - DNA, 440 bp, Glycine max
  unsure at all n locations
tgcttggacaattgtacatgtgaagcatttggagagaagtgagattttgaagcccttttccatccaacaactntaaaccactgaaattgtgtaggaccaganattatagagaagtgggcagtaactgctccttcaaaagggtgttaataagatcttcatcattacggagacccttaactaaaagatgtgacagagaagttaggtgttggaatagcaaacctaactcttgtctagacatagctgatagtactcgaacatcaacgtaaagtgatcgtaaaccggaaggaaaacaccttgnggacaatctagcttctgaatccaagtgttcaatggcggggagatcaatctgatctggcagtgatctatagttctcacaatcagtgacaataaaacaactaatttggaagctgctcctccaccttgagtagtaattgcttcca

SEQ ID NO: 16026 - DNA, 385 bp, Glycine max
  unsure at all n locations
tatatgctacaaagtgtttagcaaacaccacaaaccttatcaattctcttatctcttcataatcaaggtggacatattgtaaagtcataatctagaaaaaacaagggaaaaaatttcaaccctgagcccacaaaaacaaagagttgtgtcagaagttaaattcaaagacaataaattactctcataggtggacactagaaaaatggggcttaccatatgcaggttcaaatgtccaaatgaccatatattaactctttttattgagaaaattaacatatagaactcacaaaagactaagatatcagggcacaaaatgataatgatgatgataaaattattgatactntggacctttaacaactcatgggtttaacatggaagatca

SEQ ID NO: 16027 - DNA, 393 bp, Glycine max
tgcttgatgaagaagagaatactcatatcagtacacgtatagctggaacaatgttagtactgtgacacatctattagcctgcatccaggatttagatcataaatagatgatattttataagtagcataaaaaaccaagagtccaagacttggttcatacttagttgatagtatttcattattaattttattagcttaaacaattggcttgcactgctgtccacaatttgtctcctgcatgaagttataatcaattaaataatcctaggaatacttatgtttcattgttttgtgaaatcgctgactattggttactacatgtcttaatagtggttacatggctccagaatatgctatgagaggttacttgacggataaagcagatgtatatagc

SEQ ID NO: 16028 - DNA, 408 bp, Glycine max
  unsure at all n locations
tctaaaagatttgtgcacccacaaaaggaagctatttgcaatgaaaggattagcatgggcagaaatatgtcagcatttataggtaaatttgttcctcacattcctgagaaatgtaaggacccaggtactttctgtataccttgcattattgggaacagtaaatttgagaatgccatgctagatctatgagcatcagttagtgtcatgcctctgtccattttcaattctttatctcttggacctttacaatctacagatgtggtgattcatttggcaaatagaagtgttgcttaccccacaggtttcatagaggatgtgttggttcaggttggtgaacttatttttcctgttgattnttatgttcttaatacggaagaaggattttcccatggtttagttccaattatt

SEQ ID NO: 16029 - DNA, 396 bp, Glycine max
  unsure at all n locations
agcttagccctagaggggatggaccttttcaggttttggagaggatcaataacaatgcctataggttggacctcccagaagagtatggagttagcaccacttttaacatttctgatttaattccttttgtaggtggagctgatgttgaggaggaggaactaacatatttgaggtcaaatcctcttcaagggggaggggatgatgcaatcctccctaggaagggaccagtcacaagagccatgagcaagaggctccaagaggattgggctagagctgcttaagaaggccctacggttctcatgaacctcaaggtagatttttgagcccattggacaaggttgggtccaattatctntgtacatatttgattangatgtcattatatttggtccttgt

SEQ ID NO: 16030 - DNA, 428 bp, Glycine max
  unsure at all n locations
tcccaaggaagttttctcaagaaatcttctcaaggaatctacctagtctataaatagaagcatgtgtaacacttattgtaactttgatgaatgagagtcttgtgagacatacttcaaagttccacttctctccctcttttattccttcaatttcgtgctcccccctctctctttctctccctctttcttttcctccattgaagcatcctctccaagcttcttatccaaagctcatcttggtggcgaagctccttcttccatggcttattccctagtggatggcgcctcctctcacctcttctcctttgtcttccgctgcatctccatggtggaaaatcaccattgaaggacctcatttaagctcanagatccagcctccatagaagccccacaagcaagcttccatcaagtggtaatcagagcacaag

SEQ ID NO: 16031 - DNA, 439 bp, Glycine max
  unsure at all n locations
atcttctatcaagtggtaatcagagcacaagagcttcaagtaggtgctccttaaacctccattaattntttgctttaccttatcttccattgttgtttcttcattatttctccatgtatctcctcacatgtcttgtgataaatgttgttaacatgattctttagagtttccaccgattaaacttgctatagaagctagatttgattttctatggctcaaatttcttgttcttgttcttgaaccatgaattgtgttgagtttaagttcctttgagttttgtcttgttatttttttgtagatgaaacctaaaccataaaattcttacaaaaatattaaagtagaagaaaaactcataaatctagagtgacttgttcacctattgtagttntgtcatataagtcatgcctagtcatgaaactngtcacataagaattcttat

SEQ ID NO: 16032 - DNA, 428 bp, Glycine max
  unsure at all n locations
ttgagccagaatcctgtctcaccataaaccttgttcttggtgagaatgtcaatccttaccctcggaagcaaaaaaaagagagaaggaaaatttccaatcaaaggaaaaaagagaggaaaggaaattctcaatcaaagagtgggagaaagcaaaaagaaaagaaagaaaattcccaatcaaagaatgggagaaagaaaaaaagagaaaagagaaaagaaggaaagaaagctcctgatcaaggatcgaaagaaaacagaagaaatgtgcagaaaggtcttttgaccagacaatatctgaacaatacagaattgtcaccaaatgaacaaaagaaagaaaaggaaaccatgacctanagtggtcttatccctttgattaccaaccaaaatcctgtgcgtcggtgacttgctcgcctcgcgcaaaacaaaaac

SEQ ID NO: 16033 - DNA, 433 bp, Glycine max
  unsure at all n locations
tctagcttgaaagtgctctatgcttcatgtttcaattatatgcaaaaagtcttatattcatcacaagtaaatattttataattaatttaaataaattctcattaaatataaaatatttgctcttgttagatatattaataatgatacacactatatgattttaatatttatataatattaaaaaatatttttattaaatttttgtgcgaattaaaattaattattctatcacgttgtcttgtgaatgtagtttattattgtggaatgttaacgataatctttttcacattatatttctaacactntatatgattgattagaatttattcaaaatgattaattttagtgggtctcacgtttaaatcgaaagaaaaaatatattatntacaaatttaaaatggatattaaaaagaaagtgtcaaaaaatgttact

SEQ ID NO: 16034 - DNA, 427 bp, Glycine max
  unsure at all n locations
tttgttttatataggtctcatttttaagtgtttgttgtctcacaatgagtagatttctacacttatcttcatatgatgaatgcggtcgttgggggcatttaatgtttgcattaaatgcacgtccttttctcatgtagagaatccactattctaagcttgcgtgttgagtattaagcatgtagtcacctcctttttgtcaaagtagattttgtacagcaaaactcttcatttgatggtgattgaaaaatttcatacctttatttcatttattcttcataaaattcaacagatcctaggagaatatttctacaaaaaagatttcatatattaaatatcatcttaaatgttgtattagatcataatcatatttatctattgtctaacaaattagacacaaacttttctaggcatgtntgctaaaacatta

SEQ ID NO: 16035 - DNA, 412 bp, Glycine max
  unsure at all n locations
agcttgacatcntttgatatatcatacaatcagtttgagggtccacttccaaacattctagccctccaaaatacttcaattgaagcattgagaaataataaaggcttgtgtggcaatgtcactggcttggagccttgcacaacatcaactgcgaagaaatctcatagtcatatgacaaagaaagtcttaatatcagttttaccccttagtttggtcattctaatgcttgcattatctgttttcggagtctggtatcatttacgccaaaattcaaagaaaaaacaagaccaggctacagatttactatctccaaggagtccaaacttattattaccaacgtggagtttgggtggcaaaatgatgttcgagaatattattgaagccacagaatantttgacgacaaatatctta

SEQ ID NO: 16036 - DNA, 425 bp, Glycine max
taaaggtggcaccttatcctcccaccaatgagcctaccaaacctcaccccacaacgaatggtaccactcaagtcatgagcatggacgaaggatctccagtccaagccttgactatcttccaagtaagcctggatgatgaattcgatgtagatccgcgtgatgacacttttgacagagtcccaaagcctattgaaagcttgtcaagctacagcttaaatccaatcttgagcaatctatgcaactcagtagggacctcaccaaccataagcacagacacatagttgatgtcctacacaggaacacggacctgtttgcttgatagccttctgacatgtagggaatccaccccaacattatctgccacaagctcatcatctgtccccaggccaaactggtatcacaatataagaggaagatgggagaag

SEQ ID NO: 16037 - DNA, 410 bp, Glycine max
  unsure at all n locations
agtctcctctaccgtaaaananaaaaacattatcggccagtgagcgtatttaaaaagtaattgcgcaatgtcaactganaaatatcagtcgggctacttcacgaccgatgtnggctattgagttntctatgcaatcccttaatgaaatatttatgatgtcggtaaggaaatgatcgatcggcgtcatgcggtgatgcttcttttttagacctcgatcggtcatctatcttggcggacgtcgactggcatttttttcaatcaatatcggtgaaaaatatttttttgccgagatgggctaatgtnttcctggccgaataaatgggaacatgccagtttctgctgaaacaaaacgtctgttgagctcgctccaaataacctagccgacctacattgtacattttttatgcaac

SEQ ID NO: 16038 - DNA, 436 bp, Glycine max
  unsure at all n locations
ntacagcagatnttagtaatgacccactaacctagaattaaaataacttaatgccattaagctagggaattaaaaaacaaacttaatggctgagtgtaactgaaattgtggcaaccaaaagtcacccccaacagccaacaagtcagccaccatttggtctcccaaaaggctgatgcctatgttgccaattgggcccttattacaacttgaactaaacctaactaaagcccttttagttgattaacccaaaacatatttttggtcagccaactggtacgaaaattgaccaagaggagttgaaaatcaacacaagtgacattcaaagggaagttaatggcgtgggggctgtttggaatcctcatcaagggctgagtttaattacttggctattttaagcattgtcatcagttaagacaaataaaattcagccattcaa

SEQ ID NO: 16039 - DNA, 418 bp, Glycine max
  unsure at all n locations
agcttgataatggaggatttccttgagggtcctctcttatgcaatcatggaacacaactccaaactcaaaaatggaggacacatgaatgacaacgccattcattcatggngctccgataaagggtaagaatggaggatttgcttgagggtcctctcttaggcaatcatggaacacaactccatactcgaaagtggaggacccacgaacaggcctaagcaatagcattcatgtggctccgaaaaaggatgagaatggaggattgccttgagggtcctctcttangcaatcatggaacacagctccaaactcgaaaatggaggacacatgaatgacaacgcaattcattcatggtgctccgaaaaagggtgagaatggaggatngccttgagggtcctctcttatgcaatcatgatacac

SEQ ID NO: 16040 - DNA, 432 bp, Glycine max
tcttttggaccttgaacaagccatcaattcctcttttataaccatgctatgtgctcgcgactggtccctttcttcccttcgcaacttgagttcactattgctaccccatagagctccgcgaaatttgttccggccatactcttccttgcgagccctcttggtctctcgttcaagggctcttgcggtaattgcattctcttcccgtaacccggcacactccttccgaacgtgtgtagcagccaacttgaacttctccttggcgagttttgcctttcctaactcgcttttgagagcttggacttcctcgtcctcttccggtgcttcaaaattctcttcgctgacgacttttaacttggcgagccaatctaaacctcgtatgcgaactttcagccattcgtggtacccaccaatgatgccattacgaacgcctct

SEQ ID NO: 16041 - DNA, 441 bp, Glycine max
  unsure at all n locations
agcttattaaanaaataatgtatcattagaaaaccaagttattaaaagcaacaatatattatcttttatctcacctgttttaatagaaggttcatcttcacctttcattaaattgccattcacattagacaatattcaacacttgatagtcaatattttgttactatgtagcttatctctttattcaaaaaattgaaaaaagcaacatatatagcaacttaaaataatattaagaaacaaaaatgtaaatacttaattcaatcaaaaaagggaatgataaatcaaccaaaaaataaattacgaagttatatatatatatatatatatatcaaaactctctacagaagaaaagtcaataaaaatgcataaatgaatntgtataantaccatttgggataaaacaatnntttttntactanaaaacatagaattactcacaat

SEQ ID NO: 16042 - DNA, 428 bp, Glycine max
tgcggactataccttcgaccgaacacggccgtgtttcttctatgcccggattcaaggcgggttgcagcaccggctccgcttccctaactatattggaggcggttgcggttgcggcagcaccccaagatttttagataacgtaatgagtccagaacttctcattttataaaaagaacaaagctttcatctagccaagattatacaaaggtgttacaaaagaacctaacgattcctaattatatgggccatcaaatctatcatgtgctgacagtaattgattagcccatggatctcctcgggggcagtacacactttggccatggcttttgctttggctaacagacgcgggaggtcttgacttccatttaaggtcaaggcgaacctatccatccacatagtcgcttcttgatgcaacgcatcaatcaccc

SEQ ID NO: 16043 - DNA, 445 bp, Glycine max
  unsure at all n locations
agcttttatataaacatggcctcagcaaactccttatttccagaagggaattctatcaatagacctccaatctttaatggagagggttaccattactgganaacccgaatgcaaatntttattgaggcaatagatctaaatatttgggaagccatagaaatagggccttatatacccaccacagtggaaagagtttcaatagatggtagttcatcaagtgaaagcataactatagaaaaacctagagatagatggtctgaagaggatagaaaacgagtacaatacaacttanaagccaaaaatataataacatctgccctgtgaatggatgaatatttcanggtttcaaattgtaagagtgctaaggaaatgtgggacactcttcgataacacatgaaggaactacagatgttaaaagatctangatatatgcactaactcatga

SEQ ID NO: 16044 - DNA, 433 bp, Glycine max
taccaccataggaggccatggataagagcttggaggtttaatgagatgaatgaagggagaggaagagaagagcacgaaattttatgctccaaatgagctttgaaatctgaagtttaatattcaaatgatcaaagttccaaaaaaatgcacacacaaggcctctatttatagcctaagtgtcacacaaaattggaaggaaatttgaatttctattcaaatttcacttgaatttgaaattgaatttgtggagccaaactttggagccaaaatttcactaattatgattagtgaatttaagctatggttcataccactaattaaagatcaagtccaagattctccactaagtatgcttaggtggcatgaggcatgtaaagcatgaagcacatgcacaaagtgtgactatatgatgtggcaatggggtgtagcaagc

SEQ ID NO: 16045 - DNA, 417 bp, Glycine max
  unsure at all n locations
ttttgcttttattttagtagatgaagatgaatctgtggccacctcatggactcctctaaggataatagcatcatttcttgcactgaattgttgggagttggaagccatcttctcaatcaaattcctagcttcagcaggggtcatatcaccaagagctccaccattggcagcatcaatcatattcctatccatgttgttaagtccctcatagaaatattgaagaaggagttgctcagaaatctggtggttaggatagctngcacacaatttcttgaatctttcctagtactcatacaagctntctccactaagttgcctgatgccttgaaatgtctttctgatggcagtggtcctagatgcanggaagattttctccaagaacactctcttaggtcatcccagctgaaacggacctgg

SEQ ID NO: 16046 - DNA, 434 bp, Glycine max
  unsure at all n locations
ntctagcttttcattggtgtattntgatctccttttggtgctctaaattgtgggaatgtgcttaaatatgtggggcaattttggtttgtttacttgcttgattaggttgaattgggggtttgtatgggatggccctaggcctataatgcattttgaaacaatgggacatgccacattgtccccgttctcttgctattgatgcctaaacgcgcgcccaccaagtgttcggtgaaatgcctcaatggcattagcgcgtgacttttgtaaggaaacaacccatggggcattttggtttgcacatattttctattttttggggcatgcattcgttcctgaaaaggttagagtaattgccccacatatattctaggcctaggaaccaaagttntatgcaaaaagaacacaagaggaggtgcatattgngtaaagttacc

SEQ ID NO: 16047 - DNA, 428 bp, Glycine max
  unsure at all n locations
tgcttgtcattgctcanaagaccctccaagagataagaggaaaattcctgaaagataacaacaaaaatgaagggctcatttcttcatgacctagctaatggaatttctgtcgcctcaacataccatgttgggaagtcgtcaaagagatatcttttgcctgattcgtgtggcaaatacagcaagtccatcactaaatcaaagcaaaatagagcaccctttcatcacaaatctggattcttacaaagattccgagagcatggtatatatataatctttaacaacttaaattttatttttcgctattgcttagttgcaagatatagaacaatcttctgtcataatttgtatgatgcataatttgacatgattattggaaaacaaaatgaagctcttattgatggctngaaactgtngttgtaaaatgcagt

SEQ ID NO: 16048 - DNA, 430 bp, Glycine max
cttggtaattgctgacgaatgcagtcacagtaacattagattatatgactttgagcaaacatcattctctctataatttgtctccattttgttaaaactcatatgaagttggagccaattgtattagtagctcttttagcccttaatctttttaggcacatacttgaaactgacatttgcaattttttaatgcttgcaaaagtttgagacaattagttttggttggatcattctgattcatgattcaaggagcaaaattttcactgaatgtgaaacaaatagtatgattttcctgaaaactatagtcaagtgttctttaggatcttaatttgtctcccgtggaccctgattattttttataataataacttgcaggaatatgaagacagattaacggttgtaaagattgatcatgatgccaacccgcagc

SEQ ID NO: 16049 - DNA, 418 bp, Glycine max
  unsure at all n locations
tttctttccgcaagacttacggaaagatcttagagttgaccatagcagaggtgtccatagaagccattgcagcacttacccaatactacgaccagcccttgagatgcttcacattcggggacttccaattagtaccaaccattgaagaatttgaggaaattctaggatgtcctctcgggggaaggaaaccatatctttcctccgggtgtctcccctctttgagcagaattgcaactgtggtcaaggattcagccagaggtttggaccgcataaaacagactcggaacggcatagcgggcctgccacagaagtacctagaagacaaggcgaggggtatggccaatcaaggagactgggtcccgtttatggatgtgttagctnntgctaattttggggtcatcctctttccaaacgtgga

SEQ ID NO: 16050 - DNA, 428 bp, Glycine max
  unsure at all n locations
ntctagcttttcattggtgtattttgatctcctttttgtgctctaaattgtgggaatgtgctcaaatatatggggcaattttgatttgttttcttgcttgattaggttgaattaggggtttgtatgagatggccctaggcctataatgcattttgaagtaatggggcatgccacattgtccccgttctcttgctattgacgcctaaacgcgcgcccaccaagtgttcggtgaaatgcctcaatggcattagcgcgtgatttttgtagggaaacaacccatggggcaatctggtttgcacatattcttgggacatgcattcatgttcgaaagagctagagtaattgccccgcatatgtcctatgcctaggaaccaaagtctttatgcaaaaagaatacaaaaggaggtgcatatcgtgtaaagttaccc

SEQ ID NO: 16051 - DNA, 434 bp, Glycine max
tgtcttatctaaaggaaatggttaaataccacctcaagctaatattaagaatgtggctaagtgtttcttttgcaagaagaatggacacatgaagaagaattgcaccaggttccagaaatggcttgagaagaaaggtaaatcaatctcattagtatgttatgaatctaatatggttagtgttaatattaacacctggtggattgattatggatctactattcatattgcgcattctttatagggtatgcaaaacctaaagaaaccagtgtgaagtgagcaaagcattttatcaagcaataagctatgctcacatgtggaggacattggaacttgcatattgactctaagtagtggctttattttagaattagaaaggactttgtatgtaccaagttcttcccgatacttgatttctatttcaaggcttgtaccgt

SEQ ID NO: 16052 - DNA, 429 bp, Glycine max
tgtctcagcatttatgcgagacggagaccacatgcttctatcatcgccaagtaccaagaagagttaggtctagccacggcccacgagcatagaatcgcggacgagtatgctcaagtatacgcggaaaaggaggctagaggaagggtgatcgactctttacaccaagaggcaaccatgtggatggatcggtttgctcttaccttgaacgggagtcaagaacttccccgcttgttagccaaggccaaggcgatggcagacacctactccgcccccgaagagattcatgggcttctcggctattgtcagcatatgatagacttaatggcccacataattagaaatcgttaggaaacttgtatggtctctcagaccttgactagatacgacttcctttttgaaatataatgagttggtcccatgtttctactc

SEQ ID NO: 16053 - DNA, 423 bp, Glycine max
  unsure at all n locations
tgcttgttgtttcagcatatgattagcaagatgatgcaaccaattctaaggataccctccgaagtcctaacggtttcactgttgaagcaagtaaaacaaaatatgccagagataaatgagcgaagcagctggaaaatctactagtggatttggcattttctccaaagagtgtcatctatagttcagtccactacagaagttatgtacatcacttgtagtgaaactggagtggaaatgcaagtactgaccaacagttagttgtgtggcctttgtgatacgaatatacttggaagtaaaaagtagttggacaaaagggtcaaacaatgaactctgaatacgtgtgaatgaagttattcaattgattggcgttgattcttcatcattgntgagttcataaaagaaaggatccttaaggagatctgt

SEQ ID NO: 16054 - DNA, 430 bp, Glycine max
  unsure at all n locations
nttccagagctacttggatgagcatatatnnntttctttctcactatattcttttttaatatatatgaaccagcaagtcagaaacctgttaagaattaagcttctgtaatgcattactaaccaattcttttaacagaacgttccttctgtataaaatgctccaacttcaataactaagctagaaccaatttgatagtcccactacaatatttgtggaagaaatagtgacaaaactgggttcattcatggaagccaagattgataacattgacttcacaaaatgttgtcgcatagcttatactaaattagacaccaccattaatgaaacattgcatctagttcatatcaatggtgtcgtcagctatcaactgantttcccaattaaaaatttgttaatggattntttggaaatttgaggctgtagtatgct

SEQ ID NO: 16055 - DNA, 432 bp, Glycine max
  unsure at all n locations
agtcttcaagttagcagcgtcttttccgttgaacttattttgtatatattttatgaatgagattgtttgtcntaatcaaattgtactctcaccttgcttttaggaaagatttgtatgaactattatattttgcatgtctttttaaatggtattatcttttatttaatatagaaatagctgaaacttctgtttttgatgtcttaattttgtttcaagattttctgaatggatgcagcatgaggaatatatgctttgttgggtaaattatgagatagtcatcttctaagcaaactgttattgtcctatgtttgaaaatgtacagaatgtgcagctctatcaagtattccacgtggtgactggtactgccaattttgccaaaacatgttccagagagaaaagtttgtggcgcacaacgccaatgctgtggcagct

SEQ ID NO: 16056 - DNA, 429 bp, Glycine max
  unsure at all n locations
tagcctcagtttaaacaattatttggcccccactccttactttttaggccaagaaagcatcgcgattcgccagcccaaagacactcccaccatttgcttttacttttacttttgtttctttttatttagatttttttttatgtgaatgaaagccagaaatcatgagatttataacagtttatacacgttaaatcaaattaactaaactccttgataatatatttgatcagtactatataattttggtttcctagatttcaattatgagaattgcatatttttatatatcataattgtgtgattttaattttttttaattntttgttataaattttaaagacatggcactaaataacgtgttaatgatatgatagttgatgtagaatttgtgcaattgaaactntgagcgacaaanatcacataattgtg

SEQ ID NO: 16057 - DNA, 439 bp, Glycine max
  unsure at all n locations
tagcttcccgccaatggtatttaaaatttcatgaggtcatttcttcatttagctntgaagagaatgtcatggatcactgtatataccagaaggtcagtgggagtaagatttgtttccttgtattatacgtagatgacattctgcttgcgactaatgataagggtatgctatatgaggtgaaacaatttctctcaaagaactttgatataaaggatatgggagaggcatcttatgtcataggcataaagatccatagagaaagatctcgaggcattntaggcttgtctcaagaaacctatatcaacaaagttttagagagatttaatatgaaagattgttcaccaagtgtagctcccattgtgaagggtgacaaacttgctntgagtcaatgccccaaaaatgattntgagcgggaacacatganaaatattccatatgc

SEQ ID NO: 16058 - DNA, 425 bp, Glycine max
  unsure at all n locations
tctagccaaatggacttaccttgaattaattcctttttagcccttttgagccttgtttccctttccttgttttgaagctcactacaagccttaaatgaaaaaccatgatatcaccatatccttaaggaattttggagctttggaattgttttgggaataagtgtgggggtttttgtttcattggataacatgttttgttggctatgcttcatgatgtattttgggccatacttgatgtacattgtatattggttaaatgttggacatgctgaatgagatgttgtttctcaaaggctacgtacgtaaaaaaaaaatcgaaaaagaaaaagaaaagcaataaagttgagtgaatatgatcttaaatgacaaaagtatgatgagactctnggttctactctntatgttntaaatttatctttacttct

SEQ ID NO: 16059 - DNA, 445 bp, Glycine max
  unsure at all n locations
agcttcttacttgggaatcagaaaaatactatggagcaaggtttttcattcttaagtacttggataaaatgataaatcaaagtaaaactttcaagtaaacttaaatattattgttccaaaagttactcttaaaatatcatattttgttgtataacagaagctggttttcatttttctcttaatatttcttttgtaaattttttttaataaaatatcagagtatatctttcgtaaataaggttttccaaaaaaaataactaagcatgcatgcaacaactaaaactaatgagaagcaataataaaggacacatcacacgaaggatttatattggtttactccaactcgggctatgtactgtacctacatatatagcatntctccactaataccaagcaatcgactaaggaattatttctctcctaaagcctctgtaggctcctacaa

SEQ ID NO: 16060 - DNA, 451 bp, Glycine max
  unsure at all n locations
tgaactatagaatctgcagctgctaccatactcagaatgcctatcatgggaagaattattgtcgtttacgctgaccacatgacagcgcgagagtgttatgcctcaagtctcacaatcagtagatggactaaatgagtcgagcctacgacacagctggtggcatacactgacctgaataatctgagggatacctagcttgatccgagagaagaatgacagagggaaaatatgacggaagaagtcgagccttttctactcagtagagaaacatcccagtgcaccaaactcaaatagttaatgatcgcagaggtggaagaaaatattacccatgtactagaagctaatggagacttattctgatggtccagatcagatatgcctataatcgactctaagattccactatcacaagctangaatctatctagaatctaaacctgttgtgcaaaga

SEQ ID NO: 16061 - DNA, 371 bp, Glycine max
  unsure at all n locations
agctattatattgggaaaagggtgtgaataacgattagttatgtagagacaagacacgatagatacaattgtgaaaagaactcatttatatgcactctgaagtanaaggagaattatgacactaacccaagtccaacttctcaatgattcttaataacattgcccttataccatttgtctatgcaattattttctcgttgacactaattagaaagcaacctagaaaatcgaacggtataatttactcaagaggtgaaagtcagtatatatgatctttcttctatataattaacttgatggttatatgtctttggataaaaagtcaagagtttctgttattgttatctgttacgtaagactattcctaatga

SEQ ID NO: 16062 - DNA, 434 bp, Glycine max
tgaagaatgtaggaacgagaatgtctcatcaagaatgtatgagtagtcaggatttagtgccaggtaacatggaacatggaatagatgctactccaataacctgttgggcagaaaacaatagcctttccaaactgtgtttgcaatcaaataagtttgaagtatctactgggggaaatgatgccggtctgtcctcgcagcctaagattaaacctctaaatttttttaactgtcatgaaagcagcaaaaacaacccagtggagactaaaaattattccatcttgggccatagtaaggacaaggaagaagtggcatcacattcatcttcaaccaaacaaaatacagataataatgataacatcgattctaatgtgctatgtgatagaaaggaagaagagaatatctgtcacagaagagataatctgggaagtctgtgg

SEQ ID NO: 16063 - DNA, 376 bp, Glycine max
  unsure at all n locations
agctattacttttagttgattcactctcgtatcataaactaaaagtttggtgtttcttacataaaagttgagacatcacaatcttaaaaagctcaaactatgaaacagtggtatacaacaattattgatgtgaatatatctgcatgtgatttcaaggtcattggagctattctcatattaatgggactntactcggatctgtggggcaagcacaaggagaacaaagagaaagaggcagagataaccattgaggtattgaagtgttgatcataaaatgggatgaggttggagactgtggtagaatatgctgaaacaaacaacgacattgagatgcaaaagggtgaagcctcaagagagctaagggtagccattggag

SEQ ID NO: 16064 - DNA, 433 bp, Glycine max
tgaatagcagatccagtgcactcagcataatcatgttttatcactatgttccctaaaaattctgtgggattgagtatctaaaaagtaatgacaaaattgattagtttattaattaatggatgacttttttttatcggttaatgaatatgtacttgttgcatgcattattaacttatataatacttacttccaaccattcttgagttcctgatggttcccatgctgctaaaccaccttttctactctgcaataattaagagaaaaaagaaccacagttgcatcaaaagtaaatattctagtagtaaaagtaaatcaaacatcaattattaatgtcgtctgcgctaaccccaacttcccaatgataaaagattaaacaaagagaaggaccatcaattgattgatctattaattaattaaaagcatatgaccatga

SEQ ID NO: 16065 - DNA, 186 bp, Glycine max
  unsure at all n locations
agcanctagccaaatggactcaccttgaattaatgcctttgatagcccctttgagcctatgtatccgtaactttgttttgaagctcaatacaagccttaagtgagaaaccatgaactcaccttacccttaaagaattatggagctgtggaattgttttgggaataatctgggaataagtgtggggg

SEQ ID NO: 16066 - DNA, 437 bp, Glycine max
tcatgatgaatcaagattgattcaaagaagttttgattattacaaaggtaatgacaaaaagctcaaaggtcaagaacacttcatgataacaaagatgatgatctcaagaatcaaagaatgagttcaagattttcaagattgaatcaagaacacttcaaggttcaagaggaaatttgatttcaagaatcaagaatcaagattcaaggttcaaggttcaagcttccaagaatcaagatcaagattcaagactcaagaatcaagaatcaagagaaaaattaatcaagataagtatgaaaattttttttcaaaaactgagtagcacatggatttttctcaaaacttgtttaccaaagagtttttactctttggtaatcgattaccagattgtggtaatcgattaccagtagcaaaatattcttgaaaaagttttcaactga

SEQ ID NO: 16067 - DNA, 438 bp, Glycine max
  unsure at all n locations
agcttatttagaaacaactattacgtcctaccactctaggctacaataatatcctctaggccactattggcacacctttagactcatcatgaatctaanaaactcaagtattgtttaacactaagccattnttggctttcacaaacaaataatgtttgattgaatacacaaatttaaatcactcaacatagtggataaacaattaagctcgaatacaaataataactttgatatgtaaatgatgaactaattaagcactattatgtatcacccaatgacttgacaatttctcacttcaaaatgctcttgtttttcacttcgtattttcgttttttttcttcttgcacttgataacgatgccttggtcactntttataaacttcatgaaagtattcattacgagattatngtttgtctctgaattgaccgttgtcttac

SEQ ID NO: 16068 - DNA, 427 bp, Glycine max
  unsure at all n locations
tctcccccattttcttataaatggggggagaagtgaatataaatttcgtttagccctcttggtaattcagaatcacttaaaattagtgaaaacaattggttccgtgaagaaaatccgagccgaggcacttccgtaacgtttccgtaacgtttccgtgggtgatttcgcgaaggttttcgaccgttcttcgacgttcttcattcgttctttgtcgttcttcggtctccaaccggtaagttccctaaatcaaacttttcaattcattctatgtacccttagtggtcctcatttgcttttatgttctttcatttacatttcatttactttccgtacccccttttgacgtgctttagtcatttgcttaagttattttctcgcctaatcaanaaataaaataaatgtccaccgttcatttgaattgtaacat

SEQ ID NO: 16069 - DNA, 400 bp, Glycine max
  unsure at all n locations
agtcttctgaagaaagtgatgaggtacaagccctaaaggcagagcttgaaagagcccgggtagtcgaagagaagttcaagtccatagccatcaaagtctgaanagagtatgatgaactaagggacgtcaatatggccacagctgaagccttggaacgagaaaccaagaaggcccgaaaggaagaacatgaccaaaacaagttttgaggggctttatagggcagcaatagtgagcccaagctccgaagaggtgaaaggaatcatcacgggtcaaaggcatgatctggaaggacgagctaaaggcttgccttangtcgaaaagaaatttgtcccaacagttaaagcgagactgaagggaatatgtgggccatcatcgataagtgcaaagagaagctaaatct

SEQ ID NO: 16070 - DNA, 433 bp, Glycine max
  unsure at all n locations
tccaagaatcaagatcaagattcaagactcaagtattatgaatcaagagaagacttaatcaagataagtatgaaaaggttttttcaaaaactgagtagcacatggatttttctcaaaacatgtttaccaaagagtttttactctctggtaatcgattaccagatttttgtaatcgattaccagtagcaaaaatgtttttcaaaaaactttcaactaaatttacaacgttccaattgatttcaaaaagctgtaatcgattacaatgatttggtaatcgattaccagtgtgtttgaacgttgaaattcaaattcaaatgtgaagagtcacatcctttcacataaaagctgtgtaatcgattacactaatttggtaatcgattaccagtgattgtttctgaataaatcaaaagatgtaactcttcnaaatggtttt

SEQ ID NO: 16071 - DNA, 398 bp, Glycine max
  unsure at all n locations
agttttatgggcctacgaataattnttgtttggacaataacatattaaatattaaaaattaaaaagaaaattntggacaggtaataaagtatatggttggtatttggatgcgtaaaacttaaagagtcactagagaggttctctctctctatctctctcccgccattgaagtaaagtaactatctatcgttctgagaatgagaatcaacgcattctgtgtctccgcctctgcttctatatattctccttttcctaatccacatgtactttntcggtttttccattcttctgttatgtatttacactaattactttttagtttaaccactgtgactctcactgattaatcgtgttatctctagggtgcgctactgcaagattggaagcttcggaagcat

SEQ ID NO: 16072 - DNA, 420 bp, Glycine max
  unsure at all n locations
ntgatcagaagctcctctttgaaagagcgcaacttgtctaattgaggacatagcgcatgatctcggtcgatcattatgcatgctgcttgtggccagccttgaagtgtccatagattttagagaaaagattggcacattgcaaaaacagctgatgaatgcgagatttggtgggaatatgagtccaacttcaagttcgatatcaagatttgtcaatgaagcgaaggagggaggggaaatagaagaggagataattgatgttactagtgatgatgttttactacagcttaagaatggtgatgccgaggaatttgcagttgcactcttaaggctaaaaaagttcatcaggggtggaaaactggatagcgggttaattaatgtggaagctgctgtttccattctttttaaccgtccattttcgtc

SEQ ID NO: 16073 - DNA, 435 bp, Glycine max
tgctttaaataggctctaaaatcgcgacgttgcacttagcgccaccctcgtgcttagcgcgagtaagtgggtttgggcttagcgccaatcttgcactaagcttggctgaagacacctattgcgcttagcgcactggtctcgtgcttagcgcccggccttgatattcacgccctgccagattctccttcgtgctaagcgcgatgtgtagaaacaagcttcatgatgatgaatcaagttgattcaagtagttttgatgatgacaaagatgatgacaaaaagcccaagagaatgatttcaagattgagtcaacaagttcaagatcaagtttaatttcaagtttcatgagaagaaatcaagaagattcaagaatcaagagaaatttgatttcaagattcaagagaagatgaattcaagattcaagagaagaaatcaaga

SEQ ID NO: 16074 - DNA, 429 bp, Glycine max
tcatgatgatgaatcaagtcgattcaagtagtttttatgataacgaagatgatgacaaaaagcccgagagaatgatttcaagattgcgtcaacgagtttcacgaatcacgagaagtgtgattttgagattcaagagaggatgaattccagattcaggagaagaaatcaagaagacttcacaagggaagtattgaaaagatttgtcaaaagacaaacatagcacagttttgtttttcaaaagagtttttctcaaaattttctaagttaccagagtttttactctctagtaatcaattaccagtttcctgttgtcgattaccagtggcatagtttgatttcgaaagctttcaactaaattcgcaacggtccaattgatttcaaaatggtgtaatcgattacaagatattggtaatctattaccagtgtatc

SEQ ID NO: 16075 - DNA, 436 bp, Glycine max
  unsure at all n locations
agcttgtcggtgatgggatccaactttcgccacaatacttatctttattatattttggacagggacagaaaatggatgctatgcccttttgctaaacgtaattntaaataataataataataatataaaaagttacatattacattttatataaatcgtattccaataaacttgtttccaaattttaagagaaacttacttaagggatttagagcattatttcgatgataatctttatatgagttatttaattttttttcttattgaaacatgtgacatggcattatttatataaacaatcgttatttaataaatttatattataaataaaatatttttcaaacataataactcataaaattaagttaattaattatttgagccattttaacatcagaataaatntcatacaaaatatttaaatttatgcaaaatt

SEQ ID NO: 16076 - DNA, 423 bp, Glycine max
tgtccttggtttagacatgatttatacatgatttattacttgtttgattcaatttgggcaaaattggacgagggcaagtgtgatttcgaaaatctgcactattatgcagaattttgctgttgaaatgtgcagcagaattttggctttgtgcagaaaatgatgtgtatttgctggttgtggaaagagtagtatagattgggttctggatgttttctagcagatcccaatggtcacaatgtagatttatgtactatggacctccagtaaaattttcgagtcgatccaacggttaacgaattggaacgaagagaatgttactggggtatttgagtaaggaaagctacggcattggtttgtgtttttgggcagagttttctgtctttgccctgttttcttggttttgatagttcatgatgtttggat

SEQ ID NO: 16077 - DNA, 515 bp, Glycine max
  unsure at all n locations
gagatgcnttgagctgacgtctcatcnctgggcgatnctctcgncccgtgatacttataatccagctgcgcgctttttatttttccttaaagagatctatgaaagataaagcggctttaagaaacaatttctgctccgaatatgacaaccaccgttttatgaatgctgaacaccatcagcactttcaggccatcaatggatggatatttctcctggagcgacacgtccagctcatggacgaccagtataccgactttcaagaagagaaagttagcccgcggtggacatcactggttacccccatggccaagttctacccaaacgtaattctcatagtttatgcgaatgcatggcctatatacgaagacttgccagatatgcgatcctatgtgaggggtcactggatatctttcgatgaggaagctcctcaccactntctgagataccctctaatgctttaagaggtcctagaatgtgaatttgcctaagaagaacccgcttcaccgatttgatga

SEQ ID NO: 16078 - DNA, 429 bp, Glycine max
  unsure at all n locations
tttcgtaaaacttatggtaaaatctgggacctatccatggtagaagtctccacagagaccattgcctccctcgcccagtattatgatcagccgatgaggtgcttcacctttgggaacttccatctatcacctatggtagaagaatttgaagagatcctaggatgccctctaggggggaggaaaccatacctcttcacagggttctatccctcattagctagaatttccaagatagtccaaatctcggcgcaggaattagaccacaggaagcaagtcgaaaatggggtggttggaataccgagaaaatatttggaggcaaaagcaagaatcttggtaggtaaaggcgagtgggccccgttcatagatattctcgcactgttgattntcagaggagtcctctttccaaatgtggatgggttggtggacctg

SEQ ID NO: 16079 - DNA, 383 bp, Glycine max
  unsure at all n locations
ttgcttgatttgtgagttgantttagccttagtttcactttggttattagtcaattcattcaaggaaacttccaaagaataacgtccaatcaattntgtattntatattatttaaagatattttgactattttattattattttgctttttttggtttaaccgaggttacagcgtgaacgatcaattagattttgttttaacagtgattaaacgagattacaacacaaatgatcggttgaaattcattttatcatttattaggtgagaaaacgacttacacgatcggttaaagctcgttaaaaatggaagagaagaaaaccggacatgaacaaaatgaatatgatagctaaaaaacaagagatgaattgaaagcatcggattc

SEQ ID NO: 16080 - DNA, 428 bp, Glycine max
  unsure at all n locations
tcaacttaaagagagtagttcaggcttagcgcaacatgcgcgctaagcacacttccaagcatttcaaaaacaataaagaattggcacttagcgcatcctgccgctaagcccatctcgtgaaagttcaattccagaatggatctgtggcttagctcaggacagcgcgcttagtgctgctacaataaatttttccagagaagaagttgcgcttagcgcatcatctccactaagcccactgcttgaagtttacttctagtgaagatgttaggcttagcgcagtgatgtgcgcttagttgaactattcagtcaactagtcaggggtctaagcgcttagcgcaagagagctcaggcttagtgcgtgaagacatggcgcttagcggatggacaactganaaaattntcaaagtcttttctgtccatctcttcac

SEQ ID NO: 16081 - DNA, 435 bp, Glycine max
  unsure at all n locations
tagcttcaacattcaattntgagcgttntgatatattacgatactcaatcggacatctgagtaaaaagttattgtcgtttgaatttgctcagagattcggtattccatttcgagcatcccgatatattacgggactcaatcagacatccaagtaaaacgttattgtcgtttgaatttgctaagagcttcgataatcaatttcgagcgtctcggtatattacgggactcaatcagacaaccgattgaaaagttattgtcgtttgaatttgctaagagcttcgataatcaatttcgagcgtctcggtatattacgtgactcagtcagacaaccgagtgaaaagttattgtcgtttgaatntgctcacagcttcaacattcaatttctagcatctcgatatattccatgactcaatcatacatccgagtaaatagttg

SEQ ID NO: 16082 - DNA, 425 bp, Glycine max
  unsure at all n locations
ttgagcaaattcaaacgacaataagtttttactcggatgtctgattgagtcccgaagtatatcgagacgctagaaattgaataccgaagctctgagaaaattcaaacgataataactttttactcagctgtctgattgagtcccgtaatatgtcgagacgcttgaaattgaataccgaaggtctcagcaaattcaaacgacaataactttttactcggttgtctaactgactcccgtgatatattgtgacgctcgaaattgattaccgaagctctgagcaaattcaaacgacaataacgttttactcggatgtctgattgagtccagaaatatgttgagatgcttgaaattgaagactgaagctctgagcgaattcaaacgacaataactttntactcggatgtgtgactgagtcccgtaatata

SEQ ID NO: 16083 - DNA, 390 bp, Glycine max
  unsure at all n locations
agcttattatatattgatacgctcgaaattaaacgtcggaaactctcgggaaattcaaatagccataaatnttcacacggatgtccgattcgggcgtataatatgtcgagaggctcgaaattgaacaatggaagctcttgagaaatttaaatgggcataacttttcacacggatgtccgattcaggcttataatatatcgatacgctcgaaattaaacatcggaaactctcaagaaattcaaatggtcataacttttcacacggatgtccgattcgatcgcataatatgtcgagaggctcgaaattgaacaatggaaactcttgagaaattcaaatggtcataacttttcacacagatgtccaattcaggcttataatatattgatacgc

SEQ ID NO: 16084 - DNA, 427 bp, Glycine max
tgaatcggacatccgtgtgaaaagttatgaccatttgtttttcacgagagcttccgttgttcaatttcgaatgtcactatatgtgatgcgccaaaattggacattcgagttaaatgttatgaccatttgaatttctcaagagcttccgttgttcaattctgagcgtctcgttatgtgatttgtctgaatcggacatccatgtgaaaagttatgaccatttgtatttctcaagagcttccgatgttcaatttcaagcctctcgacatattatgcgcccgaatcggacatccgtgtgaaaagttatgaccatttgtatttctcaagagcttccgatgttcaatttcaagcgtctcgacatattatgcgcccgaatcggacatccgtgtgaaaagttatgaccatttgaatatctcgacagcttccgatg

SEQ ID NO: 16085 - DNA, 324 bp, Glycine max
agcttttataagaaagtgaagtcaaaaacttttaatgttggagatttagtttggaaggttatcctgcccatggatagtaaggatcgagccttgggcaaatggtccccatattgggaaggactcgttaaaataattcatatctattcgaatggtgcttatgaattagaggaattaacccctcagaaacgtactttgagtataaatggtaaatatttgaaaaaatataaaccaacattgctcgaagttaaataagcatagaattacagaagaatggaacataaaatggtataacagtaaaattgccacaaaggcatgtgtcaaatt

SEQ ID NO: 16086 - DNA, 437 bp, Glycine max
  unsure at all n locations
tgtccaatgaggtgacaatgaanatacctagtgttactatctgatatacagtttttgctgctcgttttattgtcaattccaactgcatcaatgcatctttaacaagcataccacgaaccagagcagcaaccaagttgaccttctttggactctaaaataccatagaaaacaaggtatgtaaaatgtgcaactagtcagatattaatcagatccttcttaaaccataaattaaggcattttccacagcaaaccagggaaggcatttcaatggctaaaaaattagatgccaacttttctgcaaaataacatgttggttaaaacacagaagtttcttagcaagtagctaggcagtggcaccacataaatgtaacaaaacattgtaattcttcaatatttatgttatggctaagctgaacatacttgtgataatacttatg

SEQ ID NO: 16087 - DNA, 438 bp, Glycine max
  unsure at all n locations
agcttatactaagttcagcctaccatcctcagtcagaggatataccgaagactgcttttangatccgttatggtcactatgagtatctagtcatgccccttggtatgactaatgctccaggtgtgtttatggactacatgaatagagtatttcacccttaccttgatagttntatggtagtattcatagatgatattttggtatactctaagactagagaggaacatgaagaacacttgaggattgtgttgcatacccttagggaccgacaactntatgctaagctgtccaagtgtgagttttggttagagaaagttagtttcctagggcatgtgatatctcaagggggtaaacctgtagatccctctaagatagaagtcgttcttgagtgggagagtcctaagctnttgtgtgggatacccaatgtaagcatagttt

SEQ ID NO: 16088 - DNA, 424 bp, Glycine max
  unsure at all n locations
ttgagccaaaatcctgactcaccataaaccttgaccctggtgataatgtcaatccttaccctcggaagcaaaaaagaatagaagggaaatttccaatcaaagaaaagagaaggaaaatttccaatgaaagaggaaaaaagaaaagaaaggaaattcccaatcaaagagtgggagaaagaaaaagaaaagaaagaaaattcccaaccaaagaatgggagaaagtaaaaagggaaggaagctcctggtcaaagaaaccagagaggtctttggaccagataatatctgaacagtacagaattgtcaccaaatgaacaaaaaggaaggaaaggaaaccacgacctanaatggtcttctccctttaattaccaaccaaaatcccgtgcgctagcgacccttttttctcgccccgcactanaaaaaaaaa

SEQ ID NO: 16089 - DNA, 432 bp, Glycine max
  unsure at all n locations
agcttcttagtttcagatgatgcagctgagtttgtagctacctcatgcactcctctaatgattataacatcatttctggcgctaaactgctgggagttggaagccatcttctcaattaaatgtctagcttcaataggagtcatgtctccaagggctccaccactggcagcatctatcatacttctctccatattactgagtccttcataaaaatattggagaagaagctgctctgaaatctgatggtgagggcaactagcacatagttttttaaatctctcccagtattcatacaggctctctccactgagttttctaatacctaagttatccttcctgatggctgtggtcttggaagcanggaaaatgttttctaagaatactctcttaaggtcatcccagctcgtgatgaaccttggagcaaggtaatac

SEQ ID NO: 16090 - DNA, 432 bp, Glycine max
aaccaaatgctcaccactgctagaggagaagcctttatgttatttcatataaacctcctcctctaaatcaccattaagaaagcatgttttcacatccatttgttgcaactcaaggtcaaaataagcaactaatgccaagataatacgaagagaatctttcttagatacaggagaaaaagtcattgtgtaatcgattccttctttttgagtaaatcctttagcaacgagtcttgccttgtatctctcaatgttgcctaatgaattgtttttggtcttaaagacccatttacaaccaatggcctttgccctattaggcaactctacaaggttccaaactccattgctctgcatggaattcatctcatccttcatggaatcataccataaatttgactctttacaactcatggcttaatcaaaatatttgagatt

SEQ ID NO: 16091 - DNA, 408 bp, Glycine max
agcttgcagaagaataaagttcaaggtcaagggaagcagatagtggaagaaagaaaatggagaataggaataagcggaagagagaaaaatggagaaaaggaaaaactgaatattatgttggataatgctcaaatgagcaaaactcacatttacatgaatacattgtgccttatatgactaaagctagtaagttgttacataattggttacaagaataactagcttgtaactaactaaaactaactaatgctagtaacactagtaatctatatctctaatacaatgctcaaacaaaccataaagtaaagtcatgaattcaggatccatacatattattctggtggcggctgaagacaatgacatctgcacccagtctcatactaccagtcttgaagccatttccatcta

SEQ ID NO: 16092 - DNA, 374 bp, Glycine max
tgtatcttttatgatgaagcagctatgaagtatttttcactaggtgaggctagctgcataaatcaaaagacaccattgttttctatcttcaactaaaccctttgctagtccatttagataaaatataaacataaaaaaaaaatccaggttttcatgtctactctagtcatgatgatcaggttttgggtaatgaaacacaaataactctgaaattttttgagagaactaaataagaaaaatcctaacaataaggggaaaaaaataattaagaaaatcaagagatgtacacattacagatgtacaagaaagcaggatagtgagacccctagatcaaccaaaaaaaggatatttagatttccaaatgtttttattat

SEQ ID NO: 16093 - DNA, 429 bp, Glycine max
  unsure at all n locations
tatcttgtgaaatatggcataacaaatattgacgaatgtntgtttatgggtcagactattctagagcaattggaaggccttcctaggcataaagcanatgccagatatgtgaactatgttgcagaanaggacaaaaataatggtaatttatatgattcttcacttttagctaataataacatggagcttttctctgagcctgagcatgctaaggtgtttggtcatgttcgtaagctttcaaatgagagtgttgaaagcgatggaagctcaatacgaggtagtgacatgtctaattttgggattccaagttcatctggtgatggctctcatgaccttcctggatctgctttggtttcaagagagacagatattatgggccacacanagtcgaagtctactggtgaatactcaatagtccttccactagat

SEQ ID NO: 16094 - DNA, 426 bp, Glycine max
tagtgtagaactggccaccaaaataaccttttttaatttatgagttgatcaaaatgaaaccctcgtgcaacataaaaggcagaagcaaataataattatttacctcttttcttctctcagctcgctcatcacacttgaaactgaatccatattttgggagcgcccccaccctgcgaggtttggcatcttctgcagtaggacttacaactggattaaggataaaccataaatacactgtgccactctcagtaacaaactaacaacataaataatataaacaaatccacattagctccccattgcctctcaccaccataaacaatgctcaaccaggaaaaaaaaggatacgaagaagattctgcttctccttgaagattatcatggggatctttcttcgataattgtggtctagtcttctccctgtat

SEQ ID NO: 16095 - DNA, 403 bp, Glycine max
  unsure at all n locations
agcttctcccctaattntctataaatagggggagaagtgaagtagaaaagggttcagccccttaggcacttctctctctctcgaaatagctgaggaaaattagttccgtgaagaanatccaagccgaggcgcttccgtaacgtttccgtgagtaattacgcgaagattctcgaccgttcttcaagattcatcgttcgttcttcattttcttcagtcttcaacgggtaagtacctcaaaccaagcttttcaattcattctatgtacccgtggtggtccacattntgtttcatgtatttttattctcgttttcatttactttttatacccccttttgacgtgcttaagtcatttatttaagtcatttctcgcttaatctaaaaataaaataaatttccaccgatc

SEQ ID NO: 16096 - DNA, 408 bp, Glycine max
  unsure at all n locations
ngagtaaggcacccctttggtttgaagacgcgttcttgttgagaggcatccacataaagttctccacagaaaatgctttatcttgggaggtatacgaagattccatatagtggaccagcttccttgaactttgagagcttctttgttcaccatagtctccattaaaatatgataatctgatcaaaccgagtatgtccccatggtactaactttcaaaatcaaaatatcagaatcatgaagattgaagagtggcatcatctttatttcttgggaatcttctttattgaaaaattgatcagtaacctcaatgttccaactattgctttcaacatcaataagcgaatgtactgtcaaatgttcaagaccaaaaagaggtaaggacgaaacataatacttatctttattctg

SEQ ID NO: 16097 - DNA, 439 bp, Glycine max
  unsure at all n locations
agtcttgtaacaaggaaaaataaaggaaacaggaaacatcataattcataaggagttctctgaccttcgccaattcaatagtgctcagatccattccgattctggttgtatagaactccctagtcataaagtcctttcagtatatgaatttgtttgcaaaatttccagcagaaaccaacttccgaaatatataagaggaggctaaagatatgtagagttgctcctgcataaatttagaacataacaagcagttcaagcctcaagctaggaagtaaaagaaaaattttaattctgatctagagcagaataactaacatagcatactgtgctacattactttcgaggcttcaattactcanatcagggtaagttcataagatagatatacaaccagtatatantgttataatacatcactctcatanaaatattagcattc

SEQ ID NO: 16098 - DNA, 441 bp, Glycine max
  unsure at all n locations
ggaccttaaatctcagcttggccaggtattcatgtttatctagcctttgagtatgtccattttgatttatggggaccatctagaggaaaaactcatggtggaagctcatactttctcaccatcatagatgatttctccagaagagtatgattgtatgttttgaaaaataagtcagaatcttttcaaaaattcagagaatggcatactcttattggaaatcaacttggtacaaaattaaaagttttaaggactgacaatggcttggagtttgtttcagagcagttcaatgagttttgcaggaaaataggcatcaaaaggcacaaaacagtccctcacacaccacaacagaatggtttagcagaaaggatgaataagaccattttgganaaagtgaagtgcatgctactaagtgcaggactgccaaataccttttggggagaa

SEQ ID NO: 16099 - DNA, 270 bp, Glycine max
  unsure at all n locations
agcttgtgccacctacatagcataggtttttcatggttgatcaacctaagctgtggntgtaaatattataaantttacatacccaaattaaacctataagttagaggtgaccaatgagttacctattatgatcagtcaaacttactatatgtttcttcattaaatcttaatcaattaatgtgatggctaaaaatattggtcgtaaagctgattatccacatctaggactaccgacttgctcaccaagccataaggagaagaatcattctc

SEQ ID NO: 16100 - DNA, 433 bp, Glycine max
  unsure at all n locations
ntagaaccacaaacaaaaaattatttgttattagctttttgtaaaacaaaaaatatgacatatgttaataaaaaccatttcatacactctgcaaaaccatttcatacagtatttgtagtgtactctcaatggaaatacacttatgagataacctctaatatttttttatcagtgaaaaactctataaaaaaaggtaaaaccaaaagacagaaactccaaggaccttataagtccaatcagctgagcccactgagcatcaacagtactccattgatccccctcaataaccaaaaaaatatgaaatacggcatgtgagaatagggtcagagaggataacattagcacagaccatgatatcaaagatggttgacagacacgaaatcttgtttgcaaaacaagaaaaaagattcactacataaataaaagacataac

SEQ ID NO: 16101 - DNA, 372 bp, Glycine max
  unsure at all n locations
tctagcttaagaatgagtccgcgaagattaagaatgcttaaagtttatgtgagaatattcaaatgttcaatccttttacaagaaagacaaaaatagaagttcgtatatgaaatattcaaatgtttcatatatccttttaaatgatgttgaagtgtttacatgtaattatccataatatcctgtttatctattttttttcatactacttttgtactcaatatagttctatatatatatatatataatttactactatcgattctttntataagaaacaaatgatacttcaaaacatttcatgcatccatgacagaagattaaaggcataagctagaccatccaaacaagaatacaaagttnttgtgcttgatc

SEQ ID NO: 16102 - DNA, 423 bp, Glycine max
  unsure at all n locations
ttcaactttgagcctgagcaagttgaatcttattctgctcacaggctaatctgaagggtgttgtgttgaaggctangcatatagctgaagcagctttgtttcttgcttctgatgatgctgctgtttacatcagtggtcacaacttggtggtggatggtgggttctctgtggttaatagaagttattctttcacaccagcttaattacatgtagagccaaaaaaacatagttttgtggctggttggcattaatttccctagccttcatcaagttgagaacatgatgatgtcatgcagtgcgtcaaattaccttgttactgggacttttttttcatttgcactctactaataattctgcaatgtctcttctttgtttgcattttcaaagcatacattcatcaaccttgtctgcttgtgactcaaa

SEQ ID NO: 16103 - DNA, 436 bp, Glycine max
  unsure at all n locations
tgctttagacctttgatagcatgttggcatcccctgcattcttgttctagtcagcttcaaacttattacaagaaaaatgacctatacctacagacaaaaactgtcactataaataaaaaatccgtaggtaaatgtatgatagactttgttctacggacgttttttccgtcaactttgagcgacatataatgacggctaattgtctgtcactataggttttacctactatgtatagtgtgtaggtaaaagtcattaacttctacttacatctcctaactgtaggtaaaagtctttaatatgtacatatcatcttcaactgtaggtaaatgtttagatcttagagaaagcttataacatacataattgaatgtgggcagtgcagcaaaccaatacctctctgcttcttctgactanaaaagaattatataaactcatg

SEQ ID NO: 16104 - DNA, 418 bp, Glycine max
tatcacccttactgatgattgaaaaaagcttttaatggaagtcaagagcatgatagtgcaacgactatcgacaatgttcctttggaaaatgatcaagtgaaggtcggtattaaggaagtttgagatgttgatgctcgcactcctgtacccactcaagaggttcaattagtggagtaggcatttaacaccttccttgcttgggcgacacatcttgtgaaacctttttcagaacaggtatttcatttagtttttttaataattattaataaaggatttgttacaaatcaagttttgagtgtcattcgcttaatgtttattaaatgtgttggataaacaggtagttgcgggattggcgaaacctgtacatatgttggatcctgacattgatcccctttacctgatgacattgacaatcttg

SEQ ID NO: 16105 - DNA, 434 bp, Glycine max
  unsure at all n locations
tttcttttggcactagccattctttctggcactcgtttntggtttttctagtccttttcttattatttaattgttggatcccaatcccaattctatttggggggtagcttaaatggttaagtagagcggaacggaagaccctttgatagcatgtgacgcgaagtcctcaagtacgaaggtgattagcagcggagtggtccttaaggctgtcgtacctgctctagtccttccggcgtaatgttctccgaagaatcggttcagtctttccctctgtggctgctacttctttacttcttcactagtcttgagattntagccgagactttgctcaggtctcatagaaaagaagattccttcccgctcttctctgaatggagagaatgagttctactctttcactggaagctatcttactaaagagtggtcctatcttt

SEQ ID NO: 16106 - DNA, 427 bp, Glycine max
ttgcctaaagctatgagtcgagaaagatttgtatttgacagatagcttaccccgctttcacgggaagggtcgcttcgctcggggagtggaggggaaggagaggacaggttcagccgtcagagtagagtagtggagccagaaaggaaagaatgagtagtaccagagagacatgttacgaaagaaggaatcaccaaccataaagaaatgtaactgtcctgggatataggaaattcttcacatcttctcttattctctttatggttacccggtaatgccctatctaaaagtggattattgtatgatagtcttatccttttccttccccagcttgaagtaaacccatctctactctcttctcggagtttcactgtggaactaaggcatctacttcactattgagtgggaatcccggatctctgtctgaaag

SEQ ID NO: 16107 - DNA, 328 bp, Glycine max
agcttgtagattggctagacatgatacatgtcagggtttggtttggttcaaggataaaagggatgccccacattatttccatgacacaaatgcaaaaatgatgatttggaaattttatgcaaaactggtcatgcatgcacctatgcggacactcaagtgtcaaatttttatggtcatgtgatgctagggctcaggattcatttcctctattttagatcaacccaatgtttccaaaatatgttcttttatcaatttgtgcattcatccgagtccattttgggtactcgggaaaattttcacagcattcacccttcatgtgtgcacacat

SEQ ID NO: 16108 - DNA, 426 bp, Glycine max
taagataacttactggagaagcttgtgtgagacaacttcgttgattagctcgagtttagctacgcacacccatctaaaaactaaactcacctccttgagaagctagagcttagctacacacccctataatagctaagctcaccccatgacaaaaaggacatgaaaatacgaaaaatatcctactacaaagactactcgaaatgccctgaaatacaaggctaaacccctatactactagaatggccaaaatacaaggcccaaaagaagaaaacaacctattctactatttacaaagaagagtggacccaaccttggcccatgggctcaaaaatctaccgtaaggttcatgagaaccctaaggccttctttatcaactctagcccaatgctcttggagcctcttgctcatggctctggtaactggtcc

SEQ ID NO: 16109 - DNA, 384 bp, Glycine max
attttccaaattattgtaccaaactaccgcggctccggccaagctatcttgaaaaaagtgtattaatagcttctcatccttagagtgtgcgcccatcttgcgatagtacatcttgagatggtttttgggacaagttgtccctttatacttgtcgaagtccggtactttgaacttcggggggataacaacatcgggtactaagcaaagatctgtcatgtctgcgaacgaatagtccccaaatccttccacggctctcaatctctcctcgaggagattgagcttactcctttcttcagatgctgtgggcggaccttccgtggacaaaactattggttgtgtcgtgattgtcgcaacctacccttcggtgggagggcgacacgtgac

SEQ ID NO: 16110 - DNA, 401 bp, Glycine max
atgcagctgagttggtcgctacctcatgctcttctctaatgactatagcataattgctggcgctaaaccgctgagagtcggaagccatcttctcgatggaatatctggctccagcaggagtcatgtctacaaaggctacaccactggcatcatatatcatacttctgtccatattactgagtccttcataaaaatattatagaagaagctgctccgaaatctgatggtgaaggcaactggcacatagatgtttaaatctctctcactactcatacaggctctctccactgagttgtctaatacctgagatatccttcctgatggctagagtcctagaagcacggaaatatttttctaagaatactctcttaaagtcatcccagctcgtgatggaccatgga

SEQ ID NO: 16111 - DNA, 389 bp, Glycine max
  unsure at all n locations
agtctngacaaatataattatctacttgttccttcttagtttcttgtatacacagcatgtctgctctttcctttctaaccattcttctaaccgccgcccatttcactcccctccctaacccccttatgttgtatgtgataatctttattattcaggcttcctgttacccaacttattggcatcctccttgtccctcagctccatcttcgtaaattgtgaccaccattgcatctcctccctcacatgtaactcccaaattctgcgccatctcccattgtgctgaggcttcctttgtattctcacttgtgtggtggctatctttttgcaaatggggctgagttataatctgcacttcatctggtgttattattcattcctgttcttctaac

SEQ ID NO: 16112 - DNA, 420 bp, Glycine max
  unsure at all n locations
ggaggaaaagaaagagttaaaggaggagcacttaattgaaggaatgaaagagggagagaagtggaactttgaagtgtgtctcataagactttcattcatgaaagttacaacaagtgttacagacgttatagcctaggtagcttcttgagaaacatccttgagaatcttccttgagaagctttcttgagaaacttccttgagaaatttctttgagaagcttccttgataagctagagcttaactacacacacccctctaataactaagctcacctccttgagaaactttcttgaaaagcttccttgagaagattcctagagaagctagagcttagctacacacacctctctaataactaagctcacctccttganatgagaagctagagcttagctctttgtatcaagtgaccacagaata

SEQ ID NO: 16113 - DNA, 386 bp, Glycine max
attttctctacaagaaataaagtttttttcaatagaaaactctcaaaaacacttctagctttgtatctaaacaggcttataatatgcttaaattaatacagataaaatcataaatccatgcatatatgatatatccttccctttgtactattcttctatctagggttttattatcatggaaagaaagacatagacttgttagccttgaaggttataatacttcttgagttttttgtagcatgaactagttaacatatgttgatgcttcttttcagataagtgtaggattggatcagggcctcagaatgagtggtatttcttcagccataaggacaagaaatacccaacaggaaccagaacaaatcgagcaactacagctggttttt

SEQ ID NO: 16114 - DNA, 420 bp, Glycine max
gctggacccgggatcctctaagtcacctgcggctgcagcttaaactagtatgtggtaattgatgtgtgggagtgttagttatatattattggagcttggaggtttgtttggtagaccggagtggagagtttaacatttaactaaggacaacgaatttcaatactcatgtaatatagtagtatttggtgtgttatcattatttttcgataatcggatatttcttaagcacactaggtaggttttaagactaaagatacctagcgcacataaaaatgcatgcgagtcttagtgattatgatatgcttttgatgcacgagatttgattctttgttcattatgcatcccttaatcaaacacgcttcctcaacacctgacataaagcactcttgtccgttggtttattaaactgcaacatggtac

SEQ ID NO: 16115 - DNA, 440 bp, Glycine max
  unsure at all n locations
taacaaanatggtggagggagtcctaccacacggtttgccaatctctcgaattctgttaagtagtcattaacagaaccgcgttgcacaagcttgaatagagctcccttgggatcgtcatagaatgttggagcaaaccgcgattccaaggcttgaagaaacccttgccatgatgttatgaagccattgctgaacatccactggtaccagctgagggcggcgtcgtcaaggtaaagtgaggctacggtgattctctcttcctcttacgtgttctgatttgaaagagttggttaattttgaagatccatccaagaggatcgcgaccgtcaaagcgcgggatatcgagcttaacggagttacggtggtttctcgagctgtttgaggaaggttggttctggtgtgcatcacgcatcctgaggtggtccaagatcgaatccaccct

SEQ ID NO: 16116 - DNA, 379 bp, Glycine max
atcttgagggattagtaggttaaacttaaatagcttgttaagcatatcattatatggaatttgctcaggccatttgttcctgaaattgtcaaagtccttataggtagtgtattcggaaggatgtgtatatgtttgtatatagatgttgtcttcaactgcaccttgcaaaagtggcctgaaacatagccggttttgaaccttaacaaatgatcattgcaatcctataatgttgtttgtgaattcactctgattttcgtatgttaatggagaacctatgtgttttagaagaaacttttgttgattctgaagcactgaggttggaaaaggctattatattgcaactaggaaaggttggtgctcctgagttattcaatgttta

SEQ ID NO: 16117 - DNA, 415 bp, Glycine max
tgcgctgagttgatccatacatcgcgctctctcctcatgacgataacttatatgctggcgctttgacgctataaaaccttatattaaaaaatggtgctagattcaatcccatgtttttgctataatgacaaactctattgatctatactctgacaccctatcatggaggaaatataatgaaagcatgagggaacgtttatgctatgcatgacacaaatgcactttacagacacaagagccaggaagatcgtgtcttcttactcacaagcattgggcctcatagttcattcacagtcattaccatggtgccccatgcatgcatttaagaaggtgattggaccttccgatttcccgtgacaaaatgacaagacaaatgcaaggcatgagtgatgacacagtatggatatacatgcat

SEQ ID NO: 16118 - DNA, 361 bp, Glycine max
ttcttggtgttggatgttttttttataaaaaatgtccgacaacggttagattcttttgacaaaaacgccttactcttttatctctcagatttatagcacctgtgaactttgactggattgagaatttggctaggtcttgttggacgagtaacgtgtgacattgagcctagattataataaatggaaaccaagtagcttcctgtcaaattcaaactcgttgatgaaaaactatggccacattaattaagactgtttacaagggcttttgatttttagaagctgatagttgaagttgttaagagaatctaagctcgctcagattctgcaaatcctgtgacaaaacaacagcacgaggtgacga

SEQ ID NO: 16119 - DNA, 425 bp, Glycine max
  unsure at all n locations
tatattgttattactggggattcagcacacatttatggcttgcgtcggngatagaaaggaatcagaatggatggataggataatatcagaaggagccatcccacttcttgaaccagataattgttcaaatggctgggctacccctcctggtgatgcattcatggttagaggccctgagtattttacaacaagggttaaggttccagctggtgattatatgctcaaacctctcggttttgattggattaaaagttcagtgaaaattgcggagatattaaaggatccaaatagtcgagttaggaatgccattgataacgagtttccagaaggtgataaaccctttgtgtgggccttcaatcttcaagtcccaaccaaggataactatagtgccattgcatattttacaaccaaagagtcagttcttg

SEQ ID NO: 16120 - DNA, 370 bp, Glycine max
aggaagtgtgcgaaggagaaacttcctgcctctattgatgaccacagagaggtacctggagatatgtcgcgggggtcacgagaccttggggacgtccagtggggtgctattgcccaaaaccaagcttgtccaatcccgacccagcccggacatagtcggacagagagaacctgtgatgtacctaatcaggcgagctcctggctgacaacatatatgaggaacaaatacctcaaagcaaggaggcttgtggtggctggccagcgtgtgaaacttgattgagatgtgagatatgggcgtctggcaatcgactaccaggggcgaggtatcgattacgaggcttaataatgaggacaggaagcctagatggtct

SEQ ID NO: 16121 - DNA, 465 bp, Glycine max
  unsure at all n locations
agatgatttctcaacctcaactgccatcganccacncntagnannaccggccganannnngaanatttagtggtgagggtttgntaagggggagttatgaaggggggagattatggtagtgaggatataaaaagaataaaagatgaaagagnaatgaggttagaggtgggtggttagatgtgaattttggtaatatgaggaagggggaatatggtaatataatattaggttgaaaattgaggataggaggttaagatggtttatggtaatagattaaataggggtgtaatatattaagaggtttgaaaataaagtaaggaaatttaaggagggtgtggtaatagattaagagggtgtgtgaatgattaaaaagatgaatgggttagtggtaattgattataatggatgtgtaattgaatagagaatgtattattggatatttgatgtgtagaaggtatgaaaatt

SEQ ID NO: 16122 - DNA, 478 bp, Glycine max
  unsure at all n locations
atgaacctgattgctgcatgcagaccnnggcgcaatngcactcggaaccgggatgctatagaggcgactaggcaggcatgctattcttattcccgaggagcaggttaattatatgatgcaacaacgctcgcgaaaagactgagctcactataaaggcgcaatcatttcgtatggagcattttcttgagcaagttaccctggcctggagctcaaactacattggtgagacccaacgagggtactccgcctgagcccacctgtgcgggttgatacccagccaactaacccacaatctctattggtaaagccactatcttctcttgagcgtgaaatacgtcccccatcttcacctctgattatcaattccgatgcaacattgtgatgaaacaccagaccactctgattcaccaaaaggagaaacagctgaacttcctactttcctagtaggaggaaattctgattcgacatctggagaact

SEQ ID NO: 16123 - DNA, 342 bp, Glycine max
  unsure at all n locations
acaanaaactcagcttcagtgctcataacttttattgctgcaattttgcaacaggggaggtgatctgggaatacataacccaaactctgcaaaggtgtagatttctgattcatggcaagctgagcactaggtagaccacgcatacgttttccttcaagcttttattttcatagatgaaatgaatgcgtggccacctcatggactctctaagacaatacatcatttcttgcctgaattgaaggagatggaagccatttctaatcaaattcctagcctaacggggtcatatcaccaaagctcaccctggagataatcatactctctcatatgctagtcctcata

SEQ ID NO: 16124 - DNA, 375 bp, Glycine max
atcttattgaggcacttaatgttttgcgtgagtgttttaatccaatcacttatgctttcttctggagagatataatataatttctgatgttgtttaattttcagtagaggttcataactcaattgtttgaactttgtggtttttacactgtgattttagagagggagggggaaatgatttctgttgccactttaagaatttttggcaagagggttgctgaaataccctttgtggctaccacggtgcagtgtaaaaagattgtgtgacattttaatgaatgagattgagaagcagttgacttacttggaagtacaggagaatgttctgccttgaagtttgacagttatgaaaaaggacaccaacctgaatttctca

SEQ ID NO: 16125 - DNA, 425 bp, Glycine max
  unsure at all n locations
tctaaacactcactgccttctcaagataattcttcccaccatcatccaaaacattgttatatctgacatgccgcttcagcttctcacactggataactgtcgcagggtgccatgatcctagaaatcccaaatccacactcctcacctgcaaaattccaaaactttccaaatttcaaaagaatcccagataaaaaaaaaatcactcactcatgctccctactaccaaagcaagtgatcacaagagaaaaatccaaactttgcaaaccaaaaacgacaccgtgttatggtagcctaaaaatagagcgacaaatcaaaaaacactttcactttgcatgcagggtggcgaanaagggaattgaataacgaaaacgacaatgtcatangtaatgtgcctaaaaaactatgaaacgacataagacccaatc

SEQ ID NO: 16126 - DNA, 352 bp, Glycine max
ataacacgcacaacctgcaagagatggctcataacaggccaatcataactatggagcaatttcttgagcaaggagcctggccggaagcgcaacttccattggtgagacccaacgaggctactccgcctgagcccacctgagcaagatgaaccagagccaactaacccacaatctctagagggaaatccactatcttctcttgagcgtgaaagagatcccccatctccacctctgaatatcatcaccgatgcatcatctgatgaagcagctgcccctcctgatccaccaaaaggagaaacaggtgaccttcctacttccctagtgggaagaatttctgattcgtcatctggag

SEQ ID NO: 16127 - DNA, 416 bp, Glycine max
  unsure at all n locations
tagaaagtgtgcttactaatgttagaatttggatgtanggattaagtgggtctaacttatgtcttatatgtcatcaagaaaggaaactcttttccatcttttttgtgattgtatggatactaagttgatgtggcaattttttattcgagtataaggttcaatacaacatcaattctttcataaccaattgtcgcaacctacccttttgcgggtgtcgcaacatgcccttttgcgggcgagcgaaggcgaggctcacgggtgcgctttccaaaggaggaaagatgcgcggagtcgccaccaacgtttatttgtgggaaacgtcggaaaaaccgaaggaaaccggtcgaaatgaaaattctaagttcgggagttgtatttacgtttcaagaaggtattagcacctcttacgtttgtct

SEQ ID NO: 16128 - DNA, 392 bp, Glycine max
  unsure at all n locations
atctntatcctcagatccctcttgttggacaagacttagaccaaacaacattattgtaacaacatatttaaaaccaaaacttaatccgcaaatccctcttgtaagactaagtttcaattctgcttcattcaagttctaaggcaacaatacattttccaatgttaaaatcacctaactaggcacacaaatggttgatcagaccaagggcatacaaaatttaagctctgaaagaagcattgaacacaagaaacacaatcaattagatattaaaataattacattagttgctcattagaaatccccaacaagggtgtttagccaacaattacaaaagaaaccctaacaataatgagcttacaaagcctaggtatctctacaaaagctactcatct

SEQ ID NO: 16129 - DNA, 432 bp, Glycine max
  unsure at all n locations
cccatggaagctcctaatatctcccacactttatggggagggtcattcttggatggccttgattttcttagggtccacttggaccccatttctaccaactaaaaaccctaagaaaactatattatctacacaaaaggtacacttctctatatttgcatagagggtgtttttcctaaggactgaaagaacttgcctgagatgtcctaagtgatcatctaggatcctactatatactaaattatcatcaaaataaacaactacaaatctacctatgaaatcccttaagacatgatgcataagcctcataaaggtgcttggagcattagtgggcccaaaagcatcactagcccttcatacaaaccaaacttggtcttgaaagcggntntccactcatcaccctctttcattcctaattggtgataaccactttta

SEQ ID NO: 16130 - DNA, 391 bp, Glycine max
tgtttttaaaatttaaattcaaatttctaaaagttgctacatatagtttaaacttctggtaatcaattacataccttgtgtaatcgattacaggcttttaaattcaaattcaaaattttcaaattgtttcataaatcaatttagccactggtaaccgattaccagagaggaaatatcatatttttgagaagataattgttcttaaaaaacttttgtaaaatattttctttagccaaacctaggtagcatcaattaaggaattctttctaagatcctaactaagtacatcgttcttcttgcatttctgaattcttgacttgaatcgcgctcatctttggcatcatcaaaacttcatatcatatatgcttctacaacatcaaatagtgcactt

SEQ ID NO: 16131 - DNA, 441 bp, Glycine max
  unsure at all n locations
taaagggttgtgggctgggatgttaagccataggatttatgctgatcaaataaagtcaatagaacccaaaatcttatttaagaacaacaaagctctttgccatttagaccagaaaggagttggtcgttaagatgtattgtttaaggaactgctttccatttcagtaataatttcatcttattttcgcttcaaatcctatttacaaatatttgttagttaataaggaagaaaaaaaatatggaaacagaatattctttaaaacatagaaaagaaacataatctgaaaagatacatagtgaaattagaaaaataaaaaataaattgataggtagacagagcaaaatgcagccttaaaattcatcataagagaaaacaataaactaacttcagataattntcaaatgcctattaaatttagaattataatatatgcatgcaaag

SEQ ID NO: 16132 - DNA, 391 bp, Glycine max
  unsure at all n locations
atcttggagcatgcttattacatggagtagatgcaaccaaaataaagcttcattcaaatttaaaattgtggaggtttgaccgagttatgttcaattntcctcatgtcagctttcatgggaaggaaaataacacattactaattaagtgagttttcttgtaagattcagttagaagactaattaatgtggcaccctctaccccgacatacatatagtgaaaggaaacatagaatagtgggagtaacttaaaaagatttacttcacaattcaatataaaacttctcaacggagtaaaggttcacattcacccattaaccaagttaaaacttatcggtaagaatataaaaacatgtttcggctccaaacaaagaccataccggtattataacta

SEQ ID NO: 16133 - DNA, 435 bp, Glycine max
ctcagcttatcctcagatccctttgttggacaggctcatttatacagcccttctaggtttagactaactcaaactaagcttcatcctcatatccctcttattggactagacttagcttacatagcttacgaaagtttagactaatttagcctaagctttgtcctcagatccctcttgttggactagacttagaccaaacagcattattgtaacaacatacttaataccaaaacttaatccgtagatccctcttgtgagactaagttgcaattctacttcattcaagatctaaggtaacgatacatttctcaatgctgaaatcacctaactacgcacacaaatggttgatcagaccatgaacatacacaatgtaagcactgaaagaagcattgaacacaagagacaccttcaattagatattaaacgtattacatc

SEQ ID NO: 16134 - DNA, 388 bp, Glycine max
tttttaggtttggcttgcaaacacatcttgaaggagctcaacgatctacaagagtatccttttacgtcatgcagataagcttctcaatcctttttcctattttttttcctgtcttttttgttgggttgtatgtaacaaaaactattattcgtgattatatatttatatatttattgcaatgtgttatctaatatatctaatgtaaaggagtagtatatggagaaaagatgtagatttgaccgctatgatagagagaaaacaaataaaaaactctctctggtattttttgattattataaagatttgggacttgaaaaaaaatctaaacacaaaataacatgtagatttgattgctttgagagagagaataaaataacaaactctgtct

SEQ ID NO: 16135 - DNA, 433 bp, Glycine max
  unsure at all n locations
ntntattgacaatttgcataaatatataaaattttttactcgtaatgttttataaaatgatgttttactaattcatgtttacaacaattcattcaaaatttcaaataaatattaaattaaaatgtgctaaatacttagttttctaaaatgatgttttgctaatttatgtttacaacaatccatttccctccaaccaaacacactttaaacaataaacattagtgttgtgtagcagaaactttccaatagaaaggagaaggatgcaagtaagtgaatgaaattttagggaccagaacatatgacatcccccaaatattgaaaagaaaaatgcaaaagaaatccatgattccatgctcagtggaaaaacttanaggaaagcatccacactcaaaagattcatcggaagacatttgaaacccttgtaaataaaagc

SEQ ID NO: 16136 - DNA, 382 bp, Glycine max
  unsure at all n locations
ttcttgctttgtgagttgattttagttntagtttcactttgattattagtcaattcattcaaggaacctttcaaagaaaaacatccgattgatttttttgattattttattattacttttttttagatattttgattattttattattattttgtttgaagatattttgattatttttttattatttttttgaagatattttgattattttattattattttgattttttttatttaaccgaagttacaacgtgaacgatcggatggattttattttaatagtgattaaacgagattacaacacaaatgatctttaaaattcattttatcaattattaggcgagataacggcttaattaaacggtaaaaagctcgttaaaag

SEQ ID NO: 16137 - DNA, 442 bp, Glycine max
tggacttcctgtgttttgggaacctctccttcctcaggtgtacccaaacccaatcacctggttcaagcatgactttctttctgcttttgttggcttgccttgcatagctcgcatttttcttttcaatttgagccttcacttgctcatgcaacttcttcacatactcagctttagcctgtgcatccttatgcttaaacatagcaatgttaggcataggcaacaaatcaagaggagtcaaaggattaaatccatacactatctcaaatggtgaacaattagttgtgctatggacagcccgattataagcaaactcaacatgaggcaaacaggcttcccaagatttaagatttttctttaaaacaatcctaagcagtgtgcctaaagtcctattgactacctcagtttgaccatcaatttgtgggtgacaagtagtagaaaacaa

SEQ ID NO: 16138 - DNA, 272 bp, Glycine max
gatctatagcctcagatcccgctcgatggagacgacttaaaccacactgcattattgtgacgacatatttaacaacctgacttaatcctgagatgcctcttgtaggactgagcttaaattgtgcttcattcaagctctaaggcaactatacattttccaatggtaacatcgcctaactcgggacactaatgggtgatcgaacaagggcctacaaagattaagctctgaaggaagcattggacacaagaaacacagacgactagatattaaaa

SEQ ID NO: 16139 - DNA, 75 bp, Glycine max
ccggaaagagaactgcattacacctgagaagaaatgttctgtcatggtcactcggacatgcatcttcaaaaggcc

SEQ ID NO: 16140 - DNA, 376 bp, Glycine max
  unsure at all n locations
ttcttgtcttaaacactacattctttgtcctactaagccattgttggctctaaacaaatcaataagatttgttggaagattatgcactgactaaatatgtgatcgtcttatagacaaatatatcacttaacacttttagtcttttctttcaaggtatacaaggtgtttttgagagcttagtaactatacaagaattttaaaaaaactttataagaaagaatgaaagaataaggtcacacagatgattcgggtattgtttcttcanagcttcttttatatatagccttcatctccaagtacctgttggtgcatgtaatgcttgcattaaatgcacatctgatcgcaaccggcaagtgtaccggatcgcacaagtagt

SEQ ID NO: 16141 - DNA, 413 bp, Glycine max
tgcagatttggccttcgccagtgaaaggatcaatgtgggtccgaaaagaggcaaatttgatcatcctactaggacgactgaaaaaactggggcaaataaagagggtgaggatgaaggagaaacccatgctgtgattgccattcctgtacggccaagtttcccaccaaacccaacaatgtcattactcagtcaataacaaacttcctccttacccaccacccagttatccacaaaggccatccctaaatcaaccacaaagcctgtctatcgcacttccaatgacgaacaccacctttagcacaaaccaaaaacaccaaccaagaagtgaattgtgcagcgagaaagcctgtagaattcaccccaattccagtatcctatgctgacttgctcccatatctacttgataattcaat

SEQ ID NO: 16142 - DNA, 435 bp, Glycine max
  unsure at all n locations
cggtacctcggngaatcctctataagtcgactctgcattgcatgcaagtcttcataaactttatacaacgaatgacagctctgatatcactatgttacacacagtggcctcagatatcgataagaagggggggttgaattaagatatcaaagactttcctcaattaaatttttaattctcctttttaaaattttcaatgtacctttattatgaattactaaaaagacaattcaaaataaacttctttaatgcaaaagaaaaataacaataactaaaagaagtttaagggaaaagaaagtgcaaactcagtttatactggttcggccacactctgtgcctatgtccagcccccaagcaacccgcttgagatttccactatcttgtaaaattccttttacaatgtctgaaccaaggacaacccttcctttgtgttca

SEQ ID NO: 16143 - DNA, 425 bp, Glycine max
tgcctaattaacctgaaattgagagagaatgattattaaacacacagaatgaaaatactaaggatttattacctatacttaacagaaaatacttataaccttacaaaatagccataaattaagagagtttgatacagttgatacgagttttatacacaaaagttagtcattttcaccgactaacaactcccccaaatttacagttttgcttgtcctgaagcaaaaagagaacaactcacttgtgctcaagtgacaatgacatgcggtgattatgtacgaaggtgtatgctacaaagtgactgattgcatgataagagaatggagtataatgccctcatcacttgtcattcacaaggtatgcagttatccaaagagaagaataaaatgtgacctgaacagatagatgaggttaggcatatgacaga

SEQ ID NO: 16144 - DNA, 380 bp, Glycine max
ttcttgttgataattagctgcgacaactttgtaaggtattgcatactttgtcgtaggagcccacgtgcggtgcttttggcggttgacgcaaacctcatctcatgaataattctactagtaatttcgatatgtcgcagtattcaaagagatacgttattctttttatacaatgcaatattgaatattagtgtttagtagcactatgttttattctttttagacaatgcaatgtgaagtgaaattgtgattgaatattagtgtttagtagcactacgttttaacacgttacattgtcacgtgtgttctagtaagagatgttatcttaagattataatgaagcaagatttttcgtcgctaacttttactttatctacatgcat

SEQ ID NO: 16145 - DNA, 307 bp, Glycine max
ccaactgatcatatccctctttctttggtacagtgttaactctttaactgcacctttggcgtatgtagacgatatagctctaatatgacatgacattatggctatcaaacgtactaccatattactggaccaaaccgacaagatgaaagatcatggcgcttataaaattattccttcgcatcgaggacgcttgttcccaacaaagcatccatctatgtcataagaaactttgcctagatatgctctctgattcaggaatgcctgcatgacgcccagcatgcacacccatggattggactactcgtcc

SEQ ID NO: 16146 - DNA, 348 bp, Glycine max
ttcttcttatccaaggcacattcttggtggtgaagcttcttcttgcatggcttattccctagtggatgtcgcctcctctcacctcttctcctttatcttccactgcatctccatggtggaaaatcaccattgaaggacctcattgaagctcaaagatccagcctccatagaagccccacaagcaagcttccattataagggggcacattacttctcaatgccccaccaagaaaaccatgattatgaggggccaagacattgatagtagccaagatgaggctactactataccctcctctagtggaagtgaagaagccaatgggacagaatctagggaagatatctacc

SEQ ID NO: 16147 - DNA, 425 bp, Glycine max
tgatcaaaacaattatctattcattcaaatccactcaaatcatacaatttcttattcaaatcattctcaaacacacatttcatacaaaacaatccactgcatatcattttcaaccaattcactgttcaaacaagctttttgtacaagcaaacaactcaaagtactaaaatttaaagaactgaaacataaaaactgaaatttaaatgattgaacataaatcatataataactaaaaataaactaaaatgttcaaaatgcacaaatttaaatgtcctgctcctgtgcatgctcattgagatccaacacctgagcagttggtgaatcgtgagagataggctgctctaactcagatgtggatgcagatggtatgacatcatcaggtgtgggtgctggggatcgctctgggatctagtttgtggaagtct

SEQ ID NO: 16148 - DNA, 354 bp, Glycine max
ttcttgccttggtttagacatgattgatacatgatttgggacttgtaggattcaatttgggcaaaattggatgagggaaagtgtgatttcgaaaatctgcactttatgcagaattttgctgtcaaataggtgcagcagaattttggctttgtgcagaaagtgttgtgtatttgctggctgtggaaagagtagtacagatttggttctggacgttttctagcagatcccaacggtcataatgtagatttatgtgctagagacttccagtaaaattttcgagtcaatccaacggttaacgaattggaacgaagagaatattactggggtatttgagtgtgaaaagctgtgatgttg

SEQ ID NO: 16149 - DNA, 400 bp, Glycine max
  unsure at all n locations
ntgaggatttggtctttgccagtgaaaggatcattgtgggtctgaaaaaaggcaaatttagtcatcctgcttggacgaatgagaaaactggggcaaatgaagagggtgagaaagagggagaaacccatgctgtgactgatattcctatacggccaagtttcccaccaacccaaaaatgtcattactcagccaataacaaacctccttacccaccacccagttatccacaaaggccatccctaaatcaaccacaaagcctgtctaccgcacttccaatgacgaagaccacctttagcacaaaccaaaaaaaacaccaaccaagaaatgaattntgcagcgaaaagcctgtaggattcaccccacattccagtgtcatatgctaactcgctcccatatctac

SEQ ID NO: 16150 - DNA, 374 bp, Glycine max
  unsure at all n locations
ttcttgaacgttnttgggaacttttttttagagacaacggatgttaacaattaaaaaataaataaaagcgttctgcatgacatattttgggatttaaaatattgcttgtgaacaaattttgttgcattttccttatattttgttctcaagcaataattatttgtgtaaccaagttgttgatatgatttaggtttaattactcatttagtttttatagtttccaaacttttatatgttaatccctatagataataagtgactttttcagtctttgtagtttaccattccgataagttcttaccgttaaaattgtttaacatcgttaaattattgttgccggtcattctttcccagagctccctctcttccgagag

SEQ ID NO: 16151 - DNA, 412 bp, Glycine max
  unsure at all n locations
tgagaggttggattntagggtaatgttcctaattatacattgagcattttgtttataatctccatccttctttttaatgttggaacaatagcatttgtagacatacctgatttgtccttttgaatatcaagaattcagatatttaacttgagtatttatatttagttgaatagctgagctttcagtttgtatatgaatattcatggttacataactttctatcgattatcaaattctaatttaaaaattgctctctatcaggcctttcatgccctcacattgaagtgaaattntctccttttatcagtcaattgcacttactgatggaagttcctctgtatctgtctcccaatattctcaaactgtggatacctgttaaccatgtgcaggtagcatcaagtgtttttctgga

SEQ ID NO: 16152 - DNA, 383 bp, Glycine max
atcttatctttatctctaccaacaaaaaaaaaaaacccagagtaaatgggacaaaatctgattaatcagactttctaacattagatatcaatattaatattatatatagttaaataatacaaatataatgttaaattaacgtatattgtttaacatattttaaaataaacaaattcattctaaacataatacataattgcttaagagaatattaacgctaaatcatgttaggacaatccaaaccacaacgtgaacaatgttacaaaatgtatcatgttcatttctaatattcaaacctatgcaaattaactaagttggattgaatcaaggtgtgcttgaattattggtgggaaaatacaaaaacatatttgagaataaaatca

SEQ ID NO: 16153 - DNA, 431 bp, Glycine max
aagcttttggcatggttttgttcatatatatttctcctaatattgtgattatattattttaaatattaagctactaccgattgcaaacatcctgcggactaaagtgccgaaatgtatggtggcagcgaggcactactttgagttgttcccatgtgcctaacttcaacatataacctctgtcttgctttctttatgctgctgttaatgtcaaattgtttaaatttaaatgtgcaagctgcttaagcagtactaagttagtcgatgctgtcatgtaaaaatatctaacgggcttttactcatttaacttgaaagtatagcagaatttgagctttgcattagtggacatgcgggatttaaacagcagattgacgacatatttgtggaaatatgttagataataatctatttgattcttggcactttcagtctta

SEQ ID NO: 16154 - DNA, 391 bp, Glycine max
agcttctatatattgttcgttcctaatttctctacaattgcatcacctctcaatgagctggtgaagaagaatgtggcatttacctggggtgaaaaacaagagcaagcctttgctttgctcaaagaaaagcttactaaggcacctgttctagctcttcctgacttttctaaaacttttgagctagaatgtgatgcctctggagtgggagttggagctgtattgttacaaggtgggcaccctattgcttattttagtgaaaaactacatagtgccaccctcaactaccccacctatgataaagagctttatgccttaataagagccctccaaacttgggaacattaccttgtttccaaggaatttgtcattcatagtgatcatcaatcactta

SEQ ID NO: 16155 - DNA, 434 bp, Glycine max
  unsure at all n locations
tctccttccatggtttattccctagtggatggcgcttcctctaacctcttctactttatcttccgctgcatctccatggtggaaaatccccattgaagtacctcattgaagctcaaagatccagtctccataaaatcttctcaagcaagcttccatcaagtggtaatcagagcataagagcttcaagtaggtgctccttaaacctccattaacctccattgttgtttcttcatttttctccatgtatttcctcacatgtcttgtgttgaatgtttttaacatgattctttagaattttcaccggttaaacttgttataaaagttagatttgatttcctatggttcaaatttcttgttcttgttcttgaaccatgaattgtgttaactntaggttcctttgagttctgtcttgctatttttttgtggctgaaact

SEQ ID NO: 16156 - DNA, 344 bp, Glycine max
atcttgggtctgggttatagcaccccacctgacgtccccaaggtctactgacccccgcgacatatctccaggtaccactctgtggtcaacagataaaagcatgaagttacacccttgaacactgactcatctcaagcttgtaggattatggggtacccatcacatgtggtactatgtggcggccgggcgatggtgcacaacaagttttacacatccacagtgcgcgcataaacccaccatcctctgttgcccacctccaacagagctcacgtactcccacgtagcctgatatcctcgcttctctcaacaccgggaccgcatcaatccttccaagcttgcacaac

SEQ ID NO: 16157 - DNA, 432 bp, Glycine max
  unsure at all n locations
ntgatttcctttgttccgganacctttcttttctcatgtgcacccaaacccaatctccgggttcgaagacaaccttctttctccctttgatggcttgtttagcatagcttttacttttcctctcaatttgatctttgactctataatgaagcttcttcacatagtccgcctttgcttgaccttctttatgcttaaaaacagaaacattaggcataggcaaaagatcaagaggagttagtggattaaaaccataaacaacttcaaggtttaagaaagaagaatcatcggatgacgccgatcgaacatttcctaatagacatcatccaaatattattcagggattgaatagaagatacaatagccgacatcggccgttgtaaatcagcgactgatatttttcagccgacgttgcgcaatttcttttacaaacgt

SEQ ID NO: 16158 - DNA, 388 bp, Glycine max
agcttccttctacacctgaaaaagaggatgagataggtgcacaaaagagaaagcttcctaacaaaattattcatgtaggtggaccctcttcttgtaattctgacttacagaagccttctatgcctcttgcattcccacctagagtaattccaaacaaaaggatggaagaagtggaaaaagagatcttggagacctttaagagagtagaggtgaccatatctctgctagatgccatcaagcagattccaagatatgccaagtttttaaaggagttgtgcacccacaaaagagagctcaaaggagatgaaaggattagcatgggcagaaatgtgtcagcattgataggtaaatatgttcctcacattcctaagaaatgtaaggacccatg

SEQ ID NO: 16159 - DNA, 442 bp, Glycine max
gcttgaaagcagagctcacaaagacaagagtggtgaatgagaagttggaaactacaatcactagggtcaggaaagattgtgatgagctgaaagacatcaacatgaccacagtcaaagcattagagcgagaaacaaaaagagccagacgggaagaatgaggtaggaacaagtttcgaggggctttgtggggtagcaataacaagctcaaacttagaagggccgagagggacaaattgttcgccctcactcacggatcacttcttactcttttcttttcttttcaaaacacgaaaatggggttgtgtgtgttaccggtaagcagaccagatcgtcaagtattttaaattaaaatggagtgatccgagtattgaacacagggaacttgtggattagacacaagtttgttcaggaatcaggcattgtgtaaacaaacattgatact

SEQ ID NO: 16160 - DNA, 387 bp, Glycine max
ttcttattcattcaatccaataatagattctttctgactcgagtagaaattcatcataaaaaaaggaaaccataaaaaataccaagcaaagcataattgagaaacaatgacactaaacaagtgtgaacggagtttgcttttgtctagagaggcagcaaccctgagcttctttgaggaacaacatagatatacacaaacaatgtcaaaattccaacccacaaggccaaagtgataatagcaacagtgaatgagatgatgatcaaagccagaaatgaagcagcacctccaacaataagcatggcacaagttatcaaaggaagaagatttatgttatgtttctgaagtattgtttcaatgatcaccaagaaggagtatacgacaatgctc

SEQ ID NO: 16161 - DNA, 444 bp, Glycine max
  unsure at all n locations
cttgaatctttcgggtgaactcgaagggggttcaatgtccattgtcaaatatttgcttaaacaagacaaccccagaagcaatttaacaagacagcactattaagacagtttttttgtcacaatgatgagaaagtcacaaggaacaaacaaccccttcctcttcaacaaccaagcacaaatttgatgactttttgcagtatattaccatcataccctccctaatattcgtaaaccaaatcatccaccaagtgacgtgtttgatttagtttattgagaaatataataatgcattgcccactgcatctgcatgaatcaattgacgcttaagttgtttaaggttaacaagaaatatcgttttgatttctggttatataaaaatacaaataaatgaaagaaaattnttattggtctataataattttatctgccaacaaaattgtctct

SEQ ID NO: 16162 - DNA, 379 bp, Glycine max
atcttgtttatgacccttacctttaccttgatgatcatcaattaccctattggcttattagtatacatatagttaaatagctccctgaaactccttggggtaagatttatcgaatgcctccatttgaattttatactcctttgtctttcgactatcctagcattttattaaccttgcttctttgttttggttttagctctttctaagaagatcccttaagatgctgtaatattaggtaaggaatgaaataacacgaaacacactaacaggggggaggagggtttaatagcgtatatatcaaagatataaacttttgcaatataaaagtgaatatagataacaatatattaaaaataggtcatccactgaagataaagtt

SEQ ID NO: 16163 - DNA, 424 bp, Glycine max
  unsure at all n locations
ttccagaggcaagctaatttgtacgccctcccgatggagcatttacattcattatcttctttgtggactttttctaagtgtggaattgaaatcctcaatcccttaccgattggcatcctccagctgaagtattaattgtggcaattgactaattcaacaaatgggttgaagccgagctggtagccaggatcaccattgaacaagtacataaatttttatggcaatcaataatgtgcctatttgggatgctaaaaaccttgatagtagacaatggcacacagttcaattgcaatagtgttaaagaatttgtgacagccacaatgtaaagttgatttttgcttcggtggaacaccctcaatcaaatggtaaggtagaggtggccattaaggtgatactaaagggttntaaatcaaactttcaacat

SEQ ID NO: 16164 - DNA, 359 bp, Glycine max
ttctttgagccaattcaaacgacaataactttttactcggatgtctgattgagtcccgtgatataacgagacgctcgaaattgaatgttgaagctctgagcgaattcaaacgacaataactttttactcggatgtctgattgaggcccgtaatatatcgagacgctcgaaattgaatgttgaagctctgagccaattcaaacgacaataactttttactcggatgtctgattgactctcgtcatatatcgagacgctcgaaattgaatgttgaagctctgagccaattcaaacgacaataactttttactcggatgtctgattgaggcccgtaatatatcgagacgctcgaaattgaat

SEQ ID NO: 16165 - DNA, 412 bp, Glycine max
taaacattcaacttcgagcgtctcgatatattactagtctcaatcaaacatccgagaaaaaagttattgtcgtttgaattggctcagagcttcaacattcaatttcgagcgtctcgatatatgacaggactcaatcagacatccgagtaaaaagttattgtcgtttgaattagctcagagcttcaacattcaatttcgagcgtctcgatatatcacgggactatatcaaacatccgagtaaaaagttattggcgtttgaattggctcagagcttaaacattcaatttcgagcgtctcgatatattacgagactcaatcacacatccgagaaaaaagttattgtcatttgtaattgctcagaggttcaacattcaatttcgagcgtctcgatatattacaggactcaatcaga

SEQ ID NO: 16166 - DNA, 388 bp, Glycine max
atttatgcattcttgtccttaattcaaataatatagtagccaagttggaataaaatcattttatccaagcaaagacacattatgtgatatgccataagcaatgtgtgcattatgtaaagtctctccgcttgcaggggcaaggttgcatacatctacactccccaaaccccactaggtgaaagcctcatgcatggggtctcatttatgtacagccttaaaccagaaggggtgaaagtttattttcaaaaaaagacagatagaaccactcactaaaagtaaacaatatatgctatagaccaatacacaaacaaaagcacagcttactcaataacaaaaacattcatattagatatgatagactctaatttcctttaaaatgtcgcgtgat

SEQ ID NO: 16167 - DNA, 420 bp, Glycine max
  unsure at all n locations
tgtaaaatacaatcaggagctatctcatgctctttaaaaccaaaactcatcttcaaagcttgctttgccatttcatccacaacactgttggcttctctgaccacatgattccaaacctcattttcatattgccctgaaaatctgtgaatctcttcgacaagttgatgctgaggatgacccaaatcacatctcccatcaagaaggtttatagcctccctagaatccgaatccacacgaataagtcgaaaagccgaccatgcaaacttaagaccaagtaaaatggctcgaagctcagcataaagaacactgcctcctccacttttggcctgaaaactgcaaagcaaggaaccagcanaatcgcggattagccctccatagcccgcaagactgccaaattgagcaacagatgcatcacaattc

SEQ ID NO: 16168 - DNA, 376 bp, Glycine max
atcttgtctgtccgatgcagtagtaatgatggcccgagttatgttggggaacggttacgaacccggaatgggtttagggaaagacaacggcggcatgactaacctgataaatgccataggaaatcgtgggaagtatggtttaggctataaacccactcaggcggatataaagagaagcatcgtgggaagaaagagcggtggtcaaagctcgcggttgaggcaagaaagtgaaggaagcccgccctgccacataagtagaagctttataagcgcgggtctgggagactaaggtcaagtgatcgcgatatacgaagatgatgttccgagtacattgtatttggtacgaccatgcccttctgattaccagctgggaaac

SEQ ID NO: 16169 - DNA, 422 bp, Glycine max
tgcttgtggagctttgatggaagctggatctttgatcttcaatgaggtcctttaatggtgattttccaccatggagatgcagcgaaagacaaaggagaaaaggtgaaaggaggtgccatccactaggtaataagccatggaagaaggtgcttcaccaccatgatgagccttggaaaagaagcttggaaggatgcttcaatggagaaaaagaaagagggagagaaagtgagatgggggagcacgaaattgaaggaataaaagagggagagaagtggaactttgaagtatgtctcacaagactctcattcatcaaagttacaataaatgttacacatgcttctatttatagactaggtagcttccttgagaagctttatatagaaaacttccttgagaagcttctttgagaaaacttccttggg

SEQ ID NO: 16170 - DNA, 389 bp, Glycine max
tttcatgcattcttggcacaatagatcacattaagacttgtcagcttagtagattctttgatgtgtgttgggagagacacaaagttgttccatgatacttttaagtctttcaagttaggaaaattgtaaataataacgtgaacatctttttcgaatagatccatagtttggaaatgtaatatctctagttttgggcaagctgaatgatagtttccttccaatcttctaaatgactctcgaagtccatgacatcctacgatttttaatgtgacaaaatttggcaacactaacaagctactaggcaaatgttcgagtcccaaacaaacatccatgtcaagatagttgatacactgttaagctaagtgcagggaaattagaggagtatatgg

SEQ ID NO: 16171 - DNA, 426 bp, Glycine max
tatattataaaaataaattgttaacttataatgattattattatgatataacatgtacacatactattatgattaagtcggttaattaagttataatttgcactctgcctttatctcaaaggagtcaactcaaggtttctttattatccatttagaatgaaacacatataagttatactcgtgagcatgctaggtatccacttttaaatgaaaaaaaagtatagaggtagattatcaattactttttttaaattatattgaataacttaattattttttatagtataataacttaccataaacaaatattaaagaagtatccgtgtctattctatagtctcttcttagaaaaccataatggttggctctttattggaaataataagtcatgatagaaaatcacataaaagcccatttcctcttttc

SEQ ID NO: 16172 - DNA, 368 bp, Glycine max
tcattcttgagatgaggaagtgttgaagggtgaaacttcctgcttttattgttgaccacagagtggtacctggagatatgtcgcgggggtcaggagaccttggggacgtcaggtggggtgctattgcccaaaaccaagcttgaccaatcccgacccaacccgggcatagtcggtcagtgagaacctgtgatgtacctaagcaggcgagctcctggcagtcaacagataaaaggaaaacaagaccacaaagcaaggaggcttgtggtggctggccagctgtgaattttgtgtaatatgtggattgtggcctctggtaatcgattaccaagggtgggtaatcgattacaaggcttaaaaatgaagacagg

SEQ ID NO: 16173 - DNA, 418 bp, Glycine max
  unsure at all n locations
tggagaagatgcttcattggaggaaatttagatggagagaaagagagaggggggagcacgaaattgaaggaataaaagaggtatagaagtggaactttgaagtatgtctcacaagactctcattcatcaaagttacaacaagtgttacacatgcttctatttatagactaggtagcttccttgagaagctttcttgagaaagcttctttgagaaaacttccttgagaagctagagcttagctacacacacccctctcataactaagctcacctccttgagaagcttccttaagaagattcctaaagaagctagagcttagctacacatacctctctaatagctaagctcacctccttgagatgagaagctagagcttagctacacacccnctataatagctaagctcacccncatgac

SEQ ID NO: 16174 - DNA, 373 bp, Glycine max
ttcttatccttatggcctgcctccggacttcaccccccgtgccaccccggaagatttaagccaagcccctactttcgaggggcaactcccaccttatgaagactatcccgggcaagatgatggggaaggagatacccatcttggccccctgctccacctcaaagatctgtccccacatgaactaccccaaccgaacatagtccgccataccccggcctcacccacacctttaaaagaatctgttcccttcgcggaagataagggaaagattgaggcgctcgaagagaggttaagagcagtcgagggccttggcaattacccattctcggatttagcggatttatgtctcgtgcccaatatcgtcattcctccc

SEQ ID NO: 16175 - DNA, 414 bp, Glycine max
tcatgactaaatctaatcaagaaaataacttatgaatcactggaaatatgtctaattcaagattgagagaaagtcgtgacgattatgtccttcaatctgcaaccacttttgacaaacaaactgttgtaattttaatgtttatttcaaaagaattttttttagacttagttaaagaatattataaattatttataactctcaatttctttgtctcaggttttctttatattggtttaatgttcatttgacttattcaaattcttgcttaatggtttaacgttaaaatgatggtcaggtgcaatttgatgactaacataatttgttttcaaacattggagatttttttaactaacaatatttgctttgaccatttaaaacaattaattgaatgtgaaagcaacttaagtgacttgt

SEQ ID NO: 16176 - DNA, 173 bp, Glycine max
agcttgcaagaggattggtagaggggctctcatctaaggcctttatgtcttagatctcaaggacactcttgattgtaaatttacttttcctgttatcaattcccatccaaattccattccttgtaaaaatgctcatatttggcattctagatttggtcatatctcagacaaag

SEQ ID NO: 16177 - DNA, 387 bp, Glycine max
  unsure at all n locations
agctttcaactgagtagatgacaatactagacggtggttttacaaactattattctaacatcttccattntgaaagattctatattttgactaacacaatattcaacccctttcagtgtgattcatgttatttcatataatagtcgttgattaaatttgaacaaatttaatattgatgaagagttaaattacttgcataaatgtcacttattataaatttgtgtctatataataataataataataataataataataataataataataataataataattaatttttattattattattattattattatagcaacgtttaagaatgagcatgcctatatatatacatatanttttaaaaataataaataaaatatagaacaatt

SEQ ID NO: 16178 - DNA, 436 bp, Glycine max
  unsure at all n locations
tagaagatctatatatggactaaaacaagcatcctaccaatggtatatttagtttcatagtgtggtctccaaatatggattttgtggaaagtgttgtagaccaatgcatataccttaaagtcaataggagtaagttgattttcttagttctatatgaagatgacattttacttgctaggagtgacttaggtcttttgcatgacactaaatttttcctctcacaaaactttgatatgaaggatatgggtgaagcttcctatgtcattggcatagaaattcatagagatagatctctaataacattaggactatctcaaaaggcctacatagaaaagttttgaaaaaatttaatatgcaaaattgttcatcaattaccgcacctatagttaaagggaaaanttttagtatcaatcaatgtccccaaacaacattggaa

SEQ ID NO: 16179 - DNA, 387 bp, Glycine max
  unsure at all n locations
agcttctttttttttcataagttaacattaatttcttgaaacagttaaaaagaaataccataaaattaattagtaaaatgggctttgtaagtacgagttttataacatctgataaaacaatgtggtaaatcacgagtcgaacaacttgtttcttcatgtttgtctttcattgtgaccccttccattgctttgatatcctacaagtttctaccttagatagtataggagtaagcaaatattatattatttatctaccagtgtgaataagatctatgttcatgtaaatgcaacattntatttatttctttgttcatatacatgctccaccagaccagagttctttcacatcattatatgctttaccaacacttttgtttatcaccaaaa

SEQ ID NO: 16180 - DNA, 429 bp, Glycine max
  unsure at all n locations
nttggcacaaagaagaagaagaagttcaaagagattcaaggcttgtaaaggattgtaatgaattgattggattgatagaaagattgattaaaaatgcaaaacaaagccttgcttttatagactcttcatgtctggtcaagaggaccatttagaagagttataacttttagaaaaaacttaaaaccaatttgaaaaagtcaaaaaccatttgatgagttacatcttttgatttattcagaaacaatcactggtaatcgattaccaaatcagtgtaatcgattacacaaagcttttatgtgaaagtatgtgactcttctcttttgaatttgaatttcaacgtttaaaggtactggtaatcgattaccaaaacattgtaatcgattacaactttntgaaatcaattggaacgttgtaaattcagttgaaaaa

SEQ ID NO: 16181 - DNA, 357 bp, Glycine max
atattactagcaactctaagatgagcgaatagacatcttacatactaagaaggtaatgtataaatcaatcctcaccggaatgactgagtaaaaaccatttggtattggatctgaaagcattccaatctgccagagtgctagtgatgctgtcagagaagacagcacatcttcgacaacatgtcgaggagattacttattacttaaggtctcatcttgagaacccaaagaaacagatccaaatttttcaacaaaatctgaaggccaccacaacacattagatggcccttgctctgccggccctgcatcttctcgtgtctcctccatgttcttatatatttagaatgaaaaaccatttcg

SEQ ID NO: 16182 - DNA, 445 bp, Glycine max
tcaagcttctgacaaaatccatcaacacatgcggactccaatttgtggcttactattatgttcctcaattttgcatgatttgtcctcacttctctgccaacttcattctcatcatccatcacaattttcacagctttgcttacactctccttcgtgaaccagccatcttcttcacccttctccacttcaaccccaatctttaagttttcacccatcatccttgcattaactatatgatcaccatctacctgtggcagtaacactatttggcacttattcactagtgcctcagttaatgaaccagcaccacaatgtgttatgaagcaacccactgaagggtgttccaaaatcagctgttgctgtatccatccaccgaggacaattactctctcttcaaccctttccttgaacccttctgggagagcagcttcaagtgtctcaaacc

SEQ ID NO: 16183 - DNA, 379 bp, Glycine max
ttcttgagaatggagaattgcactaagcaatcactacgcatagctccaaactcgaaggtggaggacacatgaacgaaaacacaattcatggggctccgaaaaaggggttgagaatggagaattacactaagcaatcactacgcatagctccaaactcgaaggtggaggacacatgaacgataacgcaattcatggggctccgaaaagattgagaatggagaattgcactacgcaatcactacgcatagctccaaacgcgaaggtggaggacacatgaatgaaaacgcaattcatggtgctccgaaaagaatgagaatggagaattgcactaagcaatcactacgcatagctccaaactcgaaggtggaggacacatgaa

SEQ ID NO: 16184 - DNA, 440 bp, Glycine max
ttgtaggattatggggtacccatcacatgtggtactatgtggcggtcgggcgatgttgcacaacaagttttccacatccacaatgcgcgcataaacccaccatcccctgttgcctacctccaactgagctcacgtactcccacgtagccgatatcctcgtttctatcaacaccgggtccccatcaatcctcccaagctttcccaacatcaaagtaatacaacattcaaacggcacaaactatcacagccaagaaaacagagcaaaggcagaaaactctgccaaaacaccaaccaaaatcacagcttttctcacttaaagaccccagtaacaattgcttcgttccaattcgttaaccgctggatcgactccaaatttttactggaagtctctagtacataagcctacattgtgaccgctgggatctactagcagacatcca

SEQ ID NO: 16185 - DNA, 376 bp, Glycine max
  unsure at all n locations
ttctatgaagaaatgagctacaaacctacacgctcacattcaattcttttttttataaagctgaacttaggagatttgagaaattctattcagatcgggaagtttagatgatagaagaagaagagaggattcacgccaagggttagtntattgcaattaataagattgcaatgaaggttcataagctctctgaacccagaagtataaagctctgtataaaagagacgaaaaactaactacttaactgaaaataggtacaacagaaaagaaaaatacaaattttgttagaacataacctatgttaatcaaccacccaaactagatgctcccttttacgagactgaactctccaccaaattactagagattggacgac

SEQ ID NO: 16186 - DNA, 331 bp, Glycine max
ggaggagcgccagattgactgagtaacaactgatacaggtggaactctgaagagtatctcataagactttcattcatcaaagttacaacaagtgttacacatgcttctatttatagactaggcagcttccttgagaagctttcttaagaaaacttccttgagaagctttcttaagaaaacttccttgagaagtttctttgagaaaacttccttgagaagctagagtttatctacacacacccatctaaaaactaagctcacctccttgagaagcttccttgagaagctagagcttatctacacacacccatctataaactaagctcacctc

SEQ ID NO: 16187 - DNA, 213 bp, Glycine max
  unsure at all n locations
atcttctagccaaatggacttaccttgaattaattcctttgatagcccttttgagccttgtttccctttccttgttttgaatctcactacaagccttaagtgaaaaaccatgatatcaccatatccttaaggaattttggagctttggaattgttttgggaataagtgtggggggggttttagnttaancttctttaacttactttaatggag

SEQ ID NO: 16188 - DNA, 424 bp, Glycine max
  unsure at all n locations
ntaaaagattggctaagattttgttaaaacatattctcttagacaatgaaggaaagctggagttgctgcacatgatgtccaacgttatgtcaaagaataagatcgggctgcacaatgcacaaggcaagataaagtgtcaaatgaagaattgaagctgcaggattcacgatgtcggatataatgtccaggacatcctgcctgaaaatactggaattgctaaaagcattgaagctgcaggatccacgatgtcggatacaatgtccaggacatcctgcccgaaaatactggagttgctaaaagcattgaagttgcaggatccacgatgtcggatacgatgtccaggacatcttgcccganaatactggacatataaatctgttatatctttaacagattattgtgcagttagcaagagattagatga

SEQ ID NO: 16189 - DNA, 381 bp, Glycine max
atcttgaagaggatgctttaatggaggaaaagaaagagagaaggggggagcacgaaattgaaggaataaaagagggaaagaagtggaactttgaagtgtatctcataagactttcattcatcaaagttacaacaagtgttacacatgcttctatttatagactaggtagcttccttgagaagctttcttaagaaaacttccttgagaagctagagtttagctacacacacccatctaaaaactaagctcacctccttgagaagcttccttgagaagctagagcttagctacacacacccatctaaaaactaagctcacctccgtgagaagctttcttgagaagctagagcttagctacacacccctataatagctaagctc

SEQ ID NO: 16190 - DNA, 419 bp, Glycine max
  unsure at all n locations
tgtccataatagtcaatgatattttttaggatgtttctttcattgtcatctgccctgcaaaatataaaacaatcataaaaaattaaaaggtgcatgagggtagaaacccatatacataccttgattccatgagtgtcagatctcctctcatgatattttattaatgaagaaagtccttatgtacagatgatgagtatgtaggacgacagcgagttactctgcctaagtcctcaccctataacttattgtagacaaaagtcaccacaaattataaatctcttattctccttttgactcattgtgaaaatatattgaaattcaaagattgaaaaagcaactttaaatttaaatggctaaaaaaataatccaaattttaaaaaagaactaagaaagaaaaaaaaactatctntatattcctt

SEQ ID NO: 16191 - DNA, 381 bp, Glycine max
ttcttgtttttgggcaatagcaccccacctgacgtccccaaggtctcctgacccccgcgacatatctccaggtaccactctgtggtcaacgaataaaagtaggaggtctcacccttccccacttcctcacttcaagcttgtaggattatggggtacccgtcacatgtggtactaggtggcggttgggcgatggtgcaagttgactatccacatccaaaaatcacacataaatccaccatccccagttgcccaccttcaactgagctcacgtactcccacttagcccttatcctcgttcctctcaacaccgggtccccatcaatccctccaagcttccacaacatcgcaagcaattcaacatccaaacatcatgaactatca

SEQ ID NO: 16192 - DNA, 425 bp, Glycine max
actaagctcgcacaggggctgaacaatatcttattgacatgttggcttttcatacaggccgacaaattgattgggcacacttagtccgatattgcatgcataaagcattgcgattaaatgctccattgccatatccacacttaggcactctcttccttcaacactttaacatccctcttgattctgaaccttttgtaccaatcaagagatccttgttaattggtgccgctgtgatcgcatcattagggtaccgtaaagagcatgaaggctctcgggcgaaaaaaggtgcacaccccattgatgaagaaggacacttactcagtggagaagattcctctgttcttcataggattatggacaggtacgatggtcttcatacctttgatggtgaaaggatcgatgctctggagttactaatggacatg

SEQ ID NO: 16193 - DNA, 351 bp, Glycine max
ttcttgggcagtccctcattttataagtcagttttgtgaggttgagttaagccctatgcccaaagtctaagatttgttaatatttaatgatattaatctatatgtgttcatattgttttgcatgttctggagcagtgcccaggcaaagcttgtatatgcttgtgagtgaaatccccatgctgtagaagcactccaacataatctacaaacaaattttgtggctgatcggtgcatcatacttgaagtagataatctaatcacagcttccaaggtatagcgagtgtatttaactatgtattcacccagcaccgtagaccgagctctaccgtatcttgcggacatctccatgtt

SEQ ID NO: 16194 - DNA, 423 bp, Glycine max
  unsure at all n locations
ntccttcgagtccctgcatgtttagccctgatcttggtcataggattggacgaattgatctggtcccacctttaagtttagatggtcaattagggaaagcaattgcatcgcctccaatgtctcctcgaggacttagacagctctctttgcccgtcaaatcattgcatgagaaattgcagaattcaccgcaagtgggtgttatacatttggctcttcaaaataactcagatggcttaattgttaggtatctgctactatgctactatgtttcatgaactcctattcattgtcaatagttatttttgcccgtgtggatggaagcctgatgctattgtccttttatttagttggcacaatgatgtatttgttgtggctgaacctggagagctcgctgagaaatttctacaaaatgtntaaattcag

SEQ ID NO: 16195 - DNA, 378 bp, Glycine max
  unsure at all n locations
ttcttgcttgtggggcttctatggaggctggatctttgagcttcaatgaggtcctttaatggtgattttacaccatggagatgcagcggaagacaaaggagaagaggtgagagtaggcgtcatccactagggaataagccatggaagaaggagcttcaccaccaagatgagccttggataagaagcttggagaggatgcttcaatggaggaaaagaaagagggagagaaagagagaggagggagcatgaaattgaaggaagaaaaagggagataagttgaactttgagttgtgtctcacaagactctcattcatcanagttacaacaagtgttacacatgcttctatttataaactaggtagcttccttaagaagcat

SEQ ID NO: 16196 - DNA, 414 bp, Glycine max
tctacttatgtggcagggcgggcttccttcactttcttttctccaacgcgagctttgaccactgttcttccttcgcgcgatgcttcttttcatgtccgcctgagtgggcttatagcctaaaccatacttcccacgatttccttgggtatttatcaggctagttatgccgccgttgtctttgcctaaacccatcccgggttcataaccgttccccaacataactcgggccatcattaccgttgcatcggacagacaaggctgcccaaagagggagtccacggaggaaatgttgaccacctcaaaagactggaaagcattttctaacgattcttctgcggcttccacataaggcatggaggatgggcagcttaccaagatgtcttcctcgcctgacacgatgaccaagtgcccctc

SEQ ID NO: 16197 - DNA, 377 bp, Glycine max
tttcttttttcaggttattgtgtaaaaatcagtttgtccaatgggatgatgattttcaagtggcatttgaaaagattaaatgatgtttgatgaatcctcctatgctcatgccattggtgcccggaagacctcttatcctatacatgacagtattagatgagtcaatggggtgtgtgctcggacaacacgatgaatctggaaaaagggaatgggccatctactacttgagcaagaagttcacggcatgtagatgaactaattgttcctagagaggacatgttgtgccttggcgtgggcagctcaccgtttgaggtagtatatgctgagttacactacttggttggtgtccataatgtatcccgtcgagtacatcttcg

SEQ ID NO: 16198 - DNA, 419 bp, Glycine max
  unsure at all n locations
tgctgcaacagcatgtaactctttntaaaataatttctccaagaacagtggaaatagtaaaccaagtgaaaatgaacagtaccaaagaagaacaccatcttttgcaatttcaaagagctcattggttgaagggtcaataggaagatatttcttgaggaactcatcttgtgctagatagtgatttatatgtgctacatatgatgctttctctgattcacttattgtgtgaagcaatgtggttgtagctgccttgaggaacgctgacgagttctttggactacttccggttctagaattcacaaatgtttggagtttcaagtagacctgtcatcattatattatatcactattacaagttatccttggatcaaaatttaacctgatcacaatagctgaaattgttctagtatgtttctagt

SEQ ID NO: 16199 - DNA, 379 bp, Glycine max
agctttttgtaaactttgtaggatatggacatcccactgagaagcactaggaagtaccttttcaaaaaaacagacttgttgagattaagggagctagcatctttagtaagtgatccagttgattttcaagctcaccacgggaagttgctcagaattcttagagtagatattgaggagggatgcctagagaccctagttcagttctatgacccgctctaccattgcttcacatttcccgattaccagcttgtccccacacttgaagagtactcctacctagttggcttacctgtgccagacaagatacctttccatggttatgagcctacccctaaaccctccgacatcgcagccgctctccatcttataacctccatca

SEQ ID NO: 16200 - DNA, 421 bp, Glycine max
tggatatttgaattacggatcttctatagtgaaatattgaagtattaattcagtgtatggatgctcattctgattactacgaattcgttctcagggccgaaaaggttgttgaggaagtagccatcattgaattgaagacgccaaagcaaagtttgacaccaaacgagtcccaacccccttcaacttctagtcaagaccaaaagtgagaccccaattttatttcccttttttgtttctcttaacccgctgtcatactcataccggtactgtcattgcaaatagattacacttatttttgacacaataatcgtgactcatttttttgtcacaataattggtatgaccaatattttattggattcgcaactctatatctgtttgattaattatttttaatttgcaatagggttgtgttgtatca

SEQ ID NO: 16201 - DNA, 350 bp, Glycine max
agcttgtctcatcgtttatgcgagacggagaccaacatgctagctatcatcgccaagtaccaagaagagttaggtctagccacggcccacgagcatagaatcgcggacgagtatgctcaagtatacgcggaaaaagaggctagaggaaaggtgatcgactctttacaccaagaggcaaccatgtggatggatcggcttgctcttaccttgaacgggagtcaagagcttccccgcttgttagccaaggccaaggcgatggcagacacctactccgaccccgaagagattcatgggcttctcggctattgacagcatatgatagactttatggccgccataattagaaatcg

SEQ ID NO: 16202 - DNA, 389 bp, Glycine max
  unsure at all n locations
agcttgngtgttgcttatatatcctagctttaaccctacacctaccaccaactgccatatcaagcaaagaaaggaatattagatatatgatgcccatatcttcttcaaccagccacattacacaattgcaactacaaccgacaaccattctatatcacatgtccacctaactttctatcttcaataacctccgtaatatcatgcaaacatgcccccaaagatgtgattgtattaagcatgcaatataacggtgcataacagaatacctttcttttagcccttttaaccatttccatgcatgtattttagcattctcaaagaagaatgaattctacttatgttgcacgtacaatcatttaatcaaattcaactcactcacaagacctact

SEQ ID NO: 16203 - DNA, 426 bp, Glycine max
attatgaataaccaagagaccagtcaaattatgataaaaggataatacatatgtccagattaagagatatgatagatcaccagcttatcacgaaccacaaagcattgccgctgaattgataatatgtaagcctcatggacttcgatgacttcatccaaatactttgctgcagtcataccttgacatagatgacgccatgcgctgtgatatacatgcatacaaagtgtaccatcagataagaacgcttaggtttccttctcacattgcagaactgaaggaagcttgctgaaccacgagcgtatactaatgggaagattgcattgtgtgactagtgatcatcatataaggaattaaaggtcattataagccattacaactagatctagccattatactattacattagctcgccttagtattatttgt

SEQ ID NO: 16204 - DNA, 385 bp, Glycine max
agcttgtgcatcaactcatgtatacatatttctattcgtagattattagaaatccattatatggttttgcatcagagtgaataaaacgtattggaaatttcgttctatgaaaataattatatgtagcgcatatttctattcgttgattattatctattatcaaaatgttttattaaatattaaattgataagtttaaggattttttttaaaataaatattaattagattataaatgagttaaacaagtcaagatcaaactttcattttttttttcaacaagttaagtccaatcttttagttagactctttaaataaatgagtcaagctaaagttattatttgtttttcacaagtcaaacttaaaatctaatattcaacctgactc

SEQ ID NO: 16205 - DNA, 442 bp, Glycine max
  unsure at all n locations
tactctnttcctgtaatgcctcattgtattcatattaacactaagttttgactacctaaaaagagtatcacatttatgactcatttagttcatcaaattataacacaaataataacataaagttgaagacaaaataaaaatatttacatagtttaatcttcttcctattattattattaaaaatattattattgctctcattattattgtcaatattaaggatatccttattattatggtcatctttcattattaatggtaaaaaaatcatttataagttaaatgatatcatagtaatataagttaaaacaaaataaaaaaaagcattatgacttatagaacttaccttttctccaataaaattggttccattaaatgctgaaaggagtaaaaaacacaaaacaaaacgatcttcaactaggtgcattaataaacaaaatat

SEQ ID NO: 16206 - DNA, 387 bp, Glycine max
agcttcgactttttggatcattcttttcaaattagagattgttcttcttccttcaatcaagcaaaatagaatgtgtttccgtttacttgctgttcgacgggcatcattcacggctagccaagcagcttcaaaatctgtacaagttccaaagggctatcttgcagtgtatgttggggagaaacattcccgaacaccaagagaacattcccgatcctagtgagaaagcatagctagaggtactcttcatgtcatctgccgaacctgcccaatcattatcggtgtagccaagtaattttgaagtggttttggtagtataccatataccgaactcttttgtcctttgagatacctcaaaattctttttgctgctccaaagagtatttgact

SEQ ID NO: 16207 - DNA, 443 bp, Glycine max
ctttgaacttcaaatgctttaggatgtgaatcacttctgttgtcctaaatgcctgcattcatgaacatatatagaagaaataattggagaggaatcgttggctacatgaatcactgaggtgggaggactataagacaagactggttggatgggaccaacagggaggcaagggcatatggacggccttggaggactttctcgctgatgctgattccgtgtgaaataaaatagatgtcaaacatcagaaatatttaaaatgatatatgacctctcgctatccgctgccttataattcatcagccacaaattaccttgcagttgtacttcgatgtaacgtgaacagaacatgtccagagcatgtttacaaaaatatggaatatcaattaatgcatgaatagacgttacgtttcactgaggcacgtctcatttggttacatgtggag

SEQ ID NO: 16208 - DNA, 384 bp, Glycine max
  unsure at all n locations
tgcttcatgatgaatcaacaatgattcaaaggtattttgatgatagcaatgatgacaacaaaagatgatgacaaaagtgatgaacaaaaagctcaagagaatcaaagaacattcatctcaagaaaatctagaacaagtcaaagagttcaagaatcaagaagaattcaagaactcaagaagaaagcctacaaacaagaatcaagattcaagatctcaagaatcaagatcaagattcaagacttaacagattcaaaatctcaagatcaagattcaagactcaagattcaagaatgaagaaaagactcaatcaagataagtattaaaaagtttttcaaaactttgaatagcacatgagttnttgacaaaacctttaccaaagagttt

SEQ ID NO: 16209 - DNA, 406 bp, Glycine max
tattaatttgaactcgtgcttgtacataagttcttttaattttattttgaaagccgtagtgcttatttttccacccagatactgcagatgctgcagaatttctgccttaaataagttgcagtgcttatttttctaaaagctacagtgcttgtacataagttcaattaatttgaatctactctgcaaatgctgcagaatttctgccttaaccaaattaggagataccatcaatcagcatccccctcaaggcatttctcctcctgctatagttaataattttgtgaaagtaggaggtattactgtccccctctttgatccatttgcttcttgacttctgcctcacaatagattcatgaagagtatccttttcccaaacttcaacttcaaatttcttcagatcttggac

SEQ ID NO: 16210 - DNA, 380 bp, Glycine max
  unsure at all n locations
tatttttttatgcagaacggctgcgccataatttcaaagaatttattgatcaatatggtgaaagtgattttccaattaaagaaatggttgagaagctaatgacaaacacagtcaaagatgaagagtgtatgttaccagggattcatcctccagaacgggaacaacctttgagttctatatttgatgaagcggaactttcttcttcggtaactaacacattccacttttttatttaggtaaaattagttatttcttctaatttattttttaaattcaaatagatcttttaatttttatgagatataatttgatactctaattctgtaaaatgattcaatttgatcttacagncaaataatagattaacggtattaataaat

SEQ ID NO: 16211 - DNA, 391 bp, Glycine max
tcaagaattagccttatgattttcgcctgaacattatcttattttcaagcgaaaaagaatccttaataagaatggtcaaccggctgagtcggtcaggttagaaccaaaagtccaaattgacctaacccgcatgttgactcttggagacctaaacccgtccaaatggactttcaattcaagttaagtgagtttcaagttagaagggtacaggttaaccagtacaattataggtcttgaaaatcattgttacccccaacttgcaaataacctcaaatacaaagcagaattgcgaatctatgataacaatcattgcagcactaatacattatcttcattatacagtgatacaactaatacccctataacctgagtaaccatttttgccattatc

SEQ ID NO: 16212 - DNA, 367 bp, Glycine max
tattttctactgcaagctgagggtctattaaagctaccagtagcctcactgttatcctctgtgctacaacaggatataatccttttatactacttaggatcaaactaatcttgactatagcattcataaatgtataataatacatttgatgaaagcattaagaaaatctatataacattgttgtaactatattagcgacgcatttggaattaaaatgcgagattggaaggtgaggctttgcacttacaggacttctactgctgctgttacagctgcactccaattctgttcacgctgcagtggtgagggatttaaaagaggataaactataacgcgctaattctaaaaccctttattatgttctatt

SEQ ID NO: 16213 - DNA, 496 bp, Glycine max
  unsure at all n locations
aggcaccagtagatnnccgttagcaanntcganagccatcagacanacacgcnaccctactcatatctctggcgtgccgcgacgcattcgtactatacactaagtttttattacctaanaggagtatcacatttacgactcatttaatccatcgcaccatgacacatagaataccataaagctgaagactatacaatacagtccacttagcttcttgtcgtacctaatatgcacatgaaacatcaaaatataggtctcatatttactgccaataaaatcgatatcctcatgattaaggccatgtctcattatcaatgggtaaactactagttataagtccaacgatttcatagttatatcagctcactcataatataatgaacgcattatgacttataaaactcaccatatgttcataatattagcttcattaatgctcacacgagcgagcacacataactcaatgattgtcactaagcgttatcacaaaccatat

SEQ ID NO: 16214 - DNA, 565 bp, Glycine max
  unsure at all n locations
cccgtctctcgcactctctcantcntattatattgatatggagaanaagcgaaccgaggcaagatnnanatancnnnacacncaagcacacagacacngcntttgangccattgagttcatagcatngcanancgcgnaagngactcggaacccggagatcctgatagagaagactccaggcgggccttcctttacttgcgtgaaccattaaatcacggcagaaactatataacaacagccgagctcaagacgacggaacaaaagaacaatcatagatcaaaattaatactacataagaacgaggctgaagattataatcaatacaatataagagaaatgcacaaaaagcatggaatgagaaaaataactggggacaggggaagagaaaaatagatatctcttagatatcaaaagacaggaaccggacaagaaccacgaaaacatatactatagcgaagtgaaaagaccgaatacctgtgagccgtgggacaaatgtacaaactggcaggaaccgtagatttgacaacagccaatttatctatacattatatgcctacaaaaccc

SEQ ID NO: 16215 - DNA, 400 bp, Glycine max
actaagagttgactatttatgaagagtatcacatttaggactcatttagttcatcatattagaacacacataatgacataacgtagaagacaaaataaaaatattgacatagggtaatcttcttcctattattattattaaaaagattatgattgctctcattattattgtcaatattaaggatatcctgattattatgggcatctttcattattaatgcgaaaagaatcattgataggttaaatgatatcatagtagtataagttaccacaaaataaaaaaaagcattatgactgatagaacttaccttttctccaataaaattggctccattaaatgctgaaaggagttagaagcacatagcaacacgatcttcaactaggcgcattaataaacaaaa

SEQ ID NO: 16216 - DNA, 378 bp, Glycine max
ttctttaggttgctcattgactccagattgctgcaaagaaggacatagatctgtatggtgatctgcagaagatcataaaccacagactcttgcaacaggtgcagatgtagatttttgattcatggcaagctgagttactatgttgaccaagacatcaagttttccttcaagctttttatttttagtagatgaagatgaatctgtggccacctcatggactcctctaaggacaatagcatcatttcttgcactgaattgttgggagttggaagccatcttctcaatcaaattcgtagccgcagcaggagtcatatcactaagagctccaccactggcagcatcaatcatactcctctctatgttgctaagtccctcata

SEQ ID NO: 16217 - DNA, 428 bp, Glycine max
tatgctacaaatatttacaatagacctcctcaatctcagctgcaaaatcaaccacagcaaagcaattatgacctttccagcaacagatacaaccctggatggaggaatcatcctaacctcagatggtccagccctcagcaacaacaacagcagcctgctccttccttccaaaatgttgctggcccaagcagaccatacattcctccaccaatccaacaacagcaacaaccccagaaacaaccaacagttgaggcccctccacaaccttccctcgaagaacttgtgaggcaaatgactatgcagaacatgcagtttcagcaagagaccagagcctccattcagagcttaaccaatcagatgggacaattagctacccaattgaatcaacaacaatcccaaaattctgacaagctgccttctcaagctgt

SEQ ID NO: 16218 - DNA, 122 bp, Glycine max
gatgtgttgccatattgatggatggtagagccccacgcgtaatttactgtatatgcaatcttacccttacattgtacctggctagcatgcgtgcaatagttattatcaaaccattgtatgta

SEQ ID NO: 16219 - DNA, 415 bp, Glycine max
tgtaatcaatacttcttgaatggacagtatctgttatgtttatgatcaaggcaaaaccactagtacaaatttaaaagggggcaccataatgtttcacagaatctatatttgatattcagcatttcatcatgaatttgatatcaaaagatgtcatggagagtgacagatgaaaacactgaaaatagagaatcaggccccatgagcaacaaagaaaaactcaaggtgtaaaataagaaacttgaggagctacatcagacaatgaacaaaataacaagaggtgcagatttgaaagatagtggttggcctggctaaaaaattttaaatgataaaagtatatttagatcaagattattcaaataactgacaatagtataggtaagagtaccagaataacagtaatttcatacctatgacc

SEQ ID NO: 16220 - DNA, 375 bp, Glycine max
  unsure at all n locations
tttctttggctaaattagtctaaactttcgtaagctatttaagctgagtctagtccaacaagagggatctaaggatgaaacttagtttaagttagtctaaacctaggaaggctgtctaaattaagcctattccaacaagagggatctgaagacgaagcttggattgattcagtctaactagggatcgaggtttagtaatttaggctacaacatagaacacaaaagcatgattgattagagaaacatctttatatacatcagctggtttgttagaaagacccaacacctttacgtactgctgtcaatcttacttacttgcattnttactatttttagcctagacttagtttaattctattctaaatcatcaattat

SEQ ID NO: 16221 - DNA, 421 bp, Glycine max
  unsure at all n locations
tcgaggcgttgactcaagttattttctctgatatttgtgaatgatttgaaccaaagagggaagatctgatctgagtagatgacatcatgggtcaacaagatgagagagaaaatgaaccaaatatgggggaaaggaaactaaataacgagccattaacctggaaactgatgaggcagtggctcatcaagcacgatttggatagacccaaatttgccatgatgcgtcgttatgtttggaagaggattgcacatcaagtacgagtcagatagaccaaagttgatcatgatgcattgccacgtgtgatggaggccggcgatgcatgcaaaaccatgtatgcccaagaatagcatgtgaaagtgcatcttaactntgatggtcctgagaatttgtggactaataaattgacatatacagcagtttt

SEQ ID NO: 16222 - DNA, 474 bp, Glycine max
  unsure at all n locations
gagtgggtcncttttgatcctttgaattgccctgaacatcgacnaccggaaaancagactcagctggaacaatatcataggggacattgtcctcttgaggggaactagcaaagcactctcaccaaatcaaaaggcggcaccataaagtggcgcaggtacgagtgttgagaatttacatgactacatgtgtgcggaaccactatgatgccctgagtgagtgatatatgacaactctgggaacagagaatcaggctcgatgagccacaaagagaatcttcaagagtatagagtgaaacgttgtgagctacatcagacactgagcgagatcacacgaggtgcagattggagagatattgtttggccagactaaaggcgttgcagtaatataagcctatatagatctagattaatcttaaacgtgcgactatcttgtcaaagtaccaacaaaacaggacctggtgcctatgacctgcg

SEQ ID NO: 16223 - DNA, 329 bp, Glycine max
agtcttgtatattggctaaacatgatacatgtcatggctaggtttgattcacggataaaaagcatgccccacaatatttccatgacactaatgcatatatgatgattcggaaacttcatgcaaaacttgtcatgcatgcatctatgcggacactcatatgactaattattatggtcatgtgatgctagggctcaggattcatttcctctatttttaatcaacccaatgtttccaaaatatgtacttttatcaacttgtgcattcatccgagtccatatcgggcgtccggtatatttcacagcattcacccttcaggcgtagacacattt

SEQ ID NO: 16224 - DNA, 437 bp, Glycine max
tctacctctctgggcaatcttatgtggtggatcttaccttcaaaaccttttgaccttctaccattacctgcaagcaaacattgtgttctggagtaagcttgtcttccacagacaagtcgaaatcgatttttgggtcttcaaaacctaactccacctttctcttccccatgacaactatgcagcttgcggacaacatgaacggccttcccaagattacaaggatgtcagtatcttcagagatatccataaccacaaagtctgctgggaagatcaaatgttgtaccctgaccaacacttcaatcactccacaggacctggtaatggagcggtcagctaattgcacagtcattcgagtgggcataatctccaactctcccagccttctgcacatggagagtggcatcaaattaatgttggctcccagatcaatcatagcc

SEQ ID NO: 16225 - DNA, 386 bp, Glycine max
  unsure at all n locations
atcttctccttcaattttctataaatagggggagaagtgaagtagaaaagggttcagccccttaggcacttctctctctttcgaatttgctgaggaaaattatttccgtgaagaaaatccaagctgaggcgcttctgtaacgtttccgtgagtaattacgcgaagattctcgaccgttcttcaagattcaccgttcgttcttcgtttttctttagtcttcaatgggtaagtacctcaaaccaagcttttcaattcattctatgtacccgtggtggtccacattntgtttcgtgtatttctattctcattttcatttactttctatacccccttttgacgtgcttaagccatttatttaagtcatttctcgcttaatctaaaaataa

SEQ ID NO: 16226 - DNA, 438 bp, Glycine max
  unsure at all n locations
tgtaggattatggngtacccatcacatgtggtacttggtggcggtcggtcgatggtgcacaacaagttttccacatccacaaagcgcgcataaacccaccatgcccctgtgagcccacctacaactgagctcacgtactcccacgtagcccatatgctcgctcctctcaacaccgggtccccatcaatgctacgaagcttccacaacatccaagtaaaacaacattcaaacagcacaagctatcacagacgagcaaaacagagcaaatgcagaaaactctgctcatacaccaaccaacatcacagcttttctcacttaaagaccccagtaacaattccttcgatccaattcgttaaccgttggatcgactccaaaattntactggaagtttatagtacataagcctacattgagaccgttgggatctactagcaaact

SEQ ID NO: 16227 - DNA, 319 bp, Glycine max
  unsure at all n locations
atctgcactttattttataaatctatttatgtacaaagtgaagtaaccaaataactaactaactaactaacttcactaatatatccagtaactactcagaaggaaaggatggacttaatcgattaagcccatctaatctacctaattaaactaattacacacagcaaaacccaaattcgcagcccaattattgaagtgtagtgattcttagtttcaagcccaatttgacccgcgaaatggtagaatgtccaagcttatttgcgaaagataatacaaaattgaatctattnctctgagtctttcaagaactactcacatg

SEQ ID NO: 16228 - DNA, 435 bp, Glycine max
tgctaacccatggaagctgctaatatctcccacacttttttggggtgggtcattcttggatgaccttgattttctcagggtccacttggaccccatttctaccaactacaaaacctaagaagactatattatctacacaaaaggtacacttctgtatatttgcatagagggagtttttactaaggactgaaagaacttgccggagatgtcctaagtgatcatctaggctcctactgtacactaaaatatcatcaaaataaacaactacaaatctacctatgaaatcccttaagacatgatgcataagcctcataaaggtgcttggtgcattagtgagcccaaaaggcatcactagccattcatacaaaccaaacttggtcttataagcggttttccactcatcacccttgttcatcctgatttggtgataaccac

SEQ ID NO: 16229 - DNA, 347 bp, Glycine max
ttcttattattaagtcttataagcctcataggtcggtctgtatatatatttatattattttttggataccaatatatacttctattatttttttgatacaattaattttttttaaaactaacagactttgattacacattactgctccataactttcattcttataatcaagtaagactttaattacaatttaggtgtgagtcatatgtgctcctttatatttctcattatctttattggctttcctattactatgtttcctttttctttaactttcttattacgttactacttcacagcaaaggaatattaaagatttaatgtgaagaaggtttttaaaaggacta

SEQ ID NO: 16230 - DNA, 440 bp, Glycine max
tgtaaaggattgattagaaaagtgttcaagatttgtaatgattgatttttaatgcaaaacaaagccttgcttttatagactcttcatgtctggtcaagaaggccattcagaagagttataacttttagaaaaacttaaaaaccatttgaaaaagtcaaaacccttttgaagagttacatctttagatttttcagaaacaaacactggtaatcgattaccaaatatgtgtaatcgattacacaaagcttttgagtgaaacaatgtgactcttcacttttaaattttgatttcaacgttcaaggacactggtaatcgattacaaccaaaacattgtaatcgattacagccttttgaaaatatttggaacgttgtaaattcagtttgaaaacattttcaaactcattttgctactggtaatcgattacaacaatatggtaatc

SEQ ID NO: 16231 - DNA, 381 bp, Glycine max
ttcttaacaaagtcaatgaaagaacaacaacatatcatgtgcttcattgttatggttatcttaatcatcgtttcaatattttaaaaaaattatatataaacataagattaaatacttttttattttttagatttaattttattttctaaatattcaaaaaatactttgatttgttttcatatttttattaaataatttatcatatggcattatcaagttaatgttccaagttagtcttacaattatatgtatttcattgtttataaaattttaaaacataaataataatagatatcgatactaaataaataaaattattttataaaatatattatatatttcaatcatattaatcatagttgtcatcaatatatgtataca

SEQ ID NO: 16232 - DNA, 406 bp, Glycine max
  unsure at all n locations
taccctaacaaataacaactcttattgcaccacatgacctttgcaactcccaacacagaatcacatccacaccccaccagatacccctacccccaaagtctgcttctacgagtattcagtaattatttgattacacgtgtgcagaactctttgttgccaaactttattatttggaacatttttaggaacatcacatatgattgaacatgcagaaagagaatttttaagattctagagtttagtcatgttgaaatgaaattgaatattgagattttaaacacatccaaaaatgtggaatnttttctttataatactaatggtctagtggtaaattatcttttattattatattctttatattaaaagtaggactatcataattctagtaatataaaaatttgatact

SEQ ID NO: 16233 - DNA, 375 bp, Glycine max
gtctttcgaatcggctatcagatcaatcattggtcgggactgaatcacatttaaaggtctttatccctccttaaaaatatattctgtgaaaatcaaactcacatatagagaatatgtgcgtgcgtgtgtgtgtgcatatatatatatatatatatatacatatatatatatatatagatatatacttcatatgcatagacgtttctttcgtggtggacatagagtcgcccaaacacacatgtgcctgatgatcaacattattgagaggagagatagaccaactaggatatctcgtcagattgaaaccggttatcacgaccggatcgggggtcttttgagagcgagtcacgagcattgtaaagacgaattagtaag

SEQ ID NO: 16234 - DNA, 378 bp, Glycine max
  unsure at all n locations
tgcttgaagacatgcaacgaatgtaattatacatgtatatttcatgtgcttttgtgctacgagcaacactctgcctcaagacatttccaaccttattacaaaaggtgcttttgcacataatattgtaaaaattgaaaccagttattgtaaggattaatagaataaaaatgcatcatcgtgatagccataaccaaatgacaaattctaaaaggtgatgagcttcacttctcaaaaaaactaacataactttcaggcattatagtcgccatttggcagacataaaataaattaagtaaggaaatcataaagcagcctcgacattaataaataggaaatatacattanataatgatatgttacctcgttgatagcaagcac

SEQ ID NO: 16235 - DNA, 376 bp, Glycine max
ttcttgtaggattatggggtacccgtcatgtgtggtactaggtggcgatcgggcgatggtgcaaatcaactctcccacatccacaaatcaaacatgaacccaccatccccagttgcccaccttcaactgagctcacgtacccccacgtagcccttatcctcgttcctctcagcaccgggtccccatcaacccctccaagcttccacaatatccaagcaattcaatattcaaacatcatgaactaccctaaaccaagaaaacagggcagaggcagaaaactctgcccaaaacacattccaataccacaactttccctactcaaataccccagtaacattctcttcgttccgattcgctaaccgttggatcgactcgc

SEQ ID NO: 16236 - DNA, 419 bp, Glycine max
  unsure at all n locations
tgtagaatggctagacatgatacatgtcagggcttggtttgtttcaagggtaaaaagggatgccccacattatttccatgacacaaatgcaaaaatgatgatttggaaactttatgcaaaactggtcatgcatgcatctatgcggacactcaaatgtcaaatttttatggtcatgtgatgctagggcccaggattcatttcctctattttatatcaacccaatgtttccaaaatatgttcttttatccatttgtgcattcatccaagtccatttcgggcgtccgggaaaatttcacagcattcacccttcaggtttacacacattntttcaaaaattggttatgatcaatgaatttttttttttttttttcaaaagcatgttggcttttcagctagacaacttatttttcttttttctc

SEQ ID NO: 16237 - DNA, 378 bp, Glycine max
  unsure at all n locations
ttcttttattctctcccccaaaggttgacccataattgggacaactttactatggtgtatgctcgatgctgtattactaaaagacaagcccccacatctcacatgttgtccaagagtaggggtgttcaaattaacttgttataaaaaaaattaaccatagatgtatataaccaatttcataataattggataattaaaaatatttataagtgttaactaatttattggttaagttaaagttgggttatttaatttttggatatgcctggatgtatatttgataaccggctatgataaaagagatatttgataacagataataatgcttanaacttaatacactatgtcgcttcttctctttggtatgcataacatgtt

SEQ ID NO: 16238 - DNA, 424 bp, Glycine max
ttcttccacttcatgtttcttgtggtgtctttcttcatgctacagcttctgcccaaaattcttttggtagcttcttgcttttgagcatgcttcgagccatatcaaggattgttctatttttcctttctgtcacaccattctattagggggatcttggaactattaagggacatctgattccattctcttcacagaactctttggaagggaattctcctccttggttagtactcatggctttgatcttttgactactttctttctctattatagctttgaacttcttgaaggcggaaaagactttggattctttctttaatacatatactcatgttttgcttgagaactaaccactgaaaaggatgacataggcacttttatctagtgagcatggcttgattggcccacagacgtcaacatgtat

SEQ ID NO: 16239 - DNA, 356 bp, Glycine max
tttcttgaacatcatttgttgatttgattcacttgtctcttaacaccacttgacaccaatcataaacaaagggagttttgtttgcaccataaacactattaaaaaatactgggaactggactgctaataatacagtagaaaaatctgctatactgcaaattttgttaaattcttgaaaaaaaaacaatactcaaatttacccccaccacattaacaataactgatacaagatgtagaatttcatatgttacagaccatatggactgttgaccataatgagctttatcatactatagcatttaacagaacttgaccagatgctcgagtaccacactactcatatgatgctaattcac

SEQ ID NO: 16240 - DNA, 424 bp, Glycine max
tagcacgcatggtgtttatgttggtggaaataattttggttctggcctttctgtcatcttcagggtccacaccatcagggagagacaccaactttatgtgtgagtccatgatgactttgtcattcccaccaccacttgcactcttcagtttttcgtagttctcatctgaactcaagagggtgattttgcagccatatttggccaaaacctgtgagaactgaagaagggggttcatgtgccctaggattgggtaaggcattgcaagaaaatgtgagatacccatcataacggggtgagttggaatcttgcaagtgaagcaaaatttactggtgatacttagaacaatagcttctttgtgtaattcgaggttgcgtgaatgggttagttactttgtggatatatatatggacctgaatgctagctg

SEQ ID NO: 16241 - DNA, 369 bp, Glycine max
  unsure at all n locations
ttcttgtactccaatcattcataaacctgtttcaaacatttcacataaatattgttaatggtatattttaaccaacttacatcctcagttaacaaatggaacacctaataaatcaaatttacttacattagccacaactgtagtatggatatgttcaaacacttgtcacctaaaataaggtcactaacatctgtgtgtgtgatgaaaaagccatctttgacattaggtatcccaaatttttccccatcccatgccaactcaattggcttttggtaaatatcaaacaagttctttaccaactcttccaatggataaactacagccactacattgtccattntagcacatttaaccggtatgggcaaacgc

SEQ ID NO: 16242 - DNA, 417 bp, Glycine max
tctttgcgaaaacttccttgaaaagctatagcttatctaaacacacccatctaaaaacaaagatcacctccttgagaagcttccttgagaagctcgagcttagcaacacacacccctctaataactatgctcacctccttgagaagagaagctagagcttagctacacacccctattatagctaagcgcacccccctgacaaaatacatgaaaatacaaaaaaaaagtccctactacaaagactactcaaaatgccctgaaatacaaggctaaaaccctatactactagaatggccaaaatacaaggccaaaaagaaggaaaaaacctattctgatatttataaagaagagttgatccaaccttgacccatgggctcaaaaagctaccctaaggttcatgagaaccctagggccttc

SEQ ID NO: 16243 - DNA, 376 bp, Glycine max
  unsure at all n locations
ttcttattttataaaactatcactctcttttatttattattttttttcttataaaataatatatgactgacaattattttgacaggggaagtaatataaagatcacaacaataaggatcaaccttgagtctctatgtaaactatcaacttttgtcactaggccggacataatggattaatatgaaaaacatttcataccaaaaatttagtatttcaaaaatatgtttcttgccttgcaattaaaaaattatggatttatttcattaaaattttctattaaatgcgtaagagaacatgagaataaactaaactcataagctattgtagttactttgtataattacactctataattgcaacttanaaagacaccaca

SEQ ID NO: 16244 - DNA, 423 bp, Glycine max
  unsure at all n locations
taaactaataagtgaaagcaaatgaatgattttatatctcacacatgcctttaagcaagaacccttttagtttcaagggtaaatagtgcataggcccaccctacctcatgcagaagttgaaattaatcttttaccaacttggaaaaatagagacaaggatcaaactatagaccacatgatcataaatgctctaataccatatcatgaaccaactatcctaaaagattactttgttgggtaaaaacatttaaatgcttttatatgtaactagagtagcaacaaagcctagggaaaaaaaaggcaatccaatctgaatgcaaatgaattaaaaaggaaaaagatcgaactaccaaaaaattatagcagaagccaacacatgtcctattttgaacagattntcaattacatactacggataaaaaa

SEQ ID NO: 16245 - DNA, 479 bp, Glycine max
  unsure at all n locations
cgctcacgcncnncntttgaacctttgattctttgcatgcanagcgncannnnnaactcnngacccggcgaggcgatatcagtagacctgaattgcaggctttcttgctttctctgcangcatactagagccgtgacacacatttcgcctaaatagtgtttatggaatataacaaccaactgacatttctcagacaacgaatggagacacctaatcaattggatttacttacaatatccacaactgtactatggccttgtgtgaacacgcttgtcacctcaaagttcgtcactaacatatgggtgtgagacgaagaaacaatgtttgacattacgactcccatacatcttccctacaatgcaactatattggcgctaggtaacatgaaactagtactgtccaactcttcccatggtgaactacaccactccattgacattttaaccatttaaacggtctgggcaaacgcctttgtgaat

SEQ ID NO: 16246 - DNA, 350 bp, Glycine max
caagagacacctgcttgagacacctccttgagaagctcgagcttatcaacacacacccctctaataactatgctcacctccttgagaagagaagctagagcttagctacacacccctattatagctaagcgcacccccctgacaaaatacatgaaaatacaaaaaaaaagtgcctactacaaatactgctcggaatgccctgtaatacaaggctaaaaccctatactactagaatggccgagatacaaggccaaaaagaaggcaaaaacctattctgatatttataaagaagagatgatccaaccttgacccatgggctcaaaaagctaccctaaggttcatgagaaccc

SEQ ID NO: 16247 - DNA, 518 bp, Glycine max
  unsure at all n locations
cccacccccgctccaactttaaaaaaaaggaagtgtttaaccccgctgtatcatcnacaaacaaccacannngcctgagcatgaatcttcgaaaccaaggcgaaacgactcgcaccgggatctataagacgaccgttgctgcattcttgaacaccagcgagaccacgtgcgagtgaatacactgtgacgagatggaatacttagaatctaaccacgagtgacaggtagtataactaggacctggaagcaaacagaaggtcgtaaatgaacctcgaaagagagaccaaaaccgaatgatgctgtagaacaatacagtgctcgcatagtagacaaaggcatgacgctaggagagagagtggactacactcacaccactgaacgcagcacgaaaagaacatatatacgggagctaaatatatggtgacactcacagcctatgagtacaccaaatggaggataaaaaagtatactaaaaggagaaccggtagaagatatacatacggaccaaccagaccgcc

SEQ ID NO: 16248 - DNA, 322 bp, Glycine max
tgactacaccgtgattctaagacttagtctctcttcaaaatttctgagagagcttaatcttcatgggtgttcatctctaaaggaaatctcactggaatgagaagacatgaatacattgaatatatctggcaccactatatgtgcattgtcgctatcaatgtcatctctccccaagcttacatatttggatttaagtgattgtagattgattgagagacttagccttcactcaaaatctctctccaaacttaatctatgtggttggccatctctctcggaaatctcagcggcgcccgaggaactgacgaatatctatttgtat

SEQ ID NO: 16249 - DNA, 385 bp, Glycine max
  unsure at all n locations
agctttgagtttattcaggcgacaatatctttttactcgtatgtctgattgagtcccgtcatataacgagacgctcgaaattgaatgttgaagctctgagccaattcaaacgacaataactttttactcggatgtctgattgaatcctgtcatatatcgagacgctcgaaattgaatgttgaacctctgagcgaattcaaacgacaataactttttactcagatgtctgatatagtctcgtaatatatcgagacgctcgaaattgaatgttgaagctctgagcaaattcaaacgacaataactntttactcggatgtctgattgagtcccgtcatacatcgagacgctcanaattgaatgttgaagctctgaggaaattctaacg

SEQ ID NO: 16250 - DNA, 432 bp, Glycine max
tcaacattcaatttcgagcgtctcgatatatgacttgactcaatcaaatatccgagaaaaaagttaatgtcgtttgaatttgctcagaggttcaacattcaatttcgagcgtctcgttatattaaaggactcaatcagacatccgagtaaaaagatattgtcacctgaattggctcagagcttcaacattcaatttcgagcgtctcgatatatgacgggactcaatcagacatccgagtaaaaagttattgtcgtttgaatttgctcagagcttcaacattcaattttgagcgtctcgatgtatgacgggactcaatcagacatccgagtaaaaagttattgtcgtttgaatttgctcagagcttcaacattcaatttcgagcgtctcgatatattacgagactatatcagacatctgagtaaaaagttatt

SEQ ID NO: 16251 - DNA, 389 bp, Glycine max
ttcttgtatttgttataggaaggagtgctagcaaacagcggcactttttctcattggttgaaattcatgttgatctcacaaatcggagaacaggacttaccaaataggaaatgaaacttacatatttagtggacctacatgaatttcacgggttaaagaagtatattagataatgtgttcctagcatttctcttgttatacttataatgcctatactacagtttttgtttggaaaatgtccaggaacaccttgcaagatcccttatggccgtgggcacattcctggcttcatcagccaagataatataagagttggggacatcatcatcaaagatcaagtcagtattatgactctaattagtactgtgattggttgggctttatgtgct

SEQ ID NO: 16252 - DNA, 433 bp, Glycine max
  unsure at all n locations
tatccaaactgaaacttcaacaaattaggcactgtctaattcgttatattttcagtacacaaaatcaaagtgatcaattctaaaagttataacataaggtacattgatagttccatccataaagggtttacttaaagttgcggatctgaaagtggtccagccatcaacgacacttctgttgccagtaataactgtaacatcctttccatcgccaaacagaacaatattggtcttataacttgggatttcaacattttcctcgtaagtcccttctttgacatagatcactgtcctaccagcactgtcatttggagcaaagttgatagcctcagtgatgaagctaaagtttcccgttccatcagcagccacaacaagctctcctccatcattgctntgcaagagacggcgaacggttttcatcgacaaccacaac

SEQ ID NO: 16253 - DNA, 386 bp, Glycine max
tgcattctttgtcttctttggatgctgacttgtggcaagaagccattaatgacgagatggattctttagaatctaacaagacctgacatttagtagacttgcctcctggttgcaaaccaattggttgtaaatgaatcttgaaaaagaaactaaaacctgatggtactgtggataaatacaaggctcgccttgtagccaagggttttaggcaaagagagaatgtggatttcttcgacaccttttcaccagttactagaataacatctattcgggtgctaatatctcttgtttctattcacagtctagtagtacaccaaatggatgttaaaattgctttattaaatggtgaattggaagaggaaatctatatggagcaacctgaaggg

SEQ ID NO: 16254 - DNA, 421 bp, Glycine max
  unsure at all n locations
tctcaaggaagctacctagtctataaatagaagcttgtgtaacacttgttgtaactttgatgaatgagagtcttgtgagacacaacttaaagttcaacttctctccctttttcttccttcaatttcatgctcccccctctccctttctctccctctttattttcctccattgaagcatcctctccaagcttcttatccaaggctcatcttggtggtgaagctccttcttccatggcatattccctggtggatggcgcctcctctcaccgcttctcctttgtcttccgctgcatctccatggtggaaaatcaccattaaaggacctcattgaagctcanagatccagcctccatagaagccccacaagcaagcttccatcaagtggtatcagagcacaagagcttcaagtaggtgctcctta

SEQ ID NO: 16255 - DNA, 377 bp, Glycine max
  unsure at all n locations
atctttgatctaccaccgccaccatcatcttagttntctatcatgtttaatattattagtactttgatttctagccgtgtatttggctatattattatgacatttgaacaatttagtatttcttttatttgcataatatgattgaacaattatgaattatgctttatgactatgtggtttttatatatttgatatattcatgtttcttgcttcatgattggattagatttttccaatgaatgtcttgtgaatgattagtaatatatgtatgttttatatttgttgcacactttggctttttgttgatgccaaagggggagagaaataggattaaatcaagaactcacataagaaattaacttaatttcaagtgaagc

SEQ ID NO: 16256 - DNA, 422 bp, Glycine max
  unsure at all n locations
ntgtgtaatcgattacactattttggtaatcgattaccagtgattgtttctgaataaatcaaaggatgtaactcttcaaaaagtttttgactttttcaaattggttttaggtttttctaaaagttataactcttctaaatggtcctcttggcaagacatgaagagtctataaaagcaaggctttgatttgcttttcaatatacttttccaatcaatcttataaaatcctttacaagccttgaatctctttgaacttcttcttcttctttgtgccaaaatctttccaaagttttctggttttctaaaccttgaaaacttgtgccattcatcttttcattctcttctaccattgccaaaaagaattcgccaagggctaaccccctgaattctttttgtgtctctcttctcccttctccaaaaga

SEQ ID NO: 16257 - DNA, 377 bp, Glycine max
  unsure at all n locations
ttcttacatatttaggtttaagtgactacacagtgattcaaagacttagtcttcattcaaaatttctgagagaacttaatctcaatggttgttcatctctaaaggaaatctcagtggaataagaggaaatgaatacattgaatttatctggcaccactatatgtgcattttcgctatcaatgtcatctctccccaagcttacatatttggatttaagtgattgtagattgattgaaagacttagccttcactcaaaatctctctcaaaacttaatctaagtggttgttcatctctcttggaaatctcagtggcgtcagaggaaatgacaaatataaaattgtattaaatgctaagagaacttaatttanaagattgt

SEQ ID NO: 16258 - DNA, 425 bp, Glycine max
taacccttctatagatcatgttaaaacacaccattatgtttgtgcaattaaggaaatactgcaattatttgaagtggtgtcaatcttgaaggtgaactttcataaaatttgtttggcaattatttcaagtgatgtctattatcatcattctactttataaacatattttcatatatggtgtatagcaactataattagaattactgtaggttgggaaaaatgaaaatatatattctacttgcttgttaatggcttaagtgaggctacaaagatttttccctttctttttattcccctattttttcttgcttagttctatgttactttcattttggaaatttcttttattaatcttctaaaatatttcttacagaatcatgggtgatgttctacccttcaagtcttcaagagttaagattgagatt

SEQ ID NO: 16259 - DNA, 379 bp, Glycine max
ttcttgaagcattttttacaacagagagtttcatctccagatcaggtgttgattggccaaactgctaggctatcaatttgaagttaagtacaaacctggcttagagaatagagccgctaatgctctgtccagatgtcatggtgaggtagaaatgaattctattatttcttttcccttgtgggctgatagacagaaacttttggatgaaataactaatgacccgtacattcaaaagttactgaaagaagtgcaggagtctcctgatgttagacctgagtttcaggtgaaacatggagttttactttatcatggcaggctggtgatttcccccgaatcaccctctattccttggctattggaagaatttcatagtactcct

SEQ ID NO: 16260 - DNA, 424 bp, Glycine max
atacctttcatcatggcatgttgacataagctctttagttgagggtaaaatttgtcaaaaaagaaataatattcgacaaaaatataagagtttgagataaaatttgtcaaataaataatattatgatcttattaaaatgtttaatggggcttaattttaaaaattttctaagttttctaccataggagctctttttttcaccccatccatgttgtcacatgtgggtgaaaagaggaaagagagggatgggatttctcttgctttaagcataacgggccaaagtgggaggcccacacgaatggttattagctcagtagtaaagtgtgtccttgataattgtgtctgcttggagtggagtgagacatgtcattgaatagcaaggagatagccacttcgttatgaaattagaaaagttaagagccct

SEQ ID NO: 16261 - DNA, 363 bp, Glycine max
ttctttgaggttgagttgcttgcagctatcgcctgtcactggaaagggaaccttctctgtctaactccaagaaaaacaattactagggtttatactttatactaaggcactttctatcgtggacccccccacatgcagaggcttccccatcccaagttcaaccctctcaagaccaagcctcgaccactgcgacagaatcagttatagatccaattgagcagaaaattcaagtagcaaaacctctaaaatcattgtcataccctaatttcgtccggggattattatttgatgctatacaacctttgattggccgcttcgagatacttggcaccctttgttacacaatatgtgaagtcccgagac

SEQ ID NO: 16262 - DNA, 422 bp, Glycine max
  unsure at all n locations
tgtgcctcttcacgtccggaatatgaatgtagcttatagatccaaagacccttaggtgctttgctgatggcttcttcccgttccaagcttcaattggagtcatgtcttttacagacttagttggacatctgttgagtatgtaaacaacattgtagattgcttcagcccagaatgtgttaggtagtcccttctccttgagcatcgatctagccatttccataactgtgcaattctttctctcggacactccattttgttaaggagaatatgcgactgtaagttgtcgctcaatgccttcatcctcacaaaatctttcaaactcgcgagaggtgtactctntgccgcgatcacttcttagtacttttatccgttttccactttgattntcagcaagggccttgaactttntgaatactccaaag

SEQ ID NO: 16263 - DNA, 511 bp, Glycine max
  unsure at all n locations
ccctcccgcctctggatctaataaagggagttccaaacgactatgcatcacatccgccccgacncatgagcttgatgatccttgacccacagggcagtgactcgtagagcgaaccaatagatgcatttggggcattcactcacaaggagatgcagctgcgttcgagacgtaaagcagatcacgataagcacccctagacaacaagacgtgaaggtgactagccaactatgacagaagaaacaataagaactactgtacatgcatagaacgaatgtgcaaccatggatcaagcaacatgaataggcggataggaataacaccgacaatacatggttctgaggtgcatgatgggacaacattagtgcaagcaatctcctgagaagggaaaggaataaccgcatgtcatatgcttgatgcacactgaggctctatggtcgagccttagggcgagagaaatatgatcaaaccgtgaactcacataagaagatatacttagttcaagtgcagcccg

SEQ ID NO: 16264 - DNA, 162 bp, Glycine max
aagcaaaagacatgcacacgtaactagttatgcgtagatgacagtgctactatccgctatagcaccagacccactccagcgtatggtctatacaggcgttattataatgcgacactattgcctttgcacagttattttccccatgagtgccaatgatattat

SEQ ID NO: 16265 - DNA, 472 bp, Glycine max
  unsure at all n locations
cggcacacgnatgaagcattgattgcctccatngacatnccgcnaangacaccgggatactctagagatctacctggaggcatgcgtttcttgctttctttatcgagcgcccgaatagagaggaactcaatatcacgtgctgaatggacaaactggtaggctgtcataccgcagaatatcaccaacccgtcttaaacagattagcctgtaatgctctgcccacatgtcatggggaggcacaaaagaagtctatcaattcgtttacctcgtgggctgatacaccgaaactattggatgaaataaccaccgacccgtaccctcagacgtaactgaaacaagtgcatgagtcgtccgatgtcagacccgagtcatatgtgacacatggagaattactttatcatggcatgctggtgaattccccacgaatgccctctattccttggttattggtagaattccctacctcctcccc

SEQ ID NO: 16266 - DNA, 493 bp, Glycine max
  unsure at all n locations
gacactgaccccagtgaagcgttgaanttgangtgttgacatccacaacnttnanaatatccagacctcagtaacatctgactattatgcctacacgattttctttagggaggcaagacgcaagaaggagatgggatcaccttcgcaccaacagctccacacacaatcctgtctctcaaaagtatgatgaagctccccaaaaagatctagagagtcctcgatatcgaacgatgtatctctgagccaccataggagaccttttttttaccccatgcatgctgacagatgccggtgaaaacacgatacacacgcatgggacttctcttgctttacgcatatccggcctacatcgggaggtccacagcaaggtgttatcagcttacccaatatattgagacctgtttaaatgtcgtggcttagacctgacgcaatcaagtcactcataagatcgagaggacgccttgcgatacaataaacaatcacgaggccctct

SEQ ID NO: 16267 - DNA, 305 bp, Glycine max
  unsure at all n locations
agcttgtgttttactcaacatggatatgcatttgtgcttgtgatgcaagaaaattttcctcgacgcaccccaactcatcaggtcattatgattacttgtaaactttttgggttatagatataaatagaattctaatattcttaaattttaattcataaatgtacattaacagaatttanaaataaattataatatagaagacactatatggaaaatgcatggattccatatggaagtggtaacagacagctgtatgactctactatttactaattactatatgaataaactctccccttgcactc

SEQ ID NO: 16268 - DNA, 435 bp, Glycine max
  unsure at all n locations
nttaaactaatttaattattgcttaagaattttatattcatctatgatgcacttgcgaatcaatcaaaaccatgcacacgtaagttggtatggtatgatgattgtgccgctattcactattgcaaaagcaccttttcacgtcatggtatctacatcggttatcaaaaaccgatgtaatacataatgcagtgctattttcgtaattaacgccaattatattatgccgtcaacgacggttttagtgaaaccgcctttgattttaatcttactaaggcggttttataaagaccgtcttagattcaagtgatttttaattattttatttattggaaaatgatttttaattataaaaactcatgttggacactgttcccatcttcgtaaaccctaaatccccttttatatatgcagttggcgaagaagcgagccgacaac

SEQ ID NO: 16269 - DNA, 390 bp, Glycine max
agctctagcatgtgtctccgtgatagaagccatttgatcttttaaggctgataggtcgaccttcatctgttcttgcactccctcttcattatccatttttctggattgagtgttataagggtgcctttgcgcttttttagttatggcgagttccctaaagaaacaaacaatggtgagtatgccaccaaaacatgaatatgctaatgaatgatcagagcacttggattcacctcaaggccttttatagataacgtgatgagtttcagaacttctctgtgtataaaaaggaacaaaacttttatctagccaagatcataccaaagtgttataacagaacctaacggtttctaattatatgggccatcaaatctatcatgtgttgacagtaat

SEQ ID NO: 16270 - DNA, 430 bp, Glycine max
  unsure at all n locations
tctacttatgtggcagagcgggcttccttcactttcttgtctcaaccgctagctttgaccaccgcccttccttcccgcgatgcttctctttacatctgcctgagtgggcttatagcctaaaccatacttcccacgatttcctttggcatttatcaggccagttatgccgccattgtccctgcctaaacccattccgggttcgtaaccgttccccaacataactcgggccatcattactgctgcatcggacaggcaaggctgcctagagaaggagtccacggaggaaatgcttaccacttcaaaagactggaaagcggtttctaatgactcctctgcggcttccacataaggcatagaggatgggcagctcaccaagatgtcttcctcgcctgatacgatgaccagatgcccttccactacgaatntcaac

SEQ ID NO: 16271 - DNA, 301 bp, Glycine max
  unsure at all n locations
agcttcaacgttcattntcgagcgtctcgataagttacgggactcaatcatacattcgagaacaaagttattgtcgattgaattatctcacaagttcaacattcaatttcgagcgtctcgatatgttacgggactcaatcagacatccgagggagaagtcattgtcgctcgtattggctcacagcttgaacgttcaatttcgagcgtctctatatattacgagactcaatcccacatccgaatacaaagtcatggtcgtttgaatcgcctactagcttcaccattaaatttctagcgtttt

SEQ ID NO: 16272 - DNA, 295 bp, Glycine max
ctttagccaattcagacaacaataactttttactcgtgatgtcttattgagtcccgtaatatatcgagacgctcgaaattgaatgttgaacctctgagcaaactcaaacgacaataactttttactcggatgtctgattgagtcccgtaatatatcgagactctcgaaattgaatgttgaatctctgagccaattcaaacgacaataaatttttgctcggatgtctgattgagtcccgtgatatatcgagacgctcgaaattgagtgtggaatctctgagccaattcaacgaaca

SEQ ID NO: 16273 - DNA, 389 bp, Glycine max
agcttttttttcttatttcaataggcatcaacatgaagtctatcaacataagttaattaaataagtgcttaatcgagatttttgaactaaatgtgccctaacatgagttcagtgatacaagcacactagaaaatgatgtcataacatgtatcaattgaatgtttgaatgcaaaaccaattttttgcatgaagttctccagtaccatcattttcaggggacccgctgccacaatttaatttcaaaattgccaatcggtaaatcacatcatctatactaagctacgtaaaattcatatacaattaacaccactaatagaacaatgcatgaaaatcccctaccatgtaaagatgctgaataataatgtacaaatcactgcagaaacattgag

SEQ ID NO: 16274 - DNA, 446 bp, Glycine max
agcttaagctgtaacactgattcataagaatatgatactttcttcccacactttcttccgctgagtatgctggagctaagcaagttacgactcttttctactggaactgggatacaccttcccgactatgttagcggctatcgctgctgacgttccatgactggtggacgcacaccagcctactgaagaaactcgacaaaaagcgttgctgtctccagctgcataggtgaactcttgacattgacagtgaactgttgccgaaatatggtaggaccaatggtgttaacatcagctatttaatttcacaggcgagttccatatgcatatgtctctatcccgaagccaactcatactccttagtccctcacatcaaaacaaagtccaagctctacaaaatattaacaagtaactctagatgtcgcagcggacataacttagatcaagtt

SEQ ID NO: 16275 - DNA, 376 bp, Glycine max
tgcttcaagaatcaagtttcaaagaatcaagattcaagaacaatcaagtttcaagattcaatcaagtttcaagaatcaagatcaagattcaagactcaagattcaagaatcaagagaagactcaatcaagataagtactaaaaaaagtttttcaaaacattgagtgcacaagaatttttcacaaaatcttttaccaaagagttttactctctggtaatcgattaccagtagccaacattgttttcaaaactgatttataaagctgtaatcgattaccatcatcatgtaatcgattaccaatgttttagaacgttagatttcaaatttcaagagtcacaactagtgataaaacattttcagatcattgtacacttgt

SEQ ID NO: 16276 - DNA, 421 bp, Glycine max
tgcttgagaggataccatgacaaacaacattggtttccttctacttcccaaatacatataaacagataagcccatatgaaccaaatgtttttccatagaaatcatacacaataatattatgaggaataaggtcatcagtagtcttaccaaatcttctcagcataaattttggcagaatatttatagttgctccatcatctaccaatattttgttgataatttagtcctctaccatggcagtcaaatttagaggcttcatatgagatttcgtctcatttgttggtggatcagaaacaacagcattatgatgaaaggtaaaacaagacacttgagtcacctaaacaacctttgtagttaaagaatgatctttgaaacactattcccttgcacaatcccttatcacatgatgagcttgatattc

SEQ ID NO: 16277 - DNA, 382 bp, Glycine max
ttcttatcaacggtgacccactatccaacaccataggcttcttcatattataaatattcctcagcgtcctcttcatcctcataagaatacactagaacatcgtgaaacatgtcaacattggctacatcatctaccactatgtcatccagttcctgataccaaagtcattaaaatgcttctcataagatttaaacaaacgaaacaacaataccatatatcattcattagtgttaccacaaaaaatgttgacgatgcatcaccaccattctcaccatgtatatattcaccccttccactcatatttgtcacacattacacaacaaacttcctaagtcagtaaggacaaaccagagcattaaacgacatagtgtgttcatcatta

SEQ ID NO: 16278 - DNA, 421 bp, Glycine max
atcttgtggaaccatggagtttagcctctttgttgtacacctatacagaacatgcatagttgtcatagcagcctcaccctataaactatgaggaagatttttctctttaagcatgcttctaaccatgttcaagattgttcgattgcttctttctacaatgccattatgttgggggtgtaatgagcagttacttcatgaactataccatgctccttacagaaaccttcaaattctccagatgtgaattcacctccaccatctgttcttaagatgttaatgcattttccagattgcttcttcacaagagctatgaagtctttaaaaatgttgaacacatcactcttggctttgattgggtagagccacaccttcctgctaagatcatctacaaaagacacaaagtatctattctctcctaatg

SEQ ID NO: 16279 - DNA, 381 bp, Glycine max
ttcttgaccaatcccgacccaacccgggcatagtcagttagtgagaacctgtgatgtacctaaacaggcgagctcttggcagtcaaccgataaaagaacaaagaccacaaagcaagggggcttgtgtggtggctggccagctgtgaatcttgtgtgatatatgggatatggcctctggtaatcgattaccaagggtgggtaatcgattacaaggcttaaaagtgaagacaggaagctaagatggcctctggtaatcgattaccaaggctgtgtaatcgattaccaggcttaaagataggatcaggaagtcgagatggcttctggtaatcgattaccaaggggtgtaatcgattaccaggcttagaaatggagacagtaggt

SEQ ID NO: 16280 - DNA, 418 bp, Glycine max
  unsure at all n locations
nttgagtgaaacaatgtgactcttcattnttaaatttgaatttcaacgttcaaggacactggtaatcgattaccaaaacattgtaatcgattacagccttttgaaaatatttggaacattgtaaattcagtttgaaaactttttcaaactcattttgcgactggtaatcgattacaacaatatggtaatcgattaccagagagtaaaaactctttggtaaatgtttgctcaaaaactcatgtgctattcaaagttttgaaaaaactttttaatacttatcttgattgagtcttttcttcattctttaatcttgagtcttgaatcttgatcttgattcttgagatcttgagtcttgattnttgattctaggctttcttcttgagtcttgaattctccttgattcttgaactcttgactt

SEQ ID NO: 16281 - DNA, 381 bp, Glycine max
ttcttgtctcaacgtttatgcgagacggagaccaacatgctagctatcatcgccaagtaccgagaagagttagccatggcccacgagcatagaatcgcggatgagtatgctcaagtatatgcggaaaaagaggctagaggaagggtgatcgactctttacaccaagaggcaaccatgtggatggaccggtttgctcttaccttgaacgggagtcaagaacttccccgattgttagccaaggccaaggcgatggcagacacctactccacccccgaagagattcatgggcttctcggctattgtcagcatatgatagacttaatggcccacataattagaaatcgttaggaaacttgtatggtctctcagaccttgactaga

SEQ ID NO: 16282 - DNA, 428 bp, Glycine max
tccttaagaagattcctagagtagctagagcttatctacacacacccctctaatagctaagctcacttccttgagatgagaagctagagcttagctacacacacccccctataatagctaagaacacctccatgccaaaatacatgaaaatacgaaaaagtccctactacaaagactactcaaattaccttgaaatacaaggctaaaatcctatactactagaatggccaaaatacaaggcccaaaagaaggaaaaacctattctaatatttacaaagaagagtggacccaaccttggcccatgggctcaaaaatctaccccgaggttcatgagaaccctagggccttcttttgcagctctagcctaatcctcttggagtattctatcaaatacccttaaggggtaggattgcatcacaagatcaagt

SEQ ID NO: 16283 - DNA, 364 bp, Glycine max
ttcttttttgaggatcttgcggactgcgtgtgtcatcatacctttaatgccttctcctacaatcctgaacagcagaggaactaggggatacccttgactccacaccattgttgttgataaaccttagaggggatacgcattaatcccacctcacatagatgctgattcgttgcttgctgatataccggaccgttcttttgtgcataaccccagtctaaacaacatatataccaaaactgacccagacactgccacgatcgcctttttaaaattcaccttgaagatagtcattggatacttgctattgcttgcttcctcaaccacctcattgataatcacatgactctggaagatatgcctacct

SEQ ID NO: 16284 - DNA, 418 bp, Glycine max
cgcatgtctataagatggctgcatgcggaaccacaccttgatgaagggaggctgccactctctctggctggtctgaccatcttcgactgtgagaaagctaaagaaactggactacatggggctgtgtaagctctcctatgtcacgcgactgaggcttgaagactgccccaacctaccacagctaccagaggagggtcttgccacatccagatcatatctacttattatatgctgccccaccctcgagcagcgttgccagaaccacagaggcgacgactggccaaagattgctcacagttacagcacttccagacccctgcataatttgatagaatcacggtaatgatgctgattctcaagaatcatcatcaaactttttcttttatagtagatctgaattatcatgaaccttctacac

SEQ ID NO: 16285 - DNA, 367 bp, Glycine max
tttcttgtgtctgaaaaatgtggttgttggggcattaaatgcgtgcattcaatgcacatacttcttcatgctagaaaaccactctttgtcactcgtgtcttgaacactacaataggaaaccacttccttttgtgttagaacatgtttgggcaatagaactcttcttttgatggaaattgaaaaattttagaacttgacttcatttattcttcatatgattcgataaatcataggagaatgtctttgcaaaatagatcttaaacacagagtattaaatgaagtctaatgaaaactctaatattgtatcagatcatgattacatcttgctactatctggaacatcatacgcaaacttctgggaacatgt

SEQ ID NO: 16286 - DNA, 421 bp, Glycine max
ttaaaatttgaggccactcataatttatttcactgttttgactaataatctaattaaaatggcgaggagcatgtgaggggattctaattgttgtcctattcaaacatatgttagtaaaagggttatttctatgtgcgtagtgatcctattatgatatatgataccattttcaaaactagacacacaaggatttctatagtgataactttcatgaaattacattaagagatgattgatatattgattttataagatgatggtactgcaatgcaataaaataagcatgtgctacttttttatttattatgaattatgtggatttttacttggactttgggataccatttcatgaactagattccttatgcttattggatgatgttacatgataatttattatgtgattgcttctataatgaga

SEQ ID NO: 16287 - DNA, 359 bp, Glycine max
tgctgtcttagcacagaagatcacatgtcggagagtattactgaacttctcataggcacggatgatggcatgctattgaagataatccgatgaaatagcaatatccatggctctatgcggccgaggcagccgctggacagcgctgaatctggtgatatcactgtgatgatgacaatcgggatcgacatcggatgggtgctcatgcactactagggactccttgtgatgagatgcacacccatggactgaggcaatatatttgcgaggcagggtgttcaagataccagcttcattgatagactgagagcgcatgaggtgctcgggttcattaaagcactggagcgttatctaacgcccat

SEQ ID NO: 16288 - DNA, 292 bp, Glycine max
tgcatgatgtacattctccacgttgcttattcatattctacgtgacacgatcctgatcttgatgatactacactggcgccatcaaattactctaaccggaatatactcacatgaaatagcctaacccttcgagatctattcttgactcctaaccagactggttataagtgagctgcactatgcacaagagacaccattaactagataactgcgcattatgtctagacatgcacacatgtagctgctctagcaaggactaaagacttcaagcattttccagtacgcaaaacct

SEQ ID NO: 16289 - DNA, 370 bp, Glycine max
ttcttggaagcatgctatgatgctgatgttagaaaaattaaatacgacaggaactaatacctgtacaatagaggaatgaaggtagaagttgtgaggcacaagagttgctcctaatagactcatcagcacaaatgcactctccccactcaactttgttagtattccattaatggataatggaatgtctggttgattaatgagtgttccaagtacaaacgaaagaaatacaaaacctgacacaaacaggcccaggatcttcaccttctcaatgtcctagagaaaggatatatcataagtgtattgtcggtcaacagagattcatgaataaacaaataatgatacttaccaggagggcatatagaaggagatg

SEQ ID NO: 16290 - DNA, 373 bp, Glycine max
acacccgctttttccttatctttacaagaaacgaacgagaaaagcataaacaaatatttcaactgcccactggccttaatgcgaataagggagtgcgatcatagcctactaaagcgtgtcacgatttatgtggacgaattgaatgactaagctacatatgttgcccgaatgatgtagatggaatgatacagatgtcgtttgatttgaagaatgggttgtcattacattagataaggtgaaagatagtacttatgtactctagtctcaatctcaattgatccacatcgaaatgcgagcttaagactttataatgagtggtttataatgcgttgcgtgagcagttatagattcaggtgcattaaattaatcttac

SEQ ID NO: 16291 - DNA, 372 bp, Glycine max
tttcttttgtccatgcattcctaaagtttggaacagtgtcctaacaacagaatttctcacttgcaaaacaaaactttcagtaccagaaagctttaacatccagcaacaacaatagtagagagaaatataagtttgatggtctattgaaatgggttttgttctattgtccaaatttccctaatcggtatacaagtagtagagagaaatggaagtttgaaggtctatttaaatggttgtaagttgtaacatttatttagggagaacattaggtttatgaattatggtcttcttcgtcatgcaatgaaacccaatcttgatacacaatagacccaaggaatgaagcctagatttctgctatattatgatttcttt

SEQ ID NO: 16292 - DNA, 390 bp, Glycine max
  unsure at all n locations
nttgaggttctggaataattgattatcaaatgaggtaattgattgtttcgtcacacaaaaagcttataaagtttccagacacaatctaatcgattactaaatgtggtaattgattatctcgagccacaaagtcttccttcttctaaaactggctttataatcaattactaaattgataattgattaattcgatgactttagccaaatttgaaatagaagtgactttagccaaattaagcaacacatacaccaattaaccccttgttcattaagcacaaacataatttaagcacataggcaattaattgaacacgaagtgtgcacagattaacagaatgcatgtgggttaattggtgaagggaaaaccgatatgagagcaccattaaaaat

SEQ ID NO: 16293 - DNA, 379 bp, Glycine max
tatctttggattcagaggaacagatgatcctcccggaatcactgcaagtaaattatcccatcctcctcgaatacctccacagtgcctctctatcaactccttcagtggaatactcatttcctcctcaacagtgcaaggcttgttcacatgccccgacacacaaaacaactttgtcccagcattgttcttcctaccaaaactggcaaaccattcaggcccacgccttagaatggttggagaaacagcaacagtttccacatttgtgacagtggtaggacatccatacaacccagcattggctgggaagggcggcttcaatcttggtttaccttgtttcccttcaagactctccaagagggctgtttcctcaccacaaata

SEQ ID NO: 16294 - DNA, 416 bp, Glycine max
  unsure at all n locations
tgttaaagaacgacgtaatcattaatcactagttgttaattatcactagagttatttatgcattaaagactatagcaacaaaaagaaagtcgtattccccagtcagaaaaaaaatggtatttgctcgagtcatacgatcaagtctcgttacttcagatataaatataaggagaatatccaacaatggtatgaaattatgtcgtataccttttcttcaatatggatttaagcacccagccttctaagaaagtatatagatggtttgctagaagatgaaaggaaaattaaatttgtgtttatgatacaagaaaaacaggctgaatgaaagtttctcaagggatgagaactgaaaaaagaaagatatttcatcttanattatgttctcttaacacaattagttttatgtacattataaa

SEQ ID NO: 16295 - DNA, 378 bp, Glycine max
gtgctttcatctagccaagattatacaaaggtgttacaagagaacctaacggtttctaattatttgggcgatcaaatctatcatgtgttgatagtaattgattagcccatgaatctcctcgggggccgtacacacttcggccatggcttttgctttggctaatagacgcgggaggtcttgacttccattcaaggtcaaggcgaacctatccatccacatagtcgcttcttgatgcaatgcatcaatcaccctccctcttgcttctttttcggcgtacacttgtgcaaaatcctccactagcttttgttcatgggccacagactggttcaactcttccttgtattgccctatgatagctagcatgctttgctccgtggc

SEQ ID NO: 16296 - DNA, 422 bp, Glycine max
  unsure at all n locations
tataagaacaaaattgcctaaatcatttccaaatatgcatgtaaattatgaagcatcaacaagaatcaagccaaggctattgtgcaagcaatcaatggggcaaaacacaccaaaagattatgatgatggatggctcaaattctcacaaaggtaaacttatcactttcaaaactatcatgacatgtagaggaaaaacaaggatttcaaatcacaaaatgtcaagagactnttattttaagaacaattacccattatttgaacatatcctataattcaaagaaaaatatgcaaagttgttcatgcaaacaaaattgacctaaaatattaaactagaaacccaacaaagctaacaaaactaacaaatttaacacaaacaaaactaacaaaactagcaaaaccaaaaccaaagaacacttcccccc

SEQ ID NO: 16297 - DNA, 230 bp, Glycine max
gccgacaagttgggacctcatccaatgtctcacctttgcaaggagctatgctccagcgatttgactaatgaataccctaaccatctcacactaattaatctactatatacgccttctccacaataatctaattaagattatgacatacatcgcattaggtatgagtcttgcatgtactatccctcattccgcactaattgacgacgaccgtggtgagacaaaaatcatga

SEQ ID NO: 16298 - DNA, 505 bp, Glycine max
  unsure at all n locations
caccatactccactcaccgccacactcgggacactccagactacactacaaaaacaacagacagcgttttgatcgatccattgcagngcacctatanaacactcaagctcgagccaataatgccatgttgagggccaaaccggtcttgtatgtcagaacctatgcacttaaatcacagggccgcgacaaggagccaacccacgcaccaatacactcaaccagattaaacgagcctaaacaacgcccaactcacactggacggaagtaacatggaacaatagggggacgaacctaccaagaaacatcatccgggacaagaacaaaataacgacatgtcgcgcaggcacaccgagaacaacattactcaccgtgaccgaagatctctcaccctcgccccaatggacatagtccatccgtatccgcacaacgccgaactttccacagggacgatcatgaagccagaactaatgaaccaagaacaatctagcaagctaaaagaacacgc

SEQ ID NO: 16299 - DNA, 377 bp, Glycine max
  unsure at all n locations
ttcttggcatttccaatggtggaaggaccttanaagactttataatcagcctgatttccacagtatccaccagaatatggtatggaaggttggttgtggggacaaaatcaaattttggcaagattcttggctgagtgaggactgtaatcttcagcagcagaagtataatcaactcttcatgatcagtagacagcaaaatctttccatttctaagatgggaaaactttctcagaacgtatggagctgggagttcaagtggagaaggagattatttgaccatgagtacgcgttggctgttgatttcatggatgaaatttctgatatctctatccagcatcaggttcacgataccatgctttggaaagctgattctagtg

SEQ ID NO: 16300 - DNA, 422 bp, Glycine max
  unsure at all n locations
ttgcagcgtatgccactctactctaaattcttgtttgatatgttaacaaggaagcataaatatattcatcaagaaaacatcatagtgtaaggaaactgcagtgctatgatccaaaagatccttccacccaagcataaagatcttgggagtgtaactattccttgttcaattggagaagtcaatgtgggaaaagctcttattgacctgngagctagtatcaatttgatgccattctccatgtgcagaagattgggagagttggaaataatgcccattcgaatgactttacaactagctgaccgctccattagcaggccatatggagtaattgaagatgtgttggtcagagtaaaacattntatcttcccggcagactttgtggtgatggatatctctgaagatactgacatctttgtaatatt

SEQ ID NO: 16301 - DNA, 462 bp, Glycine max
  unsure at all n locations
cgagtggtgnntttgatgcatgatacatgagcgacttcagctcgtacccgggatactctagattgacctgcatggacggtttccttggattctgcggaaccgatgatcgcaacggggtctctgctccataaatcttccatcctacacgaataccttcacgtcgactaatgtataaacatctctagtggaaaatcctctatactcataacagtgcagagggtcgataaaatatcctcttattccattcgacctgagtccaccaatggcgtattcctatccataaaggatatggaagcatgcaacgagtctttaaatgtgtggacaatgaaccaccgattccagcagtgtgtaagggtgctgaaatctagtctaactagcgttggaagggaaaggcagtttcaaccctgctatagcttgtgaacgatatatacaatactggacggctctacctccccgatacac

SEQ ID NO: 16302 - DNA, 337 bp, Glycine max
gaggaattatctgcttcaggcccttaatccgctggaggaagagctcttacatcccagtttgttttcctacgacccacgggaagacttccgcacatgcagcgctcccagtgaaataaaggcttgcccttctacgatagttacgccggcgattttgtacgaagctcccctgggacgaaattgccctacctttctcattggttaagaccacctcctaatagccccagcgtgtcaaacaacgatattcagtcgtttcgatctaacccccgtccaatatcaaggcggggcgacatgaagatacccttaaacgctttacccaaaatctggcttccatctgacc

SEQ ID NO: 16303 - DNA, 366 bp, Glycine max
ttcttgtaataaaaaacaagtaaataatctttacttagagatgaactaacatcttttgtctgacccaaacgatgagctctatccatcgcctgtagatccaatgttggattccaatcactctcgtaaaatatgactgtgtcagcagctgtcaagttgatacccaatccaccagctcttgtactcagtaagaacacaaaaatatcactcctgaaacagagatataaagaaacaagtcatcttcagtagtctcaccaaagtagacacattaaagcatgacaacacagacattacctgtgctggaagtctctaaccatgtctctgcgatcctgaatagtggatgacccatcaagtctaaaatatctatat

SEQ ID NO: 16304 - DNA, 393 bp, Glycine max
  unsure at all n locations
tgtcaaaaagggaagcaagttagaaactcttttcttagcaagaacattgtttctacttcgaaaccccttgaactacttcacactgatttatttggtccctctagaactatgagtttgggttgtaattactatggcttagttatagtagatgattactcaacgttcacatggactttgtttttgaaaacaaaaaatgaagcttttgatgcttttcgcaaacttgccaaggtgattcaaaatgaaatacgtcttaacattgtttcacttagaagtgatcatgaaggtgaatttcaaaatgagtcttttgaaatattttgtgaagaaaatggaatttaccacaattnttctgccccaagaacaccccaacaaaatggtgttgtggagaggagaaat

SEQ ID NO: 16305 - DNA, 369 bp, Glycine max
ttcttcatacaattaatataaaacctatatcctaatgtcacatcctatcagagcgttgtgtccccgtgtcctctagcatgaggttcttcatagtcatccacctattcatctgctcccccgaacacacgttcaagatcatcacaggatccaaacacaacaacacacagggagtgagttatcacattcctagctaatagagaaacaagacaattaaatatacatattatataaatgagatactacttgcttaaacataactcacgtaatttcatcacgttgtcattcaaaattcactttcaatcatcaatcacattacacaagaatctcacactccaatcaagatataataacacatcaatttcataataa

SEQ ID NO: 16306 - DNA, 410 bp, Glycine max
tatcaatgtggcagttccggggaccattgtctaattggcgatcaatacaaaaaaaatactcaatccatgggaaaggaatgaaaatcacacactttgcctcaactctgctaaagcaattggatgtacagtagtcaacattggcacccaggacttcattgaaggaagggtatgcttgtaggcattcaagtttccacccataaaagcagaattattgtgggcgtgtacactgcagaacaacaaaatttaagattaaatttaatttataaatgaaatcctttgttaagttatgaaataggaatttttttattctaaaatcaaatcctttggtcagaaagttataagaattttttctttttttttttttaatttaggtgtgatactacaaaaaatctggcaaatttgatatttct

SEQ ID NO: 16307 - DNA, 365 bp, Glycine max
  unsure at all n locations
ttcttgtttggtgttttattctcttcttttcttttgttatttcttctctttttttctttttttttgtcttttctttcttttttaattgatcctttttgattttcttcttcttcttttcatttcttttttcttttctttttttttcttaatactttttcttttcttctattttttcattttttttattattttcggatccgcataaaattagggtctgacaaagagaataaaaacataattattctattaattatcataattgtaattcttactcttttcccactttagatgttaattagcatctggtatatatccaccattnttctttacttatttatcatatacggatataggttcataagggg

SEQ ID NO: 16308 - DNA, 380 bp, Glycine max
tcagggatttcaaattctgcctgacaaataataaattatgttgtattgtaagtaaataacaaatttagactattaaagaaaatcaacaaagaaaactcacatacctgaatatcctcccatatcaaatccttctaagcagtagggacttccttccagttgtcatatgtgacgtcgaccttatcatgagcgaaaatccccaaatatgttcttaatttcttcatgtggggactgtcggccttgccggtagcagaatcgacgttgaccgcaggtctttctgccccaggtggtctagtggccaataatcgtaaccgtgttgccttgcgtgtccgcttcaatgtagatggaaacggttatgcgtctgcaggaagaggaggcgagac

SEQ ID NO: 16309 - DNA, 342 bp, Glycine max
ttcgcatgctttcttctagccaaatggacttaccttgaattaattcctttgatagcccttttgagcgttgtttccctttccttgttttgaagctcactacaagccttaaatgaaaaaccatgatatcaccatatccttaaggaattttgtaactttggaattgttttgggaataagtgtgggggtttttgtttcattggataatatgttagttggctatgcttcatgatgtatttttgggccatacttgatgtacattgtatattggctaaatgttggacatgctgaatgaaatgctgtatctcaaatgtttcttgtttcaaaaaagataagaaaagaaaat

SEQ ID NO: 16310 - DNA, 439 bp, Glycine max
gtgacctataaaactcagcttatgatgatgaatcagttgattcagttgttttatgatgactaagatgatgacaaaaagcccaaagaatgatttcaagattcaagagaagaagaattcaagattcaagagaagaaatcaagaagacttcacaagggaagtattgaaaagatttttcaaaaaacaaacatagcacaattttgtttttcaaaagagtttttctcaaaattttcaaagttaccagagtttttactctctagtaatcgattaccagtttcctgtaatcgattaccagtggcaaagtttgatttcaaaagtttttaactgaatttgcaacattccaattgttttttaaatggtgtaatcaattacaatatattggtaatcgattaccattgtatttgaacgttgaaattcaaattcaattgtgaagagtcacatc

SEQ ID NO: 16311 - DNA, 321 bp, Glycine max
tgctcttaaactctatacaagaatgaagttctgataccactcgatagacaggtggcctcagatatctttaagaatgggggttttgaattaagatatcaaagactattctccaattaaaattttaactctcttcttgagttagaaatttacccttaatatgaattactcaaaagataatttagagtaaacttctttatagccaatgatagatgacgatatataaaagaagtttaagggaaaagagaatgccaactcatgtgttatactggttcaggcacaccctatgcgctacgtacagtctccaagcagcccgcttgagat

SEQ ID NO: 16312 - DNA, 386 bp, Glycine max
tgcatccactagaagagaataaacatgtgattagaactttgactgaaaatgttagtcagtttgtcagattgattgtgaaggaatgcattgaccgtatcccggtgagagtgtgatcctaaaattttgagagaaacgactatcatttagtactaatttttgcatgaacctctgaagtatggactgaatgcatgaaattgaggatgatgaaggccatgtttgattgtgatagtcacttagccaaaaagctgaccatgtgcttgaatgattcatccctggcacccagtttgagctgaatgaattattgattgattgaaccttgagcctatacagtgttatctcctactaccttgtgttacgttgtaggagagcatcatccacaggaagct

SEQ ID NO: 16313 - DNA, 369 bp, Glycine max
tgcttgtaaagcaggttaggcgcacgcctaattatttttaatttttataaagacaaatgttataagaagtgaggctgaattatgattctagaagaagaaaaattaaagcctttttttgaaaaaaaaaagttaacgtttaaagaaaaactttgtaagaaaaataataaatttttacaaaaacttgtttagacaatgaaaatagatttcgcagaacataaagtattttcaagatgaaatgaaattcaaacccctatattaatttaaagcaaaagataaatacaattaagacatataagatataaagaattatactagtttatctttaccactaaggctatgtttaagttttgattaatcactaagtttcac

SEQ ID NO: 16314 - DNA, 405 bp, Glycine max
tggtgccaaatgtcggcatgaagtcactcgtgatttatgttctataagagattgtgtttacagttccttgaacctgattgttaattttacattgaagaatatgtggggatttaaaaataataacacttgtttaaagcttattgagaaggtgaattcaatatcaaaatattagcacatttgatcttctgcaacacttatagactagagattagagattaattcacatttcgcaatcatggttagcaactcttggacagcttgtggattgatagaacaaaagtaatgtaaaggcaaaaagaacttgactagaaacatatgtgatgaactaaggtctacgctaatactggcaaaaatgtcactgttttttttttttaaataatgcttttataaccattctaaaaagct

SEQ ID NO: 16315 - DNA, 384 bp, Glycine max
tgctttgagccaaaatcctgactcaccataaaccttgacccagggtgagaatgccaatccttaccctcggaagcaaaaaaagaatagaggggaaatttccaatcaaagaaaaagagaaggaaaatttccaatgaaagcaaaaaagaaatgaaggaaaattccccaatcaaagagtgggagaaagcaaaaaaaggaaaagaaggaaaattccccaatcaaagagtgggagaaagcaaaaagaaaagaaaggaaaattcccaatcaaagaatgggagaaagtaaaaaaggaagaagaagaaggaaagaaagctcctgatcaaggatcgaaagaaaccagaagaaatgtgcagagaggtctttggaccagacaatatctgaaccgta

SEQ ID NO: 16316 - DNA, 423 bp, Glycine max
tcaagtgatacagacagtgaaatcacttttgatgtgcttgccacatcctatagagaactatgcatcaaaagtgagaagattcttcagcaagaagcacaactgaagaaggtcattgcaaatctggaggctgagaaggaggcacatgaagaggaaatctctgaacttaaaggagaaattggctttctgaattctaaactggaaaatatgacaaagtcaataaagatgctgaataaaggctcagatgtgcttgatgaggtgctacagcttgggaagaatgttggaaaccagagaggacttggatttaatcataagtctgctggcagaacaaccatgacagaatttgttcctgccaaaaacagcactggagccacgatgtcacaacatcggtctcgacatcatggaacgcagcagaaaaggagcaaa

SEQ ID NO: 16317 - DNA, 165 bp, Glycine max
  unsure at all n locations
agagctttagtttgaatgcacacaatctgaccaaggcgcagaactttcttgagcacactttctatgacaaanaggagattcaactccatttgcttagatctcaatgacaggatacgagtcaaggagactatgctaagattgtcacggtaaacaaatggggggggg

SEQ ID NO: 16318 - DNA, 417 bp, Glycine max
cttctcttctgttcactggatcgggttccaggatttgattggtaggttcagtaagggttgtgttgatctgcaccaagatgcttaatttgcgttgaaaaattcattcatttgcgagactcggcatcggaaatgaaccagttagttgaaagttcaacgactactcaaagggtatctagagttcaagctccactggtaataagtcctttccctccaatttttttatctgcatattagttttcttcttttgaatagtataatttttctccatttttcagttgcagctttcttttctttttatttttttgtgtgtggataaaaggttcgatttgccagcgctgtgcttgagggtttggttaacttgagttcctatcattctctgcttgtgtttggaagagaggcagagaactaagttgtaac

SEQ ID NO: 16319 - DNA, 372 bp, Glycine max
tagcttatatgatatttcatgatcaagggaatgctctttgattagccggtgtgtgtgactgaaaatcttgatgaggatacctcatcgccaaactatgtgaaagctggaagatgggaaacaacggctgtatgtgtcgggataaacatgacacccacttgtcttagccctattttagtttaagttgatcgagcacttgagtatacgtcgaaattattatactgcaaaactacattaatgcatagaccaagtgaataccgtacgtgccattcgcatattctttggcatatattatccattctttaattaaacaaatgccgaattaactaatcacaatatcaaactgatgcgcctagaagaatatatattacttac

SEQ ID NO: 16320 - DNA, 423 bp, Glycine max
gcttcttcacaagtacttgctggagaaaaagataagtttattatttgaaatatgtttcttctacctaacacattggtaaggatgtttaagccgtatacaattgctggcaatacatacattatgaaagaaaatcaatcaaatgaccaaactgcttggcaatgacacataaatgtatcacacatctattgtgctgtattcaagaaaaatcaagcattctaaggccatatgatatcttataaactcttctatcactctactgatgatgatgattcgagaaagcgctttagttctttgtagatgactgaaggggtacagaatcaccttcatttgtgctgtcacggtctttcccaaaaatcttagatgcattcaatatctgtttcaatcaacatataatctatcacttacaaacagtggaacatcata

SEQ ID NO: 16321 - DNA, 380 bp, Glycine max
ttcttgcaagatggaagcaaagaaatctatcaatggggggtagaataaccctcattaattcagtcttaacagccttacccatctatttgctgtccttcttcaagatacctaaacatgtggtgcaaaagattgtatctattcaaaggaatttcttatggggaagtcaccaagactccaacaagatcccttggggaggcgccatttgcacatgaatcactcttgaggcaaaaatcaaggatcaaatggctcagggaaggtgacagtaacacatgcttctttcataaatccataaattttagaagacattataatgcaattcaaggaatattcattgaaagtatatgggttcagcaaccaaaattggttaaggaagaagctgt

SEQ ID NO: 16322 - DNA, 418 bp, Glycine max
tgttgacacgcggagatttacgtcatcttccgcgcacactagatctgtcatactgacatttgagtcacgctgacgggcggaaatacccgagtggttatccgtataaacattcttttgctgtctgtaagacaaaaagcctgatagcacgcagagactaacgtcgtcttctgcatccttcgtcaatcgcggccgacaagcccgttggcacgcggagatttacgtcatcttccgcgctcacaagatctgtcatactgacatttgagtcacgctgacggacggaaatacccgagtggttatccgtataaacattctttttgctatctgtaagatgaaaagcctgatagcatgcagagactgacatcgtcttctgcaccctttgttcccccggggacaacaagtcagttgcatgcagagatat

SEQ ID NO: 16323 - DNA, 368 bp, Glycine max
gagctttgacgcattctctctgtctctctatcccttctctcaatttacaccatgatgtataatagaagctatcaatatttgcttcttcgttttcttttcaactatattttcgtaggtggaaattatattgaaatcagaacagcatgcactaaacaaagaattgtacacacacaatattgaagttgctttatccaaaccaaatatttcaaaaataagaagaatttagtcgaaaataattaatgagaaactactctatgcagtgagagtattacactgcaagtcccagatagagggtatgactactacgcgtgctagctttaagagctatagctactatgatttctgattgatgaacagtgtcatgcatt

SEQ ID NO: 16324 - DNA, 428 bp, Glycine max
tgagatacaatattgtactaagaaagtatgaatcttacctattaaattaacaaaggctgctattaggtatctcatctcttggctatttcaagtagttatgcgtaaagacaataacaagaagaatcaagctaagaaaatcgtcaatgtcaactcataattaattaaaacattaacaaaacaattcctacataagtttactaattcaatttataaatatattgcattttgttaaagacttatcaatcctcaatacttattcctgtctcgattataagtaaaaaaggacatatgtcacatttattaaggaaattagttatcttcattaaagtgtgcgagtttcaattaataaatgagttttttccctaaattatctttcatttaaacttgatatcaagcataaaaatggttttggtcatactaaatgaata

SEQ ID NO: 16325 - DNA, 388 bp, Glycine max
atgatcgttgtgtgcatgcattcttgtgggatttggtgatagtgattgtgccggagatgtagatgatataataagtactaccggatttgtattttttatgggtgattgtgtctttacatggagttctaagaggcaaggcattgtgacactttctacttgtgaagccaagtatgtagctacaacttcttgcacatgtcatgccagttggctaagaagattgctggaggaaattcagttgttgcacaaggagagcacaaagatctatgttgatcatagatctgcacaagagcttgccaggagtccagtgttgcatgaacgaactaagcatatatatacaaagtatcatttcattgtagagtgcattaccaagacagaagattaattgact

SEQ ID NO: 16326 - DNA, 405 bp, Glycine max
gttcgattcattctatgtacccgtagtggttcactttgtgtttcgtgcattactattctcgttttgtttactttttataccccctgttgacgtgcttaagccattttacttaagtcatttctcgcttaacttagaaataaaatcaatttccaccgaacgtttgaattgtattatccgttaacttcgggtaaaataaattccgaccgttcggtcgtgccgtaaccacgttggaaatcaaaaaagaggtaaaaataatataataatcaaaaagacatcttttagtaaaataaagcggaaaatcaatcggacgttttctctttgggatttctcattcttaatcgaattgattaataactaaagtgaaattaaggctaaaatcaactcgcctagtcaagctcggccaca

SEQ ID NO: 16327 - DNA, 211 bp, Glycine max
ttactcgcccggatcttcatcgaacgcggctgcttgctgatcggacctcagtgtcgaaagttatgaccatttgaatttctctagagcatccggtggacaaatttgagcgtgtcgacatattatgcaccctgagcaaaaatatctgtgagaagcgatgacccattgactttatcgagagctttcgatggttaagattgagcgtcttgaatat

SEQ ID NO: 16328 - DNA, 404 bp, Glycine max
tatactatatcgagacgctcgaatttaattatcttatatctcttgagaaattcaaatggtcgtaactttttacacggatgtccgattcgggcgcataatatgtcgagatgctcgaaattaaacaacgaaagctcttgagaaattcaaatggtcataacttttgacacggatgtcctattcaggcaaatcacatatcgagacgctcaaaattgaacaacggaagctcctgagaaattcaaatgcttataacatatagtgacactcgaaatgtccgattcatgcttataatatatcgatacgctcgaaatataacatgtaaagctctcgcgaaatctaaatggtcataacttttcacacggatgtacgattctgacgcataatatgtcgagaggctcggaattgaa

SEQ ID NO: 16329 - DNA, 316 bp, Glycine max
ttcctccagaaacaacagccttacggacgaacgaaccggaaggcccacctgggccagaatgccatatgcaccccccgctatacaaagtgcaccccctactaaatttctgatagagaagtttccgtaacatcaccaaaatctacgaaggacgcaccgatacttaatgacctaccgcaggggcacaaatccatgcggattaggcatatacactgtgacagctacccaagcaattacggaaactcacggattgcacaaaaccacctattgccgactaccgacaaattactgaatgtcacgggtcgcgcaagcctgcttg

SEQ ID NO: 16330 - DNA, 559 bp, Glycine max
  unsure at all n locations
cacacacacgcnacacccacacaatgcgaaataacaggacagtcactacgcacncgcgacaacatccacacncaacacaacgacggtnnnntttgattacatngcatcgccaancacgtgacacaancnacaaccaggcgagagagagccaccgaagagagagccaactttgactacacatgctagcaacgctactaggacactgcagaccggaagaatccccatatcggagaaccataaacgcgggctcccatgactacctacaattacgaagtgtcgaccccaaacgacacaaagcgggaaaggctgacttactgcaacaccgctgaacagcccatgaaaacctcaagacctccatatatatcatagaccccgaatacggacatcgcatccaatgctacgcacagacaaggcgaaggcacatcacaggtatgacactgaaacatactagcacagacgaagcaacaaaaaaggcagcccgtcagacaaacgaacagcataatatgagacctggaacaagatggacacctatacaaacaagcgcgctacatacttctcg

SEQ ID NO: 16331 - DNA, 376 bp, Glycine max
ttttcatgctatctttgccttgcaaatctgttgaaattggacggaaggaacgatcaatctacccttgaaagagttctgactagatgacatgatccatatgcgttttcaccatctcatgaagaacacaaactatttttcttactcattatattcttaatgtaaactgagcctcgagctcattagcatatttttaatgcgtttttctttgcactttttaaatctccattcgtacgttaatgattaattgttctaaagaccacttccacttcactataaggctcttacacccatgggcgtgattcgaccctatctcactcgcccatcacttcctgtctctataatttttttctttacccaaaatgcgtcgagatataaa

SEQ ID NO: 16332 - DNA, 367 bp, Glycine max
tgacactactcaatactctagctagcatttgcataatctgctgggcggccctctacatttatcagagttcttctacctgaactcagccatttgtgaaaattatccctaattcaccatctcagaactataatatagtttgcggaactcgtggaactcagaagatgctcaactacaatcctgtgttattatactctaatggaaagggagaaacctacaaagcgtgttcgcgacgatgatatctgttaatctctttggatatatcccgaatctgagagagcgtaataagattcccttggaggacccatttctgaagaacgttggtggcgcttctcttgggagcctaagcctgaagattctgctccttacg

SEQ ID NO: 16333 - DNA, 370 bp, Glycine max
tcttgtcaaggcccccagccgggacaagtgttgtccgggctgcttctatcaagttgtctaggatggacatgctttttgtattacaagcaaagtcagacgtgtcaagtgaagggagtccctaattttgacaactctaccattttctaacttttggagaatgcattaaaggaaaatgttctcgtttttccttttgctacaggcgaatgttgcgcacgggcgttacttttgcatacgtgtcactcgtggaatgggcacgtactggagacacggtacgtgggtgagtggagctccatagtggtgcaaaatttttgggcatcatttcagctcctgccagttactgaagggttgcacctccactctaaatggagtg

SEQ ID NO: 16334 - DNA, 425 bp, Glycine max
ttgtaagcacaaatcagaagtaggtcgctctaacttagagggctgaagctgaaacacaaatttctcactcaaagatcttgcatatagtggttgttcagtgacatctaagggttttttaaaacaatttttcaaataagcacttggtgtaaaatgatgttagaaaaagataatatgaatacttaataaaataatatggagagaagtataacaacttggattatatcggttcgctcaacttgacctacgtctagttctcctttactcactggtaaagggttccactaatcaataactaattacatataagtattctaatccgcaactcctgaatttacaagtattcttaacaccacttatagaatcttcctagactctccctgaatctaagaacccaagtattttgaacactaagtcactcctgtcac

SEQ ID NO: 16335 - DNA, 505 bp, Glycine max
  unsure at all n locations
catcatgcactccgagcacctcgccatcgttaacctatgtngcatcttcctacanaaannacaaagcaggggnntttgagcgtgtgatggagcgttgaannncccnnggttaaagggnccccagcgtggccccacnacgggtggcgncttcttattccacacggacacacatcacaaaataaaaccctctcatatttctcccacatctcttgccaaaatataataaattcacccccccataatccccaaaaaaaatccggggacacagcggcgctctggggaaacaggggggggggactacaaagagtcgctgtccttggcgacatgggtgctctacggacgcacaaggggggggcgccgcgagacgtacccttcgtgggggtcctcccagtgtctttcattggcgtgcgcgccggggcgggcggttatactcgcctctgaagcgcacggtggcggtcttatcggtgggcggggcgcccccaatgaaacgagaggtatgtttgcg

SEQ ID NO: 16336 - DNA, 409 bp, Glycine max
tatcggattatggggcacttgtcttatgtggtactatggggcgatcagcgatggcgcaagtcaactctcccacttccacaagtcaaacataaacacaccatccccagttgcccacctttaaattgagctcacgcactcccacatagcccttatcctcgttcctctcatcaccgggtccccatcaacacctccaagctttcacaatatacaaacaattcaatttcatttgtcatgaaactaccctaaaccaagaaaatagagtggaggcaaaaaactctgcacaaaactcattcaaattccacagttttccctactcacataccccaataacattctcttcgttccgattcggtaaccatttgatcgccttgaaaattttactggaggtgcctagtacagatatctacat

SEQ ID NO: 16337 - DNA, 367 bp, Glycine max
ttgctttgtgtaatcgattacacttatttggtaatcgattaccagtgactatttctgaataaatcaaaagatgcaactcttcaaaaaggttttgactttttcaaattggttttaagtttttctaaaagttataactcttctaaatggtcttcttgaccagacatgaagagtctataaaagaaaggctttgttttgcattttcaatttattcattcattcaatcttgaatacttttccaatcaatctcttacagtcctttacaagccttgaatctctttgaacttcttcttcttcttcttctttgtaccaaaatctttctaaagttttctagttttctaaaccttgaaaacttgtgctattcatcttt

SEQ ID NO: 16338 - DNA, 407 bp, Glycine max
  unsure at all n locations
tattagagttttaacacactctttttaacacactctccactgttggtcctcaattaattgagaattataaaatcagaataatgactcatcatatgagtagtgggacctgccaaatttgtgatttttaagaaatttgagccaacaaaaaaaagtgttcaagagaatatgttagagacagtgttgctaccatttctctgtttaggaatggtgtttgtagttattagtgaaaatagaaatagaaaatattttccttatgtcaaacaggcttctgcattactatttttagtttttacaacattatgatagatcattatatattttttctttctctaaaacaaatgatttatttattgtcttgnggtggtgtatataaaaactgatcaacacattntacttttctttttttg

SEQ ID NO: 16339 - DNA, 301 bp, Glycine max
gagcttgcccaaaacccacaagttttaagtttcaataaattacatattacattacattttttaagaactcttcataataatctatatttacaaccctttctaatgcaccttgaaaaatactcaggaacaaagatatttttaatgaagatattattattggaataaaaaaacatgctagataaacacaatcggtatacacataagttcagaatggcaagggacaaagtataatcttcacctgtttgtgacctcaaactaaaactcataagtgataggaaatcagatggaaaatatataactt

SEQ ID NO: 16340 - DNA, 421 bp, Glycine max
tcctcaattgtttagcttgactccatcttctggttaagctggaaatgtccaaaggcggcacaataattctcctcaaaccagccaaacagagaacctctctgataggaaatcactggatcctccttcaaataacgaagtagcaagttcagcagaaggtatgttttgtcatcttaggccttttgtctaaatgttttgttagagctataaatcatatttgagtctccacccaatagcttatgcatttgggagacttggtcgttgacatggtatcaaagcctctctgaccaatggattaggatttcaatcaatccttgcctccatgatcccccttcttcataattcaattaagcttcaatacaaaggaaagtgagcttgtgcaccatccatgtttaaccttaaaggactcttgctgttatgttaa

SEQ ID NO: 16341 - DNA, 148 bp, Glycine max
  unsure at all n locations
ctcgtacccgagatcctctaatcgacctgctgcatctgttttacatcttatntanttangacccactatcctagaacatacatatctctatgcccctaacctacggaattaaaaataaacttacatgctgattgtgactgaatttgtg

SEQ ID NO: 16342 - DNA, 178 bp, Glycine max
tatggatggaatacttacttggcggtgacgaactttagtgtcgaaaccaatcaccaaatgcgagaaatgatgaccctaaggctggaaactcgttaatcgcgaggatatggctcttgcaacgtggaaaagacgatgctgaatgacaaaacttcccgacttgcgacatctatatatattg

SEQ ID NO: 16343 - DNA, 376 bp, Glycine max
ttcttgcctttaagttgaccaaatctaataccaccgacaaccgtgtgaagctagtgcacctcgcatacaaaggcttcttagaatcaatttgtaattgcttatacaaaggtgcatgtgcttgccaaaaatcgtcttgtccaagatcgtgtatcatgtcttttatatgatttgggatgtcttcattaaccgcgttagtatgagagcctattgttatatatgttgattcaccatgcgaaatccattttgtgaaattcagaattatcccctcacatataagatgtgatcttatgtcattgagtgactgtcgtctcccattcccacatttgacacatggacaaaaatatttttcacccataagtgatgcatttcgttcagc

SEQ ID NO: 16344 - DNA, 419 bp, Glycine max
taaagtatgcccgagtcattcatccctatgagatgttgtttaagtattgtcgatcagaattgccattccttggattatagggttgaaccaagctcatgcttttacaaaaaggttcatcaagtcaagttgaaatatggaagtaatcgtcttgcaaaattggggcaaaagatgagtcgagtcacatcactgcttcgtctactgccaaacatatttaggattattgatgtccttgttacttccagtttcaccttgacaaagatgtcatggaccatgttgaaaatctaaattgattcaaccccatatcctgtgtaaaaattcgcaatacttcaactgtacaccattcgcatacatacatgcttttcattgcttgcattgctcattgcattctttccttgaaaaataaaataaaataaataatg

SEQ ID NO: 16345 - DNA, 380 bp, Glycine max
ttcttagggatggaatacttacttgttggtgatgaacaaaagcgcggaacggaatcaaaaaatgcgaaaagtgatgaccctaagactgcaaactcgtaaatcccgtgggtatggcttttgaaagggggaaaagaagtttttgaatgaaaaaaaacgtcccccctttcgtcacttttatattttggtgcagaggtggctcgcccaggcgagctaacctgcactttttttttttttttttttttttttgaggggaacatttaaacatgcccctcccttctcatggattagcatcttgcctaacttgaacttacttaggttagaattaggcgttgattacttattttattattgctatcatttttttcaaatagtaaaagaaa

SEQ ID NO: 16346 - DNA, 422 bp, Glycine max
  unsure at all n locations
tggagaggatgcttcaatggaggataagaaagagtgagagttagagagaggggggagcacgaaattgaaggaagaaaaagggagagaagttgaactttgagttgtgtctcacaagactctcattcatcaaagttacaacaagtgttactcatgcttgtatttataaactaggtagcttccttgagaagttttctagagaaaactttcttgagaagcttctttgagaaaacttccttgagatgctagagcttagctacacacacccctctcataactaagctcacctccttgagaagcttccttaagaagattcctaaagaagctagagcttagctacacatacctctctaatagctaagctcacctccttgagatgagacgctagagcttagctacacacccnctataatagttaggctcac

SEQ ID NO: 16347 - DNA, 375 bp, Glycine max
  unsure at all n locations
ttgttgcgagcgcnnacctcgtccttcaggagcatgcctttgacccatgatgattcctttcacctcttcacgagcttgagctcactattgctgccctataaagcccctcaaaactttgctttggtcgagttcttcctttcgggccttcacggtttctcgttccaaggcttcatcggtggccatatagacgtgccttagttcatcatactcttttcagactttgatggctatgaacttgaacttctctttgactacccgggctctttcaagctctgcctttacggcttatacctcatcactatcttgtgaagctataagctcatcatctctcatagtctgtagatttgggagccaatccaatacttgtgtgcggac

SEQ ID NO: 16348 - DNA, 408 bp, Glycine max
  unsure at all n locations
ntgagccaaaatcctgactcaccataaaccttattctctgaagcagaatttataaaaagaaggaaaggatattcccaatcatagagaaagcataaaaggaaggattggatattcccaatcaaagagtgggagaaagagaaaaaagaataagaaaggaaattcccaatcaaagagtgggagaatgaaataagaaaagaaagaaatttcccaaccaaagaatgggagaaagtaaaaaagaagctcctagtcaaagaaaccagaagaaatgtgcagagaggtctttggaccagacaatatctgaacagtacagaattgtcaccaaatgaacataaaaagaaggaaaggaaaccacgacctataatggtcttctcccttngattaccaaccaaaatcccgtgcgctagcgac

SEQ ID NO: 16349 - DNA, 201 bp, Glycine max
tcaaatatttgaaggtctacctagtacacttgaattattatcttttttcttaagctcatttacctctgcctggtagtggctgggattgagtatgcttatgtgacacggctacacagattgcgaagttaatatatggatttgggctgcagatgaatgatttcactgataagccaatgataaaggttctgtggagatgtaact

SEQ ID NO: 16350 - DNA, 420 bp, Glycine max
  unsure at all n locations
tcccagatccgatcatggaaggacttggttactgttcttattaggcagtaccagtacaatacggacatggctctcgatcggaaccagcttcggggtatgactaaacgagagcatgagtccattaaggaatatgcccagagatggagagatctcgcagcccaagttgtatcgcccacgcagtcaccaccgccccaacatggatgaaagcaccccaaaatatccaaagctcataccagcccaatcccccaaattttttaatccgagccgagaattccctcccgactcaagtaaaaggaccacccgcagcagaaagagcgccagcccgacgcacagctccagccgcaccccggctagttaataatacagcccccggcgtgacctatanatatgcacagcaaccgaaagacaacttcccttcta

SEQ ID NO: 16351 - DNA, 435 bp, Glycine max
  unsure at all n locations
gcagatcnnnttgaagctttgattcattcgactaccannggcgaanncaactcgtactcgggatcctgttgagtgatccggatgatgcttttttatgtcatgctttaccgaatggattccttgagcctcactccatacacaatgcacttgatatgcgtgctgaatgtcagtgttacattgaaacatgggtgaaggaatcccaaagagaagtctacctaggagcttacttgaatccataaggtcatttattgcaatgggtgtacgaaaaataatgtgaccttatgaaccttaatattgcccattatagggcccatggcacctggtttgcctatgtcctaagaaggaatgttgctaaattgttcgcccctaagaaccggatttcaattaacttcactacaagttagtttaatttcactaataaggatggaagttggn

SEQ ID NO: 16352 - DNA, 365 bp, Glycine max
tggacactttcaatatgattgtcctacgttgtattagaaaccattttatgctgagatggaggataaagaggaacaagaggatgagctcttgttaataaccttcatagattgcatacaagggaagaaggatgagtggtttctagactcgggatgcggcaaccacatgagtagtaacaaggagtggttctcagaattggatgagaactttcggcacaatgtaaggcttggtaatgatactcacatatctgtgaaggggaaaggtagtgtttggatggttgtgaatgagattatacatgtaatcacacatgtatattatgttcttgaactcaagaataattcatcgagtatatgactgcttcaagaaa

SEQ ID NO: 16353 - DNA, 354 bp, Glycine max
ttcttctatagaagggtcggtcctaatttctctacaattgcatcacctctcaatgagctggtgaagaagaatgtggcatttacctggggtgaaaaacaagagcaagcctttgcttttctcaaagaaaagcttactaaggcacttgttctagctcttcctgacttttctaaaacttttgagctagaatgcgatacctctagagtgggagttggagctgtattgttacaaggtgggcaccctattgcttattttagtgaaaaacttcatagtgccaccctcaactaccccacctatgataaagagctttatgccttaataagagccctccaaacttgggaatatgaccttgtttcc

SEQ ID NO: 16354 - DNA, 413 bp, Glycine max
tccactatactacaaattgtagaatcatattatgtatccattctctggtgctcgataagaacatttatactcaccaacatacaattctccggccataaaaatcttaaggggaaaatatatatcagttatattagcactgcccaagttgtcagtatggtattcccttagcatgcataagtccccgaggactccaacaataaattttgatccagtccctaaaacatggtgctccctaaatgggaaaccaaaggggtgttcagcatttcattagcaaataattcagcccatttaaaataaagaaaaggaaataaaatctaagaaacaacagaaaacgaggccagtgtatgagatataaatgcagaataaaggtggcatcatccaatatgattaagatgagccatatggattaactg

SEQ ID NO: 16355 - DNA, 354 bp, Glycine max
ttctttaaatgtgtctaaatgaccataacaattgataagatgtcgctctaaattcttaaccatttggactcatcactaactattcaattgccttaagtgactaagtgaaaaaaacttagccaaagaggacatcgctctcatattctacttcaaccagaccaataattaacactctaacttgactggacaatagcgaagacagagttgaggactttaaattattttttttatatataaaactgatacaactagcttcaaagcttgagagacttatgtactactcgaacttgagaagcctttgtactctgtgatcgaccaagccggcaactcacatttaaagaatctagtggataa

SEQ ID NO: 16356 - DNA, 418 bp, Glycine max
tatgctacaaacatttataatagaccccctcagcttataaaccaataacaacagaataattatgatctttcaagcaacagatacaatccagattggaggaatcatccaaatctgagatggacaagtcctccacaacaacaacagcctgtccctcccttacaaaatgttgctggtccaagcaagccatatgttcctcctccaatgcaacagcagcagcagcagtcacaattgttagtgcttagcactactgagtttaaaaaggttggctaagattttgttaaaacataagcacttagacaatgaaggaaagctggagttgctgcacatgatgaccaacgctatgtcaaggaataagatcgggctgcataatgcacaaggcaagataaagtgtcaagtgatgaattgaagttgaacgatc

SEQ ID NO: 16357 - DNA, 384 bp, Glycine max
  unsure at all n locations
atgcggttgcatgctttctntgaaagcggaactcgaaaaaacaagagtgatctacgtgaagctaatgacggcattcactacagtcatgatagattgtgatgagctgagaggtcaacatgactacggttgaatcattatagcgggaaacaaaaagggcccgaaaggaagaatagagcaggaacaaattccgagggaccgagagggaccagtcaaggatggaaagcatggtgttagaggataagttgaatgcttgtcaaaggtcgaagagaagcttgatggaacggttgagcacaacaaaagaaaatatgttgacaattattgatcaatataaggagaaggtgaacttagctactagtcatgggtagaggctagaggatgaacatg

SEQ ID NO: 16358 - DNA, 418 bp, Glycine max
tttccctcactctcacgttgcttttttcttcctttctcctccaccattgaagcctccatcaaagctccaaactttactcaccatttctactccaaatcgcaaaaggaagccattttcggagtcgtgaagcgcatctcaacgttgtgggacttcaaatttcaggtttgggtagacttcttctcacatgattttcatgggtattgggtgtttgggagatatgatgggtagttttactaggtttatgccttatggtagttatttgtgaaggaatttgttgaaagcatgctaaaattatcatgtttgatgtgagtcaaatttacccattctgttttaggggtttatgatgatgctttgtgatggttgtgtgctgaaattgatgatagaaaactgatagagatgaagggtagagctaaccgag

SEQ ID NO: 16359 - DNA, 463 bp, Glycine max
  unsure at all n locations
ggagagacncgtggancctttgaatgcatgcattgccaacgcaagtacatctagttcccagcgtcgtatcatacatcaggctgatgcattcttatttgatgctncagtggatctaaggggcttacgttacataatacgccacccagaccacaatacaagctgaaagtgtctactctgttgcacttggtcagaaagaatcctattgataggatctcctagtacctaacgagcaacaatcggcacactcaatcgtgacgtgtctcctaatattatatatccccctctttaccgcatttgccttacaactatgtgccattgaaacctgacatgactcattacaatcaatgtgatagtagtctatccatgtgctgtccatttgaacacctcaaagcatatctaacactgctcatatacctgcagaatgctcatatcgtttcctcaatacaggactgaaccatcaccg

SEQ ID NO: 16360 - DNA, 408 bp, Glycine max
tgtgcctcttcacgtctgtttatgaatgtagcatatatgatccaaagacccttaggtgctttgctgatggcttcttcccattccaagcttcaattggagtcttgtcttttacagactcaattggacatctgccgagtatgtaaacagcagtgtagactgcttcagcccagaatgtgttaggtagtcccttttacttgagcatcaatctagccgtctgcataactgtgcgattctttctctcggacactccattttgctgaggagaatatgcgactgtacattgtctctcaatgccttcatcctcacagaatctttcatactcgtgagaggtgtactctttggcgcgatcacttcataatacttttatccgttttccactttgattttcaacaaggaccttgaactttt

SEQ ID NO: 16361 - DNA, 364 bp, Glycine max
tttcttcaacatcagaccacttccagggtgctggaactacttcacatggacttgatggggcctatgcaagttgaaagccttggaggaaagaggtatgcctatgttgttgtggatgatttctccagatttacctgggtcaactttatcagagagaaatcagacacctttgaagtattcaaagagttgagtctaagacttcaaagagaaaaagactgtgtcatcaagagaattaggagtgaccatggcagagagtttgaaaacagcaagtttactgaattctgcacatctgaaggcatcactcatgagttctctgcagccattacaccacaacaaaatggcatagttgaaaggaaaaacatgactt

SEQ ID NO: 16362 - DNA, 402 bp, Glycine max
ttccgctcggatgtccgattcatgtgtatcacatattgagacactcgaaattgatcaatggaagctctcgagatattcaaatggtcataacttttaacaaggtggtctgattcaggcgcataaaataacgagacgtttgtaattgaacaacggaagctcgagagaaattcaaatggtcataacttttcacacggaggtccgactcaggcgcgtaatatatcgagatgttcgtaattgaacaacggaagctctcgagaaattcaaatggtcaaaacttttcactcggatgtccaattcaggcacatcacatatctagacgttcgcaatggaacaacggaagctcttgagatattcaaatggtcataactcttcactcgaatgttcgattcaggtgtatcacac

SEQ ID NO: 16363 - DNA, 378 bp, Glycine max
acgttcttaacaaatggcatgcgaagtgggtggaattcctagagcaattcccttatgttatcaaacataaaaaaggaaaaggtaatattgtagccgatgctctttctcggcgtcatgcattactttctatgcttgaaacaaaatcgattggacttgaatgtttgaaaagcatgtatgaaaatgatgaaacttttggagaaattcttaaaaattgtgaaaacttttcagaaaatggtttctttagacatgaaggctttcttttcaaagaaaacaaattgtgtgtgcctaaatgttctactagaaatctgcttatttgagaagcacatgaacgaggtttaatggggcatttttgggtccaaaatactctagatacattac

SEQ ID NO: 16364 - DNA, 280 bp, Glycine max
tcattgcctaacaagccaacttacaacagcaagcttcaagagactcagcataaggatgcacagaccaaagttgcgtatgtaaaaaaattgtatgaccaagtgaaggtgcaaattgcaaagaagaatgaaagctatgccaagcaagcccaaaagaaaaggaaggaagtggtacttgaacccggtgatgatcttggacatttgaggacaaatgttttccaagaaggagggaatgatgagaatcatgaaacaggccatatacagtctaaaggcccaagtggag

SEQ ID NO: 16365 - DNA, 379 bp, Glycine max
ggtgcttaagcttcttcaactgcacaaggctcttaatgtttgaagagtatccttgtggaaccttcacccgacgaagacactgacaaaaacttatcttctcctttttggacaaggtatggcaagctaggggcaagtaaattttcttcccattagaccttggatgcaactgtgatcgtatgcccatatcagctagatcttgacaggtattgaagccatccttcatcttgccttgaatgttaaggagagtcccaatcacactatcacaaacatttttctccacatgcataacatcaatacaatgtctaacatcaagatcagatcagtacgagagatcaaagaatatggacctcttcttccatatgcaactcttacttttatc

SEQ ID NO: 16366 - DNA, 409 bp, Glycine max
  unsure at all n locations
ctgacatgagtcatcaaaagactataaatatgtgaccatggaatggaatttaagatgatatccatcatctatctttcaatcttctctcacacatcattcagatatctttcaactctttctacaaaaggntctgatgctttttctttgcatctttctaaaagttttgatcaaaactttctcttccaataaatattgttcagaaacttgtgctattcatcgttttcattctcttctccctttgccaaaagaacaaaggactaatcgcctgagaatttttctggatcgttcctttcccttaagcaaaagatttcaaaggactagccatctgagatatcttttggttccccttacaaagattcaaaggactaaccgcctgagaattctttgtccaacacattggagggtatat

SEQ ID NO: 16367 - DNA, 373 bp, Glycine max
tatcttttcatttggttgctctgctacagtccccaagcattagagagaaagcgaaggaatggaagcctcaatttcattgtctccatgtaaggggtatttctctctctacaggcattcattagcaaatcccaatggtatgaacctacgaaattgagtaccataaacgatttctgagtctcaaaataatccaacggttaacgagtttaacattgaagtgttactaagatggatttgggtatatgccggaaagagattggattattggagaggaagagagaacacatttaggaggaagagagcataagaacatatcataagtgtaataattgatcgaatatttatctatttataggtcgggtactctgagcttatt

SEQ ID NO: 16368 - DNA, 423 bp, Glycine max
  unsure at all n locations
ntagtcaaacaaaataatccagatatgtcaaagaattgngtgttgaaaaagcacaacaagactttntgtgattagtttaaagatacaatctttgtagatgagaatgcttcaaaaacattaagaaagctagcagatgggcctaaaagaaatgttataacccgacaaggatacaacataaacaagtattcattttacacaaaagcacaagatgacaaaagtacaatgcagaacaacggggtcaccctaagggctgaatctcaacacttcgcaacttttgttttgtaaattacagtgtagtttacaaaagcaaaggtgaaaggaaagatattgagctggtagaggaggaagagccatagattggtgctgattgttctggagcaacctctaataaatctgagatttataaggaggaagcacataata

SEQ ID NO: 16369 - DNA, 388 bp, Glycine max
tggagtgcattcttgctctagaacacaatgtttgcttacaggcaatggaagaaggtcaagaggttctgaaagtaagaaccaaaacataagatcgcccagtgaggtaaaattgtcaagctaatgacgttaaagaagcgcttcctgggaggcaacccagttttaatttctgtagtttttgttttcatgcattagatcattgggaacttgctgcataatctgtacataggagtatattagcctatctttgaatgttaaacataagggtttcaatttcttggaaaaaggactgaaaaataactcagaaaatattttataaaaaaatactcctttcgctaagcgcaagtctcacactaagcgcatcattattcatgcgctaagccatgagtct

SEQ ID NO: 16370 - DNA, 419 bp, Glycine max
tgttgttgctgctccacagagcccctcggaacttgttccatccgtgctcttccctacgagccctcttggtctgttgttcgaaggctttggttgttgctatatttatatctctcagttcggcattctcctttcggattttcagagttgctgatttgaacctttctttgactgtttgggcttgctcgagttctgccctaagggcctgcacctcttcgtcttcctccggtgcctcaacttcctcccttttagcggttctcaaactcaggagccaatccaatccttgcacgtgggctttcaaccacttacggtagccactgatgggcccattgttaccgcccctgagttctttgtccttcttttgcaccacctcccatgccttgcggaccttctgaagtgtctccatgttggtcttattgaaa

SEQ ID NO: 16371 - DNA, 375 bp, Glycine max
ttcttccacaacatccaagcaaaacaacattcaaacagcacaagctatcatagccaagcaaaacagagcaaaggcagaaaactctgctcaacacatcaaccaaaatcacagcttttctcacttaaagaccacagtaacaattccttcgatccaatttgttaaccgttggatcgactccaaaattttactggaagtctatagtgcataagcctacattgtgaccgttgggatctactagcatacatccagaactcattttgtactactctttccacagccaaccacacacaagcatttttctgcacttgtgcaaaattctgctgcacaatttcacagcaaagattctgcataagtgcagatttcggacatcacact

SEQ ID NO: 16372 - DNA, 425 bp, Glycine max
  unsure at all n locations
ntgctatctcttctctcctaacatcatggttaatttccattccgattcctcaagttgtgcatacatacttgcaatttgtttgttgctcggcaaagaaaggccaacaaatcataggcacacctgcagatatactttcaagtgtagaattccaaccacaatgggttagaaaggccccaactgatggatgagaaagcactttctcttgaacacaccaacttgttatatatcccctgtccttgatctcatcaaagaactcttgtggcaaagatatagattcacccattactacatctggtctcattatccataagaaatgttgcttgctatttgctagtccccaagcaaattctttcaagtgatgctctgtcatcaccgttatacttccataattaacatatatgactgagttaggttcccatttgtct

SEQ ID NO: 16373 - DNA, 278 bp, Glycine max
  unsure at all n locations
atgtgcatgcnttctttcttagcataaacaacacttactagaacagcccatccgggcaccgcgttttcattaaaaatgagtaatgcaacacataattaactagaatttttattaagaaaaatcaaatactaccgtgtgagatgaacaatttataaaattgaccaaaaacatgatgaaattctgaatttattcttttggggaccacttatttgattttgaagtatgctctgccaaactcatctcattcaatttacttattagactaatatcttttttgt

SEQ ID NO: 16374 - DNA, 415 bp, Glycine max
tctttatttatttatatatatatatatatatatatatatatatatatatatattcctttggcggatcaaaataagtaaaaaatattttgagccttgtggacgagattctagagggtaatttgaagaaaaagatcattgtaaacagttgtagcatttgttgctagagaaatgattatttggactcaccaggttcactagagcagacttggctttaactttttcagacagcttcaaattaattccatttttcattatcaaattgatatgaagcacatgatcaaatctttcagtttttattatagtacagagattagtttcacatgaatggatgttctttttaatataaccaatgatttttattagatatatgtttcaaagttttaattaaaaacatcaacatgtcattatttattag

SEQ ID NO: 16375 - DNA, 368 bp, Glycine max
tgctttttgggattcatttcgaatccgagggctagcttcatcatataaattctttcgtgatcaacccatgtcatcaaactcccagcgggattaaaagacccatggcatcactctacgaccttcaatcaagaaagtttcacttggtcatataccaaagtgcaacaatccattgccatccttcaatggtgtatacgattggtcccaaggccttatatttctcttgctgtgcaaagtaatcaatgttttgaacaaaaaaaggggggaaaaccctatgatcaatatttcaatggattgattaaatgtcaaacgactccattgtagtcactctaaaatgttcaagtgactgaatcagaccgaacatacactct

SEQ ID NO: 16376 - DNA, 416 bp, Glycine max
tcaacatgaagcaaccagctcacttgggcaagcatgttacttctgaactaagccaccatctcgttgaggcgacctgagctcacctgggcgagctgggcggcaagctcctcccctattttggctataaatgggcatgagaggctgaggggaaagagttcaacacccttagtattcagatttcacttaaaattagtgaggagaagaagaaagaaggagaaaatcaaggccgaggcacttccgtaacgcttccgtgacgtttccgtgaccaattccatgaacgttctctgtcgttcttcatccattcttcatcgttcgtcgatctttaactggttagttttttatttcacagctatgaattcattctatgcatcgttaggggtccattcttgcattgtatgttttcatcttcatctcgt

SEQ ID NO: 16377 - DNA, 330 bp, Glycine max
gctacatggcatgatctaaaacccgcactcagcgacccgagccccgaagggttttccctttttcacggaaccggtcttggccacgccacattcgatctgttccgactttctaccctacagggaattttacttgatgcatcaaatgcccatcgagcataagctataacgcaatcgatgagacatatacaaagatatggcacatttaccccataggcgcctttaaaagtcaccaagcttaatctagggaagggattacttatccctaaatacagtacaattctgtccgaatacgcaagaacctatcctaaagttacatcgccaccctagttc

SEQ ID NO: 16378 - DNA, 411 bp, Glycine max
aaactcagctctgatgcccccttctctatacccactgtttatatccaatctcaggctcctcaaggtattggtaagagcaactcccccccatccaccctgcacatctgagatccaagcctctttaatcatacaatggtaccctttatgttcaagccaccagtccaccaccctaaaaggcttagggccccaatccaccatctttgtggccaagaagatcgggcaatgatccgaataatctctttgaagaacatgccgagaagcatcatgccacaaggatagccatcgatcagacaccatgaatctgcctagtctgctcttggcactgccattgggcctaaaccaagtgaaattgcctccaaaacatcgtatgtcctggagctccatctcaaatatccagacattgaactccga

SEQ ID NO: 16379 - DNA, 338 bp, Glycine max
  unsure at all n locations
gggatcctttaagtcagtgtgttgcacgctttcttgcaagaggaatgtggaacggtgaaacttccctactttgttcgttgaccacagagcggtacctggagatatgtcgcgggggtcaggagaccttgtggaggtcctgtggggtgcttttgcccaaaacgatcttgaccaatcccgacccttcccgggcataagcagtcggtgataacctgtgatatacctaaacaggcgagctgctggcatgtccccgttttaagaagctagacctcatggcttggatgcttgtgtggagactggccanccataagtcatgagtgagatgtgggatatggcctctg

SEQ ID NO: 16380 - DNA, 418 bp, Glycine max
tgttagaactatcatcacatgatgctttattggctctgaataagttgctttctaagcaacttgagattttaacagaaacacttggtaagttgccaactaaactgtctattggtcaaccttcacattcttctgttttgcaagttacaagttgtaccatctgtggtgaggctcatgaaataggccaatgtattcccgttgaagaaaacactcaagaaatccattatatgggaaatcaacagcgacaagggtataatcaaggaggattctcaagcttccagcagggtccttataatcaacaaggacagtggaggtcacaccctagtaattagttcaacaaagaccaaggtggaccttcaaacatgccaatccaacaagggcctaacattctttacaggactactaagctagaggagacttt

SEQ ID NO: 16381 - DNA, 370 bp, Glycine max
tgtgcatgcttgctttaaattgtctgtgggagatccttgttgataatcttcatccaaaacttgatgacgtgcccattagttggacacgtcagatgatacatgtatgaaatcacgtcataagtatcaataacattacgagtcacatggattttttatattgaatttcatttaataaactattttattaataagcattttgttgggttgcggaagatttgaaggtttctggatttgggtgctgcgaaagtacagattttgttggattttggggatagagattgacgtagcgctgcgaggggtgcggaatgatgaagagatctcgacgatggtggatgaactggtcgaggggtgtaaccgcctttacttaatc

SEQ ID NO: 16382 - DNA, 420 bp, Glycine max
tgctcgtcttgctgatatttatcatgcatacttttctgatgatgaccgacgaacaatgagggatcaacttgaaacttatgtgcttcaagagagaagaaatcttctttttccacttgtgaagatgttcaaagtttggctatgaagatggttcaaactgagaaacatttggtatttccattggtttataaacttattgagctagctttgatattgccggcgtcgacaacatccgttgaaagagctctttcagcaatgaagattatcaagtctaaattgcgcaataagatcaacgatgtgtggttcaatgacttgatggtatgtgacaccgagcgggagatattcaagtcgctcgatgatattgatattattcgaacatttaccgcaaagaagtctcggaaaggacacttgcctcgtatttta

SEQ ID NO: 16383 - DNA, 253 bp, Glycine max
tttcttccatttttccatggcgagcggctggatatttttgagcctgaatcttacctccgactcaaacgttatgacccttcgcatatctcgagagcactctggtgttcaatctacgagcgtctatatatgagatgcgccttggtcggaccccccagtgcaaacttacgtccacttgcttcactggagagcacgcgtggatccaatgccgatcgtctacacatgctatgcaagtgattcgcgccttcgagtgaaa

SEQ ID NO: 16384 - DNA, 410 bp, Glycine max
  unsure at all n locations
ntgcagatttggtcttcgctcagtgaaaggatcgatgtgggtctgaaaaaaggcaaatttgatcatcctactaggacgactgagaaaactggggcaaataaagagggtgaggatgagggagaaacccatgctgtgactgccattcctgtacggccaagtttcccaccaaacccaacaatgtcattactcagtcaataacaaacctcctccttacccaccacccagttatccacaaaggccatccctaaatcaaccacaaagcctatctatcgcacttccaatgacgaacaccacctttggcacaaaccataaaaacaccaacaaaaaggaattttgcagcagaaagcctgtagggttcaccccanattccgttgtcatatgctaaacttgatcccatatccactcaataa

SEQ ID NO: 16385 - DNA, 367 bp, Glycine max
tctttctttaagataaactcttttctctttgtctctctcaactgatcttcattcttctttctcttttcacttatggtcttcctttatcttgcacaaattttgcggctcttccattggtgatgatcatggaacgctaatcacttaattaatccatggatccactccaagcaaggctgaatttgagttctgatttaatactctaaatctgtgtgaatgttcatctttttcttcaatcctatatttgattttcgagattatgaatatacttacgattgaaaatacattaggttatggattcatttcctaattgcagaatttaaacacaaattgatcggatgatattctaacctaattcgtgatcacaatg

SEQ ID NO: 16386 - DNA, 409 bp, Glycine max
ttagcttctttacgaatcttcttaaggaagcttttcacggaggtgagcttagttatgagaggggtgtgtgtaactaagctctaccttctcaaggaagttttctcaaagaagcttctcaaggaagttttctcatgaaagcttctcaaggaagctacctagtctataaatagaagcatgtgtaacacttgttgtaactttgatgaatgaaagtcttatgagacacacttcaaagttctacttctccccctcttttattccttcaattacgtgctcccccctctctctttctctccctctttcttttcctccattgaagcatccttccaagcttcttatccaaggctcatcttggtggtgaagctccttcttccatggcttattccctagtggatggcgcctcccttctcct

SEQ ID NO: 16387 - DNA, 374 bp, Glycine max
gtgcttccaaattagtgtaccacactaccgcggctccggccaagctatcttgaaagaagtgtattaaaagcttctcatccttagagtgtgcgcccatcttgtggcagtacatcttgagatggtttttgggacaagtcgtccctttatacttgacgaagtccgacactttgaactttgggggaataacaacatcgggtactaagcaaagatccgtcatgtctgcgaacagatagtccccaaatccttccacggctctcaatctttcctcgaggagatcaagcttcctcttttcttcggttgccgggggcggtccttccgtggacaaaactattggttgtgtcgcgatgttgggttgaggcaacgtgctgggtgcc

SEQ ID NO: 16388 - DNA, 424 bp, Glycine max
tgcaaaatggaagcaaagatatctctctatgggtttaagaataaccctcattaattcagttttaacagcattacccatttacttgctgtctttttttagaatccctaaaaaagtggtgcaaaagatagttactattcagagaaattttctatagggaggtgattttgaggccaacaagatcccttgggtgaaatgggacacaatttgtcttcctaagaacaaaggggggttagggattaaagacttgatcaaatttaatgaggctttgcttggcaagtggggttgggagttggctaataattagaaccaactttgggcaagaattttattgtctaaatatagcggttggaatgaatagctctctggtagaaacagtagtgatttctctcattgatggaaagatctaaagattgtatttcaatac

SEQ ID NO: 16389 - DNA, 376 bp, Glycine max
tttcttacttgtattgttgaaaataagtgcaaaaatgaaggagaggtgcaggcagtgtcaattggaagcaaggtgcagagtgaatgcaaggaatggggaagaaaaatgcttaatggagagaaatggtaactacctaaggcagttacgcctctttaccttttggcagattcgatccattctcttatcacatagacttgataagcgagcctaagtgatgtttgagttttgaaaagctcatgtgcttatcgactgtactcactcagcccaattcaagaaattagaaattccagagaaacttttgggcttagcgcaaagatacatgctgagcgagttctacagatataaagtgtcttgcaactcgtgcttagcaggcatt

SEQ ID NO: 16390 - DNA, 424 bp, Glycine max
  unsure at all n locations
tacctcgaacacaacagcgacaatgccggcgagattgttcctcangtgaaatgtacctcagctgaccacaaacaccatgtactaccagtcaaatgtacctcaggtgaccagcaattcgccaatccttgcaccagaaaccaaaaaaggtccttatcttaaccacgagttccagaaacagacctatcacggtcatgctctttagttcaatagaacaacataggtagacgaagcgtacctgtgacggtcttcagtgtaataacagagcaacaaccttcgatgttaacaatgcaatggagaagagagcgtgaaagggttcacagagaagaagaaagcgcgagagggtaaaccgagaataacggagcgcgagcaaaatatgccgtgtcaaatacaatttaaaatgttagtttaacatcgcgtttcaata

SEQ ID NO: 16391 - DNA, 204 bp, Glycine max
ctatctacaagaaataaccgttattcttggacgcgctctactgtgcttcacacgaaccatgctctgacacaactcactccttgtattagcacaaaacttgtggctataatgtcggagatgaccatggaacgctatgaaaacgaaaaatacatggatgcacatcaggaggagatgatacaaacctatgccatattatgaatagct

SEQ ID NO: 16392 - DNA, 323 bp, Glycine max
ggcatgtggtagtgtattaacaagatttttttataaaaagggagccttaaccgaggctgttttcgtaattatcatagccggactctagtatggtgcttctttaaaaagtttgacatagcttagtctgatattgctgggtaggcttggggaacaatgtggtctattggtctttggaaaggagctagataaggtgtggaatacatatcaaaggacatggcagggaaggatctatctatgaagtctatacgatttagtcacgcagggtgtgtgaagtcatacggggcccatttttgacagaggatgggttgatctggcttatgttt

SEQ ID NO: 16393 - DNA, 377 bp, Glycine max
ttgcttgtcatttttctgagtgactcataccagccctttgagattacttcaattattgttcttcaaaaaacttgtctttctcaatacatttacacaaactcaccaataggcttaaactcggaaggtttatgatttatgtttagaaggtttttcataattaaaacacaaagaattttggactcaacaatggagtctttgctaagaaccagacatgagagctagttgagcttcctatgggaaagaggaaacctctattatcaaaaaaataaagggaaaagttcacggctcgcctactagcaaaaaggcattcaaagaagaagaggattgactatgatgagattttctccccaatcgtaagacatacttctatcagggtg

SEQ ID NO: 16394 - DNA, 415 bp, Glycine max
  unsure at all n locations
aaactcanggcaaacacatcctcggccatgctcttcaacctaaagttcacccttggtgagccctttttgtttctaagttccatcttcaaaggaactcgaggtacacaaggtttgtccttgacgatcttctttattcctaatttttatctgtctaggaatacgagtatatataaaacccaaggtctgcccttggtacagattcctccaaaacccaaggtccacccttggtacgtactcctgtaaaacccaaggcatcccctaggtccactcactcgcacaactatgacgaccacaatcaaaggtctaagttcaacaacacaaactaccaccaaactatttggcaaggcctttcaatcaggtggaagtcatacttgctcctcaaaaccatcagagaagaagcttcgcaagtcaaaac

SEQ ID NO: 16395 - DNA, 375 bp, Glycine max
tgttcttcgagcttatgcaaatggccataatatttgacttgggcatccgattacggcccataacatatcgagaatttcgaaaatgaacacagaatctcctagcgaattcaaaccacctaacttttgacacggatatctgattgccacccataacacatcgagactctcgaaattgaacacagaatctcctggcaaattcaaactgccgagacttttcacacgaatgtatgattgaggtcaaaaatatatctcaacgctcaaaattcgacaaagaagctttggggaaattccaattgtgatgacttttgactcgggcatccgattgaggcttgagatagaatctcctagcaaattcaaatggccataacatttgac

SEQ ID NO: 16396 - DNA, 427 bp, Glycine max
  unsure at all n locations
ntgagaaaattctaacgacaataactttttacgcttatgttcaattgagccccatagtatatcgagacgctcgtaattgaaaatagatgctcgtagcaaattcaaacgacaataacttttaactcggatgtccgatggagtcctgcaatatattgagacactcaaaattgaaaatagaagctctgagaaaattcaaacgacaataactttttactcgaatgtctgattgtgtcccgtagtatatcgagacgcttgaaattcagatcagaagttctgagcaaaatcaaacgacaataacttttaactcgaatgtccgattgagtcccgtaatatttctagtctcacgaaattgaaaacagaagctctgagcatattcaaatgacaataactttttaatcgtatgccgattgtgtcccgtagtatattg

SEQ ID NO: 16397 - DNA, 377 bp, Glycine max
ttgcatgcatttttattgacactattgataagtctcccatggaagcacctgatctgagtgatgctgaagcaaccaaggtttttcaaaagtacctagatgagtgccttactgctaagtgcattatcttggcatcaatgagttcaaaactccagaggcaacatcaagacatggacccatatgagatcgtcgaacatcttaagaagatgtacgatggtcaaagcaggacggctagattccagttatctaaggctctgtttagatcctcacttgctgcaaatgaaaaggttggaccccatgttcttaagatgattgatctcatagaacaacttgagaagttgggtgcactcttgggaaagagctttctcaagatttgatta

SEQ ID NO: 16398 - DNA, 415 bp, Glycine max
tccactaagattcgaacccacaacaaagtatgtttataaaccacatctaccactagatcaagtcaagctttatttaaaattgttagtttaaaatgtagattaacaattccaagacagtaaacaaaacccgcaattaaaatgacatatttagatcaaacagcggaaattaaaaatattacgagcgtatctcccgccattgcaaattaaacgggaagtttgttcttccagacccttactcactctgaatagatgatgtattttttctgaatagagaagtgggtttggtgatacaaaactgagagcacctcattctatttatagagtctgtccatcacagagctctcaagaacgtgagatatgaagggaaagggaagttaatagtacgtgagataagagatagaaaaaaggaacgtgg

SEQ ID NO: 16399 - DNA, 597 bp, Glycine max
  unsure at all n locations
ggaagaagtaccanattggagccccatcggagtgcattgcgaatgaccatagccgcngaagannnnacagctcgngnacncncgcgngaatcgcgtctcngacgnagcacagtcgatgctctatcncctttgtctttttactanacaacactcgcagacgcatctttgagtcgaagtagaacgtcacagtcgcgacgtctctacgtccagacactaattagacgctctagtcgtcttgtcatccgtaatctgatgacgtagaatacctgctataatagcttcgagctgagttcaacgaaccacacctggactgtactccactgtgatcttctcacacaccattcgtcgggctcgcctctcgtctaggcacagagcagattgtttatcctgacctcttcatcggtcgtcccgtcgttactgtataaactcacagatgcttaagacgacgccgcagctatgctccatcacattatcctcgaagagccgtaaattcctcgtttaacgcactggacattatctcgatcttttgatcgctaaactcgagtttcacaaacgagaactgtcaccgcgacttcgtcatcacccgcccttggaccg

SEQ ID NO: 16400 - DNA, 418 bp, Glycine max
  unsure at all n locations
taaaaactagctagaagttgaaaaactagttattatctagtagttggaaaactagttggaagttgaaaaattgatttattaaattataagtgtttgattaaactagttgttgaagtaactcaaaagtaaaaaatgatagaaaaataacaaaatcatgatttatttaaaaaaaggtaacaagagaaatgaataaagacttgtttatcgaataaccaatcaagctttgcaactagtaaaaaaagctaaaagcaagctgaaatgttttttcaaacatactatttgtataatgggacaaatatcacctcattatgcttatcaagtctatagggtctgtggtgctcaaccatgttaaacctttatactaaagcanattagacttgcaaaaccattttatttatttctagacttctatgtacac

SEQ ID NO: 16401 - DNA, 254 bp, Glycine max
gcaattcagctcggacccgggatcctctgagctgagctgttgcatgcttctttgcgaaagcttgacgctggagctgaactatccacttccctatctcttttagactgtagatccctaggctcttgaccttgacttgatagaacctgtttttatgagaaggcgtttgacttgatcccatgttttactttcgtgaacagacatccgcgtgattcaaaactcctacatctatcatgggtggaatggatgcatgcttg

SEQ ID NO: 16402 - DNA, 411 bp, Glycine max
  unsure at all n locations
tgactaatcccgacccaacccgggcatagttagttagtgagaacctgtgacgtacctaaacaggcgaactcctggcagtcaaccaataaagtccacagagcaaggaggcttgggtggcggctggccagctatggatcttgagtggtatctggaatatggcctctggtaatcgattaccaagggtttgtaatcgattacaaggcttaaaaatggaaacaggatgttaatatggcctctggtaatcgattaccaagggtgtgtaatcgattacaaagcttaaaaatggagacaggatgttaatatggcctctagtatttgattaccaagggtgtgtaatcgattacagggcttaaaaatagagacaggatgttaagatggcctctggntaatcgataccaatggtgtgtaatc

SEQ ID NO: 16403 - DNA, 352 bp, Glycine max
  unsure at all n locations
ttgcatgcattcttntggtgggacatgttgacttgctttccaatctgacattcgccacagatcctgccttcttctattttaagatcgggaatgcctctaacagcacctttgtcaatgattttcttcatgcctcttaagtagcacatgtccaaatctttgatgccatattctgactttatcttctatggacgatagacatgttgaggagtagctggtttcttgaggagtccataggcagcagatgtccttggacctgctgcccttgattagagcttcactcttctgcttcgttaccaagcattctgactttgagaagcttacattgaatccttcatgacactactgactgatg

SEQ ID NO: 16404 - DNA, 402 bp, Glycine max
  unsure at all n locations
aaccataaccggtgagagtgcaatcttttactttagtgaactactagctttgagtaatagtctttgcatcaatctttgaaatctagaatataacgtatgaatgaagacatgatgaacgccatgattgtatatacaagccaattgactaaaaagcttaccttgaatgataattgtatcctttgcaccctttgtgagctaaattacattttcaaaattgaaccctaaacttgaataaatatctctagataccttgcttacattctatgagagcatatggctcaaggaaaatttaccctaaacttangggagtggagtcgatttggatgtaaagaaaaaggtaaagcgtcaacacacacaacaaataagtggtgtgctaaacaaaatgtaatcaaagaaaatgtg

SEQ ID NO: 16405 - DNA, 334 bp, Glycine max
tgcttgagctgaaaaaactacatctctagaatcattatgaagaataagacacgcgtgcatgacgcattacatagcctacctattgagctacgcttcatatagtactattcagtcgtgcactaacctactggtacctgtattataccgattgacacatccttgtatgaatgatattacgtacttatgggacaccagtatctccgcattttccatcgatgtcacattgctggatagtgcatattcaaagcacattctcccaataatcctcaacaaccttgcttatgctgtgagcacaaccctcagattagtcatgagcatgcttgcatagacatac

SEQ ID NO: 16406 - DNA, 389 bp, Glycine max
gacactactacaaactcaagctttatactgtagttgtgcttttagtactactgtttgttatgctcttccttttgacgatggcctatgtagtgtgtatatactcaagagctacacaaacgattgcatacactagttggaggctatagcacaaagagaactaatgtggtggaagtcaagcatttgttgactgtgtcctcagtcctcttgtcaactttacaaagatcctatcatttagtatttttcattcatctaataaatactttttgaatttcgaaagatatgtgacggctatgtgcacatagttgttgtgtgacttgtggagacctggtaactgcttcagccaatgtgatttggtcttgtgctttccttatagtatgtttatgagccac

SEQ ID NO: 16407 - DNA, 287 bp, Glycine max
ttacgagcatggcgatgtatcacaggactgctcatacatccgagtgagaagtgatcgtcagaagaatatctcatatctgtgtgattcaataaccaccatcgtgatatatgacgggacttagatctaacatccgagcaaaaagttattgccgttggagtttgctgtgagcttttacattccatggcgaccgtcttaatatattacggatgtcaatcacacgtcctagtgaaaatttattgttgtttgaattaattctgaggttcacaaatcaattatgagcgtctcca

SEQ ID NO: 16408 - DNA, 348 bp, Glycine max
ttgagctaattcaaacgattataactttttactttgatgtctgaatgagtcccgtaatatatcaagacgatcgaaattgaattctgaatctctgagctaactcagacgacaataacgctctgctcggatgtctgattgcgtcccgtaatctattgagacactcgaaattgaattctgaaactcaaagcttattcacacgacaataagcgtttactcggattgtcgattgagtcccgtcatacatcgagacgctccgaaattgaatgttgaagctctcagcacattcaaacgacaataacctttttactcagatgcctgattgactcgtcgaatatatcgagacgatcg

SEQ ID NO: 16409 - DNA, 367 bp, Glycine max
ttgtcttcttgcaagatggaagcaaagaaatctatcaatggggggtagaataaccctcattaattcagtcttaacagccttacccatctatttgctgtccttcttcaagatacctaaacatgtggtgcaaaagattgtatctattcaaaggaatttcttatggggaagtcaccaagactccaacaagatcccttggggaggcgccatttgcacatgaatcactcttgaggcaaaaatcaaggatcaaatggctcatggaaggtgacagtaacacatgcttctttcataaatccataaattttagaagacattataatgcagtctaaggaatattcattgaaagtatatgggttcagcaaccaaaatt

SEQ ID NO: 16410 - DNA, 410 bp, Glycine max
  unsure at all n locations
tgttgacacgcggagatttatcgtcatcttccgcgtacacaagatctgtcatactgacatttgagtcacgctgacgggcggaaatacccgagtggttatccgtataaacattcttttgctgtctgtaagacaaaaagcctgatagcacgcagagactaacgtcgtcttctgcatccttcgtcaatcgcggccgacaagcccgttggcacgcggagatttacgtcatcttccgcgctcacaagatctgtcatactgacatttgagtcacgctgacggacggaaatacccgagtggttatccgtataaacattctttntgctatctgtaagatgaaaagcctgatagcatgcagagactgacatcgtcttctgcacccttttgttccccggngacaacaagtcagttgcatg

SEQ ID NO: 16411 - DNA, 375 bp, Glycine max
ttcttgctcagtgtctctatgagagtctctagttgcttggctaggagcttattctaggctagtagtgcgtcttgtgatgtgagctcgagaagactcttttttataggtgtgtaggcttaatcacgaaggatggcattgtcattggctgtcatattttcaatcaacttcatagcttcattaggtgtctttaatttgatcttcccaccagtggaggcatcaagtaactacttcgaatgggttcgcaagccatcaatgaagatattgagttgaacccgtggatgggagtcttccagagtaaaccatggaagtagtcaagagcttcactcagtgatccatcggggaattgatggaatgaagagatctcaacctttccct

SEQ ID NO: 16412 - DNA, 422 bp, Glycine max
  unsure at all n locations
tagacaacttanagaaaccaatttggaaagcatattgagcccaacattttacactcaagatatatctatgaaatttatttggatgaatatttgggttgaatagttaactgagcccattgcatttattatgtccgaatatattcaaaggatattgaagatatcatatgtttaacatttattattaagatttagagtttagagtttatatcattatgatatgtttttatcttgtctttggatttgtttcatttattagaactcttattttgttaagatttgttttctcttttaggatcaaaatcttattttatcatatctttagttcatataagattattgttttatcttatctttaggttagacactattaaaatttgttttccgtcacttgttntgtatttccctataaataggaagccatg

SEQ ID NO: 16413 - DNA, 379 bp, Glycine max
ttcttgccattacaccacttgaccattcaactaggctgcatcaagatgaagggaaaccatatgaagatgtagcatcctacagaagattgattgggaaacttctgtacttgaacaacactaggcctgacatcacatttgccactcaacaacttagtcaattcttaagtaaacctagtatgacacactacaatgctgcctgtagggttgttaagtacctcaaaggcagtcctggccgaggcctgttcttcccaagaaagccagaaatccagctactaggattttctgatgttgattggggtggttgcttagattcaaggaggtccatttcaggatattgcttcttcttgggagcatctttgatctcttggagagctaagaa

SEQ ID NO: 16414 - DNA, 423 bp, Glycine max
  unsure at all n locations
ttgaacaatatacttgtccttcatttaactgtctttgggtttggcggccacactcaacaaagtactttcgacacctactgtacgttgatttgaccaatgctgttatgggaatgttgcaacaatccttcaaaaccttattgatacattttgagaggttggttgtcatgtggccatatcgacgtccttctctatcataagccatcgtccatttttcctttgaaatgcgatcaatccatgttgctgtggctggacttagttgacgaaatttttctaaattttggtaaataaatgtgcttgcaaggagtgtaggctgcataaaatgagttatgaataacacatttaagtatatattaaataaacgtgaccatcaaatatgaaatcttacccaatttcttcaacatttctttnntgttggcattattg

SEQ ID NO: 16415 - DNA, 379 bp, Glycine max
agcttgttacttatatggtaaacctactagcaaggaaaggcggttctagccatgtggtcgtgctgaataaatgacagctcagcggcagtcaatgaaggcctgtggttacgacgggtactgtttacctgtgaaaagagcatgcaatgtatgcgtgagatgcacgcgaatggggccacgtgtgcggcagacagcaacgcggttgtggcgtctaggtcatcaaagacaggcaatgatggtctctagtaggcaccgacgaaagggcgtcgggaaggcttccaaacaaggcagagacgcagtgtggtactgttcactgcgatgagggactgcgcaagcaaaaagaagtgcgtgagaacacgccggtggttcttcaagacatgat

SEQ ID NO: 16416 - DNA, 418 bp, Glycine max
  unsure at all n locations
tatcttgctcaatattagcaagttcttttgattgttgtgcatatgtcaacacctaatttcaggaaaatacacaaaagtaaaatcaggtcagaattttcatgcaacaatctaggtttgagtcattgatagccaccatcatcaaatattaaagagattactttcaaagatgatcattataaaataaaactatcanagaaaacattttgtagtgtcacaatgtataaaaatgacccgttgttcatacataacattccccaaccaacagcatagaacaagcaagaaaatggtagggctatagagtcctcgtaaagatagtgcaagagatatctaagagaaaggttaaccacattttgatattaaaactcatcttacacgatagtttcctttttttccttttcaagcacgtagattgagcaac

SEQ ID NO: 16417 - DNA, 378 bp, Glycine max
atcttatgctcatacttcttcacgaacgttcacttgcacaagacattcttataactaagaaaaatgcacccatatacaatcaaggcaccttcgttacctagattatttacatgtacttccaaggtgtatttgttacctacatcacacacatttcctttgctaaattcacatacatgcatactctaagcactttgtctatcaaaaattgcatacgtgcacatcttggtatttctaatacctatacatacacaaacttcatgatgaatcttgactatctacacaataaggtgctacatttcatgctttttgcctttttttttttcaagtgtttttttttactacctagagtcgcatgcaaattcaagaatattttctttt

SEQ ID NO: 16418 - DNA, 423 bp, Glycine max
tgtaatactgaatttgtaagggaaggggtgtgttattctatgtttgattgtgcattcttgtatatagtaacttttcaccacaatttacaagtttccattcaactgtaccccattccaccatattcttgtggctatgattggggattaaatgatagtattctgagaaattaccgtacttttgaaataatacaccttaacaaaacaagaaaatgaaagaataaagcattttgtgccaaaagaaaatacagattttgcatgggccacacaatttatttacgtgattttttacaagaatgacatatggagctgctgtttcagcatatggcctattctatctatgcttatggttttgcacttcagtcaatacaataatgaaccaaaatacacagaaggccaaatggatttttcttaactagcagaaat

SEQ ID NO: 16419 - DNA, 386 bp, Glycine max
gatgtgcaagcttatttctttcctttctaaagaaatccttctcttgtcagcattcataggctcgtaacctagaccaaacctcccatggttttcagcaaacttcaccaagcctatcgtgccatcactgttcgggcacaaacctatttcgagctcataaccatctcttaacataactcgggccaccatgaaagaggcacctgataaacatggttgtaccggaggagactccatgtaagcactgctcataatttctagtgcttgaaaagatgtttccaatgactcttccacagcttccacataaggtgtagaagacggacaactcactagtatgtcctcctcgcctgacactataaccagctgaccttccactacaaacttcaatttct

SEQ ID NO: 16420 - DNA, 414 bp, Glycine max
ttggcggatcaaggagagtggacctcattcattgacatattagctttgttggtgtttgagaccatactctttccaaatgtagataggctaatgggtttagtagcgatcaacgcttttcttgcttatcatcacagtaaggaaagcccgatcgttgctattttggccgatgcatatgacacattcgacctgagatgcgaaaagagtagcacaaggatcatctgctgcacgcccgctctttatgtgtgattgctctcccacgtgctccatcatgaaggtagacctgtctgtcctctacaaggtcatcgcatgtgcgccaaaaagggaaaaacaaattgggaggaactcttgcaagtatggtaggggtgtcataccctaattttgtttgggggccttcatttactaatgttttgattc

SEQ ID NO: 16421 - DNA, 358 bp, Glycine max
tgcttctcccctatattgctataaatagggggagaagtgaagaacaaaagggttcagccccttaggcacttctctctctctcgaaatttctgaggaaaattagtttcgtgaagaaaatccaagccgaggcgcttacgtaacgtttccgtgagtaattacgcgaagattctcgaccgtttttcaagagtcatcgatcgttcttcgatctcttcagtcttcaacgggtaagtacctcacaccaagctattcaattcattctatgtacccgtggtggtccaaatttcgtttcatgtattggttattctcggtatcattcactttttataccccctcttgacgagcttatgccatttattta

SEQ ID NO: 16422 - DNA, 415 bp, Glycine max
tcaatggcaggccctctgcattcagaacttattctctgtcagggatacatagtcgggcagccaactcctgaggacctggctatagtttgcagaacctgtaatatgtgggaaggctctcccctggctctagaaccaccggagtctccaggaaggtattgagggaatcaacatcaaattttatcaagtgacctctaaccctaacctgttttggagatttatcctccgggtcatatatattagcataaaattctttcactaaagccacatccatgctcccctcggtcaagttagtcagctacatgtgctagtttctgctctcaatttctcttctagattcatcgtattcagtcacaaacagcttgaaatttctttccgaaagaatattctgaccaagaacattatctgcataatgatt

SEQ ID NO: 16423 - DNA, 369 bp, Glycine max
tttctttcacttgacagttgaactttaacctcgcattacttaattgttacggttatgtcgcgagggaagttaatgacagacataacttactgcttgccagattgtattggaatatagattatgatacagatctatgctgcgagtgcatattatgttagctctgccacaagcgtggtacgaaactatctatttttttagaaaaaaatatcagatattttttaagaaaatattatgacatatagctctactaatctatgtggaaattaaagtatgtgaaattatgaggataatctatctatctatatctacttatatgttatatcggagaattagaagctgacacatagcatctgacttattctgaaataa

SEQ ID NO: 16424 - DNA, 408 bp, Glycine max
ttcataaagataacaaatggcaaacaactcttatttaactaacatgttaatttattgtttgtttgttcgtttgtgtgaaacataacttgatggaaataaaggcttttatgaaacgtcaggaaaaaactgtttgtatgaaacatttttgcataacatttttttttcatattactttagggtacagattaaaaaataaataaataaatgtttttattgaaaatacattacaaatcatggtagacatatattagtaccattttttgatatattttttccgattctaatttcttaatcatttacttttttcattaatgcacataatttatatttgtcacaattttaaaattaaaacatttctaacgctggcttataaatgattgcaaagtatatattactatccgttcgttt

SEQ ID NO: 16425 - DNA, 377 bp, Glycine max
cgttgcatgcaatctttgttctaaaggacaatcattaaatgtgtgccacatatatgcctcgtctctagaccatatcactttgttagcgttttggaagtacggtttgtgaacaatggctatcgtggtatttttctttgtttgatggaaaaaatatcctctttgataagtaaaatcaatgacctttttcaatactcttctccaccaagatagtgaagaaaactattcaagcaaagtctgtgactccctctacccctcacattatgtactaataataaatggaataagaaatcagaattaattaaaagtttttaaaacacatttaaataagatgctctcaaaagggcacaagactcacattcacttttctaacatcataa

SEQ ID NO: 16426 - DNA, 414 bp, Glycine max
  unsure at all n locations
ttgaggtacatcacttcaaatttcagagtgtctctataaagtaaagatatgagctatgagttattccctaggtgccattttcaagtcatagtaatggcaagtggcagattcaattntaaaatatacaaataaaaatggacactcttcacttttctctgtgtgtgtgactcaatctaccacaacttagtaggttaagtaggttgactactataacaaagagtccaattaccaacggaaaattaccaacaaatccaaatctgtacgttggaaatatgagcattttttacggattttctttcatcgaaaatgtctatattactgacagaagtttccaacaaattttcgtctaatttttttaaaaaaaaatcaataaatatttattgatgtatttatatcaatcaaaatgtttaacat

SEQ ID NO: 16427 - DNA, 351 bp, Glycine max
tgtttttatagaaggatcgttcctaatttctctacaattgcatcacctctcaatgagctggtgaagaaaaatgtggcatttacctggggtgaaaaacaagagcaagcctttgctttgctcaaagaaaagcttactaaggcacctgttctagctcttcctgacttttgtaaaacttttgagctagaatgtgatgcctctggagtgggagttggagctgtattgctacaaggtgggcaccctattgcttattttagtgaaaaacttcatagtgccaccctcaactaccccacctatgataaagagctttatgccttaataagagcccttcaaacttgtgaacattaccttgtt

SEQ ID NO: 16428 - DNA, 420 bp, Glycine max
tgaacatgatgaaactcgttaactcaatgtcacttttattcactcaattcgctcaagtttcctttttccagtgtactaatgtttgaacccggcaagtgcactggattgtgcaagtagtttaaaacggtaagaatcgagtatcgaactctcgaggaacttgtgttacttcgtaaagctatattcagtgaataggtgtctagtatgaaaagagatgtgtcgactatgcacaagtatgtaaactaactattaaaaggaaaatcacgtgagtaatgatgtgtaaagacaagtagacaacaccttggtcttcctatttaggtgcctgatgttaaaaggatattctctacttaacaatgctcatgtgttctatggtgtctcctgaaatgctaaaccccgattcctcatgatagtctatcctaatcc

SEQ ID NO: 16429 - DNA, 386 bp, Glycine max
aagtctgctcgcatgctttctttcttcaagcttgttcagacacaattttccaaaagcattaaggctatgcggtctgataatgctaaagaattagctttgactgagtttttgcataatgcaggagtagttcaccagttttcttgcccacacagacctcaacaaaattcagtaatagagaggcgccatcaacacctattgaatgtagcacgtgctttaatgtttcaagctcagatgccaatttattttttgggagagtgtgtatccacgacagcttacatcgtcaacagaacatcaagctcaaatttgcagaaccaatcaccatatgagttgctatatggtaaagtaccagcctatgatttgataaaggtgtttgggtgcttgtgcta

SEQ ID NO: 16430 - DNA, 422 bp, Glycine max
  unsure at all n locations
ntaaactgttctcttactttaatcacagatcttatgctttgaattattacaaagangcttcattgctatgtggtgccacttggcttatcaccggcaaccacctggttatcctgtgtaaaactccatggtaccagagggctaaggagttatgggcttctctcatgatgcttatttggtataggggcaagcattctagatttgatggatgatggaatcattaatttacagttaaagttttcttaagctcctgagtcctgattgtttgcaaactcattaatttattgctgaggtggtcatcatactgcgatatgtatcgacaaattcataatgtatttctaaaatatttgttggatcaaaacacgttggtatacattactggcttgcattatctttgagcactgtcctatgaatgatacttctgc

SEQ ID NO: 16431 - DNA, 347 bp, Glycine max
ttcttatacaatggagggtacaaactacatgaactggatggaaaagcaattccaagaacacggaacactacccatatgaagatctactttagttgacctaatgcaagattggatgttgtactctttttcctacttaattcttttgaccctgtcagaccctaattttgtccggggactatcatttgctaacgttttgattcttgctaaccgaattgagctgcttgacaccagttgctacgcaatatgaaaggtttttcgatgtttcgcgaaagaatgtagaaaatactcaaatgggagggcaaaagggtcattttggagttattctgacccctggctcgcccaggata

SEQ ID NO: 16432 - DNA, 405 bp, Glycine max
tagattgaatccaaagctatattgttaaggcaattggacactcaaagaagatgctgagagtagtgttttaaaacccaaaccgaaccgataggtcagattggtccaagataaagcctttcgattgtagcttatcaccagaaagaattttccagtaataatttctagagaagaaaagaaggagaaggtggaatggcttggttccaattcttcatcccaaggaaccttatcatcacaaggataataggtatgacttaattccgaatctccaaaaacatatcaggaaaccaagcttcaagagatgctggaagagactaagaatttcctgagataaaatcttctaccttagcttccaacaagctacgtaattgatatggaatattacaaagattcacaacaaaatcacta

SEQ ID NO: 16433 - DNA, 496 bp, Glycine max
  unsure at all n locations
caaacccacgcaaaacccatgaaaccccacaacatgtatcaaaccagaagagaaatgaacatgatgatcaatgcaacannganaaaagagccgcacaaaggacagaaagaggagaactcgcggattccatgctcagcacagaaggcaacgaaaaaggtaaacaagcataaacactcaaggaacgcgcgaacaacaaagcggccatcccatggggagaacaggacaaccacggcgcaaaaccgccacgagaggagctcaaggaagcacacgaaaccaacccccctaaaagccacagcaaacaggagccaaaacgtgaggacaccagagagaaaatacgagaaggagcagcaaaaagcgccaccaccatagcgataaaccgggaaaaactaaggagcacataccacaagacccacacacaggaaaacaagcccagcgcaaaaggacgagaacaccaaccccgagaagatgcaccgagcaacaacgcaaaccaaactac

SEQ ID NO: 16434 - DNA, 262 bp, Glycine max
agaatgtcgtcatgaactgaacagacaaaatcccgtgccttagaattcttcaactttgccaccagttctgggcctccaccccagcatctgctaatctaaagactcttaggcccgctcaattaatcaagagaactcagaactctcctgaaaacctttggctatatggctccttgcaagccccacaaagaccaatagagagtacacaatcaataccgtacattgaaaaaggttgtccagatatattcaaccgattgatcgactc

SEQ ID NO: 16435 - DNA, 378 bp, Glycine max
agcttcaagaataatgacatcatccaattatttatttcccgaagggaattctataaataggcctcctatttttaatggcgtgggttaccattattggaaaacccgcatgcaaatttttatagaggtaatagatctgaatatctgggaagcaatagaaattgggccctacattcccactatggtggcaggaaatacaaccatagaaaaacctagggaagaatcgagtgaggaagaaaagagattagttcattacaatttaaaagccaaaaatataattacatctgctttaggaatggatgagtactttagggtatcaaattgtaaaagtgcaaaagatatgtgggataccctacaattaacacatgaaggtacaacaga

SEQ ID NO: 16436 - DNA, 425 bp, Glycine max
  unsure at all n locations
tataagaacaaaattgcctcaatcatttccaaatatgcatgtgaattatgatgcatcaacaagaatcaagccaaggctattgtgcaagcaatcaatggggcaaaacacgccaaatgattatgatgatggatggctcaaattctcacaaaggtaaactcatcactttcaaattgagctttcaaaactatcatgacatgtagaggagaatcaaggatttcaagtcacaaaatgtcaaaaacttttattttcaaaacaattacccatttcttgaacatatcctataattcaaagaaaaacatgcaaagtcgtacatgcacacaaaattgacccaaaatattaaactaacaatccgacgaaactaacaacattaacaaattaacaaaaccaacaaaactagcanaaccaaagaacactcccccccccat

SEQ ID NO: 16437 - DNA, 376 bp, Glycine max
tgcttagaattggaaatgggatattgaggtggcctctggtaatcgattaccagtgccgtgtaatcgattacacagagtaacaggccactggtaatcgattaccagttatgtgtaatcgattacacagtgcatattgcaggtttccatgttctgaagttgtgtaactcgagtttggcctatggtaatcgattaccaatgttgtgtaatcgattaccagaggagaaaacccttgaggcatactttttaacttcatgtagtggttatgggacacattgtgttgttaaccgtagttagatttctcgtgaaagagtctacccctttcttttatttcttgtagatcgcgatgacaatgcaattaatccatgaccgagtggag

SEQ ID NO: 16438 - DNA, 421 bp, Glycine max
ctaagctgcttgggagcttctatggaggtcggatcttttatctttattgaggtccttcaatggtgattttccaccatgaagatgcagcggaaggcaaaggagaaaatgagattttccaccatggggggtaggattgcatcatcctttccaccttggaaatgatttgacctcaaatcccgaggttcttcatactctgggctccttcccttgacacctataaaaagaataaaaacatatgtattagtggtgttgggtatgttagagtaggtaaggtctgaaaacccctttcatagagattttcccatgaggaaacatggttcctcaccaactcaatgagtggtgctacaagtatagaaaaatatgggacaaatcttttgtaaaagtttgttaagtcatggcagccccgaatttcccttatact

SEQ ID NO: 16439 - DNA, 376 bp, Glycine max
tagcttcttattcaatgctcatcttggtggtgaagctccttcttccatggcttattccctagtggatggcgcctcctctcacctcttctcctttgtcttccgctgcacctccatggtggaaaatcaccattaaaggacctcattgaagctcaaagatccagcctccatagaagccccacaagcaagcttccatcaagtggtatcagagcacaagagcttcaagtaggtgctccttaaacctccattaattttttgctttaccttctcttccattgttgtttcttcattttttctccatgtatcgcctcacatgtcttgtgataaatgtttttagcatgattctttagagtttccaccgattaaacttgctatagaa

SEQ ID NO: 16440 - DNA, 425 bp, Glycine max
  unsure at all n locations
tgaagggacactcacatttcctacttccagtatctcttctaacaaattctttcttcctacacctatactgaccactcctttcacaaccaattaacacaaatgaactccttcctctactatcagtctgtgtcagacctcataatgattacaacaaatccatttttatgagcaactgatcaagcccactgcaaaacatcatctcaggtatcaaacacctacaacgcaatccaggcaattttagttttctacaacatattcattttatgaaatcactcacaataacgaacattattacctaagaagtattaaacgcatccgaacaatcaacatgtggttcattcacaccacattcttgttcattntgatcatccatatcaacttctttaggcattatactgtcatgcatccattgatcttcgttcatc

SEQ ID NO: 16441 - DNA, 380 bp, Glycine max
agcttgtatgattatggggtacccatcacatgtggtactaggtggcggtcgggcaatggtgcacaacaagttttccacatccacaatgcgcgcataaacccaccatcccctgttgcccacctccaactgagctcacgtactcccacgtagcccatatcctcgtttctctcaacaccgggtccccatcaatcctcccaagcttccacaacatccaagcaaaacaacattcacacagcacaagctatcacagccaagcaaaacaaagcaaaggcagaaaactctgccaaaacaccaaccaaaaatcacagcttttcccactcaaagaccccagtaacaattccttcgatccaatttgttaaccgttggatcgactccaaaat

SEQ ID NO: 16442 - DNA, 421 bp, Glycine max
tgtcctgtgcttgtgcccttgtgcttttgtgctttcttctgcctgcatttcaagtcatccctgcatcattcttgctttcatcttacatcctttactccatcataatccaagtaagtagtgcttcatttccattttcattttcatgctttgaaccttaggatagacgatttcttgctttgttagcttgccttgctgtttaggttagggtttctagctttagggtttgttattttaggatttaggttgagttgtaagcccattaggggcaatgctgctaaaaggggtgaagacccctgtgtttctatttagaaattgcgatggacacgctaagtgcgcctgctacgcttagcttgtttatcacagctgttaaattttttgatttccagatgagggcgctaagtagaccatgtcgcgctaagcg

SEQ ID NO: 16443 - DNA, 358 bp, Glycine max
aacaaaagacatcctataagaacattgcgtaacgcacatgcctcaattcagccgtctcttaatcatcagggacattggactttcctcgacgtcgacaggggtccagaagtaaacatatactagattaccattcggttctcaacggaataaatcagaccctccgagaatggctcgactcagctgtacatactgcccaactgtacaatgcggactaatataagatatcagcccagttcccgttgtcgagaatgaccttgcacactatgaacgtagccacctatatcttgatgaccatcggagcattgtgacatctttcagtgaccccgcaatccttgattgtgaaaatgatagggggcat

SEQ ID NO: 16444 - DNA, 420 bp, Glycine max
  unsure at all n locations
tatgctctttnggaggcaataaacattttattgttatttattgttatactttaataagattatatcaaatggacataaaaagtgcattccacaatggactaatataagaggaagtctatgtagaacaaccccctgggtttgagagtaacactttccacaacatgtttttaaactcattaaagctttgtatgggctaaagaaaactccttgagctttgtatgaataccttagttcattccttttgataaatggttttgaaagaggaaaagtggatatagctctattctgcaaaaactatgactcctaatttatattagtacaaatctatatggatgtcatcatacttggtgctactaatgaacctctatgtgaggatttctctaagttaatgtacgttgaatatgaaatgagcatgatggg

SEQ ID NO: 16445 - DNA, 370 bp, Glycine max
ttcttgcgtagccgctcttggtgctcacaaaataccaaatacaaatccctcttattactagctatgtttgaatgctttagttactgaatgtacaaccttcaaattgttgctcgatcccctctttggtttctgcaaaaaagaaaaacaatatcaaagaaaacattgacagataggtcatggttattattactcgaaccaaaaggaataacatttaaacgagtcatattatttttagaatgtgaaaactctacatatctatggagaacatggggtatggaggcacgtaatcatgtgaataccacaagtcattttctgcaattcaaggactggattaattgctctaggataaaagcatacgtctcggatattg

SEQ ID NO: 16446 - DNA, 308 bp, Glycine max
  unsure at all n locations
gtgacgtatagaaactcagctaagctctagaagcgtctagactcttttatttgtgagtgtgctgctggaacgnnnacccgctgaagacactgcctgaatctgatgctggcctttctggacctagcttggcacgctgccggcatgtaaattgtcttcccatcacaccttgaatgctgctgtcaccgtatacacgtatcagctaaatcttgactggtattgaagccttccattgacatggcttgaatgctaaggtgcgatcccatcccactcctcctggcctatttatccacatgcattacatcaataca

SEQ ID NO: 16447 - DNA, 378 bp, Glycine max
tttgcatgctttttttattgaaaatttaagatacccctgtacttcagggaacgatcctagtcttttgttataaatgactactccatggactaacggcttgactgatttatagaataccgcgtttatctttctgaaacaaacgttcacactgttcggacttgactcttgattcccttgaccatagtgaagcccctaaaactaaaaacagaacattcagaaaaagagtactactttcaaccgacgatattttgggaacgtaattgaattctctcttcgaaaattctaatgaatgcaaaatatgcccaaaaacagagtgtcttttttagttcaattctagtatattatcaatataaaaaattatattattaattgattaga

SEQ ID NO: 16448 - DNA, 415 bp, Glycine max
tattttcaagaatacatttatgatgatatgtgatttcaaatattaagggaatttttaccttttatcttcaagacattattttctcttagcatattaattagtggtcaaccttccccatttgttttgctttattcaaacgaatttaatagcctccagagaagcatgacctgcatgtatccgtaactcatcaaaggagattaggcatgtacttcttccgtttcatgtcaagtactggtgtcatagatcttttcacatatcagaaaagttaataaatcactaaataataataatcttataaaattaaccttatttatattaaaaagtaaattttaaaacttatcttttattacactacagttattatatgacagaaagtatatagcatgcaaacttgtattttcaggttcaagtttat

SEQ ID NO: 16449 - DNA, 363 bp, Glycine max
  unsure at all n locations
attcacataggatacgcgacacaagataacaggcagtcaattatacataccaagaaccaggaatagtcaggtgtagcgacagacaaccagcatatagatagccatgagaatgcgaaaataaatgcacacaaagaggctagaggaaaggtgattgacgccctcagcaacaggcagcgcgcgaacggaccggcttgctattaccagaacggcaggcaagatattgcacgntcggaaacaaggccaaggcagatggaagacacccactccacccaccaagaaattcaagggcttctcggctattgtcgacacaagataaactcactggaccacattatggaaaggttggatggaaacacagatgcn

SEQ ID NO: 16450 - DNA, 367 bp, Glycine max
gaggaaattcaaacgacaataccgtttttatttttgtcggattgagtcacgcaatatcgggagacgctggaaattgaagaccgaagctctgagcaaattctaacgacaataactttgtactctgatgtccgattgagtcacggaatatgtcgagacgctagaattgggataccgaagctctgagcatattcatacgacaatgcctaatgactcggatgtgggattgagtcacgtaatatctcgagacgctcgaaattgaataccgaggctatgagcgaattcaaacgacgaataactttttactcaggtgtgcgattgagtcccataatatgacgagaccctcggaattgaataccgaagctatgag

SEQ ID NO: 16451 - DNA, 354 bp, Glycine max
ttcttcatgcacaaagtaggctaaaaaaactctatgtctgacctacacaaatttgtactcttccatctgatggacgagacccctttcgaccttccacacattgtctacatcaatattttaaggaacatgaagccctcgggagaagtggatgacatctactatgccaccctcatcagcaaactcctctgggaacaccaagtattccatgtctttgaaagattggacgaggactccaagcagtccatcatcagtaaaagaactttcggtgccacacagtaacactttagtcaacaagcttgttgactgtaagcaacaccaggtaagacttatctattagtgggcaccttgtctact

SEQ ID NO: 16452 - DNA, 334 bp, Glycine max
ccccaatttaatggatttttaaggtttgagaagtgaaattgagaatgaggtaaatttggagcaaactctcaccgcttacaaaaattccgggtagaaatttccaggatgtcacacaaacaaacatcaaaagaggatccatatacagtgaaatcatccataaacacctcgatgcaattttctaaaaaatcactaaaaatactaatcatgcaccactagaagataccaggggcattgcacatgccgaaaggcatcctcctgtaagcaaaagtgccaaagggacatgtgaatatggtcttttcttgatccttatgaacaatagtgatttgcatataac

SEQ ID NO: 16453 - DNA, 331 bp, Glycine max
tttctttactaatagtggcacatttggagaaggggttctgtttactacccttgacaaaacaacacctttctatgctagggcttgttaacgaggtgtaccattccattgctatattgttttgtagcaccccagtgtggtctagtaagatcactaaaaatagtatcaaaattggaccactttgtatttaattattcatttatgtgagatatctatggggcacatctactttaccacatgaaagttgaaatgaacctgtgacgcgaggaggattccaatgagttcaagaaagatgaagaacattcgtgaaaccacgacctagttgggagttaat

SEQ ID NO: 16454 - DNA, 403 bp, Glycine max
  unsure at all n locations
nggctcctctgtaattgttttctgtttgcttccctagctcttcgcatagtgacattttatgctacgcagcttcctggtccaaactaccattgccgagaggtatacttatttgagaatgtgtgctttttaaacaaacatcacgtctcttaaaattaactgtttcttctttctggtgactgtgagtggtaaactatgcaagctggattcttttcaaataatcttttgatttaactccacttcatgtatcgtgcaggggtctaaacttgctacactgcctcatccagatagtgacgttgaagtcctcttgattaattgctagtatactattgttcttgagttctttagctttgactcctttgtggtgttatggtgctcatttgcgtttcatcatgcagttccacgt

SEQ ID NO: 16455 - DNA, 365 bp, Glycine max
tgcttgtctcagcgtttatgcgagacggagaccaacatgctagctatcatcgccaagtaccaagaagagttaggtctagcgacggcccacgagcatagaatcgcggatgagtatgctcaagtatatgcggaaaaagaggctagaggaagggtgatcgactctttacaccaagaggcaacgatgtggatggaccggtttgctcttaccttgaacgggagtcaagaacttccccgcttgttagccaaggccaaggcgatggcagacacctactccacccccgaagagattcatgggcttctcggctattgtcagcatatgatagacttaatggcccacataattagaaatcgataggaaacttgtat

SEQ ID NO: 16456 - DNA, 406 bp, Glycine max
taaagtatgcccgagtcattcatccctatgagatgttgttgaagtattggcgatcagaattgccatttcttggattatagggttgaaccaagctcatgcttttacaaaaaggttcatcaagtcaagttgaaatatggaagtaaccgtcttgcaaaattggggcaaaagacgaatcacatcactgcttcgtctactgccaaacatatttaggattgttgatgtccttgttacttccagtttcaccttgacaaagatgtcatggaccatgttgaaaatctaaattgattcaaccccatatcctgcgtaaaaattcgcaatacttcgactgtacatcattcgcatgcatccatgcttttcattggttgcattgctcattgcattctttccttgaaaaataaaataaaat

SEQ ID NO: 16457 - DNA, 366 bp, Glycine max
tgcttaacattaggcatgtgaagcgggcggaattcctagaggaactcccttatgttatcagacataaatagggaaaaggaaatgttgtagccgatgctctctctcggagtcatgcattactttctatgctcgaaacataatagagcgcccatgaatgttagcaccgcatgtctgaacatgatgaggcttttggagaaatttttaaagcttgagataaggcatcagaaaatggctactttagacatgaatgcttactttccaaagaaaacacatggtggatgcctaaatgtgctacaagaaaatggcacggctgtgaagcacatgaatgagggttaatgcggcatttggtggtacataagagtctaa

SEQ ID NO: 16458 - DNA, 331 bp, Glycine max
tactaaggcacctattctagctgttcctgacgtttctaatcttctgagctagaatgtgacgcctatggagtgagacctaaagctgtattgaataccaagtgggcactctattgcttattttagtgaaaaacttcacggtgccacactcatctaccccacctatgataaaaagctttatgccttaacacgagccatgcctacttgggagcatcaccttgattcccacgaatctgtcattcatagcgatcatgaatcacttatgcacattcgacggcaacagcaagttaagccaaaagcatgctagatggctacagccctatagcacttccat

SEQ ID NO: 16459 - DNA, 378 bp, Glycine max
ttcttctcgaccaattaggttatggataacattcagtaactttatcatcctctcggtgctacccgtggctacagctgtttgcaagaagtgacttcttccagcaagtctagcaatattcaaaggagaatattatgcaataaccacattattattgtttcacaatattttggattattgacttttacacattttttggaagaaaaaataatcacgtgaagaacttttacaatccactttgctttgcaaattattacaaatatccatgaacatctttaacgacttttatatatttggattctggaatggagcttgcatgagaaaatatagcagataaagttcacaagtaatgttaaggattaaataagtttttaatatcta

SEQ ID NO: 16460 - DNA, 426 bp, Glycine max
tgtgtttgtgctctgcatcagaataggttggtttcatgaacatattttaattccttttctgagctgactctttaaaatctctagcctgtttttaccggtcctttttatgttggacactaaaactgacgcccttttaaaatattggttatgctgttaagggttttgtcctgttcatgttgcattggttctattgtattttgttttatgtcttttttatatactaaatcacatgctatttgtcttttttttatatactaaattggtgtgaattgaccaagactgataaggagtgtttggccatgttcctagccattgtggggcatcttagcattctatttctatttgtcggtaatgatgagaaatacaagtgaccaaaaatgtcatatatgaaggtcactagataaatagtgcttcatccctcctgtg

SEQ ID NO: 16461 - DNA, 380 bp, Glycine max
  unsure at all n locations
tgcttcttaataaactcatcatcagagtcatcaaaatcatatgagagatgaatagggctacttgggggcgtaggaggactaggaggtttccagccagtgatcttatagaagtagtccctaatcatgaaccatctgcaagcctcctttttagcatgagcatgatccttcaaggcttgagcaagagcttttcttgttctggcaagttcagcttcaagcaaactaacataagtgcgagaggatggaggatcatacacttggacaaccatggaatcagaagcagcttcagcctcaacattagatttgacttcttcaatgataggatccatgtgatgtgtgaagaagaatttggagaagggaaggaatgccatanacaaaaaggg

SEQ ID NO: 16462 - DNA, 428 bp, Glycine max
tgtatattgtcttattcaaaacaggaccactttcatattcttcccttgcattggcataatgttcaattactgtcaaggcttttggagcatctataacttgttcaactatattttgtgcaacatttcggttgataagctgcatcaaatctctctttttcctctgtattctttcagcacgaaagtattttttggttttcaattgcttggcaactttagtttgtatctctcctttgacaatcttcttccgtatcgcatccagagaagcccccttctcaagctcttctaacaattcttttcttgcttcctcaaattccatctaattcaattaagcagtgagtgccaaaaagtattgttagagaaaatgaaatatgattgacaatctaagtaattaatatttaatactcagcagaaaaaagaagaaatcagaa

SEQ ID NO: 16463 - DNA, 363 bp, Glycine max
tgcttgcttgtggggcttctatggaggctggatctttgagcttcaatgaggtcctttaatggtgattttccaccatggagatgtagcggaagacaaaggagaataggtgagaggaggcgccatccactagagaataagccatggaagaaggagcttcaccaccaagataagccttggataataaacttggagaggatgcttcaatggaggaaaataaagagggagagaaagagagaggggggagcacaaaattgaagggaaaaaaaagagagaagttgaacttcgagttgtgtctcacaagactctcattcatcaaagttacaataagtgttacacatgcttctatttatagactaggtagct

SEQ ID NO: 16464 - DNA, 417 bp, Glycine max
  unsure at all n locations
tcaatgctacctctaacgctttaacactgacattttcaaccacacaacaattgacacaaacttgtcgaaccctcatttaccaagttttctatctactttgtataacgatgaacctcctaccttaaccctcttagaaatgggaccagtgcttccttcatcctcagtggtaaaagccttgtcaccagtatcgcactcatcatccatcatcaattcatgcattaacattcaattatatgaaatcttcctctattttggaaagcatatgttccttagatttcatagattcaatgaacaatgcactaccactaaaagtccacaatgtctttcttgaacctaattacgacaataacaaacaaaagaatctaatgatttagcaatactctcttttctccactacaaaatgaanagaaaaaagag

SEQ ID NO: 16465 - DNA, 415 bp, Glycine max
ggcaatcagctcgacccgggatccttaagtcgacctgttgcatgcatgctttctgaagttttctggttttccaaaccttgaaaacttgtgctattcatctttccattctcttctccctttgccaaaaagaattcgccaaggactaaccgcctgaaatctttttgtgtctctcttctcccttttccaaaagaacgaaggactaactgctgaattcgtttgtgtctcccttctcccttgtcaaaaaattcaaaacgacacagtctaagaattcttttgattcttccctttccctaatacaaaagtgttcaaaggactaaccgcctgagaattcttttgtatccccattcacaaagtatcaaaggtttaacagcctgagatctttgtctcaacacattggagggtacatcctttgtgg

SEQ ID NO: 16466 - DNA, 408 bp, Glycine max
  unsure at all n locations
tctgggagggacatatataatgcatacacttcatatcatattcatttcttactagtttagtaatttctaaccgagagtatttatttctccagtaccattattcacgttcaatatcgtatcaatattattgaaaattctagggatatgatgagttgacatcaatgtcaattttagatctggggtatccaggtcagcatacaccatcatcatgcatgcacttgaactttctttaatttccctttgcaacatggcaatccttaacattntgtactacttatttttcccctttgcaatgtgggaattcatgacatttttttgctttggttgaaaaatgattcgttntctttacctaaccaagagacatggtacgtcaagggcttcttgcctagaatacgatggatacacatg

SEQ ID NO: 16467 - DNA, 367 bp, Glycine max
ttcttatagattgtccaatccataagtggttcaaataattgtttttttatttttttttcaaaaatgttgtacaaattaatttaaaattaatgacccatacaagaatcaaaccttcgagatttgtgttattagcacaacactctaaccaactaaactaataaatgaattatattatacaataattaatgtcactatatgtaatactaaaatttttaatatttaatgcgcatgaaaatttagataataaattttgcaacaattaattttgatctaacaattaatttgtttacacatgttcgtagaaaaacaaccactagaccacatgtcattcacatattggataattgaacactgcagaagttgagtg

SEQ ID NO: 16468 - DNA, 404 bp, Glycine max
  unsure at all n locations
tgaacatctgaacctaagtagcatttttttgtttatttttaaatgtaattnttggtgattaaaaacaatcataaattacaaaataaaaattaaaaaatcaaatcacaatttgtggctgtacaacaaccaccacacacgtccaaggcaagagattcagattgagggcccaattggtggctagaacaacggtgttgctggcaaagttcaatgtaatcactgacaacaccatcatagtcacccaacgcatcatcaagaagcttncaatagggacaaatttcaggctcacaaattgcaagtccacccccgcaaagcctccaccctacaccctcacagatctggttgtcgatgtagaggcatccatcggaagaagaggcaatggtgcacaatgtcaaggttgagccaat

SEQ ID NO: 16469 - DNA, 371 bp, Glycine max
tcattcttctttgagaaaacttccttgagaagctaaagcttagctacacacacccctctcataactaagctcacctccttgagaggcttccttaagaagattcttaaagaagctagagcttaactacacatacctctctaatagctaagcttacctccttgagttgagaagctagagcttagctacacaccccctataatagctaagctcacccatgacaaaaaacatgaaaatacaaaaaaaaagtccttactacgaagactactcaatagaatggccaaaatacaaggcccagacaaaggaaaaacctattctaatatttacaaagataagtgggctcatacttagcccatgggctcgaaatctaccct

SEQ ID NO: 16470 - DNA, 397 bp, Glycine max
  unsure at all n locations
tgttcttcactcatcttctccttgaagtggcatcttcaatcacctttcctccttctctattctactatcattgatcttcaagaagaaaaggactccattgatgaagaagtttcaaggcgtacaagctccacatggggctacatcagacagcgtcgactgcgtcacgtcaccagaaaccaccaagtcctcggcagcatccaggtggaacctcccattcgtcggcgagaacgagtgtgctagcatccccaagctcccgtcgaacggctccccctggctgtggtcaccactgaagaacccgatcctaatgtcggtgcttgtttataaataagtgcaacaagtttttctttcattgtgnctctcttgtgtgccttttccatctgcaacaaagcttgttcta

SEQ ID NO: 16471 - DNA, 232 bp, Glycine max
cttgtctatacagtgcactgaatgaacaggcgaatacaaggccatacagaatctgaggaattgataccgctcacggttccccgacgcgtactacccgcaaacatggagtgtcactcctgaggtgcccattgaatgaacttactttcattgattgcgttgagcttactgaccgctctccagtcgtaactgctgacaggcccacttgcttattgagaactgcaacccgaacccg

SEQ ID NO: 16472 - DNA, 408 bp, Glycine max
  unsure at all n locations
ttcatgacttgcaatctttctatataatggtgatctatacgaaaatgccacaaatctatagggatgacattacattntggatgggtaatggcggagcatatggttcttgaatgtgatggtttcaaggtaagctgataaagcccatgactcacttcaactgtaccaatcttcactttggtgttgatatcctgcaaaacacaagtattagaggagaagattaactcggagctgtttgcggaaatgagtttggatatggatatgagattaaagctaaaagaaggtatgtatagaacatctttcaatgtaattgaagaggtgagatggacggttcccgagtgggtggcatgaacttcgtgtccatttggtaacttaactagaatgggtttaatttggtgatatgaatcaaaa

SEQ ID NO: 16473 - DNA, 164 bp, Glycine max
gtgaattctagctccgcgcgccgggatcctatgagtcgatctgctgctttcttcttcttggtgattcctagggtgtgtggctataacgcggtcgtaagagacctccgagtgaaataggtttacgatcacaattgctcacgagctaccattgtgcaagctttagc

SEQ ID NO: 16474 - DNA, 130 bp, Glycine max
tttgagcaattcaaatggttataatgtttcactttgaggtccgacctaggcgcataatatatggagacgctcgaaagtgaacaatcgaagcttttgaccaattaacctggtcataactcctaactaagat

SEQ ID NO: 16475 - DNA, 419 bp, Glycine max
  unsure at all n locations
tctttccctgtgctgtgctctttattntgaaccccataatatgaaatccaaatgcatctggcaagcacgacctgctgcacttgcacatacatcgtcatcgtattcatccccttgcttttcctttgcaaatgctgctcaattgttcatacaaaaatatgctcctcacggaataaagaaagaaaaaataattgttataataagttttttcctgtttataatctttttttttttttaagtttataaggagttttgcctgtggaagtaaaccatcatttgacatttaaatgtcaatttttgctatatagaaaaatgtcatttttaaattaattatgtagaaaatatgaagccgttttggtaaaacattcatcgataacattgtaattataaacaagtttttctttacagatatttaccccttt

SEQ ID NO: 16476 - DNA, 161 bp, Glycine max
  unsure at all n locations
ccttacgcatctgtgcggtatttcacaccgcatatggtgcactctcagtacaatctgctctgatgccgcatagttaagccagccccgacacccgccaacacccgctgacgcgaaccccttgcggncngattgaatttaccttgttataatgattgctatcg

SEQ ID NO: 16477 - DNA, 408 bp, Glycine max
tgtgtaatccagagagagtatctttttattaattttctgcaccaaagcaagaagatcattgatttcagcagatgttaaattatttgacacaaatcacattagtcaaagtaataaaacacaaaacacttggacttatgcacccaaataaacttagatagccatgacctttggcagttaaaaaaagaattggtagacacatgatttcaaatgcttcaaagaattaatgttaactactctttggagtcataaaagaggaaaatctgtaaaattaaaaagtgggctaggggtggtaattagttacactcaccaaagaatgttgtctgttgactgtgcatgctattaataattaataatatactaaaaaaaaatcaaaatatggcaccacccttctcatgaagagcacaggat

SEQ ID NO: 16478 - DNA, 413 bp, Glycine max
tcagtggcttagtgaagatgaaaaggtaaaagtgactcaacaggttgaggtgagtctcaccattgggagatataatgatagggtgttgtgtgatatggtcccaatggaagcgacccatgtgctgttaggaagaccgtggcagtatgataccaaggcagtgcatgatggcttcaccaacaaaatctctttcaagcaagatgacaacaaaattgttctcaaaccgttatctccgagagaggtttgtgtggatcagataaaaatgagagaaaagaaaaggagtgagacacttgagaggaaaaagagtgaaacacttgagaaggaaaagaggggaaagaaaaagagtgaaacacttgacagggaaaagagagaaaacatatagagtgaaacactcgagagggaaaagagagaaaaca

SEQ ID NO: 16479 - DNA, 373 bp, Glycine max
ttaaaccactttcctattatgcttttcactagagcaatctactttgggtgaatattgatctattcctgataatgatcttttggtataataatatcgttcaacactcgtgatgcatacaaataggttaaattaggaagtttctttgaaaatcgatattaacacggctttttacactatctataaataatggcatttttatcgacatcgtgatacctacgatccgttatgttgcggaactcgctttaaaaaagtgatgcgcgtggcacctattgtcatctttgcgtaataaatcgcattttacacccactttctttggcggttattgaaaacctcctagaatctatgcttaataaatttacgccggtcttataaa

SEQ ID NO: 16480 - DNA, 379 bp, Glycine max
taaaggaagtgaaagaattagcatgggcagaaatgtcttcgcattgattggtaaatttgatccccaaatcccttataaatgtaaagatccaggtacattcaacataccttgtattatagggaacaaggagtttgacaatgccatgctagatttaggagcttctattagtgttatgcctttgtctatttttaattctctatctcttggtcctttgtagtcaactaatgtggtgattcatttagctaatagaagtgttgcctatcctgctggtttcatagaggatgtcttagttagagttggtgaactaattttccctggtgattcttatatttagaatatggaggaaggattttctcatggatcacttcccatcattcta

SEQ ID NO: 16481 - DNA, 398 bp, Glycine max
tggtgcatatgatttatatgctccagcttgatgggtgagtgttgaatatcttgctttacttgatgtatgactgatgtaatatcttgcttatctgagaaattagcagagatatgcctgagagtaggctgtctctctcttccatcttttctctatatattttgtaatcttaccaagttatgaataagcttagtgagagacattttttcctcactcaaatttcaagcttcaactgtttcattaatgctgggagtaatttttggaaaaatacataactttaggacaaacttaatgttactatattaactaatttccttgtgaatcagttaattgggtcttcctaaaaggaccatagtaaatattactgggattcatgtataaaccagagtgaatattatgta

SEQ ID NO: 16482 - DNA, 328 bp, Glycine max
tcagcctgaatgctaagcttcagcctgaacgctattcgatagcttatctgtggctaagtgcgagcataaatcatacaccatgcaagtaagtcccttgattctatttctctttcttatgtcataactatagggtagaagacattaactgtagcttgagatttctatggtttatatgcttagttagaataaaattaagattacggctatgtaagcttgtatactgtattgattatggcgcacacatagtatgtatgatatgccttttacaggcttgaatagtgcgagaaaatgagatatgttccctgcattttctggaaaacgcaatgaa

SEQ ID NO: 16483 - DNA, 410 bp, Glycine max
tcttgttctagatcactactactagacattcttctatttagctgatgatgcataacctaatgcttgacatgggtagggatgttgtttctccataattgagaacctaatcaaagaaggttggggttttgtgaatatattctcgaactaccagttcaagatgtacaaggaccataactgttttcttaaattctgttgttttggcaacataacatttatgccattaattttcattacgtatgtaaacatattgcttgtgtttcataaaattacaattacttcttcttgtatagtccctccccctaaataaatgtatattgcattttaatctattataacataaatgagtttattaataatgatgaacaagctataaacgaacttttcaaatatgcatttttcctttcaactcc

SEQ ID NO: 16484 - DNA, 312 bp, Glycine max
caccttgctaggattcgtcccaactattggtgataccatcatcaagatcatgctctatacgccaggcatttccgaacttgaaagatctggtgacaaacctcctaattattgcgtccaattggatcattatacgagaatggtcggactttgaagtgacactactacatatattgcaagttatgacatattaactctgaagtggcatggttttaatcttaatgactacatacgacgatagttaatgactaattctcatagaatgcttgcttaaattttatgaatgattacaatgaggggcttagaaagaccgtc

SEQ ID NO: 16485 - DNA, 405 bp, Glycine max
tgtaatactgaatttgtaagggaaggggtgtgttatgctatgtttgattgcgcattcttgtatatagtaacttttcaccacaatttacaagtttccattcaactgtaccccattccaccatattcttgtggctatgattgtggattagatgatagtattctgagaaattaccgtacttttgaaataatacaccttaacaaaacaagaaaatgaaagaataaagcattttgtgccaaaagaaaatacagattttgcatgggccacacaatttatttacgtgattttttacaagaatgacatatggagctgctgtttcagcatatggcctattctatctatgcttatgggtttgcacttcagtcaatacaataatgaaccataatacacagaatgccaaatggattt

SEQ ID NO: 16486 - DNA, 531 bp, Glycine max
  unsure at all n locations
tactcctacacaagagtacacatacgacactttgaagtgataagtaataatagtaaancacaaaaaaagagggtattgatgcgtcgttgacatgcacactatanaatacacaagctcgacangtataatgactctcgcaaatgaatcaccctttgttgagccataacaccaaaatacacgagcggtaaccagtgcacacataccaagtatagacaacaaatgacataaagtgattatcattagattaaacatgcactgattcaaactcaaggcacacaaatagcacacacttagaactaaattatacctgtgctccccaaccaccaacatgaatagtacagatgacacattccacatgcgaaaattcacgccgcgagcaaaagaatcaccagtaatcggagatctcaggcggccaacgaagcatcccgatcgcacaacaagagaggagaaacgagggaacaccctcgcgacggaagacgcggcaccagcaacagaaaccatcgactacatccctggaagctctcgagagaa

SEQ ID NO: 16487 - DNA, 414 bp, Glycine max
  unsure at all n locations
taagcagttaggtgaagacacatgaatacatttatattacatcatttctagcatgcttcctcctgcaagcaatgttgtcaaaattgccagaccacccccctccggaatttttgcttctctcattcatgtgctactctctcagtctctccctctttgtactcttgaatctctcttgctccctcacttattgatctttctctctactctctgctttctgttttcatgttctgactttggccttctctgttcttacccgactacattctggtctctgccttggattctgacctcggtcttcgcagtatctaccttgtgttctgacttcagtcacctgagacttcattctggactatctntctgctctctgtggttcaatactttcagtatttattatgacttgtatgtgaacttatc

SEQ ID NO: 16488 - DNA, 416 bp, Glycine max
tatgattccatttcctgggaattcttggattggatgtttaagtccattggcttccccagcccagttctgtacttggatcatggagtgtgtttcttccacttcctttagtgtggcagtcaatggatccatttatggtcacttcaaaggacagcggggtcttagacaagaggatcctctctccccttatctgtttgtgctctgtttggagtacttttccagagatatgagcagcctcaaggatgatgccaattttaaatttcatcccaactatgcaggtattcagctatctcatttggcttttgcagatgatattatgcttctatctagatgagatatccattctgtgttaactatgtttgccaagcttcagcacttctgtagggtttcagggctttccatcagctctgataaatctg

SEQ ID NO: 16489 - DNA, 410 bp, Glycine max
tctaaatatccgaaacatgatattattgggggccttaggcataaggtgtctagttatgcatatttgtcaagtgtgtggtaaattattttttttaaccattatattggtataaaattgtttctactaaaaaatggtgacaatttttcattggaaaccttaaatgcatataagatgagtatctttcttttaatatgatttattctatacataagtgcgatcatcatttagatgcctaaaaatatgtatttctttgattgcacttaacaaatccagatactagtgggtgttatttacgatgatcacttgattctttgctaaacacataagatgttgatgagtgttccataataatagggatcgaaaacaaattttcaactttttgaggaatgaaagtcatattctgttttata

SEQ ID NO: 16490 - DNA, 413 bp, Glycine max
taataagaggcatgctaagtgggtagagtttttatagcaatttccatatgtcatcaaacatacaaaggggaaagggaatgtagtggctgatgcactgtctatgagacatgctttacttgctatgcttgaaactaaactgtttggactcgagtctttgaaagacatgtatgtgcatgatgtggactttgctgatatttttgctgcatgtgaaaagttttctgaatatggttactatatgcataatggattcttgttaaagcaaataaattgagtgtgcctaagtgttccattatagagttgcttgtgagtgaatcacatgagggggggttgatgggacactttggggttcaaaagaccctggaaattctgcatgagcattttctttggcctcatatgaggcgtgatgtgcataa

SEQ ID NO: 16491 - DNA, 415 bp, Glycine max
tgaacgaatataagatacatcttcttcgaccttggtgattcttgactccatctcattgaagcgcatgtccacttgtaactccaaagtatcaaacctttcactaacaaaggtttgaagaccatcgaacctgtccaaaatctttgaaagaagagatgaatcttctccatcatgtccttcttcaccaacatgtcgagcaccctttttcacccaagagccatcatgctctttttgataaccaaaggatgcaatgactgaagcgcctattagaaaggatctcttgattggaacatagggtttagaatcaagagggatgctaaagtggttaaggaagagggtgactatgtgtggatatggcaatggagcattcaatcgcaatgccttatgcatgagatatctaacaagatgtgcctaatca

SEQ ID NO: 16492 - DNA, 410 bp, Glycine max
tgaagggacacccacatttcctactcccagtatcttttctaacaatcttttttcctagacctatactaaccactcttttcacaaccaattaacacaaatgaagtctttcctttattaccagtgtttgtgtcagatctcataatgaccaccacatatccattttcatgagcaacggatcaagcccactgcaaaacatcatttcgggtaccaaacacctacaacgcaatccatacaattttagtcttctaagggacattgattttatgaaattaataacaataatcaacattattacttgagaagtattgaacgcatccgaacaatcaacatgttgatcagcctttgctagtagtgaaggatcaaataccatgcagctttagccgaaagacatataggtgattattatcttt

SEQ ID NO: 16493 - DNA, 406 bp, Glycine max
ttgagccaaaatcctgactcaccatagaccttgactccagggtgagaatgccaatccttaccctcagaagcaaaaaaagaagagaaggaaaacttccaatcaaaggaaaaaggagaaggaaaattaccaatcagagaggaagcaaaaaaaggagagaaggaaaatttccaatcaaaggaaaggaaattcccaatcaaagagtgggagaaagcaaaaagaaaagaaagataattcccaatcaaagaatgggagaaagaaaaaaaggagaagtaaaaaagaagaaagctcctgttcaaagaaaccataagaaatgtgcagagaggtctttagaccggacaatatctgaacaatatataattgtcaccaaatgaacaaaaggaaggaaaggaaaccacgacctaaaatg

SEQ ID NO: 16494 - DNA, 407 bp, Glycine max
tccagctcccagaataaaaccaattgctttacaatttgttttaaaaaaatcatttggtcatatttaaataaatttgtttataagtatttataagaaaagaatctcatatactaagattaacttgtgcgtaagtaaaagtgacttttttttaatagaaaataaatgattttttcataaatgattgtaaatataaattaatttaaactttttttctcccttattatatagtataagagagtttacattactcttatacttatatataaaaacttatccaaacaaaatctaaataactcatgtatgattttaacacaaacctcagtccattacaaaaaaactagacactctgtgtcgttaaggaaaaaagttgaacgatcatctaatctatttagtaatgaaaacggttc

SEQ ID NO: 16495 - DNA, 408 bp, Glycine max
  unsure at all n locations
tgttaaagtaattgacatgtgattntgttatatattgattcagttgtgcaacagaaaactaaatttccctttaattcttcaatttaatttgtaggggccaactcgagcacttttggctgcaacaattgggaacatcctaggatattcttcaagtgctagtggaaagtggaacaagtgagactttgcttatatcttgtgcttatttcatatttttgtacatagctatatatgtaaagtccattctgcatatgttttttcctttaattctgttgatttggcacatcaacaaagacacacgaggagctatgagctatctctatttcccatagacatgtgcttctaaggtctataaattacaatttccatgaagaacgtttcaattttgatctaattaaacttttctataca

SEQ ID NO: 16496 - DNA, 417 bp, Glycine max
tcctcgggccattcctgcgaaggcaaacatttggaaagttagtttacaagaaatataacaatcattacaaacaagggccaaacaacacttctcatggcacgagtgtcaacatgcactttataaaataatcatattggggtcgtgctattttatgacacatacgtatttgcacacataaaaattttgtgtgaagcattttacgacacctattcatgtacatattttttgacaaaccttttcatgctacatcctatatatatatacacacattttttggaaggcttcttttgttacctactcacaaatacacacattttgaaaaacacttttacgctacccatccaacactttgtaaggcacttcatgctatatatattcatattatgcaaggcattttcatgctatatatgttcatat

SEQ ID NO: 16497 - DNA, 416 bp, Glycine max
  unsure at all n locations
tcgaattgctcaagtatctcttctcctttcaacattttcaactgccaataaattcagcacttctgtgtcagtgctacctatctcaaccattaaaaacattcaatacataccattaatattaaaataaagttttaaggaagattgacaaactatgcatataataaacaaacaccatatgcaagaataaaatttgaaactagtttttgcatatgagcatatcaatatgcatgaattgcaaatatacctgagagacagagagaaggtgggaaagagcgtgttggtattgagcatcattgttatggagggattcttggactttgttggtgttgtcgtgtacaagcttctgaattgcgtggtcgatgagctcanaccttcgatcttgttccatgcttgtatattgtttggacttcaataat

SEQ ID NO: 16498 - DNA, 412 bp, Glycine max
tttctcagtcgtctgtaaggatgattgggtgtcataaagcggcgatgcctactgtagactgtttttctgtcatgtttaagttgtatgtaacttgtattttcttcacagatggggcatgcatgatgacccttaacactgtaaccgttgagattcccatatgctggaaagtcattaatggtacaaaaaagcattgcacgcatttcaaaggtctccttgcgaaacgcatcaaacactactaccccctcgtcccacaactttctcagatcttcaaccaacggacttagataaacatcaatgtcatttcttggctgtcttgagcccgatatcatcatagacaacatcatgtattatcgcttcatgccaatcaaggaggcaaattgtaaattactatcagaactggccatgaactgtg

SEQ ID NO: 16499 - DNA, 412 bp, Glycine max
tgctttatttaggtgggggcatgcaatcagtttaatatgttgctggggatggatatccagcctttttactgaaatagatattatagagaagcatatcaacaaaaagaactgaaaaaaaattaaaattgttgattttcatgtattttcctttttgttgtttatctatttcacctgtcccccttaaaatatattttcttaatatatcttactgtttccacttttgatttttgtgaccctcatttgaaccactttgttgttctttacaggacaaaattgaattaagggaaggatcttggtttgaaccattaaaagatatggaaggaaagctagtgggtcttggtagtaacccaccttatataccaagtaaagacatctctggtctacaagctgaagttggtaggcatgaacctag

SEQ ID NO: 16500 - DNA, 392 bp, Glycine max
tggataaatataagccacgtttgattgttgatgggaatatggaatcttcccaaacaaaatcatgattatttctggcaatctatcaaaattatgtgtagtataaactctcaaatttgataatatatgattggtttattacgggaagaaagatgcgggatcgaataccttttgtttttggagaaaattccaatacctttgtgattgacactaaatattgatttgttgttttaattgtacgcattggtccgtttaacgtctaaatctatttcggctgagatatcgagggtgtgattggttggacattagcacgggaccccaagttgatgaaagttgacaatgagtgaaaatcagaaatggtagttacgtctgcatctttattaagattggccttt

SEQ ID NO: 16501 - DNA, 410 bp, Glycine max
  unsure at all n locations
ntgacttgagtcatcaaaagattataaatatgtgactcatggcatgaattttaagaagagatgaatcgtctatctttcaatcttctctcaacatcattcaatatctttcaactctttctagagaattttctgattctttttcttttcatctttctaaaagtttttgttcaaaactttctcttccaagaaaagctctttgttcaaaaacttgtgctattcatctttttcattctcttctctctttgccaaaagaacaaaggactaaccgcctaaattcttttgtgtctctcttctcctttacaaaagattcaaaggactaaccgcctgagaattcttttggttcttaccttccccttaagcaaaagatttcataggactaaccgcctaagatatcttttgttccccttaca

SEQ ID NO: 16502 - DNA, 417 bp, Glycine max
  unsure at all n locations
ntgccgatttagttttcgccagtgaaaggatcgaagtgggtctgagaagaggcaaatttgattatcctgctttgataaataggaagcctagggaaaatggagagaataagaagggggtagaaacccgtgttgtgactgtcattcctacatggccaaatttcccactggctcaacaatatcaatactcagccaatatcagtccttcttattacccaccaccctaccagccaagaacacccaatcatccataaaggccgcccctaaatcagccacagaacctgcctgctgcacatccgaggccagacaccacccttaatacgaacaaaaacaccaacgagaggaggaattttccagaaaataagcttgtagaattcaccccacttctagtgttgtatgctaacttactcccatatatac

SEQ ID NO: 16503 - DNA, 404 bp, Glycine max
  unsure at all n locations
nttctgccagcaagattgggagagtcttcgccaaattcatggtttaacaagttatattgagctgtctagttgggcacaccaatacaaggctgggacaaagagggaccttcttggcaagctcagcaaacatagaagggagcatgatacattaaataccaaacatgccagtaaggcttcacaatgaatccaatcaactcaattagtttgaaacttgactggttaatttgttgaagttggtggatgaattaaagtaactcaatttgagttgaaaattcagctcattaaacaaatgggctgatcttgaatcatgtatagttagtttggtttgattgttatatgaaaaaaatatttattctaattttgcttatgttgaatctatattattaattcttaaactacactcg

SEQ ID NO: 16504 - DNA, 411 bp, Glycine max
  unsure at all n locations
ttcaacaagagtcctcacaaataattatcatgaaacagaaaactagcaagactacccatcatatctcccaaaaccccatacccacgaaaatcaagagggaaagaagtccacccaaacctgaaatttcgaagtcccactcgtagacacgcacttcacgaccccgaaaatgccctcctttcacgatttggggcagaaatgatggccaaaggttgaagctttgtgtggagcttcaatggtggatgaggaagagagaaagctacgtgagagagggagagaaaaggcttctgaatttttttggggctgagtgaggagagagaacatagctttttggttttaaataaaagggttctctctttttctattattntatctaagcaatgccacatgtctccatttgagtgggatccaaag

SEQ ID NO: 16505 - DNA, 410 bp, Glycine max
tcttatccaaggcacatgcttggtggtgaagctccttcttccatggcttattctctattggatggtgcctcccgtctcctcttctcctttgccttccgctgcatctccatggtgaaaaatcgccattgaaggatctcattgaagctcaaagatccagcctccatagaagctccacaagcaagcttccatcaggctccaacatatatgttattgaattttgtgtctggtttaaaacaagaccaattttatgaaaatatcaatgggtagactgtgagaaaagttcaaaacattgaggctggtctacaaaacccataattattgcaagcatcttcaccattgtggttcaaaatttcctaataaacactcgtataaaaattatggaaaacatattgcgtagattcacctttata

SEQ ID NO: 16506 - DNA, 405 bp, Glycine max
  unsure at all n locations
tctagagaaagctacatgaagatacctcggttatttcgctgcccagccttcgttaaccgttggtgcttctcgaaattnggtctgcaacttcacaagacactcgtccatgatctgactgttgggatctttgataagttgtctggagtgtgctagaagcctcttaatgaagcttctggaggaagcctcttaatgaagcttctatagaaagctacatgaagctgcctcgtgaaaaacgcttcccagccttcgttaattgttggatattctcaaaatacggtctgcaacttcacaagacacttgtccatgatctgaccgttgggatctttgagaagatgtctggagtgtgctataagcttccgttcccgaaagcatctcgtattcaagcacttcagcctttgctttagt

SEQ ID NO: 16507 - DNA, 390 bp, Glycine max
tcttcttaaacaaggttccagtgtaatattgatgtgctataatgatctataaatagctaatactaattaataagcatagtttaataaactatattgtccttgaaatatttctttattaaattataagataattattataaaaacaaataattttacaagatatagggacttataattgtatgatcatataataacctgtacactccaatatttctattggttagtcttaaaaagataaaaccaaatttacaatgaatttatattttcaaaattaaaatcatgaaataaaagtttatctgatgaataaacaactagttgactttacacaaatataacgatggcatattaataattgtttaaatctctattagcacaaactttttgttttaa

SEQ ID NO: 16508 - DNA, 412 bp, Glycine max
  unsure at all n locations
tattgataaactcctctagttctatatggtggaggtatttatatatgctagataaagactattaaaaaatgtgtagaacctttcattttctcaaagtgttataagaaatgttaattagtaatggagaacaaatttgtttttggcatgatgtttggattgaaaatgatagtctaatntattttttcctcggttatttcaaatcttttggcataaatgagagatctctctcatgtttttatttttctccatttctcaatagatctttttaagttaaatcaacttacgatattttatcacattcttagttgtagtcaaaggacttcaaatccttctaattcttttatccttaattatttttagaagttttgcacccttcaaggtgcttgtgttttcttggcacgttatcatgaat

SEQ ID NO: 16509 - DNA, 418 bp, Glycine max
  unsure at all n locations
nttcctgattaaaagaatagaagatacaaaatacattcccattatctcagacaaaaacagaactacattgcttgaagatccacttccaactcttgaaacagcaaaaaagaactgcatgcaaccccaaaaatggaagttaggctttataacaagtcaacaatacaaactgtatctcttaccgtatttagtgaagccaaactgtacctggacacatgatataggactagatataatcatagccgaactcttaaatacacaagataaatctcaaatcaaccacaaaagaagaaactttcttgaagttacactcaaaactgaaagaagacgtttcatggtttacaccaaataataaagcttgtccaagcacagatccttctaaactaacagtaactcatgacatatagtaactngctataat

SEQ ID NO: 16510 - DNA, 413 bp, Glycine max
  unsure at all n locations
ttgcctanaacaaatggttaccagaagataattttgaaaaaaaatcttttagaagggttttgaaatttgaattttaaagctgtaattgattaccattgatgtgtaatcgattaccaacaacgaaactcttgaaattcaatttgaaaagtcatgatccttcaaaatataattgtgtaatcgattaccagaaacctataatcaattactagtgaagaatttcagaataagctttttgaaaagacacatctcttcaaaccattttgaaaaggcacgaagggcctatatatatgtgtgtctgacttcaaaaagtaagagagagatattctaagagaacttcattgccaaattctctctcaacaactcttgggcaaacacttgtaaatctattgagacttcatccaggaatttcaaat

SEQ ID NO: 16511 - DNA, 414 bp, Glycine max
  unsure at all n locations
tatgcgcatatttccctacgaacgttcacttgcactagacatcctattaactaagaaaaatgcacccatatacaatcaaggtagcttcattacctagattatttacatgtacttccaaggtgtatttgttattacatcacacacgcctccttggctaaatttacatacatgcatactcaaagcatttcggggtaccaaaaattgcacatgcgctcatcttggtatttctaatacctatacatatacaaacttcatgatgaatcttgactacctacgcaataaggtgctacatttcatgcttttttttctttttttttttttcaagtttttgctacctaaagccacatgcaaattcaagcatactttcctttgctgactaagattgtattcaaattagaaagtatatattntttt

SEQ ID NO: 16512 - DNA, 401 bp, Glycine max
tgtctcgtggtttcgatagagaacgaagcccaatctgaccttcgcgattttcatcaaggtaaccgtgattctacgcttgttccttgttagtttcagcttgtctttgcatcttttcttactttagaaccaccattgtatgtttttgcgcttcctttgaaaaaccctagagaaagagactttataaaagttatctttttatgaaatgggtgttattttcgtgaccttcgctgaacctcgatcacattggcgtgatcggaattttaaaatgatgttccttctgtagaatctgaaacgcccttagccttttcatgtaaagacatgagtagttgactcagaatattattgttaaccttatttctgatatccatagtactttccttcattttggcgcatagagactt

SEQ ID NO: 16513 - DNA, 184 bp, Glycine max
  unsure at all n locations
ntcataagtgaaatcaggtgtagccatctccctaagtgtccttgatcgaggccgtacccgaatcaaataaacattaaaaatgcagtatctaggaagtgatccaaggtcgtctcccaacgagcaatggttaaccaaacgttcataacagatagtaataaaatagtaacgaattgggggggggggg

SEQ ID NO: 16514 - DNA, 373 bp, Glycine max
  unsure at all n locations
nttatgctagcttatttaattagtgttgagtaactttagtcttcaaaacagctgaacgatgtataatgacagaactcgacacatttataagatactttatcataaatctaaattttattttgtgaataaacacatatctcgaggtgttataatcatagtatttaaatgaattttaaactcttataatttttgatctaaattgtaattttggtcctaccttgttacccaaatacatgattctggtccatatatatttttgatgtgacatatggtccacatagatatataaattggcgattttggtccacttagaacatgataactaatgacttcaaataataaagttattatatgattctataattaattaaac

SEQ ID NO: 16515 - DNA, 390 bp, Glycine max
tatgaaatcaatggaatccaagatttcatttaacacaagtcgttcaattttgttcttagaaatgtgacctaagtgcttatgccataatgctcctgagtttgtattatcaattttacgcttagtaccacgtaattccgcattaaaggattcaccataagaagctacaatatcaagtaaatatatattatcataagccaagagtgaaccagttccaacaatatctgaattaaaagacaacctaatcacgttgttttcaaatgaacacaaataacccaatttgtccaaataagaaattgaaatcaaattccttctaaatgacggtacaacaaaagtatctttcatatccaaatgagaatcagtacataataataatctaagatgccctataac

SEQ ID NO: 16516 - DNA, 404 bp, Glycine max
  unsure at all n locations
tgcctcaaagaggtccaggaaggacatggcagcctatagaactagttccgctccggagtatgatagtcaccgctttaggagtgctgtacaccagcagcgcttctaggccatcaagggatggtcgtttctccgggagcgacgcgtccagctcagggacgacgagtatgctgatttccaggaggaaatagggcgccggcggtgggcatcactggttactcccatggccaagtttgatccagaaatagttcttgagttttatgccaatgcttggccaacagaggagggcgtgcgtgacatgagatcctgngtaaggggtcagtggatcccgtttgatgccgacgctatcggccaactcctaggatatccattggtgttggaagagggccaggaatgttagtatggcc

SEQ ID NO: 16517 - DNA, 403 bp, Glycine max
tgaatctgaagctgaacacaggcagctgacttgcttagaaaatatgaaaaggaagaagctgcagcaagatctttggtcagcagcccaagctcacgagtctttattgaggcagaaggcgagatcgcgttggattaatgagggggttagatatctcgatattttcacctggtgattaactcccatcgaagtttatagctttttccaacagagatttcaagaaactatgagcagcagaccagttttgaatgacacctcttttcaagaaacatgttctttggggaggctactatgaaaaatgtcaagactatcaaattgattttgagagcttttgaattgtcatcaggacttaaaatatattatgggaagagcggctttgtggtgttgggccaatctgaacaatgga

SEQ ID NO: 16518 - DNA, 415 bp, Glycine max
cttcactcggagatctgattcaggcgcataatatatcgagacgcttgaaaatgaacaacgaaagctctcgagaaattccaatgctcattatctttaactcggaggtctgatttaggcgcataatatatcaagacgctcgaaattgaacaacggaagctctctagaaattgaaatggtcataacttttcactccgaggttcgattcaagtgcatgatatatccagacgctcgaaattgaacaatagaagctctcgagaaattcaaatggtcataacctttaactcggaggtccgatttatgcgcataatatatcgagacgctcgaaatttaacaatggaagctcttgtgcaattccaatggacataacttttatctcggaggtccgattcgagtgaataatatatcgagacgatcg

SEQ ID NO: 16519 - DNA, 409 bp, Glycine max
caaatgcggaaagtttacgcctccatttcccggtatgcttacactcaaagtcataagggagccatggagtggaccttccctcctagtaatattcttgcagctctaagatttgatttggcttgtgtgccttagtttctttgcttctgttcattttgtttttcttcatttcatatgtacaaaaaaaaaattggtcaaactaatttataaactaattaaataaacttataaactttctcattacttataagctagttagttaaatgggtttacaagctttccgagtgtgtcttaccaaactcaccaatacataatcattttaaaaatatacagataggaactgatatataatactttagattttaaaattaaaactttttcgataacttgtgcattacaaattatataatat

SEQ ID NO: 16520 - DNA, 415 bp, Glycine max
tcaagcaatatcaaacatttgaaacaacttcctcactgcatatgagcttcctaagtaatgaaataattttcctaataattacaagcacaattccaatggtaagatacagatcacaattaatttaaatgataaatgaatcagtaagaaatcatttcctcgctgtttgtgaaagtgagtatgaacacatcatataaatattattgaaaacataaagatctaatacagacctccatggccgtcataaacaccaaagtatgacgtagactcgtccaaatatggatgagctgcatgctggcatgtaatgtaaaagaattaaaacttgtatacaccatcaaacagattgtaatataataatgggctactgaagatttaagtacaaagcatcaaggtacaccaagcattgacatcaaatata

SEQ ID NO: 16521 - DNA, 415 bp, Glycine max
  unsure at all n locations
ctcccagtttttaagttcttcctcaaaactgccctactcttatttcccaaagncctattaacaacattgcgtttgcccatcggtttgagggtgacaagaggatgaaaataacaatttagtgcccaacttgctccacaaagtcctccaaaaatggcttatgaacttagagtccctatcactaacaatgctacttggcaaaccatggagtctcacaatctccttgaaaaacaaatcaaccacatgggaagcatcaatcaactgtcttacatggaataaaatgagccattttagaaaacctatcaacaaccacagaaatggaaattctaccattgcttgtttttgacagccccaaaacaaaattcatggataaatcactccaaggaatactacggaattgacaatggagtatacaatt

SEQ ID NO: 16522 - DNA, 237 bp, Glycine max
cggcaccttcgcctagtttgtgtgctttgtgtacctgtattatatcctttgttctggaagacggtgtatgatcgattcgtgcttggcatcgcagtgactatctctagatgatagtcgtctttgcgtaaagggcacgccggccgaaatctgtgttctatctgtgctgtactcttatatggtaagagaggcatgaaaacaggggcaactcgtaatgcgctaatatcatccggtgatgat

SEQ ID NO: 16523 - DNA, 411 bp, Glycine max
  unsure at all n locations
tgtctcagcgtttatgcgagacggagaccatctatgctagctatcatcgccaagtaccaagaagagttaggtctagccacggcctacgagcatagaatcgcggacgagtatgctcaagtatacgcggaaaaggaggctagaggaagggtgatcgactctttacaccaagaggcaaccatgtggatggatcggtttgctcttaccttgaatgggagtcaagaacttccccgcttgttagccaaggccaaagcgatggcagacacctactccgcccccgaagagattcatgggcttctcggctattgtcagcatatgatagacttaatggcccacataattagaaatcgttaggaaacttgtatggtctctcataccttgactagatacgactttttntttgaataaaatgag

SEQ ID NO: 16524 - DNA, 399 bp, Glycine max
  unsure at all n locations
ntgagccaaaatcctgactcaccataaaccttgacccatggtgagaatgtcaatccttaccctcggaagcaaaaaagaatagaagggaaatttccaatcaaaaaagaatagaaggaaaatttccaatgaaagcaaaaaaagaaaagaaggaaaattccccaatcaaagagtgggagaaagcaaaaagaaaagaaaggaaattcccaatcaaagaatgggagaaagtaaaaaaggaagaagaagaaggaaagaaagctcctgatcagggatcgaaggaaaaacagaagaaatgtgcagagaggtctttagaccggacaatatctgaacaatacagaattgtcaccaaatgaacaaaaagaaggaaaggaaaccacgacctanaatggtcttctccctttg

SEQ ID NO: 16525 - DNA, 350 bp, Glycine max
gagcaagactacttcagactgatcaaagttatttattttatgaaaacctatcataacaactagaatgtattgcttgccatcaaccatgacattattacaaagactatcctatctagaccaatatgcttactaaagaagcataactgataaaaagctgtatgatgaacctcatccccatagtgatgtaatctccattggagcttgtatgcctaggatcctcttcattaatggattcctttgcttcttggaagatgaatggcagtggaatggataaggaagagagagaggagatgccacttcagggagaatatgagactagaagaagctcaccaccataggatgccatggat

SEQ ID NO: 16526 - DNA, 404 bp, Glycine max
tcttatccaaggcacattcttggtggtgaaacttcttcttccatggcttattcccttgtggatggtgcctcccctctactcttctcctttgccttccgctgcatctccatggtggaaaatcaccattgaagctcaaagatccagcctccatagaagcttcacatgcaagcttccatcagagatagtgcaactcgatgtcaaaacaacctttctccatggaagattggaggaagacattatgatgcaacaacctgaaggttttgaaatggtagggaagaaaaattatgtatgtacgttgaaaaggtttatatatgggttgaaacaatctccaacgaagtggtaccagagagtcgatgagttcatattactcatgggtcaacaaaagtgccaatgatcatgtatca

SEQ ID NO: 16527 - DNA, 404 bp, Glycine max
tgccaattaaattgattcggatccatatgacttgttacaaatgaaactagaatttaaaattggaattggagaatatgacaatgataatggaaataagaatgaaaatgtgaaattgtatgcaaattgcttcctataatgaccaatttataagacccaatagggatttgttatgttattgttctcgattgtgacatatctattgttgttgtggttcattgatttcttcttcttctatccgatttgtttcttcccacaagaattagttaaggagagagacaataaaaaatgatttttttaaatgcgcatttcttcaaggtttttctacaagaactcaatctccaacgtgaagaccttgagagtgtctttagtagctagatcttagaagaacatatcttcaacttaaa

SEQ ID NO: 16528 - DNA, 408 bp, Glycine max
tctcccccaattttctataaatagggggagaagtgtagtgaaaaagggttcagccccttaggcacttctctctctttcgaatttgcttagaaaaattgtttccgtgaagaaaatccaagccgaggcacttccgtaacgtttccgtgagtgatttcgcgaaggttttcgactgttcttcatttgttcttcatcgttcttcggtcttcaacgggtaagtacctcgaaccaagcttttcgattcattctatgtacccgtggtggtccacattgagtttcgtgtattttccttctcgttttcatttactttccgtaccccttttgacgtgcttaagccattttatttaagtcatttctcgctaaacctacaataaaatatatttccaccgattgttagaattgtattatccg

SEQ ID NO: 16529 - DNA, 412 bp, Glycine max
  unsure at all n locations
tcatgatgaatcaagattgattcaaagagtttcgatgataacaaagatgatgacaaaaagctcaaaagtcaagaacacttcatgttaacaaagatgatgacttcaagaatcaaagaatgaattcaagattgaatcaaaaacacttcaaggatcaaaaggaaatttgatttcaagaatcaagaatcaagtttcaagattcaagttccaagaatcaagatcaagattcaagactcaagattcaagaatcaagagaagattcaatcaagataagtattaaaaagttttttcaaaatctgtgtagcacattaattnttctcaaaaaccttttaccaaagaagttttactctctggtaatcgattaccagattgttgtaatcgattaccagtagcataatgtttttcanaaagcttt

SEQ ID NO: 16530 - DNA, 418 bp, Glycine max
tctaagcctattacagtagtgtacaaccgaatactttcttcaaataaaagaaagaaggataaagggaaggtagtggttgttcctttaaaaattaccttttagtggagtatttataatgtatatgatcttacatggtatttatttgctctagtgagtgtagacagaacatagagttagttgagcaattaagttcaccacctccaaactccagagttttgtattttccatctcattttccacaaaatggttgggaacagtttaaagcatgcttgtggaaacaacatttgttctattggagaattccttcatacaacttgatgcgcatcatatttgtgcgtgtctcatctcttttgtttgggatattgttttggaagcaaggatagacaatgttagtgatcataattttattctacttatg

SEQ ID NO: 16531 - DNA, 415 bp, Glycine max
tgcatttggacttgcgaaagccccactccatcattatgattattacctgccatctcaaacaaacaaatcaaacgtaacaagacaattatagtcgttgtttgaatacctcacccactcaagtgtagcacacaattatggattttctctaatgacaacactcttgccttttaccactctaattccccttgagttcttaggaaattcaagagattatggccacaacaaagaacaattcaccaatatgtgtaaggtaaggctatagagacaaggaaaaggttaaccaagaaaaaggctaacaatgtttttaggcacaatttaaggaaataaaattcagaatttaggaattcaagtaacaatccttcatacaaccaatatatttccttaaagatatatttttttttaagttcttcaagca

SEQ ID NO: 16532 - DNA, 416 bp, Glycine max
  unsure at all n locations
nttaataatggtgatgtcttatttatttgtatttatgtggatgaccttatctttatcggcaataacccaaatttgtttaaagacttcaaggagtccatgtctcgtgaatttgagatgacagatatgggactcatgtcatattacttaggaagggaagtgaagcaaatggaaaatggtatctttgtctcacaagaaagctacacaaaagaagtgttgaagaaatttaatatgcttgattgcaatcccgtgaacacacctatggaaggtggcttgaagttatcaaagtttgatgaaggagagaaggtagaccccacggtcttcaagagtcttgtggggagtttgaggtatctaaccaatacaaggcccgatattctatatgcggtgggagttgtgtgtcgctttatggaggctcctac

SEQ ID NO: 16533 - DNA, 408 bp, Glycine max
tcaggctgttcaattgcttcagattgttgcacagattggcaaaggtctgtgtggtgatcggcagaggagcatataccacagagtctggcgacaagtgtagatttttgattcatggccagttggattaccaggttaaccaaggcatctagtttaccttcaagcttcttagtctcgactgatgaagatgaatttgtggctacttcatgcactcctctaatgacaatagcatcacttctagcactaaattgctgggagtttgaagccatcttctcaattaaatttcttgcttcaacaggggtcatgtctccaagggctccaccactggcaacatctatcatacttctctccatgttactgagtccttcataaaaatattggaggagaaactgctctgaaatctggtggtga

SEQ ID NO: 16534 - DNA, 415 bp, Glycine max
tgcctttcgttaatcttgctccttctacgttgctctgtttctgaatgctttgaacgctgtgggttcaccctcttccccgtgctgggttcatccaccttcactgccaagtcacaacgtaataataaataattgtgttaaaaattgcaaattgaattgcggaatgcaattgaagaggtaaaaagataagaactttgagacacccatcaatgaatcaatcgataaaccctggtgggtgttgcacaaccaaaccaaacacagagagagagagagagaaacctttgaaagaggtgttattagcagttaagagttcttcttcatcatcgtcgtcgaattcatcttgatgccctttcgcagacctagccatttgtttctccagatgaagagaagtgtaatgtaatctgtacaacctacctag

SEQ ID NO: 16535 - DNA, 412 bp, Glycine max
tatggcccataggcaaagctatgacaggttgataatataagtgaagtgctatgttaacctagtttatgttataggaaaaatatattttgacactcaaatgtttataaacacttattgagaaaggagaaaaaaagagaaaaatataagtatgatagaaaatataatgtgataggcaaatagagataaaaaaaaatgaaaattgctagtgggtgtttaaaatattacccttcgtattttaattgtaaagaatgaaaatgtaagttaatgaaaaaaatgataattaatgcaataaaagaacaagtggatatttttcgtactgttggaaagtttccgatcccctggctcaatttttgggatgcagttgatacatatatctgttgagcagctgatgtaataccatttggtggacata

SEQ ID NO: 16536 - DNA, 405 bp, Glycine max
  unsure at all n locations
ttntatgccactccactttctctacccctctgtattttccacttctactgaccacacaccataaaggaatggtaacaatatactcttttccaattctctactctacaagtgttatgttgcaattaaataatgtatatgaattgtgatagagggaagcttgctgattattcttcaaatttaaaactgagacaatttaagtcataatgagttataagttattgtcctttcacaggaggtgctattctatgaggatggagagcccataattgatggggaatctggagatttaagggttagtaacttgtcactttcagtatccatgctattatgtatgcagtatgcctgacatttcatacggttgaacagtttcgtatccgaactgcacctcatgacgtcttcagaaga

SEQ ID NO: 16537 - DNA, 410 bp, Glycine max
tgttcgaaggggttgataaatgtgtctgaatatattaagatacaagatttgtgtttattacgtaatttaatattgatttcatcaaattacagagcctgtttccaaagaacatgttaaattaatccttgggttcattaaattaatcatttgattcctataagtagtacttaagatttagtccatatacatccttattagtacacatcggtacctggtattactatgttccttaagttttatccttatatcgatgtataaggaccaaatcttaactatgcttttcatacaatgactaattcttaaatgaatatcaccgataaggactaactaatttaaacttctgatttgtaaactccttcctattgttatgggacatttctttcaatgtcttctcaaaattcttttgcatc

SEQ ID NO: 16538 - DNA, 404 bp, Glycine max
tccttaagaaactttcttgagaagcttccttgagaagattcctagagaagctagagcttagctatacacacctctctaataactaagctcacctcctttagatgagaagctaaagcttagctacatgttagtcgatgaatacgactaactcttgtgtataaaacctatgtaaattggatcaaactcctccaatttatggatattttgtatggatgaaattactttttgttaaagataggaaataaatacttagtactcccattttgtgtgtttaataaccatttcctctcagttctaggttaattaggcaagtttgtgaagcgctgattatcatccgctcgctaaggcaatcttctggcttagcgagccatccactgagcacaatactcctcgactgagcgcga

SEQ ID NO: 16539 - DNA, 349 bp, Glycine max
atggctgcgcacgagctcatatttggcgagttatatattttatgacgcattgaaatggattacttgtattggtaatctactacaggcccaataagccttctggtaatcgattactggatgtcgtaatcgattacaggctgcctgttcatgtgtaatctattacactggatggtaatctattaccagagcctaccctaggctagtttgtaagagaatatctatttttatgcttaaatacatactatatgtctaattctcctactaatacacttaattcaaccattcaattactatgtgcacaatagcccgtaattgacatcgttaaaaccataattactacatgatcatc

SEQ ID NO: 16540 - DNA, 408 bp, Glycine max
tgtgcaaattaaatcactcctacattttatctctatcatgcattgtatgttggtctcgtcctttgtcacgggaagccggaaggtccatatcaccttcttaattgtacacatggggcactgcgcccccaaatgcacaagtaagaagagataattttccgggctctcgtgtccgtaaaatgcattcatatcatgcaccgcataaacatctcttcagcatcataatgaacatatcgttcctgcatttgtccgttatcacattcccattttgcatgagtcattgcatcatcatatgcgttcaacatactttttgtttgcttatacatgatccttgtattttcctctacaaaacaaaaacaaaaaataggggaagtacgaaaattcacgctgcattcttagttgcatatattc

SEQ ID NO: 16541 - DNA, 279 bp, Glycine max
ttgacttgagccatcaagagatatatttatgttttcatggcatgaatttaactgatgatttctctctcaatcttttttcatcatctctcaacatctttgagctccttttacagaattttatgattcattattcttcatcttacttaaagtttttgaacaatacttttatctgtgaagaaaagctcttagatcaaaaacttgtgttatgcatcttttacattctcttctccctttgccataagaacatagtgactaaccgcctaggttctattgcgtttc

SEQ ID NO: 16542 - DNA, 417 bp, Glycine max
tgtatcatctactaactacaaattgattttttcatcaaatatttgtattctacaggataccaataccaaggtgaggattggtacaattgaagtgaatcgcggcctctatcaattcacccccgaagcaccaaaaacacataccatatgttctatcattacacacccaaagtgtctaatcctccctgtaaatctatggcattttcgtatgggtcacccctttcccgaaagattacaagccatgcaaacatactatcctttcttaaataataacaagagtttcatttgtaatacttgccattatgccaaacataagaaattaccttttcattctagcacatctcatgcattaaatcaattcgagcttttacatgttgatatttgggggtcgtgctccaaaacatccatgcatgggcaccg

SEQ ID NO: 16543 - DNA, 413 bp, Glycine max
tcttatccaaggcaattattggtggtgaagctccttcttccttggcttattccctagtggatggtgcctcccctctcctcttctcctttgccttccgttgcatctccatggtgaaaaatcaccattgaaggacctcattgaagctcaaagatccagcctccatagaagccccacaagcaagcttccatcagaagccattccataagagaactgaaccggatttgcaagaaagttgttgatgtctggaagaaattggatttaggcaaccagataggactaagacatgtaaggtggtgtattgattattaagaaaaaattgagacaattgtttcagtttgctgaacctttcatgttatgatcaatagaattagacttgcataatatgtatttgagaatttttgtatctgattctc

SEQ ID NO: 16544 - DNA, 401 bp, Glycine max
tctctctgagttcctcgttgaaccaatctcagacttatcaagtttgaacccttatggcgtctacccttaacttatcttccatctctggaagtggcgtcatccaaattctatgacctgtaccaagcgatccactcctataaggatcacgtcattaggtgtatcaaaaagagatatcattgactcaatcatgtggttgaagtctggtcttttggtggattctccttttcaaggctttaagtgtgatccctcgctttgacgtaaagaacactaggttggagcattcaaatgtatccccttcatttgatttgattatttgaccattgtagtgcactaactaatggacaaatgaggaaaacatgtcatgtattatatttgtagagttagaaataattaattgagaa

SEQ ID NO: 16545 - DNA, 391 bp, Glycine max
  unsure at all n locations
tagctttgggaagaatatgttcttgataatgagcttgataaatctttgcacttgtccttgatatcaacaaaaaagatttcaagagagaatcaaatatggaactcaacactttaaggaaaaatcgccaactaagattacatttttcacggatactattggggatttttataatgcttagtcaaaatataacaataaaatcacaataggaagaaaagataagaatttaacagtttcaggcttgtaacatctatcatcttcaccttattactctttgctttggttcacattatggacttatatcaatatatccatcaaaacaccaccaaattagtttcacaaatgaaacatgatgagacanaaattaatcttctttatgcttcggacatgatgc

SEQ ID NO: 16546 - DNA, 407 bp, Glycine max
tctcaaggaagctacctagtctataaatagaagcatgtgtaacacttgttgtaactttgatgaatgagagtcttgtgagacatacttcaaagttccacttctctccctcttttattccttcaatttcatgctcccccctctctctttctctccctctttcttttcctgcattgaagcatcctttcaagcttcttatccaaggctcatcttggtggtgaagctctttcttccatggcttattccctagtggatagcgcctcctctcacctcttctcatttgtcttccgctgcatctccatggtggaaaatcaccattaaaggacctcattgaagctcaaagatccagcctccatagaagccccacaagcaagcttccatcagcctcagattttgacttgtttttggga

SEQ ID NO: 16547 - DNA, 408 bp, Glycine max
tgtatgtttgggttgtgatatcttattacttgcacttgatcaatagtatgatattggccgacaagttctcgactcacttccatgttgcctacctctagtaccttgacaacttaggtgcttgccacaagtatgcatggggagtagctgcactgacatacctctacgaccatctctcatatgcgagtaagtataacagcaagtcatgtggaggttatgtgacattactcatggtaagtaaacatttttagtcttgtaattattttttattactataattaatatttgtattggtattttttatagtcttgggtgctggcgcatctgccaatgtttgctacttatagtgagaggattatgttttggaggacctagaagccaccagatataacccattgagaggtaccgagc

SEQ ID NO: 16548 - DNA, 414 bp, Glycine max
  unsure at all n locations
tgtccgcaaaaaaatcactaaaaaggattttaaggttcgatacctcaatttttctcaccaagtaaaaatggatccttttaaggtccaatgccttaaaaggaccaccttccaagtaaaaagaatcgcttgattcgccctttagaaagaactacgtaggtctgatttcctcttcgatggagggtacgtaggagcaagagccccgcttttgtcgacctcaaaaattaaaaaagaaagaagagtttagatacacaatttcacacaattctaatttaaggctattgtcctttgggacaaacgtgagaggtgctaataccttcctcaaacgtaaatacaactcccgaatctagaatattcttcatgaacgatttctttcgngttttctgacgttntacacaaataaacgttagtggcgac

SEQ ID NO: 16549 - DNA, 405 bp, Glycine max
tctcttagtatcttttgtattttgggtactgtaatttgatatttatacactttgaaaaatccttgaaaatgagacgttgtaaaagttttcattttataaaattgattttattttcatgacctttgctgaaccccggtcacattggcatgatcaaaatttcaaaatgacgcctcgttgtagtagaacccaaaacaccctttagcccttttttattttgataggggcatttgactccaaatgttattattaaccttgtttttgaaatctatactaatttgccttcaatttggtatatagaactatgtgtttggatcaaagaacgtgaacgagagaggtctctgagcgacgcatagaggagttgacggagagctcacgataagtgaagggagtttattttggtttacc

SEQ ID NO: 16550 - DNA, 183 bp, Glycine max
acatcatcttcgttaacatgaagtgtacttgactttggagctgtccgtgatcatcggtggaatcatcaaaactcctagaatcaatcgggattcatcacgatgctggctactccaaagacaaactaacaatgatatcgcccagtccaggggacataacaattggctgccccttaacctaaacac

SEQ ID NO: 16551 - DNA, 406 bp, Glycine max
tcaagttgttcattgactctagattgctgcaaagtataaaaaagatctgtatggtgatctgcagatttctgattcatgacaagctgagttactaggttaaccaaggcatcaagtttttcctcaagctttttattttcagtagatgaagatgaattcgtggccacctcatggactcctctaaggacaatagcatcatttcttgcactgaattattgggattggaagccatcttctcaatcaaattcctagcctcggcaggagtcatatcaccaagggctccaccactggcaacatcaatcatactcatttccatgttgctaagtccctcatagaaatattgcagaaggagttgctcagaaatttggtggtgaggacagattgcacacaatttcttgaatctttccca

SEQ ID NO: 16552 - DNA, 365 bp, Glycine max
tctacttcaccagattcctagaaaatgtgatcattatggcctatggggcatctttggagagtagggactagttcgagagatattcatccctacgcgtaggaacaaagaaagaagaaggctcggcttccagagatttaacggggtgatcgccgtaaacaggctatagcggcaacttgacaaccttgtgatcggaggcctgatgctacacatcaacgtaccaatgtacgaacgtcttaacgagtcacgaccacaattaagactagggctcgaaactaggagaggcggtggaacacaggtaaacattgcactcatgtcagaatcacatggtatcttcgatgttctataataatgccctactcacaacg

SEQ ID NO: 16553 - DNA, 408 bp, Glycine max
ttgcttggtcatcctttactggcgatgcattacttgctcattctttgggggtaacttggcggatccagaaatttgtttagtgggggcaaaaaagtagtccataatattttcatacaaaagtttttacaaaatacataatttcatgacaaaaaaatctaaattatccaagtttctttaaattacagctaccttctacacatatcaatgtattttctcttttatctcttataacttgttaccttcatttaaaaaaaaaaacaattgtcttgtctcttgtgggggcaacactattttttttgtgggggcattttttttattaaagatgttttaagtaaaaaaattgcttatggtggcaattgcccccataatgctgtccgccactgttgtagcccagaaaaggttcgtgct

SEQ ID NO: 16554 - DNA, 369 bp, Glycine max
tcatgaagatgaatcatgtatgaatcaagtcgctttgatgatgacacacagcacaaaagaatgatttgaagattgattcagcacgttcaagatcatgattaatttccagattcattagaagaaatcagcaatattcaagattcaggagacgttgactccaagattcgcgaaaagacatcaagaggaatcaagattcaggagacgatgacttctggatgctagagacgagatcaagaagcacgcagtcacgacatcacatgggaagtatcgaaaaggacttctgacaagccaaacatagcacagttttgttctacaaaagagtgctcgtagattgttctaagtgaccagattatgcactctctggtcatc

SEQ ID NO: 16555 - DNA, 408 bp, Glycine max
tctgggagggacatatataatgcatacacatcatatcatattcatttcttactagtttagtaatttctaaccgagagtatttatttctccagtaccattattcacgttcaatatcgtatcaatattattgaaaattctagggatatgatgagttgacatcaatgtcaattttagatctggggtatccaggtcagcatacaccatcatcatgcatgcacttgaactttctttaatttccctttgcaacatggcaatccttaacattttgtactacttatttttcccctttgcaatgtgggaattcatgacatttttttgctttggttgaaaaatgattcgttttctttacctaaccaagagacatggtacgtcaagggcttcttgcctagaaaacgatggatacacatg

SEQ ID NO: 16556 - DNA, 414 bp, Glycine max
tatctgggccctcatcaacagggttttcatagagatatattgcatgtccaagtaggcacagtagcaggaggaaggccagcagtagctagccgcagatacaccgccaccacctctacggcagccgccatccctggagtctatctctgctcacctgcgaaggatagagcttcagatgcacacgtatgtgcagcatgtgactggccaataggtggctaatcataggggtcaggtgtagctaaatgagaccttctatcagtacaccctgcactagcaaagctaggaccctggtcctttttcgtggcttacccccgagcagttcggggccacaattgcgtggccgggagatgagcccaattttcagacaagggcaggactcgcaagcccccagagacaaggatggagctcaggaggatg

SEQ ID NO: 16557 - DNA, 272 bp, Glycine max
  unsure at all n locations
tctagccaaatggacttaccttgaattaattcctttgatagcccttttgagccttgtttccctttccttgttttgaagctcactacaagccttaagtgaaaaaccatgatattaccatatccttaaggaattttggagctttggaattgttttgggaataagtggggggggtttttgtttnattgnacaacttgttttgttggntatgcttnatgatgtattttgggccatactagatgtacatgtgatcttggttaaatgttggacatgct

SEQ ID NO: 16558 - DNA, 405 bp, Glycine max
  unsure at all n locations
tgcgcatgctctcatcagtggccagcctgtagaaccaggtccacaaccccctgacctccttgataagcaaataagcttattaacaccagttgtgatggatgcaacccctattggtgtaaagtttggggattgtagctctgatgttcccaagaactcgacctttaagagagctgacatggtgtctgttactttctggtctgcgtgccctcgtaatgaccttatgactgaaggtacattttccctggtggaatttctccaaggaaaggatatgtgggttcctgcttatgatgatgatgatttctgcctgcgcttcaagtggtcaagacctttcanactcagttctcatagtaaagctaccatagaatggagaatcccaaaggatgttactcctggtgtatacagaat

SEQ ID NO: 16559 - DNA, 396 bp, Glycine max
  unsure at all n locations
tgagctgaggaagtgttgaagggtgaaacttcctgcttttattgttgaccaatcccgacccaacccgggcatagtcggtcagtgagaacctgtgatgtacctaaacaggcgagctcctggcagtcaacagataaaaggaacaaagaccacaaagcaaggaggcttgtggtggctggccagctgtgaaacttgattgatatgtgagatatggtctctggtaatcgattaccaagggtgggtaatcgattacaaggcttaaaattgaagacaggaggctaagatggtctctggtaatcgattaccacggngtgtaatcgattaccaggcttgaaaacgaggtcagaaagccatgagggcttctggtaatcgattacaaagggggctgtaattattacc

SEQ ID NO: 16560 - DNA, 406 bp, Glycine max
gtagacccacttttgtgagttcgtgaatgtcttatatgtgttctatattaatggatgactcactgcatatgtggataatggcgattcccatggttgggataatctcagtacaaggggtgtttgaagaggccatttcatagagtcgagagctagggtatgaattctcagagaagaagttgaagtgtctcatagagtgtgctatgccaagagttttgatgcaacatgatcttattgtgtgctctccggctttttcaataactatcattacgcccactttcccaaaatgagttagcacagagtatatatatatatatatccagataacaacgaattatcgagtgttgtaaagtccagtggaccatatgtctttcgatgccacagcggatgacatatagatatacaatct

SEQ ID NO: 16561 - DNA, 397 bp, Glycine max
ggttcatgtgaaatctcaacactaagttgtttatgtcttcacaaagcccttaatgcttctaactttctcttactttatccacaagttgggactcattaacattgactctccaacttgaggggggattaaagttgtatgaagaaatggagttaattacttcagttagagggtagttagactagtcggtaattagttagaatgaagttagttactaagattgttaagctggatataaaatagtgtgtatgcaaccttatattcaataatcatcaataatattttacagatttccttggtgcacaaagctctctatcaataaattcccctttcccaagtccacattgaagaatctatcgcaactttagaatgtctgaaaacatattatgtacatacaaat

SEQ ID NO: 16562 - DNA, 407 bp, Glycine max
tccacaacatccaagtaaaacaacattcaaacagctcaagctatcacagccaagcaaaagcagagcaaagtcagaaaactctgctcaaacaccaaccaaaatcacagcttttctcacttaaagaccacagtaacaattccttcgatccaattcgttaaccgttggatcgactccaaaattttactggaagtctatagtgcataagcctacattgtgaccgttgggatctactagcaaacatcaagaactcattctgtactactctttccacagccaaccacacacaagcattttctgcaccaagctaaaatcctgctgcacctattttgacagcaaaaattctgcataagtgcagatttcgaagatcacacttcccctcatccaatcttgctcaaatcaatcctaca

SEQ ID NO: 16563 - DNA, 408 bp, Glycine max
  unsure at all n locations
ntaactgaatttgcaacattccaaatgatttttaattggtgtaatcgattacaatatattggtaatcgattaccagtgcatctgaacgttgaaattcaaattcaagtgtgaagagtcacatcttttcataaaatgctttgtgtaatcgattacatggttatggtaatcgattaccagtgacaagttctgaataaaaagtcaagagatgtaactcttccaatggttttctcaagattttctcaaggttataactcttcaaatggttttcttaaccagacatgaagagtctataaaagcaagaccttgacttgcattcaaataacttttacaacttttgagaaatcttgaaacctttccttctcatctttcttcttcttcctttgccagaaagctttctatgttttctgt

SEQ ID NO: 16564 - DNA, 400 bp, Glycine max
ttgccaagagactattaactactctgtattgatcattggtgattatgtcgaagctattacccctaagagaggactaagacagggtgacctactgtcaccttacctgttcattctacgccccgagggtctatctaattaaaaccctaacaaagacaacaataagagaaggaactcatggtattaaggtttgtagaaggactccaatcctcccacacctcttatttgctaatgattttttattttttttataggagtctattattcttatggaggttcttacttctttatggcaaaatctctggtcaaatgattaattatcaaaagtctgagattttcttcatcgacaacactgaacacacaattagacaccacgtagcatctgtacttggtgttaacaaac

SEQ ID NO: 16565 - DNA, 409 bp, Glycine max
  unsure at all n locations
tgcatcatcttagcatagaaaaagggcaggtccatttggtcaattacccatttcatacggttgggttagaaattttggtgtttgaaaataatagaattggtgctttctgattttagtagaacttggtcattactctactgcagaatttctcccttaaactaaaatgtataaatatgcccttattggccacatgaggcttcagctttgtgtttccaagtagaagcacttttatttaatagccacccttttgtgtacttgaagttgaatccacaagtagataaactcaaggagccagtcagaaaattcactgcttangtaaccaaaaccatccatttcatttctataacgctgcttatgcataaaaaaaactagaaacttatccaaccacgcatcaataatcaaaccccag

SEQ ID NO: 16566 - DNA, 389 bp, Glycine max
agcttgttatattctttaaattcaaaatcttttttttttttggtttaatgatttatttcatgttgataattgattaacgtcatgtactaattcaagcttagcaagaaaagtaaaatctaatagtgccttccaagtgttcacaagttaactagtaataggattaaaaggggcctttttctcaaatggattgcacttacttttagccccacagaaaggcggttgatttggtctaagttaaaactgcacttttatccaagacagtcaaattaaaattcataaactgtagtaaaaaccaatcaagtaatttgttgtcttctgaaaatgttggagcttactatcccttaatgaacacacatgaaattgaattcaaattctgtcatttttggatg

SEQ ID NO: 16567 - DNA, 302 bp, Glycine max
agagcactcactacatcgtcatgagtcgtgcctgacacgtgactgatatctttcagacgtcactggacaattattattgctgaacgcttacctgaccatctcgtgcgtttaccacaatgaaggcttttctgtaatgaagcactctagcctttgacacactgtaagtccgctaggttcttatgccaatctcagacgatggtcagcttcaggagacaactggcacatatccgtttatgcaggctagaaatacttagcccaagttagccaagaaatatgctcacactgttttgatgcacaaatga

SEQ ID NO: 16568 - DNA, 424 bp, Glycine max
  unsure at all n locations
tcgccggatgatgccgatcgaacatttcccaatcgatattatccaattgttgttcagggattgactatagaataaacaatggccgggtgtcggttgctatatggcctcgactgatatccttcagccgacattgcgcaatttcttttacaaacgttggtcgataatgtttttttacggtagaggaagttttttgttttgctgttgcttaaaaaatttacaatgtaggttagctaggtatttccgtgcgagctcaaccgaagttgngtttcggccgacactggcatgttctcatttagtcgaccaagataacgttagcccaccctggcacaaaaaaaacatcattcacgaaaattgatcgaacaaatgatagctgacgtcggcgtggagagatgatgtgaatcttacgaggcagatcgcttgatac

SEQ ID NO: 16569 - DNA, 355 bp, Glycine max
agcttacttctatttactaccctcattctttgatgtatataatataggggaacttattgcaaggattaccaaatgaggacccctatgaacatttggcaacattcattgaaatctgaaacactgcaaatattgcgcgtgatccagatgaagccattatactcgatctatattcaatgtgcttaatcagagaagcctaaaggaggctacactcatttaaagggaacaatctgaaaacctgtgaatgatgttattgaacagtttgtgaggaaacatttcccacagacaaagactgagaaagggaaagctacaatctcttcgatttgtcagttccctgacgtaaccttgaattaagcgc

SEQ ID NO: 16570 - DNA, 427 bp, Glycine max
tggttcaactgagtagccatctgccccatctaatttgtcaaactcttaatggaggctcttgtctcttgctgaaattgcatattctggatggtcatttgcctcactaactcctctaaggaaggttgagaaggggcctgacttgcttgttgtctttgtcgctattgctgcattggaggaggaacatatggcctgcttagactagcaacattctagaaatgagggacaaattgttgttgctgctgttgttgttgtggaggatttgcccatctcagatttggatgattcctccaacctggattgtatttgttgcttgaaagattataattattctgctgttgctggtttttttgttgagggggtctattataaatgtttgcagcataggcttcaggttgctcattgactccaggttgctgcaaagaaagat

SEQ ID NO: 16571 - DNA, 334 bp, Glycine max
agcttctctatatacaatagggcttaatcggacatccgagttaaaagatattgtcgtgagatttttctcagagcttccattttcaattacgagcgcctcgatattcaacgggactcaatcggacatccgagtccaaagctattgtcgcgcgaatttacttagagctcctgttttcaattgcgagcgtatcgatatattatagggctcaatctgacatccgaattagaagttattgtcgcttgaatatactcagagcttctgtgttcaatcacgaccgtctcgatatcctacaggacacattcggacatccgattcaaaagttattgctcgtaga

SEQ ID NO: 16572 - DNA, 428 bp, Glycine max
  unsure at all n locations
ntacagcagattttagtaatgacccactaacctagatttaaaataatttaatgccattaacctagggaattaaaaaaaacttaatggctgagtgtaactgaaattgtggcaaccaaaagtcacccccaacagccaacttcagccaccatttggtctcccaaaaggctgatgcctaggttgccaattgggcccttattacaacttgaactaaacctaactaaagcccttttagttgattaacccaaaacatattttggtcagccaactttacaaggattgggccattatttagacaaactaaacactctaaaattgagacaaagtggtgtcattcagtcctcctccatttgggccatgatacaactcacaaccttggacttttctccttgaaacttgngcttgtattcaaatagtatggacagcacttg

SEQ ID NO: 16573 - DNA, 394 bp, Glycine max
agcttctgcttgtctagatatttctagagagagaaaggtccaagttccaaagagttttgagattttgctgtgcaaagacctgcagagaaccgagcttgaagaagaagtcgtcctgagagcatgagatgagtttgtgagtgattgcgaggttctagaggtggaggagacatcctcaccgcttgtatttcttcaatccttcatttttattttctctttgttgtaaaggaagcttcctagctattgagagttaaatcctttgttggttcttccttgtaagcacttgatgtagatacctgtttatttatttaatgatgttttgtgtgctatcagaacttcattctaccatgcttgttccttgatcacatagatgcatgtgttgttagaatcattcaac

SEQ ID NO: 16574 - DNA, 433 bp, Glycine max
tcaatctttataaaaaaaaaaaatcaaatttgtacattttcagtttaaaaaatgaaaatgaaagaaaaaaaaaaagagagaatctaagatgtgaaaaaaaaaatggaaagggacaagtaatggagcaaacacactaccattaccctctcttttttccagttttccagcaccacaagtctccaactccaacaaaaataaaaggcataacgtacaccaagagagaagaaatagagtggggaaataacaaaaaaaagggaaaaaatgacgtttgcaccgccgtccataccactactctcagagtttatttcgtagacaagtcaaatctagttgctcattctctagctcaggcatctagatttcctgctaacatatatctttaatagtattccgagttgtattctagttattattattaatgaaatgatatgagtat

SEQ ID NO: 16575 - DNA, 379 bp, Glycine max
ctaacaatggatttcaaaatctttgttttttatgggtcaatgaattattgcatgttgataattgattaacgacatgtactaattcaagcttagcaagaaaagtaaaatctaatagtgccttccaagtgttcacaagttaactagtaataggattaaaaggggactttttctcaaatggattgcacttacttttagccccacagaaaggcggctgatttggtctaagttaaaactgcacttttatccaagacagtcaaattaaaattcataaactgtagtaaaaaccgatcacaaggtttgttgtcttctgaaaatggtggagcttactattccttaatgaacacacatgaaattggattcaaattctgtatttttggat

SEQ ID NO: 16576 - DNA, 420 bp, Glycine max
  unsure at all n locations
ttgcaatttggcatctaaattctgagagctctggacttataagtctgctaaagttggaagtggggctgaagtacaggatgcacggatgccgactattagtgcaaaggaagagggaacatcaaccgctctgagcatggtcttccttgcctcttgaaatttaactgtttggttattcacattccaacatttccttatgatataagctaagtcaatggccgaccttaagttttcatagaaggtaagggcatcagatcctactcccctcgatctacacaaggcagtgattaaagctgggaagcctaagcgagaagagttagactgagccatcatggtcattnttccagagatcaaactgccaatgttcatgtccatccttgtgactaagccatagaacaacctagctctgtctgtgtcaaatct

SEQ ID NO: 16577 - DNA, 390 bp, Glycine max
tgcttctatctatttcaggatcaaaggggtgtaaatcacctggattgctcctagtcatgcactatatgcagcaaataatgtgttcctcaacaagcacctaacaaggggttaaaactacagctatactcaaacgatatcaagatgagctgaaattttgtgaggaacaccctacaatcatgaaaagatagcacaacaattttcaaacaaaaattcaaagtctaactatgaaaactacctacgcaaagtttagaaaaataagacaataatacttaaaaaataaaaaagaaacttagtaaacgactgatttttggagtttgggagaccccaaccggctttcgcggagtgccaaagtatggaaaaaaaatttctatcccaaatgcatatataata

SEQ ID NO: 16578 - DNA, 413 bp, Glycine max
tctgctcgcgcatgtcctccaagagctcctcatactcccttgcggcttctgcccacgcctccgtctccgattttatctgcctcctcttaagcaacttgtacttgtagctgctactgctgctgctgttgtccactttgtgttctgccttcgccatttgctgcaacaatttctgaacctcgtcgtagtcatcttcggtgtccgtggactcaatagcctcggcaacgctagaaaagccttcgtaaaaaagaaacttggaccggctcaccccggctttagggaaagcctgaaatgggtatgggtttatcgttttacttgtttggggcttacagaatctcggatataaagaagaaacgcggaaggtgttccttaaagttgaggaagctcgcttggctacgttggtccacattttgtac

SEQ ID NO: 16579 - DNA, 385 bp, Glycine max
ttcttgttgctggagctgacccatcaactggtgatccctaagctcttgaccttgacttgatagaacctctttttaagcgaaggcgtttgacttgatcccatgttttactaaagtgaaacaaaatctagtgcgaatcaaaactccgacatctatcatgggtggaatgcatgaatgcatgaagaaatgcatatgatacagatgcaatttatgaatacgggagcccgggaaattgtctccttcttagatacaacgtcttgaggtagcacagtgcccgacgtatgtatttaagaaggtgacacggacccttcgttagcttgccaaaaagagaggatcaagacagaactcgtgcatgatgcgtatgtgaaaggcacaatacgtggatgta

SEQ ID NO: 16580 - DNA, 426 bp, Glycine max
  unsure at all n locations
tggttntgggcaatagcaccccacctgacgtcttcatgtctcctgacccccgcgacatatctccaggtaccactctgtggtcaacaataaaagcaggaagtttcacccttcaacacttcctcatctcaagcttgtaggattatggggtacccatcacatgtggtactaggtggcggtcgggcgatggtgcacaacaagttttccacatccacaatgcgcgcataaacccaccatcccctgttgcccacctccatccgagctcacgtactcccacgtagcccatatccccgtttcgctcaacaccaggtccccatcaatcctcccaagcttccaaaacatccaagcaaaacaacattcaaacagcacaaactaccacagccaagataacagggcagaggcagaaaactctgcccaaaacaccaacca

SEQ ID NO: 16581 - DNA, 391 bp, Glycine max
ttttcttataccaaagcgacacaaaatctaggtatccaatacccctcaatttaatggattttcaaggttagagaagcgaaattgagaatgacgtaaatttggagcaaactctcacctcacacaagtctataacatcaatttaaacttgctcatactggatttacacctaaaattccaccgaatcaaaatttgactcctcaacacccaatttttaccctagaaatgactctttgtccacttggtcatttgtttttctcacttgcacagcccaagctttctcataagtcctaaatgacatttcaaactatgattaactcactttaacctccaaataccactaaatccagatttggccttccaactctcataaactcactctgtttccactcat

SEQ ID NO: 16582 - DNA, 419 bp, Glycine max
tatagaatatataatataagaacactgacaatataatagtctatacatgtttcctttgatgagtctaatgccattcttccaaggaaggattttttagatgatatttcagattccgtagaagatacacatattcatggaaatgattctaaagaaaaagatgaaggaagcaatgaggattctcaagataatggggctagaggaaataatgaacttccaagagaatggaaagcctcaagagatcatcccctcgacaacattattggtgatatatcaaaaggggtaacaactagacattctcttacagatttatgcaataatatggcttttgtatctatgattgaacctaaaaatataaaagaagccataggagatgataactggatcattgccatgcaagaagaactgaatcaatttgaaag

SEQ ID NO: 16583 - DNA, 389 bp, Glycine max
tgcttgagatgaggaagtgtataagggtgaaacttcctgcttttactcgttgaccacagagtggtacctggagatatgtcgcgggggtcaggagaccttggggacgtcaggtggggtgctattgcccaaaaccaagcttgaccaatcctgacccaacccgggcatagtcagtcagtgagaacctgtgatgtacctaaacaggcgagctcctggcagtcaacagataaaaggaacaaaggccacaaagcatgggggcttgtggtggctggccagctgtgaaatttgattgatatgtgagatatggcctctggtaatcgattaccatgggtgggtaatcgattacaatgcttacaaatgaagacaggaggctaagatggtctctggtaatc

SEQ ID NO: 16584 - DNA, 416 bp, Glycine max
tgccacccagcttgcccaggtgagctagattgttttctccataagcaactgccttctaaaggaatattttggaaggccaagtgggtctggttgctatttgaacccccatttttactaaatacacccccttgctctttattggagattctttttccgtaacgttatgaaattttacgaatttcgaaacgatgcttggtttctttccataatgttacgaaaccttacggattacgtaatcatcccttttttgccttccggaacgttacggaactttacggattgcacactaacacttccttttaatttctggcatgtcacggaacttcagggattgtgctacaatgccttcttttgacttccggcatgtcacggaacttcacgaattgcctaatgatgggtgccaagtacctcgaagt

SEQ ID NO: 16585 - DNA, 362 bp, Glycine max
agcttgtatagatccccaatttatggatattttttattgagacgctaactcagacttgatgtatggctaacgatgtctctagaacatttccattagatttaaagatgaaatctgtgcattttcaggtgaaaacaaaggctaagttttgaattgcaaagagtagtagttgggctaagctcaatagtttggctaagcacatatccatcactaagcgcagcttcaacacacttagcgcaaaggagaatctggcaaagcatcagcatcaaagccgcgcgctaagcacagcaggtgccttcagccatgctaagctcgggacatgcgttaagcccgaatccacttactcgcgctaagcgcagcatcgc

SEQ ID NO: 16586 - DNA, 411 bp, Glycine max
  unsure at all n locations
tgaaattgcatgtgggtacctattttgaatctcctatgctgtctctactgacataaaatagtcccaccatcccaatttttgcaaaaccatattcatatatcattggagcatttcaccgagcacttggtgggcgcacgttgggacataaattgcaagagaatgggggcaatgcggcatgccccattgcttcaaaatacaacataggcctaaggccttctcattcaaatcctcaactcaagaaatcaagcataaaaacaaacaaaaactgccccacaaatataagcacgttctcacaattaaaagcaccaaaagatgaagaaaatactccaatgggaagcaaaaaactcaaggattgaatacttacttgttggagtgagtagaaacaccaaatatgacagcanaatgcaacca

SEQ ID NO: 16587 - DNA, 387 bp, Glycine max
tgcttagtaaagctaggcactaacaatctccccctttggcaaattttgtctaaaacatacttagacacttcctgagcaggtacgagcagttatgcatgtgggatcagcaactttcattatcagagtaatcaagcacagcggaaattctgcaagttgcaagtcgtttccaggatgtcaagacatctcacatgacatcagctttctgcttctgctccccctgtctccatgctcttactgcagcatcttctatcagctactagtcttttccaggatgtcaagacatctcatgtgacatcagctttcccttgtctccatgctcttactgcagcatcttctatcagctactattagcttacatcagtcatcatcagcagcagcagtcttccc

SEQ ID NO: 16588 - DNA, 422 bp, Glycine max
  unsure at all n locations
tgactaggcgagttgattttagccttagtttcactttagttattagtcaattcaattaagaatgagaaatcccaaagagaaaacgtccgattgatttttcgctttattttactaaaaggtattttttattattatattattattttacctcttttttgatttccaacgtagttacggcacgaccgaacggtcggaattcattttaaccgaaattaacggatgatacaattcaaatgatcggtggaaatttattttatttttagattaggcgagaaatgacttaaataaatgactgaagcacgtcaaaaggggatatagaaagcgaatgaaaatgagaataaaaatacatgatataaaatgtggaccaccacgggtacatagaatgaattgaanagctcggcttgaggtacttacccgttgaa

SEQ ID NO: 16589 - DNA, 390 bp, Glycine max
agcttgccgagtccggagactcggtgaaaaacgattctggagtttgtgacactaacgctgagttaatgtctttcaaaacaacgtcgttgacgacgttgttgttgttgttattgtcttcctcattgttaattttggtggtggtgactctaaaagagagggttttgggttggtggcaggatggccaggcccttgatgaagaagaggaggaggatctgacatgtctgcttttcagaagattaaaaaacttcatttttaattagaaaaaagaaggtaatgagaggaaacaaaatggatatattcaaatgagttttggaggttctgatatggcagttaagtccatagaggaggaattaatggttggtcagaaaaatggactgtgtggggggatga

SEQ ID NO: 16590 - DNA, 430 bp, Glycine max
  unsure at all n locations
ntgctagtgaaggtcttgaacgaggctcatgtggcccaagatatctctgtagaaggttttggaggactagtcaataacatcaccgccaacaactatctcgccttcaccgaagaagatatccctgtcgaggggagagggcataacagggctttgcatgtatcagtcaaatacatggaccacgtcgtggccaaggtgctcatcgataacggttccagtttaaacgtaatgcccaaaagcacgttggagaaattaccgtttaatgcttcccatctaaagccaagttccatggtggtccgtgccttcgacggcacccgccgagaagttaggggagagatcgacctccctgtatagataggccctcatacctgtcaggttaccttccaagtaattgatattaacccggcttacagctgtcttttaggacgcccgt

SEQ ID NO: 16591 - DNA, 395 bp, Glycine max
agcttgatggcgtgtaactcaccattttccataatataacactttatgtctactatcattgttattatttctttcttcgtcattgagggaaacacttgggttgccagatccctccacctttgggtgtattctttgaaagatctgtgccccctttttgcacatgttctgtagttgcatcctatccgaagccattatactgacactgcctaacgaaggcaaccattaggtccttccaagaatagactcgggaaggttccaagttagtgtaccaggtaacagctaccccagtaagactttcttggaaggaatgtatcagcaattcctcatcttttgcgtatgcccccatcttccgacaatgcatctttagatggttcttggggcaagtattccccttg

SEQ ID NO: 16592 - DNA, 430 bp, Glycine max
tgtaggattatggggtacccatcacatgtggtactatgtttcggtcgggcgatggtgcacaacaagttttccacatccacaatgcgcgcataaacccaccatcccctgttgcccacctccaactgagctcacgtactcccacgtagcccatatcctcgtttctctcaacaccgggtccccatcaatcctctcaagcttccacaacatccaagcagaacaacattcaaacagcacaagctatcacagccaagcaaaatagagcaaaggcagaaaactctgctcaaacaccaaccaaaatcacagctttttctcgcttaaagaccccagtaacaattccttcgatccaattcgttaaccgttggatcgactcgaaaattttactagaagtctctagtacataagcctacattgtgaccgttgggatctacta

SEQ ID NO: 16593 - DNA, 395 bp, Glycine max
agcttatataaatatgaaacaactaaaatagaagtggaatatcgtgttataagtatagacaaacaaaattaacaagagaaaagtaaaaacttaaagttaaatataaaccaataaaatgagtagaaataggatttataattaaatataaaagaataaagtatatagaaatagaaatagaaatagagtaataacgggtatcactggccggggcatactcaatttcttcgaccacacatatttctctcgcttggcttactgactcatgggatgtcaaggggcatactctaccactcccttttatagcctataaatggtgccattttccacatatgacacacatttatcatttaaaaaaaaaaaaaaacatatccactctcttttatagccaatcaatg

SEQ ID NO: 16594 - DNA, 425 bp, Glycine max
  unsure at all n locations
ntagtgcttctttactgagtcaaaagaaagtttggatatggttttgttcatgtgaattcattatcttcacatgataccactgcgagctaactcaacatgaaatgcgagctattacaactcagactatatgattaagtaccccacatatttgacaagaatattataattcctgaacctattacaactacaacaagtatggtattttgattgttagagtacaagtgtgaggtgaagtactacatcgggtaaaagtgaaaaagttaagcaccatacaagtgagtagaagacccataaacctgagccttaaggttttgggttaaagtgtgagtcaagtacccttatgtgattgctcatggctcattggtgtaaatctccctggtgtttactcccctcgaattccccaacaactggtatcagagtcgatg

SEQ ID NO: 16595 - DNA, 396 bp, Glycine max
agcttattcgcgagttaacctaggcttaagtgataagatcagaacatgtaaggtgattttgtgatgtattggggcttaagtgcaaagtaattgaggattaagtgcagcgcttaagcatggattgactggtgcttaagcctgacagtgatgcttaagcacaactggactagcgtttaagtgtgactctttaccatatctgttgtgaatgaattccaaatggatttgaattggatttttcttatattagaaggctttgaaatgacataaataggtttgaatgttatgttggaagaatttacctttactaagcatagataattagaaattgaatcaaattgggtatgaattccttgtacattaagttgttgttgatgaattgttattgaaatgagtctt

SEQ ID NO: 16596 - DNA, 428 bp, Glycine max
  unsure at all n locations
ntgctcctaattcctaaaaaattccctctgcctagcatgatgtacggtacaggtaatgcacctctgattattgtagtggtgaacgaggtttatttagttgttaatcattccatgaacccttttccttacatcctctttgtagttgcagaggttcaatatctaagccaggaaaaaaaacttattagtcatctaaaatcttcacaaatgtaacctaatggtgccaaatagccacatgtttacctgctcaggagcacctttgctagatcgatgccaatttccatcagaatcaatgtaagttagaggagtcctcttgtccacaagattgaatggaagaaagtggacctccctaataccagctcgtgcctgatcagttcataggaaaagtgaatttatttatcaccattcatcccacatcataaaagataatc

SEQ ID NO: 16597 - DNA, 378 bp, Glycine max
agcttgttgagcttggaagactctctgcatcaatgaagaagttagagaaagatctcaagaacaagaataaatacgatgtatgttatccattcttgtggataaattcttcaaactttctgttatgggtttctttggactgtgattgccttacttttgtatgtgtattggttacctatatatggctgcaggatgagcaataccgcgccaaactaaacaagtcaaatgagaggactctatcacttatcaaagcatgaattgatactgtggtagcagtaagactgcttcaatcggcacccaagacagctactcctcgcgtaactggggcttttggatttgattcgtctctaatatcttgctatcaggtacctgctagtataa

SEQ ID NO: 16598 - DNA, 418 bp, Glycine max
  unsure at all n locations
tgacctaagtgaccccaaaacgaaaaaatggttggtgtattgttttcgagttgttctacttagtcgatgatctctgcgccaaggctgctctgctttcaaagcagaggaagatgatgccattgttccctacgtgcaaccttaaaccactgctccaactcaggaaaatcgaaaagcagctggcacgggaagtggcaccaatgaagaatgtcaaaatgttgccaatccgggatgtagaggaggaaaaagaagcagaaaccgtggtgcgaggttatgtcaaggaaaaaattatgaaaagcatcttggacaggaagaaaggtgttgttcgagcggctgtgattnttgggattacagggttagagaagggaaaagttactgaatatgtttgcgaagatgagaatgtgaaaagtggctttgacgt

SEQ ID NO: 16599 - DNA, 368 bp, Glycine max
tttctttcaatctcagtcaattggcattcagatggttacttttcatgctttagaggtgtgagataaggggaccccatttctccccgtatattttgtcttgctgaggagcaaggttcttagcagaggcatatcagacttgggtcacaagggcaaattagcccccatggttggtcccacctccttctcacatgctctatgcaaatgacatcattatcttctgcagaggcactaaaaagaatgttcacaatattctgaatctgatgaatatgtatgcataagcctccggtcatgaggttaaccatagaaagtctacttaatattctggtgggctctctaataatcggatgtatgaaagctcctttatactt

SEQ ID NO: 16600 - DNA, 423 bp, Glycine max
  unsure at all n locations
agtcgagcccgtcacagcactggaggtgtttgtatttcaagggtggttccaatgcccctttttctcacaaaaacaacattcgacgcaacagcaatggtgtttgcaaacccaaagaacgaactaaagcggataaagaaacaaaaacggctcctcctaagatcaccaaccacgcaaatgcagacatttcagttcaatcatgaccgaaatagccttcacatcacttgattttcatggggactgacttttgtgacttgcggagtatatgttatgtaacttataatattgctacacggcatctcttactgttatataatgaaagttattgatgtaatatgtgaggatgtttccccagactagtccctggattntaaatttaaattaaatgctttcagcacgactagtagcattaggggtcttattata

SEQ ID NO: 16601 - DNA, 387 bp, Glycine max
  unsure at all n locations
ttgcttattaagtccgtctatggattgaaacaagcctcccgccagtggtatataaaatttcatgaggtcatttcttcattcagctttgaagagaatgccatgtatcactgtatataccagaaggtcagtgagagtaggatttgtttccttgtattatacgtagatcatattttgcttgcgactaatgataagggtatgctatatgaggtgaatcaatttctctcaaagaactttgatatgaaggatatgggagaggcatcttatgtcatangcataaagatccatagagaaagatctcgaggcattttaggcttgtcccaagaaacctatatcaacaaagctttagagagaattaacatgaaagattgttcaccaagtgtagctccc

SEQ ID NO: 16602 - DNA, 421 bp, Glycine max
  unsure at all n locations
ntaagagcaattcccttcttcttcttatcagtttcttttgttgatttagtctttgcaactccatctcatgttcctgtaattttcaaaataaagtagcaagagacataatagacaaatctctagattctataatggttgttacttttggttgcctcattttgaaaagttcttcctaatgaagcaagatggttaactatatgtgtgaatcttttctgcatatcttgtatactttcatttgtcttcatcctaaataattcatactcatgagttagagtatttatcctagatcttttgacatcagttgttccctcatgtgtaacttgtagagtgtcccacatatccttagcactcttacaatttgacaccctanaatattcatccattcctagggcagaagtaatgatattnttagcctttaaat

SEQ ID NO: 16603 - DNA, 395 bp, Glycine max
tagctttgatgatatggtcttcaccgacgaaaggatcaaagtgggtctaagaaaaggcaaatctaatcatcatgctttgataaatgcccaaaagataactatggcaaatgaaaagggtgagaatgagggagaagcccatgctgtgactgccattcctatacagccatgtttcccaccaacccaacaatgccattactcatccaataacaaaccttctccttacccaccgcccagttatccacaaaggcaatccctaaatcaaccacaaagtctgtgtactgcttgcaatgacgatcaccacctttagcacaaaccaaatacaccaaccaagacatgaattgtgcagcgagaaagcctgtaaaattcaccccaattccattgtcctatgctgactt

SEQ ID NO: 16604 - DNA, 444 bp, Glycine max
gacctatgaatctcagcttctatataagctgaaccattttatcaataaacttttgttgagttttattcagaaaattagaggttatctcttttatcttagtgagagtgattctcctaaattcttgagtgattcaagaacaccttggctgtatcaaaggacttccacaacctttgtgtgttgacctcgctggaaagagtgattctttccttcctttcatcatcacccttgttctttcaaaccacaattccagaaaatccacctctgcccagaattatctcgtggccataactcccattttacgcactcaaattaagtgattcttgagcctaaattgaatttcaaaacgagacctttcacctcgttttggaatcatctcatttggagccctgtagattcagttattgccatttctatatttctgtccagccaccacttaacctacgt

SEQ ID NO: 16605 - DNA, 391 bp, Glycine max
agtctttcctttttgtcctcctcatagttgttgcatgagaatacatgctctattttcatctcccactccaagtaggcctccggatcattcttgcctttaagcggaggaatgtcgagtttaataccatgaattcggttttgtctaagaacaccatcattccctcttgtcctactttcttcttcattatgacctctattctccatttgatccaacctctcatggagcgcatcatctcgttgtttcattagcctctccaaatgatgcatcgaagcttgcatttggaagtgcgaaacccccactccgtcattaggattagtacctgacatgtcaaaccggcaaatcaaacgtaacacgacaattcttgctgctggtggaacacctgacccactca

SEQ ID NO: 16606 - DNA, 422 bp, Glycine max
tgcatttggaattgcgaaagccccactccatcattattattagtacctgacatctcaaacaaacaaatcaaacgtaacaagacaattatagttgctgtttgaatacctcacccactcaagtgtatcacacaattatggcttttctctaatgaaacactcttgccttttaccactctaattccccttgagttcttaggcaattcaagagattatggccacaacaaagaacaattcaccaatatgtgtaaggtaaggctagacaaggaaaaggttaaccaagaaaaaggctaacaatgtttttaggcacatatgaaggaaataaaattcagaatttaggaattcaagtaacaatccttcatgcaaccaatatattaccttaaagagttttttttttttaagttcttcaagcatgaagcattcag

SEQ ID NO: 16607 - DNA, 388 bp, Glycine max
tatcttattcaggatatgggatgtcactctgcaaatgtttgggaatggaagcttgaatggagaagacacctttttgacaatgaggtgcaagcggcaaccagtttcttggatgatatctcgcggggtcatattgatcgttggacatcagactgctgggtttggaaaccagaacctaatggcaagttttctacaaggagtgcatactgtatgctactagaaggagcagcatatcagactatggatgaggctttagaggacctatggcagctcaaaatacctttaaaaccaacaacatttgcttggtgattgatcaaagatagaatcccaactaaagggaatttgtggagaagacagctggagaaacgctgtgcccagccctacaactatt

SEQ ID NO: 16608 - DNA, 432 bp, Glycine max
taagaaactccgcttcttgaccggtgatgttcaacaacctcaccttatttctctgtttccatcttgcgaattctacttctcctctaggaaattgcagctgcgcaagttcaacaagctcatcgtcggacattgcgtcttattcttctcctataacaaatttttggagagatttgtgtggttgagtaatgggttttggtgtatcgtttcatgcatcacttcatagtacattatgtattatttgaaaagtattttcttgtctatcgtctcatggtttattttaaagttagattaatggcatttgtcaagcatttctcaaccatttttgtcatgctctgcttcaagcataaactattattaaaactttgaaacatttagctgaaacacaaaaggagaagaataatgaatataacaaggcatacaaaacattaatgg

SEQ ID NO: 16609 - DNA, 348 bp, Glycine max
agcttcccggatccattcttggaaggacttgatggctgctttcatcaggaagtatcaatacaacactgacatggctcccgatagaacccaattgcaaatcatgtgcaagaaggagcatgagtctttcaaggagtacgcctagaggtgaagggatttggtagcccaagtagcaccccccatgatggagagagagatgataaccatgatagcagacacattgtcagtcttctactatgagaaaatggtaggttatatgccctctagttttgcagatttggtatttgcgggtgagagaattgaagtatgcttaagaaaggggaagttcgattacaccacttcagcaagtat

SEQ ID NO: 16610 - DNA, 416 bp, Glycine max
  unsure at all n locations
tggcattcccattggtggaaggaccttagttttctttataatcagtctgatttccacagtatccagtagaatatggtatggaaggttggttgtggggacaaaatcaaattttggcaagattcttgactgagtgagggctgtaagcatttcaaaaaaagattcttggcaatatggaaggaaggttagtttattaataatattcaaagaaagattctcagagtagaacccgtgcagaccaaccctggatgggattcagttttcttctcttggccaagggcagaaggaaagccttgctgctagattctctgaagtggaaattaagtctgcagtttgggcttgtagtggagataaaagccctggcccgtatggtttgaacttcaactttatcaagtagttntgggaaattctaaaacctg

SEQ ID NO: 16611 - DNA, 391 bp, Glycine max
tagcttaacatgccccctgccaaattctgagaagtacctaactcctactaagagcataaacatttacagagggatttccaaaaccagatgcacttattgccgaaaaatcacgaagtccaaagtcctatatatgttacgtctcaaaaattggatgcaatctcatgttgtaacaaagtcatttacaaatcccccagtccccacataaaagatcatacttgtgccattactttgcaaattaaaatctgtctccttgatatgaatatattgaagaatttctttacaggtgaattacatgataactgatcagcggataagtaggcagtatggaaagctggtaaataaaaagacaatatgattcacataccagaagtggcccactggtccaacgaaa

SEQ ID NO: 16612 - DNA, 423 bp, Glycine max
tctagtatttataggctttcttcttcaagtgttcattgtctttaaacaaatagatttcttcacttaaactcacgtatgaagatgtgactgttgcattaaatgcacatcctcctcatgctggaaaaccattatctttagctaccttgaaaaatacttcagcaggaaaccacttgctttcactcagagcaagtttgtcatagcatagcacattgtttgatactatttgaacttcaaggtgttgaatgttcctttatgcttcttaggattttgatagattctaagagaatgtcgtgtaaaacagttcttgcaaaatgaatctcagacacaaagtattaaatgaaaattttaaatgcattcttaaatgttgtatcaaatcataactaatgtttactttcatttgaaacttcaaaagcatattcaatg

SEQ ID NO: 16613 - DNA, 390 bp, Glycine max
agcttgtatggttaaagtctcacgattgtcacgtgctcatgcaacaattgttagccatggctatgcgagacatcttgccaaacaaagtcaggttaacgataactcgcctgtgctttttcttccatgctatatgtagcaaagtcattgatccagtaatgtttgatgagttggaaaatgaggccacaattatactgtgcctgttggagatgtattttccccctgctttctttgacatcatgattcacttgattgtgcatctggtcagagaaatcaaatgttgtggtcctgtttatctacggtggatgtacccggttgagcgatacatgaagatcttaaaagggtatacaaagaatctatatcgtacagaagcatctattattgagaggtaca

SEQ ID NO: 16614 - DNA, 429 bp, Glycine max
  unsure at all n locations
cttgcagatcagagtgaaatgtattctgatcccgatatatatagaagacttgtgggaaaactcatctatctcaccattacaagacctgatatttcctttgttgttggagtggtgagccaatttatgcaaaatcctcgtgttgatcattggaatgctgttatgcgtattcttagatacattaaaagagctccaggtcaaggattactttatgaagacaaaggtaatacacaagtatctggatattgtgatgcagattgggctggttgtcctatggataggaaatccacatccggatattgtgtctctattggagggaatgttatttcttggaaaagtaagaagcaaactgttgttgctagatctagtgcagaggctgaatatagatctatggctgtagttacatgtgaacttatgtgggtcaaacaaatn

SEQ ID NO: 16615 - DNA, 395 bp, Glycine max
agcttcctttacaacaaagagaagagaatgaaagatttcagaaatacaagtagtggggatgtctcctccacctctaggacctcacaatcgctcacaaactcatcgcaagctctcaagacagcttcctcttccagctctagtctttgtagatcttcacacaacaaattctctcaaactctctggaacttggacctttctctctctagaactctccaattatgtagaagcttcaagaaaaggctaaactcctcttcaaaatcagatttcaggcttaaataggtggctttgtttgtgctcgtgcgcttagcgcaattctgaaccgcttagcgtgcattagtgaatttcggcttatcgcggcttttctcactcagcggatggactgaagcagtgtgctt

SEQ ID NO: 16616 - DNA, 427 bp, Glycine max
  unsure at all n locations
tgtaatcgattacatatatactgtaatcgattaccttagttgattttcagaaaatactctcaacagtcacatgtttttacttggttcttgaatggccatcaaaggcttatatatatgtgacttgagacacgaatttgctaagagtttttcagaacaaaaaggtcttatcctcttaaaaagcaaaatcgttttatcctcttacaaattccttggccaaaacacttgtgattcaataaggatttatttgagtgctcaaattgttcaatctatctctttcaagagagattacttcttttcttcttctttattctgaaaaaggattaagagaccgagggtctcttgttgtaaagaaatctgaacacaaaggaagggttgtccttgtgtagttcagatcttgtaataggctnttacaagatagtggaactct

SEQ ID NO: 16617 - DNA, 393 bp, Glycine max
agcttctcaatcttgattttaagaagatcagaacttgctttgaaccttctgagtctgatgtgttttcttgctctctcttttttaagcaatattccccaatttcaccaagatttctgacttgtcttcaaaatattggtttgaaacttcccaatgttggttttaagaaagttggaatttgcttttctttggttatggatattccaactctctctttctagcaatattctccgaattcaccaacatccctgagtggtctttcaaactattgtctttttcagtggaactgagttttatgttttttattgggaatgaaattatcttgtaataagctgagagtttagtaagcttcagcttgaggtgggagtgttaagaatctgacagatattctagatg

SEQ ID NO: 16618 - DNA, 428 bp, Glycine max
  unsure at all n locations
tgcttctatagccaaaagtacatattcgattgtaagattaataaagaagagtcaaatcacatctaaacagtgttttgttgtttcatattgctgaaattgataagaaagacaaaggttgcagttctcaatgggaaatgaatcaatcagccataagacaacaatataggacaactatcttattttaattaatttatttcatcaatttgtctatttttacacttctagcgtctattcaagcataagacagtaaattggccataataggcatggcactaatatttaaaaaataaaacattgaaattttgacaataaaattgtcataagacagtaaattgcccataataggcaaggcactaatatttaaaaaataaaacattgaaattntgacagtaaaattgtcactttttactatgagatgttgataaaag

SEQ ID NO: 16619 - DNA, 147 bp, Glycine max
  unsure at all n locations
gtgcggtccgtatgccatttcttctgatgagacagcttattcaccatggtgctgcatactttgatttattattatgcattctcgtggcagaaccacacactttgagacatgcctcattgactgaatcaaaatgccccgagccctgcn

SEQ ID NO: 16620 - DNA, 381 bp, Glycine max
agcttcttaccatttgaaagcacttgaattctcctaaacatgtcatccatatattctccttctttcatggagaaactttcataatgttgtgtcagagtggcaacctttcttagttgaacatcttatgttccttcatagttgatgcttaatgagtctcaaatctctttggttgtctttagtctgcatatcttgttgtactcattcttggatagagagcatgtcaaagtataacgattttttgtgtttagctccattattgcaaggtctgcatttatccattctgtttcaggtttgggaatgggtatctctctatttgtgatgatcaaccaaagtctctagtggttggacttgatgtacatcttcattattgctttacagtaa

SEQ ID NO: 16621 - DNA, 428 bp, Glycine max
  unsure at all n locations
tcatttcctctaatagaaattntttggtgactttgatttacataaatcacattcaatccatttgctgtaggaattttcacatagtattttgcttagtattatttaggtcttgcctttgatattgtctaaagctatgcacatttaattaataatagggaatattattggcaaaatattcattctcttattgtttattaatctcagaatcagaaatatgccaagattgtaagatcaaaatttggttttctatggcttttctagtgagtgttattggatctagtaatagggggtactgaatcaaaacttgtaagttgaaacttaagggtacatagcttgtcctgccacatctggaggttctggtttgagtgcatttgtaggaatataaatggcttctcaatttagtttctcatttgcatatcacacatact

SEQ ID NO: 16622 - DNA, 390 bp, Glycine max
tatcttttggagacagagttaagcaactgattaattgaaagaagctctgaatggggtcactgtcgatgtaagtttccccttgacttgttatattgcctggcaaaaatatagttgcgagtttccctttagtttgttatatgactggtaaatagtttgcagctaaaagaaaaccgagagccaagttgcctttactttttttttgatagttacattcactatctcattgcattcatagcttcctttgccatttccattaatagaatagagaattcttaggcatatgagcatttaatgcatctctgtcactgactctgctcaatagctttcaataattacaatgacatctttttttttggttgtggaagataggcagagtcatagagatataaa

SEQ ID NO: 16623 - DNA, 418 bp, Glycine max
  unsure at all n locations
ttctacgctgccagttaacaaggtatgagctctatctattttgntgttcttcttagtaagttcttaatcaatgcggtggcattgtctgaaggttcttatcaaattattgggtcattttgtccacttggctaaccatataaaagtatcaataagaatggtaatgtggggtttcattttgttgtggcagttgattgtgctttacgtggttttcaagcttgacgagagttacacgccgagcaaagtttccatccgtgccggtgatggttttcacaacttgaaggtaaatttttattttattggtttgggtttgattgggatgattatgcttaattatttggtgttgactttgggaacatttttaggagattaagaccgtggaactcgtgaaggcaactgggtgggtttatctatccttgtc

SEQ ID NO: 16624 - DNA, 385 bp, Glycine max
tgcttgtatgcacacaaggatggatttttgctcctctgttccatcctccttccaggtcagtctgtgtagattgattggacaaagacttccttttatgatttttaggttgttttttcccactgcagtaaatttgcaaaaccatctaatataggaggatgatagaaactggttcagatttagcacaccaagaatatactgttactgattaacagaaagaatgcacaatttccctggatattcagagatccaagactctccctagtcacaatactaactcaccaattgactaactcctcctttcaatctctctttctatatataggcagcatgccttatttcttctaccaactaacctaattagctaactaatgtaactaggtatcta

SEQ ID NO: 16625 - DNA, 424 bp, Glycine max
tgcttgcatacaaaagaagacaatccacaccaacatttataagaaaaagaagcctctgtcttcctcttcaccttaccccataaagtaaagatgatgccctatttcgaggaccatttttcattgcttgacatatcctttttttttactgtacggtcgcaaaaaattactgcacattatagaatatcagtgtcatttgtaccaatcaaatatagtttagttcaatgtgaactactaaataaagatcaaaaggcacaccttctctaactatgccgagtgtgttagttttttagtgatcatacgtgaatatattcatatctttagtgttaaatcataatacttataatgtctatatttttctcacttttatcattttcttattaatgagctcagatcccataagttcatcggtctggatatttcaatg

SEQ ID NO: 16626 - DNA, 385 bp, Glycine max
ttgcttctaaactttatacaagaatgaagctctgataccacttgttagacaagtggcctcaaatatcttaagaagggggggggggttgaattcagatattccaaactacttccccaattaaaaatctattacactttttaatcaagttatgaattcccttaatgataatcttcttaaatattaattcaaataaaacaatttgaatatgaatataaaacaataatatataaaggacgattaatggaagcgagaatgcaaactcggttttatactggttcggccacacccttgtgcctacgtccagtccccaagcaacccgcttgagagttccactatcttgtacattgcttttacaagttctaaacacacaatgacaatccttcca

SEQ ID NO: 16627 - DNA, 426 bp, Glycine max
tatgcgcatatttccttacaaacgttctcttgtttaagacatttaaccgaaaaaaaatgcacccatatacaatcaagggagcttcgttacctagattatttacacgtacctccaaggtgtatttgttacttacatcacacacatctccttggctaaattcacatacatgcatactcaaagcattttggggtaccaaaaattgcacacgtgcacatcttagcatttctaatacctatacatacgcaaacttcatgatgaatcttgactatctacacaataaggtgctacatttcatgctctttttttcaagtttttgctgcctaaagccgcatgcaaattcaagcatattttcctttgctgactaaaattgaattcaaattaaaaggtatatcttttgtaatatgttttcttcacataacatgcaac

SEQ ID NO: 16628 - DNA, 392 bp, Glycine max
ttgtttggtgcatatgattatacacttcagcttaaggtggaatattagaaataacgtaattataataacaatgtaaataggacagattatttgttatgtaattatgttaagggaaactatatattcttgtatttatgactcttaatataaatatatgctctggtgtgtaattttacacagaattcatcacatgccattttctctcgttctcaacactcttttttaggttcatttatggggaggaataactatgttcgttttgagtgttccctattttcctgataattgtttcaatgtgcagtcaacttctatgatggagagtcttatgaagcttgccaagtcaaacactgataaaaatttagagacttgtggaatccttgctggtttgcttg

SEQ ID NO: 16629 - DNA, 411 bp, Glycine max
  unsure at all n locations
ntnttttctctattttttgtgagctacttagttgatattgttttgttgattcactatcacatgaattatgaagccaggaacattctatgccttgccacaaagtcctcagctatttaagcaaatgctaatggtagctggttttgacaaatattatcagattgcaaggtaatattttcgtcttatgtttgagtctttatttgtagcttggcttcttttacgagaatatgttattgtcccctatgtagtgctttttcctttttctcttttaagttttttccctatattaatatgcattttgtttaagtgactttcataaactaagaatatagaatgcttgtttttgtaagctatactaaacttaaaattgaaacaattatgatgcaagtgacttttctttttggataaaatgca

SEQ ID NO: 16630 - DNA, 377 bp, Glycine max
ttgctttcaaaattgccccatgtgtggcatctcttgtcaatgtcaggatttacacgtgattctcctcaaatttcagccagcttgcatcaattagaccttgcaccttacgcttcaagcccctacaatgctcaatggaatgccccggggcttctccatgacaagcaccacgttgcgttcgagtcgtattctcggagaaatggaggttgatgaaccttggttagggttatggctaccattgaattatcaagtagatatgggagcaactcagcataggacactggaattggggtgaattctaaggctttctcgttgcaaaattcatttcttcggtggtgttttggtttacgctaaaggtggtgtttgtcattggaagtgcg

SEQ ID NO: 16631 - DNA, 426 bp, Glycine max
tgaaatgaggaagtgtggaagggtgagacttctttcttttattcgttgaccacagagtggtacctggagatatgtcgcgggggttaggagaccttggggacgtcaggtggggtgctattgcccaaaaccaagcttgaccaatcccgacccaacccgggcatagtcagtcagtgagaacctgtgatgtacctaaacaggcgagctcctggcagtcaaccgataaaagaacaaagaccacaaagcaaagaggcttgtgtggtggctggccagctgtgaatcttgagtgatatctgtgatatggcctctggtaatcgattaccaagggtgggtaatcgattacaaggcttaaaagtgaaggcaggaagctaagatggcctctggtaatcgattaccaagggagtgtaatcgattaccaggctttaaaac

SEQ ID NO: 16632 - DNA, 344 bp, Glycine max
tagtttttctttcacaatcaatttgtctactaactaacaattctactgtgagttcacactcttgttctttcttctttcaacatgcatattcgttcaaattcatgaatagaaacacaaatctcatcttcaacatgcattcaatttaaagcaaggcatacatccatttttcaaaataaataaactattttactgcaacaccaacaaaagttaagttaaactgttccagatgcttcagaatgagcaactacactactcatgcacaaaactaacaagaagtaaataatgtactataaccataattatactaatagatcaaaaagcacaaaaaaatcaataggaattta

SEQ ID NO: 16633 - DNA, 420 bp, Glycine max
  unsure at all n locations
tgaatctctntcaacttcttcttcttcttctttgtatcaaaagttttctgaagttttctggttttccaaaccttgaaaacttgtgctattcatcttttcattctcttctccctttgccaaaaagaattcgccaaggactaaccgcctgaattcttgttgtgtctctcttctcctttttccaaaagaacaaaggactaaccgcctgaattcttttgtgtctcccttatcccttgtcaaagaattcaaaacgacacagtctgagaattcttttgattcttcccattccctaatacaaaagtgttcaaaggactagccgcttgagaattcttttgtatccccattcacaaagtatcaaaggtttaaccgcctgagacctgtgtcttaacacattggagggtacatcctttgtggtacaagtag

SEQ ID NO: 16634 - DNA, 386 bp, Glycine max
tagctttggagtttccaagtgccaattcgtcctcttctttagtccagtcttcttctggcttcaattcatcagtgggctttccttctgtgtccagcatcttgggatgttcccagcctttgatgacagctttccaggttctgctatccagtgatttgaggaaggccaccattattgctttccagtattcatagttgcttccatcaagaattggtggtctgttcactggtcctccttctttctccatgttcatcagaatttatctccccagatctcactctgtgatttcgagtgttggctctgataccaattgaaattctgataccaggggacagatgtcgtacaggatgtcacgacatcacgcttcagaacatgcagattgtatgtgt

SEQ ID NO: 16635 - DNA, 415 bp, Glycine max
tggaggggttgatggggacccggtgctaagatgaactaggttaagggctatgtgggagtgcgtgagctcagttgaaaggtgggcaactggggatggtgtgtttatgtttgacttgtggaactgggagagttgatttgcaccatcgcccgatcgccacctagtaccacatatgacgggtgccccataatccaacaagcttgatgtgagaaagcgtggaagagttagtcttcctacttttgtttgttgaccacaaagtggtacctggagatatgtcgcgggggtcaggagaccttggggacgtcaggtggggtgctatttcccaaaaccaatcttgaccaatcccgacccaacccggccatagtcagtcagtgagaacctttgacgtacctaaacaggcgagctcctggcaatcaac

SEQ ID NO: 16636 - DNA, 391 bp, Glycine max
  unsure at all n locations
agctttttcctcgttggaaggcaacgacaaagggatctcagatagtttcaggcaagcttgccaagcggttctatggacccttccaagtcatagaatgcattgggctcgttgcatataagttacaattgccataggaagttaaaatacaccccgtattccactattccaagctgaagtctttttgcggttcaccagaaaatatggcgggaattgcctggcacaaggagttactcaacgaccaacccctcgtgtttccattaggtatcttggattaccgtagagcatccaccgaggatccctgngaggtgctagtgcaatggaatggtctctcacctgatgatacctagtgggaggattggaatcagctgtgtgaaaactaccaccttgagga

SEQ ID NO: 16637 - DNA, 417 bp, Glycine max
tgatgagaaataaatgttttgcttggtacaacatctatgttatttaatgagatcattacattatttgtgtcttaataggaagtgaaggacatacattagaggaagccaaatctatcaatctatccttgagtgcattggggaagtgtattaacgcacttgcagagaatagtgcacatgtgccatttcgtgactcagcttactagattgctacgtgattcatttggaggtaagattcagtgagtataataattcatattttgtctttgttcatttatacaaagcagtaagatttggcaaaatactcttcctaactttcaggacgtgagacagatgaagtcgagcccataccggatgctctgcctaatctggaacagtaagctgcctaatgtgtctttgatgcattttagaagtctaatc

SEQ ID NO: 16638 - DNA, 393 bp, Glycine max
agcttgttcaaatcaagtcactcccgcattttatctctagcatgcattgtatgttggtctcgtcctttgtcacgggaagccggaaggtccatatcaccttcttaattgtacacatggggcactgcgcccccaaatgcgcaagtaagaagagataattttccgggctctcgtgtccgtaaaatgcattcatatcatgcatcgcataagcatctcttcataacatcataatggacatatcctgcatttgtccgttatcatattccggcctcacattttgcatgagtcatggcatcatcatgcatatgcgttcaacaaactttttgatctacaaaattgcataccatttgttttcatgtttgttcatccttgcgttttcctctacaaaacaaaaac

SEQ ID NO: 16639 - DNA, 425 bp, Glycine max
  unsure at all n locations
taagaatggccttattgtttatgccttgacggcttgtgctatttcctgaatttccggtgttacgaatatgacatgatgtcgtttacggggtattcaagttcgtgatataatacccgcagaaagcttgaaggaccaagctttcatttgtcctggttctcatcactcgatcatctggcctgtagaagatccaagtccgagaagcaaagcaaagttggtagccactgctaagttggttcactttgacaaaagctagaagttgcagtatgggttcccacccacctgttgtaaattgagcccgtagggtacaaaatcaaggtcatggatgtccgtgtggctatttttctcattattttttacaaattttttttactcattgtccctaggttattggtttttttttttttttcattntatatttttaaatc

SEQ ID NO: 16640 - DNA, 396 bp, Glycine max
agatatttaaattaaaaaagccacttttaaattttgagactttttttggtacatgaaattttgagactaaaaataactttaaatttaaaggattaaaaaatcatttttaaatttggagaagaatattttttatctaagtttgaagaaccaaaaagacatttaagtcacaaaattaaatactttgacctgacatataaatatatgataacatggacttcattagtcatattaacaacaactacaacattgtttatgatgaggagttaaaaggagctatttccaaattttggagaagaaaaaatcatttttttttaatttgaggaacaaaaagctaacttgttccaaatttaagtaactataattatatttaagaaaaaaaacactaaaagatttgaa

SEQ ID NO: 16641 - DNA, 428 bp, Glycine max
tcagacaatgtgtggaaccagtcatcgttggtgtttgttctgccgaagaggacggtggcgtctacggtggctgttgatttgcttcgagctgtgtcatcctttgcaggagatcatctatcttcgtgttcattgctagctgagatgctgatagttttgcaatggcgtcttccaatcggtctgtggaaaccctagagcgtgtagcttccgccattgatgctcaatgaaagcaccaatgttatgacttggacttcgaggaccaagggcctcggttagtagagagaagaaaggaaggagagaaaagaaatcgtgtttagttgcttgttatttcatgtatgaacatttacaaggttttatacttcctgcagttgagatctaacagaattagctaactacaatcacattctaactgaatctagaatattccagat

SEQ ID NO: 16642 - DNA, 397 bp, Glycine max
agcttcatgaaaaagatggcctcagcaaattccttatttccagaaggaaattctatcaacagacctccaatctttaatggagagggttaccactactggaaaacccgaatgcaaatttttatcgaggcaatagatctaaatatctgggaagccatagaaatagggccttatatacccaccacagtagaaagagtttcaatagatggtagttcatcaagtgaaagcataaccatagaaaaacctagagatagatggtctgaagaggatagaaaacgagtacaatacaacctaaaagccaaaaacataataacatctgccctaggaatgggtgaatatttcagagtttcaaattgtaagagtgctaaggaaatgtgggacactcttcgattaacacatg

SEQ ID NO: 16643 - DNA, 426 bp, Glycine max
tgtgggatggctttgaagattgatatcaataaggcctttgatagggttgattggaattatttgttggttgttatgatcaagatgtggtttcatcagaaatgggtggattcgatgaaactttgccttgggtctacgcaattctcagtaatggttaatgaggattctttgggacctatttctcctaggagagggctaaggcagggtgaccaattgtcaccttacctgttcattatttgcactgaaggtctttcttcccttctaaaaaaatctgagaggagtggtgagttacatggtatcaaggtgtgtaaaggagtccctgtcctctcacaccttttacttgttgatgattgtttttgttttgcagggtaaatgatattgagcatattgctttgaaagctattctagattcctatggtgaaaattctg

SEQ ID NO: 16644 - DNA, 384 bp, Glycine max
agctttaaaagattggctaagattttgttaaaacataagcacttagacaatgaaggaaagctggagttgctgcacatgatgtccaacgttatgtcaaagaataagatcgggctgcacaatgcataagtcaagataaaatgtcaaatgaagcattgaagctgcaggatccacgatgtcggatacgatgtcctgacatcttgcccgaaaatactggacacatgaatctgttatatctttaacagattattgtgcagttagcaagagataagaagatctatctttatgaacgaattaaaagataattaaagttcgaatttcaaagtagaagagttcgttcagggattaaagattatagataaaaactaaaagatcaaactgtatctt

SEQ ID NO: 16645 - DNA, 430 bp, Glycine max
tcctcgaggccatttcctgcgaaggcaaacatttggtaagttagttttaccaagaaatgctactcttaaaacaaaatggcgtacaacctcctccaataaacacaaatatcaatgtaaatttagagcaaactcatgcacatacttccttacgagtattcactcgcacaagatattcttctaactaagaaaaatgcacccatgcacaatcaaagcaccttcgttacccagatcatttatatgtacttccaaggtgtatttgctacctacatcacatgaacttccttggctaaatttacatgcacgcatactcaaagcatcttggctaccaaaaattgcagacatgcacattctggtatttctaatacctatgcatatacaaactttgtgatgaatcttggctatctacacaataaggtgctacatttcatgc

SEQ ID NO: 16646 - DNA, 360 bp, Glycine max
gacaacaatagcccaagagaatggattttcaagaatggattcacacatagttcatagaatcaagtatatcatagatagattcacagaatcacagatgaagattggatttcatagattcaacgagatgatgatattcaagaattcagagtgaagataatcaacgaagacttcacaagggaagtattgaaaagatttttcaaaaaacaaactctcatctcacacaagtctataacattaatctaaactcgctcaaactggttttacgatgaaaactccatcgaatcaaaatttgactcctcaacacccaatttaccctagaaatggctcttgccttcactttggtcactcatcttcctcctt

SEQ ID NO: 16647 - DNA, 333 bp, Glycine max
tttggcttttaaatgccattaagaggttcaactaccccattcatcttgggcctgcatgggggggaattatggcggtggaatcttgaaacctcacacaattcctttatcattttggtggtcaaaatggtggcattatttggataatcttcttgggccacccataccggcagaatatctctttcttaatgaacttgaccaccacacttcctttgtacaactggcatatgaagcagcttcaacccatttggtgaagtaaccgatctgcaccaaaatgaagcgacgtctattcggagcccttggctcaataggcccaatcacatctattccccacat

SEQ ID NO: 16648 - DNA, 144 bp, Glycine max
  unsure at all n locations
tgtttgttcttttagcgctctagttatgaaagactagcttgcgtagnaaggggatcccatccttcgaccccgaaagcctgaaggtccgtactcccttcttaatatggcacatggggcactgctcccccggacgcgcatgtccca

SEQ ID NO: 16649 - DNA, 82 bp, Glycine max
tctaaggtagaacaacaattgaaaagaaagagtgtttttgtgaggagttcatctaactctcactgtcttggttgcaaggacc

SEQ ID NO: 16650 - DNA, 392 bp, Glycine max
tgcttgaaacattgaccacccaagagcgaggtctctctgaaagatatcaacactctgcaaacacattacattaggaagcatggcataaagccctacatgaacaatattcaacaacctagctaagcctcataaagggtgcgaaaacagaatctcgatgaaaccttgtttgcatcgaacactattattagccttggcgacaatgtgaacctttaaagggtacgatatgaatatgtaacccccatagataggagaataatcaaagagctagttaagagctgaggagagcaggaggtcacagggagatttaactctttcatgttagcgccatcagtactcataacatttcatacaaggtactgaatctaccaaaacctttcatcttatcgccgatt

SEQ ID NO: 16651 - DNA, 412 bp, Glycine max
tatctgctggccacaatacatccccgaagcaactggtattggaaaggactgggtcccctggctataaccttgctcttgctgcatacccaccaccatcaccagcctatagatcacatcaagcatggcatagacagtcctcattcacaaactggaaatgattcaatagaatagacatgggccagatactctcatgcatgacaacgccactactcgaactttggccctaaggtgaggccaaatgtgttgacaacctccagctcaattaattatctatgaaggcccagtgattcttgctatgatgacctcaagtatccttccaacattggcggaaccattgacgctgccaactcgtaacgaggctgacacacccattatggcttcatgaagcaagagcccttgaaacatggttcta

SEQ ID NO: 16652 - DNA, 271 bp, Glycine max
ctgcttctttttttgagtggctaactaatgaacgatgtggagagggcttgtttatacacaaccctgcccattcctaccgtaatgcataccactcctggataacgcgattgcgaagtcctatcgggccataaatctcgctatggagtagaaccttctttaaacgatcttaggctcctgacacttaagacgtagctgaatggatgcaccgtagcattgagaccataggcgctgaaatattggataccttggtcagctacgatagaaactgcta

SEQ ID NO: 16653 - DNA, 377 bp, Glycine max
tgatgaaagcatagattggttgttatgatcaagatgtggtttcatcagaaatgggtggattcgatgaaactctgcctagacaataatatgagtaatagagaacaaaatattagtcgagtgaaacgccgttcacaaaagcgatagatagggaaacagcgaaagggtaggcaatactttgtggttaggataatgagggtggttgtagaagctttggagaacaacagctgtggtgtgttgaggaataattaattactcataaaacacacacttgatttccgcccaacaaatttattgatgattggtgacacaataactggaagctcaatcttcatttatggccaattatagcttgctacagctgagtttgtgacaggatc

SEQ ID NO: 16654 - DNA, 252 bp, Glycine max
  unsure at all n locations
agctttacagcagattttagtaatgacccactaacttagaattaaaataacttaatgccattaatctagggaattaaaaaaacttaatggctgagtgtaactgaaattgtggcaaccaaaagtcacccccaacagccaacaagtcagccaccatttggtctcccaaaaggctgatgcctaggttgccaattgggcccttattacaacttgaactaaacctactaaagccctttcaagncattcacccaaaac

SEQ ID NO: 16655 - DNA, 287 bp, Glycine max
  unsure at all n locations
tatagaaactcaagcttctcgagaaattcgaatggttataacgttttcactcaatangtcctgatgcggcggacatcaactcatgtagacgctcgaagattgaacaacgcacgctctcgagaaactcgaatggtcataacatttcgcacacatgtccaaatctgtgacctaacatttctagacactccgcactggctggataaagatcttgtcatatccaaactgcagtaacatcgcgcgcgccatgcctatataagctcgcgagcaacggcactcccccccaacat

SEQ ID NO: 16656 - DNA, 382 bp, Glycine max
agcttcaagaaaaagatggcctcagcaaattccttatttccagaagggaattctatcaatagacctccaatctttaatggagagggccaccactactggaaaacccgaatgcacatttttatcgaggcaatagatctaaatatctgtgaagccattgacatagggccttatatacccaccacagtacaaagagtttcaatagatggtagttcatcaagtgaaagcataaccatagaaaaacctagagacagacggtctgaagaggatagaaaacgagtacaatacaacctataagccaaaaacataatatcatctgccctaggaatggatgtaatattcagagcttcaaattgcgagagtgctaaggaaatgtgggacactc

SEQ ID NO: 16657 - DNA, 388 bp, Glycine max
tgtagggttaaagtctcacgattgtgacgtgtttattcaacaattgttagtcgtggctatacgagacatcttgccaaacaaagtcaggttagcgataactcgcttgcgctttttcttccatgctatatgtagcaaagccattgatccagtcaagtttgatgagttggaaaatgaggccgcaattatactgtgccagttggagatgtattttccccctgctttctttgacatcatgatttacttgattgtgcatctggtcagagaaatcaaatgttgtggtcctgtttatctacaatggatgtacccggttgagcgatacatgaagatcttaaaagggtatacaaagaatctatatcatccagaagcatctattgtagagaggcacatt

SEQ ID NO: 16658 - DNA, 210 bp, Glycine max
agtctgtggtttcagcataagattagcaagatgatgcaaccaattttaaggaaaccctccgaagtcctaacggtttcactgttgaagcaagtaaaacaaaatatgccagaaataaatgagcgaagcagctggaaaatctactagtggatttggcattttctccaaagagtgtcatctatagttcagtccactacagaagttatgcacatc

SEQ ID NO: 16659 - DNA, 253 bp, Glycine max
  unsure at all n locations
tttccagagctacttggatgagcatatattttttnctttctcactatattcttttttaatatatatgaaccagcaagtcagaaacctgttaagaattaagcttctgtaatgcattactaaccaattcttttaacagaacgttccttctgtataaaatgctccaacttcaataactaagctagaaccaatttgatagtcccactacaatatttgtggacgaaacagcgacacaactgcgcccattcatgcaagt

SEQ ID NO: 16660 - DNA, 395 bp, Glycine max
agctttgagcaaattcaaacgacaataaccttttactcggatgtctgattgagtcccgtaatatatcgagacgctcaaaattgaatgttgaacctctgagcaaattcaaacgacaataactttttactcggatgtctgattgagttccgtcatatatcgagacgctcgaaattgaatgttgaagctctgagccaattcaaacgacaataactttttactcggatgtctgattgagtcccgtagtatatcgagacgctcaaaattgaatgttcaacctatgagccaattcaaacgacaataactttttactcggatgtctgattgagtcccataatatatcgagaggctcgaaattgaatgttgaacctctgaaccaattcaaaagacaatatctt

SEQ ID NO: 16661 - DNA, 429 bp, Glycine max
taaacattcaatttcgagcgtctcgatatattacgggtctcaatcagacatccgagtaaaaatttattgtcgtttgaattggctcagaggttcaacattcaatttcgagcgtctcgatatattacgggactcaataagacatccgagtaaaaagttattgtcgtttgaattggctcagagctttaacattcaatttcgagcgtctcgatatattacgggactcaatcagacatccgagtaaaaagatattgtcttttgaattggctcagaggttcaacattcaatttcgagcgtctcgatatattatgggactcaatcagacatccgagtaaaaagttaatgccgtttgaattggctcagaggttcaaaattgaatttcgagcgtctcgatatattacgggactcaatcagacatccgagtaaaaagtt

SEQ ID NO: 16662 - DNA, 382 bp, Glycine max
agcttgtttttggtttaaacatgatttatgacttgtaggatccaatttgagaaaaattggatgtgggcaagatggatttaggacttgtaggatccaatttatgcagaaaaatgttgttgaattgtgcagcagatttttgattgtgtgcagaaaaatgcttgtgcattgctggttttatgggaaaaggtagtacatattgggttctagacattttctagcagatcccaacggtcaagatgtatacttatgtactaggaacctccagtaaaattttcaagtcaatccaatggttaacgaatcggaatgaagaaaatgttactgggatatatgagtaatgaaagctgtaatacgtgaatgtgttttgggcagagatttctgtctc

SEQ ID NO: 16663 - DNA, 423 bp, Glycine max
tgtaaggttaaagtctcacgattgtcatgtgctcatgctacaattgttagccgtggctatacgagacatcttgccaaacaaagtcaggttcacaataactcgtctgtgctttttcttccatgctatatgtagcaaagtgattgatccagtaatgtttgatgagttggaaaatgaggccgcaattatactgtgccagttggagatgtattttccccctgctttctttgacatcatgattcacttgattgtgcatctggtcagagaaatcaaatgttgcggtcctgtttatctacggtggatgtacccgattgagcgatacatgaagatcttaaaatggtatacaaagaatctatatcgtccggaagcatctattgttgagaggtacattgcagaagaagccattgaattttgttcagaatactt

SEQ ID NO: 16664 - DNA, 392 bp, Glycine max
agcttctaatgtatgtaagatgtgtattgcctctaaatgagctacaggtgcataagtttctttgtagtctattccttcttgttgagagtattctttagcaactaaccttgctttgtttttcacaacctttcaattttcattcagtttggtttgaaagactcatttctctccaatagctttctttctttttggaaattcgactgactttcaaacatcattcctctgaaactgatcaagctacttttgcattgctttaacccaattgtcatcctgcattacatcatcaatgtgtttgggtttcatttcagaaatcaatgcaataggtccttatgttctgagtgatgatcttgtttgaacatgatcaactagatcaccaataatttgactttttg

SEQ ID NO: 16665 - DNA, 430 bp, Glycine max
  unsure at all n locations
tgtaggattatggggtacccgtcatatgtgtactatgtggcgttcgggcgatggtgcaagtcgactctccacatccacaaatcacacataaatccaccatcctcagttgcccaccttccactgagctcacgtactcccacgtagccccttatcctcgttcctctcaacaccgggttcccatcaatccctccaagcttccacaacatccaagaaattcaacatccaaacatcatgaactatccaaaaccaagaaaacagggcagaggcagaaaactctgcccaaaacacattccaataccacaactttccttactcaaatacccagtaacatcctcttcgtttcggttcattaactgtttgatcgattcgagaatntttaagccttgtaatcgattacacacccttggtaatcgattgccagaggtcatat

SEQ ID NO: 16666 - DNA, 379 bp, Glycine max
agcttgtttcaaagaggtccaagaaggataaggcggccgaagggactagttccgctcctgagtatgacagtcaccgctttaagagcgctgtacaccagtagcgcttcgaggccatcaagggatggtcgtttcgacgggagcgacgcgtccaactcagggacgacgagtatactgatttccaggaggagatagggcaccggcggtggacatcactggttacccccatggccaagttcgatccagaaatagtccttgagttatatgccaatgcttggccaacagaggatggcgtgcgtgacatgaggtcctgcgtaaggggtcagtggatcccgttcgatgccgacgctatcggccagctcctaagatattctgtggtgtt

SEQ ID NO: 16667 - DNA, 429 bp, Glycine max
  unsure at all n locations
tgccgccacggagttttccgactatgctcttgtgtgtgtggaacaagctacaaaaagagagagcaagaattgtggtttgaaagaacaagggtgatgatgaaaggaaggaaagaatcactctttccagcgagggcaacacacaaaggttgagaaagtcctttgatacagccaaggtgttcttgaatcactcaagaatttaggagaatcactctcactaagataaaagagataaactctaattttctgaataaaactcaacttgtgtttattgataaaatggttcagcttatatagaagctttacagcagattttagtaatgacccactaacctagaattaaaataacttaatgccattaacctagggaattaaaaaaaacttaatggctgagtgtaactganattgtggcaaccaaaagtcacccccaac

SEQ ID NO: 16668 - DNA, 389 bp, Glycine max
  unsure at all n locations
agcttgtataacggctggacatgatatatgtcagggtgttggtttatccagcggttcatggataaaggaatatcccacattatttccatgacacgcgtgcaacaatgatgattcataaattttatgcaaaacttgtcatgcatgcacctatgtggacactcaagcatcaagttctgtggtcatgtgacactanggctcaagattcatttttcctatttaagtcaatccagtgtttccaaaacatgctcttttatcaattcatgcattcatccgagtccattttgggtgttcgggaaaattttacagcattcacccttcaggtgtatacatattttttcaacaaacacttctgtgtttgatcagcgaatctttttaaagaaagagttgga

SEQ ID NO: 16669 - DNA, 424 bp, Glycine max
  unsure at all n locations
tgtccttggtttagacatgattggtacatgatttgttacttgtaggattcaatttgggcaaaattggatgagggaaagagtggttttcgaaatctgcactttatgcagaattttgctgttgaaatgtgcagcagaaatttgcataagtgcagaaaaatactatgtatttgctggttgtggaaagagtagtacagaatgagttcttgatgtttgctagtagatcccaacggtcaaaatgtagacttatgtactagagacttccagtaaaattttcgagtcgatccaacggttaacggattggaacgaaggaaatgttactgaggtctttaagtgagaaaaagctgtgattntggtttgagttttgggcagagttntctgcctttgccctgttttgcttggtttgttagtttgtgatgatttggat

SEQ ID NO: 16670 - DNA, 327 bp, Glycine max
atcttacgctccttcaactgcacaagactcttaatatttgaagagtatacatgtggaaccttcacctgacgaagacactgacagaaactcatcttatcctttttggacaaagtatgacaagctgctggcaggttgattgtattcccatcagaccttggatgcaactgtgatcgtatccccatcttagatacatcttgacggagattcaatccatacttcatcttgccttgaatgtcaaagagcattccagtcactctgtcacgtacatttttcttctgatgcatatcatccgaccaatgccttacgcttagatgacaccatgactgc

SEQ ID NO: 16671 - DNA, 393 bp, Glycine max
ctgccgtccagctcttacatacgagcagaggtgcttcctctaaacacatcaactcttaggacgaatatgtggtaggacctacttagagcattcttgcgactagtcacgtgtttttactaaacgcacccctgtatatttttaaggaaactctccacgcaacctacgagactatgcgaatctctgaacgctaactattattctatatgtatgacacataatgcattgcagagaactgatgaacgcattcttagctcgctaagaagatcaatgggagctcacttaattgtgccactgctaccgctttctaataatctgtccatatcatgatattccggattgtgctcaatcatctatcgttagagtcctgagatctctttgctctcatatattgcg

SEQ ID NO: 16672 - DNA, 276 bp, Glycine max
tgcttctacatctataggcggactgcccttgattgttaactaaggattcatggcgatcctctaggacgaggatggaatgatcttaacagcgcccttatgaagaggcacattccctcctactatgaaagggaacttactgacaacctccaagggcttagataaggacatatgagtgcgaagaatatagaccacaaatgggactactctttttacaagctggacttacggaggacacaagccttcttcatttgatgagctaaatcttgcactgtcatc

SEQ ID NO: 16673 - DNA, 388 bp, Glycine max
tgtttctacttatgtggcagggcgggctgccttcactttcttgtccccaacacgagctttgaccaccgctctttcttcccgcgatgcttctctttatatccacctgagtgggcttatagcctaaaccatacttgccacgatttcctttggcatttatcaagctagttatgctgccgttgtctttgcctaaacccattccgggttcgtaaccgttccccaacataactcgggccatcattactgctgcaacggacaggcaaggctgcctagagaatgagtacacggaggaaatgctgaccacctcaaaagactggatagcggtatctaacgattcttctgcggcttccacataatgcatagatgatgggcagctcaccaagatgtcttc

SEQ ID NO: 16674 - DNA, 427 bp, Glycine max
tgtccgcataaaatcactaaaaagagattctaaggttttatacctcagatcttctcaccaagtaaaatggatcactttaaggtccaacgccttaaaaggaccaccttccaagtaaaaagaatcatttgattcgccctttagaaagaactgcgtaagtctgatttcctcttcgatggagggtacgtatgagcaagagccccgcttttgaggacctcaaaaataataaaaaaaaagaaataaagcttagatacataatttcacacaattctaatctaaggttgttgttctttgggacaaacgtgataggtgctaataccttcctcatacgtaaatacaactcccgaatctggaatattcttcatgaccggtttccttcggtttgtccgacgtgttccacaaaataacgttggtggagactctgcgcatt

SEQ ID NO: 16675 - DNA, 392 bp, Glycine max
tgtttgtgcaaatcaaatcactcctacgtctcatctctagcatgcattttctttctttacccactcctcacgtttggatttttagggaaaacaccataactaaacgcgccgcaagggatccctatcgcaccagatccaaatctagaacgatgggtgatcaagaggagacacaggaacagatgaaagccgacatgttggctctgaaagaacaaatggcctccatgatggaggccatgttaggtatgaagcagctcatggagaagaacgcggccgctgccgccgctgtcagttctgctgccgaagcagacccgactctcttggcaactacgcaccatgctccctctaacatagtaggacggggaaaggacgcactgtggcacgatggtagccct

SEQ ID NO: 16676 - DNA, 425 bp, Glycine max
gtgagggtgcgtagcccaccatcttttcatagtttagtaccgataatgtgtctaccatcacgattatcgtctccctttttgcacatgttctgtagttgcatcctatccggaaccatatcagaatagtaccgatactgcctaacgaaggcaaccattaggtccttccaagtatggactcgggaaggttccaagttagtgtaccaggtaacagctaccccaataagactttcttggaagaaatgtattagcagttcctcatctttgcgtatgcccttatcttccgacaatacatctttggatggttcttggggcaagtagtccccttctacttgtcaaagtctagcaccttgaacttgggaggggtgatgatattgggtactacgaacaactcttctaggttagcaaaggcataatctttacctcct

SEQ ID NO: 16677 - DNA, 372 bp, Glycine max
tgcttttgagaaattcaaatggtcataacttttcacacggatgttagattaaggcgcatcgcatatagagacgctcgaaaatgaacaacggaagctctcgagaaattcaaatggtcataacttttcacactgacgtccgattcaggcttataatatattgatatgctcaaaaataaacatcggaagttctagagatattcaaatggtcataatttttcacatggatgtccgattccggcgcataatatgtcgagaggctcaaaattgaacatcggaaggtcttgagaaattcaaatgtgcataacttttcacacgaatgtccgattaaggcttataatatatcgatacgctcgaaattaaacaacggaactc

SEQ ID NO: 16678 - DNA, 293 bp, Glycine max
tcgctagaatcggacctccgtgtgaagagatacgagcgttttgttttgtccagagctaccgctggagagtttccaacgtctaagacataagaggctcccgattcggacatcctggtgaggagatatgagcgttaggatatgaccataggaatcgctggagagcttccagcgtatagatatgagctacccctgaatcgaacctccttgtgacaagatctgaccattaggatatgaccagagcaatctgtgaagaatttccaatgttactatatgagctgcgccacatattggac

SEQ ID NO: 16679 - DNA, 353 bp, Glycine max
tgcttttgatcctttttataaaaagagaagttctgaaactcatcacgttgtctaaaaaggccttgaagtggatccaagtgctctgatcattcattagcatattcatgttttgatggcatactcaccactgtttgtttctttatggaactcaccataactaaaaaagcgcagaggcacccctataacactcgatccagaagtaagatggataacgaagagggagtgcaagaacagatgaaggccaacctatcggcctgaaaagatcaaatggcttctatcacagaggccatgctaaagcttcaaacaaactatagaagataatgctactgcggccgcttccaatacagctaggg

SEQ ID NO: 16680 - DNA, 410 bp, Glycine max
tgtagggttaaagtctcacgattgtcacgtgctcatgcaacaattgttagtcgtggctatacgagacatcttgccaaacaaagttaggttagccataactcgcctgtgttttttcttccatgctatatgtagcaaagtcattgatcctgttaagtttgatgagctggaaaatgaggcctcaattatactgtgccagttggagatgtattttccccgtgctttctttgacatcatgattcacttgattgtgcatcacgttagagaaatcaaatgttgtggtcctgtttatctacggtggatgtacccggttgagcgatacatgaagatcttaaaagggtatacaaagaatctatatcatccagaagcatctattgttgagcggtacattgtagaagaagccattgaatttt

SEQ ID NO: 16681 - DNA, 387 bp, Glycine max
agctttatagaaacctttgctttttttgctagacttgaagctataagaatcatgctttcctttgctactcataaaaatataaagttatttcaaatggacgttaaaagtgctttcttaaatggctttattgaagaggaaatatatgtcaaacaacctcttgggtttgaagatcatactcttccagaccatgctttcaaacttaaaaaagctttgtatggtctaaaacaggaaccacatgcttggtgtgacagactgagttcatttctcttagaaatggttttattaaagtcaaagtggatacaactctttctaaatgagaagttggcaaagatttcattatagttcatatgtatgttgatgatagtatttttgaagctactaatgaat

SEQ ID NO: 16682 - DNA, 421 bp, Glycine max
tgaatgaatataagacacatcttcttcaatcttggtgattcttgactccatctaatggaagtgcatgtccacttgtaattccaaagtgtcaaacctttcaccaacaaaggtttgaagaccatcaaacctgtccaaaatctttgaaagaagagatgaatcttctccatcatgtccttcttcaccaatatgtcgagcaccctttttcaaccaagagccatcatgctctttttgataaccaaaggatgcaatgactgaagcgcctataaggaaggatctcttgattggaacatagggttcagaatcaagagggatgttaaagtgttgaaggaaaagagtgactagatgaggatatggcaaaggagcattcaatcgcaatgccttatgcctgcgatatctaacaagaagtgcccaatcaatttgt

SEQ ID NO: 16683 - DNA, 396 bp, Glycine max
agcttcatgatgaatcaaaagtgattcaaagatgttttgatgataacaatgatgacaacaaaagatgatgacaaaggtgatgaacaatcagctcaagtgaatcaaataacatttcaagtgaatcaagaacaagtcaagagttcaagaatcaagaagaattcaagactcaagaagaaagcctacaatcaagaatcaagaatcaagattcaagatcttacgaatcaagatcaagattcaagactcaagattcaagaatgaagaaaagactcaatcaagataagtattaaaaagttttttcaaaactttgaatagcacatgagtttttgacaaaacctttaccaaagagtttttactctctggtaatcgattaccatattgttgtaatcgattaccagt

SEQ ID NO: 16684 - DNA, 424 bp, Glycine max
tgatttacattctccccctttctcaagaaaattcttaattcttcttgacatcatcaaaatcttcatgatttacaaaaaattttagaaagcttttggcaaaggaagaagaagttcaaagagattcaaggattgtaaaggattgtaataattgttcttaaaatgcaagttaaggtcttgcttttatagactcttcatgtctggtcaagagaaccattacaagagttataacctttacaaaaacttgaaaaccattggaaaagttataacttttagaaaaacttaaaaaccattggaagagttacatcttttgattttttgttcacaacttatcactagtaatcgattaccaaatcattgtaatcgattacacaaagcttttttgcgacaggatgtgactcttaacaattggatttgaatttcaaca

SEQ ID NO: 16685 - DNA, 396 bp, Glycine max
  unsure at all n locations
agcttgtctcagcgtttatgcgagacagagaccaacatgttagtcatcatcagcaagtaccaagaagaattaaatctagccatggcccacgagcacaaagtggcggacgagtatgctcgagtgtacgcggaaaaggaggctagaggaaaggtgatcgacttgttacatcaagaggcaacaatgtggatggaccgatttgttcttactttgaacgagagtgaagaacttccccgattgctggccaaggcaaaagcaatggtggacacctactccgcccccgaggagatccacaaacttctcagctattgtcagcatatgatagatctaatcgcccatataattaggaaccgctaggaagtttgtattatcactcanatcttgactagttataacttt

SEQ ID NO: 16686 - DNA, 426 bp, Glycine max
  unsure at all n locations
tgtagccattagaagagaatgagcatgtgattggaattattactgaaaatgttagtcaatttgtcagattgattgtgaaggaatgcattaacagtatcccggtgagagtgtggtccttaaattttgagataaatgactatcatttagtactgatttttgtgtgaatctctgaagtatggactgaatgcatgaaattgaggatgatgaaggccatgtttgattgtgataggaacttagccaaaaagctgaccacgtgcgtgaatgatgtatcctttgcacctagtttgagcttaatgaattattgattgattgaagcctgagcctacagtgttatctcctgctaccttgacttangttgtaggagagcatcatccacaggaagcgcgattcanagcaaatttgtcccaaattttggggagtaattat

SEQ ID NO: 16687 - DNA, 388 bp, Glycine max
agctttctgtaatcttttgcaggtttttataagattttgaaagaatagatgagttcgaataaagttcattataggcttgttttggagattcacagtcattgcaatctacctcatcctcttgatctaatttagattctttaaaggctgtgtccgccatcatacatatgttgtttacaacttttgatatcatggttggggtcagggaacccaattatggggatgtatgttttgccctgtgcatgctggttttcaagaaaaactgtgttcttaactaatgggatgtgatatatttgttattgatgtgcatgctggttttcaagaaaaactcatgttttaactaatgggatgtgataggtttggtattgatgattgaaattgtcaatgatgt

SEQ ID NO: 16688 - DNA, 334 bp, Glycine max
tccaagaatcaagatcaagattcaagacttacgattttagaatctagagatgactcaatcaagagaagggttaaaaagttttttcaaaaactgagtagcacatgaatttttcttgtcgcaacatgcccttttgcgggcgagcgaggcgaggctcatgggtgtgctttccaaaggaggaaagatgcgcagagtcaccaccaacgtttatttgtgggaaacgtcagaaaaaccgaaggaaaccggtcaaaatgaaaattctaagttccggagttggattcacgtttgaggaaggtattagcacctctcacgtttgtctcaaaggacaacaacctat

SEQ ID NO: 16689 - DNA, 393 bp, Glycine max
agcttttacctttcattttaacccttagaacttctcggccaacaatgtcatagataaagaaatgttgatgttcaaaggacactttaaatccctttttaatcaactgacctacacttagcaagttttggtcaatgttaggtacataaagaacatctgatattagtttgatacctgaacacgttgaaattgcaacaattccttttccttttactggaatatagccaccattcccaattttgacctttgagacattagttggcttcaaatccttgaatagagtcttatcatatgtcatgtggttcgtacaaccactaccaatcaaccaactttcacttgattcactactcaagaagcatgtggccacaaacagttggtcctcctcgtcttgattag

SEQ ID NO: 16690 - DNA, 427 bp, Glycine max
tgatttgtgagttgattttagctttagtttcactttggttattagttaattcattcaaggaaactttcaaagaaaaaatgtccgattaatttttcttgattattttattattttttttcaagatattttaattattttattattattttgctttttttggtttaactgaggttatagcgtgaacgatcggttagattttgttttaacagtgattaaacgagattacaacacaaatgatcggttgaaattcattttatcatttattaggtgagaaaatggcttaaataaacggtcaaaagctcgtgaaagcagaagaaaagaaaactgaaagtaagcaaaattaaagtgaaagtacacaaaacaagtagggaccactaagggtgcatagaatgaattgaaagattcgatttcgggaacttaccgattg

SEQ ID NO: 16691 - DNA, 384 bp, Glycine max
agcttcttgatagggcccaaactccactccaaaatctgacttcaggcttaaataggtcgctttgtttgtgcttgtgtgcttagcgcaattttgaaccgcttagcgctcattaatggattttagcttagcgtgtgcttttctcgcttatcggatggactgaagcggtgcgcttcgctggatgaccctttgcttagcacaaatgcacaactcatccttcttctagattcttcctcgcgcttagtcgaggagtgttgtgctcagtggatggctcgctaagcctgcaaattggcttaaccatagggtgaaaataagcacttcacaaacttgcctaattaacctgatattgagaaaaaatgattattaaacacactgaatggacatact

SEQ ID NO: 16692 - DNA, 432 bp, Glycine max
ctcacgcttcatgcttaactatgtatggcaaaacttcattattgttgttcatgacatacaagtgagcttgtaacagatcttctacacttggagtgatcacatgcagtccttttgaacccttaccacccactttgtcatcatgccgagactcaggaagcccaacaggtttagccttctctaagtattctgaacaaaattcaatggcttcttctgcaatgtacctctcaacaatagatgcttctggacgatatagattctttgtatacccttttaagatcttcatgtatcgctcaatcgggtacatccaccgtagataaacaggaccacaacatttgatttctctgaccagatgcacaatcaagtgaatcatgatgtcaaagaaagcagggggaaaatacatctccaactgacacattataattgcggcctcat

SEQ ID NO: 16693 - DNA, 394 bp, Glycine max
tatctttgcagatttggtcttcgccagtgaaaggatcgatgtgggtccgaaaagaggcaaatttgatcatcctactaggacgactgagaaaactggggcaaatgaagagggtgagaaagagggagaaacccatgctgtgactgccattcctatacggccaagtttcccaccaaacccaacaatgtcattactcagtcaataacaaacctcctccttacccaccacccagttatccacgaaggccatccctaaatcaaccacaaagcctgtctaccgcacttccaatgacgaagaccacctttagcacaaaccaaaaaaaaaacaccaaccatgaactgaattgtgcagcgagaaagcctgtagaattcaccccaattccagtggcctatgctga

SEQ ID NO: 16694 - DNA, 422 bp, Glycine max
gcttgagatgaggaagtgttgaagggtgaaacttcctgcttttattgttgaccacatagtggtacctggagatatgtcacgggggtcaggagaccttggggacgtcaggtggggtgctattgcccaaaaccaagcttgaccaatcccgacccaccccgagcatagtcggtcagtgagaacctgtgatgtacctaaacaggcgagctcctggcagtcaacagataaaaggaacaaagaccacaaagcaaggaggtttgtggtggctggccagctctgaaacttgattgatatgtgagatatggtctctggtaatcgattaccaagggtgggtaatcgattacaaggcttaacaatgaagataggaggctaagatggtctctggtaatcgattaccacggggtgtaatccattaccaggcttga

SEQ ID NO: 16695 - DNA, 393 bp, Glycine max
ttgctttttccttattcctcaaagaaaaggccaacgtatttgcatggaagccggtggatatgttgagcatagatccaaactttttctgtcataagttgatagtaaaccctttagtgaaacctgtgtgtcaaagaaggaggaaaatgactctcgaatgcctagaggaaattgaaaggcaagtgaaggagttgctaaggaaattgaaaggcaagtcaacccttcagcgaaacctttcatacgacttggctggccaagatcatcctagttaacaagcataacggaaaatggagaatgtgcattaactacttgatctaaacaaacattgtctgaaagactcatatccgcttcccgacatagataaaatggcggatagatctttcgactactgatatt

SEQ ID NO: 16696 - DNA, 422 bp, Glycine max
tatcgtaatcgattacacaattgtttttgagacaattattgatttattcaggagtctctgctttaatcgattaccatgtgatattatcgattacttctcttttaaaagtgttttagaagtaatcaagaacactttaatcaattacttctcttttaaaagtgtttcaaaagtaatcaataacactttaatcaattacattgaggatctagtcgattacattattcttgagaggtttccaatttttgggaagaacactaatcgattgaaatgataattaatcaattactttgttgaaataatcgattataggtggttataaatattttctctataaatatccaccttgtgttctctcttataacaacttaacgaacttctaacagtgcaaaactatttctgaatgagctagaatcacgagttga

SEQ ID NO: 16697 - DNA, 394 bp, Glycine max
ttgcttgtggttcaggtcaatggaacatgattgtacgataagtacaaggggaccctccttgtggcagttgcacaagatgacaacaataaaatccttccaatagcttttgttgttgtcgaaagtgaatcaacaagagcatgactcttctttctacaaaatttaaaaaggcatgttactccacaacatggtctatgtttgatttgaaagagaacaagtcaataaatagtggctactcaagacgtgatagtgggtggacgacacagaattctatgcatgtgttctgcatttgacacattgcacataattacatgaggagatacaagaacaatgccatcaaaaaatcaatatgagtgagtgtcaaacttctttctcttcctattaaatatcacttcat

SEQ ID NO: 16698 - DNA, 426 bp, Glycine max
taagctctttcaattgcacaaggctcttaatatttgtagagtatccttgtggaacctttacccgacgaagacactgacaaaaacttatcttctcctttttggacaaagtatggcaggctgggggcaactaaattttcttcccatcagaccttggatgcaattgtgatcgtatgcccatatcagcgagatcttgacgggtattcaagccatccttcgtcttgccttgaatgttaagaagcgtcccaatcacactgtcacaaacatttttctccacatgcataacatcaatacaatgtgtaacgtcaagatcagaccagtacggaagatcaaagaaaatggacctcttcttccatatgcaactcttacttttatccttcttttgggtctttccaaatacaatattcaggtgttgaacccgctcatata

SEQ ID NO: 16699 - DNA, 392 bp, Glycine max
tgcttgttttttagcaggaaattaaaaactgaaattatagtgggagaaaaaatactagttcccaacgtttcaactttttttggtgtacataatggctaaagtccacccgattcacctgatagactggtaatctttgtattttaaacatgtgccaattagaaaaataaaaatgacacatgatgttagcttagcaagcgaatacgagtgaataggaatagagatttgatattatgaggggaacgaagcaaagttttccagaacaaaaacatttcttcaccaatcacaaggatcacctttcctatttattgtgattgtgaacatcatgatcctaagcatcagcgtttcgctgtggctagaatattgagtaattgtcctctaatacgcacctgatt

SEQ ID NO: 16700 - DNA, 425 bp, Glycine max
tccatcaagcaaaatcatcaaaaaggtcatttgacatatagctcaaatcattaatccaagaaactatcaaaacttaaccaccaagcagaaactatacctcaaagtttaaccactcgataaaagcaacgaggcttaaccattaagagcagaaacaaaacaacgattcaatgcttaaccatccatgtcaaaaacttaaacaatgtttaatcaccgcggacagaagcttaccaggacttttcacaaacattttgtgaatcaacaataatcaaagcttaatcactcatgatagaagctaacaaatgaacaatgcttaaccaccacacatgacagaagctaaaatcatcagaacaagtcgaaaaactttagaagtatttaatcaaacaccttgtagacaaacaaaatctgaacactagacatgaagaaac

SEQ ID NO: 16701 - DNA, 381 bp, Glycine max
ttgttttttatgcattagcctgagcaatctttgaatctcaagccaatttgaattgcatgtgaaagttatgaacaaattaggaaacccaataaccccacaaattgtcattcaatcaaaatatagttgatccatatatctttgatttcgaacaaaagttaagggtagaatgactcttttccctttatttgacccctgattttgggtctgatcataacattactgcaatttgttggattcatcaactcttaattattttttgtgagtcctgatgaaatacaatctttcggactccatcatgcaatatctgtcatctacaaattgttgaaaaagtttcctagatctcaacattgtccttcatcttttctggtatgaatacaaaaa

SEQ ID NO: 16702 - DNA, 367 bp, Glycine max
actcagcttcaaggcatgctgctcaagtgcaaagcacatttaatcaactggcctcagtctttagagaacttttgtgagaggtcctcgtaattcatatcccaccgctcacttctcagatactgtggcccacaccaagtgggttactaactatgagttgaacttgtccggagatgatagatattatcctaagcatataggatataaacatctttatctctaaaaaatatcacactgtgtgatgcatagacagctatcaaaaggcctgacctttttattaacacttcatagggatcgccaaaataaaagatggtgctattgtgcgggataccgcctacggttagtattatcctctacgtgaggctcacct

SEQ ID NO: 16703 - DNA, 380 bp, Glycine max
ttgtttcaatattgcaatccaacacttgtattttcagctttagcatttttgggtccaatttgtaattagtggcccagttacacatttatgtagatttttggacagtgtatcagtgagatttatgaaaatatattcgaagatatcgtgatgtatgtagtattgattattgagatttagagttaatatcattaggatatgtgatcttatcttgtcttatctttagaatcgttgctttattaagatgaggattccatcttattaagattttgttcctctattagaatcaagattgtatataatcttatctttatgttatataagattatgaattgtttaggatttatatattttctttcttatcctatatattggaacccatg

SEQ ID NO: 16704 - DNA, 417 bp, Glycine max
  unsure at all n locations
tgtcaagccccccagcctggacaagttntgcccggtctgcttctgttaaagtgtttgggggtggacatacttttagttttgcaggcgaggtctaacatgttaggtgaggatagtctctgtatttggcaactctgtccttttctgacaattggagatcgcattgaagacatacgttatgttttgtcctttgatcaagcgtgtgcgacacatgtgcagcactcttgcatacaagttactcgaggagtgggcacgtactggagacgtgatgcgtgagcgagtggggctgtatcgtggtgcgaaaagctagtgcaccacttcatctcccgcaagttaccaaagagcttgtctcctctataaatgcagtggatgtttgatttgtagccaccattactatgagattattgtctctttctcttg

SEQ ID NO: 16705 - DNA, 387 bp, Glycine max
agcttcaaatatattgacttaaaatttgaagccataaatgagtaataatttttttttggaatcatttaacttgccctcaaatttatttcaacaggttcttttagtgttagttaatcgctttagtatgtgatgtattgattgtttctttaggatctgatctcgtgttacaagtatgatgttggtttgtacgttcaaaatttaaaatatttatcgtattgtgtaactataattaaatgcttatttattaattaggaaatgtctactcctatgttattaagtattgtgtcattaattttagtataaaaaaaaagtatattgtgtcatgaatatgcaaaagttgaattgttatccttcaagtaaaattggatgaatgatagagtttattat

SEQ ID NO: 16706 - DNA, 423 bp, Glycine max
tcatgctttagatgtctaatccctagcatgaggaggtgtatgttggaaatctcatattgactagtgatgtgaccaaaatagtatatataactgatctcttgagttagcttttggagttgagttaggctaagctcaaaatttcaagaggtttgatgatacgttctgtatcaatggtacttgcaaatcacaaaaggagaagacagcaagaaagggaagagatgttagccaagagccgaggctctccaagcaagagggagggtctctctgctacccaaattccactaaggatcccaatggatgatcctgaatcatcattacagaattttatataacagaatgtcagaatgtgcacacacacacacacacactccactaactaactgtccgaggggcgtttcctaatctgtcctccctattcacact

SEQ ID NO: 16707 - DNA, 384 bp, Glycine max
  unsure at all n locations
agcttaatagtcttctagtaaagaaatcactggtagcagtaaaattattaatcagctatatatcacgggtgatattaaataaactgcctagttataaattatttcatgcattgggctgataatagcttgtcattaagatctctatacacaaaacagaggccttcaagttcaatgaagttaactacttcagtacttcatatatgggacgcagtatatataaaatggatacttctttgccaaaaagattaattagtataaatattttaaacattttatatttaaaatggatactttttaattaacaatatatatatactcatttcttcttttaaatgaatactttttaattntatttgattacatttaattaacttggtgacagat

SEQ ID NO: 16708 - DNA, 318 bp, Glycine max
tgtgccacccacatagcataggttcttcatggttgatcatatctaggctgtggttgcaaatttgagaatctctccaataacaaaatatgaaccaagtagtaaaagggtgaccaccgatcttcctcttatcttcaccctcactaactattgtgtccttcacaggacctatatcattctatctgtgggcttaaaatattgctcgctaagtcgtttatctacatcaaggatatcatatttgttcaccaagccattgggagagaaatcaatctcttcttaccgtgttgcatcgaatgtttctctgctcatttccttcccttt

SEQ ID NO: 16709 - DNA, 394 bp, Glycine max
agcttgataatcatcaacagatttccaccagtgatatgtgagattctgtctttggatttggatccaatatgtattttagccaccctggcatcctcatttgtgaaactcgtggttttagtgtgcaacacatcattctacatgtcacatctcattgctcaaaccaaattttgcttctttatatatatatagttactacccttccgtttcaattggagttagatgatttggcctctagcttaactaaaaaatatactctcgcatgttgttagggtgtggatgcatgtcatttagaaataagcttccttgtggtggatgaaactacgattatctttggtaaaattagctgaaaagttaattgataggtgaaagttaaaaaattaatttattaaattat

SEQ ID NO: 16710 - DNA, 423 bp, Glycine max
  unsure at all n locations
tccaagtcanaatcaatgccaccaatgaagaggaaagattctgatcaactaattgcccacactgttaggcaagcaatgaaagcctctccattcccctttaagatattttaattttaatatttcataatagttgtgaatgaactgtgacaagataaattacaaaagctgtgttctggttacttgcaatgtaccttttaaatttgattaagtctaatttataacataattaagatagtttgttaaaatgctcactactataaaagaaatacgtatcattaagtttaaaacctaacaggaaccagtcaaccgtggctctaagtatacactatttgcaatgacattcaaattcttgtcgtcacttataaaaaccacagccactagcccggaaataaatatcataactatgatgaaatattttgtcat

SEQ ID NO: 16711 - DNA, 393 bp, Glycine max
agctttattcttgacaaagaaattaaagatattcaagatggatgatcaagacagtctctagagtcttaggaagggtatattaaataggaagggaattcctaattgaaatagcaaaaggtttggccaagaaatttaagttaaaaagtctttttcaagagatttactctctggtaatcgattaccagaggatgtaatcgattatcagtggccaaaaatgatttacaacagctattaaaatttgaattcaaaatttgcactgtgtaatcgattacacatatatggttctcgattaccagcagttattgaactttttaattcacattttaaaggttgtaatggattacacacatactgtaatcgattaccagaggagattttcagaaaatattctca

SEQ ID NO: 16712 - DNA, 429 bp, Glycine max
gtagcctgatcgctaagcgacaacttatccttggctaagcatgacctattggcaccaagctaaataccttatgaccataactgaggttcatgaagctaagcgccagtcatggcagctaagctgaattccttgcagcaatgtgagcgctaagcaagtccttattagctatgcgcatgctcctctatacttaagatgcatcattttagctaagctggtcagagcctggcttagcgagagttgcagcttttcggatctgcaaacctcactaagcggccttatcctcgcgctaagccaagcttgtgtgaaatattaaaaaaaaacttattttgaatttgaaacgttggctaagcgcgtgggtccactaagcaagccttgctgagaaaccaaatgtctctctggctcgcttagcgcaacagtccgctaagcaaa

SEQ ID NO: 16713 - DNA, 264 bp, Glycine max
agtcttttgctgatcaggacgatacggatgcagaatgcgaatgaactactaccgcatgcttcacgtcagattaccgttttaggagctctgatcaccatttgcgcattaaggccattaatggatggcagtttctacaggagcgacactctcaattcaaggacgaagtatatactgatattcaggaagagatagggcacatggggaggacatcactggttacccccatggtcatgtatttatcagaaataagcctagaggttatgc

SEQ ID NO: 16714 - DNA, 425 bp, Glycine max
tgcagcgctatccgcagactcatcagaagtcgggtgttttataaatcagactatgtgcatgactcttacacccagtgggttattgataggaccaaaagctttggcctaccctaccgcttacctaaatacctatcgtccaccatcccaccatcatccttgcctatcccctttgatactaatgaatagtttcatgaacaattaacccactactggcaagataaagaaacttggatgaggagatgccaggagctctaccatgagaatgatactttgaaggggaagatagcccaacagacccgagagctttttatccagaaccagaggatgattgagaaggacgacttgcttcgtcggaaagactctgtgctccaccgagatgctagaatgaagaggacgtttatggattcgttctcccgtgcacattc

SEQ ID NO: 16715 - DNA, 389 bp, Glycine max
agcttttatccaattaagacgacaatatctttttactcggatgactgattgagtcccgtcatatatcgagacgctcgaaattgaatgttgatgctctgagcaaattcaaacgacaataatattttactcggatgtttgattgagtcccgtaatatatcgagacgctcgaaattgaatgttgatgctctgagcaaattcaaacgacaataactttttactcggatgtctgattcagtcccgtcacatattgagatgctcgaaattgaatgttgaagctctcggccacttcaaacgacaacaacattttactcggatgtctgcttgagtcccgtaacatatcgagacgctcgaaattgaatgttgaagctctcagccaattcaagcgacaa

SEQ ID NO: 16716 - DNA, 426 bp, Glycine max
tagtaaagctaggcactaacagaatttgctcaatgcatcaacattcaatttcgagcttctcgatatattacgggactcaatcatacatccgagtaaaaagttattgtcgcttgaattggctaagagcttcaacattcaatttcgagcatctcgatatgtgacgggactgaatcagacatccgagtaaaaagtcattgtcgtttgaatttgctcagagcttcaacattcaatttcgagcgtctcgatatgttacgagactcaatcagacatccgagtaaaaagatattgtcgtttgaattggctcagagcttcaacattcaatttcgagcatctcgatatatgacaggactcaatcagacatccgagtaaaaagttattgtcgtctgaattggctcagagcttcaacattcaatttcgagcgtctcg

SEQ ID NO: 16717 - DNA, 374 bp, Glycine max
tgcttattgtatatgagtgcatgtccaatggatctctcttatgatgacctacactctagtgataagagaaaggaaccactaacatggaaacagaggctaaagatctacataaaagtagcacatgaccacactactttgacacaggtcccaagtgaaccatcttatatcatgacgtaacaccttataaaactgttttcgatagcaacatggtggccaaactcttagacttccaactttccttataaggactgcattatgcatcaaagcaaaaaccatagacaatgtgtgtgtgtgtgtgtacttatggtgatgagggtgtgtgtgtgtgtgtgattacggtgtgtgtgagcagattacgatttgagtgtgtgaga

SEQ ID NO: 16718 - DNA, 422 bp, Glycine max
  unsure at all n locations
tgtaaaaagggaagcaagttaaaaactcctttcattttaaaaacgttgtttctactacaaaaccccttgaactacttcacatcgatttatttggtccctctagaactatgagtttaggtggaaattactatggcttagtaatagtggatgattactcaaggttcacttggactttgtttttgaaaaccaaaaaaagaagcttttgatgcttttcgcaaacttgccatggtgattcaaaatgaaaaaggtctcaacattgtttcaattagaagtgatcatggaagtgaatttcaaaatgattcttttgaaaacttttgtgaagaaaatggaatttaccacaaattntatgccccaagaacacctcaatagaatggtgttgtggaaaggaaaaatagatcccttaaagaaggtgcaagaaccct

SEQ ID NO: 16719 - DNA, 386 bp, Glycine max
  unsure at all n locations
ttgcttttaccaaagagattttactctctggtaatcgattaccagtggcatgttttgttttcaaaaagctttcaactaaatttacaacattccaatcaatttcaaaatggtgtaatcgattacaatatattggtaatcgattaccagtgagtttgaacgttgaaattcaaattcaaatgtgaagagtcacatcctttcacaaaaatgctttgtgtaatcgcttacaatgatttggtaattgattaccagtgataagttntaaacaaaaatcaaaagatgtaactcttccaatggttttcaagtttttctaaaggttataactcttctaatggttntcttgaccagacatgaagagtctataaaagcaagtccttaacttgcatttt

SEQ ID NO: 16720 - DNA, 426 bp, Glycine max
  unsure at all n locations
tagttcctagcttagccgataaggttttccaaaagtgtgctaaggaacttaacatttctatctgacacaatggtcctaggaaaaccatggagtctcacaacttcccttaaaaagagttttaagatgtgggaagcatcatccatcttgtggcatggtataaagtgtgccatcttgctaaacctatccaccaccacaaagatagagtctacacctctttgggttctagaaagcccaaggacaaagtccatactaatgtctacccaaggtgcagatgggatgggtaagggtgtgtatagcccatgaggcatcaccctagacttggcttgtaaacaagccacacacctagtgcaaagcttatggatatctttcttcacacggngccaataaaacttgtctctgagtatgacaagggtcttgtctatccca

SEQ ID NO: 16721 - DNA, 389 bp, Glycine max
ttgcttggttcgaggtacttacccgttgaagatcgaagaacgatgaagaacgaatgaagaacgtcgaagaacggttgaaacctttgcgaaattcttcacggaaaacgttacggaaacgtttcggaagcgcctcggcttagattttcttcacggaaacgatttttccaagcaaattcgaaagagagagaagtgccaaaggggctgaaccccttccttcttcacttcctcccctatttatagcaaaataggggaggtggttgccgcccagctcgcccaggcgagccaggttgcttcctccagaagcaacagccttctggaggaatcttctggagggcccaagtgggcctgggtgctatttgcacccccatttttactaagtacacccccct

SEQ ID NO: 16722 - DNA, 425 bp, Glycine max
  unsure at all n locations
ntatatagactntagagctttgatccattgagatatcccaacaagtcgtagtctaatagattgggcccttttacatgtggcatgctactatgcaaagagagaaagagggtgtggtgccacaaacatcttctacaatgtatcttgagagaaatacatcttaccagtgtcgacttgtgctcagaggtgacttttagtcaacaattcaaatacaatgttagtagcacatgaaaaaaggaataaagaatgtcaagacaacacaatttaaaaactccatgttgtgcactatggcatgtatgagttactaaaccatggatgttacttttggatgataacttctcaattcttggggattgagtagttgttccatttcctttggactgcgacccaaatgctaaagcactntgtcataccctaatttcgtctgg

SEQ ID NO: 16723 - DNA, 391 bp, Glycine max
tgcttcttgagatgcctttcagttatctcattagaggctttggtaaagtctacaatctcattagaaatatcgatagtgaaataatcaatgaatcttgaggtcaagactgcatatggaaattcataatccaccagtcaatagcttttcaacatgatatcttcaatcaacagtacccaattcatttgaatacttgatttcatcccatatataatctacaagtcgtcgttcgtgacttgagtatgactgttggatcttggtgctagaatatatgtaataatgtataccaacattttgtcttccgctatcagaccaccaatacccaatctgttccttaacaatcttgtcgggtcaagaagcatacctctgtatgtggccattttgctatagtcat

SEQ ID NO: 16724 - DNA, 423 bp, Glycine max
  unsure at all n locations
taacaagctntntttatagtttgactgtgacctttttatttaaaaaagctttttaaaaagcttgagcttgacctttatagtaaacaaaccaagccgagccgagccttaaataggccgagccattggcccttgacaagcggctcggctcatttccatccctacttgcactcctcacctccttgagggctagaatgcatccattgcctcaactcaccatcacttaaactagcatgcttagcgcaggtgattcaactgatttcgcatgttttataagtaggcaagtaaataattacatatccaatttattaaggtcattgtttttttttttttactgaaaggagcttatctaatttcattaataatcaactactcaatacatgacaaaggatgattgaaggtatagaggttagggaagaatgaagc

SEQ ID NO: 16725 - DNA, 375 bp, Glycine max
  unsure at all n locations
ttagcttctcattttcttgcttcagttagttcagctcttcttgtgttaaagacaatccattgacatgcaattttagttcacttttcaaattgttgttcaaaacagaaagcctttgagcttgctcatgcatctcattaaatgcttctaaaagttctccaaagtcagaatttacctcaattttttcacttgctgacagatcatttatggattntgccataaagcacacgctancaatttcttcatcatttgaagagttggaagttgttgatgcactatcttcccatgctatgtaagcttacttttgttttttatccttcttccctttcttttcaccaccatgttntctaatgtagataagacactcatgattaatat

SEQ ID NO: 16726 - DNA, 435 bp, Glycine max
gacctatgaaactcagctattggaatatcgctaaagcctgggattgtgttctggtgttttggtatgctttgagttttatatcattgataatgattctgactagtaagccttgaatctttgagactaaagtaatttttcctgaagagattatttgtctaatgattatgacaagcaatcaaatgctggataaagaatatattttatccaaacttcagtaagagcgtgcgcaacatgtgtatataagcttgtgtgcatggttactttcgtgaaacatcaattattaactttttattgtttaaagacaaataagagcaagggtagacaacatgcaaaccattttgaccttttattgaaatttaacttatgagtaattgaggaagcaaagatcaaacacttaattacttagccataaagattatattttctttttaataa

SEQ ID NO: 16727 - DNA, 392 bp, Glycine max
gagatttctacctcgggaccctgtgaagctcaacatgctacctgcaagcttcttattgtaatacatcgcaagcgactgacttaataaatgtgacttgcaaaaattcacctaatcgatcgagaaaaatataagagcattcatcgtacgcaaaaaaagcatgctaccccccagaattaatacatgtgaataccataattagacatggcgatggtgaaaataataaaaccctatggttattacggcttcacattaaacttacaaattgcatctgatcatgcaatagaaatagcgagctcaatatggaacttgcagacatctgacaaataatacatagatgatcttatctctatcattcgcacaagagaacaatggtggaaacacactgcttacaa

SEQ ID NO: 16728 - DNA, 246 bp, Glycine max
tccatacctgatgatcagcgaaacattgctcttctcatacggaacaatgaacataatcaccttggattttgactaatttttgctcaaattaaatcgtaattcatcttggtacgaactgattaattttcttcactttatttcgatttcagttccaagcaatgacaacgaggtccatgcatgcattatgcatcacatctcatgggaatcttatatcacaaagtgcttatgattatctggaaagccgca

SEQ ID NO: 16729 - DNA, 388 bp, Glycine max
agcttgtgttagttgtatggccttagccaaggaaaacaagaacaaccaaacactttcataaaagagtaatcaggttgtttgttgaatagtttctgataaggaacttcattatttatagcatatgagggcaatctgttgatgaggtaaatgcttgagacaaaggcatggtcccaataatgaaaaggtaacttggcttgagatagaaaagtgagacccaactccacaacatgtctgcgcttgctttctactactccattttggtgatgagtatgatgacatattagtttgtgctgaataccatgctctgtcaagaattttgtgaaaggtctgaactcccctccccaatcaaactgaatagccttgatagacatattaaacttatttgaaa

SEQ ID NO: 16730 - DNA, 424 bp, Glycine max
  unsure at all n locations
atagagttttccaacctcatataaggaaaattctattaagtagggacgtgtacttcatggagaatgagaaatggagatggaatgatactgaaaagatgtcgatagctgaccctttgcaaaaacaatatgagttacttgatgatgcacccgtgagaggcactagattgctctcagatatttatgaaagatgcaatgtagcagttctagaacctgcatgatattggtatgcaaaggaggatccaaaatggagtgctgcaatgcaggaggagcttgtcatgattgataaaaatcaaacttgggaactcgttgaaaggtctgaacacagaaaagtcataggtgtgaagtgggtgtttagaacaaagctgaatgcagatggctcaatcaacaaacataaagcaaggttagtagtaaaggggtatgctcn

SEQ ID NO: 16731 - DNA, 397 bp, Glycine max
agcttgtcatcgtgagacatcagaggctagtattttaataaatgtgggtaggaaaaattcaccaaattgatagagaaaaatctaaaatcatacatcttaggcaaataaggcatgctagcccccaacattattgcattttgattccatctttggacattgtgattttgaaaattagaaaacccaaagtttattagggcatttcatcaaacatacaactcccaactgatctggcaaaagaaatagtgagtagaaaatggaacttgcagacaaaaaacaaataaaagaaagatgattttctctttatcattcgcagaaaagaaaaattgaggaaacacactgcaaacaaatgtttagatttccttatgtgacattatactaactagtgaaaatttagcag

SEQ ID NO: 16732 - DNA, 419 bp, Glycine max
  unsure at all n locations
tgtggattntagggattgagggctgttttggtttgtgtttatgtttgagtttgtgtttgaggtttgtgttttggaagaaaaactcgaagaaaaaggtttgagtttaggtgtatatttctcttcatagagtttggccaacgaaattgttctgagaagtgatgtaggtgattgtgcaatgacatccattctgatattaggttttaatcctcctacaaagcaatccaatagagcttcttgtgtaattccttgtactcgattagctaaagacgtgaactgcacgtaatatgactgaactgaaccaatttgagtgagtttaaacaactgagatctangacattcacacggtgatgggccaaattctgtctctaaggctcgcgtaaaagcaatccatgttgtgaatgaattttcatgagtcatca

SEQ ID NO: 16733 - DNA, 397 bp, Glycine max
agcttgttataaagtttgaattaaggagttaaaagtgactgtgataaacacttgtaacttgttaaagttagtaaaacttagtggtttgtcaagaaatggacatagtctcggtagttgagacgaaccaatataatttcatgtgtcttattttgtttattttctcttatgtgctttaaactgattcaaggttcaaatttgatttttgtaattaaaaatctctatttatttgcaagatttgaaactatcttctaaatcgttttgcaaaaatatgatgtatgctttctttcataattcactattagacaataatattgttgttttagaaaaatgttttaaattttctaaaaatcataattcaatccctttcttgtgatatatgtctctacaaaggttcatg

SEQ ID NO: 16734 - DNA, 422 bp, Glycine max
  unsure at all n locations
ntaacaaatgatctatntcttatcagtactttaattattttgtaactgccaaatataaaggcattagaacctgataatgataatggaatgatatagttagttagtttcaatcacatttttgttgaagttatttgggggcaaagaattaagagctttctatcaaacttcttcagaatgacaaagcctatatcagtaccctaagcacgtaatcaaaagggtcccaaggaagacttaacgcagcatggtgccaatattaaaaaaacgcattaatgatagcctaattatattattaatttgtgggatcacgttacgtcaccatttacatccataaatccaccaaccaatcgtgctataccaagatgcatcgaataagttacattttacacaccaccatacatacatacaaaatgctagatcgcaat

SEQ ID NO: 16735 - DNA, 394 bp, Glycine max
agcttatacacaggaaaagaacgacagagataggagaagagaacgaaatagcattggggaatttgaatttgcacatttttatttgttagtcttaacttagcaattaagctacgttcctgttttttgttctcccgtcctatttcggtggtatatatggattctgacacttgggcagtcgatctgttattatatgcaaatgcaattcatcccaagtttgcaacacaagtcaaccaaggaacaatatacaaataagtttccttttgtggaatgttcttagagtttgtgtaaagtaagccacacaatttttataaatcgtcgaataaagttgcacatccttcgactaaatttgtattaaacgttattttactggcatattctgtttaatttgagtcct

SEQ ID NO: 16736 - DNA, 428 bp, Glycine max
  unsure at all n locations
ntaatatataagagacatctcaaaacaaatatttttttttattaaaaactcaaaacaaaattctgtaatttataaaaaaattaaacatatttgcatcataattttatcaatcactagttgtaacttgaccaaatccatttaggtcaatattgatattcattctttcacaccaatatcctccttttcaagattatatatgtaattactgtttataattaaattagttatgttttaaacatattttcttatataattacattttttgtgtcagatgccgtggctttcaacttatgtgatgaattcttgcttgtaacttatgtggtcatgattataataaataaattttaataagaaaaagtaacgtccattatttatttttcataaattctttgtcccatcctttctcttcattnttcttatgacctttc

SEQ ID NO: 16737 - DNA, 395 bp, Glycine max
agcttgcataaccaccaaattagttttgcatcccgattattgaaaagtgacctctagcaagcacaagaacccttctaagggccattacttaagtcttggtcttacgcgtatcccggtcaaagtatgtcgagctcacttcaacatagatttttgtctaaggtagatccactatcggcaccatcaccatccaaatcgacatggatgagatgaagcttcctttattctccttcctcaatagttaaaaacctagatatgaagcaaacatcttgcattaagcatcacttgtcaacttctcaaaccatggcgctcataatgcattaaatgtgattcattactagatcccggatttgatttcgccacgaacaacctaagacttgacatatggtttggtagag

SEQ ID NO: 16738 - DNA, 426 bp, Glycine max
  unsure at all n locations
nttggagtaagtaggggcactttctagctgtcaagatgttataggagacaaaaccattatgaggttccattctgaggttctcattttgaagatcctttataatggacattttgaagaaccatcagaataatcattctaatgtttgctgagaatgaatccatactttgatgaattcccttgatgaagttcacattgatatttcattttgatgtagtgcagcttcaacactcttaacacttctcacaacatcaaagcattctaaagttgattacttcagacaaatttaatagaagttatgttgttggtgtgttagtattatgtccaaggtcagattgagtagtattcttcagtcttccattttgatgtttgtcatcagtgtttctcatggacaacttcattcaataatctagcacttcttatgcagct

SEQ ID NO: 16739 - DNA, 385 bp, Glycine max
agcttctcaatctaccaaaggaaaaaggggcaattactagacaactttagaattcctagaaaaagatattaaggtctacttatatgcaagaaagtttctaagcaatccaacaaaagttatatttttaagaaagaagcaacaaatgtttttaagaaaaaaagaattgcaactatgaggaatgctggaaaggttaagacctaggctagttatttttagtcaatttaattacataaccaaaaattagtaatatagtaatttttcaattttgtcctttctttctaattattttaaaatattgaatttttttttggaaattaccaaaatgcaaccaaactaggataatccctttataatattataattataaccatggcatgtaaatgag

SEQ ID NO: 16740 - DNA, 419 bp, Glycine max
tgctcgagctaagcgcaaatacccctaattgattggttgaatggttcaactaagcacacatcgctgcgctaagcccaacaccttcactgtaagttgcaccttaagcagtgggcttagcgtggatgatgcgctaagtgccacttccttgcaaagacaatccaagtaagttagcatttctacttttactttcatcctccaaaccttaggatagttgatttatagttttagtgactagtattgttgtaggttaggttacttagttttagggttaggtattttaggactttaggtagtttagaagcccattaggggcaatgtgattaaaaaggggtgaaaacccctgtgtatctttctgagattcgcgatgaacgcgctaagcatgcctgctacacttagcttgttcatcacaactgttaaat

SEQ ID NO: 16741 - DNA, 395 bp, Glycine max
agcttataagaacaaaattgcctcaatcatttccaaatatgcatgtgaattaggacgcatcaacaagaatcaagccaaggctattgtgcaagcaatcaatggggcaaaacacaccaaatgattatgatgatggatggctcaaattctcgcaaaggtaaactcatcactttcaaattgagctttcaaaactatcatgacatgtagagaagaatcaaggatttcaagtcacaaaatgtcaagaacttttattttcaaaacaattacccatttcttgaacatatcctataattcaaagaaaaacatgcaaattcgtacgtgcacacaaaattgatccaaaatattaaactgaaaatccgacgaaactaacaacattaacaaattaacacaactaacaa

SEQ ID NO: 16742 - DNA, 413 bp, Glycine max
  unsure at all n locations
nttcgcanagcttacggtaaaatctgggacctagttttggtagaagtctctacagaggccattgcctccctcgtccagtattatgatcagtcgttgaggtgcttcacctttggggacttccagctatcagccatggtggaagaatctgaagagatcctaggatgccttctagggggaagaagaccatacctcttctcaaggttctatccctcattagctagaatttctaagatagtccaaatctcagcgcaggaattagaccacagaaagcaaattgaaaatggngtggttggaataccgagaaaatgtttggaggcaaaagtgagaatcttggcaggtaaaggcgaataggccccgttcatagacattctcgcactggtgatcttcggaggagtcctctttccgaatgtgga

SEQ ID NO: 16743 - DNA, 306 bp, Glycine max
  unsure at all n locations
tgtttctctctaccatcgagtctggagccccatgactttattggctagcactgatcgtgtatactccaccctcaaatgttatccagaggcccatgaatcgattatgattcctgcaccctccaccattgactcttgatccggacaaattgactgcctagcactgttggcctattgtccgccctcaagtcttaatcggagcctcgtgaacagaatgccatnaanggatgctncaccataaagtatgtagccccacgaattgatggactatggcttttcgtctatcctgcaccctccaatcttacccac

SEQ ID NO: 16744 - DNA, 478 bp, Glycine max
  unsure at all n locations
agcncncccgcgcgnaattgatgcctcgatacagacggccctatgaaactcagcttgaggaagagggctcaagaacactgaaaattttttttggagcggaaatgttgtctcctttcctcttgaccagcttgcgaaaatggaggaagaatgagctactttggtgagttttggagtttaaatggacttgtagaagaagcttagagcatgatccattggtaaatcttatcctaatcttctagattagcgtgctaacttctattgggatatgagtactcagagtgaaccttgtacattgcgactcaatgcacagngcaattcttgcacatatggaaatctagctcaaataatttctgtatctctgtcaagctttactaaaccaatcacatacacacacacacacacacacacacacacacacacacacacacataacatgataatcaataattaaaagcatattaattgctgcagctacacn

SEQ ID NO: 16745 - DNA, 381 bp, Glycine max
ttgcttataatatatcgatacgctcaaaattaaacatcgaaaactctcgagaaattcaaatggccgcaacttttcacacggatgtccgattcggtcgcataatatgtcgagaggctcgaaattgaacaacggaagctcttgagaaatttagacggacataactcctcacacggatcgacgacccacgcaaaccacatgaatagacgctcacaatcgtacatcggctgctcctgagaaattcaaacgatcataacatctaacatggatggtcaatcaaggctcgtcacatattgagacactggaacttgtactgcgtgagctgtggtgcaattctagaggccatatctgtttacaccgcgagccgactaagacttatcatat

SEQ ID NO: 16746 - DNA, 355 bp, Glycine max
  unsure at all n locations
gaaactcagctgaatcggacatccgtgtgaaaagtatgaccttttaatttctcaagagcttccgttggtaaatttcgagcctctcgacatattatgcgcccgaatcggacatacgtgtgaaaattcatgatcatttgaatttctcgagagcttccgatgtttaatttcgagcgtatcgatatattacaaccctgaatcggacctcagtgtgacaagttatgaccatttgaatttgacgagagcttccgctgctcaacnnccaacatcactataccngacgcgcccaaatcggacattcgagtgaaatgttatgaccatttggatttctcaagagattccgttgtttatttttgag

SEQ ID NO: 16747 - DNA, 390 bp, Glycine max
tgcttgtcaagacaatgcacgcatcctcttttttcaggtccttagacttttgaatatatatcatttgcctaattagtagaatcttgggtgctttgtaaattttgtgaactctctgcttcaaccattttcttttttagttcatcctacgtaaatacaccttataaattattaccatacatcaatatcctcaatacttcaatttcactaaacaaaactcatctccacaatagttactcctcctcaccccataaccttctattagaaaattaagcaaaacaaagaaaaagtattgaaattaaaattaaaattcttacaattacaatagaagccttttcagtaacaatgcttccatcttttcgagttcgagtgacaatataaatgtatgcccta

SEQ ID NO: 16748 - DNA, 414 bp, Glycine max
ttacatcccatgttgtgataaaatcttttatataattagttatgttgaggttatgaaatgatgattcaaactgtgagtatgtgataaattgaacatgtgacggatgatgaaatacatgtgtattgagatgagatgtgtgtattgagttgtgaactataaactatgcaatcacacaattgtaagaccctttaagggcgacgagtattgtgatgggatccactgtgggaatccgacgagttaaaatgattttgaaaacaattgagtaaatgtgtgtatttcatagttcatagataaagtgtatatgattcatgaggtgtgataacatgttaaattgtgattataccattgcgattaagattaagtgtatgtgataaattgagtatgtatatgattgagatatatatgtacattgaa

SEQ ID NO: 16749 - DNA, 384 bp, Glycine max
  unsure at all n locations
agcttcaacattcaattttgagcgtctcgatatatgacgagactacatcatacatccgagtaaaaagttatagtcgtttgaatttgctcagagcttcaacattcaatttcgagcatctcgctatattacgggactcaatcagacatccgagtaaaaagtttgttgtttgaattggctgagagcctcaacattcaatttcgagcgtctcgatatattaagggactcaatcaaacatccgagnaaaaagaaatgggcgctggaagttgctcagagcatcgacactgaattgcgagcgtctcgatatattacgggactcaatcagacatccgagtaaatagttattgtcgccggaatatgctcagaggttcaacattcaatttcgag

SEQ ID NO: 16750 - DNA, 423 bp, Glycine max
  unsure at all n locations
ttgaatgcactattcaatggagttgacatgaacattttcagactgatcaacacttgcacagtggccaaagatgcatgggagatcctgaaaatcactcatgaaggaacctccaaagtgaagatttccagattgcaactcttggctacaaaattcgaaaatctgaagatgaaggaggaagagtgtattcatgacttccacatgaacattcttgaaattgccaatgcctgcactgccttgggagagaggataacagatgaaaagctggtgagaaagatcctcagatccttgcctaagagatttgacatgaaagtcactgcaatagaggaggcccaagacatttgcaacatgagagtagatgaactcattggttctcttcanacctttgagctaggactctcggatagggctganaagaagagcaag

SEQ ID NO: 16751 - DNA, 373 bp, Glycine max
tagtttgtttgaaggacagattctcattatacaaagcttgcaggaactagttcagcaaaggccagttatgagtgtagatcagttcattgacaatgtggcctggcctggagcctgaccttcttttgtgggagataatgaaagttttacagcccagtcacctcaacaacatgagccagaaccagaaacgatcactcatttgaagccaccatccctcgagctgttgatttcgcaaaaagaagattagagacgagatctaatgaggctgctcatcctagaccagtgccagcatcagctgaggcaccatttccaggagtggatccatcttcaccttagcatgcatcagactcttccactcctatcttagagatacatg

SEQ ID NO: 16752 - DNA, 416 bp, Glycine max
  unsure at all n locations
tctatggaggttggatctttgagcttcaatggtgattttccaccatggagatgcagcggaaggcaaaggagaagaggagaggggagacaccatccacaagggaataagccatggaagaaggagcttcaccaccaagaatgtgccttggataagaagcttgaagatgatgctttaatggaggaaaagaaagagggaaggggggagcacgaaattgaaggaataaaagagggagagaagtggaactttgaagtgtgtctcataagactttaatgcatcaaagntacaacaaggggtacacatgcttctatttatagactaggtagcttccttgagaagctttcttgagaaaacttccttgagaaacttctttgagaaaacttccttgagaagctagagcttagctacacacaccactc

SEQ ID NO: 16753 - DNA, 95 bp, Glycine max
agcttcaggttgctcattgactccaaatttttgcaaagaaggacaaagatctgtatgctgatctgcagaagaacatagatgacagactcttgcaa

SEQ ID NO: 16754 - DNA, 98 bp, Glycine max
tgacacatcttcctctgtttccttccccatggtagttctatcatcccgagtgatctctttccattttctaaaatccaaaccctttttcctcctccttt

SEQ ID NO: 16755 - DNA, 390 bp, Glycine max
atctttacagcacattttagtaatgacccactaacctagaattaaaataactcaatgccattaacctacggaattaaaaaaaacataatggctgagtgtaactgaaattgtggcaaccaaaattcacccccaacagccaacatgtcagccaccatttggtctcccaaaaggctgatgcctacgatgccaattgggcccttattacaacttgaactaaacctaactaacgcccttttagttgattaacccaaaacatatttttggtcaggcaactttacaaggatcgggccattatttagacaaactaaacactcttaaattgaaacatagtggtgtcatttagtcctcctccattggggccatgatacaactcacaagcttggacttttc

SEQ ID NO: 16756 - DNA, 384 bp, Glycine max
tggtgatgagcttcattgtaagagacaaaattggttctgaataatagctgtcattctgtgaagctagtggaatttggcgttaaccaagaactggatgtaatcccaatgatagaaatgaatcagtataaatctttgagtctgatgtttattctatttatctcatgctttagacttacttatgttttgaatttgattttggctggaaaacatattctattctgcacaatagatttctatggactgaacttgttgtgaaaattaggtgagagctttgaaaacttatacttcaaacggtgactttgtttctcccaaaataaggttttaaaatttataaaatcacaatccactcctctgcttatgatatatgactttatagattggtat

SEQ ID NO: 16757 - DNA, 372 bp, Glycine max
atgcttctttccaccaaggcgttagttaagactcatttaatttaactcctcacaatttacagtaccctcttcctcccaattaagtctcacatttcattaattgcgctagtaactggcgtcagttaagtttacccccccagagataaaatgataaagaagctatagagagatatataggtggatactagaaacttgagctaactatgctgatatatatatggcaattatagtactagaactactatctttggttttatttctaacctcatttgttcgaatcaccaataacgagaggctcttataccttgtcacaggtgcaaaggtatgttcaccacgatgtgattcgattacatgatctggaagactcattga

SEQ ID NO: 16758 - DNA, 412 bp, Glycine max
taaaggaacattcaaatcgggtgtatttacccgtatgtctagactccaaagagttcatcagggtctctccttcctgatttaggtccaatcccgaaaatattttagcacacagactatctataaactgtacaaaacacatgactccttaattgttgtcaaaataattttaacttgtcgcatctcaaagtgattaaactcgtcaggttcccacagtggatcacatcacaatacttgtcgcgcattaacccgttgaccttaaagagtcttacagttgtgtgattatacgggtcatagctcacaactcaatgcacaataatatgtcaatacacatgtatctcacaattcatgacatattcaatttatcacttacacacaatctcaatcacaatgtcatgatccatcccaatataac

SEQ ID NO: 16759 - DNA, 224 bp, Glycine max
  unsure at all n locations
caatgactaacaccatattgtcttacaaacgaataagcaaattatatgcatagtctcttttctcaagatgaataaagtgttgtgagagcttttctaaactttacaagaatatacacatgagagattttacacagaatgatataatgagtgcttcanatcatgctacatatcttcaaagcttctgggatatatagggccttnttaatcaagtaattggtatatct

SEQ ID NO: 16760 - DNA, 420 bp, Glycine max
ttgaagtaccaatcaaagcccttaccatcagaatcttgacaggttcaacataattggcttgaacttggaaaggattagtatccacttgcataggcttttcttcaaacttcaacatttcttcatcaatagtcttttgtatcatatctctgaaaggtaaacaactataagtccaatgtccatagacatatttaaatttgcaatatctatttccttttctttgctcaaatgttgtaattttatgatcatcactaagtgcaatttgtttatcctttaattatacatcaaaaattttatcagacttagtaacgtcaaaactatattttgagtttacaaattctttttcttctggttttaacaattgacaaatataaggaggaccatattgtaattttgctaaataaacttcattctcctaattat

SEQ ID NO: 16761 - DNA, 294 bp, Glycine max
  unsure at all n locations
tgtctttttgctagacctcgatcggtcatctttccaggccgaggtcgaccgtcattnntttcgatccatttcggtgaatgatatttttttgccgagatgggctaatgttttcctggccgaataaatgggaaaatgccagtttccgccgaaacgaaaagtcggatgggctcgcacaaaaaaacctagccgacctacattataaattttttatgcaacaccaaaacaagaaaacttcctgtgccgtataaaaataaaaaacattacatgacagcgagcgctttgaaaaacaaaatt

SEQ ID NO: 16762 - DNA, 422 bp, Glycine max
tcaccggatgacgccgatcgaacatttcctaacctacgttatgcaaatttcgttcagggattgaattgaaaactcgttaggcgacatctgtcgtgaagtagcgaccgatatttttcagccgacattgcacaattctttttagaaaagctcgctggtcgataatggtctttttacggcagagtaagttttcttgttttggtgttgcataaaaaagttacaatgtacttcggctaggtttttcgtgcgagttcaaccgacattttgtttcggccaggaaaacattagcccacctctgcaaaaaaaatatttgctaaccgtcttcatgcatatttcattcaacgattgaatagaaaactcaatagccgacaacggtcgtgaaatagtcccgactgatatttttcagccggcattgcgcatttctt

SEQ ID NO: 16763 - DNA, 388 bp, Glycine max
  unsure at all n locations
agcttgcttgtggggcttctatggaggctggatcttagagcttcaatgaggtcctttaatggtgattttccaccatggagatgcagcggaagacaaaggagaagaggtgagaggaggcgccatccactagggaataagccatggaagaaggagattcaccaccaagatgagccttggataagaagcttggaaggatgcttcaatggaggaaaagaaagagggagcgaaagagagaggggggagcacgaaattgaaggagaaaaagggagagaagttgaactttgagttgtgtctcacaagactctcattcatcatagttacaactagtgttacgcatgattctatttatagactangtagcttccttgagaagcttccttgagaaaac

SEQ ID NO: 16764 - DNA, 387 bp, Glycine max
tgagtgagccaccatagactgagacaattttgtatacacatccttgtaaccatactatcactttgtatagtggaagaatctccatattggaaaattataatcgtgtgctcccattactacctttaattactaagtgcctatcttaacttcacgaagcgggaaagtccgagttttcccaacagtggtatcagagccagatggttcgacttggtgaccggctcagacgagtaaaatggcggtgatggatctcagccttggggatcccttgtatcgaaagtcttccaagcagtgagtccaggcagcgtgtcccgcagatggagcggcggtgcaagtaccgcaggtagctagagcatgaaggctctaatggttatactcgtggatgatgac

SEQ ID NO: 16765 - DNA, 395 bp, Glycine max
ggtcttgctttcttgaggaagttcatgatgaagttgttaaatcactagagaatcatcttgagtcaaatcaaacaaagtgttgtaacactgttagcttagttggacgaaataaacttgagcgaattgagtgaaccctagctctactaagttagcaagtttccattgtatttgaacttactatctaaaaaatccttgagtgattagaatacatattctatgaaacatttattgtttgggaaagctagaaatggcttcatgacaaaaaatacttgattcttaatctcaaagagagattaagggtagtgccaaaagtggcttagagaatacttcttgtagagagaagtggaataaagaatactaggttataatcaaagttttgattagtggagcccttc

SEQ ID NO: 16766 - DNA, 406 bp, Glycine max
tggttgtttattacttgcaggtacttacgtatggatgcaagtggggatggagtcacgaccgactgatcgttgccccttctctgcgctaaacaaacagagaacgtcgctgcaagacagccccgtatcctttgtattcgcagttttcttttactatttgtttgtcttaaaaagaaaataataataaataataagtcgacgcctaaattctaacttaagtaagttcaagttaggcaagacgctaacccatgagaaaggaggggacatggctaatgttcccctcaagaaaaaaaaatgcaggttagctcgcctgggcaagctgagctcgcccgggcgagccacccctgcaccaaaatataagaatgacgaaagggtgggacgttttgcattcaaaaacttcttttccccc

SEQ ID NO: 16767 - DNA, 376 bp, Glycine max
ttgcttgttatgctaaagatcatttaaattggtatcaatattttgtccttagaacaaagcactcaaaaagacacacatctccggttctctcttgtttctgtagcatctgccaaataataatacataaaataaaaaattcccctgtaactcaagctatatcgtgcgatgtcctggttgtgttgtgcttaatgtgcatgaaatgcaccctcgttttattaattttgaagactaatataatttcaaggaccattaagatgacgatttacgcgttaagaaagtgattcagtcctcacattaaaaattaattggagacatatataatacaatagcagccatctccgcacttcattaatatggaataaaacaaaggagttaa

SEQ ID NO: 16768 - DNA, 397 bp, Glycine max
tggtcatagcaaaccactttgcatgccaaacatgtgttctcagcctcttggttacatccctagaagtgcaaaaaccattctctaggtttttctttagttcatatctccgatgaacacatcgaggaagcttcttttggtgattctcctccaaacctgatttggcaagggctttatcaattattcccagtttctgcctctttcttctgcacccttttcttgcaatttggttatcaaacacaattgtccttcttctcttgttcttttgagacctataatcattgcttactctattttctatgatagattgaagactatggagttcgagagcacgggattcagcatatttctgcaaattgattttccaaggtggtggtggtggtgtatgtactgaaacttg

SEQ ID NO: 16769 - DNA, 386 bp, Glycine max
  unsure at all n locations
tttcttgaaagaaatctcaagaaccgntggttgcttggggactggatgtaggcacgggttattgccaaaccagtataaatcttgtgtttgtcttcttcttccctacactctttaaattatgttgtgtacttttaatggccgcttttacttttggttaagtttttgtttctgttcttcactttcttaacttagtagtaaaagcctagttgaatctagtaacattaagaaggataaatttttaattagtcaagacacattaataattaattcaacccctcttcttaattattccgaggccacttgatccaacaaccatgagtcctacaattcttaaagggacaaggtaagctaaacaaaaggcatgccacatgggtggaatttcttga

SEQ ID NO: 16770 - DNA, 419 bp, Glycine max
tatactgtagctgtcaaaaaccctctagtattcttttacaacctattgtaatcaattacaggggcgtgttctatgacaattgattacagggggtggtaattgattaccagaccctaaaacatggattttcaagtaaaataagcattaaaactaactattttacacccacaaaagtacacattcaatataagtaagcaaaatatataataataaaaaacaatcatcaaaagcaatcaacaatcatcataactttcaaacacaatcatcaaagacaatcaaaactcaataaaaaacaatcatcaaaagcaatcaataatcatcataactatcaaacacaatcatcaaagacaatcaaaactcaagcaaaaacgaataataaaaactcaatcaaaaacaatcatcacaaagcaatcaataat

SEQ ID NO: 16771 - DNA, 380 bp, Glycine max
  unsure at all n locations
agctttgatggtgcgtagcccaccatcttttcatagtagagtatcgataatgtgtctaccatcacgatcatcgtctccctttccatcattgggggtaccacctgggccgccagatccctccaccttttgggcgtgttctttgaaagatccgtccccctttttgcaaatgttctgtagttgcatcctatccggaaccatatcaaaattgtactaatactgcctaacaaaggcaaccattangtccttccaagaatggactcgggaagattccaagttagtgtaccaggtaatagctaccccagtaagactctcttggaaggaatgtatcagcaattcctcatcttttgcgtattcccccatcttctgacaatacatcttta

SEQ ID NO: 16772 - DNA, 407 bp, Glycine max
  unsure at all n locations
taggaaccccaacgttntagcttcaatgcatgatttcatactcatgactaggaacccaaaatttggttttaaaattagaaaagcatgaaaatagggacttgcttgtaagaattcgggctgccccatgattggtgctttgcacctaagtaacatgggaaatgcttttcaatggtatgtagatatatgtataaatataagggccataaaattcctcgccaagtatgaataattgttttcttaaatgaatgtatgatagtgtggaatgcttttttgaatgcaaatatgtgcaggatgtaattagctttccaatatgcatataaataaatatgagtgaaacagtaaaaatttgtatggtgtacttcaaatgtatgtaagtagtttgtgatagcaaatgtttaggatataaa

SEQ ID NO: 16773 - DNA, 391 bp, Glycine max
tttgcatttttgcatttggaattgcgaaagccccactccatcattatgattagtacctgacatctcaaacaaacaaatcaaacgtaacaagacaattatagttgttgtttgaatacctcacccactcaagtgtatcacacaattatggcttttctctaatgaaacactcttgccttttaccactctaattccccttgagttcttaggcaattcaagagattatggccacaacaaagaacaattcaccaatatgtgtaaggtaaggctagagagacaaggaaaaggttaaccaagaaaaggctaacaatgtttttaggcacaaatgaaggaaataaaattcagaatttacgaattcaagtaacaatccttcatgcaaccaatatattacctt

SEQ ID NO: 16774 - DNA, 555 bp, Glycine max
  unsure at all n locations
tagcgctaccgcancntcatgcatcacattgttaacattacatacttgatcnggncgncgacntcccccccccccccagcaagaggcattgatgcgtacgatagccacgcgagcgacacaatacacacncaagccgacagcacatagtactaacagacccacggattatacactccaagaaactcaacgccatgaacctaaggagagaaaacacacacaatggctgattgtaactgaaactggcgcaaccaaaagttacccccaacagccaacaagtcagccaccaaacagggcacccaacaagctgacgcctaaggtgccaattaggcccacaaaacaacctgaacaacagccctacacaaggaaaaacccaaaaaagaatctcagcctaccaactttacaaagaccggaccattacagacacaaactacacaccccgaaaccgaataaagagcggccatgcaacgctccggcatgtaggaaacgagacaacccacaaccttagacttacctacgagaaacaacggccggaaggcaaacacaccaacaacaccg

SEQ ID NO: 16775 - DNA, 378 bp, Glycine max
  unsure at all n locations
ttgcttggttacctccttcttgactacatcaagaattaccgggttgagtcttctctgtggctgtcttactggtttagccccatcctctaaatttatttgatgcatacatgtggatgggctaataccaggaatgtccgccagggtccagcctataaccttcttatgcttcttgagaactgataacagcttctcctcttgctcattagcaagggaggaagatataattactggaaaactattgctatcatccaagtaagcatattttaaatttgatggtagaggctncaattctggtgtgggcgattagataatggtagaaagagatggtttctcagcctgtacctcatacagaaagtcagaggtatgtgtacttcctga

SEQ ID NO: 16776 - DNA, 409 bp, Glycine max
tcatcatctactcaagaaggaagtgatatggaggactcaattgaaatagacgaagatgatgatcctagtttatttgtaaaaagattcaacaaattcttgagagtaagaggaaatcatagaagatcaaattttaaatcaaagaaaaggacagaagattcatcctctactccaaaatgttatcaatgcaatcaacctggacatctgagggttgattatccaatgttcaagacaagaatagagaaatctgaaaagaaagtttttaatgaaaagaaggcaaagaaggcctacattacatgggatgacaatgatatgaactcatatgaagattcagaaaatgaagtagtaaacctgagtctaatggccaagagttatgaaagcgatgaagaggtaacatcttccaataacaact

SEQ ID NO: 16777 - DNA, 375 bp, Glycine max
  unsure at all n locations
tgcttacttggattgttgaaaataagtgcaaaaaggaaggagaggtgcaggcagtgtcaattggaagcaaggtgcagagtgaatgcaaggaatggggaagaaaaatgcttaaaggagagaaatggtaactacctaaggcagttacgcctctttaccttttggcagtttcgatccattcgcttagcacatagacttgataagcgagcctaagtgatgtttgagttttgaaaagctcatgtgcttagcgactgtactcactcagcccaattcaagaaatttgaaattccagagaaacttttgggcttagcgcanagatacatgctgagcgagttctacagatataaagtgtcttgcaactcgtgcttagcgggcatt

SEQ ID NO: 16778 - DNA, 409 bp, Glycine max
taaagtatgtccgagtcatttatttctatgagatgttgttgaagtattggcgatcagaattgccattccttggattatagggttgaaccaagctcatgcttttacaaaaaggttcatcaagtcaagttgaaatatggaagtaaccgtcttgcaaaattggggcaaaagatgaatcgagtcacatcactgcttcgtctactgccaaacatatttaggattgttgatgtccttgttacttccagtttcaccttgacaaagatgtcatggaccatgttgaaaatctaaattgattcaaccccatatcctgcgtaaaaattcgcaatacttcaactgtacatcattcacatacatccatgcttttaattggttgcattgctcattgcattctttccttgaaaaataaaataaa

SEQ ID NO: 16779 - DNA, 326 bp, Glycine max
  unsure at all n locations
atgctntgatgcaaattcaaatgacaataacttttgagtcggatgttcgattgtgtctcgtaggatatcgagacgatcaaacgacaataacttttaattcgaatgtctgattgagccctttaatatatcgagacgctcgaaattgaaaacagaagctctatgaaaagtcaaatggacaaaactttcaattcggatatctgattgagtcccgtaatatatcgagacgctcgtaattgaaaactgaagctttgaggaaattcaaacgacaataacttttgaatctgatgtgcgattgtgtcccatacgatatcgagatgctcgttatt

SEQ ID NO: 16780 - DNA, 419 bp, Glycine max
tcaacatcagaccacttccagggtgctggaactacttcacatggacttgatggggcctatgcaagttgaaagccttggaggaaagaggtatgcctatgttgttgtggatgatttctccagatttacctgggtcaactttatcagagagaaatcagaaacctttgaagtattcaaagagttgagtctaagacttcaaagagaaaaggattgtgtcatcaagagaatcaggagtgaccatggcagagaatttgaaaacagcaggttcactgaattctgcacatctgaaggcatcactcatgagttctctgcagccattacaccacaacagaatggcatagttgaaaggaaaaacaggactctgcaagaggctgctagggtcatgcttcatgccaaagaacttccctataatctctgggctg

SEQ ID NO: 16781 - DNA, 395 bp, Glycine max
  unsure at all n locations
tttcttgtctttttcagggtatacgaaagaaggcccaggaaattcaaaaatttaatgactgccctcacgtactgtctcgtggggggtatgaactgcttgacaagaaacttatggaggagaagagcaagcgtggacatgaggaacattcgtgtactgaaagcccaacactcaacgtcgacccaccatccctagttgcaagacacttgaagtggaagatcgcccgcactaagcggcatggccaaatgacgtctgaagtggcacaagaaattgcagacaaaattgtcagttcatatatttttttggttactatcattggcaaataatggttagctaacctagtcaaatttgttttattcanattcaacaattgtatatgcatgcaggattcattacag

SEQ ID NO: 16782 - DNA, 418 bp, Glycine max
tgcatcatgtgatatcaagagcatcttcatctatgtgatgttcttttgcttcctctatctttttgttcggtgaattctctttaattccttgttcttcatcttatcctccatgtatatcctccattgtcttgtggtttggtgctgtttagagtagattccaaaaaaaaaaaataaaccgattaaatcttagatctatacttgttcttgcatttctatggttcaaattttgtagatctactcttgaatcatgtttttgtgttgatttcaggttctatcatttttcattcataatattcttgtgctgaaccttagatctaaattttcttccaaaatattgattagaaaaaaaaacacaaaaatctaagtgtaaatcacttaatccatgttgtcttagagtcatgtttagtcatagtaattg

SEQ ID NO: 16783 - DNA, 391 bp, Glycine max
atcttcgtggggatggtgaatcttcttcagatggtggatggtacaatggtggagaggagggtattttaggtatttcaaaatgtctaaaaaattgagggatgtcaggggttaaaaaaaaggtgtaaatagtcatccctttttcgcttttcttttcctttccaccttttagtttatttttattcttaagtttcaatagtctaaatcaaacggacagatgctaaccatggcacataggagattcctcatgaccattttagaactcgtcactgttgatgatcaaagaagaaaaaagaagaactcgttatcgttgcttgcagatgttggcttacagttagtcaggattacttgttaggttagccgacaggtttgaatctttgaagttggaagtttg

SEQ ID NO: 16784 - DNA, 421 bp, Glycine max
  unsure at all n locations
tgtaattnttctcttaagagcaatcatagtagactctttcactctaaacatcttattaatatttttttctatttctctttctaaaacatatcatacatttattcttatcattagtccattaccattctcacttctgtctctttctctcactaattttcatctaaactctaaagtttaagtgaagatgtccagtgtccactaatcatttttaaattatcaatacaaaatgctagcaattacatttcctaggtggagagttgttctccattattcaataagaagttagtgctagatgtacatttttccatggactcgaaaactacaatacggattacgtgccttccgctgaaacgttctgggtgtaaacaaatgtcaagttccgttgtaaacaaatgtcaagttcattaatggttggttaaag

SEQ ID NO: 16785 - DNA, 393 bp, Glycine max
  unsure at all n locations
atgcgcgtatagaatggagttccatgagaaggaggtcttaaggggcatttcatcgaacaggcgatgggcgtcggaggaggagccggttttgacgtagaggttgaggaggttgtttgtgaggaagccgccgcggtagcaaaggccgtgtttgatgattcgagcgtgaatgcatcttccgatgaatgggtctcgtgatttgattgcagattggagaaggtacacgcatgcatcggaatgggagggacggtttgnggttggtgttagcatcaacacaagcacggcgcagtgtctgttcactctgttgtaatctcgtactcgtagttaacagaattgcataactaanacgtttcgcttctattcttagcccggtaccgaggagaggctggatcgaca

SEQ ID NO: 16786 - DNA, 420 bp, Glycine max
  unsure at all n locations
ggcatgatcaaactagcggcatgaatcccttttttacaaatctctcttttatttacccttaaacttaaattaaatctaaaatgaccgatgcaggattgattaaggagaaaaagtattctcaaaccttgaccctaggctgataattaaaataagaagtattaggcagttaattggtagttgagagttcttaattaaaatagaaattatgagaaaaatggtacatgtgaaatcataattcaagaaacttttattcatacatatctcttctttaatcaagtttctagcattgttgtcgggggactggtagtgaagttctcggataatttaatttgtgtaaatgaaataaaaagttgttcatatttatttttttattctatnntattttttattctatttttattagtttaaattctgaatttt

SEQ ID NO: 16787 - DNA, 317 bp, Glycine max
tgcttagtttgttatctgattgaaagccaaacaaagattggagctggggaaggtttcctctttgagaaaaaacgagtttcaaagtatgatcttgctaattgccttggacaatgacatataaacttagctttttatgagatggctactttatttcatgtgcttgtcggctattctacaattaataatatatagtggggcggtattttgtaagacatatatatactatatcaagtaaactttgtacgtaacatgaccacttccgatattatatagattaggtaatttgatgagatgtatgataagaggaataaatatat

SEQ ID NO: 16788 - DNA, 422 bp, Glycine max
tgtattcatagaacatttgatattagtattttgttattaaaaaatatttttggcccctaattatttccgataaaactatcaattctgcaacaaaatggctcatgtttgtaatgcaagaaaagtgatggataagatagaagaaaccgtgaatatttttggcattggaatagacattccacccatttcatctagataaagacaacgtggtctatcataactagttcccgtcaagaaaaaaagcacagcgccaaaaacgccaataaatccatgacatgggattctatttcacaacccagcttggtagagggtgtttcttcctccaccctataaaaataaaagagcgtcccttgtatattcccaaaaaaactaatgtaaaatgtaatttacatctaggattactctttacgaaatataataggatg

SEQ ID NO: 16789 - DNA, 286 bp, Glycine max
tatccggaagcataaaatgcatagcctggggtgcctaatgagtgagctaactcacattaattgcgatgagctcactgccctatttgcaataaacaaacctcgcaagacagctgcatttatgaatcgtgcaacgcgaaccccttgcaggcgcccggaccgtgcaaacaattctcatggttgacagcgtatcatcgaacatactgccatcatacgctgattatcacatatacacgacgtagaaccatgcgtataaaggcaccgataacggcctagataattaacgccg

SEQ ID NO: 16790 - DNA, 366 bp, Glycine max
  unsure at all n locations
ttgcttgnagaatggccagacatgatacatgtcagggtttggtttggttcaagggtaaaagggatgccccacattatttccatgacacaaatgcaaaaatgatgatttggaaactttatgcaaaactggtcatgcatgcacctatgcggacactcaagtgtcaaatttttatggtcatgtgatgctagggctcacgattcatttcctctattttagtcaacccaatgtttgcaaaatatgttcttttatccatttgtgcattcatccaagtccatttcgggcgtctgggaaaattttcacagcattcacccttcaagtgtatacacattctttcaaaaactagttatgatcagtgaatttttcttt

SEQ ID NO: 16791 - DNA, 412 bp, Glycine max
tggaggcattacctttatggatctaaattttagttgtttagtgatgataagagccttagatatttgtttgatcaaaaagagcttaacatgaggcagaggagatggttagagttccttaaggattacgattttgagcttagctatcacccaggtaaagccaatgtagtagttgatgccttaagtagaaaatcccttcaaatgtctgctttgatggttagagagttggatctcttacagcagtttagagacatgagtttggcatgtgagattacctctagtagcattaacttgggtatgttgagagtcaccagcgaactcttgagcgagatccgtgagggtcagaagtctgacccattcttgtcagctcagttagagtccatagttgcagggagaaagagtagtcttagagtgg

SEQ ID NO: 16792 - DNA, 395 bp, Glycine max
tgtctatgctttctttgccggaaaattgtcattttgtagacaaaaacccatatgaatcactggttcatacggatcaacaatccgtatgggttttttttattaaatttaattgggtttttttaatttttttttaaattataaaaatatgtttaaatattggctggtaattttttttaaaaaaaaataattattgctaatgccatacggatcagtggtttatacggattgtgaatccgtatgaaccatatggatcactaatccgtatggttttttttttgtttttttaatttaaaaaaatgcttaagttgatatttaaaactgtatttgcttttgtgccatacggatcattgatccgtatgatttttttataatattctttatgaaccatacggatc

SEQ ID NO: 16793 - DNA, 413 bp, Glycine max
tgagggagtggtgacttcccgttcccagtgttggtgcttacttgcctgccctactttgacatgtacaaatgattgtttgaggcattggatgtcattctacccttgaccctttttagtgtgctctactggagcactagaatgcggccccttcccagctcctcccaaatagttgggcgatggtaagggcgtttaaaattttgtgtcctttcttcaacatcaggcctagcgtgtcaatcttattcttttttcaaacgaagtttcctggaaagactagatgagtctccttgaacagcatgttcaagaagctgtttgagtttgattcaaacattgttcgtcgttttaaggaccactttattaaggtcctagctactagattcatggctaatggcatgccactgatgcttaacagggat

SEQ ID NO: 16794 - DNA, 364 bp, Glycine max
  unsure at all n locations
ttcttgaaggtaaactanatgccttggttaacctggtaacccatctggcctcgaatcaaaaatctacacctggcgccagactctgaggtttatgctcctctgccgaccaccacacaaacctttgcccttctatgcgacaatctaaagcaattgaatagcctgaagcttatgctgcaaacatctacaatagaccttggcataccctaatttcgtccggggattataatttgatgatatacaaccattgattgaccgcttcgagatgactggcaaccctttgatgcacaatatgtgaagtcccgagacgtgtccaaaatcaaaaaggaagcatgcttacccgatccgtgaaaattccgtgatgtga

SEQ ID NO: 16795 - DNA, 423 bp, Glycine max
  unsure at all n locations
gacactacacaacactcaagcttcagaccatagcaactcagaatctacgtattctttatccctcattttaatggactttcacggtttgagaagtgaaaatgacaatgggcgtgaattatagcgaactctcacctcacacaagtctataccatcagttaacttgctcaaactggattaacgcctaaaattctgccgaatcaaaatttgactcttcaacacccaattttaccctaaaaatggctcttgccttcactttggtcattcgtttatctctcttacacagcccaaactttctcataagatctaaatgacatttgcagctaagatgaactccctttaacctccaaataccactaaagtcagatttggcctttcaactctcaaagcctcactctnttatcactcataacaccatattctcac

SEQ ID NO: 16796 - DNA, 386 bp, Glycine max
atcttaacggagtcttaactatctaatctataaaggcattggtaaataacttgatatgtaaagaagttttctaaaacaacaatctattatgaaaaccaaaaagcgaaaattagtaccttcaacttttgactgttgtcgtagaattgcctttgctcttccggttcatcaattattacattttttatctgtgatgttttgtgccaatcctgtccaacctccttctggtattttttgcataattcaggacaaccaacaatttctaatgtttcaagatttgtgaggtgatgcatgttttgaggaagtaaaagcagctttggacaaccttgaattggaagttgtttgagacaaatcagagttgacagccattcaggaatctcctcaagatt

SEQ ID NO: 16797 - DNA, 417 bp, Glycine max
tgcatgatttacatctccctctttctcaatctaattcttcttgatatcatcaaaatcttcatgatttacattctccccctttttgatgatgacaaccacctgtaggttaggagcaacaacaaagaaaatatctatttgcatatagtttactcccccttggttttacaatgattgcttatatgagacaattgaagatttcatatttttcatatataaaaagttgtctcataaaacaatagataatttttcttactattttatcttttatctttctctccccctttgtcaacatcaaaaacaaatcatgaatagaaaggagaaagatgttaccacttgttgcaatgtatgagaataagataaggcattaaaacaatcattcaatattaatcaagcaaaaacaagtacaataacacatca

SEQ ID NO: 16798 - DNA, 379 bp, Glycine max
tgctttaaataggctctaaaattgcgacatcgcgcttagtgccaccctcactcttagtgcgagtaagtggatttgggcttggcgccagtcgtgcgcaaagcctggcaagagacaaatgcctcgcttagcaaactgatctcgcgtttagcacgcggccttgatccttgtgctcttctagattcccttatcacgctaagcacgctgaagctgcgcttagtagtggatgcgcactgagcccaaatggtgagttgagcgcaactgctccctttagcacttcaagattttagcctcttttgacctgaaattgtgtaaattttatcattaaatcacttgggagatactctagagacaactataacaataaaacaagatttattta

SEQ ID NO: 16799 - DNA, 408 bp, Glycine max
  unsure at all n locations
tgtctcagcgtttatgcgagacggtgaccaacatgctagctatcatcgccaagtaccaagaagagttaggtctagccgcggcccacgagcataggattgcggacgaatatgcccaagtatacgcggaaaaagaggctagaggaagggtgatcgactctttacaccaagaggcaaccatgtggatggatcggtttgctcttaccttgaacgggagtcaagaacttccccgattgttagccaaggccaaggcgatggcagacacctactccgcccccgaagagattcatgggcttctcggctattgtcagcatatgatagacttaatggcccacataattagaaatcgttaggaaacttgtatggtctctaagaccttgactaaatacgacttcctttntgaaataaaat

SEQ ID NO: 16800 - DNA, 281 bp, Glycine max
tatcttctttgttagacctcgatcggtcatctttccaggccgaggtcgaccgtcatttttttcgatccatttcggtgaataatatttttttgccgagatgggctaatgatttcctgtccgaataaatgggaaaatgccagattcggtcgaaacgaaaagtcggttgagctcacacaaaaaaacctatccgacctacattataaattttttatgcatcaccaaaacaagaaaacttcctgtgccgtaaaaaaaaaaaaagaattcataagacagagcgcgtt

SEQ ID NO: 16801 - DNA, 398 bp, Glycine max
  unsure at all n locations
tcaccggatgacgccgatcgaacatttcctaatcgtcgtcatgcaaatttcgttcagggattgaattgaaaactcgttaggcgacatctgtcgtgaagtagcgaccgatatttttcagccgacattgcacaattctttttagaatagctcgctggtcgataatggtctttttacggcagagtaagttttcttgttttggtgttgcataaaaaagttacaatgtacttcggctaggtttttcgtgcgagttcaaccgacattttgtttcggccaggataacattagcccacctctgcaaaaaaaaaatatttgctaaccgtcttcatgcatatttcattcaacgattgaatagaanactcaatagccgacaacggtcgtgaaatagccccgactggtat

SEQ ID NO: 16802 - DNA, 368 bp, Glycine max
  unsure at all n locations
atgcttctatataagctgaacccatttatcaataaacacaagttgagttttattcagaaaattagagtttatctcttttatcttagtgagagtgattctcctaaattcttgagtgattcaagaacacccttgctgtatcaaaggactttcacaacctttgtgtgttgccctcgctggaaagagtgattctttccttcctttcatcttcacccttggtctttcaaaccacaattccagaaaatccacctctgcccagaattatctcgtggccataactcccattntacgcactcaaattaagtgattcttgagcctaaattgaatttcaaaacgagacctttcacctcgttttggaatcacctcatttg

SEQ ID NO: 16803 - DNA, 418 bp, Glycine max
tctcgatatattatgcacctgaatcagacttccgtttgaaaagttatgaccatttgaatttcttgagagcttccgttgggcaattttgagcgtctcgatatattatgcgcctgaattgaacttccgtgtgattagttatgaccatttgaatttctcaacagctttcgttgttcaatttcgagcgtctcggtatattatgcgtcagaatcggacttccgtgtgacaagttatgaccatttgaatttctcgagagcttccgttgttcaatttcaagcttctcgatatattatgcaccttaatcagacttccgtgtgaaaagttatgaccatttgaatttctccagagcttccgctgtttaatttcaagcttctcgatatattatgcacctgaatcagacttccgtgtgataagttatgac

SEQ ID NO: 16804 - DNA, 380 bp, Glycine max
  unsure at all n locations
atcttctctgctcatgctgggaacgcctctagttcaacacccgtgcagcctaaggcacccacccagagggaagctccccaagttccaactccgaacacggctcgaccggccggtaattccaacacgacaaggaacttccctccgaggccattgccggaattcaccccgctcccgatgacgtacgaagatcttctaccatccctcatcgccaatcatttggccgtggtaactcccggaagggtcctcgaaccccctttcccgaagtggtatgaccctaatgcaacttgcaagtaccatggaggtgccccggngcattccgtcgaaaaatgcttggcccttatatacaaggtccaacatctaatggatgccggatggctgac

SEQ ID NO: 16805 - DNA, 420 bp, Glycine max
tctggtgactgggaagcacgttattctgttgttttccatgatcggttccttcgccaagtatgtgtatatgtgtatatgtgtattatgttcattgttctttgttattgtttatattttgttttgtgcagaagaaaaaaagaaggaatggagacgagagtcgtcatcacagaaaagggcaggacggacgaaatcagtgtcctatctttgctttcctcttatctccgatgagaggtaagtaaagaggggcaactgtcataccctaattttgtccgtggattattacttgatgacatgcaataaatgaagtcccgagacgtctcagaaatcctaaatgaagcaggcttgtgttatccgtgaaattacgtaaggtggcggaaatcgaaaagaggtgtttttgtgcaatccgtgagtatttataac

SEQ ID NO: 16806 - DNA, 388 bp, Glycine max
tgcttgggtgatgttgcgcgtactgatgggtaccatgaggtgtttgttggggtttgacccatgcgggtgttgaagagacggcatgggcatctccttccttcctttttgcccctgttgccccgattcttttggcgttcacgtttgtggaggaaacgtaatcaaactttcctctcttcaatccaacctcgattctttccccggcaaacaccagatccgcaaagctggacggcatgtaacccactagcttctcatagtagaacactggcagagtgtctaccatcatggtgatcatctctctctcaaccatgggaggagctacttgtgccgccaaatccctccattgctgcgcatattctttaaaggtttcaccctctttcttaacatattc

SEQ ID NO: 16807 - DNA, 440 bp, Glycine max
  unsure at all n locations
tatagacaactcaagcttgctttgaaaacttccattcaccctaggccttacatagctacaatggtttagtgagaatggagagctaattgtagatagacaagttttgatatgcttctccattggaaaatatgttgatgagatactatttgatgtagtccctatggaggctagccatctcttacttggaaggctttggcagtatgatagggatgctgtccacaatggtgtcacaaacaaattttcatttgtacataaagggcaaaaggttacccttaaacctttgtctccaagtgaggtttgtgaggatcaaataanaatgagagtgaaaagagaacaagagagaaaagaagagaaaaataaaattgatgaaaagagagagaaacaagaaaggagagataagaaagaaaatagtggaggtaaaaaaaggagtgaaactgaaa

SEQ ID NO: 16808 - DNA, 393 bp, Glycine max
  unsure at all n locations
ttcttcaatcaatttcttcaaatgattttagtcaattcaattatctaataacctttgcacatataaatttcatgatgagaagtcacctacacgtaagaaaatataaagcttgtgaaataaaagtgtcaatatgtgtagtgtatacactggggcgtcgaaaatttaaagaaaagaatcaacaagattgaaaggctaatatatcctctataacaaaatcacaaccacacaatttttatgctccttataaagaatcctaacgcctaaggtacacactcaacacaagaacacatcaattttacaacaaattcgcatcgaaacaccaattggtccatcaaacacactanatccgtgattaaaacaaaacaacacatagttgaacttcataaaacattc

SEQ ID NO: 16809 - DNA, 419 bp, Glycine max
  unsure at all n locations
tcttgagaagttcttttggtaaatctcactagatgttttgttaaaatccactatctcattggagacatcgatattgaagtagtcaatgaatcttgaggcaagtacaacataaggaaatttgtagtccactaactgatgactttttaacatgatgtcttctatcaaaagtacccaattcatcttgatacctgattttagaccatagacagtctgcagatcatcgtccattacctaagcgtgattacttaacctctgantcanaatgtaggtaatgaggtaactaggagattcctcaagntccttgctgggtcaagaagcattcccctataggtctgcatcttgttgtacccatcagctgtttcatcgaacttgtggactccacccatgtccagaccgactacttccttccatacttcaat

SEQ ID NO: 16810 - DNA, 401 bp, Glycine max
  unsure at all n locations
tgcattctttatctcatagtaaattaagcataatgaatttatgcataattccattgaagtgctggtagctaagatggaaaacatggcagtccccaaaaagattctaaagattcaaattgctcaatgtagttcctctttgagggaccatgaggtgaacatagagaagcttgacacaactcttagaggaagtgtccaaatttgtaccgcacagtccttctcatctaggtaaattggaaaagataaggaccttgattaaaggtgaacatcaaaagaaaaggtaaaatccaccagtaaaacttaaaccaccttcctcactgctcatgtttgactntcttggacatgactatattgttgataccattttggactaaaactaanactaagagaaaacatagagaatg

SEQ ID NO: 16811 - DNA, 411 bp, Glycine max
  unsure at all n locations
tgtccttggttgtgtttcgatagaagtggatgtgcggcttgcttatgacacacatgccattatcaggaaggtatttgattatatgcttcattgaccactgataatgttaatatttcattgctttgcatctagaaagtgagattgtgatgttgaatacatttgtagtttcaatgtattttatccttggagaaatatatataataaagcatgccaaatagagcatctatcttgagtaaagtaaccaagaaacatactcattgcaaaatttatttgtttttgttggcatcttaatgaaatttcaccaattaatgcatgttaaaaataataggtactataagttgctaattcattatgtccaccangcttttggttgctaattcatttatgtgttgttgcaaacttactcaaaag

SEQ ID NO: 16812 - DNA, 479 bp, Glycine max
  unsure at all n locations
tacccgaacgcgantanntacgcacaaaacaaaccannnannnnnngcccatcgttggctcacatcangcaaagagaccgagccggaccggaacttaacgcagctgatttctgcttcttaccatctcancatgagactcatatatgttggctcacctgatacacaatggcaatcaacccatacacaaacacgcactgggagtgagctaccacatgtcgtgctaaaagacggactagcgacatcacatgcaaagtactatactgatttatagcatatctcaacgtagttcaatacacgtcactccaccactttatcatttagaatggatatgtcaattatcactcacattacacatgaatcatacactcgagtgatacatatatcactcaccgattcacttatacagtcacaggcatatgataatatatcgaactaatctatatgcatggtacatgtcaggaaacacactaacacgttgg

SEQ ID NO: 16813 - DNA, 238 bp, Glycine max
gggacaaccatccatggagggtagtgatactcgctaacagaaacgtgtcgctcggcatcagagtccagcacaaggcataacagccgacgacatctgggccaaggacgcagaacaaaaccaacgggaggggcaaacacgccactacaagaaaaatgctggaccctgcccacctacgcggacacatggcaagaaaatccgcaccccggggcacccgcccaagcccgtcccgactctgacg

SEQ ID NO: 16814 - DNA, 383 bp, Glycine max
  unsure at all n locations
ttgcttgcacaacaaataactaaatatgtttttggtacaaaataaagtaactaactaactaacttccactaatatatacagttactactccgaatgaaggtatgaaccttgattaggctcatctaatctacctaatttaactaattacacaaagccatgcccaaattcgcagcccaattattcaagtgtagttttgacttccaagcccaattcgacaaaattgaagctttccagggactactcacattgagcatttggagttttgtagtattctataggccctacacaaggcagataggtcaagtaagcataaaaatccaaaaataagccacaattatcaattaagctcaatcatcttcctaagacgaanactaagctaaagt

SEQ ID NO: 16815 - DNA, 418 bp, Glycine max
  unsure at all n locations
ntcataccctgtgttaggaagattcgataaattttactcagatagggaagctcagatgatagaaggagaagattctaaatctgatgaagatttaatcaaggcaaaggatgccactaagtaggtgaagtttgatagttgcacaaataaaatcattagtgatcataagcagtttgaagcacctaatgagactgatcaagatcttcaaattcaccctcaacatcagaatttagcaccagttgaggggactaattggacaagtcaaaactatccaaagcagcccaaaacaacaacacccaaaaggcataaagacaaatcaaagctcctgaaagatatggctttgatatactgtctcatgcactacaagtagcaaaagaaattgattcattcgaaccaaccacttatcagaaagtaatttctt

SEQ ID NO: 16816 - DNA, 378 bp, Glycine max
tttctttggggctaaaaagctatataacagcaccaaggttctagttcagctctctctcctctctctcttctatttttcgctcttagcttgagtctctcttctctttctcttttattatcgttccttacaattccatttccgacgttgagtcttatcaatacaatttcgatctctattagattaatggcaggctaagtccgcaacgttgatctctctggaggatcaagcacagctctctttgaggttctattatcactggtacattctgttcagtttttcctcttcactaatcactctgaatttgtggctattaatctatgcatgcttagtgcccgattaattgtctctgcgcataattcacgtacgttcatgcttaat

SEQ ID NO: 16817 - DNA, 418 bp, Glycine max
  unsure at all n locations
tagactctgtttcatgaagaagaggatcatctatttgagggaagagtcgcaagtttgagaataggatttaagaaactctcacgtgaaagagaggagaaatataaagaaaatacgcgaatgttctgaaagattcttctatcaagaagagaatttcaatttctcactttctagaaggaaattgaaattccacatttttagttgtttaaaattatgttttaaaattccaaaatttaaattcttcataacacaccatccccacaatggaatttagattatagaaagtgaaattctctgatcaataactgtccacaattaaaattctttatccaaaggtactctaaggcttactttacaccttcctatgtatgttgaactcactaggcttgtttaccacactnttagaagttcaatattcact

SEQ ID NO: 16818 - DNA, 359 bp, Glycine max
ttcttctttgttagacctcgatcggtcatctttccaggccgaggtcgaccgtcatttttttcgatccatttcggtgaataatatttttttgccgagatgggctaatgttttcctggccgaataaatgggaaaatgccagtttcggccgaaacgaaaagtcggttgagctcgcacaaaataacctagccgacctacattttaaattttttatgcaacaccaaaacaagataacttcctgtgccgtacaaaaaaaaaaaacattacatgacatcgagcgttttgaaaaacaaaattgcgcaacgtcggctgtaaatatcagtcggggctttttcacgaccgatgtcggctattgagttttc

SEQ ID NO: 16819 - DNA, 418 bp, Glycine max
  unsure at all n locations
agcaatgncccttgatatattngagggactcatgttcactatgattgacaaattccttgggataaaggtagtgttgccatgttttcaaagcccgtactaaggcatacaactccttatcataagttgaatagttaagggtaggaccacttaacttttcactaaaataagcaattggatggccttcttgcatcaacacagccccaatcccaacatttgaagcatcacactcaatttcaaaagatttttgaaagttnggcaacgcaagtatggaggcattagatagcttttgnnnaagaacattgaaagcttcttcttgtttctctccccatttgaaaccagcatttttcttgagcacttcattgagaggtgctaccaatgtgctaaaatccttcacaaatcgtctataaaaacttgctaa

SEQ ID NO: 16820 - DNA, 236 bp, Glycine max
gatctaccaccggcagcggaatatcagcatactatcatggccaagattatcagcactatgatttctagcgcgagaactcggacatattactaggaaatgtgaacgatttagtattgcttttatttgcacaaaatgagtgaacaaataggaagtgtgcacaatgactatatggggcgtatataattgatctaatcacgtatcctcgcttatgaaaggatgagatattaccatgaatg

SEQ ID NO: 16821 - DNA, 328 bp, Glycine max
  unsure at all n locations
cacacatacaaacgcaagctttgagtgatcgattacactagtgaggcaatttatttccagggatatgccctgaaggaaggagaggatgttactctttaatacgttgttgactcttgcatattggtggtaggaaatccccattaaaggacctcatctgtgcggacctattcgccctacatgaanagcctataaaagcactgctatgaaaagcttttgcatatactattccaaacaatcttattaaatccttaacaagcctcgagacgctgtgaactgcatcctcggattggtgccaagaactatacaaaagaagctggttttcaaaaca

SEQ ID NO: 16822 - DNA, 376 bp, Glycine max
tgctttgaaggtgcgtagcccaccatcttttcatagtagagtatcgataatgtgtctaccatcacgatcatcgtctccctttccatcattgggggtaccacctgggccgccagatccctccaccttttgggcgtgttctttgaaagatccgtccccctttttgcaaatgttctgtagttgcatcctatccggaaccatatcaaaattgtactgatactgcctaacaaaggcaaccattatgtccttccaagaatggactcgggaagattccaagttagtgtaccaggtaacagctaccccagtaagactctcttggaaggaatgtatcagcaattcctcatcttttgcgtattccaccatcttctgactatacatc

SEQ ID NO: 16823 - DNA, 402 bp, Glycine max
tcagaaaactatagaagataatgctacggcggtcgtttccaatacaactagggaagcggaaccggttctacagcccgcaataaacttgggccgagacagaaacatgatggttttcggtcggaggtatagtcctcaagcctacccttatggtttgcctccggacttcaccccccctaccgctccagacgatttgagccaagcccctacctttgaggggcaactccctcctcatgccgactatcctctgcaagaagatgatgaaggagatgcccatctaggccctctacttcccctcaaggatccggccccccatgaattgcctcaaccaaacatagtccgccacgtcccgtctccacccgcacccgttaacgagttatttccctcggcaacctacccgtctta

SEQ ID NO: 16824 - DNA, 444 bp, Glycine max
  unsure at all n locations
agataataattgattatacgataaattatgtaaatnaaannannaaaaaagaganattaaccttgattcaggcttgaaacatagggaaggagngganngggatnttaagtttttgatgtatgatgttatattttagaggagtagatattgatgtattgtggngatatatatataaaaattgtatgaagataangttataaaaaagtatattagtaatgaagaggagaaatagagaaaaggagaagtggtagatagaatatatgatgagtgaagaagagaaggaaagtaaaagaaagagagtataatgaaggaataaaaaatgttgaggtaagatgtaatatggaaggtagaagggaggatgaaaaaaaatagtgaagtaagaaaaaagaaaggaggtagttagaaaaaaggataaagagtgaaaaatgtagaaaagataggaag

SEQ ID NO: 16825 - DNA, 312 bp, Glycine max
  unsure at all n locations
ctatcaaatattaagtgagcccactgtcattggcaaatgaaactaaacataaatcgcacaccaaaattttcagcacaaggtaattatattgatagatgtggcacattacatgtaaaatatctattaagcatgaaaatggtgcccaacaatagaaaatcttccnttnnnccctcnncctcatatgggattaggtgatggagtggtncngaggccttaaaccatggtaaacaggcttgaggtggaccatcttagataaagaaataaacctgtgcgaaaacaacatacccatgtgaataaaacaacctataattg

SEQ ID NO: 16826 - DNA, 374 bp, Glycine max
ttcttgactaggcggattgtttttagccttaatttcgctttagttattagtcaattcaattaagaatgagaaatcccaaagagaaaacgtccgattgatttttcgctttactttactcaaaggtattttttttattattatattattattttacctctttttttatttccaacgtgcttacggcacgaccgaacggtcggaattcattttaaccaaaattaacggatgatacaatttaaatgatcggtggaaatttattttatttttagattaggcgagaaatgacttaaataaatggcttaagcacatcaaaagggggtataaaaagcaaatgaaaacgagaataaaaatacatgtgtcgcaacctacccttc

SEQ ID NO: 16827 - DNA, 419 bp, Glycine max
tatcataatcgattgcactgttgttttttagacaatgattgatttattcatgagtctgtgttttaattgattaccatgtgatatattcgattacttctatttctataagtatttcagaagtgatcaagaacactttaatggactacattgaggatctaatcgattacattgtgcttgagaggtttccagtttttgggatgaacactttaatcgattgataagataatataattaactacttcattgaaataatcgattacattgtatatttaatcgattataggcagttataattgttttctctataaatagtcaccttgtgttctcacttctaagtacaagttcattaagtgtgaaattatatgagctgaaataattgaaagaatagaagaagagtgcttagaaacagtgactcaaaa

SEQ ID NO: 16828 - DNA, 366 bp, Glycine max
tgctttatataggttctgaaatggcgatgttatgcttagcgccaccctcgcgctttgcgtgagtaagtgggtttgggcttagcgccagtcttgcactgagcctggctaatgacacctgctgcgcttaacacattgatctcgcgcttagcacgcggccttgatgctgatgctttgccagattctccttcgcgctaagcatgctaaagctacgcttagcggtggatgtgcgcttagcccaactgctgagcttagtccaacgaccacttttgcacttcaaaacttagcctctttttcacctgaaaatgcacatatttcatcattaaatccaatggaaatgttctggagacatctttaaccataaaagaa

SEQ ID NO: 16829 - DNA, 421 bp, Glycine max
tgaagaatttttggcttttacatgcccgactcccttgtgtgacatttgtattggttgttatcttggttgttgcatattagtacatttgatatctatattgcatcatgcatcatcatggttagtgagaagaaaagtttctaagttagaaaagttacttcaaaggaaaaaattatttgttttaatcaattacagagttgtcgtaatcgaatacaagaagctatctaaagcttaaagagttgagtctcgtatcgatttaatcgattacagtagtctcataatcgattacactattgtttgagtcaatgactgatttattcaagagtctttggtttaatcgattaccaagtggattaatcgattacttctttctcgtttggttatgaagatctttttcttggaagtgagttgtatcttttgagtt

SEQ ID NO: 16830 - DNA, 370 bp, Glycine max
  unsure at all n locations
atcttgaatgcatgtaacccgccatcttctcatagtaggacaccgttaatgtgtctactatcatcattatcaactccctctccatgggggcactacttgagctgccatatccttccacctttgggcataccctatgaaagattcgtgctcccttttacacaagttctgtagttgtgtcctatccggagccatatcagaattgtactgatactgcctaatgaaggaaaccattaggtctttccaagaatggacttgggaaggctccagattagtgtaccaagtgacagcttccctagtaaggctttcctggaaaaaatgcatcaacaacttttcatcttttgtgtatgccttcattntcctccagtacagc

SEQ ID NO: 16831 - DNA, 417 bp, Glycine max
  unsure at all n locations
ntataagcgctggtcggagggacgaaggtcaagtggtcgtgatatactttgatggtgttccgggtacattggatttggtacgaccatgccctcctgatttccagctgggaaattggcgagtggaagaacgtcccggcatttacgcgacgagcataatgtaaacctttacggttttaaaagctctatagttgggcctaggctttagagtttttcttttgttaaggctttgtgtcttttgtttttgaatttataatacaaggatctttcttcatctgtgcctacgtgtctacccattcttatccatttgcatgtttacttctttatttctgaaacggcagatccgatgacgagtcccccgaaggtactaatacctgggacccgcctatcaacttcgagcaagaaacgaatcanacggaa

SEQ ID NO: 16832 - DNA, 377 bp, Glycine max
ttctttctagtgaacccaaaaatggtgaaatctttggagtctatgaaatcatagcgagctggtttaaaggtgttgatcaaacccctcacttgctcaccaagacatcggatttggtgtgtgctaccttaaactataggtggccaattctacatctgaagctagatgatgtatgagtgtctaatgttgatgattatagatggcaattaccaagggtgtcaatggctgagaaatgcttattaatgttgaaacttgaaagacaatttcacctttgatatatgaagtgatgagtcacaagtgaacatagatcttgtcaaatgcagcttctaggaactataggttggtttggttatatattagtccaccaaatcttataatgt

SEQ ID NO: 16833 - DNA, 419 bp, Glycine max
  unsure at all n locations
tgaactccttatcctaaacttctgcaaaaagcttttaatgttgccagagcttccttcaagcatgctacgattggatgcaagcaattgcacttcattggaaacttccaaattcaatccatctaagccgtgcagtctcttcgcatcacctacaaaatgacatttactaagaaaattggaggccttcttgaagtttgtaccctagttttccccacactctcaagattgtctgtgtataacaatcatctatttttgctgctcattcaacattacattatgtgtgtattgttacaacatacaggaactccgtcttccaaagcaagatntgacatggagtgaaatgccatcatggtctgtccctccaaaatatgtagtcccacctgagatgcaccaacatgaagctgaatgctgcttgtttagac

SEQ ID NO: 16834 - DNA, 392 bp, Glycine max
atcttatcaccaaaacacgtattattagctaagtgctaatcaagagcgtttatacatcaaatcaacagcgtttagggtcagtttcttttagaataaaaaatttaaaaaaataagtgatttacatctagcatgtaaatcaattagtggcagaattattctaatttaattattaattgtaaatttaagtcttttatatatatagttgtattaaataattaaaagataaatttttatcatctcacacgtgatcatattcaatttaaataggattgtgtctagttgcatgtaatatatatatttttttagtgtctgattattctgaaattttgcaacaaacacataaaaatctttttttaacatataaaaaccttaattattttttacaataaatg

SEQ ID NO: 16835 - DNA, 363 bp, Glycine max
  unsure at all n locations
ttgctttgatggtgtcgagaagaaatcacatgtttgtcatcatcaaaaagggggagaatgtgaatgtatgtatacatgattttgatgatgtcaaagaagaatctaacaaggctgcttcaaatgataagcatttgcttcaagaataattcaagattgcttcaacaaacaaagccttgtttcaagattcactaaagaccaagccttgccttaaaacaaagtgctttcaagacatgcaaggctctggtaatcgattaccaggaagtgtaatcgattactagaagacagggttgagaaatagctggtgaaaaatgttttgaatntgaattttcaacatgtaatcgattaccatatgtctgtaatcga

SEQ ID NO: 16836 - DNA, 416 bp, Glycine max
tgtccactactatcttgaacttagtgttggatgttttcacacaaagacacctacccttagcccaatctagaaaaccctattctagcatgcctttagaaattcatgcatacactaacaacatgtaaaacacacaatgttaacaacttacttttaccatgaatgcttcaaaaaatgaagtttagaaggtgtgagtcgcacaaacttattcttagaactttttcttttctcttaaaagtgagaacataaggtcattatttatagagaaaatagttataaccgctgtaatcgattatatcaaagaagtaatcgattagattatcattttaatcgattaatgtgttcttcccaacattggaaagctttcaagaacaatataattgattagattattcatgtaatcgattgaagtgttcttg

SEQ ID NO: 16837 - DNA, 380 bp, Glycine max
  unsure at all n locations
ttcttcctgatgatcattcatgtactttcttgacctgcaccggagaagagcaaaaaatatgataaaagagagagaaaaacagaaagaaaaaaactagaatatatgcttggaggaattactttaaaaaataattaaatgtaggtttaaatattcttaaaaatatgagctttttttagcttttgtaaaaaaaattaattaaaatatttaaaaataaaaatgaaaacaggtgcattaattccaatttattattatttatcattattaaaaaaagttagatattttaaaatagctcagtgtaaataattctaaaaataattaatattttttaaaattntaaatgaacaaacaaataaaagaaattcttaaataatatacaaatg

SEQ ID NO: 16838 - DNA, 413 bp, Glycine max
  unsure at all n locations
nttcctattgttctgagcaatggaccaaaactgattaattcatttgctactgttcctaatgggtgttccattccttacccttgcctgaaagttcgttttgtcaagggagagggagagactttcctgaatgactacactgaggattttcatactgttgacccattttcttctgtgcattccattgaaagatatctatggccaaaggtcagtgcaaaaggcacagagcatgctagatcgtcatctgtccaagtagtgtcgcaacctgaaagtccttctccccttcaatcaccatcaaatgcaagttcagtcccagttgaaattcccgtaattttaaggacttctgacatgatgacagatctccctgaaacacaggtgatatttgtatccataatntattgattgcagaactatct

SEQ ID NO: 16839 - DNA, 391 bp, Glycine max
ttcttctaagattaaaaataatatattcattattcaatattttcaaaaaattataaaaacaaaattattaatctaaaaaagaaaaattaaaaaaatattttgaaaacaaaataatttaaaattactaagagaaagagcaactaagattttgacagaaaaaatgaatgcaaaaataacacaattaaaattaaaaaataataaccattaatgtcttacatttttatgcataaacatatatattacttttaatttaaaaataaaaatattttagtcatttgtgtgaaattaaattacttacaacaaataaatttaattcaattttttaatagtaaaactctttatatatatatatatatatatatatatatatatatatatatatatatatata

SEQ ID NO: 16840 - DNA, 416 bp, Glycine max
  unsure at all n locations
ntatgcttaagtacgtatggcaaaacttcattactgttgttcaagacatacaagcgagcttgtaacaaatgttctacacttggagtgatcacatgcagtcctcttaaacccttaccacccactctgtcatcatgccgagactcaggaaggccaataggtttagccttctctaagtattctgaacaaaattcaatggcttcttctgcaatgtacctctcaacaatagatgcttctggacgatatagattctttttatacccttttaagattttcatgtatcgttcaaccaggtacatccaccatagataaacaggaccacaacatttgatttctctgaccagatgcacaatcaagtgaatcatgatgtcaaagaaagcagggggaaaatacatctccgactggcacagtataattgc

SEQ ID NO: 16841 - DNA, 383 bp, Glycine max
  unsure at all n locations
ttcttgagggggagtgttaaagntgttgtttaataatgttttatatttctagcttgttgtagaagctcatagaagctgtcctgtaatctgtctccataggctaggctgtagtcttcatcatgaactattttttgtactatctgttaattctctctctctctctctctcacacacacacatatatacatctctcagcaaactaaggctgaggatcctttttgtgtgcatattttcatactcaaacatttctagtgtaactacagcacaaaactttattccattgtttggtgagaggggtccagttaaagggaaagaacccgtacttatatcttctgatcattctactaataattatatctgctgatcattctactaataatact

SEQ ID NO: 16842 - DNA, 407 bp, Glycine max
  unsure at all n locations
ntaaacaagggttagaaatggcatttctcattatataaatataaataccagtttaatttcattaaatacaataaatatgcgtttaaatttagctaaacatattcacaagattgataaccaaaatcaccaactctctatacaggacattctagtggtgatgacctaaaaaaaaattagaaaacactcagatccaaccttgcattacaaaaataacatggtctctttacacatcaaaccttctcaagaacacaaggtttgcttcctcagcatttccctcaacctactcaaagatattcatcctagttgagtcaagtcatttttataagcagtcacactcagcttcctctatgtacaattctctgaatggagtntaagcaacaacagtgattctagaattctggcaatcc

SEQ ID NO: 16843 - DNA, 384 bp, Glycine max
  unsure at all n locations
atctttgagccaattcaaacgacaataactttttactcggatgtctgattgagtcccgtgatataacgagacgctcgaaattgaatgttgaagctctgagcgaattcaaacgacaataactttttactcggatgtctgattgaggcccgtaatatatcgagacgctcgaaattgaatgttgaagctctgagccaattcaaacgacaataactttttactcggatgtctgattgactctcgtcacatatcgagacgctcgaaattgaatgttgaagctctgagcgaattcaaacgacaataactttntactcggatgtctgattgaggcccgtaatatatcgagacgctcgaaattgaatgttgaagctctgagccaattcaaac

SEQ ID NO: 16844 - DNA, 385 bp, Glycine max
taaacattcaacttcgagcgtctcgatatattactgtagtctcaatcaaacatccgagaaaaaagttattgtcgtttgaattggctcagagcttcaacattcaatttcgagcgtctcgatatatgacaggactcaatcagacatccgagtaaaaagttattgtcgtttgaattagctcagagcttcaacattcaatttcgagcgtctcgatatatcacgggactatatcatacatccgagtaaaaagttattgtcgtttgaattggctcagagcttaaacattcaactgcgagcgtctcgatatatgacgagtctcaatcagacatccgagaaaaaagttattgtcgtatgaattggctcagaggttccacattcaatttcgagc

SEQ ID NO: 16845 - DNA, 354 bp, Glycine max
  unsure at all n locations
ttgctntgaacaatatatttgtccttcatttaactgtctttgggcttggcggccacactcaacaaagtattttcgacacctactgtacgttgatttgaccaacgttgatatgggaatgatgcgacaatccttcaaaaccttattgatacattctgagaggttggttgtcatgtggccataccgacgtccttctctatcataagccatcgtccatttttcttttgaaatgcgatcaatccatgttgctatggctggactcagttcacgaaatatttctagattttgatcaaaaatgtgcttgcaaggagtataggctgcatcaaattagttatgaataagaattctaagtatata

SEQ ID NO: 16846 - DNA, 409 bp, Glycine max
tctaatgttgctttcgtagagattttacagaagttgtcaatcccaaacatgttgtcatcaattagtcttgcttcaaacaatttccaataagcaaaaaagttcaaaatctcataaatgaaaatatctatagatttggaataagactttccaaaatgaactgaaaatcaaaacaacttacgagcacaagcacacactatagagcttatacgctcttgaaaatcaaattacttttagtctgcaaaagattaacacacagtgactatagattaatttcttggttgaaatatagataattccttatagagtagttcaaaatcttgcttggctatagattaattcattgagaatgaattgtgtggttcagtaatggaatttgtgcatcaacatttacagatcatggttagaacta

SEQ ID NO: 16847 - DNA, 379 bp, Glycine max
tttcatgcattctataactcggatgtccgattcaggcgcataatatatcgagacacttgatattgaataacagaagctctcgagaaattcgaatggtcataacttttcacacggatgtccgattcgggcgcataatatgtcgagacgctcgaaattgaacaacggaagctctcgagaaattctaatggtcataacttttcactcggaggaccgattcaggcgcataatatatcgagacgctcgaaattgaacaacggaagctcccgagatattcaaatggtcataacttttaactcagaggtccgattcaggcgcataatatatcgagacgctcgaaattgatcatcgaaagctctctagaaattcatatgcgcataac

SEQ ID NO: 16848 - DNA, 352 bp, Glycine max
gcttgtgcaaatgcaaacggtattatctttttactttgatgttcgatcgagtcacgttatacatcgaaacgctcgcaattgaaaacagaagctctgtgcaaattcaaacgacaatacattttaactcggatgtccgattgagtcccgtaatatatcaagacactcgaaattgagaataaaagctctgaacaaattccaacgacaataactttttactcggatgtccgattgagtccagtaatatatctagacactcgaaattgagaatagaacagctgagcaaatttaaacgacaatgacctttttactcggatgtccgatggagccccgagcgtctcgatatattatgcgc

SEQ ID NO: 16849 - DNA, 385 bp, Glycine max
  unsure at all n locations
tgcttgatgaaccctgtcattttataggtttattaattatgataagatggtcacaaacacacaattaactaataatcagaatgatcaattccaatatagaagtgaaagcgatagaaaaataaaataactgaataacattgaagaactttattaaaaagaggaacgagagtacatggatatagttacctcactattcgagttctacggngtttaatcaaccatggtcataaaataactaaacaacatacaatattgccttagaaataaaagagatcggaaatccttatagatttggaccccaatttttctccgtgcaattctcctctcaaaagctcttgtattttgtaaaatgtataatgaatttcaaatccatgaaatacaaact

SEQ ID NO: 16850 - DNA, 415 bp, Glycine max
  unsure at all n locations
tgngggctgctgttctcgtagttcccgtgagcttgggggtttttgaagtgagggggaagagtttcgggtgaagaaaacgttccccctccacccctttatatttttcgtacaggggttgctcgcccaggcgagctaacctgtacttttttttaggggtgcattaaccacgtctcccctctcttatgggttagcgttttgcctaacttgagcctacttaagttagaattaggtgtcgattacttatttaaaacaaacaatagtaaaagaaactgcgaacgcaaaggatactgggctgccttgcagcgacgttctctgcttgtttagcgccgggaaggggtggcactaggtcggtcgcgatcctatccttcattcgcttccatccctaagtacctgcaagtaaaagccaaatgatatg

SEQ ID NO: 16851 - DNA, 398 bp, Glycine max
aggctgctgtctttttgacacgctgggttctacaggcgattcatcaaagatttctcataagtcgccaaaccactcaacaatctgttgaacaaggatgttgcattttgtgtttaatgaagaatgtgtggaagcatttaatgatctcaagatcaaactagtagctgttccagtgcttatagcatttaatgatctcatgatagtgaggcttgttttgaagaagacacgttggagcatgagatggaattaacagcctcagccatggtattacagtctcctttggaagaagaatccaacaatgtgatagaatgcctagtcagtgaaaatgaaggagaagagctagcttgtattgaagagctggatggtccagaagataagtctgctggtcatgtgatgtttga

SEQ ID NO: 16852 - DNA, 423 bp, Glycine max
  unsure at all n locations
ntgccgatttaattttcaccggtgaaaggatcattgtggttctgagaagaggaaaatttgattatcctgctttgataaataggaagcttagggaaaatggagagaataaggaggagggaagaacccatgttgtgactgtcgttcctacatggccaaatttcccaccagctcaacaatatcaatactcagccaatatcatcccttctcattacccaccaccctataagccaagaacacccaattatccacaaaggccacccctaaatcagccacaaaacccgcctgctgcacatccaataccaaacaccacccttaacacgaaccaaaacaccaactagggaaagaattttccagaaaagaagcctgtagaattcaccccaattctgatgtcgtatgctaacttacttccatatctactcaata

SEQ ID NO: 16853 - DNA, 388 bp, Glycine max
ttcttctgcttattagtgcacagctccttcaagaatttagcatatcttggaatttgctttattgcatccagcagaggtatgtttacctctacttttctaaatgtttccaatatctccttatttgcctcttccatttttttgatggaaattgctcttggagggaatggaacagggatatgctgcttctgtaaatcagaattaccagtggaagattcacctgcatagaaattgttaggtaacttactctttacatgtttgtcatcagctttttctggagtagagtaaagttgggcaggttcatttgcggatgaagaagatgttgctggttgaggtccttgacacaactctcctgatctcaatgtaatggcactcacatttttaggattct

SEQ ID NO: 16854 - DNA, 446 bp, Glycine max
gagctcattgggtggctatccccacaaagcttacctattttaatttatctcgactcatgctcttcacctaggctctatatttatagagctgtggcacttctctcactcctctgtccgagagctgtcgaagattcttcctcatatgataaacctttcaacgttgagagagccgaatctaaccacttggcgtatgaaactcgtagcccattcatgataaccacgcgatgatgccattacggatgcccctaagttctttatctttcctcaacggacttctccacgccttgtggactctttgtacaaccttgagactttgcgcaccgaaatctctcacaaggaaaggcgagaggctctcttctgttggcactcccctcatggggtaccctaactgtcttatggcaagtgcgggattatagttaataaaaccgctcgtcccatcaacggaa

SEQ ID NO: 16855 - DNA, 393 bp, Glycine max
ttcatgctttggctgctgagcgaggcgacacgctatgcctgtcttgtgcactaaccgagttgtctcaatcttcatctttttcttaaaaataacagtaaagtaaaggaattataatcaatcttagtcaaaatttcctattaattgaacctatattttacaactatcatcgatttttcagaaactgatgttaacatgagttggctaacatcaggctttacaaaaattaatcttaaccaactcatggtaacattgaattttggaaaatttaacgttgtattgtcttatttataatattttttacgctttttccagttcactcatctccctcatgcttcgtctccctcacgcttctggcaacctcgaaccctctgtcactctcacactcactctcgc

SEQ ID NO: 16856 - DNA, 410 bp, Glycine max
tgactggactttaactcaagatgaaaaaaatgttttttttttaccttgttgatcattctatccagcatatacttttcactttttatcaattagtaggccattttgattcctgtctacaatttgcattttattctttagtgttgactcttgactcattgtttttattctaattgttgattctccattatacttctgctcttttagaaattctcatagatacattaattaaaaaaaaaagccaatgcattaccgaaaaaaattaaaaataaggctcaaaaaaaagtcaatacattacccaacaaaaaattactatagattacatcaaaggctatactacgaccggtattgtataaccgtcttactatgtgcacgtactacgccggatatttacaaccgtcgaaaaatccatt

SEQ ID NO: 16857 - DNA, 390 bp, Glycine max
agcttgatttgctggctcgattaactagtaattgactaactaataggaagaacgttagtgtatcgaatcttatcttatccagagtttatgctagctggattttagtgtattcaaattcgatttcatcacatcttatcgttgtcttgatctgtagtcgattttatttcggtaatgggtttggacttgaagtagatttgtgagttttggggccgaggacctatataacagcgccgaagttttgggttagggagttttttgtgggagaggagaatgaatgtaggattttagaatatcagctattattactgctcatgcacactgttgcacgagagaagaacgcattttctaccgatcatctctaatgcatgcagtagttaagagtatgctctt

SEQ ID NO: 16858 - DNA, 418 bp, Glycine max
ttgagaaaggtgatgtgaacaagcggttactggttatatccttcaagaagaccccaattctgagttcatttctttgctttggttgctttccattgtcgaagctcttcaaagcgcgtttgaggattccccaattgaaggtagaccacacaactgaacgtgtgttcaagaacctcgttgcttttgagcagtttcactatccagacaagccttacttttgcaactatgtttctttcattgactctctgatacacactcagcttgatgtggagttgctggttgagaaggaagtgattgggcatgaacttgggagtgataaggaagtggcaactcttgttaatgggttatgcaaacatgttgtcacaaactcaacttggtaccatcacattataaataagctcaacgaccattacatgaacga

SEQ ID NO: 16859 - DNA, 393 bp, Glycine max
  unsure at all n locations
ggtttgcattcttcaacatcttttttggtgtgatggtgaaagtcgggtaaactttgttattcggtgatgtattggcatttgatgccacttataagaagaataagtatcatctacctgttgtgggtttttctggtgttaatcacaacaatcaaaccatagtttatgacacaatccttgtaacaaatgcaaccgaagagacgtatgtttggttattagaacaatttgtgcaagccatgaatagtaagaaactatcaacaacgattactgatggtgatattgcaatgagaaatgcataagaaagatacttttcaaaacatgcctangttatgtgcttggcacttgatacgtaatgcanaagccaatgtaaacaatcctgcattnttgccaatgttt

SEQ ID NO: 16860 - DNA, 412 bp, Glycine max
ctgcggaattggtcttcgccagcgaaacgatctatgtgggttcgaaaagaggcaaaattaatcatcctacttggacgactgacaaaaactggggcaaatgaagagggtgagaataaaggagaaacccatgctgcaactgccattcctatacggccaagtttcccaccaatccaacaacgtcattacccagccaataacaacccttctccttacctaccacccagttatccacaaaggccatccctaaatcaaccataaaacccactttccacacaaccaatgacgaacaccacctttagcatataccaaaacaccaacaagggaaggaattttgcagcaaaaagcctatagaattcaccccaattctggagtgctatgctaacttgttcccttatctacttgataatgcaat

SEQ ID NO: 16861 - DNA, 387 bp, Glycine max
tgcttggttcgaggtacttacccgttgaagatcgaagaacgatgaagaacggatgaagaacgtcgaagaacggttgaaacttttgcgaaattcctcacggaaaacgttacggaaacgtttcggaagcgcctcggcttagattttcttcgcggaaataatttttccaagcaaattcgaaagagagagaagtgcctaaggggctgaaccccttccttcttcacttcctcccctatttatagcaaaataggggaggtggttgccgcccagctcgcccaggcgagccaggttgcttcctccagaagcaacagccttctggaggaatattctggagggcccaagtgggcctgggtgctatttgcacccccatttttactaagtacacccccc

SEQ ID NO: 16862 - DNA, 412 bp, Glycine max
tgccacccagctcgcccaggcgagcaaggttgcttcctccagaagcaacagccttctggaggaatcttctggagggcccaagtgggcttggttgctatttgcacccccatttttactaaatacaccccctgtcttttttttttgtgattcttttttcgtaaagttacgaaaacttacgaatttcgtaacgatacttgttttctttcagtaatgttacgaaaccttgcgtattacataatcattcccttttttgacctacggaatgttacggaacctcactaattgtgcaacaatgcttccttttgatttccggtgtgtcacggaaccttacggattgtgcatcaatattttcttttgatttccagcacgtcatggaatttcacaaattgcctaatgatgggtgccaagcacc

SEQ ID NO: 16863 - DNA, 225 bp, Glycine max
  unsure at all n locations
atgccacatataagaacattcaacatttgcaacaaaagaagaaatgcttgatattntatcaataganagaggcataagacttaacttanacaaaccatcacanatgtagtctttaccaacaaaaacactatgtctagtaataacaactctatntgactcanaaacaaccttgtacccatgtnggactaacanagaagtacctattanattttcctcctaatatat

SEQ ID NO: 16864 - DNA, 412 bp, Glycine max
  unsure at all n locations
tggtgcatatgattatatgctctcactttttgttgcttgntataaacttgaattgtcatgaaccaactctgtcaaaagattaagctgttaggctgttaggtgaagacacacatggttttatgttatatatctaacaatagtaatctattaatatagcttacaggttcattatgcatacaattttaggtccaagtcaacgcatatattttcatgaacgaaattaggacctgcatattcattattagattcatatataaatttttgtccgtacttccatagtgtccattgacacattttcagcatatgattctcttttctatctctttctccacaacaatgagcccaaggagcagagttttcttatgagcatcaatcaagaacgtacaattatttatattacatgatagacaaa

SEQ ID NO: 16865 - DNA, 248 bp, Glycine max
tgtcatgcatttctatgatttacatatacgaatctccatccaagcattttgacaagccacttgtaactcccatcaatactgatattgcaacatgcttaattatatgcagtagcttattctgatcattgcgtgtagtgtgattatctcttccatgcaggtacatgattcctatttgtagtgaaagagaaatgatgggcagcagaacctaactgaggagagtatataataacttttatttgtctttatct

SEQ ID NO: 16866 - DNA, 119 bp, Glycine max
tgacggtggccatgattaatggttaaattattttattcgaacgcctctccgatttgtgttaaagatgagataacagcatatgaccccactaatagaacatattgcccgtatggtcatat

SEQ ID NO: 16867 - DNA, 381 bp, Glycine max
  unsure at all n locations
ttcttatccaaacatatcctttattaaagttatttcttcttattctcgtaggaccatgaatggaggcaagctataactgctgctggatctggatgcgttgcagctttatcacgtgagagatatcttgtgagcaatgatcttcttatagagttccatcaggtatttgacttcaaagaactcctattttgttttcgcttatcgttcttttggtatataacactgtagattgagtgtacacatcacattaccaatttactgtatctttattatatgtcttaattcttgtacatttccacagaagcagatgcaactttagcaagattngcttgtaaaacttatatctataaatttataaaacttaataaatttagtgcatctaat

SEQ ID NO: 16868 - DNA, 396 bp, Glycine max
atgcgtgtctagtgattctagagagagaattgtctctgttccatatagttttgagagattttgctgtgtgaagatctgcagagaccagagcttgaagaggaagctgttctgagagcttgagatgagtttgtgagtggttgtaagatcctagagataaaggagacatcctcaccacttgtatttttgcaatctttcatcttgttcttttctttgatgaaaaggagacttcttggctatggaaagctaaaatcctctgttggatcttccctgtaggtacttgatgtaaatatctttctatctatttaatgatgttttgtgtgttctctgagctatcagcttttcattctagtatgcatttaccttgatcacatagatacatgctatgttagggtcatt

SEQ ID NO: 16869 - DNA, 379 bp, Glycine max
  unsure at all n locations
tgcttcttatccaaggctcatcttggtggtgaagctccttcttccatggcttattccctagtggatggagcctcctctcacctcttctcctttgtcttctgctgcatctccatggtggaaaatcaccattaaaggacctcattgaagctcaaagattcagcctccatagaagccccacaagcaagcttccatcaacaggattagtaagtctggacttgtcaccagtcatgtgcctagtgcagccattatccaagtaccatagtgagtctcttgctnttaggcacacctacaagacaaaatcaattagagagaggtggtacccaattgagattaggtccaatagggttaatttccacaattaattctccgggaatccaaa

SEQ ID NO: 16870 - DNA, 383 bp, Glycine max
  unsure at all n locations
tgtagaatggctagacataatacatggcagggtttggtttggttcaaggataaaagggatgccccacattatttccatgacacaaatgcaaaaatgatgatttggaaattttatgcaaaactggtcatgcatgcacctatgcggacactcaagtgtcaaatttttatggtcatgtgatgctagggctcaagattcatttcctctattttagtcaacccaatgtttccaaaatatgttcttttatccatttgtgcattcatccaagtccatttcgggcgtccgggaaaattttcacagcattcacccttcaggtgtacacacattntttcaaaaactagctatgatcagcgaatttttcttcaaagaaaagttggaagtcatct

SEQ ID NO: 16871 - DNA, 378 bp, Glycine max
tgctttaagcaaattcaaacaacaataactttttactgggatgtctgattgagtcccgtaatatatcgagacgctcaaaattgaatgttgaagctctgagccaattcaaacgacaataactttttactcggatgattgattgagtcccgtattatatcgagaccctcgaaattgaatgttgaagctctgagccaattcaaacgacaataactttttactcggatggcctattcaatgacgtattatattgggacgtttgaaattgaatgttgagcctctgagcaaatacaaacgacaataactctgatgcaatcctccctatgaagggaccaatcactagaaccatgagcaagaggctccaagaagattgggctagag

SEQ ID NO: 16872 - DNA, 405 bp, Glycine max
tcaacattcaatttcgagcgtcttcatatattatgggactcaatcagacatccgagtaaaaagttattgtcgtttgaatttgctcaaagcttcaacattcaaattcgagcgtctcgttatattataggactcagtcagacatccgagtaaaaagttattgacgtttgaatttgctcagagcttcaacattcaatttcgagcgtgtcgctatattacgggactatatcagacatccgagtaaaaagttattgtcggttgaatttgctcagagcttcaacattcaatttcgagcgtctccatatattacgggactcaatcacacatccgagtaaaaagttattggcgttagaattggctcaaagcttcaacattcaaattcgagccgctcgctatattatacgactc

SEQ ID NO: 16873 - DNA, 382 bp, Glycine max
  unsure at all n locations
ttcttgcaaaagttactagctaatttcttacgacagcgagaatatagagaaaaagagcatagtcaatttcaccagttctatgtgataaaactgaaagtcatctagaatattgaagtcctataacaattgacaaacaccattcaaaccttctctaactgtaaccttcatattatataattatttccccaattatgatgaactccacaccagcatggcctgcaataccaaaatgttttgctaaactcatcttcgatttgtagtagatattgttggttttgtggaggaaattataaaaaacagaggagagaagagagacaatacgtatacagagaaaatagaattattctattctaattcanattattctcagcagcgatacaat

SEQ ID NO: 16874 - DNA, 418 bp, Glycine max
tattcaaaatttgcatcagttccctttatgccacttctgaattcttgagatgagtaaatgacgactcaaatgaaaatcttgccaccgttcctgtgcttgtaggttgcagaatttctgatgatatattggcagtttgtgggtcgaaataaatggcagaagaaaggatcattctacaggccaacatttgcaaattcattttgcaacaagttgattgtgttttcctgagatgagtttgctgcatcttttctccgttctggtgagattattcctttgcttctttttcctttatttcttccttcattttgttcaattgccccagatttgcgcttcctagccaacggatttgatagttcttgatccttggtatatacccagcgatatccgaatttcttcacctcagcatgactctttccactct

SEQ ID NO: 16875 - DNA, 392 bp, Glycine max
  unsure at all n locations
ttcttgttgttcccgaacgataaagggcgtagaatctatctatgcgcgtttacctactcagggtgttgttcctgaattataaaggttgcagaatctgtctctgcacgtttacccactcaggttgttgttcctgaatgataaagggcgcataatctgtctctacgcatttacccactcagcttgctattcctgaatgataaagggcgcagaatttgtctctgcgcgtttacccactcagcttgtgtgtgcggataaccgcatgtcaagttactccagtgtcagtatgacagaaattgtctgcgcggaagatgacgtanatctccgcgtgtcaacaggcttgttggccgcgattgacaaagggtgcagaagacgacgttagtctctgcgtgcta

SEQ ID NO: 16876 - DNA, 420 bp, Glycine max
  unsure at all n locations
ntntggagtagaaacatgggaccaactcattttattttttaaaggaagtcgtatctagtcaaggtctgagagaccatacaagtttcctaacgatttctaattatgtgggccattaagtctatcatatgctgacaatagccgagaagcccatgaatctcttcgggggcggagtaggtgtctgccatcgccttggccttggctaacaatcggggaagttcttgactcccgttcaaggtaagagcaaaccgatccatccacatggttgcctcttggtgtaaagagtcgatcacccttcctctagcctctttttccgcatatacttgggcatactcatccgcgattctatgctcgtgggccgtggctagacccaactcttcttggtacttggcgatgatagctaacatgttggtctctgtctcg

SEQ ID NO: 16877 - DNA, 433 bp, Glycine max
  unsure at all n locations
gctttggctcgctatcttngcgatcagctcgtcccgggtcctctgagtcacctgcggctgcatcttctagttcctcagaatcttcttanatcccacggtanatcatggacagtatcttgtgaagtanaaacaaatttcgagaagatcgaacggtgaacgaaggctgngcagcattnttaccgatgcagctccatgtagttntctctagaagcttcattaagaggcttctagcagactccagacatcttctcanagatcccaacggtcagatcatggaaaggtgtttgtgaagtngcagatccaattcgagaggaccaacgggtaatgaatgctggcagcgttntaccgaggcagctcatgtagcttctctagaagctcattaagatgcttctctagaagctcctcgtggctctctgcacgcttctcananggc

SEQ ID NO: 16878 - DNA, 420 bp, Glycine max
  unsure at all n locations
tatctatatgtattgaacaacacatcaaaggtcattccatacatagatgctcacaaaaaacatgtcataaatactcatcgaaaaatgaacaagatgaggttgttgcaaaagcacaatagaagtttcatcaactggtttagacaaacaatcttcgcagatgacagtgcttcgaagacattcaaattgttagctattggtctaaatctgaatgttccaacttggaagggatatgatatcaatcattattctttctacacaaagtcacaagatggaaacagtagcacgcagaacagtggggttagtgttgacggtcattcaaatctgatggaaccttgcttgtggagcttctatggaggctggatctttgagcttcaatgaggtccttcaatggtgattntccaccatggagatgccgcggaa

SEQ ID NO: 16879 - DNA, 393 bp, Glycine max
ttctttatccccctcaccccaccccaccccatcttgtgtaagtcaattttgcaggattttttgtgtcatttaaggtcctgatgaaattttgaagaggatgcagactgctacatctttccaatgttccataatttgtagttaatccttccatacttcataccttatgcccatttttaagaccaatttatcttttgcatccaatatagcttcaattatttggagttctcttttgtggcttgactatatgttggtttttttggatgaggtgcaaagtgattttgcaacataatgcactttgtcttgataagatatattttcttgactgcaatattgcttgaattatctagccattaaacattatgctctgactctagtttttttaactcgatataa

SEQ ID NO: 16880 - DNA, 419 bp, Glycine max
  unsure at all n locations
tgcctaaggatagccagaggtgtcactacggaatgcattatatatgtgcagttgtgatgaaggcggcgtatggaagatgcatgaagacatttataactttttaagaaatgtttagacaacgtttatcattttattttatttgacaaattttattagacatgttttttatacaagtatcggacctgtatatcataggtcgtgaattaaaccacaaaccctatattagacacgtagtaaataagtagctaaatcttcactcttcacttaaatcaacatagtctagtttcaacaccatcaaatntttgtactgttgcattctactaatatatggagttggctactgctttgcctgaggatgacaatgtctagaccataacaaagctagaggcgataagggacaacagtctcttaaaaaagtc

SEQ ID NO: 16881 - DNA, 336 bp, Glycine max
tgcttgtttctgagacgagcttttgcagatagtcagatagaagactgatgatccaaactgaatcatgtggtagtgatgattacttgccagtccatatgaatctctaaggtcaatctaactaaccactatagttgagtgctgaagatcatgtgcgtatgcaaccgagggtatcatgtcattacatgtttgagagagtgaaggtatgctctaattcatctatccatcttacatgcaagctccgactaattccagcataagactacattttaatgatactagaatagacaagactagcatgttacatcatgtcatgaatattggagaacagacttgaaa

SEQ ID NO: 16882 - DNA, 379 bp, Glycine max
atacaatactcaagctttgaactaaaatagactctgtacattctaatactttctgttgtgttgattacaaaccatttcatgagacttgattatctcacaatgataaaatatatctccccctcaaccaggcttcctacttataggcaacacactataatgtttaacatcttggcgctaataactacagaatgtagcctaacttactaaaaaagggaaatgtgtgaatactcatgatgatcatttcaaagttctgaatctcatgcgtggaattttctattgggagaaagtaaatatcttatggtattgcaccatctcaatacatatggtacttaatttgtacagcctttcatgcactgttcagctgataaagtctatctct

SEQ ID NO: 16883 - DNA, 387 bp, Glycine max
ttcttgctttcttaaccactaagagtagaagctaaacataaggcttaaccgctccaaatagaagcaaaacaagcttagctgttagagatagggggaccaacatgaagacttaaccttaaagcttgaagaagtttttcttttacatgcctacctcacttgagtgacatttgtattgattgttgtattgtgtgttgcatcttaatctctattttttcatatgggcatcatgcatcatcatttaggagtaagaagaaaggttctaaagttagaaaatttcttcagtgtttaacactctatatcttaatttattatatgcatgattgtaatcgagtacacagttcagatgagacaatgattggctttttacgagtcattgctttaattgat

SEQ ID NO: 16884 - DNA, 364 bp, Glycine max
  unsure at all n locations
taaggctttagcgggtacaagatggccaatgttttttgttgcagctataaggagattccgtagaaaaaacctgtcagcatggcactcaaacatatccacattgagaacaatcagttgaaacagtggcattgtgcctttctctaataatctcaacaaaaaacgaaatcaagagacataaacactagcattgggcctttctctaataatctatttctataacgataaaacgcagaaaataggcataaacgacgaaaaaacacatgtacacatgcatataaaaaacaaatgttaaccttttaagagaacaaaaccttgttgccgtcatgagagtgacactgatataggttgngcaaaaggtttcaat

SEQ ID NO: 16885 - DNA, 369 bp, Glycine max
ttctttaacaaggctagtcacctatatgttttttatacttgaaagtaatatgacatagttaatgaagatctcggatagcaatattttgggcagtatacatcttaagtcaacccccaggttttgtataaacctgaaaacttagtgccgaggaatgtacgaggggtagtagggtttattctgcaaaaagagtttacctggcatctgaataaaaatttatgttgattgcagtatgctggattatgtcatttcttcgggtttttaattaaaatggtcactagtctcatttattttttgcttgcttatagaaatgagctctaattgattaatttcttagtttaagacattcttaaggaagacagtaatgttctt

SEQ ID NO: 16886 - DNA, 416 bp, Glycine max
tcttatccaaggcaattcttggtgttgaagctccttcttccttgtcttattccctagaggatggtgcctcccctctcctcttctcctttgccttccgccgcatctccatggtgtaaaatcaccattgaaggacctcattgaagctcaaagatccagcctccatggaagctccacaagcaagcttccatcaagtggtaatcaaagcacaagagcttcaagtaggtgctccttaaacctccattaattgtcttgctttaccttttcttgcattgttgttacttcatttttctccatgtatctcctcacatgtcttgtgataaatattgttaacatgattctttagagtttccaccgattaaacttgctataaaagctagatttgattgtctatggatcaaaattcttgctcttgttct

SEQ ID NO: 16887 - DNA, 392 bp, Glycine max
  unsure at all n locations
ttatgctttctttatgaagntttctggctttctaaaccttgaaaacttgtgctattcatcttttcattctcttatccctttgccaaaaagaattcgccaaggactaaccgcctgaattcttttgtgtatcccatctcccttgtcaaagaattcaaaacgacatagactgagaattcttttgattcttcccattccctaatacaaaagtgttcaaaggactaaccgcctgagaattcttttgcatccccattcacaaagtatcaaaggtttaacagcctgagatctttgtctcaacacattggagggtacatcctttgtggtacaagtagagggtacatctacttgggtgtgactgacaacaagagagggtacatctcttgtggatcaattct

SEQ ID NO: 16888 - DNA, 365 bp, Glycine max
tgacgaagtttctagccacagagtatgagattatatgtgtcaaccgctcacatccatcgacgggcaaagaggacaaattctgaaagcaagaaagtgggtgagtccatatcctatggatattgattgactacagcttcaaggactccaagttaggatactcaacctgtcaacattatcctgggtagattatcactcacaagtaactaaagaacgcctttcattacttctctaactaactcaagtaaaaaatgcccattaaaggcaaatgatccaattggcttgttgagaactggcaagtaaactctcctgttacatgaccaccatgtctaagagacaatttgtatctctctagacaatactattga

SEQ ID NO: 16889 - DNA, 378 bp, Glycine max
tttcttaattagcctcactttaaacaattataaggccaattattttgcccccaccctacactaattaggccaagagagcatcgctatacgccagcccaaagacactcctgccatttggttttactttttttaattttttttatcgatatgaataaaaaaaaattataacaattaatgcacgttcaaccagttagacgtactcctttaataaagttatatgtttaatcttattgtaatatataaattacaattaatccatattagaatatatctgaaacaacaatatcttaattcttatgttattatccagtctcacgttaataaaatttattaaatgttctatgaaagaaaatcaaaattacataattaccatacctc

SEQ ID NO: 16890 - DNA, 419 bp, Glycine max
  unsure at all n locations
tctcgaagcagtccagtctaattaaggcactagtttaatttactgtaatttaaaacgtgcaacccttttaacaaaataataaaaacaatggagatccctcagcagacaaaagaatgagtaaaattaattaataaccattaaccaggtgaagcttgtgatcgttattaattagaagatataacttgaaaaggatatcggagtcatcaaaatcatcgttcaaacagatgaagaaaggatattaagaatggaaaaccgaaaacactatttacccattaataatcgagagtagatatatctggctggcgtgctaataaaagctgcctcagctgcgaaacatgtgtattattgtgtgtatattttgagctacaaaaggtttaaacatgacgtanaaagtacattcccgtacggagtaaagattt

SEQ ID NO: 16891 - DNA, 223 bp, Glycine max
atcccttctcattatagaagctagctcgctttgtatcctctatctggcttaatgttgacatacacactttgttgtggatctctatatgagatcatagaccctctcatgcaagcttctttacaaacatctgacctagattccccttacttacaacaaagagaattgtctagtgggaagggaattacgtctaacggtgttataagatcgaacccatagacaacct

SEQ ID NO: 16892 - DNA, 344 bp, Glycine max
ccctcacggtttcttgttccaacgcctgggcagttgctttatgtgaatctcctagttcaggaccctcctttcagataataagagctgctgatttgaaccttcacttgactatttgcgctagcaccagttgctccctaaaggcctgcacctctttctaattcctcaggggcctcaacttcctcccttctatcggtcctgagaactcgggagccaattcaaacctttaacgtgggcttcttaccaccttcggtatccaccgatgtggcccattgtcactgcacctaatgtcatatccttcttttcaccacctaccatgccttgataccatatgaaatgtcggcccg

SEQ ID NO: 16893 - DNA, 370 bp, Glycine max
tgcttttgttcctttttataaaaagagaagttctgaaactcatcacgttttctaaaaaggccttgaggtggatccaagtgctctgatcattcattagcatattcatgatttggtggcatgctcaccattgtttctttctttagggaactcaccataactaaaaaagcgcaaaggcacccctataacacccgatccaaaagtaagatggataacgaagagggagtgcaagaacagatgaaggccgacatgtcggctttaaaagatcagatggcttccatcacggaagccatgctaaaaattcaaaaatcaatagaagacaatgctacgacagttgcttccaatacaactagggaagcggaactggtgctac

SEQ ID NO: 16894 - DNA, 399 bp, Glycine max
tgcatattcagcctgacgatggatcgagagttttgttatttagggtacaacataaaatacaagagcacgattgattagagaaatatatttctatgcatcagcttgtttgttagaaagacccaacatatctacctactgctatcattttatttaccttgcattttatagtttttagcatacaagtttagtttaaattttgtttgaaattatcacttatacatgttctctcaacaatgctttgattctaaacctaattcaggctaacattagttccttgtgttcgatacttggattcatccgttctaaacctaatccagtaaacccccattgaaatttcctcgagacataaatgcacaaaaggtaactgcagtggggattcatcattggggatcatacaac

SEQ ID NO: 16895 - DNA, 380 bp, Glycine max
tgcttctatataagctgaaccattttatcaataaacacaagttgagttttattcagaaaattagagtttatctcttttatcttagtgagagtgattctcctaaattcttgagtgattcaagaacaccttggctgtatcaaaggactttcacaacctttgtgtgttgccctcgctggaaagagtgattctttccttcctttcatcatcacccttgttctttcaaaccacaattccagaaaatccacctctgcccagaattatctcgtggccataactcccattttacgcactcaaattaagtgattcttgagcctaaattgaatttcagaacgagacctttcacctcgttttggaatcacctcatttggagccctgtagct

SEQ ID NO: 16896 - DNA, 315 bp, Glycine max
  unsure at all n locations
acttcttgtgtctctccccattatataccaacattttttttgagcacttcatagacaggtgctgcccatgtgctaaaatccttcacaaatcgactataaaaactcgctaagccatgagtcgcaacctacccttcggcggtagggcgatgcctgactctcgcgatgcgtgatccacaaaaggaatacgcgcggtgtccccactaatgattatttgaagaaaacgtcggaccaaccggaaaagaagcgatctaccaactnttaagtgaaaggctcgggagttgtatttacgcctggggaaagtattagcaccccaca

SEQ ID NO: 16897 - DNA, 391 bp, Glycine max
  unsure at all n locations
tgctttgaaatttgaaaaccctagcatgggataatctattaggcatcctaagagtttatgaattccatcttcagaactgagataatcaaccaaagaaagatttatttgcccttaagtctagagagacaagctccaaaagattagaaaagaatgcttctctaaatctcttaaagtgaagatagattattctgatgggtcaaacaatagttttggagattccacatatgatgaagtagctctcatgtctatgaggttcaagcaaatgatgaaaaaganagggaagttccaccattcctccaaaagaaaggacataagattcaagatgaaatacgaggaggatagcattgaaatcatctgctttgaatgttgaaaacctgggcatatgaaaact

SEQ ID NO: 16898 - DNA, 424 bp, Glycine max
  unsure at all n locations
tgcttgtggggcttctatggaggctggatctttgtgctttaattaggtcctttaatggtgattttccaccatggaaatgcagtggaaggcaaaagagaaaaggtgagaggaggcgccatccactagggaacaagccatggaagaaagagcttcaccaccaagatgagccttggataaaaagcttggagaggaagcttcaatggaggaaaagaaagagggatagaaagggagaggggggagcacgaaattgaagtaagaaaaaagggagagaagtttaactttgagttgtgtctcacaagactctcattcatcaaagttacaacaagtgttacacatgtttctatttatagactangtagcttccttgagaagctntcttgagaaaacttccttaagaagcttctttgagaaaacttccttgaga

SEQ ID NO: 16899 - DNA, 369 bp, Glycine max
  unsure at all n locations
tttctttgtttatatggaagccctgcaacaaactctagctctgaaaaattggaaataatattgtaggaaacatcaagtccttcaagtgacttcaaattctcaatcccatgcaaagtagttagagcattgctcctcaaaactagtttaacaatatgacaggaaacctgcaaggtccaacacaattgtatatgggtctccagagcaaatccctaaatgaaaggcatacaactaaaacaaaagatattaacttttctacaaataaattgctntcattgcatttaaggatcctgtcattcaactttcaatcctgaaatatcaattcattctccatgaatcgcagaagtcagcacagcaagcaaataaagacat

SEQ ID NO: 16900 - DNA, 418 bp, Glycine max
tcttcagatgaacttccaaccccactgctgaatgatgcttcgtgagacgaatcaagctctcttgatgaaggactggctacaaaggaagaatcatcaaactcaatgtgtgatccagtagcatcagatggaataagtgttccaagagctggcattaggtcaacaatgtactccctgaaattcatatcattatcaatcacaacttccagatacataataacaaggctttgcaactcctacttaagaaacttacaaaaagaatgagagaacattcagctataggcaatattaaatgattaattgaaaaaatgaacaaaatgctacaacaggaaagtctaaccaaaacaaaagatactagtaacgtaacacatcttcaagtcaggaacaatataatataacatagcttcaagtctgtacacag

SEQ ID NO: 16901 - DNA, 392 bp, Glycine max
ttcttgtctcagcgtctatgcgagacagaaaccaacatgttagctatcatcgccaagtaccaagaagagttgggtctagccacggcccacgagcatagaatcgcggatgagtatgcccaagtatatgcggaaaaagaggctagaggaagggtgatcgactctttacaccaagaggcaaccatgtggatggatcggtttgctcttaccttgaacgggagtcaagaacttccccgattgttagccaaggccaaggcgatggcagacacctactccgcccccgaagagattcatgggcttctcggctattgtcagcatatgatagacttaatggcccacataattagaaatcgttaagaaacttgtatggtctctcagaccttgactagatatga

SEQ ID NO: 16902 - DNA, 418 bp, Glycine max
tgcttgtggggcttctatggaggctggatctttgaacttcaatgaggtcctttaatggtgattttccaccatggagatgcagcggaagacaaaggagaagaggagagaggaggcgccatccactagggaataagccttggaagaaggagcttcaccaccaagatgagccttgcataagaagcttggaaggatgcttcaatggaggaaaagaaagagggagagaaagagagagggggagcacgaaattgaaggaataaaagaaggagagaagtggaactttgaagtatgtctcacaagactctcattcatcaaagttacaacaagtgttacacatgcttctatttatagactaggtagcttccttgagaagcttccttgagaagattcctaaagaagctagagcttagctacacacacc

SEQ ID NO: 16903 - DNA, 391 bp, Glycine max
ttctttatctagtaaaatgcaatcttccactttgcatttaaaccacctaaaccttagtgataaaaattcaatttccaatatcaatgcaccttatcttttatcttggaactctacaaaaccttacacttttatctttctataatttaaaattctcacttttcttttttactttttgtataaacttgtgggaatgaaattttagtagtgaatgaatatttgagaattggagaaactagaagttttggaggaagaggtctactgtataattgatcaattcttgttttttttttgcttgatacagaaaaaggaaattgaaaaataacaaaaaataattgaattctaacatatatgcactgattgaactaatcatctaaaattgtgctcgcagtag

SEQ ID NO: 16904 - DNA, 409 bp, Glycine max
  unsure at all n locations
ttgaacaatatacttggccttcatttaactgtctttgggcttggtggccacgctcaacaaagtactttcgacacctactgtacgttgatttcaccaatgctgttatgggaatgttgcgacaatcctttaaaaccttattgatacattctaagaggttcgttgtcatgtggccatatcgatgtccttctctatcgtaagccatcgtccatttttcctttgagatgcgatcaatccatgttgctatgtctggactcagttcacgaaatttttctaaattttgataaaaaatgtgcttgcatggagtgtaggctgcataaaattagttatgaataacaatnttaagtataaatgaaagtaaaataaacgtgaccatcaaatatgaaatcttacccaatttcttcaacatttc

SEQ ID NO: 16905 - DNA, 393 bp, Glycine max
ttcttgtgacgttaaaaaagcacttgctgggaggcaacccaacttttctttcccttctttatcttcatttttatttcttgcatgtagttaggacatctttcttgtgattgtgattgatttcagcttgtttagtaatgaacaaaaagggtttttaaattgtgtgtgaagagataagcagaaaatgacttagaaaaattttcagattgcttatccgctaagcacaaaccttgtgctaagcaccatctcttcatgcgctatgccgagcttgctcgcgctaagcgcaaagacccctgattgattggctgaatggttcagctaagcgcacatcattgtgctaagcccaacatcttcactataagttgcaccttaagcaatgggcttagagtggatgat

SEQ ID NO: 16906 - DNA, 425 bp, Glycine max
aaactcagcttcttatccaggctcatcttagtggtgaagctccttcttccatggcttattccctagtggatggcgcctcctctcacctcttctcctttgtcttccgctgcatctccatggtgtaaaatcaccattaaaggacctcattgaagctcaaagatccagcctccatagaagccccacaagcaagcttccatcaaaaccttttgctatttcaatttggaattcccttcctaaaatactagagatcttcttgatgttgtatcttgtattcttggattgttgtcttgaattaaacatgagaagcgcattttcataagacatcaaatcatcacgatcatatggcgtcatcaaaacatcaaatgtaaagtctttgcttctacaatctcaacgtctttgcttttacaagattgaatggtggatgc

SEQ ID NO: 16907 - DNA, 329 bp, Glycine max
  unsure at all n locations
ttcttattcttgntgagtactttgcagtcctgtattgctcctgcaaaataactcatgcctgcaacactggttttgttcctaccttgaacgagttgaaggcaatctgtctcaaaaataacatttataaaatagaactcgcctgccacttgaatcgcccacttgtagcataaagcttctgcagtccttggttcatatacaccaccgtaaccattatggtagcagctcccagaaccagtttttcatggtctctggccactactagccccattcccgtcccttgattgttatgggcagatgcatcaaagttaatctttatgcactgtagaggt

SEQ ID NO: 16908 - DNA, 411 bp, Glycine max
tgtagataacactgcggctgcagcattcatttcttttcttttccaacctccatcacccttgttgcccaaattcctttgatctctaagtacatcaaccaatacacgttccatttccaaattccatgtaaaataacttcttgtattctcattattttttcctaaaacttttcttttgtccgccattttttcattacatgactccattgaagataatgtcacttattcaacctgcacataacaaatagtagatatgacctactttattcatttgactagtccactgcacaatcatagaaaatatttcaagcaaatgttttatgcaatagcacagtacataaaagtctatcttcaataaaacagtacaatagtaactaagcacacatagtttgtcaccaatagcagattacattt

SEQ ID NO: 16909 - DNA, 382 bp, Glycine max
tgccaccaaacgcgtgatgggacattaacaattataaaaaaaagaagaatggtgagactgagcctaaaaccagccgggagccgagcgacgcagcagtttttattacatagcgaccggggtggagaggcaccaacccaggacaagaacgatcgcaacaacgaccgtaatatatcgggaagcacacaaccaactataggatcgcacgagaaccgcacaccatgggagagcgataacgggggaagaagaagaagggaagccacaagaaaggagaaacaagctggggagagccacgacgcggtcaggccggtgttcggcgatcgacaggagacggccaccgcaaaggagccacacatgccggagacagctcaaaaggacgcggccc

SEQ ID NO: 16910 - DNA, 465 bp, Glycine max
  unsure at all n locations
gccgtgccttgtactcgtttgcgncntccanaacacncgacccctggacatatacttggccttatagaactggctttttttttcgcggtcaacctcaacagagtgctatcgacacctattgtacaggggattctccaatgctcctatgggaatgctgctaccatgctttaaatacctattggtacatccatagacagttatctgcatgaggccatagtgatgtccttctctatcgcacgccatcgtccttgtttcctttgagagctcatcaatccatgtagctatagttggactcaggctacgaaaatacttctaaattctgataataaaaaggcctgcccggagcgtatgctgcatacaattacttttgattcaccattctaactctagacgaacagtatactaatcgtgaccctttcatatgaagtcttatcctatcttcttaacagtttttcttgactgccg

SEQ ID NO: 16911 - DNA, 386 bp, Glycine max
ttcttgcattcttctcccacaattttctataaatagggggagaagtgaagtagaaaacggttcatccccttacgcacttctctctctttcgaatttgcttacgaaaattgactccgtgaagaaaatccaagccgaggcgcttgcgtaacgtttccgtaacgttaccgtgagtgatttcgcgaaggttttcgaccgttcttcgacgttcttcattcgttcttcaccattcttcaggcttcaacgggtaagtacctcaaaccaagcttttctgttcattctatgtacccgtggtgagccacattaggtttcatgcatttgtatgctcgatgcatttactttatatacccgcttttgacatgctgaagccattctatttaagtcatttc

SEQ ID NO: 16912 - DNA, 400 bp, Glycine max
tgtagggttaaagtctcacggttgtcacgttctcgtgcaacaattgttagctgtggctatacgagacatcttgccaaacaaagtcaggttagcgatagctcgcctatgctttttcttccatgctatatgtagcaaagtcattgatccagtcaagtttgatgagttggaaaataaggccgcaattatactatgccagttggagatgtattttccccctgcttttttgacatcatgattcacttgattgtgcatctggtcagagaaatcaaatgatgtggtcctgtttatctacggtggatgtacccggttgagcgatacatgaagatcttaaaagggtatacaaagaatctatattgtccagaagcatctattgttgagaggtacattgcaaaagaagcca

SEQ ID NO: 16913 - DNA, 488 bp, Glycine max
  unsure at all n locations
cgtgcctttgatcgtcgacntttgatagcataggacncacataggacgaatgacatgctcgtaagcggagatgctcgagatgcgttctgcatgcacgctttctcgatgacgtggagtataatccaaaggtgattcatgctaccataaccaccttatgcctgtagaagaggcccttagactatatgtgacgcgactgaccttgaatggactctcacatgacaattgccttacagacatttaccactgcatcatatgctgatgactgtcatactaaaccgtgctattaataacctagaagatgctctgtacattcaaccttgcattaagaaatgcatgacgcgattacttccttaactgacccgcaagataaagcaaattttattccttgctcctaccggaccttaatggactcgtatgacgtctccatagtgagaggcctacgagcgacaagactaaaggaggtaatggcagttgatatgcgatcgtct

SEQ ID NO: 16914 - DNA, 478 bp, Glycine max
  unsure at all n locations
agccagctggcatgatgcgtcgattgacnccactggacanacangncacactatatgaaactccagctataacagggcctgcacaatttactttcataaaatctatcgacagcgcgtgaacgactttatgcaccttaaatgcaaatgcttttttggataactctgctaggccatgcacataggggcacgggcttgctgataaagaccattgttcaatgtcacgaatcatatcctaccagcgagctccagttattacatcacacggctgagatagggacccactcagagtgtctgtttattcaccatgccagatgcatgtggcgtaattactcttaatcccgatccacaatagatgctctactatgtagttccacttttagcgacttctcattatacgataaaagccaagacaataatctctttcgaccgtaacttaatcgattagatttgaggccaatcgcaacaactgcttgacgcc

SEQ ID NO: 16915 - DNA, 372 bp, Glycine max
ttcttatgttgctagcatatagcatatcatcaacatataacaccaagaatgagtatttactcccactaaacttgtggtatacacaatcatcaactgcatttgcctcaaaatcatatgaggtaatgacttgatgaaacttgtaataccattgatgggaagcttgtttcaaacaatagatgaatttatttagtttgcaaaccatagactttgagtcacctgatacaaagttttttggttgcatcatataaattgtgtcttcaatgtcaccatttagaaacgtagtcttaactacaatctaaaagttcctatagcctccatcgcaacctttttgccatcgccaacaaatatgaatctttcatcatcacttgacag

SEQ ID NO: 16916 - DNA, 405 bp, Glycine max
  unsure at all n locations
nttaaagcagcttttagatactgcttccctcatcagacctgtcaagccttcagccactagatcaaaaagaaggggtgccaaagggtccccttgtctcaaccctctttgaggtttgaattcagaagttgggctaccattaacaagaatagatatggaagctaaggtgagacaagcccttatccacctaatccatctctcatggaaccccattctcctcaacatatagaggagaaaatgccaagatacagaattataagccttctcaaagtccactttaaaaaccatgcaagacttcttggatcttcgagcctcctcaatcacctcattagccaccaaaactccatggagcaattgtctgccttttataaaagttgtctgcctttcatctataagataaggcatgac

SEQ ID NO: 16917 - DNA, 353 bp, Glycine max
agcttcctgcacaatgagtcaatgactaaattattaagagagttactcaagctaccataaccttatcatgcctgtgtcagtggcacttacactaatcaagcgtcaagtaccaaagaagcattagaaaggaaagttagtttacaataattatagccgcaagtaatactgagtactgacaaaaaaaaccatactaagaataaattagaaaaggcacggaacagtctaccttgcatcaggaattccatgacagattacttcattaactgacctgttagataaagcaaatttcattcttaacatataccacaacgatatgagaaaaatatgacattacagaaggaaagtacctacgt

SEQ ID NO: 16918 - DNA, 420 bp, Glycine max
  unsure at all n locations
nttgtaactccacctatatctggccttcacattaaccagacttaataccattgacaacagcatcaacaaatttttgcacctcgaatacaaaggcttctttgaatcactttgcaatgtatcatacataggggcatgtgcttgctgaaaagactcttgtccaaggtcacgaatcatatcctccaagcgatctccaatttctacatcaaacggtttagattgggacccactttgcatgtctgttaattcaccatgccatatccatgtggtgtaattcttcttaatcccatcacacaatagatgctctcgtatgtcgtccagtatttgtcgtcttccattcaaacaattaatgcaaggacaataatatttttcgtcctcattcgatcgacttctttcggaggcaaattgcaagaactgtttgat

SEQ ID NO: 16919 - DNA, 384 bp, Glycine max
  unsure at all n locations
tgcttgatcaagggtaactttgatgcatccattaaggaagggagaggtacaagctttggagttatcttcaaaaacaacaatggagaagtccttgcagcagctgcaaagatcctgccttattttccagcctcatattagggaggctatggcttttcgctaggccattgaaactgctcattcactacttctccccttaaccatctttgaaactgattgccggagattattccttgcttggaaagatagatcctcagctgattatagctacttcgatggaatcattcatgctatgcccatgtgctacactaggattcttcagaccttttaatagagctgtgaattctctagctagattagctntttttattaatgattntgtttgga

SEQ ID NO: 16920 - DNA, 421 bp, Glycine max
  unsure at all n locations
tatgctgcaaacatctacaacagacctcctcaacctcagcagcaaaatcagccacaacagaataattatgacctctccagcaacaggtacaatcccgggtggaggaatcatcccaaccttagatggctgaatccttcacaatagcagcaactttgaaagccaatagttgcttagtgttaaaaaaaatatagagtgcaacaattatttaataacactcggcgagtgcataaacaataaagctgaagtatagagtaactttgctttgcaaagaaaaaataatgaaaaattaaatgtatagtccaacaatttctgcaaagtttcacgttagagattntctcatttctttatgattnttttcatgtgttactttgagatagagattgccttttataaaattcagtaaatgattcattgtgggatt

SEQ ID NO: 16921 - DNA, 384 bp, Glycine max
ttctttgatgcaacatttggagaggttaatgaaacaacgagatgatgcgctccatgagaggttggatcaaatggagaatagagatcataatgaagaagaaaggaggagaagagggaatgatggtgttcctagacaaaaccgaattgatggtattaaactcaacattcctccatttaaaggaaagaatgatccggaggcctacttggagtgggagatgaaaatagagcatttttctcatgcaacaactatgaggaggaccaaaaggtgaagcgtgccgccatggagttttccgactatgctcttgtgtggtggaacaagctacaaaaggagagagcaagaaatgaagagctggttgatacatggacggagatgataaagatcatg

SEQ ID NO: 16922 - DNA, 385 bp, Glycine max
tcaacattcaatatcgagcgtttcgataaattactgggacacaatagaacatacgagtaaaaacttattgtcgtttgaatttgctcagagctttggtattcaatttcgagcgtctggatatattacgtgtctcaatcagacatccgagtaaaaagttattgttgtttgaagttgctcaaagcttcaacattcaatatcgagcgtctcaatatattacgggactcaatcagacattagagtaaaaatttattatcgtttgaacttgcttagagcttcgataatcaatttcgagcgtctcgatatattaccggactcagtcagtctaccgagtaaaaagttattgccgtttgaatttgctcagagcttcggtattcaatatcgagcg

SEQ ID NO: 16923 - DNA, 390 bp, Glycine max
ttcttattgtgtaaagttaaaatgcatgttaaccttttattctttgagcataaggcagcgatggtgtctcagctaacttgctagtgttttttttgctttggcttaatattatttgatcatgctctttagaacaatatgtttgtatccattgctcaatttcatcttaattgatatttctagtcactttcatggccacttgaaaatttattaccacaatttcaaatatctatgctgctcttggcttgtttttctttagagatatattgcaatattacaacatttcaaatgtcagtcagtgtttttgacagtgtactttgcatactgatgataatgttatgaacatggggcttttctggaaaagattagatcagacaatcctgcgataccatg

SEQ ID NO: 16924 - DNA, 357 bp, Glycine max
agaatactaagcttgtcggatctcaaagatgtgtcacagggcaccaatctttatcaaatcatataacaagctctgttgctataagagggtttctaaactgggtgcaacttagatagacaaatgaagatggctgtcaatggcatcaagaacaaaggtgacagacatagatgattatttaattattattatttatacaacattttattgcttcgacatatatatttttttttactcgacggagtgtttcatttacttattttttgtattccaccactatttaaacaacatgtgtctaatacctataaataacaactgttcgattgattcataacacacatatttggatttacaccacta

SEQ ID NO: 16925 - DNA, 377 bp, Glycine max
ttcttgtcctacaattgctagttttttcattgacagttgcccaatgggtatcatctgcattgatagcaaatctcacatccttggccaaacgaagatacatataccaatttaatataaatggagaataaattaccgttctactctgatctacaaatgctgctgattccctcacttggccattagtgatgcctggcatatatttgcgctgtttctgtactggcacagactctggagataaaggttccttgatgtcttccgcatagtgtttcaatgaatttggagagtttccctgttgacagagagcgatgataaattaacagctgacaatgaaagctatatagatccgatcaaaaagttagtctcatagataaaatcaa

SEQ ID NO: 16926 - DNA, 405 bp, Glycine max
tctttgttcctatggttcagtaaggccaacaatgttcagcgcccagggggccgccgaggaacaggtcctgtgcaacaaccccaacagccaatgccaatgatgcagcagcaggtctgctcttgcacagagtttccaatttttttgtttgtctctcacgttactcatctgcatgcatgcctgatggtgagatactttcttatttgtttgttagatgcttccaagggggcgtgtctatcgttaccctcctggccgcaacatgcaagatgtcccacttcaaggtgtagctggtggaatgatgtcagtcccttatgacatgggtggtctgccaatccgcgatgctgtgggacagccaatgcccattcaagctttggccacggctcttgcaaatgctccccctgaacagca

SEQ ID NO: 16927 - DNA, 200 bp, Glycine max
cttgtggctgagaagacgaagatgaagctgacggaagctgcacaccctgaagcattgatggcgtgctccaccgtccatccccgttcagacgccacgtgaagcggaacatggcccgcacgaacaagacataggagatgacgactgacgccacgaaggacatcactgacaagatcgactgccattctcaactaaccattaca

SEQ ID NO: 16928 - DNA, 416 bp, Glycine max
acactctagcgtgacacaacctattattcgtcgtcttacccttcctttataggctctataacggtcttaaagatgaatattcaatctcagcacttagtcttttctctcaaggaattttgggagctttttacaactatacacaaaatttacaaaaagcattttacaaaaagaattaatctatagctttttaaaaaaacctaggattcttttgtaagtttttgctttggatcttcaaagcttctaatatttatagctctcatctttaagcgttcattatctcacaatggatgaacttcttcacttaagcttgcgtctaatgcttatgatcgatggagcattcaatgcttacattaaatgcacgtccctcctcatgcaaccaaaccactttgagtggctttcttgtagagcactgcatt

SEQ ID NO: 16929 - DNA, 354 bp, Glycine max
tttcttctctttcaattgagctaaggaggttggaaagcaaatgcagcatatgggaactcatattcatttgggcctttgtgttggtcaatgtatgtgggtcttggtcttgcgatattcaagggacatttatgatagaaaatgcatgttcttcttgtagatgacagaatgagcacagaacatcttctaattgaattaactttcgatggtagcctattatgaaagagtctccacaagaggcaataaactttaggtaaggcacccaaattctagagcctactgaagaaaatggggtctgcagtaacaccaccgtccttgacttccataattgcaaaatatgctgaaccgaccattagt

SEQ ID NO: 16930 - DNA, 415 bp, Glycine max
tttgaagtttaaatgaaacttgtagaagaagcttatagcatgatccattggattattgtttatgatctaattaatgaccaaatttgacacattgaatgaccttgatcagctatgcgtagccgtgccatccaataccaaatgttatgtgcttcacttttaaaaattttactcaaaaaagttaaaataaagttttgccaaaaatggatattcttactttataccaaaactagtaaattttatcctatatgccttgattactatgctaatcttcctaggattagccataacttgagtaaacctctcatagagctaaattacgctgccactcattgcacaatgcaatcttgtcacggatggaattttcatttagacaattttcatatctctatcagttaagctaaacaaattatttata

SEQ ID NO: 16931 - DNA, 388 bp, Glycine max
  unsure at all n locations
agctttgtgctaatatgttctattgacactctttatttctgaacttcttctttcacggcaaagtacttcaattccatatgcttagcacccgtagagtacttgtcgttcttagaaaagaatattgctgcggagttatcacaatacattttcagcggcctagcaatactgtcgacaattccaagccctgaaataaagttctgcaaccaattagcctaaattgtagcctcaaaacatgctacaaattcagcttccatggtggatgcagcaacaactgattgttttgcactcttccatgatatttctcctccggctaagagaaatacaaagccaagagtggattntcttgtatccacacatccagcaaagtctgagtctgaatatccaatca

SEQ ID NO: 16932 - DNA, 420 bp, Glycine max
tgccattgtttccaaataccatcactaacatcatatgaaaacgtgtgttttacagctatgaaacactgacacagacacagacacgtggacatttgtaatgtccaaaatgtaggacacacacacacaaaattaaataaaataaaattacataaaattaaatatgagcgatatgcataaaagatctaaattgaaaatcaagatttatatatttatcatcacacacacacacacaaatatataattaaataaaataaaattacataaaattaaatatgagtgatatgcataaaagatccaaattcaaaatcaagatttatatatttattatcatctaaaaagaacttttcctatgataataagtcacaaaaaatactaagagacctcattatacaatttgtacgctttgtttctttacaaaca

SEQ ID NO: 16933 - DNA, 387 bp, Glycine max
ttcttgcagccattagaagagaagagaaagaacatgtgattagatgtatgactgaaaatgctagtcagtttgtcagattgattgtgaaggaatgcattgaccgtatcccagtgagcgtgtgatccttaaattttaagagaaatgactatcatttaatactgatttttgcaagaatctctgaagtatggactgaatgcatgaattaaggatgatgaaggccatgtttgattgtgatagccacttagccaaaaagctgaccacgtgcttgaatgatttatcccttgcacccagtttgagctgaatgaattactaattgactgaacctttagcctatacagtgttatctcctgctaccttgttttaggttgtaagagagcatcatccact

SEQ ID NO: 16934 - DNA, 414 bp, Glycine max
tgtagggttaaagtctcacgattgtcacgtgctcatgcaacaattgttagtcgtggctatacgagacatcttgccaaacaaagtcaggttaacgataactcgcctgtgctttttcttccatgctatatgtagcaaagtcattgatccagtaatgtttgatgagttggaaaatgaggccgcaattatactgtgccaattggagatgtattttccccctgctttctttgacatcatgattcacttgattgtgcatctggtcagagaaatcaaatgttgtggtcctgtttatctacggtggatgtacccggttgagcgatacatgaagatcttaaaagggtatacaaagaatctatatcatccagaagcatctattgttgagaggtacattgcagaagaagccattgaatttttgtc

SEQ ID NO: 16935 - DNA, 373 bp, Glycine max
ttcttgtataatgtatagttactgaataattattgtcatgacaaggaaatcttaaatatgcaattggtcacgcatacatatatatatatatatatatatatacacaatgtgtcaatgtgaagactacaccaccacattcttggtgcaaaaatagtatatacactgataaccaaggacccttttgtttcttacttttgcctttaattaagtgggcgtgccctcccaaatttaaaaagataaagttagcatatggtagcaaaatacccttacaaggcaaaaaagcagcacggaaacaaccatataaaagagaagcatgccgacggcaaaatcaacgtggacagaatcaagagagtgacacattattatgaagtca

SEQ ID NO: 16936 - DNA, 408 bp, Glycine max
tcaagaaaaagatggcctcttcaaattccttatttccggaagggaattctatcaatagacctccaatctttaatggagagggttaccactactggaaaacccgaatgcaaatttttatcgaggcaatagatctaaatatctgggaagccatagaaatagggccttatatacccaccacagtagaaagagtttcaatagatggtagttcatcaagtgaaagcataaccatagaaaaacctagagatagatggtctgaagaggatagaaaacgagtacaatacaacttaaaagccaaaaacataataacatctgccctaggaatggatgaatatttcagggtttcaaattgtaagagtgctaaggaaatgtgggacactcttcgattagcacatgaaggaactacagatg

SEQ ID NO: 16937 - DNA, 354 bp, Glycine max
ttgtatgcatttacaataggagccagtggcatagtccatgtacttctctaactctttcttgtacaaaacacaagcatggcctattgtgttgtaaaccttgtctgccccatataggttgatcttaccaaccctattctcctttggggttatgtactttctaatctcctcaatgatgaaaaaattgatcaaatgatcctccttcactggggagctcgtcccttcatcaaccttgggaacccgaatctgccttagagcaacattaccactatgaagagggctgactatttgatcctctagaaactccttgtccaacatggcgcctatgattgtctccattacttgaacttttgactc

SEQ ID NO: 16938 - DNA, 396 bp, Glycine max
tgccagaataatgggttggattcttatcattctgtgtaggttggtcatcttggtaagccttttgagtctcactagattctactcagcaggatttttcctccacaatgaagatatatgccaacacttctacaatctgagggatgtttctgatggttttgatgtcaaatcattctctgatagagttggagaagtgatagacatgttggaagctttgcaggccaagcttgagtcaaaagttcaagaaatggagaaaaacaaaggctccatgttggacaagaagtttctagaggatcaaatagttagccctcttctagtgctaatgttgctctaaggcagattcgggttcccaaggttgatgaaaggactaacttcacagtgaaggaggatcatttgatc

SEQ ID NO: 16939 - DNA, 364 bp, Glycine max
  unsure at all n locations
ttctttaatttttggacctttagatgcaatttcataagtcatgtgaatgcttaaagttgtttgaattgaattggcctatttgtttggttaaactaccaaggtgggtgcattgcgcatgaattgttgtagaatatctaattctttctttcaaaataatacacatggagtggtgatctttattagttgtatgtatggtaacacctacaattaataaagaccacacaaaaattggttgacttcttggttgctatacttgggataactaaaatagtattgttatgtatttcatgcaaaatattctttatgctaaattntacttgaatgtgcctttgtaggtatggcttcgaagaagctatctactaaa

SEQ ID NO: 16940 - DNA, 408 bp, Glycine max
  unsure at all n locations
ttgaaagtgtagttnttcatcttctcgctaagccattctactggcttagcgagcatccgctaagcgcaacactcatgggctaagcacgacgaagactctggaagaagataagttgtacaggtttgctaagcgcaccacttcatctcattaagcgcaccgcttcagttcatccgctaagagagaaaggcacgcgcttagccaaaattcactaatgtgcgctaagtggtccataattgcgctaagcgcacgagcacgaacaaggccacctatttaagcgtgaaatcagattttagaggtggagtttggactgggattcagagctttgcatgtctagagtttctagagagagaaaggtccaagctttagagagttttgagagtttttgatgtgtgaagatctgcagagacc

SEQ ID NO: 16941 - DNA, 368 bp, Glycine max
tattcttgtgagcattctctccatagatcatatcattcttcatttaggtgatcatgaaggtcagagagatggtatagctcaatttgtaagccttctagtaggctatacaacttatgaagatattctaatcagtcagatttatttttgtttacatattgactcattattaaagaggagctttgtggtctctattttaagagcttcaaacgcatcacacacttgagtggaaaactattaagaactatatactattactccatgttacccttgaatctgattatgatcactggagatgttgaagaaatatattcttgactctgataatgtttacacattatggatgaattaggaataagctcatgatatgt

SEQ ID NO: 16942 - DNA, 412 bp, Glycine max
tgctatgtgccccctaattgaggaacctaatagatatgatccaaaagtccacttctagtgataactccaaggggtggttttaagtaactctactggtttctaaagatatcatcctcttaagtaatacattgtggcaataagaactatcagcaacaatgcaccactaaaagaggaaaactctagataaggcttcactgtcatcaagcgagtcggagacccagcatgaccatagattgacctccactccttacgactcacatagacccgggtataaggcctaatatctcaatgtgcgtgcgaagtgtacgtgccatgtgtgtgtaaaacaaatatttctaactatcaatgtaatcgatagacaaacacacatcaaacacaacaacatagaaaaggttatatacaaatatggaca

SEQ ID NO: 16943 - DNA, 368 bp, Glycine max
ttcttatgagcttacataacttacacattcgttgatgggcacttaagatgagtacattcacacttactcacatacttatttttatagttactcttctaactttatatacttatttgaggacgttatgctttattgtacatgtatgcctttatgccgtccttataacgattattcttttttaggaatttatcataatcacatctatgacgtgtgtctgtttcagattttagtaaatacaacattaatttagtatatctattatattgattaaattcctgtttttcatgtgtgcacggaggatcattactaattatatatattgatttgaacggtcgaagtcttttattttataaattatctttcgtact

SEQ ID NO: 16944 - DNA, 359 bp, Glycine max
gaaagatgctgaatacatgacagtagttttaaaaaaaatgctaaaggttcatacaacaacttcaaagaagcaatgacgatttaaaaaatgaacctaacctttcaagttaaaaactacgatatactattgaagagtggaggcacaatcactaatcagcaatcaattataggctacccaataacaaattcaagcatgatggttaaggtggaacagaacaattaccctgcaactgagctgagcatacacgaagcaataacacaccaaccagttacggtagaggtagtaatcgcaacatagtcaaagaaatcacgagactcaaccgagacacacgtgtgccaacaagtatcgacaagaacaac

SEQ ID NO: 16945 - DNA, 374 bp, Glycine max
ttcttgaagattctgggagaatttcatctttattggctatagctccttgtgagagagctatacacttcacaattggtataccaggatagagatcattatctgaaatgtggttatttataagcaggccttttggtatcggcaaactgacaatgttgagtgagattgctcttactgcagttatttcaaagcatagtccaacttcatcaataaatgatcaacaaacacctagcacaccatcgtcactgagctttagctctttatctccaaacttaactccaataaaaatgaggagtttgagtgatatttataccatgtttaattattattctatggaacaatttaaccttgaataagcacgtaatgaaatgcttggc

SEQ ID NO: 16946 - DNA, 380 bp, Glycine max
  unsure at all n locations
cactatacacaactcaagcttcttgagagaacttanaataaaagtattaagtttaattgatcatatttataagcgactataattcatactatgaccctttatgcttccccctcccttttatcacatagtaacggtttgaaaacaagggttgattcaatgctggaacaaacaagtcatcttcaccatcacttacatagttgattgctaagtttttgttatgaagaaaaggaagatcccttatagcgtcgtccttgaacaaaccaacaaaaaaagtactaaggctgagcttctttatcaaggattactaggtaacacgcattccatggaaatataaaatactttgtcttcttatccatgtaatgtaaagcaatagtaagaat

SEQ ID NO: 16947 - DNA, 367 bp, Glycine max
  unsure at all n locations
agcttctcactgtcaaaggaacccctttgcattttttcacaatttcctttccgatctccattagatttggatattccttctcttgaccttccttaaatgcccatctcacaaacagcgatatacaattctctggagaaaggccctctaaaacataagagggaatagtgcccatcattgaagcaatggagttacttcgcgttgtcactatgattntgcttcccactgcaccaacttttattaaatttttcaagtcaatccattttgtataatcatcattccatatatcatccaagaccagtaaaaatttctgaagagaaagcttgtgtctaagacgagtttgaagctgctcaatatctaagctggtgat

SEQ ID NO: 16948 - DNA, 374 bp, Glycine max
tgactgttacttgatgaatgtatgtcagctacatattctttttcagccttatattgcagaacattatcatactgatcaacaaattgcttcagagttgttagccggcttacatatccatcaaaaaatgcatgcatgctttcattgtgtggaataatagacattccagcccagaactcacctcttacaaaggaaggagcccagcgatgtctctcacagaacaactctttcaaccatttattgtccttgaggtcaaaatcctccacaatcttctttcatttctgctcaaattcacttattggatgtgtgtcatatacaacattctgcaaatgatctcttaaggactcgtaataacatttccatggattagttgggga

SEQ ID NO: 16949 - DNA, 355 bp, Glycine max
tttcttatgcgcatattgccttactatcgttcacttgcgcaggacattctatcatctagaaaaaatgcacccatatgcagtcaaggtagcttggttacctagatgatatacatgtacttactatgaggatttgctatttacatgacacacgcctacttggctgaatgtacatacatacatactctaagcatttgggggtaccaaaaattgcacatgcgcgcatattgatatgtctaacacccatacatatacaaacttcacgaagaatgttgactacctacacaatgaggtgctacatttcatgcttttttttttaagatcttggctacctaaagcaccatgcaagatcatgcat

SEQ ID NO: 16950 - DNA, 384 bp, Glycine max
  unsure at all n locations
ntgccaaataaacaagttccctgtgttcgatacttggatcattccgttttagttttacatacttggcgacccggtgcgcttgccggtatatcacttcccttttgatataagtgtttgtaagtttaagaaaaaagaactgtgtggggaagcgaacaaagtatttttggtgccgttgccggggaatttatttcatttggaaagtttaggtcagtttgaaggcattattgattcattttttttctttgattcattgattatttttgtgaatatttagttactgcacaatttattgctctttggaattggttaactactattctgcttgttttgcatgcaaagaaggtctgctgcaagtgctttgatttccatagacttgaaaattaa

SEQ ID NO: 16951 - DNA, 362 bp, Glycine max
atcttgtagaatgggtagacatgatacatgtcagggtttggtttggttcaaggataaaagggatgccccacattatctccatgacacaaatgcaaaaatgatgatttggaaacttcatgcaaaactggtcatgcatgcacctatgcggacactcaagcgtcaaatttttatggtcatgtgatgctagggctcaggattcatttcctctattttagtcaacccaatatttccaaaatatgctcttttatcaatttatgcatttatcctagtccatttcgggcgtctggggaaatttcacagcattcacccttcaggtgtagacacatttttcaaaaattggttatgatcaatgaatttttttt

SEQ ID NO: 16952 - DNA, 351 bp, Glycine max
tactccgcacaatgagggccttttgggtatgaagtgtctattcctccttctaatgacgcatggacacttatctctgacccaactacaattcgtgcgaaaggtcggtcaaaatcaacaatgataaggaatgagatggattgggtcaaaccatctgagcaccgacaaaatgtattacatgtggagccgaagaccataacaggagtcgctgtccaatgcaatctaagcgcgggagttgttcaaaccattgatttatgtatgttagtcgactcactctgatttgtttaagttctcttcaatgtattgaacttgcggggttgaatcaattcgttagttataaacattacttattta

SEQ ID NO: 16953 - DNA, 362 bp, Glycine max
agcttgtagaattatggggtacccatcagatgtggtactaggtggcggtcgggcgatggtgcacaacaagttttccacatccacaatgcgcgcataaacccaccatcccctgttgcccacctccaactgagctcacgtactcccacgtagcccatatcctcgtttctctcaacaccgggtccccatcaatcctcccaagcttccacaacatccaagcaaaacaacattcacacagcacaagctatcacatcctatcataacaaagcaaaggctgaaaactctgccaaaacaccaaccaaaaatcacaagtttttcccactcaaagaccccaggaacaattccttcgatccaatttgttaacc

SEQ ID NO: 16954 - DNA, 404 bp, Glycine max
tataatatatcgagatgctcgaaattaatcatcggtagctcttgagaaaatcaattggtcataatttatcacacggatgtccgattcgggtgcataatatgtcgagacgctcgaaattgaacaacggaggctctcgagaaattcaaatggctataacctttcacacagatgttcgattcaggagcatcacatatagagacgtacgaacaacggatgcactcgagaaatacaaatggtcataacttttcacaccgagttcccattcacgctcatactatattgatacgtttgaaattaaacatcggaagctcaacgagaaattcaaatggtcataactcttcacacggatgtccgattatggagaatcacatatcaagatgctcaaaattgaccaacgaagctct

SEQ ID NO: 16955 - DNA, 366 bp, Glycine max
ttcttgtcaggtttcctaactcttttggtatgttgccagtgattccattcccttgcaaagatctaatacaagtataatatgcatcaatttactttcccgtcatcaaaatttgagttagttagaatgcaaaaataatttttagtattatggagttgaccaagattgtgtggattttttgtgatagaaatccttacagagctgtaagatattttaaaactcctattattggggtcaagtatcctgtgaatcccatatatgctagtgatctgcaatgaagcaatttatatattacacagcaagcaggaattcaagatttaaaaatgtgaaatataacactttctacaatgagtaatgacagccaacatc

SEQ ID NO: 16956 - DNA, 358 bp, Glycine max
  unsure at all n locations
tccacttctcaatgtgagagctctatattatttctctttttaacccatactgttcattattaacattgaactttttgtttttcttcaagataaaaaaaaatctcatgaaactttgctataatatactttgttgatgctttgtattccactattcatctggagaaaacattatatctatattacctggttaacttatgaatgtgaatcattttatttcatttcaggaaactaactttaaggaatggaggcaagtggtgacagaaattaaccgtntcacgaaagttgacaagggctttagtttcaggcccatgcgttattgtgccacatttgatactcatcgagcttctcttccttatgt

SEQ ID NO: 16957 - DNA, 366 bp, Glycine max
ttcaacaacaaaaatgcaaaaggttgttgtcaaaaagtaaccaaaacttattctattatcaacacttttcttcaatttatttttattatcctaaaaacaatgtatttttgtttaaaataaattagattcatgttgttaaatgcatgtttttgttgttttacatttttataatcactgcatacgctaaaattcttttataattaatctcggaatgatgctccactaaaagtcaaatttggtcctagaaaagactcttgtcatgtgcctttatatattttcctttttttccagttttatattattgagacatggtgagggtgaatattaaaacccaacaattgttaatcgaaattttcggttttgatt

SEQ ID NO: 16958 - DNA, 374 bp, Glycine max
  unsure at all n locations
ttgagctntgagcacccacgagtgtttcatcaccttattaccaagagtagtgtaggcggttctgtaggttcgagcgaggggtttccggtagtattgaaaacaatatgggacaatgtgggtgtcgagggagcgatttccggcagatttcacgcgggaggagaaagagaagagcgatttcaagcaggaggagaaagagaagagcgagtgcaaggttttcgagcgcgcacgttgtgaaatgtcaatgtttcaacttataaacataacaacatcggttttttaaggataaccgatgttaaatgaatatagttaacatcggttgtggcaaaaccaatgttaacatcagatatgttacatcgtgtttttataaaaaccaa

SEQ ID NO: 16959 - DNA, 369 bp, Glycine max
  unsure at all n locations
atcttgtgcattcaatatcctgatgagggtgttccatatgttctcaagactagactaatacatttgttgcccaagtttcatggtcttgcaggtgaagatcctcataagcatcttaaggagttccatattgtttgttccaccatgaagccccttgatgtccaggaagatcatatctttctaaaggcttttcctcattctctagagggagtgaaaaaagattggttgtactaccttgctcccagatccatctccaactgggatgaccttaagagagtgttcttggagaaattcttccttgcatctaagaccactgccatcaaaaaagacatttcangaaacttaatggagagagcttgtatgagtactggg

SEQ ID NO: 16960 - DNA, 351 bp, Glycine max
ttgaatggacaccacttcattttggtcttctttgtatacttcaccaaatgggttgaagtgggtgcgtacgccagtgtgactaggagtgtggtggttaggttaatcaagaaagagataatctgctggtatgggttacccaggaagattatcattgataatgccaccaatctgaataataaaatgatgaaagaaatgtgtgaggatttcatgatccaacatcacaattctactccttatgggcccaagatgaatagggtagttgaggctgctaacaagaacatcaagaaattagttagaagattaccgggtcatacaaggattgacacaagatgctcccttttgcactacatg

SEQ ID NO: 16961 - DNA, 327 bp, Glycine max
ttcttctcggtacatcacgggcctcaatcgtacacccatgtcaaaagttatggccctctgaattggaccatagcttccttgttaggtttcgagcgtctcgatatattgtgtctgaatcggacatccgagtgaaaagttatgacaattttaatttctcgagaacttccattattcaatgccgagcgtctctatatatcatgggcgccaatcatacactcatgtcaaaagtaatggccgtctgaatttctccagaacttccattattcaatctccagcgtctctgtatatattgctactgaatctgacattcgactgaaaagttatgac

SEQ ID NO: 16962 - DNA, 464 bp, Glycine max
cggtgcttgattgtgtcgttcgtcgacaccccgggctcatataatacgcctgcatctatcccgcacctctatacgacttgcgagtagtgtagtgtgaccaggttcagccccttgagctcttctctctctatacaaagctcttacgaatattgttgcacgtgaagaagatccacgccgaagcgctttcagaacgtttacgtgagtgaatgctcgaaggatctctaccgttcttcggagatctttattcgccctacatcgaccctcagtgctcaacgggttgaccacctcgaaccaagctgtaacacttcattgtatgtacccgcagtggtccacacttggtttcatgtatatttactctcgggtgcatttactgtttataccgccttttgacgagcttaagccgttttatttaagtcatttctcgcttaacctccaataaactaaatccccaccgattgtgtgaa

SEQ ID NO: 16963 - DNA, 353 bp, Glycine max
ttcttgctggcgaagacgtgctgatgccttctgattgagcttgaacttgggcctgagtcaacccctgaccctgggatcttcttctccttctcctctataaaagcacggaatactcgatatggcagatacacataccgattctgaaagcgggaacgatttgcgacaattatccgcccaattctctcatcgccaaatgtcaccctctttcagacaattttccggcgcatatggaaatccctcgccggacatttacggtgccactgcctgtacactcaacaatccattattgctccgcatctccatctccaactacatctacatctcgaacgctacttagctagctagggtttatg

SEQ ID NO: 16964 - DNA, 182 bp, Glycine max
ttcctacaataatggggcattcattattgcttttttatatggagagaaagtggcctccaagaggttgttgatgatgttgctctctgagttgatagcatgcaactgatgatggaagttgcggcttgttgacgatgatatggtggcaaccatacctgaaagaaatcaatggtgttggtcataac

SEQ ID NO: 16965 - DNA, 370 bp, Glycine max
atcttatcatatattcattgttggaacgcctacatttgccacactccaagttggtagccctggacatgaggaggggtgctggaaagtcatcttaattgtagtcacccttggcccaccttagttgccgtttcttcgggctgccttgattgcagtgttgaaagggggtgtttagtcctacatggactagatatatgacttaaataaagctaataaagtttggacaatcctcaccttaaatagattgatatcctttctctcatctttcaacactatttctctctctctctctctctcttagtttctcttaattctactaaaatcattttcagccacaatagatcatagtccttggtcaattgctctaaattca

SEQ ID NO: 16966 - DNA, 414 bp, Glycine max
  unsure at all n locations
ntttctttgatatatagctagcaatctatactttgtattaattgtagaatgcacaatgcaaaccaagtaggagggggcaaccttataaagaggtattctctgttgtaatgtcattttaataagttggttgaagaaatacttaagacataataagtacaataaaataataatgtgaactgtctacacccaaaagacaaaaattaaagatggccagaaagttctattatttttcttgtgtatcacataaagtaaccagttatccatcaactaagatatcttttgaagctaagaatcatagtttgagtntaagggtgatttatttatttattttcttctttgcgatggactaggtggtcacatcaagatactgggtttggtctaaccatattgggtgaagtataacgattctcagct

SEQ ID NO: 16967 - DNA, 372 bp, Glycine max
agcttcttattcaaggcacattcttggtggtgaagctccttcttccatggcttattccctagtggatggtgcctcctctcacctcttctcttttgtctttcgctgtatctccattgtgaaaaattaccattgatggacttcattgaagctcaaagatctagcctccatagtgtggaagcaatgacttccaagattattttgatgatgccaaagaatcaagagttaagcaagttccaaagaataaggagtcaaaaagcttcaagaacaatcaagtttcaagattcaagattcaagaacaatcaagtttcaagactcaagattcaagaacaatcaagatcaagattcaagaatcaagagaagactcaatcaagt

SEQ ID NO: 16968 - DNA, 368 bp, Glycine max
  unsure at all n locations
tattgcatcgattatgtcgcttagcgagatctgcttattatattacctgcaactcttcgcacgcatattgctgccaaaatctgagcttaacggcatggaatggtgcttaactcaatcaaaatgaagtttggccgcaagaagttcaacttagccaccatgattggcgctcagctctatgaacttcagttctggccgtaaagaattgggctttgtgacacttagtcgcacttagccaaggataatgtatcgcttaacggnttggctgtcngcttaccgaattcagatcgaattgaagttggcttagctcagccttggctagcttaacggaccaaatcatcctcagatgccaaggtcgagcgctaagcgct

SEQ ID NO: 16969 - DNA, 376 bp, Glycine max
ttcttgttactattgaagaagtttatcatgttgtttcctctatgaaatcgtataaggcacctgaacctgatgggtattagaaaatattttttaagatattttgggaaaaggttggagatgatgtttggagatttgttagagaagcgattcataaggtatgtttgatgtgtaggctgctaagactattattgtcctaattcctaaaggtgattctcaaaaaacatttagagtgtgtttggatagagaattttaacaaaggaaagtaatttatcagagaatttaaatttttctaatctagaattcattgtttggatgttttttttatgaagaatttaaatttttggaattttaaaacggaatttcaaacaactaaaaa

SEQ ID NO: 16970 - DNA, 400 bp, Glycine max
  unsure at all n locations
ntgcggatttggtcttcgccagtgaaaggatcgatgtgggtccgaatagaggcacatttgatcatcctactangacgactgagaaaactggggcaattgaagagggtgagaaagagggagaaacccatgctgtgactgccattcctatacggccaagtttcccaccaaacccaacaatgccattactcagtcaataacaaacctcctccttacccaccacgcagttatccacaaaggccatccctaaatcaaccacaaagtctgtctaccgcacttccaatgacgaagaccacctttagcacaaaccataaaaaaaaaaaaaacaccaacaaaaaggaattttgcagcaaaaagcttgtagggttcaccccaaattccgtggtcatatgctaaacttgat

SEQ ID NO: 16971 - DNA, 346 bp, Glycine max
ttcttctaaaggatgtgagcttatttatgagaggggtgtatgtagctaagctctagcttctcaaggaagctatctcaaagaagcttatcatagaagtattctcaagaaagcttctcaaggaagctacctactctataaatagaagcatgtgtaacacttgctgaaactttgatgaatgagagtcttgtgagacacaactcaaagttcaacttctctacctttttcttccttcaatttcgagctccccctctctctttctctccctctttcttttcctccgctgaagcatcctctacaagcttcttatacaaggctcatcttggtggcgaagctccttcttctatgg

SEQ ID NO: 16972 - DNA, 305 bp, Glycine max
aagagaaattcaacgccaagtcccaattttgaaaccatatatattgtcatataacataatcactttattagaagcgcataagacaacatactcacatggcccctgtatttgtgagctcataggaaatcaagcaagggctaccaagaatccttgttgctcaacataattgacgaaagtcggacaaggaaatgtggcattaaatggctcaaatcaaccccaatacaaaatttcattactctaagcacattgcaaacaaaagcaatccttaattacaatccagggcagatgttatttctataacaaaa

SEQ ID NO: 16973 - DNA, 365 bp, Glycine max
tgcattttatcttttttggatgtttatgccctgacggggggagtccttaccttggtaataaaatattgacctaattagcattatagttcctgaataatgatagtgttctttttacattgataaatgtacatattttttttctccatatcttacactacatactttttattctatatattgcactatcttttatttataattctaagctaaaggttatatttttcgtttatacattattactacgtaaaataacattattacacaaattaaattatttgccatatatttactatatactgcacacattttgttggtagtttaagtgaatccatactcaatcattacatgtcttaagtttgaagtga

SEQ ID NO: 16974 - DNA, 387 bp, Glycine max
actgagttgcatgcatatttttaccttttttttttacacaatatcatctacgatggcaatcggtacatatttctctacttctcaactaattggatgctgtcatcctaccccctctctgaatctttacaagcacaagatctaatatggggcctagagtctcaactcacaactgatgtatgtacgaaaatatccagttttacaatcttaatatctactagattcacaaccgaggaggaaaagtaactccctttccccagtgaccttgcatgcgtaaccagtatgcccatcataaacgcatgtgattcatgccttgtgtatgtgctgtgccctacaacttgcggaattgggggtaattgtggacgtaaatatccactttaaaattaaaat

SEQ ID NO: 16975 - DNA, 372 bp, Glycine max
ttcgcatgctttcttatggttcgacttggggcccgacttatacgagtaagatgatggcggtggatccttggcgtgaggattccttatatcgaaagtcttcttggcggatggtccacgcggcagcgtgaggatcccttgcatcaaaatccttcttggtagaaaggtcacgcaacatgtcccatgggtggagcggtggtgcaagtatctagagcatgtgggctttaatggccaccttggaaatactcatggatgaaaatggcttctgctagagggggagactaccatctggatgacactcacactttatggggagattataggagtacacgtgtgaggtaaagtctcacatctcataagaatgagaaagttaaa

SEQ ID NO: 16976 - DNA, 346 bp, Glycine max
  unsure at all n locations
caatgcccggcatcagagatgcagtantcaccaccatctgtctgcccaagggtgaactcatcacatgcgtgccttgataaaatttctataactgtaaagccaatgagggtctctttcttgccagtaatagtcttcacaaactccttctcagggttcttagccaacacatcatattcaggagaccctttctcaagcataaatctcctgcaaataattggcctattcaggattaaacctccatatggatactgtccaaggtaacagcaacatgaagagttgaagcaatccatataagggtagcggatgcttcaaccaactcttcccaggtttgcatctgttgccacca

SEQ ID NO: 16977 - DNA, 365 bp, Glycine max
tttttggaaggatgcttcaatggaggaaaagtaagagggagagaaagagagagggcggagcacgaaattcaaggaatagaagagggagagaagtataactcttgaagtatgactcacaagactctcattcatctaagttacaacaagtgttacacatgcttctatttatagactaggtagcttccttgagaagctttcttgagaaaacttccttgagaagctagagcttatctacacacacccctctcataactaagctcacctccttgagaagctttcttaagaagattcctaaagaagctagagcttagctacacatacctctctaatagctaagctcacctccttgagatgagaagctagag

SEQ ID NO: 16978 - DNA, 368 bp, Glycine max
taaaaccccttgatcattactaaacaagctaaaattattcttaatcatacagcaggtatcctaattacatgcatgaaataagaatgaaaaatagaaaaagggaaagaaaagctgggtggcctcccagtaagcgctcttttaacgtcactagcttgacgcatcgccctgttatccatgatccaagagagttcctacttcaaggaccttcttctcaagtctcttttcctccatcacatgcactttaaaacaaacattttggctaggcggatctttgtcctcctggaacatatcaaagctgatcttctgatcttctatgcccatctatagaatcttcttccccatgtccattatgaagcttgcagtaaaca

SEQ ID NO: 16979 - DNA, 698 bp, Glycine max
  unsure at all n locations
tgcagactgcgtcngnntttgattagccccnntcggaatnagccattagcgancntcacccanntaagngtctgagatantcncacgccatcgagtcacctctcgaggagtactcccctnnnctagcaaagcgcgnnacgcatgttgttctactnantggcatatgtctctgatctatacaggcntncatatgtaacagtaggcgatgtatacgccgcatattctacgtatcagatagtgtgaggactactatggttgtctctcgatttagcgcagtgacgcgcaccatgtatattgtctgagtcatcacatcctagctgtcaccgatgctacgatatttgttacngttcacagcacgcttgtgtatatgacgatagacctacatcgagtagcagaataatctcgtacgataataangcttcattatacatactatgtcacacatacacgtggtgtgatagatgtctctaatactaggtaaagacacagtttcttcaaaccagctctgcgatttgagagagacctttacactaaatagatctctaccacatctccttgcggaaaagcgtcgtattactcaattagatagaggttgcttagtgcatacgtaacattgacttgtgctgagatggatagactaattattacataggagagagtgtcaacttagataggctccatacaatctatcgcatacg

SEQ ID NO: 16980 - DNA, 354 bp, Glycine max
aactcaagcgtaaccttatcgctattggagagtcatatttgaacttgatgacggagcagcaaaactatctgagagattacggcgcgaagtatattcttcctcgtcgaccatgcaaccctcatcgaagtcttgagcataccttaaagggtcataccccaagccaccaacgggatcgaaagtgcttgttctccttggcaaggaagcttcaatttgagacaccccagacccaaagctagcctcgtctaagagatgatgaactattctccatcacttcgagagagctcatggaatgaaagtacaacaactcaatatctaatgctttttgaagcctttcttattcactacttttcactc

SEQ ID NO: 16981 - DNA, 466 bp, Glycine max
  unsure at all n locations
tgagcgcanccattgacacgngtgaatgcattgattgattcgttgaataccacacgggaattcgagatccgttccagacgacctctataatgccatgttgcacgctttctttactcgcatgtcctgacactgggcgtacctgatagtgagcctgggactaataaaggggaattctctagaggtgcaagagaagatgatgtctcttctttggtccagaaaaagcgcactaaggcaccggtagtttgtaattgtgactttgataatactcttagaaacttaatgggaacaacggctatatagacggttcgaatgctgaccatatcataacgcgactgatgacatcagacaacgtatgagttcgagcacactccacatgtatagcctcttgcatttgttggatgagattggctgacctctatttggaggaactcgcaaatgaatgatactacctttatcatactgggag

SEQ ID NO: 16982 - DNA, 391 bp, Glycine max
tcaagataaatggcctcagcaaattccttatttctataatgaaattctatcaatagacctccaatctttaatggagagggttaccactactggaaaacccgaatgcaaatttttattgaagcaatagacttaagtatttgggaagccacataaatagggccatatatacctaccatagtagaaagaattacaatagatggtagcacatcaagtgaaagcataacaatataaaaatctagacatagatggtctgaagaggatagaagatgagttcaatacaatctaaaagccaaatacataataacatctgccctgagaatggatgaatatttcacggtttccaattgcaacaatgctaaagagatgtgggacactctacaattaacacatg

SEQ ID NO: 16983 - DNA, 367 bp, Glycine max
  unsure at all n locations
ttcttgcacacaagattctccttgcctggcacctcnaaaccttcaggttgggtcatattgatgtcttcctctaaatccccatgcaagaatgcagttttaacatctaactactccaagtgaagattctctgcagctacaatactcagaataactctgatggtagtcatctttacaactggagagaagatttctgtgaaatcaattccttgtttctgctgaaaccttttcaccacaagtctctccttgtatcttcttctatcgtcggatttttcctttaacctatagactcacctattctgtaacgctgtctttccttctataaatttagttaaagaccacgtcttattcttttgaaggggtgtcatct

SEQ ID NO: 16984 - DNA, 388 bp, Glycine max
gtgcataccccaaggatccattaggattttacttgtgaaagagagccatgagggtgggctcatgggccactttgggatagacaagacccttgtcttactcaaagaaaagttttattggccccatatgaagaaagatgtccataagcattgcactaggtgtgtggcttgtttacaagccaagtctagggtgatgcctcatgggctatacacacccttacccatcccagctgcaccttgggtagacattagtatggactttgtccttgggcttcctagaacccaaagaggtgtagactctatctttgtggtggtggataggtttagcatgatggcacactttataccatgccacaagatggatgatgcgttccacatctcaaaactcttt

SEQ ID NO: 16985 - DNA, 353 bp, Glycine max
tgcttcaacataagccacggttcaaataagacatttaggttaagggttagggcattacttgcggtttgtctataataaaatcaaatgacatctattaatatgcctgtcccaaccaactgtctcagattttgtgcatatgacatactgtgttcttgcttcagttccacgtattacaacagtttactagaaaatatcattgacattaaggtccagagcaaaaaatgcacatgcttttatataaaagtgtccccctcctccctctctcttttagtaaaagagagttatatccaatattgttgaattcagttcgtgaatactaacagacaatatgcaattaatcaattatactactt

SEQ ID NO: 16986 - DNA, 364 bp, Glycine max
  unsure at all n locations
tatcaacatcaaacttggagaaatatntctttggttctagacatgagaagcatcaagtataatgttacttcctcactaaagcggtgatctatctccacacatattttatcaatagcaacataaaaaatctttgcacggtaatgatgaagattagtgatagtcatcccttctgctcttgaacgaccccgcaccgggatttcgtcatccatatttggtaccggaatacttttagctacacaaaatacttggacattggcaaaaaaatattccagccactctctctcattgtgcccaaccgagctttgacaacatcaactaattgcatggcattcacagtattaagaaccttttcttgcaatacatt

SEQ ID NO: 16987 - DNA, 358 bp, Glycine max
  unsure at all n locations
ctttcactcgcatgtccgattcaagcgcatagcgtatcgagacgctagaaatctaacaaaggaagctctcgagaaattcaaatggtcataacttttcactcgcatgtccgattcaggcgcataacatatcgagacgcttgaaattgaacaactgattttctcgagaaattcaaatggtcataacttttaactcgcatgtccgattcaagcgcataacatatcgagacgctcgaaattgaacaacggatgttctcgagaaattcaaatggtcataacttttcactctcatgtgcgattcaggcgaataacttatcgagacgctcganattgaacaacggaagctctcgagatattcaaa

SEQ ID NO: 16988 - DNA, 368 bp, Glycine max
ttacagcagattttagtaatgacccactaaccttttttaaaataacttaatgccattaacctagggaattaaaaaaacttaatggctagtgtaactgaaattgtggcaaccaaaagtcacccccaacagccaacaagtcagccaccatttggtctcccaaaaggctgatgcctatgttgccaattgggcccttattacaacttgaactaaacctaactaaagcccttttagttgattaacccaaaacatatttttggtcagccaactttacaaggattgggccattatttagacaaactaaacactctaaaattgaaacaaagtggtgtcatttattcctcctccatttgggccatgatacaactcac

SEQ ID NO: 16989 - DNA, 374 bp, Glycine max
agcttatttagcctatagtctaaaatactctgtcagggctacctccttatctgggggcatcctgctcttttcttataaacctcacaccagaatcccatgcttccaatgtggggctcaagtaccataccttgcaattgtaacctaacaaaacctatcaatctgctgctgtgtttagaaactccttcacaatcaactatctacaagcttaatccagctaagatcaattgaaattaaatccaaagagtaaaaccataacttcggagccataatgtctttcaaatagcacctgtaagtcagtatctggtctgtctacatcattgatttaaggattttccccacaccaccaacattccacagcttagccatacatttaa

SEQ ID NO: 16990 - DNA, 393 bp, Glycine max
  unsure at all n locations
tgcggtcgcggtgttcggcggtggatgttgaggctgcgcgttggataggaaagagcggcgtgcatggctgctcctccatttgggaagaatatatgtgcctatgtaataatggatttggcgctaactacggtcttgctgttcccttcacggacgtggaaactctgccacagtgccacagtatctcggctntacaaaatattaaaattgtaatttcaaaaccatattatctctgttctattataattaanaaaaatatgccaaaaatagtgatcattttaattctttaatataccattacttatctttttctactcatatgatgaatgttataaaagtgtttatgtttatttttataaaacagctctaaatgattttattttgagatggggaaat

SEQ ID NO: 16991 - DNA, 374 bp, Glycine max
tttttattgctgcttaaagcatgtgtgatatacaaaatctgaagatcctaatgagtggtgaatttgatatgaaagatctaggggctgcaaagaaaatcttaggaatggagatctatagggatagaactcagaaaaggctatttttgtctcaaaaggattacattcagaagatacttgtgaggtttggaatggctaactctaaacctatcagcactcccctttcagaaaaagagaagttgtctgttatgataaagattcaagctcaggctgatcaggattatatgtcaaaggtttcatactcaagtgttgttggcagtctcatgtatgccatggtctgcacaagacctgaccttgcttatgctgttagcatggtc

SEQ ID NO: 16992 - DNA, 392 bp, Glycine max
tactatgacttatttttaacagcttacaatttacttatttatgatcaattaacgctaagcaattgtctggtacgggggttttctgtgaagcttttaaacgtcttacattgacaattgcatgtattatctgttggtaccgtaatattaaaaggtttcttatattagacgtgccacctaaaacaactcatttattcaatattaatgatttggttaccctcgatacaatttactcaattatgaccaattaaaggctagcaattgtctgctacggtgttttttgtgaagcttttagacgtcttacattgacaattgcatgtatcatctgttgctaccgcaatattaaaggtctcttatattagacgtgccactaaaaacaactcatttattcaata

SEQ ID NO: 16993 - DNA, 379 bp, Glycine max
atctttacagcttattttagtatttacccactaacctagaattaaaataacttaatgccattaacctaaggaattaaaaaaaaacttaatggctgagtgtaactgaaattgtggcaaccaaaagtcacccccaacagccaataagtcagccaccatttggtctcccaaaaggctgatgcctaggttgccaattgggcccttattacaacttgaactaaacctaactaaagcccttttagttgattaacccaaaacatatttttggtcagccaactttagagggattgggccattatttagacaaactaaacactctaaaattgaaacaaagtggtgtcatttagtcctcctccatttgggccatgatacaactcacaac

SEQ ID NO: 16994 - DNA, 387 bp, Glycine max
tttaaccttgacttggtagaacctcttgccggtttgatttgttcccatgcttgctaaagtgagacaaaagctggtgcaaatcaaaactccgatatctcatgggtggaatggatgaatgcatgaaggaatgcatataacacagatgtaatctaggaatgcgggggtccggggaattcgtccccttcttagacacaatgtctaggggtagcaaagtgccccaacgtacgtttttaagaaggcgacacggaccctccgttggtttgtatacagaagggatcaagacagaacccatatgcgatgcctatgcaaaagacacaatgcgggaatgtacacagtatgataatattcactgaacataagcaaaagggtatatgatacttatgcatg

SEQ ID NO: 16995 - DNA, 377 bp, Glycine max
ttctttagaattcatttaaaagatcgtgtagtttttcatcattctttcattaattataagtcttcgtagttttgcattgatgttcttttataaacataaccacaacctctcttaggatcttaaggtgttacactttcattttgggtaaataagttagatacatcattgcctttatgctactgtattttctacttgcaaaaacttgctaggctatgaatggaggaacaaatcataggacataacctttaaaattgtgtgtaacttttcgtggtttaagtgtggtttctcctaatcaacgttttaaattgcagttacagttgtgttttgatccctgtctctatttctatctgataaaaataagtaaataacacataaaa

SEQ ID NO: 16996 - DNA, 392 bp, Glycine max
ttgaattcattatatgcacccttaggggtccattctttctttgtatgttgacatcttcatctcgtctactttcagtattctttttcttcattttaagcgagtttcgaccgatcgtttaagctgtaatctcagttaatcaatgttaaaatgaattttgaccgatcgtttgcgttgtaatctcatttaatcacctttaaaataaaattcaaccgatcgtttatgctataacctcggttaatcatcaaaaaggcaagtgtcaaccggacatttgctttgaaagttctcttttaatgagttgagaaataaccaagtgaaactaaggctaaaatcaatcacaaatcaagctctgcccacaaaaggtcatttgaaccgtttaaggtccaacccttaat

SEQ ID NO: 16997 - DNA, 377 bp, Glycine max
ttcttgtagggttaaagtctcacttattgtcacgtgctcatgcaacaattgttatccgtggctatacgagacatcttgccaaacaaagtcaagttcacgataactcgcctgtgctttttcttccatgctatatgtagcaaagtgattgatccagtaatgtttgatgagctggaaaatgaagccgcaattatattgtgtcagttggagatgtattctccccctgctttctttgacatcatgattcacttgattgtgcatctagtcagagaaatcaaatgttgtggtcctgtttatctacagtggatgtacccggttgagcgatacatgaagatcttaaaagggtatgcaaagaatctatatcatccgaaagcatctat

SEQ ID NO: 16998 - DNA, 321 bp, Glycine max
gaacgaggctgaagaagctgctgctcatgttcttcaagattctgtggagaataatttatctcatcctcattcgtcacaagatagagacatggaattggtggtaaatatttgtcacaacacagtacttgtatttcaacctaagttgttgcagcactccattgttatatattacaattattcatgtttggcatctgcatggacggccctgcaaccgttgctccagcaataacgctgcataaccttgctataacgagagccaagcaaaggacggttatgacgcagcataaataaaactgaagacccatcttttgttgcattttg

SEQ ID NO: 16999 - DNA, 375 bp, Glycine max
ttgcatgcattctttgagccaaaatcctgactcaccataaaccttgacccagggtgagaatgtcaatccttaccctcggaagcaaaaaaagaatagaggggaaatttccaatcaaagaaaaagagaaggaaaatttccaatgaaagcaaaaaaagaaaagaaggaaaattccccaatcaaagagtgggagaaagcaaaaagaaaagaaaggaaaattcccaatcaaagaatgggagaaagtaaaaaaaggaagaagaagaaggaaagaaagctcctgatcaaggatcgaaagaaaacagaagatatgtgcagagaggtctttggaccggacaatatctgaacaatacagaattgccaccaaatgaacgaaaaaag

SEQ ID NO: 17000 - DNA, 405 bp, Glycine max
  unsure at all n locations
ntgttagtttccaccaaagaactaagcttttcagttttgagtagactctcttttcaatcatgttcttgtatatgcaaaactcgaatatgagatgctggttaatggatctcaacttcgnttcacttgaaccaacataatgttggttgagattcatggtttgaatttatttctagactgaaaaatttaaaaagaattataaatataaaattaaaacatctattaattaagatattaaattttattgaaaaaattaaacaagttcaggtatacatgaataatatctagaatattaataattggttctattactgtacctttataataaatagtcaaagacatgtccaaacaaatggtttttatgacgaataatactactcatttaatccaataataaatattaattac

SEQ ID NO: 17001 - DNA, 371 bp, Glycine max
tgcatgtcttcaacatctgaccacttccagggtgctggaactacttcacatggatttgatggggcctatgcaagttgaaagccttggaggaaagaggtatgcctatgttgttgtggatgatttctccagatttacctgggtaaactttatcagagagaaatcagaaacctttgaagtattcaaagagttgagtctaagacttcaaagagagaaagactgtgtcatcaagagaatcacgagtgaccatggcagagaatttgaaaacagcaggttcactgaattctgcacatctgaaggcatcactcatgagttctctgcagccattacaccacaacagaatgggatagttgagaggaaaaacaggaccttgc

SEQ ID NO: 17002 - DNA, 360 bp, Glycine max
taaacattcaatttcgaggctctcgatatattacggtacttaatcaagcatccaagaaaaaatttattgtcgtttgaatttgctcagagattcaacattcaatttcgagcgtctcgatatattacgggactcaatcagacatccgagtaaaaagttattgtcgtttgaattggctccgagcttcaacattcaatttcgagcgtctcgatatgttacgagactcaatcagacatccgagtaaaaagctattgtcggttgaatttgctcagagattcaacattgaatttcgagggtctcgatatcttacgggactcaatcagacatccgagtgaataggtattggcgtttgaattggctcag

SEQ ID NO: 17003 - DNA, 369 bp, Glycine max
ttcttgggaaaattagttattggcccataacttgagaaggcatattttactattttagaactctaagtagtaagtataaatctagggattgcatctttaaataattttccaagttcttgttaaatatttgttagatggatctaattaaaaaaaatattagttcaagaacctattaaataagtaaactatcaacctgatccctgaataatttgaaattctcaattaggttcctatacttaaacgaaccctaatgaaaatgttgccaaggatccaattagaaataatttacatgtttagggttctaaatctaattacagacttttaaaagtacaggaacttatctaaaatccctaaaatagttcagaaacc

SEQ ID NO: 17004 - DNA, 576 bp, Glycine max
  unsure at all n locations
acatcgctacacaattatngtaactgtacaaaccgnganagtacggatgacangtancncacaaccaccaacgcagagatgatacgagacatcacaaccacaaacatacaaaaactcaagccacgcgaggcaacgacaagcaacaaattgttcctttcgactacgacactccaaccggagaaagagcgaaaaacagaaccgaacgcccgcaccgacaatgacgcaaccggcacgacgcactccgagaaaccgaccaccaacaaacggcgagcacacacacggacgcgcggaaggccggcggacatcgaccacctcgaacacaccacgcacaagacaaaccgaccacgcggacgcctgaacggacagacctacgcaagaagcgcgcaacgaacacccgcgatgcaacacaacgcaaacgaacagcgaacagcgtacagcaacgcactgcaggagagcacaccgcacacagaacaaaccgccgcgagagaagacacacacgagacagaaacgctgcgcccgaatagagcgggcggaacggaaacgagtgctacaggcaccaacgacaacaactacccg

SEQ ID NO: 17005 - DNA, 370 bp, Glycine max
atcttcgatattgttctaagcactgtcggcccaaagggagaaagattaagatgaccctcaatccattattcataactccattgattatttttatttaagaactttaaagaaatccattttgtatttttatttaacaactacaaggaagagaagatgaagaatgcatggattgcactttttgtgcaaccacatgtttttttatcaagaaattcacacagctgttggaaaggaaacgaaagaaattccacttaccattattgaaagaactaatgcagttctgatagtattataaaagcgaagatcttataagagaatgaaatccttttggagtgctataatatggtggtagaattattcctacatatgacat

SEQ ID NO: 17006 - DNA, 388 bp, Glycine max
tgaagtgagaaagcgtggaagagtcagtcttccttcttttattcgttgaccacagagtggtacctggagatatgtcgcgagggtcaagagaccttggggacgtcagatggggtgctattgcccaaaaccaagcttgaccaatcccgacccaacccggacatagtcagtcagtgagaacctgtgatgtacctaaacaggtgagctcctggcagtcaaccgataaaagaacaaagaccacaaagcacggaggcttgtgtggtggctggccagctatggatcttgagtgatatttggaatatggcctctggtagtcgattaccaagggtgtgtaatccattacaaggtttataaatgaagacaggaagttaagatggcctctagtaatcga

SEQ ID NO: 17007 - DNA, 372 bp, Glycine max
tgcattcttgcccagagaatgagtccacggaggaaatgcttaccacctcaaaagactggaaagcggtttctaatgactcctctgcggcttccacataaggcatagaggacgggcagctcaccaagaggtcttcctcgcctgacacgatgaccaaatgcccctccactacgaatttcaacttttggtggagtgtagagggaacaactcccactgagctgatccacgggcgccccaacagacagctgtagggggggttaatatccattatttggaaggtgacttgacaggtgtgagggcctatttgtactgagagatcgatctctcccctaacctctcggcgggtgccgtcaaaggcatgaaccaccattgaac

SEQ ID NO: 17008 - DNA, 396 bp, Glycine max
ttgagccaaaatcttgactcaccgtatatcttgatccgggtgagaatgtcaatccttaccctcggaagcaaaaaaaagaagagaaggaaaatttccaatcaaaggaaaaaagagaggaaaggaaattcccaatcaaagagtgggagaaagcaaatagaaaagaaagaaaattcctaatcaaagaatgggagaaagaaaaaaagagagaaggagaagaaggaaagaaagctcctgatcaaggatcgaaagaaaacagaagaaatgtgcagagaggtctttggaccagacaatatctgaacaatacggaattgtcaccaaatgaacaaaagaaagaaaaggaaaccataacctaaaagtggtcttctccctttgattaccaaccaaaatcctgtgcgt

SEQ ID NO: 17009 - DNA, 348 bp, Glycine max
tttcttcttaagcctttatggtcttaaacagcatatggatgatgattgaaaggagacctcacatgcgagtatataacatgtaactctcaccaaccatggatacgactttgctctactctagaacgccaagagaagtccacgaatcccctaaactacctggaaatgcccttggtcgggttatcaccactcatcatcccaagtgtctttgaatcgttcaaaccgtctcctaggggacctatattatatctcatccatcttctcttaacgaatcctcactcatccttcatgatgaaaagcatctatcctcgaacgatgggcgtgtcagtacatgggaatagacgctaaaga

SEQ ID NO: 17010 - DNA, 369 bp, Glycine max
ctcagctttaaaacaaatgcttcattatttcctaatattcatgagaatttcgacgcatcaaccagaatcaagcccaagttattgggcaagcaatcaatggggctaaacacaccaaatgattatgatgatggatggctcaaattctcacaaaggtaaacttatcactttcaaaatgagctttcaaaactatcatgacatgtaaatgaaaatcaaggaattcaagtcacaacatgccaaaaacttttattttcaaaacaattacccatttcttgaacatatcctataattcagagataaacatgcaaagtcgtacatgcacacaaaattgacccataatattaaactaacaatccgacgaaactaacaaca

SEQ ID NO: 17011 - DNA, 360 bp, Glycine max
ttcttttgttccttttttataaaaagagaagttctgaaactcatcacgttgtctagaaaagccttgaggtggatccaagtgctctctgatcattcattagcatattcatgttttggtggcatactcaccactgtttgtttctttagggaactcaccataactaaaaaagcgcaaaggcacccctataacacccgatccagaagtaagatggataacgaagagggagtgcaagaacagatgaaggccgacctatcggccttaaaagatcagatggcttctatcacggaggccatgctaaaacttcaaaaaactatagaagataatgctacggcggccgcttccaatacaactagggaagcg

SEQ ID NO: 17012 - DNA, 393 bp, Glycine max
tatgctgcaaacatttacaatatatttcctcaaccttaacagcaaaaccaacctcagcaaaacaattatcacctctccagcaatagatacaaccttggatggaggaatcaccctaatctcagatggtctagccctcaacagcaacaacagtagcctgctccttccttccaaaatgctgctggcccaagcagaccatacattcctccaccaatccaacaacaacaacagccccaaaaacaaccaacagttgagacccctccacaaccttccctcgaagaacttgtgaggcaaatgactatgccgaacatgcagtttctgcaaaagaccagagcctccattcaaagcttaaccaatcagatgggacaattggctacccaattgaatcaacaacag

SEQ ID NO: 17013 - DNA, 375 bp, Glycine max
agcttgcccagagaaggagtccacggaggaaatgcttaccacctcaaaagactggaaagcggtttctaatgactcctctgcggcttccacataaggcatagaggatgggcagctcaccaagatgtcttcctcgcctgatacgatgaccagatgcccttccactacgaatttcaacttttggtggagtgttgagggaacaactcctactgagtggatccacgggcgccccaacagacaactgtagggggtgttaatatccattatttggaaggtaacttgacaggtgtgagggcctatttgtactgggagatcgatctctcccctaacctctcggcgggtgccgtcgaaggcacgaaccaccattgaacttggctt

SEQ ID NO: 17014 - DNA, 412 bp, Glycine max
  unsure at all n locations
tcacttgcttggggatgcaatacacttcggcttcatttgcatcagctatcatgaacgccgtaccttctgtaacctttgtgctagcagtaattctcaggtgacattcaattttctttttaaagcagaatatatgatactttaattactaactaaatcccaagagacaatagcaagtaatattcccaacatcacatgcatggcttttcattttgtaaaaaggttgggggtaccttgtacccttctaaaatgttttcattttggcatgtatgcatgctttttcttttacgtctaaacatcacatcctttatctttcagctctatttttattattttttaattatcttgacactttttctcaggcaagcgctacaaagagaaactanaattagtaaggaaataatttatatgtaat

SEQ ID NO: 17015 - DNA, 366 bp, Glycine max
agctttgaaaattttgggagttgtgagtgtaactgatgttacactcacttaagcagttttcgtgcttcttactaagcgagcaactgcgctaagccgacgtttcagattcaaaatcagttttctttttttttttaacaaacaaaagcttggcttagcgctcagataaaaccgcttagcgagttatgcaaatcaaaaaacctgcaactctcgctaagtcgggctctctaccagcttagctaaaatgatgcattttaagtacagaggagcatgcgcttagcggaaaaggactcgctatttctcacattgccgcaaggaattcagcttagccgccatgactggcgcttagcttcatgaaccccagttctg

SEQ ID NO: 17016 - DNA, 406 bp, Glycine max
  unsure at all n locations
tcttagtttcagatgatgcagatgggttggtagctacctcatgcactcctctaatgactatggcatcatttctggcactaaactgctgggagttggaagccatcttctcaattaaatttctggcttcagcaggagtcattgtctccaaggctccaccactggcagcatctatcatacttctctccatattactgagtccttcataaaaatattggagaagaagctgttctgaaatctgatggtgggggcaactggcacatagtttcttaaatctctcccagtactcatacaggctctctccattgagttgcctaatacctgagatatccttcctgatggctgtggtccctgaagcagggaaaattnntttcaagaatactctcttaaggtcatcccagctcgtgat

SEQ ID NO: 17017 - DNA, 375 bp, Glycine max
  unsure at all n locations
tgtttatgcattcattataagctttttgaaagtactttaattatttaatatactttttgatcagttctagatttttccttacaagttctactactaaaattgcgatacgcggtcaactaaaccccgaaaagtaataaaatgatcaaaagctatttttttggttaaataaaaatgtcctttgaaaatccaagttgttatttatttgagttcaacattctaaatgttgtgtgacttacataaaaatattagcatatcttgagggactaaatgacaatgagtattaagtttaggaattatactgatacagngaggaatctcattatttacttttatggattaaattaacactatctcacacttttacgaaagaatttg

SEQ ID NO: 17018 - DNA, 371 bp, Glycine max
  unsure at all n locations
tggcatagcacaaatgtgacgagagattggtgccttctttaattatgccaatncttctgctacaacgtcagattctttagcatatgagactttttatatatagctgagcaaatacaataaatagcatagcatattactattagcataatcaatattgtcctttaaaagatgcaactctcaccaatgttcaatgataacttggcaaagtagtttctacattctcccgggcattgatttcttcaataactatctcttttttacaaatggaaaattgtgtgttatgtagacatcaatctttggtaatgtcatcaaatggaaaattgtgtgttatgaacacatcaatctggacttcctgcatactaatcacaata

SEQ ID NO: 17019 - DNA, 383 bp, Glycine max
agtcttcatgatgaatcaacaatgattcaaaggtgttttgatgataacaatgatgacaacaaaagatgatgacaaaaagctcaagagaatcaaagaacatccatctcaagaaaatctagaacaagtcaaagagttcaagaatcaagaagaattcaagactcaagaagaaagtctacaaacaagaatcaagattcaagatctcaagaatcaagatcaagattctagactcaagattcaagaatgaagaaaagactcaatcaagataagtattaaaaagtttttcaaaactttgaatagcacatgagtttttgacaaaacctttaccaaagagtttttactctctggtaatcgtttaccatattgttgtaatcgattaccagtag

SEQ ID NO: 17020 - DNA, 398 bp, Glycine max
tgaatcagacctcagtgtgaaaagttatgaccattttaattttacgagagcttacgttgttcaatttctagcatctcgacatattatgcgcccgaatcggacatccgtgtgaaatgttatgaccatttgaatttctcgagagctatcgatgtttaatttcgagcgtatcgatttattgtaagcctgaaccggacatccgagtgaaaatttatgaccatttgaatttcacgagagcttccgttgatcaatttcgagtgtcactatatgggatgcgccccagttagacattcgagttaaatgttatgaccatttgaatttctcaagagcttccgttgttcaattctgagcgtctcgttatgtgatttgctttgatcgtaaactccggtgaaaagttatga

SEQ ID NO: 17021 - DNA, 355 bp, Glycine max
atctttgctcaagatggaggaacatattcatactttgaggagaaacaagaaagaattcaagagaaatactattgagtgaaacacaatgcttattgagtttatcctttgcttggtaaagtttttggaccgagtcttacatcattgtaaacacactccttgagtgttagaatttgtggttcttcaaactgtttgtttttgaaagccaggagtggtttagtgacaaaataatacttctttgttcttaaatttaaggggagtctgagggttgtgctagtaatggcctagatgatacttgtaaaaccaaaagtgtcatgttagaatacttgttgtaatcaaatgttgattagcgcaagcc

SEQ ID NO: 17022 - DNA, 391 bp, Glycine max
tcagtgccaagattccaacaacagtcatggtggatatgtatttgtgtgtgcctaattaaagtaattatctttagagatctaatcataatatttatctatattgtgcctaattaaagcaattatctttagggatctaatcataatatatatattttgtagtgtgcctaattaaattaactatctttacgagtctataaataagatgttggagtctataactaatgacatttgaaatccactacctattttatgtttttaaagctttgagactgtttcgggtgtttctgatgcatggacaacactatgaggacagatcataatcatcgttccttcactactggtatgtctatgctaatttcttctaagctttgtagtttgactttgaccatga

SEQ ID NO: 17023 - DNA, 442 bp, Glycine max
  unsure at all n locations
tgagcgcntgtgatgcctttgatacatggactaccttagctggttcccggtgattccccagagttcaccagagagcacgcgcttgtcggccattcttcgtgcgtcgccgtgcaatggctcccaccatcccagacacaaatccctgttataactacctattgtgcagctctttccattatcgaatgtacgaactgtcaaatcaccgatatgtccttctcttccgatccgaagaccagatgctctttcacagtaaccttcgtactttgtcgctgtttacatggaacaattcctattgagttgagccgatgcccatcaactgcccatgtcgcggcacctaactccattctcgaatgccattgacacagatatgtctatttccctccgaaaggaatcttgctaccctctcgtagggactcataccgttcacccactttaagccgtc

SEQ ID NO: 17024 - DNA, 401 bp, Glycine max
ttcctacaataatggtcccttcttattgcattttttatggagagaaagtggcatcaaagaggttgttgctgatgttgttctctgagttgaaagtatgcaactgatgatggaagttgcggcttgttgaagatgatatggtagtaaccatacttgaaggaaatcaaagttgttggtaaaaaccaataagagaatatagaacctaattggagatagataggttaatagaataggcaagaagaacaaattatacgcaaaatgaaaatgaagggaaagaacaacacatatataggatcaataaaacaactgatgattatgtgaaagttgatcataaaaagggcttgacatatatgcagcatttccctaagtgcttgttgaggatcaaagttgagtgaaaaaaaaac

SEQ ID NO: 17025 - DNA, 363 bp, Glycine max
tttgtcgcattaatgtgcacgcgccgatggattgaactgggacttggaacaggaacattcgcttatcctgcgttgatcaatacgaatccctctgctaatgcacagaataataaatgtggcaaacaccgagtcctgtgtggcaatcctacaacgatctgctacactattccgcccagttctccatgcccaagtctaactctattcttgtcattacctcccacgcatatcgacaagagtctcccaacattcccagagacactgcctgaatataccacaatacactactgatgtccatccacgtacccatctccatctgcaaatgaactctccttaactaccctgggtaatggacccgacgaccac

SEQ ID NO: 17026 - DNA, 286 bp, Glycine max
caccatacagacctttggccttccaatgcacaacctggagcaattgaacagcccgaaacttatgctgcaaacatttacaatatacctcctcaacctcagcagcaaaatcaaccaccatagaacaattatgacctctccagcaacagatacaaccctggatggaagaatcaccctaatctcagatggtctaaccctcagcaacaacaacaacagcctggctcttccttacaaaaggtgttggcccaagcagaccatacattcctccaccaatccaacaacagcaata

SEQ ID NO: 17027 - DNA, 317 bp, Glycine max
ggtcattggcatgatctgatacccctggaccggacagtggcacgcagaagctttttgattttccattttcagggtttggtgtcaccgagctctgccatgagcgctgctacggaaccacgacattcgttttagattcaacagcaagatgaagaacaaagatctgacgcggagaaaccgcctcggaactgattggatctcaatttcgacagatctgatcgattcaacgagatgatccttcagatgtacagcttcgacttgaagcccgagtcttacgaccttcccaaggttattctggactgactagcgttcgaacatgc

SEQ ID NO: 17028 - DNA, 433 bp, Glycine max
  unsure at all n locations
gcgaagacaaaccccaaagccaagcctgagaaagtggaggagttaaaacccccacaancaggagattgagcgagactgaaacccacaaaacaagagcgacacaaccccggcacaacggcgacttaactttcaccacaccaaaaagggaaagggacagccaaaaaacacaccacaacagaagagacgcggaacacaacgaaaaggccacgaacaaccgacgcacagcaaaaccgaacaaaagcaacggcaggcccgaaacagacagccgccaaaaacaaaaacagcggacgagacagacagacgaaaacaagcaaccacacaaggaacaaagcgacaaagcaacccacgaaggccacgacaacaaaaacaacaacaaacgccgaccacaaccgaccaacacaaaccccccgaaacaaaccccaaaaacaaaacc

SEQ ID NO: 17029 - DNA, 357 bp, Glycine max
atcttgccacccatctcgcccaggagagctaggttgcttgctctagaatgcaccaccttctggaggaacttcctgaaaagcccacgtacgcctggttgctatttgcaccaccctgtttactagatacaccccctgcttttttttgctgattcattttccgcaacgctacgaaactttacgaatatcacaacgagactcgttttctttccgctatgctacggatccttacgaattacgtaatcatccatttttttggctttcagaatgttatggaacttcacaaaatgtgcattaacactgtcttttgactttcagcatgtcacataactttacaaattgtgcaacaatgctttcttt

SEQ ID NO: 17030 - DNA, 391 bp, Glycine max
tgaccttggtttagacatgattgatacatgatttgtgacttgtaggatttgatttgggcaagattggatgaggggaagtgtggttttcgaaatctgcattttgtgcagatttttgctgtgaaattgtgcagcaggattttgcataagtgcagcaaaatactagacatttgctggttgtggaaagagcagtgcagaatgagttctggatgtttgctagtagatcccaacggtcaaaatgtaagcttatgtactagagacttccagtaaaaatttggagtcgatccaacggttaacgaattgtaacgaacgaattgttactggggtctttaagtgagaaaagctgtgattttggttggtgttttggcaaagatttctgcctttgctctgtttc

SEQ ID NO: 17031 - DNA, 365 bp, Glycine max
ttcttgttttgtttgcaatatttatgttgtgtttagattgatctctataaagaataaagtttggaccaattggaaataggcatgactgagatcacattgtatgtaattttcatgttgcttatccatattgacctatgtcattgagtgtactgatgtggtagtcattggggtctagttacatttgttgtagtgacaaagacacaatgattccattattgcatgagatggaccaggttgttaaggtggaagtttaaaggttaatagcatacagatgcgcgcttaaggatttttgataaaactattataatatgtagcccaagtgggagattgttggaattttctattccaataattaatgtgggcta

SEQ ID NO: 17032 - DNA, 305 bp, Glycine max
ctataaaactaagcttcctagaatcttaaaggtcctgctgtgctgaccatttctgttggtaggtagcaagagcctatatgctgacttattagagtagatcccagtagggtctgctttccacaacattgagtcctgcagctgctgatgaatagatatagcagatatatcgtccatgaaggctattgcttgctcattcttgcgataaaaaaagttccttctccatttaaaatcccaattccaagtattctgataaaactttcccattttataacatgggaaggttttgctgtctgctaatcacaaat

SEQ ID NO: 17033 - DNA, 355 bp, Glycine max
atcttcggaagaaagtgatgaggtataagccctaaaggcagagcttgaaagagcccgggtagtcgaagagaagttcaagtccatagccatcaaagtctgaaaaagtatgatgaactaagggacgtcaatatggccaccgctgaagccttggaacgagaaaccaagaaggcccgaaaggaagaacacgaccaaagcaaagttttgaggggctttatagggcagcaatagtgagctcaagctccgaagaggtgaaaggaatcatcatgggtcaaaggcatgatctttaaggacgagctaaaagcttgcctcaggtcgaaaagaaatttgtcccaacagttaagcgagactgaaggga

SEQ ID NO: 17034 - DNA, 400 bp, Glycine max
tcatttctggtccataggaagacaaactatatcctgtagtttaaggacactttcaactttttacttgttatgttcataccacatttaactcataatatcattaacattcaacaggaatcactgagaactttgaagcattgttcctttcctaatgtatctctggaaggcctaatatctgaccaatggaaagatatgggatggcaaagacctaatccatcgaatgactttaagtacacaaatatgttcttatgagagctcacgtgacattttggtcacttttcctatgtgaaagaatttgcttattaaatgttatgaaaacagtgtcattttagtgctgctaacggttatggtagcgtatacaattcactaatttaatttatgggatataattaaaccaaat

SEQ ID NO: 17035 - DNA, 359 bp, Glycine max
agcttgtagggttaaagtctcacgattgtcacgtgctcatgcaacaattgttagccgtggctatacgagacatcttgccaaacaaagtcaggttcacgataactcgcctgtgctttttcttccatgctatatgtagcaaagtgattgatccagtaatgtttgatgagttggaaaatgaggccgcaattatattgtgtcagttggagatgtattttccccctgctttctttgacatcatgattcacttgattgtgcatctagtcagagaaatcaaatgttgtggtcctgtttatctacggtggatgtacccggttgagcgatacatgaagatcttaaaagggtatacaaagaatctatat

SEQ ID NO: 17036 - DNA, 391 bp, Glycine max
ttgaatgaggctgaagaagctgctgctcatgttctacaagattcggtggagattaatttatctcagcctcatttgtcacaagatagtgacatggagttgatggtaaatatttgtcacaacaaagtagttttatttcaacctaatttgttgcagcactccatttttatatattacaattattcatgtttggcatttgcatgtaggtccctgcaacaattgttccaccaatagcaaggaataagctaaccataacaagagccaaacaaaggaaggttatgatgcagtataaagaaaactgaagacccattttttgttgcattttgaaggttgctgagtttgaaggttgctgatgaagaaaactgaagaagcattttttgttgcattttgatat

SEQ ID NO: 17037 - DNA, 375 bp, Glycine max
atcttgcagacctaacattatctatgtatgataagcaaaacacatctcaacacatgataataataactagcactatattattcttttaattatagctcaaattcaaatggttgtgattttgtatttgaagatactctccacaaaatatattaaatcgcatatataaataatggtgttgacaagaactactaatacgtcccatgaccccaccccttatctacttattccatattgacacatatgcataattaatattaagctataaacttataaaaaacaaatttttatgttggcaaaaaaatgtcaatattaacaattatctatcactagacaataaataaattcgactaacaaaatttaaatatttaaataaaa

SEQ ID NO: 17038 - DNA, 405 bp, Glycine max
tcttatcaaattatatgatcatatgttaccaatgctttattattttattgtcaatgtaaacatattgcacattgtaatgttggagaagaaaaagacaattctgtaacatgtcgagtgtatattctgagcacaaattggccctttgctaaatgttaaaccgaagcaaaatcaccatgattgaacaacagatgtaatttcataaattaactcctgagtgcaacaaactgccatacgttggctccaaactcataaattaactatttgtctgtcaggagcaaatttattcttagctacctatttacccttgttgatatcatgactaacatactggcttttgttcttgaattagcatccacataataaagccggaacaaagaacataattagaacacccattttcttctt

SEQ ID NO: 17039 - DNA, 372 bp, Glycine max
ttcttatacatttatgattctccctatgcttgaagttcattttagaagtctaaaataaagttgactttttgtctagatctactataacttgtggtttttatcaagattatgaccaacctatttttaactcatccgatgaaatgtaggacttgacatttaaattttgagcacatattaaatttgagcctcaattttatagtagtatatattaaatttgatcactttaactattccattaaatcatgcaatattgttctaataaccatatatcaaatttaacattatttaaacaataatatatatatatatatatatatcaaataaattacttatattttatataacattaaatatttaaataaataatgctat

SEQ ID NO: 17040 - DNA, 406 bp, Glycine max
  unsure at all n locations
ttaaaatttgaattaaaacgttcagaaacagccggtaatcgttttctatatatgtgcaancgagtacacagtgcaaactttgaattcaaattttaatagctgctgtaaatcagttttggccactggtaatcgattaccagagagtaaatttgttgaaaaaaactttttaacttaaaattcttggccaaaccttttgctacttcaattggaattcccttcctatttaatataccctctctaagactctacagactgggttgatcattcatcttgaatatctcttaattctttgtattgaatagagctttgagactttgagacgcatgtgaaactttggcatcatccaaacattcagcttgatcctttgtctacaatctctccctctttgatgatgacaatccctgaa

SEQ ID NO: 17041 - DNA, 380 bp, Glycine max
atctttataagctcaggtttgggagacgaaggtcaagtggtcgcgatatacgaagatgatgttccaagtacattggatttggtacgaccatgccctcctgatttctagctgggaaattggcgagtggaggaatgccccggcatttacgcaacgagcataatgtaaacctttacggttttaaaagctctatagttgggcctaggctttagagtttttccttttgttaaggctttgtgtcttttgtttttgaatttataatacaaggatctttcttcatctgttcctacgtctctacccattctcattcatttgcatgtgtacttctttatttctgaaacgacagatctgatgacgagtcccccgaaggtactaatacctgg

SEQ ID NO: 17042 - DNA, 399 bp, Glycine max
tcaaggctaagtcttcatgttgcttcctctatctctaacaatagcctcaaccatcaacaacaacataattccatcaccatttgtcatcaggattcatatgatcatacctcacataagccatagctgatgtcaactatcatggattctcatcatacataattataacaagtgacacacattgacaaccaactaaaccagttatcactactacatacaccaatagccaactaggccaccccaaactcagatgtcaacactaactctactccatggagtttcaacacaatatgagtggttccttatgatccctaatagaataacttttgtgatattttgtatgagtttttatgccattttacatgcagtttcttggcacaacccacgtttggagactaattt

SEQ ID NO: 17043 - DNA, 375 bp, Glycine max
ttcttgtaatctttcacacatatactgtaatcgattaccagagtagattttcagaaaatattctcaacagtcacatctttttatgtgattcttgaatggctatcaaaggcctatatatatgtgacttgagacacgaatttgctaagagtttttcagaacaaaaaaagtcttatcctcttataaagcaaaattgttttatcctcttacaaattccttggccaaattacttgtgattcaataaggaatttttgagtgctcaaattgatcaatctatctctttcaagagagatttcttcttttcttcttcttcattctgaaaagggattaagagaccgagggtctcttgttgtgaaagaattctaaagacaacggaag

SEQ ID NO: 17044 - DNA, 384 bp, Glycine max
  unsure at all n locations
ctcagcttctccgaagcttattaaaggctttagccatttcagtttcntctgaaagacccacggtcagatcatggaaaagtgtttgtgaagttgcagaccaaattttggaagatccaacggttaatgaaggccgggcagcgttcttatcgaggcagcttcatgtagctttctctagaagcttcctcgtggcttctttgagaagctttctcaagaggcttctttgagaagctacattcttatctatccacccctctattaactaaattaacttccttaaaaataattacggatgaaaataacgccacaaataatcaaacattanacataattactaataatatatagatatttatatcagggtgttatagtagtggtcccagtatg

SEQ ID NO: 17045 - DNA, 374 bp, Glycine max
tttttaatcctatttttctaacaaatagccttcacaaagtgtgccgaatccgatcaatgtgagtgccatcaccttgatgcatggcaaccaaatgcatgtgcctacacacactagcaacatctgcactggaacctgtcaaccttgattctacacctgaacaataggatgacttaattgcactatagatatagctgcctatcataaattttcatgcaggtagaccttattatagtaattccaactaacatcaccctgctatccctctctcattcccacctataacaattcccaacaaaaagatggaacatgcgtataaggacatcttggagaccttcaaaattgcagaggagatcatacctctgctagatgccatc

SEQ ID NO: 17046 - DNA, 383 bp, Glycine max
  unsure at all n locations
ttacataagattntagtaatgacccactaacctataattaatataacttaatgtcattaacctagggaattaaaagaacttaatggctgagtgtaactgaaaatgtggcaaccaaaggtcacccccaacagccaacaagtctgccaccatttggtctcccaaaaggctgatgcctaggttgccaattgggcccttattacaacttgaactaaacctaactaaagcccttttagttgattaacccaaaacatatttttggtcacccaactttacaaggattgggccattatttagataaactaaacactctaagattgagacaaagtggtgccatttaatcctactccatctgggccatgatacaactcacaaccttggacttt

SEQ ID NO: 17047 - DNA, 353 bp, Glycine max
ttttcatgcattcttgctagccaagatgtgctgtagccttcggattgagcttgaacttgggcctgaatcagtccctgaccctgagttctccttctccttctcctctttcaaggcacggattagccgatttggcagatacagataccgatcctgaaagcgggaacgattggcgacaattctccgcccaggtctccatacccaaatgtcacccttttccggccaattttccggcgcatatggaaatccctcgccggacattccctgtgccactggctgtaaattcaataatacattattctcctccatgctcatcttccatctccatctccatctcgaacgctacttatctagct

SEQ ID NO: 17048 - DNA, 388 bp, Glycine max
tcgacctcagatccctcttgttggactatgcttattttatacagcattataatcataacataattaaaaactaaaaaacctgcaatctatccctagcaatgccattatctagccctgctctatcaagttctaaggaaatagtatagttcccagtgctaaagttcctaacagtacacaccaatgggtgatcagactaaaagcatgcaacaatgaagcatcgatagaagcagtgaacacataaaccacacttaattagatatgaaaagtgtttacatcaacttttcattagacatccccaactagagttgtagcaagccataacaaggaagccttttctacaattagatagagaatacagagaaattattgcttacacaggaagggggat

SEQ ID NO: 17049 - DNA, 355 bp, Glycine max
tgccgccttgtcggccagggaggacaaagcatcccaaagaactatgcctgttacgacgagcgattgtgaccgctttaggagcggtatgcaccacgcttactttgtagctctctacggattgtgttttctgcgggaactaaacatgcaatttaggccccacgaactttctgactatctacaagacaaaatattcatatatgggtgccgataggagactcccatgggatactttgatcacacaacagccttgcctgatcgcacatagatgccccatcagaaagtcgtgcagacaagagaactgggtctacgcaagcagatgcgatagatgccaaaacgcccacgcacaggcgcgatg

SEQ ID NO: 17050 - DNA, 377 bp, Glycine max
aattcttcgaatatgaattcttaaaccccatcctgttcccaaggagtctcactctgacctaaaatggggaatatcctccctcccaacctggtggagctaccagaaacttggttagctgaattaaaactatgtttcgtcccatcaacatctctaagaaattcaggctccttagtggtaaccactgagtccatcaagttgccgctgaaccccaaatcagaatacaccctcaaggcatcctagatatgaaaatagatactactagatatagtagtggcagaacattaaaaaaactgatatatttgataatatcacaataaagcacccatatatatgttcatatcctctactgtcaaatcagacaaagaactcatatgact

SEQ ID NO: 17051 - DNA, 307 bp, Glycine max
ttcttcaagttgcgtggacaacaacttatattgggccagcaatgcatcttgagatcaaagctctaatagactatatttggcaggaatatgaactctatcatgcataattgtgtggtcactggcaaccatattttcaattgagtccatggcttcttcaagtgtcttcaccggcataacccaattttgaagatgcctaactatataagctctgaaaaagctacagtgggagtgttctgtaacaagctatagaatcgttcttatgcctcagtcaaagattcatctagaaactgatggaatgaataaatta

SEQ ID NO: 17052 - DNA, 375 bp, Glycine max
tgacccttacgagatagatgggacgatttttatattaacttggagaaaccttccatgaatctctggtaatatcctgctaggcccaaaaaactgctaaattcaaaaacagacttaagactctcgcactcgagaatgacttctatcttagaggagatacagctataccccttgagatatcacatgccctaggaagctaactttctctaaccaaagctcacactcggacaacttagcatagattattcattcgtatgggtatgcagcacaaacctaaagagctcttcatgttcctctttagccctggaatataccacaatatgttctatgaatactaccacaaaactaacgaggtaagggtgaaagactctatacatg

SEQ ID NO: 17053 - DNA, 479 bp, Glycine max
acccgcctggcgaccacgacggcgagaaagttgtgatcccaccacagaaaactgaactttgagcctgatgaccctgcaaaccacgggaacaggacccgcaaggaacccgtaagagacatttggcaaacattctaggagaggaaccggacggagccaccaaaccggaacagcacatgcagcatcgagtcggacccagggcaggggccaaagaagcagacaacacctacaattccggcctaacaaacaagatagaagaacgagcagacaacaacaggtagcgaagcaccaggatatagcccaaaagatccatacgcacgcccgcggaccaacgcgaggcactacccgcaccgacttacagcccatagagaagcacccaaccctcaaaaaagacggaaaaccaggcggcagcaaaaaacccgggcccaaggccaaaccaaaaaagcgggccaacaaggaagacccccaaacacacaagctga

SEQ ID NO: 17054 - DNA, 352 bp, Glycine max
taggaagtatcaatagaggttgaacccttttaagttctctattggggtcaaaccagggaaatagcgaggtttcatcgtcagccacatagggataaaagtggaccccgaaaagacgaaggtcatccttgagatgccggaaccccataccaagaggcaagatcgaggttccctgggacaaatgacatatattgccacatccatatcacaactcactgctatttgtgagccgtcgtacaaactattacgcatacaccaaactgtacgctggaacgaggatgcaaagacgcatatggaaagatcaaaaagtgtgccatgaatcctcctgtgcttatgccaccggaaactcgaaagc

SEQ ID NO: 17055 - DNA, 140 bp, Glycine max
aagtgctcttacgcatatggcggtatacacaccacataggggactcttcgcacaacacgcatgaggcgctaaataagcagccccgaacccgacaagaacggtgagcgaaacccggcgagcagaaagaaactcaccgacac

SEQ ID NO: 17056 - DNA, 363 bp, Glycine max
tttgcatgctttctttatagatcatatgatctcacagagagaaattaaaaaaaatgagagttgtgtataaaaaatatgaatgtccatgtatcatcactctaaatcttttgtaataacacaaaattaattccttttattcgataaataaaatttgatgaactattccagaattttttattacatctctaaattatttattttttagtttggtatctgaatttgtacttattttttttaattaagctcatgccacacttaattaaaataaataaatacaggttcaggatcctattaaataaacaatttaataatctaattaataaaataaatagtttacggacttaaaaactattaatatatgca

SEQ ID NO: 17057 - DNA, 555 bp, Glycine max
  unsure at all n locations
tgcagatcgccanctgcangcanaagtcgcanagaatgaccgcacaagnagtagtcgaagagacattnannctnntccnnncnnccaagagacggggttganatagaagatcgctagnacattncgccanannnccnnnnnnanannnannnananacananagcccggcggccngcggacacaacagcgcacacacgcacgtggtggggctctcacgcaacacagatgccgagagccgatcgggagggcaaggtcaccccacgaaacaatacaaaccatagaccgaaaagaggccagggccccacacccgatcagggagccgccaaacacgaccacccgcgccaccagaaaaaaaacaagaggctaccaagccaccgacggacaccaccgacccgaagaacaacggggaggaaacgcgccccaagaaaaaagaagcagccgcaacacaacccccccaaggggagaaacacatccccccggaggccgagaaggaacacaaagacacggcaaagcaggggacaagacccaacccacgccacagagaagaccccccg

SEQ ID NO: 17058 - DNA, 361 bp, Glycine max
ttcttgcttatctcttcagggagctcaacacagtactgcatatgttccttcaacttggacctacagcaagcaataaaaacaaagtatataactatatattctctaaaacaacaaaaatcacaacaaatccagcatcatcaagttcacatatcacaaattcaatacccaaattctttgttcaggctgttcgcggccgcagtcgtggccttcccgccaccgtatttcgccacaaaatcatccttcgcacgctccagaaaagccacaggcacctgtctcccaatcgattcatccgcaacaacacaataagctaaaaaaaagtgagtcagacattcatttccaaaaacataacgctgaacttcaa

SEQ ID NO: 17059 - DNA, 391 bp, Glycine max
  unsure at all n locations
tccatgactttcactttctctcacttatcattntctattagctagacccaaacaatcggggcctacatgagtaccctgaggtacaattgtaatcctcattatcatcttccatttgcaacagcaaaaattgtctattaggacatttatgattaaaagagaatttctcatacaaaaataacacaatcctttttcccttctcaactgcatttcagcaggagtaatcttttttacattcgaggaccgaattggagggcctgatggagtaggtaaaagcgaaagtaaactggatttaatttgcgtttttggttgagcattaatagagattggggtagaagaaatctgggaatatttgtgactataggaaatttgaaatggcttataaacatgacca

SEQ ID NO: 17060 - DNA, 373 bp, Glycine max
ttcttcattcttagaatgaagttagtagagatacatatatcgtgaataatcatctataaaggttatgaagtatttcggactatttgcatccatgtctggacaacatatgtctgtatgtatgatttctaataaattagaactcctctttgcaccctttttagacttgttagtttgcttacccttaatgcaatctacacaagtctcaaaatcagcgaaatccaaagtactaagtactccttcatttactaatcgcttgattctttcaatagagatatgtcctaatctccggtgccacaacatagaggattcttcattcacaatacatcgtttttaacccaacagaaacatgcatagaagtagcatcatttttgaa

SEQ ID NO: 17061 - DNA, 479 bp, Glycine max
  unsure at all n locations
ggacgcacacagaatcgcaaatgacgcaagggagcgacgtacatacttccnncccaggaggtgaatgaactgaaacttcccaaacaacanancaccaagaaaagagggcccggaacatcaacactttcaatgggagtctcaccggcgaacggcgaacccgaaaggggaggggcacccgccaccaggcaacaccggagcgagaataacaaaaggcagaggaacaaaacccccggaaagccccccgaaagggcgcgtttaacacaaccacaaaaaaaagagccggcaataacatggggataccgggcgaagccagccccccaaataagcccgcacatagcatggccaaacaagatgaaaacaaaacccaacaccgccaagcccaaagaaaaaacacactccccagaacgggagaaatccaagggtcacaggcgcaacgacacgggacgcgcgacccccttaaaaaacagaagagccccccc

SEQ ID NO: 17062 - DNA, 378 bp, Glycine max
ttttttatcatgttcacgacaaaggactaaagaagaaatctccgtcttatgaccactacaaatcaagtcctccttgcctaacacatgatcaagccttgagcacaacaggcacggaatttgcaatttgcagtaaccagcaaactttgctataacataagaaaaaacggcatcgataaacaggaaaaagatcagcaaccattcgagaaaagccgatgccaaggccgtggtaacacccggggagagcttacgccactcagaagatgaaattccagtggtagccatcatccaaccaactcaattagcttcgaaaggagaaaccgattgctgaaagttgaaacagatcaaactatgaccttcttcccaaaatgatatgaataa

SEQ ID NO: 17063 - DNA, 409 bp, Glycine max
  unsure at all n locations
agaattatgaactagacttcaggacctataaaactcaactgctactgtttttatccttatgtcgcaatttatgtttctanaaatataacttcaccactagaaacgacataaattgcttttacatataagccttggcaactcaaatgatcaaattccttaatgtgaaaaggggaacaaacttttctatctatagaatcttaaaggaaatacggatttacaatattcaagcctaactataaccctgaaatactttccaccttttatcaaagctgctttagaccgactatgaacacaactctctaacaaagtccggaaggtggccaattgtcatcgagttaatgttcaacaatttgtggattatactcttacatgcatgattatgcatcacatgactatgtggacatgcagn

SEQ ID NO: 17064 - DNA, 382 bp, Glycine max
agcttatcagattaacattttttttcaaaatgcaacaatgagaaaagaaagcacaaagaggaaattcacagaaccaaatgagattaacatcaattcacattttgtttctaaagaatataagagaaaacacccgattcactcaggcagaggaaaacctctcaaaggtgcataattctcatgcaggcaattgttccatcacaattccaatcactgatatgtcataaatcaatttttgcaagtcatttcccatcaaatcaaagataaattgcataatcatcatggatcattagggcttttaggatttggactagctttgaaagaaatattggtttttctggatattcaaaaataccttgagaataggaaagcaacataaaaacaa

SEQ ID NO: 17065 - DNA, 402 bp, Glycine max
  unsure at all n locations
tgaatctaanaagttgttcagcaatcttcatgcccatcttggaccttaggtcgatgttgttgaacctactagttaaagtcatttcccaacctcaacccatcattgaagatgcactcacaacaatgaacaattccagcactcctcatgaaataactcccttgactgcctctgctccaataggtgtgtctaaagagagaatacaagaatttttgtgtaacgatctacctcgtcgctacgatatcattactctaaaccgcataaatttcaattttaaatgaaaacttcattaatttgcttatgaaaaaagagagtaaatcttttgcaatatacattcaccagacaaacgcacgaatacttaaatgaatntatatgtatatagatacattaactcagtacacatca

SEQ ID NO: 17066 - DNA, 378 bp, Glycine max
ttcttgaccatttttgacccaacccgggcatagtcggtcagtgagaacctgtgatgcaggcgagctcctggcagtcaacagataaaaggaaaacaagaccacaaagcaaggaggcttgtggtggctggccagctgtgaattttgtgtaatatgtggattgtggcctctggtaatcgattaccaagggtgggtaatcgattacaaggcttaaaattgaggacgggaggctaagatggtctctggtaatcgattaccaaggggtgtaatcgattaccaggcttgaaaacgaagtcaggaaacttagggagtctctggtaatcgattaccagcctgtgtaatcgattacacagaggaatgggtcactggtaatcgattacc

SEQ ID NO: 17067 - DNA, 416 bp, Glycine max
  unsure at all n locations
gacctatgatactcagcttcaatgtccttcttgatcaaagcttcgaagcaaatgttttttatatcgacattnttttcataaagtctatatatttactttaactataaaatatatcacacatattaccaatgttttgttgaggaagctcattgattatgccaatggttcatcttaaccaggtctctgattttggattggctaagttgaccaatgatactaatacacatgtctctactcgtgtcatgggaacattcgggtaatttcgccaccccatggtttaatacctacgtagaaactataaagaaattgataaaaatgggaattaatagtttaaatttgcatgtctaaacaggtatcttgccccagaatactcatcaagtggaacattgacagagaaatctgacgttttctcattt

SEQ ID NO: 17068 - DNA, 376 bp, Glycine max
tttcttcaacctcttattactgcgtacttctatattttgctcacgtttgaaaggctactaatctttgaaggtgctctattttttgtcagaagactttgccttattgcaagctcaatattctccaattcttatcatcaataatattaacataagagtagtaattaatcgtgtcattacaggcaagatagtttaatttatttgagaagtcttttgatagatttctgcataaaagtttcaaaattcaaatccattcagcgatgaaatatatactttattcatatgtaaaacccggcagcagatcaacaccttagctggttttataccttcgcaatgaaattcaaaggacaaccttgtactcttttttacgggtactatt

SEQ ID NO: 17069 - DNA, 375 bp, Glycine max
  unsure at all n locations
tgtcagaggtcattctatgcttgaaactttatattttatttctttttggnagcaaatacatttaccaatggaaaatattacggatattgcgttttttgcattcttatggtggtattcatgatgcacaccttccaggagtcaatagttgcagccggtgctggattagccttagttgactcagtggtgatctcttaacctggcatgtgcatctcttggtaataatctgtgtgcgtgtttcggcgaggggtaagtgagtggatatggatatgtacatatctacttcttctggtgacttcatactggaaaggactatttgtgtgtgcgtaccttttttgtatctttaaacttgcgttcgctagagggggttaaggagac

SEQ ID NO: 17070 - DNA, 268 bp, Glycine max
  unsure at all n locations
tttgcattagacattttgccctcacatagttctttcgacgggaagggttgcggagggagcctcaactactttgttagtttcatggggcctgttcgctgtttgttggatttggtggagcgaatgtantggtctactctgggccatgtagcattttggaaggaaggagtaagttgctgttgttgttgatggctagaccatctgagattatggtgattcctccatctgggattgtatctattgctggagaggtcataattgctatgctatg

SEQ ID NO: 17071 - DNA, 99 bp, Glycine max
aaaccatgccttgagctcccaacttgaacggttaaggccttccctacttgaaaacccgaatgccaactcttatagctgccataaatttgaatctgccgt

SEQ ID NO: 17072 - DNA, 367 bp, Glycine max
  unsure at all n locations
ttcttgcaagatggaagcaaagaaatctatcaatggggggtagaataaccctcattaattcagtcttaacagccttacccatctatttgctgtccttcttcaagatacctaaacatgtggtgcaaaagattgtatctattcaaaggaatttcttatggggaagtcaccaagactccaacaagatcccttggggaggcgccatttgcacatgaatcactcttgaggcaaaaatcaaggatcaaatggctcanggaaggtgacagtaacacatgcttctttcataaatccataaattttagaagacattataatgcaattcaaggaatattcattgaaagtatatgggttcagcaaccaaaattggtta

SEQ ID NO: 17073 - DNA, 362 bp, Glycine max
tgttgacacgcggagatttacgtcatctttcgcgcacacaagatctgtcatactgacatttgagtcacgctgacgggcggaaatacccgagtggttatccgtataaacattcttttgctgtctgtaagacaaaaagcctgatagcacgcagagactaacgtcgtcttctgcatccttcgtcaatcgcggccgacaagcccgttggcacgcggagatttacgtcatcttccgcgctcacaagatctgtcatactgacatttgagtcacgctgacggacggaaatacccgagtggttatccgtataaacattctttttgctatctgtaagatgaaaagcctgatagcatgcagagactgacatc

SEQ ID NO: 17074 - DNA, 366 bp, Glycine max
atcttagtcttgatgttactccccatatctctaacaatctctccccttttggctttgatggtgccaaacttgaattgccttttgagtgcatttggagattcttgagagtagagactttttttaaaaaaacctgaaagtttataatcactaagagaagtgtcaaatcacatcttcatcattaagtacagttgtatacggatgtatgtatacaatgcattacttcctcctaatgcaatgtttctccccttttttccattatatagccaaaaagtcacaactactgatagagtatacaaaaaaaaatatgatgtgaatagggaaaaatgatcattacaattaattcataaagaacattacgactattat

SEQ ID NO: 17075 - DNA, 359 bp, Glycine max
tccatcaagtggtaatcatagcacaagatcttcatatatctacggttgtgtgtttaactctttcgtgttttatgtttaattgctagtattgtgttagtatgtgtgttcgcgttgcttaatctcttgatattttgcttagcgagtgttctgtttcagttttcctattgagcgctttccctatttcagtattgcgtgttctctgtgaatagcgttttgcgacggacttatcgaccatttctacttgcgccaaaccatagtaatagtaaaaatcccttaccgactgattttatcgaccacccatgctgaattatttgtgactttttgcttactacctagggttgttatttctggctgaattt

SEQ ID NO: 17076 - DNA, 367 bp, Glycine max
atcttgtgcgaatttttcactcccacattttatctctagcatgcattggatgttggtctcgtcctttgtcacgggaagccggaaggtccatatcaccttcttaattgtacacatggggcactgcgcccccaaatacgcaagtatgatgagataatgttccgggctctcgtgtctgtaaaatgcattcatatcatgcatcgcataaacatctcttcatggcatcataatgaacatatcgttcctgcatttgtctgttatcatattacagcctcacattttgcatgagtcatggcatcatcatgcatatgcgttcaacaaactttttgatctgcaaaattggataccatttgtcttcatgtttgctcat

SEQ ID NO: 17077 - DNA, 396 bp, Glycine max
tccagcatatgaagggaatttttactctcttacattcttcaagcacaccgtacgtactccatcaccatagttgaacgttaaaattgatacccgtatctcaaaaactaacacgtcatccatggcttccgataataacagtctattcttcgttatccttgctagcttcctcagtttggaatctactgaggcacagatatactaatattgctccagcgaaaaaaccaatgccggaacctccttctcttccaatcttatttcttcattattattaccattctccaacactgacaaaaacacacctccgaatcagcctatggagtccaaagtgaaacccagcctctacactcatcaggtcgctccccctctaaagaatgcatggatagttattcctatagc

SEQ ID NO: 17078 - DNA, 365 bp, Glycine max
ttttttgtcttaattgatagatgaggttgagggacaaaatctgcgtgaggtggggagagaatggctcaagaacaacacgatggcttacagaatgggtgagggccaggagtacaagcgccttaggttattatgttatacaaagacggtcctaggataaaaaccgacgttgtcttaatttatagtaattacaacattgccacagcacccattctaagacggttattcataaccgccttataatgtacgacgtaaaaacaaatttttgtttccttatttacaaaattgccaccgcgccatattctaaatcagttcttgagaactgtcgtagctggcgcgtcgtacattcaagcttttgtagtagtgta

SEQ ID NO: 17079 - DNA, 402 bp, Glycine max
  unsure at all n locations
tacataatatgtctgaagtttagtacatatgctttttctttaatttcangatcctaagatgttgagtttttaattaaaccatgtgtggcaggaaatgaatgttctgagagattggcatactatgggatgagtacaaacctggtgaactatcttcgggagcgtttcaaccagggaaatgcaaccgctgcaaataatgtcacaacctggccaggaacatgctacatcacaccattgattggagcctttctagctgattcatacttgggaagatactggacaatttccagtttctcaattgtctatgttattgtaagtttagagattttttttttcttgtttgttgagtccccatgttatgctaaaggcatttagtcttcactcttctgacctcagtttatattt

SEQ ID NO: 17080 - DNA, 356 bp, Glycine max
tgcttaataaggctatacgctggaccctggctgacattcctggtattagcccatccacatgtatgcatcagataaatttataggatggggctaaaccagcaagacaaccacagagaagactcaacccggtgattcttgatgaagtgaagaaggaggtaaccaagcttttgcaagctggaatcatttatcctatctccgacagccaatgggtgagtcccgtccaggtagtctcgaagaaaaccggcctcaccgtcataaaaaatgagaaggaggagctgattcctactcgggtgcagaacagttggagagtctgcatctactataggaggctaaaccaagttaccaaaaaggaccac

SEQ ID NO: 17081 - DNA, 295 bp, Glycine max
  unsure at all n locations
tgtatgagtatggggtacccatcacatgtggtactatgtggcggncgggcgaaggtgcacaacagggtttccacatcctcaatgcgcgcataaacccaccatccccccgtgcccaccttcaactgaactcaagcactgccacgtagcccatatcctcgattctctcagacaccgggtccccatcaatactctcaagcttccaccacatgcgatcagaaacaacattcacacagcacgaactatcacagccgagccaagcacagcagaggcacagaactctgctcaacacatccac

SEQ ID NO: 17082 - DNA, 361 bp, Glycine max
tttttattcataagctccagaagcaagctttgctgaagaggaatgattcagccatggctgatagcttcaaccagggttattagggtataagaaggctaaagctaaaattgagaataaaaaatatctgacttcattcataggttaaggttaggtgaaccacttcatagctaaaaataacctgttatattctcaatttttaaaaaatttatgaattttactcttaataaaattgtgctttttatatgtaattttttattttttggccaaaatttaaaatttatttttaatttatttttaaaattttatttttatttttttagaaaatcttacttcaacttttatacttattaacaaataaatg

SEQ ID NO: 17083 - DNA, 394 bp, Glycine max
tatgttcaaacggttgcaaatatataagcattattattatttcttaataagttaagcacccggcaagcaactgcaatggagatatgccctttgaactttgaagtcactcaatagctatacgtcaacaaatagcatcaaaaggttaatgggtcgacaaattttcgaccaagcaaatcaattgacaagatacgaatttaataattcgggcctcaaaattaaagctgaaatcattatttcacctagtgttaacattgattatgtctgaataaagaagcagaaaaagatataaaagacatggctaaaaagcaatccacatggtacccctctttctccacgtgttctctgtatctcagagcgtcttccaagcttaaacaaacgcagcacaatttttaca

SEQ ID NO: 17084 - DNA, 374 bp, Glycine max
cttgggagttctgagtccatgagggtactcagaagctaaagggaatcactaatagggtctatttccgctgaatctttcgtctttgattttttttttttcctttcaatggggtagagagggttttctctctcaaaatccaattttatctcttcacaagagataaatttttctatgatgaattgtctaattattagagctatactaatgaagaaattagaaacaaattgagcaatgaatttctaaatagggcaaaagttatggataaggaatttatttctctggatatattagaaaaccaaattcgattgtctaatgatgaaactaaaacaaatatttaactaaaatatctctcaatttggatattgaagagagag

SEQ ID NO: 17085 - DNA, 376 bp, Glycine max
ttgatcaatgttctggattgtctaactagtgaaaatgagaaagatctaagggctttcttgtaagacttagatcgtgaagaaaccattcctgcagggggaaccaactttgaagaattgaaaagcgggagtcaatccgagaagaccaaggtggagttgaagatcctacccaaccacctgaagtatgtgttcttggaggagaacgagaccaagcccgtggtgatcagcaattagctaacagtagaggaagataacaggttggtagaggtcctcaagagacacagggaggcaattaggtggcacatatcagatctaaaaggaattagccttgtctactgtatgcacaagataatgatggaagaagactatagacctgtca

SEQ ID NO: 17086 - DNA, 377 bp, Glycine max
ttctttttcgtctttaagaagttcaaagctacagtggagaaaaaaagtggttgagaaatcaaagatatgaggactgaccaaggaggagaattcacttccaaagagttttgagagttctgtgaagagaatggaatcagatgtcccctgatggttccaagatccccccaatagaatggtgtgacggaaagaaaaaatagaataatccttgatatggctcaaagcatgctcaaaagcaagaaattgccaaaagaattttgggcagaagctgtggcatggccgtttatctattcaatcgatcaccgacaagaagtgtatggggaaagacaccacaagaagtatggagtgggagaaagtctggtatctctcacttgagggtc

SEQ ID NO: 17087 - DNA, 379 bp, Glycine max
  unsure at all n locations
ntgatgtaatatttataccgtcctagaacctaaactcttatacttttaataaaataaaagtgatataattaatgatttatggtgtaaaatactaattaacattactcatacattttagcatcattacaggtgttcctgactctagcaacttctagtgctgccgctgctactgccatagtgtacttaacacacaatggcaatcaggattcgaattggcttgccatctgcaaccaatttggtgatttctgccaagagattagtggagcagtggtggcatcgttcgttgccgtgggtctcttcgttttgctcattgttatgtgtgcagcggctctaccaaatcattaactagcaccacttaattaattatatatggagctat

SEQ ID NO: 17088 - DNA, 453 bp, Glycine max
  unsure at all n locations
gagcgtanncgtgatgcttgtaatcttggttgaccactctgagacccgcngatcctctcgagctgacctgcgggatgcatttttgcaacattctacccgcatttttgacagcactcgcgagaacagagtatcgtatatatgtagcataccaccctgactacgttggcacctacgctgacaccgctgaccgatgcacgtgatggcgccgagaatctggacctgcttaatcataagcaggaggaaggcctgcaccacccgcggtggcggcaaaagctgagctgggttcgtagattccatgctcctacctagcaggtcacgacataaaagggtgcagatgatatggatttcattatcgcttggcccaggcttacatctccacagaacccaacttcttggaatgaacgtgtgatcattcggaagcgaaactacatctgatcgatagtaaatccaagg

SEQ ID NO: 17089 - DNA, 553 bp, Glycine max
  unsure at all n locations
cctatgctcttaactcacaaacgtgagaacagttaaaattgatcacttacaacactaccaaaccccgggtgctttgatccgtagtagatcccgtgacactatcanantactcaagtctncacacgcgtggctcttagctcctgacagaagagcagtaatatatgtatttcaatctgagacaggcacattgaagcatgccgacgaagacaaaatgtcagcacagagaaaaccacaaaggaagaacggtcgaaaagacaacacgaaccagcatgctccaagccaattccgacggaaggaaatcatagggagcgaacgccgctgaatggagaatagcttatcacgaaagctaaaatgggtcacatgacactggtaggacatcggacaaccaagagtgaacgaaagtggacccctctagaatgcttgatcatactcgttcgatgacattttggaaaaggcaccgagaagcataccttgagcgaagtgaaaaccaatgtggaatagaatgtgaacaacgttctctgaaatatacggataccaggaaccggtatctacg

SEQ ID NO: 17090 - DNA, 378 bp, Glycine max
ttcttcagaatatacttccaaaatggtaacaagaagtacctccaaattaattaacgtcattaatgaagatagtgaccaaaactcagaaaacacaactgagataggatcaatatcagaaaataatataaatccaattaattccaaacactggaaaaccccctccaaattatattatcaacgtccaaccgcccctgacctactattagaggaaagaggagaaaacaatttcaagagttttagtgctaacaacatctatgaatggaacatagatgcacaaacggagtataatatcatgaatacactccaacatatgaccatggttgctacggcttaccaaacctcccacgaatgttcaaaagagaccattatagatatctt

SEQ ID NO: 17091 - DNA, 406 bp, Glycine max
  unsure at all n locations
ntactttnttttcccccaatacttacaaaaatattatcttattttttttacctcatgtcatttgaagaatgtgttttgctacaaagtaccgatactttaatttgcttcatgcatctatacctgataccaatatattgatatatttcactggtacatatatgtgaagaccaaatctttaaaaaaattatgaaaatcaaatatagtgacatagaagtaagtataatatagaaatataaaaagtattgtttcttgatgaaccaaatataaaaattgttttgtttatagataatttcaagaaagaaatgagattgatcattgatagtaccattcttatttgtgaaaaataggaaaaaataatttacaatnttttntattntgtttttagtaatgtctaagaagtatgtat

SEQ ID NO: 17092 - DNA, 373 bp, Glycine max
atcttggcattttgatgctgccactgtctatggggagggcgttttcaacatcagatcaaaggtttacatgtcaccaaaactgtggtatctcagagtcaatgtaatagaagctcaagatgtgataccgggtgacagataccgcctaccggaggtttttgtgaaagctcaagtgagctgccaagtgctgacaaccaagatatgccccagcagaacaaccaccccattctggaacgaagatttgatctttgtagcctgtgagccatttgaggagcaattaacaatcactgtggaggatcgtgtgcacccttcaaaagatgaggtactggggaagataagcctaccaatgaccctctttgagaagcgattagaccat

SEQ ID NO: 17093 - DNA, 398 bp, Glycine max
tatcctatatgacactccttataccaccaaatctctaagtctttcacttttaaagtcctgctgaatgggtacaaagtgacttgcagcaatttgatgagtaactcaacattatatataattagtgcaaaggcacttatgttcatcaaattttaaaatcctatacatatctaaaatgaacttaatgttaatttcaggatgtgtcaaacatcatatactcatttatgaaatgtgtgggattcacccatctaaatttggaagagattacggaatgcaggattgtttataatcattggaggaatgttacacaaattggttatgaatagaagacttttgcacaatcacgaaatttggaagctaaaactcaaattatatttgagttcctagatgcaacatctaac

SEQ ID NO: 17094 - DNA, 348 bp, Glycine max
gacatgaagaatgtgcagctactgagcattcactcaatacggtctaaagttcactaaatatgacacattcgttcgcgagaaaccacctcattcggtggaatgaggatgagatgcgacgaaatccataacatgttatccacgatactcgtattattatagacgtaagaagaatcttaatatacatgctctaatcgctgtacatagaatcccatagaccaatggatcacttggctcggcggatgagtgagctaaggcttgaagttcggtcgcttactttaatacaacacagactacgttgtgcgagaaaattacatcatatgaataatatataatactacacttggatac

SEQ ID NO: 17095 - DNA, 482 bp, Glycine max
  unsure at all n locations
cacaactatagtaacaaaataacgcagaaacacaacaccnnccccncagcggatgaccgtagcatcgcgacacggaacacacaacctcgacatgtggtgcatcgagcaccaagtgcgccttggatttatctaaggacaatggcgcgagactgacgatccaaaagccgccattccaacacggcgaggccactacgaagaaacctaacaccgaagccaagcgcgagaaaccggagaggagtagcagaatctagcccacacccctgattgaccagacgagcacgaccactataccataccggtggagctcaacaaaaatcgaacatccaacgaagataacaagccgtacacggaacaactaaacacgggatgcagagacagccaccacaagagacaaggggacttagtcacgactctcggaagccacaagagtgccggaccataatgatcagctgttcacaggcaaagaaacgtcaaaccataag

SEQ ID NO: 17096 - DNA, 467 bp, Glycine max
  unsure at all n locations
agctctgcccaccctttgggccttttgatgccttcgtatgactaccttcgaatacccgcngggtacaccggggatcctcctgcaggggacctgttttgtttgctctttttgaacaacattctcgagccggctgaggtgggatccttgtgacgcataatcctcttctttaggatctagtccttgaccgacatgactctttcagacagtatccagatcattctgattatgctactgattacgccttgccaacattgatctagatcgcattattatattggtgtaacttcctgaacattttgcatgttatctggctaatgttgcattacgtgcctacgagcgaattcggacaaataatataggtgtaatttatgatactcactaacttgttagacgtcgtcccatcataacgtggagaattccttcactacttatttatggagaactttcgtgataaaataaattacgcg

SEQ ID NO: 17097 - DNA, 754 bp, Glycine max
  unsure at all n locations
acgatgcacgacacanacagatcgtcanatgtcatgtataagngagagaggtagtaantagaaaaaangcgagacacananncacccacnacnnncaaagagagaggtnntggaaatcgaagtccactncgcatangccccgnanannacnnanacaaaanacnncagggcngaggagcgcagaancanggcgcnactgcaaggcaggagcncaactaancgagaggtanttagntcatagacacacacacacnacgacgcgcgcacacanaaggcgagagcagagcgacgagncgaaaccnacgcgcgcnctacagccataagcgagcgacataacagagctaaaaccgcagcaggcacacacaggaagcacagcacacgccaccgcgcgcacacatacgcctgttacacctccgggtgcagagatataccgtacgaggccagaagataccgcagcgagaagctaccaacgagagcgacgcacacctagcaagcactcaggacacagataaccaacagctcacacacacacaaaggcggcggcacacgcacaggacagatcgcaaaaagcacacggacgcctacacgtggcagcacgcaaacggcagccgggagagacacacagccccgcaccgccgactgtaagaacgcagcgccaacggcgcggcaccacatacacgacagcgcaaaccccacagcgagatagaccaaggcaaggccgaacagcacgaacacgcgcaggggaccacacccc

SEQ ID NO: 17098 - DNA, 104 bp, Glycine max
cctacccttatggacctaaagctcctttgatgagctcttattttggcacaactagggtgatgatctcttacttcggtgtattgcaactttaatatctagaaggg

SEQ ID NO: 17099 - DNA, 332 bp, Glycine max
ttgctatgatgcaggtgttactgatatttcgtgttgcgactgccaaggagagcagtgtagatgatgcacttccatttagcatactgtcatctaattgaaagttgcatccccgacaaccaagatttccttactatcatcgctcgaggcatgtatgtgattctcacacttatgtgcttaagtattataggcaatggttaacatgttactattcttttgtagtacattgtatttcattgagggagccataggtccccgtttgagattgcgtacgacgattaatacggataggttggattaattgttgaattcatacttgaattgtccgattggac

SEQ ID NO: 17100 - DNA, 118 bp, Glycine max
cggtccggcagaccatactcatgtgtgacacgctatcatcaaatttcagccgataatccggttattatctctcattcatgcgacgcaagcaaacgtttaacgtcaccagaaactgcct

SEQ ID NO: 17101 - DNA, 357 bp, Glycine max
ttcttctcatcagaagccactctccaaccataatattggccatcaatattctgctcattgaaataaaataaaataaaataaacaggaccaaaaaagtacatatgagcaaaatttcaatgccctgaggcataagcatcagcgcaactcatcatttggataatgaatgaacatttacagacatataaattcggcaaagtcatgcttctacagtctacttggtcatcattatgcggctacagttggcccaatctttcctgcatgaaagaaagaaacaattttaatccatgtttcagagcaggaaaataaaaatgataaataaaccatcacattttttgaaaaaggaatttatgtagatag

SEQ ID NO: 17102 - DNA, 268 bp, Glycine max
ttgtggatgattgactccttttcatcggcttcttttgtgcgccgtaacaagagccctttggcggacgtaggcacctaaagtcctgatcagggtatgcaacccctcaaagaatactcttcctagcgactttgtaagccacatcaagttcatcacaccttttggatatgaccgctatttcttccttgaaggagaacttccgttcacataaacctttgtctggaaagcaaagtgtcctccaataaagatggactgactgccatgagatgct

SEQ ID NO: 17103 - DNA, 356 bp, Glycine max
tatcttggttcgatggggtgggtattgatatggatgaaactactattcaatacactaatgaagcccaacaagctattaccgagaggcccaagtgagttagcatgaagccaaaaaattgaattgtttatattcattacacatgattattatagtggggtttattaacggaccattctaaaagttaatagtggaattctgttagaggggaattggggaaaatattcgagtgttaagactgtcgtcctttatataatacttactatattggtgaaaaggtatcaatgagaatattgtctatttcttctctctactatcttgctataggatcctctatcctttaatttagagaactcctt

SEQ ID NO: 17104 - DNA, 383 bp, Glycine max
tgatttggttatacaaggctcaatttgtgctatcttatgtgctaaatggcctaaatagtactttatttcttttcaattattcatcttggaatcatgggaaacacaaaagttgacatataatacatttatagcatattagcctgatgattaaattgattgtaagccctcatgttttggggtagagagcggaagaactgacaactccatatcctttctgtgtcatatgtctctgaccaaggtggagaaacatcagtcaatattagcattaattattggttatcattcttggtcttcatgtgaatttgatttcccatagtctctcttgctgccattaccatcatcttaattatcaatacaacccaagaattatgttgtggaatatt

SEQ ID NO: 17105 - DNA, 357 bp, Glycine max
ttcttcaacatcagaccacttccagggtgctggaactacttcacatggacttgatggggcctatgcaagttgaaagccttggaggaaagaggtatgcctatgttgttgtggatgatttctccagatttacctgggtcaactttatcagagagaaatcagacacctttgaagtattcaaggagttgagtctaagacttcaaagagaaaaagactgtgtcatcaagagaatcaggagtgaccatggcagagagtttgaaaacagcaggtttactgaattctgcacatctgaaggcatcactcatgagttctctgcagccattacaccacaacaaaatgacatagttgaaaggaaaaaca

SEQ ID NO: 17106 - DNA, 377 bp, Glycine max
tgtgtgttggtgctttgggtcatttctcagtttgttcatttgaaacatgaaaacaaacacacctatagaagtcaataatgtttagatgggatatggagttttgaacttataatgttttatgttgttttgaagtagacattggagaactttacttttatgcttttccttttcttagttgttcacaatattttcttcagcgcttatcctatggtgtttttatgtatttaacagagggatcatgccaaaaagagattggatagtcatcactttgaacctaatggaagtagcggtaaactgccctgttatctgataatatatttagaacactcttctgtagtcagtattatatttttttcatgcttgatgtttttaactgt

SEQ ID NO: 17107 - DNA, 377 bp, Glycine max
ttctttaggagaaaccataaaaactaaggtagttcctaaacaaaaatcaattgaggaagcttcgccaagtatccccattgaaaaacctttattcaaacctttcaaagttagtgagaaggctaaacgaaaaattagggaacttagaaaaactaaatccttaattgaaggcgtaggtgataaccatagtgaattacttaacaagattggtagtttacttaaagtcattccagatactccccaagcctcggaaaatacttccaaaatggtaacaagaagtacctacaaattaattaatgttataattgaagatagtgaccaaagctcagataacacaactgagataggatcagtgtcagaaatgaatataaatccaatta

SEQ ID NO: 17108 - DNA, 392 bp, Glycine max
  unsure at all n locations
ntacagcccctcaccttggtctatgcaacgggcttggcttgtctctaagaggagaagttgctggacaatcattgccctttctggcctcgaccatctacttttcctccaccaccgaccaccacgccttcgccagctatggctcctccttcggtgcccgtatttccgcctccagtgaagcctcaagcctcggatcccattaaatggctatcctatgaggagctcaccttgcgatgtgaacatggtatttgtttcaactacgatgagaaatttcatcgcggccacaaatgcgcctctaaggcttttctactcattatggacgatgatgacccttttgaagacgctgctcctttggtggagccctcacccgaaccacctgatacccatgacccact

SEQ ID NO: 17109 - DNA, 378 bp, Glycine max
agcttgaagattagactatacgaggtatcttccttgggtatagcaatatctctaagggctactgtgtctacaacttgcaaactaagaaactcgtcatcagtcgagatgttgaagttgatgagtacgcttcttggaattgggatgaagaaaaagtggagaagaacgttcttatacccgctcaactacctcaagaagaagctgaggaagaagacccaggtgaaccaccttcacctgcaccacaacaacaagatcaagaactatcatcaccagagtctactccaagatgagtaagatctttggtggacatatatgaaacctgtaacttagccatacttgaacctggaagctttgaagaagcgtcaaagcaggacatatggg

SEQ ID NO: 17110 - DNA, 401 bp, Glycine max
  unsure at all n locations
tccacatcaagcaagtgcatctcaaagctcttatgctaacaatttaattcaaaagttggagaatttgcttggaaaccttgtagctgtgcttaaaggacgaattgcagaaaatccacaaattaatcaagtcttagaagctatagatcaagaggtatgaatttataattctacttattcgacgatttaactatgatatgatactttacaaagaagaaacattcttttaatttacgtacctacaaatggttctactagtcaagatcatcaaactacaaacaatcttaactagaggttaggtgaaatatacatggtaatgaagatgcgagccggtgacataatgttatttcacgaacatgatttanatggtaatgaagatgtgagccgacgacataatgttcaag

SEQ ID NO: 17111 - DNA, 377 bp, Glycine max
atcttcataaatggtgacaaaattgtgttcataacacgtttcatgaattttttcgactctcgtatctttagagaagggaaccaaagtgccgatctcttggcaaattatggtcttcatgcaagtgatcctatttggtgggatcatctcctccttttattttcttaagcttttatttgtaataaaaggtttttttttttaccagaatttaggtcttgttgagtctatttgcatgggttttggttattatagtgtggtatatgattactagattatattggtgtcaacataattgggattagttaatatgttgtgatgttgtgcacttcaataagtttataaaaaaatcattctacattaagatgagtcatctaattatt

SEQ ID NO: 17112 - DNA, 335 bp, Glycine max
  unsure at all n locations
acatccactgacttagaacatttgtttcttctctcacaacaccaaacttggcttggattggagacttctatatttattaaagtgggttttttgtgaagtacctcacaaaaatagattcttcctanctagggggattccactctacacttctcatagatatacaataaatatagtggaagtgggttctcttgatgagaaagaagaacagatttctctcataaggaggttgatgatatgtcttgattcaatcggttgttttaaaaaatcagcttaggcttttnagaaattttcacactgtcgtggtgagacacatgtggtggtgcaagttgacactg

SEQ ID NO: 17113 - DNA, 372 bp, Glycine max
agcttcttatttcttgctcatcttggtggtgaagctccttcttccatggcttattccttaatggatgacgcctcctctcacctattttcctttgtcttccgctgcatctccatggtggaaaatcaccattaaaggaccccattgaagctcaaagatccagcctccatagaagctccacaagcaagcttccatcacttccgttttcaatttcgagcgtctccatatattacagggcacaatcggacatacgattcaaaagttattgtcgttggaatttgctcacagcttcagctttcaattacgagcgtctcgatatatttcagggctcacttggacatccgagttaaaagttattgtcgatcgatttttctt

SEQ ID NO: 17114 - DNA, 136 bp, Glycine max
gaaaacagaagctctgagaaaaatcaaacgataataacttttaactcggatgttcgattgaaccctgtaatatatcgagacgctcgaaattgaaagcggaagctttaagaaaagtcaaacgaaaataacttttgac

SEQ ID NO: 17115 - DNA, 354 bp, Glycine max
ttcttagacgaccttgtttgagtcgagaatactttattatttatttggacaagtttgaatatgatgtagaagaaaatgaatgtgagcctttttcccctttgaaagacttaaaaaaaaagttttaaaaatacttttaattaagatttgaattttttttccttattagtatatatgtgaggggtagagagtgtcacaagatattaggagcttccatgggttagcaagcttctataaaaggttcgttcctaatttctctacaattgcatcacctctcaatgagctggtgaagaaagatgtggcatttacctggggtgaaaaacaagagcaagcctttgctttgttcatagaaaagct

SEQ ID NO: 17116 - DNA, 396 bp, Glycine max
tatgccccactctcttgctcatactagccttactttagcatatatattctttactttcctcactcatattcttacttgagcatcgaagtcctttgttttgcaagtcccccctcctgtcaagggtacctctctaagccgacgcgtgaagttcaggaccgcactcaaccacgtccatcccaacgtgtcacggttccggattttggcaagaacaagtttaaataattaaaccaatggtgataagtgagatgtgaaagaagaacctggccatctagctaagaagcgaccaatatacaaatgatggattagagaagatgggatttcttgttgttgggcaagaagaggctctctcctcaataagaaggtttcttccatatcacattcttccactcactcact

SEQ ID NO: 17117 - DNA, 503 bp, Glycine max
  unsure at all n locations
gacacgcgttnggnnttgatngccttggatagcatacggctactataaggtgagttcccgctgataccctgagtcctctgaggcacgcgttctcttacattatcatataatggctagaggtgatacttgacatggattggtttgggtaactgatacaagggaacccccagattaatctcatgacacaacctgctcaaaagatgtatgattgtaggagacactatcatagcaaattcgtgggtcactgcactagacaacactatgatggcactacatcagagatgccgaaatgctgatatgcgcctatgtgaatgcaattggcctcaagatgtgatttccatctatgatacatcaacacactgtccccaacctatggaactactatcaataagtgcattaatacaacctcacaaggacgaacggtaaaattgcacagagtgaacccttcctgtgtactcattctgacataagactattgtgatcaatgaataatgttatatgaa

SEQ ID NO: 17118 - DNA, 377 bp, Glycine max
  unsure at all n locations
tatctttacatcttttctgactgtggaaccaccattttatgtantatgattcctttgaaaaaccctagagaaagagactttgtagaagtatccttttctgaaatgggtgttattttcgtgaccttcactgaaccccgatcacattgacgtgatcagaatttcaaattgatgttcctttagtagaatccgaaatgccctcaaccctttcatgtagtgacatgggtatttgactcagagtattgttgttaactctatttctgaaatccatagtaatttccttcattctggcgtaatagagacttacgttggaccaacaagtgtgaacgagagagagacctctaagtgatgcanagaggaaccgatgggatgctcatgat

SEQ ID NO: 17119 - DNA, 368 bp, Glycine max
ttcttaagctccttcaactgcacaaggctcttaatatttgaagagtatccttgtggaaccttcacccgacgaagacactgacaaaaacttatctattccttcttggacaaagtatggcaggctgggggcaagtaaattttcttcccatcagaccttggatgcaactgtgatcgtatacccatatcagctagatcttgacgggtattcaagccatccttcgtcttgccttgaatgttaaggagcgtcccaatcacactgtcacaaacatttttctccacatggataacatcaatacaatgtctaacgtcaagatcacactagtatggaagatcaacgaaaatggacctcttcttccatatgcaactctg

SEQ ID NO: 17120 - DNA, 378 bp, Glycine max
  unsure at all n locations
tggctttggtttagacatgattgatacatgattttttacttgtaggaattgatttgggcaagattggatgagaggaagtgggattttcgaaatctgcacttatgcagaattttgctgtcaaaataggtgcagcagaattttggctttgtgcagaaaaatgcttgtgtgtggttggctgtggaaagtctagtgcagaatgagttctggatgtttgctagtagatcccaacggtcaaaatgtaggcttatgcactatagacttccagtaaaattttggagtcgatccaacggttaacgaattggatcgaaggaattgttactggggtctttaagtgagaaaagctgtgattntggttagtgtgttgagcagagtttttct

SEQ ID NO: 17121 - DNA, 367 bp, Glycine max
  unsure at all n locations
atcttgtagaaaggctagacatgatacatgtcanggtttggtttggttcaaagataaaagggatgccccacattatttccatgacacaaatgcaaaaatgatgatttggaaactttacgcaaaactggtcatgcatgcacctatgtggacactcaagtgtcaactttttatggtcatgtgatgctaagtgtcgcaagattcatttcctctattttagtcaacccaacgtttccaaaatatgttcttttatccatttgtgcattcatccaagtccatttcgggcgttcgagaaaattttcacagcattcacccttcaggtgtatacacattttttttaaaaatcggttatgatcaatgaattttttca

SEQ ID NO: 17122 - DNA, 249 bp, Glycine max
taattcacataaataatatgtttaaaaaagtgtatacctaatgaaaggagcaaaatgggtaaaaagaacccatacgttgtaagggaaatacactaatagtttacgtgtgaggtcatgtgatagttaatcacttatcaattaagtataggtcttgattgaatgcatgatcacggcaaacaattgatggtcactgtgaaaagatgctagtctaagatattctttatgatttgaggtggataattgaatctt

SEQ ID NO: 17123 - DNA, 233 bp, Glycine max
ttacctctatcttctgtgaacgtctgctgcgtctacagggtggaaaatcaccattaaaggacctcttagaaactcaaagatccagcctccatagaaacttcacaagcaagtttcattaataatactaagcacactacaatcttaaagactaaacatatgatgtattctattattgtttaatgcttaacttaataactatagggtcactgtaaatcttcttggtacggtcactc

SEQ ID NO: 17124 - DNA, 370 bp, Glycine max
  unsure at all n locations
acttaattaacaaaatctaatccggaaatatatcttatgnncttgtttgtttaaagaaagtgataaatcagcttcaaatcaaacaacctgcaattgagtgctctcgtccagtacgacaacgtcttggatatggatgttcactgcacccaagaattggtcttttgagatcaatgctgaaatcaggatctccaagatcattgtaaacatcataatcatagattctttcataactcttacgttctccttctccatttcctctcaatagcattagctccacttctctaagtcttctcaacccacatggtgtttgtgatggcaaataagactgtttcagaataagttaactcgatttaaaaaaaaaaagcctata

SEQ ID NO: 17125 - DNA, 354 bp, Glycine max
ttctttacaattacaatatgcattcctctagatacaattccagtgcatactaattggttgggatattgattatcatgttctcttttgctcaagtggcattttctacttgaagtctagacattgaatttatgaggttttttcttccttattgctaaatcacatgaggcataattaattagaaagagcatctatgcctaaatataatattcaaagtgcatcagtcttatttatttatttggataaacataattgataatttattaagatagaaaggagaggtacgaatgtgagagaataagaaactaaatagtaacaaaataaaaaggaaaataaaaataaaaatgagaaacatac

SEQ ID NO: 17126 - DNA, 399 bp, Glycine max
  unsure at all n locations
tgtcttgtgcagaattagggtatagaatagcctgtcacagatttttccaacattccagagcacaccatagtgccaattttgggaaaagggctctagaggcagcaagaggagcaatttttgtagagatacctaggttttgtaatctcattattgttagggtttcttctataatggttggttaaacactcttgttggggatttctaaagaacaactgatgtaattattttaatatctaattgattgtgtttcttgtgttcaatgcttctttcagtgcttaaattatgtatgctcttggtctgatcacccatttgtgtgcatagttaggtgactntagcattgngaaatgtattgttgccttagaacttgaatgaagcagaattgaaacttagtcttacaag

SEQ ID NO: 17127 - DNA, 350 bp, Glycine max
tttttcaaaccacaacaacaaaaaatctaggtgtccaaaacccctcaattcaatgggttttctaagtttgaaaagtgaaatttagaatgaggtaaatttgaagcaaactctcacctcacacaagtccataacatcaatctaaacttgctcaaactgaatttacacctaaaattccaccgaatcaaaatttgactcttcaacacccaattttgccctacaaatggctctttgttcactttggtcattcgtttttctctctagttcagcctaacctttctcacatgtcctaaatgacatttcaaactagtattaactcactttaacctccatataccacagaattcagactt

SEQ ID NO: 17128 - DNA, 357 bp, Glycine max
tctgcttcttttccctataaataggggaatgttgttgtaacaaaaagattcaaccctcctgggatctaagattcactcaaaattagtgagaagaatgtttctgtgaagagaatccaagccgaggcgctttcgtgacgtgttcgtgggtgattacgcatagattgtcgaccgctcttcattcgctcttgcacaatgttcggtcttcagccggtaagttaccgaaatcgtacttttcgatgcattctatgtacccttagtggtcctcatttgtttcgcgagctttcatgttcattacatttactttccgaacccccttgtgacgtgctttagatatttatttaagtcattgtctcggct

SEQ ID NO: 17129 - DNA, 354 bp, Glycine max
ttcttctccgaagagcatgggtatttccagtttcctgaaaatatctaaaaatcttgccagatgacgatctttttatttcttggaaggtatcacagggtaaggtacttccacaccttcatccacaactttttgactcctactcttctttgcattcttattatttttttcattttctatttctttttctttttcttggtccttctattctttattcttaaccattgtttgttcctctttttcttgattactttcacctctcacctcatttttcttgccatcagtacttttcttgtcatcatttttcttctcatgtacaacattatcctcatcctcaacctccacaaaccttttact

SEQ ID NO: 17130 - DNA, 395 bp, Glycine max
tctcaaggaagttttctcaaaaaagcttctcatggaagctacctagtctataaatagaagcatgtgtaacacttgttgtaactttgatgaatgagagtcttgtgagacacaactcaaagttcaacttctctcccgcttttcctccttcaatttcatgctccccctctctctttctctctctctttctttttctccattgaagcatcctttccaagcttcttatccaaggcacattcttggtggcgaaactccttcttccattgcttattccctagtagatggcgcctcctctcacctcttctcctttgtcttccgctgcatctccatggtggaaaatcaccattgaaggacctcattgaagctcacagatccagccttcatagaagctccacaag

SEQ ID NO: 17131 - DNA, 336 bp, Glycine max
cctcgatggagaagcagtcacaatctatagaatttatgtttggacttaattgtaaaaactaactcaaggtaagaattgccgtcacttataatttcacaatactaccagctagttgatgtcaccccaacaagtcgggagatggacgtctcaattatgaactttgcaggattaggcatctttgtgagggttgataacaaccttgataacatgtgacccaataagccaacaaccacccttattttgaagccatattagcattcaagtttaggtcttacttaacttctaaaagctagtttgataggtgaaaattgcccccttataccactagtctatgtg

SEQ ID NO: 17132 - DNA, 434 bp, Glycine max
caccgaccctcctccctctcgggtccgcgacccacccccccaggctgacttgacgtgacacaaccactgactgaaaagggcgctgacgtggctattggaccgaagaactggaatttgaattagctatatgttaaatttgttccgaaaaagaagaaagataagattacctaaatttgacgggcctgcaaatacaggcattgaccctacccattgcctatttaagatcttattaatgactagcttaagaatatattaaataaaaatatgtaaggagttcatttttaatggcttaaataggatatgaaattttttattttaatataagagcatcgtatacaaatgtgggaatttatttttagctgatttttacaaaagaataacaatagtattgttatgatcatctctaagtggcaatatcacacatcatcaaaaca

SEQ ID NO: 17133 - DNA, 675 bp, Glycine max
  unsure at all n locations
tgcatacctcgcgtcctaacatacttcgcgccgcggtaaaaataacttctgtgggcacgnaggcgactcacgagcgcagcgataantcgctgtgtcgccgtgttgagaacattgggagaacgcgagaacactccataaggacaacgccctcgtgacatcgcggtttncttgcacaatattaccgtcactatgtattganagagcagacgacaaatagtagcactgcaccgatgtgtattctctatgtgtgctctctcgaactctccacaatacttttaacctcaatacaagaaccataacatgcacactagagtcgctagatctctacatgaggtcgtcacaccaatctataaaaagctcaacagactgactgacactctaggtaacactatgtatttagangccatggaatcggaatatcttcatctctgccacacagcatagattaacttcacattcgctccgaccaccactctgggatgacatatctatttctgcgaatctcctcacacaaaagttagtccaaaaagctcagatgatcttcctgaccagcacttcatgaattctgaacccatccacacatcctctacaaattgtgttcccaatgaacaaattacccgaanggttaatccccagttctattctttctatccgccaaccatctgacgtgattcc

SEQ ID NO: 17134 - DNA, 326 bp, Glycine max
atactcagcttgttttcttctatgtaattgtttaaaacaatccttattaacacttttttactttctggtagaacctcagagtattttacaagactcttagatctgagatttgaattaatcaccacttaaactctctcactctttttcgcaaatttattatgtaagaatgaaatccaaaattctttcacatatgaatcatatttattgagtacttgagtatcatacttgaatccaaagcacaagaatggtattataggaaatgatacagtacacgaagctccattttgggtacttgcaatatccattcaattgagaaacactgctct

SEQ ID NO: 17135 - DNA, 429 bp, Glycine max
  unsure at all n locations
tgccacggtccgagcattgtgatgagtgggtaacatacccaggcgcaaccccttcgaaaacctatcgacgatgacaaagatacacgtgttgcccttgtaagagggtaatcccacgataaagtccatggataaataatcccatggttgtactggtatcggaagaggactcaacagcccatctggttttctgttatcgtatttggtacattggcacgttaagcatcctgctatgaaggcacgggtatcagctctaacggaatcccacgtaaagttttcttgtaagcgatgaagcgttttctgaatccccatgtgaccacctgtcggagattggtggaatgcttctagtaacaacttagtgaaggaggaatttgagggaatccanatacggcctctgtgtaagatcanataagcagttaacgtgtactctgg

SEQ ID NO: 17136 - DNA, 288 bp, Glycine max
acagagtggtacctggagatatgttgcgggggtcatgagaactttgggacgttaggtggggtgctattgcccaaaaccaaacttgaccaatccccacccaacctgggcatagtcagtcagtgagaacctatgatgtacctaaacatgcgagcttctggcagtccaccgattaaagaacaaagaccacataacaaggaggcttgtgtggtggctgaccaactatggatcttgagtgatatttggtatatggcctctggtaatcgattaccaagggggggtaatcgatta

SEQ ID NO: 17137 - DNA, 335 bp, Glycine max
agacgctcgaaattggatgttgaagctctgagcctatttacgcgacatatctttttactcggatgtctgattgaagcccgaaatatatcgagacgctcgacgatgaatgtggaagctctgagccaaatcacacgacaataactttctactcggatgtccgattgaatcctggcatatatcgagacgctcgagattgaatgttgaacctctgagcgaatgccaacgacaataactgtgtactcagaagtctgatatagtctcggaatatatcaagacgctcgaaattgatgttgagctctgacaaattcaacaacataacttttactggatgggga

SEQ ID NO: 17138 - DNA, 547 bp, Glycine max
  unsure at all n locations
actctcatgtaacngagcatgtntgtgcgaccaagaatatcacgcgctggcctanttactattccncncccccactagagcccttgaccctttgattcatgaactccaggcacaacaaaacgccgctagttcaggcctgatgcagacgctactctctatctggcagctgacgggacactgcaatacattactgtaacactgccagaatggagctacagtgtaaacaacgtccgtcagataatgtcaaacctgcgggaacattggaaggctagcagcgcatttaaggcatccaaaggggactataaacaaagggtatccattacaatctgctcctcaaggagaaccctatactttacaaactctgtttgatactgattcgagaatggaaaatggctgaccgacaaaccaaatttgtgaggaagaattctcatcgagcctaaacctgtgacaagatcgtcaacaaccaaaactcgcgtgcctcgacgacaaacaagctgaaacatcaagctcggctgtacttgaatacaacatctatggaatcaatccc

SEQ ID NO: 17139 - DNA, 644 bp, Glycine max
  unsure at all n locations
tcgtggcgcataccaacgtgctgagatcgggacactcacgatagatatctagctgatgactgtaganaccccccccccccncncaagcgatggcattgaaaccttttgatnccntcgacactatcagaagacacaaccnnaannctctacgcggtgacgcatatgtaggtagcgacaagatgtatatcgttaacagtgtttagtattcgtattggagcgtgacgtctagatagggaattgttcttagtatgtatacacgatgactggaagaacatagnggtgaaagagtgataaaaggatcattgtatgcctggagaaatgatcggctactgaaactcagatagaacggatgtgatggaactgtagtgcatgggatgaaatagactagagtagattgcctaagaactatttgtactgttgggaagagatatctctgctaaacgtgacatctgtgtggcctctattaagaacaggtggtggtggtaatatgcaatgaagttcattcatttgctgtgataattaataagggtaggcttgtgggagtggtgtaaaagagaagaccaagaaagaatgttctgcagttgaccatttagaaatcatactagcagtgtcagcatacgatattgacgtcttgaatgaataag

SEQ ID NO: 17140 - DNA, 362 bp, Glycine max
  unsure at all n locations
tggagctaggtcatgaaataaggtgttttcaacgagtgaggcctttcaagtttcaaacgatgacgaggaccaccatagcgcaagtagctcaacagtccagcacgatagcgatgacgacgatcactacgacgcgagtagctcagtaagagtcattttcgggggtgaatagcttgaacaaggtagagtgagtcacaagaatcattctcgggggttgttgtacgatgccttttcgagtttttgtaaacccgtggactcggagcaaactcgcgagtttaccaaacctcgtccgagtctacgcanaatcggacgagtttactccgngttcgattctgctttcgatttaacttgccaacccttagtag

SEQ ID NO: 17141 - DNA, 581 bp, Glycine max
  unsure at all n locations
cacgatacgacccgcggtgccgtacgacgctacagacattggcgtgatctcgcatacacaccacccnccgccgcatggatgaaacctgtagancngtgttgaatcactagacaagcagtgaancttgagaatactcacgcttaacaacagtacttttacccacgtttttccgaaacctatgtgacagtggatttctcatatgtaccaatatgtaactaagcatgtgaaatggtcgcatcaatagatgctgctatgacatcaacctttggacacatccctttacctaacaaggaagtcgatactatcagtacccttcttcaatatacagaatgatgcaccatgcaaacatatcgtaatacaagaaatgccaccactaataatcagcctaatactcataaccaatgaaatgcctcatatccgagttattccatcttctaatcttattggagtatctggagaattaaaaaaaagcggctgggtctcccgttcaacataaatctaacgtttaagtctattaatcactcaacacagcgcgttatcatattcaacatgcacactatgcacagcaaagagacggaatc

SEQ ID NO: 17142 - DNA, 402 bp, Glycine max
  unsure at all n locations
tcanaacacagcatcacagaatctaggtgtccaacacccctccattcaatgggttttctaggtttgagaagtgaaattgagaatgaggtaaatttgaagcaaactctcacctcacacaagtctataacatcaatttagacttgttcaaactggatgtacacctaaaatctcaccgaatcaaaatttgactcttcacacccaaatttgccctagaaatggctctttgttcactttggtcatttgtttttctctctagcacagcctaacctttctcataagtcctaaatgacatttcaagctaagattaactcactttaacctccatttaccacagaattcagacttaaccttccaactctcaaagcctcacttctttttccactcataacatcacattctcac

SEQ ID NO: 17143 - DNA, 413 bp, Glycine max
  unsure at all n locations
gtctatgtggataaaagagcttaanaactgagatgttagaaaaggttggttatccattataaatgtcttaatcattttctcaaagatgataagtctcccatcccgaaagcttcttcactcccaaccttgatcagaaaatcaaacttattttcaaagtttgatttaaaattagggttttggcaacttggcttacaactagaagatcagtataaaactgaagatcagtattaaacagtcttttgtgttccgaatgctcagtaccaatggacagtccttccttttggtttaaaagtatcaccctttctcttccacaaagccatgactaagatttttagcctattttggacaacatcattgnttacatagatgatatccttttctgttcaaaagacattgtctctcataaaaactta

SEQ ID NO: 17144 - DNA, 395 bp, Glycine max
  unsure at all n locations
tcgtcaacatgaagttattttcttacccaacactcacgtattctctcccttttagctattggcccaaacaacctaacttcttcaactttttcttccatggaaacttaacctttaaagatctccacctttcctagttttcctggttggtattggctcaaaaccttcattaattcttttcatccttcacaagttaagcgagcttcttctttcttttcttttgagaatagagatacacaccattttaatttattcctctccttgtcatagttttgtaagagctatggatggattcatactctcctacccatatttaccanatatttatgaatatatgtttttggtggtggtttaagatgtttaaacacataatgaccaaggtcttgacgttcatcaca

SEQ ID NO: 17145 - DNA, 433 bp, Glycine max
  unsure at all n locations
nttatcttgccaagttcatacaaaagtgttacaacttaacctaactgtttctaattatatgggccatcaaatctatcatgtgttgacagtaattgattagcctgtgaatttcctcaggggctgaacacacttcagtgatggcctttgctttggctagtagtcgcgggaggtcttgacttccatttaaggtcaaggcgaacctatccatccacatggtcgcttcttgatgcaatgcatcaatcaccctccctcttgcttccttttcggcggacgcttgtgcgaaatcctccactagcttttgttcatgagtcacagactgggttaactcttccttggactgccctatgatggctagcatgcttcgctccgtggcttccaagtgttgagccaaactcctcttggatcttgagcaaagagctaaatcttcctttaa

SEQ ID NO: 17146 - DNA, 411 bp, Glycine max
tgtacttttgaacacttgcttatcttatccagagctttcagtttctaaactaagtgcttttaaactatttgcataacttttgttgattctgttacttatggtgtgtgtcacgtatttgtgttccattccttgtttagttatgatgcattttttgatgatactcaagtcatgtgtaacttttgaacatctacctatcccttgactggagatatctttcaagcatgcttttgatcatacaaaacttttcatttctattgcactttgatatgggaaaagcaagattttcctttcatgattctagctagtaaactctattctagtagtcctacttctattggggctgatcctatgtctggaaggttgacatactttcaagtgaatcttcgtacctttcttgatgcttattgatca

SEQ ID NO: 17147 - DNA, 352 bp, Glycine max
  unsure at all n locations
tctagccaaatggacttaccttgtattaattcctttgatagcccttttgagccttgtttccctttcctttgttngaagctcactacaagccttaagtgaaaaaccatgatatcatcatatccttaaggaattttggagctttggaattgttttgggaataagtgtggggggtttttgtttcattggacaacttgttttggtggctatgcttcatgatgtattttgggccatacttgatgtacattgtatattggttaaatgttggacatgctgaatgaaatgttgtttctcaaaggctatagaataaaaaaaaaaagaataaaaaaaaatattcaaaaaaaaaattcgaaaa

SEQ ID NO: 17148 - DNA, 423 bp, Glycine max
ccatccttgccctatgaccgtgtgaacgtgcacaccaaactcagcttagacataaaatcatggtttttcttccttcaagcctttttaggcctttcctccatcttagatgataataatatgcaattactctttgacttaccttccttggcgtgtcaactgtcgggataaacgccggtatatctcctcaggctaccaagccaaccacactactgagtgaaactacattaaccctaacctcaccgtattgcactcactatataatttccccttatgcgagtaaactcagctaagctatccttagatcttacttatggccacactcaccatttttgtgacttgacttacacttacctccgacataaggattataggttatgggcccttattccttacctgtcattttatcaatgggatcatggatgc

SEQ ID NO: 17149 - DNA, 535 bp, Glycine max
  unsure at all n locations
cgggcgacacacactncgcgcgaacgtgtgatcaacacgcgcacaggcccgatnanctcccnnccccccnnccccaccgagcatggaaccgcttgatnccagtgaacacccagngacactatagacaacccaagcgtgtgaacgtagatatagtccaccattatacaacatgttgatctatctgctaggaggacatcagatatatagatacatacatatacatatatactgcacgtgagaaatcgagactcacgggcgcatatcaaagttccatacttactggattcactgggatagcgcgtgtatactacatacaactcatatcgccatactcaatcgacccacaagattccatagccgcgctatgagatgatctgaaaacactcgagccacgcgatgaacctgagacatgagaaatgcgacctgagactacaaactgtgaagagacgagataacggcaaggcaacatgtgtaattcggaaaatccggaaaagcacgagggatggacattggaaaggtaaatgggaccgagacn

SEQ ID NO: 17150 - DNA, 406 bp, Glycine max
  unsure at all n locations
cgcgaatgcaaacatttggaaagttagttttaccagagggacactactcttaaaacaaaaatggcatacaacctcctcccataaatacaaacatcaatgtaaatttagagcaagcttatgtgcatatttccttacgaacgttcacttgcacaagacattctattaactaagaaaaatgcacccatatacaatcaaggcagcttcgttacctagattatttacatgtacttccaaggtgtatttgttacttacatcacacacatcgtcttggctgaattacatacatgcatactcaaagcantttggggtcccaaaaattgacatgtgcacatcttggtattcctaatacctatacatacaccaacttcatgatgaatcctgactatctacacaataaggtgctaca

SEQ ID NO: 17151 - DNA, 403 bp, Glycine max
tgcatgattcatattctccccctttgtcaagcatattctttttgatatcatcaaaacctgcatgatttacattctccccctttttgatgatgacaagcattatccaaggcttgatctttttgacatcatcaaaatcttcatgatttacattctccccctttttgatgatgacaaccacttgtaggttaggagcaacaacaaataaaaaaatatctatttgcatatagtttactcccccttggttttgcaatgtttgcttatatgagacaattgaagatttcatatttttcatatataaaaagttgtctcatataaagaatagataattttcttactatttatctttatctttctctcccctttgcaacatcaatacaatcatgaatgagaggagaaaatgtac

SEQ ID NO: 17152 - DNA, 302 bp, Glycine max
  unsure at all n locations
ctcagcttgaccattcccttgcctctttgttggtttgctattangtactcangcacatcacgtangtgcggaggtggtggattcttgctcaaaactttgtcatgcttcagtagatctgttcaaatacaatttcaatcctttaaatttaacttcaaacataagttttaaaaaaaataaaaaacaataaatgccaattgtatattttaacgataacatcaacctattacattacctaggtcttttggattagtttcgaagtgggctttcaacctaaaataaaagcacaagtttgcagaaatgaa

SEQ ID NO: 17153 - DNA, 381 bp, Glycine max
tcatactccacatattttgttcctgatcgagccatatataccatatagtaggtgcctataaaaaatcagtagctacctcttccagaatccatagccccatgaccaaggtgtcggcctgtactttcttcacaacacaacatattacattcttggcatgtcctacaccaaccacatatagtagacaccatctagaatgttgtccccttcattgatttaacgtcattcaattaggttgcctgacaaacaattcataaagtgatatcaaaaaatcgaaatcataagcaatttaacattatttatacatcgttaactgatatcaagatattcaagacataaaagacatcctagatcgggaaacataaatgacagagaatgaatacc

SEQ ID NO: 17154 - DNA, 443 bp, Glycine max
  unsure at all n locations
ttgacctatgcgccaanaaaatttcagattgcattgactaatctagatcgcacaatttcaaacttgagtgttgttcacacgtcaattcatcattaacatccttgtccaatgtctcaaaaaaagaaacaatccatattgcaccaactaaatcaacaatgcagataacatcgattgttcacacgacaatgaatcattacgtcctctattgaagtgtaagttatttattaaaagctctcatagaaaaaaatgggttatttaaaaaacataaaaaaatcacatttttaaggtgtatttttcaaaaaatcacaacgaaattgtatttttgtatggtatttctagaaactacataacgaanatgaaactttngtgtgtaaatttgaaaaaatatcctacaaaaacctgttttcattnntgtgtttttcctcaacggaataatattttca

SEQ ID NO: 17155 - DNA, 443 bp, Glycine max
atgaagctaactaaagtaaagatacatgaacacctctacactacatatagtgagtgtttgttaaaaactttcccatgttaacgaacattttatccaataacagcccaatgttgcttctataattacttcatgattatatgagaatgcttggttgaagcgcctcacacgataatccataatcatgtacccttatttaaacttttacacacacttacaagttaacagaatacctcacgatcaaacctatccccagctatcacaattcaaccttcatctagatatttcttaagattgctgtccaatacaatttatcctataaaaaaaatctttactaaataaaatggtaggttctctgagcattgtagtccaatattaaatcttttcctgataacataaaataattttcctttcttctattttgagttactcttttacagtggaca

SEQ ID NO: 17156 - DNA, 432 bp, Glycine max
  unsure at all n locations
gtaatgtatttataatttttggtgtccatcattattattataaatgatgtaagtaaaaaataataattaatattacataaacaaaatacaatgacaaatattatttaggtgatattattattaatattttaacaaatttgcggcggagttaaactaagctgcccaatggccagatttataatgacttgcttgctattctacaaaaggataaaaccaaaagtcaacgtctagtttggttaattacatgaacctcctgatggctctgactgcaatttaaagaaaacagaaaagaaacttgtctatatgaccaccatttcttattttcacacaacattggtattttttatgtctaaatccacanacttttgtttagtttgtgcagtaaaatcagacataaatgaaatacaccttattttaattatctatgtgaat

SEQ ID NO: 17157 - DNA, 418 bp, Glycine max
  unsure at all n locations
cttcaaactcagcttggtaacaatatcctttanataagaaaaatgtttataatatcttatcaatactaattaatgaacttaaaggcgaaatacggaagataaaaaattacaatgttcatattttttatgatttatgcatttaatattttttttcttttaatttcttaactaatatctaaaagcgctaattaacaagaaccataaaagtaaaccaatgagtaactaacaatcccgttataaaaaaaaaggttatcatcatgtcttttttggactaatcatatcatcctatgatttcatttgacaaataataaagttaaaaatgaatcgaaattaaaatacataggaccgaataggagttatgagttaatatatttaattaagacacatatctgttaacaanattgatacagcttgaatg

SEQ ID NO: 17158 - DNA, 376 bp, Glycine max
ttctattaagaagctgatactctattctgatatcctatctaatagttcggttgtacttgatagtatagttattaaatcaccttagataggatcatcttatcaccactaatctatatattttaaaaatatgttgattctaggagttagctttccacagctatcaccacttgtttatgtatacatgaaaacattcaagagataatcacactcagattattcccctaaatttctttctttaacattgccaagaaggctgtcaggcagtcaaaaagtgttggaataagtggtcattggtttcaaagcccaaaaagatgtagtatgtgttacatgggaatgggcatagtaaccaatttgattaagaccttctcgtctgatc

SEQ ID NO: 17159 - DNA, 395 bp, Glycine max
  unsure at all n locations
nttgaaatcaaactnttccactggttatcgattacatgaaactggaagtcgatttccagagagtaaaactctggtaacttaaaaaattntgagaaaaactcttttgaaaaacaaaactgtgctatgtttgttttttgaaaaatcttttcaatacttcccatgtgaggtcttcttgatttcttctctctaatcttgaaatcaaacttctcttgattcttgaatcttcttgattcttctcttgaaatttatcttgatcttgaacttgntgactcaatcttgaaatcattctttngagctttttgtcatcatctttgttatcatcaaaactacttgaatcaacttgattcatcatcatgaagcttgcttctacagtctctgcgtgtcaacgggctcac

SEQ ID NO: 17160 - DNA, 355 bp, Glycine max
  unsure at all n locations
ttntgtttaatttcctaaacactttttaatgtctgttcattttctcttttccaagttctttcttctaagttagtttggcatctttcacccaccaacccatcccatgtaacgaaaacatattangtaaaggtaaatcaaagtgttttatccaataatgtcantccaaattggtagttggaatacttcccaattaaaaacgacaagttaaatgtaaccaccctataaattaagtggaagtattaagcccatttgggctaatatgggaagattgagtcagattgacagaggcatttcatacaaaagagtattaataatagtaacatacaacggtattaatattatggattagactgtg

SEQ ID NO: 17161 - DNA, 385 bp, Glycine max
  unsure at all n locations
tcttagtctcaactgatgaagatgtaattcgggctactctatgcactcctctaatgacaatagcatcatttttggcactaaattgctaggagtttgaagccatcttctcaattaaatttctggcttcaataggggtcatgtctccaagggctccaccactggcagcatcaatcatacttctctccatgttactgagtccttcataaaaatattggagaagaagctgctcagaaatctggtggtgagggcaactgacacatagttntttaaatctctcccaatattcatataggctctctccactgagttgcctaatgcctgaaatatcctttctaatggtcgtggtcctagaagcagggaaatttttttctgagaatactctctt

SEQ ID NO: 17162 - DNA, 394 bp, Glycine max
  unsure at all n locations
ntgacgggtttgggagacgagttttagagggggtttgacattttaatattgagtttgttgtgatgagataaagttgtattgatactaatgtgtttaatcacattattggagtacgatgaggaagatgaataagatactatggatgctgtgtaaagaatgctagccatggtggatataaataaataaaggtccgacaaatttgtggggtagcgttggctgagttgctcacttgctcacgagataatcttatttacgaagctatgcagtacattacattgatgcttgtgtaccttttatgccactagtatgagcataaatcacatgcgtcaagttttccatgtgcatactacgttactacctgcttatccgtccaattgattagatgtactattat

SEQ ID NO: 17163 - DNA, 362 bp, Glycine max
  unsure at all n locations
ntcacgctctcttcttctccatcttagctttcacgctttttttttttttgcatctaaggcctctgttctccgtctaccttgaagctctttcttctgcatctacctgaagctctctgttctccaactaccttgaagctcatttcgtataagctcgagcatcgtttccgtcgcactcgagcatcgtcataactctctacttcttctccttcgccaccttacctaggtatgtttcgtctaatcctgtataaatatttgattgcattcatgtatcgcacacttagtgaagtaaacatgactagggtatctcatatttaactgagatctccttacccttactgtgttcttgataagaggagcacccc

SEQ ID NO: 17164 - DNA, 410 bp, Glycine max
  unsure at all n locations
tgtagcaattcttctaggcttggagtcataacatgcaatcctctagaacccttacctcccactctttcgttataccgagactcgggaaccccaataagttttgcctttntaatgtactccgaacaaaacttaatagctttttttgccacgtaccttttaacaatagatgcttcaggatagtgtaaattctttgcatacccttttatgatcttcatgtattgctcaaccgaatacttgcattggaaataaacaaaaccacaacatttaatttccctcaccagatgaacaattaatagaaccatgatgctgaaaaacaaaggaggaaaatacatctccaatggacataagataataacaacctcattttctacctcatctaacttgacaggatcaatgcacttgctacatat

SEQ ID NO: 17165 - DNA, 372 bp, Glycine max
tcaccggatgatgccgatcgaacatttcctaatttacatcatccaatttttattcagggattgaattgaataaacaatggccggtgtcggtctttatatggccccgactgatatctttcagccgacattgcgcaatttcttttacaaacgctggccgatagtgtttttttttacgctagaggaagttttttgttttggtgttgtataaaaaatgtacaacgcaggtcggctatgttttaccgtgcgagctcaaccgatggttcgttccgacagacactggcatgttgttcttctcatttacgaggctcagacaacgttggccatcccggcaaaaacaaaaaaaaacatttttacggaattgatcgaaaaaat

SEQ ID NO: 17166 - DNA, 394 bp, Glycine max
tgtctcaacgtttatgcgagacggagaccaacatgctagctatcatcgccaagtaccaagaagagttaggtctagccacggcccacgagcatagaatcgcggacgagtatgctcaagtatacgcggaaaaagaggctagaggaagggtgatcgactctttacaccaagaggcaaccatgtggatggatcggtttgctcttaccttgaacgggagtcaagaacttccccgcttgttagccaaggccaaagcgatggcagacgcctactccgcccccgaaaagattcatgggcttctcggctatggtcaacatatgatagacttaatggcccacataattagaaatcgttaggaaactcgtatgggctctcagaccctgactagatacgacttcct

SEQ ID NO: 17167 - DNA, 371 bp, Glycine max
ctaatgaattgggctctaattgcccatcagacatggcaagttaagccaaatttaatttactttacctcacggcatcaagcaatttgcttgcaattccttttcttctgttagagggagcaacccaaatggccctaatgccacaagcagcgatggttggtttgctatcacagaagattgcaccttccatcctttcaaaatcactcaaggaagcaacttttttttcaacctccctttggaaaataacattcccaaaccgaaaagtggtagaacgcgtcctcacttcccttttcttcacgctatcaggagagccagacacaactttgaatgccttttcaatgggttctgcaacgaggcactccacaaccctgtga

SEQ ID NO: 17168 - DNA, 407 bp, Glycine max
  unsure at all n locations
tcagatcaaagcaacacaaaatctaggtatccaaaacccctcaatttaatggattttcaaggtttgagaagtgaaattgcggatggggtaaatttggagcaaactctcacctcacacgagtctataacatcaatttaaacttgtttgaacgggattcacacctaaaatttcaccgaaccaaaatttgactcctcaacacccaattttaccctagaaatggctctttgttcactttggtcatttgtttttctctctagcacagcccanactttctcataagtcctaaatgacatttcaagctaggattaactcactntaacctccaaataccactaaatccagatttggccttccaactctcaaaacctcactctttttccactcataacaccatattctcactttct

SEQ ID NO: 17169 - DNA, 427 bp, Glycine max
tgaccaatcccgacccaacccgggcatagtcggtcattgagaacctgtgatgtacctaagcaggcgagctcctggcagtcaacagataaaaggaaaacaagaccacaaagcaaggaggcttgtggtggctggccagctgtgaattttgtgtaatatgtggattgtggcctctggtaatcgattaccaaaggtgagtaatcgattacaaggcttaaaattgaggacaggaggctaagatggtctctggtaatcgattaccaaagggtgtaatcgattaccaagcttgaaaacgaagtcaggaaacttaaggagcctctggtaatcgattaccagcctgcgtaatcgattacacagaggaatgggtcactggtaatcgattaccaggcatgtgtaatcgattacacagtgtattattgcataattcatg

SEQ ID NO: 17170 - DNA, 413 bp, Glycine max
  unsure at all n locations
tatccttatggctggcctccggatttcactccccgtgccaccccgaaagatctaagccaagcccctacttttgaggggcaactcccgccttatgacgactatcccggacaagacgatggggaaggagatacccatcttggccccctgctccacctcaaagatccgtccccccatgaactacccccaccgaacatagtctgccatatcccagcctcacccacacccgtaaaagaatctgttcccttcgcggaagataagggaaagattgaggcgcttgaagaaaggttaagagcagtcgagggccttggcaattacccattctcggatntaacagaattatgtctcgtgcccaatatcgtcattcctcccaagttcaaagtatcggactntgataagtacaaagggacgacatg

SEQ ID NO: 17171 - DNA, 259 bp, Glycine max
gaactagttccgctccggagtacgacagtcaccgctttatgagcgctgtacaccagcagcgcttcgaagccatcaagggatggtcgttctccgggagcgacgcgtccagctcaaggacgacgagtatactgattttcatgaggaaatatggcgccggcggtgggcaccactggttactcctatggccaagtttgatccagaaatagtccttgagttttatgccaatgcttggccaacagaggagggcgtgcgtgacatg

SEQ ID NO: 17172 - DNA, 429 bp, Glycine max
  unsure at all n locations
ttgtgaactntanataatattagctagaatccattattttaacttaatgtacaatcatgtacaagatgattctaataattaatggctcttttacgagttatgacgtacgtaaaacgatgcacttctatgcttaattcggcatagttttaaataaatcaacatatataagattcgtatgacttcatgacttcattaattaatgattntacgaatttcatccattttttttatatcgtgctgccttttttacttcttctattggaattagataagataaatacatgtgtcggagtaaaatacagataaattaacattagttacacaaataacggttgtacatgtcagatatatatgtggggtctatgcaacacatctcatgttcaaagagaattcgtcaaatgaaatgaggttatcaactcaatcgagtag

SEQ ID NO: 17173 - DNA, 389 bp, Glycine max
tgcacttatagcttctaaacaaatatggagaacataagtatgtttctcctacttcaaaatgagggggagtatattgataaggatgtgaacattgttctatccctactgtgagatgctaagaaattcttagttaacacattccttactcctttcgtgaagggtctttctgcaaagccttatatgtagaaatgtcatctatttcttataaatccttgggttagaataatccaagaaaagtgcagaaattccttagatattttcttaggatgaaatcattgtaattcttagcaagacaaaaagaacatgtggactaagtatcttttgtccttctccactttggggctttgtcctttctcactttggccttcgtccttctccacttggacctt

SEQ ID NO: 17174 - DNA, 421 bp, Glycine max
  unsure at all n locations
tgattcatgattcaattcatgtatctttccattattaaccgaaatatcactaccaccaacagctctcttgatggagcttgggtatttcattaactgaccaataccaaaaccagaatttattgtaacaccagagtctttagcaaagttcacccctttatcattgttcaaacatttattggtccttatgcccgaattggttgattgtcttcctgtgtggccgtaatcagaatacagtttcttgggcatgatagggctgccatcattccacanaatttcactagtttttgtctttcccccatattgatcatcaaattgcagacatggtgaaaaagataaacccttggccacatttttaggttctgatctagctctaccagaagcattaaccacagcagacatatatgtctttgagttaagctga

SEQ ID NO: 17175 - DNA, 411 bp, Glycine max
  unsure at all n locations
tgtactgtaatagaattggggcggtcatgaccttatgggctcatattgggaaccgcgacaggtagacttgggatattttgaagatatatgctaatatatttagaattttttttaccaaaaaaaagaaagaaagataaagatatacctaaaatttgaacgtgtcttccagagtacaggtcattttaccctacccatttgtttattttaagatcttattaatgactagcttaagaatatattaattaaaaatatgtaatgtattttcattcttaattgctttaaaatagtatattgaacantttttattttaatataaaaaacattttattaaatatgtgttaatcttattttttagttaaatttttaaataaattaattaacattatntattttgtattatcattctcctaa

SEQ ID NO: 17176 - DNA, 398 bp, Glycine max
tgtttgtcgtcttcaacgttctctctacgggcttaaacaagccagccgacaatggtttaccaaactatcaagtttcttagtctcccatgggttccaacaatctaactcggaccactctcttttcttaaagctcactaagtcagccactactatactcttggtgtacgtcgatgatatcatactcacagggaacagtatgctggaaatacaagatatcaccaccctcttggattaaacattcaaaataaaagatcttggtgacttgaaggtctttttgtgactcgagattgcccgtaccaatcatggaatccatttatggcaacgaaaatatgccttagacattttgtctgattcagatatgctaggatgcaagccacactcgacacccatggattatt

SEQ ID NO: 17177 - DNA, 391 bp, Glycine max
  unsure at all n locations
ntatatcatttcaatgactacacaagaccttgcctcacatatatttcctttggaattcccaattcttagagaaatgggagttgatcaatgtatgattttcctactagagttaaggtccccacctttgtttatctttcatccctcattatcctcaagttgtccacaatcatgcttatctttcacccttttgaggatattggatgatgaaagacaaacaaaggtgggaacaataattttggaaagaaaatcaactatttctagaatagggaattccaaagggaatgacgggagatgtcttgtgttgtcattggaatgataaacaatttattgactctctgatttataatgttatatatccagttataacacgacgattacaataactttatgt

SEQ ID NO: 17178 - DNA, 444 bp, Glycine max
actatcaatactcagcttaacattcaatttcgaggctctcgatatattactgtacttaatcaagcatccaagaaaaaatttattgtcgtttgaatttgctcagagattcaacattcaatttcgagcgtctcgatatattacgggactcaatcagacatccgagtaaaaagttattgtcgtttgaattggctccgagcttcaacattcaatttcgagcgtctcgatatgttacgagactcaatcagacatccgagtaaaaagctattgtcgtttgaatttgctcagagattcaacattgaatttcgagggtctcgatatcttacgggactcaatcagacatccgagtgaatagttattgtcgtttgaattggctcagagcttcaacattcaatttcgagggtctcgatatattacgggactcaatcagacatccgagtaaaaatt

SEQ ID NO: 17179 - DNA, 320 bp, Glycine max
  unsure at all n locations
gagacagccgaggggagaacagtgcgaagcccccccccacagggtgacttaactgaacaancaaannccggcaagaggacaagaccgatgaaaagcaaggccaggagaaaaaaccggagaaacccgaaagaccggaaaaacggaaaaagaaaaacgggagagcaaggaaaagcgacgacaaagggacacgaaaaaaaacacacacaaccacaagagagggaaacgagcaaggggcgaaaccgggacacgggccaacgcgaaagagggggcacggaaccggaccaaagacgaacaaaagcggggaaaggggcagacgcaga

SEQ ID NO: 17180 - DNA, 402 bp, Glycine max
gagagcttccgtgttcaatttcgagtgcctgtatattgatgcgcctgaatcggacatccgagtgaaaagttatgaccatttgaatttctcgagagcttcctatgtttaattttgagcgtctcgatatattatacgcctgaatcgaacctcagtgtaaaaagttatgaccatttgaatttctttagagcatccgttgttcattttcgagcgtctctatatgtgatgcaccttaatcggacctccgtgtgaaaagttatgaccatttgaatttctcgagagcttccgttgttcaatttcgagcgtctcgacatattatgcgcccgaatcggacatccatgggaaaagctatgactatttgaatttctcgagagcttccgtagttcaatttcgagcgtctggaca

SEQ ID NO: 17181 - DNA, 381 bp, Glycine max
  unsure at all n locations
tacataatataaatgtgtgcaattttattacaggttcagatggtgaagtatggacatattagaatattttctttatctgtcactttattgaaatgaccatttttttaaaaaaaatttgaaacaaatacaacatgttcttgttattaaattttgaaaattactttccgacaaatattgggcttatgaaaagtactttctagaatccaatatcaaaattgaattctaaatactattntccaaaacctataattatggcgtctgaacaaaatatattttacaatgatatttaaaattgtgtatttcaaacaaagaataaatctcataacgtactttcttgaatgacgatatatgagtatttntttcaataaaagtggaatgaat

SEQ ID NO: 17182 - DNA, 385 bp, Glycine max
ttatacataggatacacctacaaaaggaaacacattaatagttattatttatagcaggtgccttggtcttaaagatgcaagttttcaaaactcctaaagacaacaaatctaacatgggatcagtgaaaaaccgtttcagagatttgatgaattatttcttcatgctcttgaccggcacgatgaatgtcccgcataacacgcttgacaagatcaaaatgaactccaccagtgacagatacacgaagatcaagcaaaggtcgtaattttgtcacttaaggcatagatgccttctatgattacaatacgagagccagggacttcaacagtcctgtaaggataacagtaccaaagatatcaacaaaaaactaacatatcccagtgccaa

SEQ ID NO: 17183 - DNA, 415 bp, Glycine max
tatgataaaatctgggacttagccttggtagaagtctccacagaggccattgcctccctcggctagtattatgatcagccgttgaggtgcttcacctttggggacttccagctatcaccaatggtagaagaatttgaagagatcctatgatgccctcatggggaaggaaaccatacctcttctcagggttctatccctcattagctagaatttccaagatagtccaaatctcggcgtaggaattacaccacaggaagcaagtcgaaaatggggtggttggaataccgagaaaatatttggaggcaaaagcaagagtcttggcaaagtaaggtgagtgggccccgttcatagatattctcgcactgttaatcttcggaggagtcctctttccgaatgtggatgggttggtggacct

SEQ ID NO: 17184 - DNA, 407 bp, Glycine max
  unsure at all n locations
aatgtctctcaatcaagttcctgtgaaattattgaaagcataatggttatgcatttttgttnttattttgcttcatctctgtatatcatcacaacttcagaggcttggttctaggattcaacttccaaaggcttacttactctaatatatctcttattcaagttgttctgtgagttttcctgttttagtctgaagctctgagctttgtttgatagatatgccaaaggcaaattgcagtttctaatttgttgaaactacaaagattgagtttagaactgatagaagagttaccatgtgtatcaaactagcattagaaatcggtatgggtgtttgctntttgcgttcttaactcttataccatactagaaactacaaagaagtgattggatcttcactaccattgtggt

SEQ ID NO: 17185 - DNA, 82 bp, Glycine max
cccagcgattatatctactactgtgtgatgttgcatgaattttgcgacttaaactactagataaggtctcttgatataaatc

SEQ ID NO: 17186 - DNA, 192 bp, Glycine max
cctagaggggatggacctttttgggtcctttagaggatcaataacaatgcctataggttgtaccttacaaaagagtatggagtccacaccacttttaatattcctgatttaattcctttgtaggtggagctgatattgaggaggaagaaccaacctatttgaggctcaattctattcaatgtggagggatga

SEQ ID NO: 17187 - DNA, 386 bp, Glycine max
tataattattattgtttattgttttgtgtttcttggcagatggagtcaattcaacaaaattataatgatgattccatggaccattcatctagtagtcctccaggttcgcctgatataagtgacgtagtcggagccctgccgttggatcctcgagttggtgagaaataccaggcggaggtccctggcatcataaaagaatcagaacggcttcaacttcttatgaatcctgctgattcagaagttatgcttgataactcgctttctttagcaattggcttgcccatctcactcacatggataccacatgaagtggacgaatgcggcatgaaaggaatcttgccgactttgatggtacagtcaatacatatgaactagtgaaagaaact

SEQ ID NO: 17188 - DNA, 374 bp, Glycine max
cttgtttaatgctattcccagctctttagtttatttaactttgttctccactattctctttattttgtgactggctcaatcacttagggcaattgtagaagagttttttatattttaaaggtatgatttttgttacactacctttttcatacgtgtgacgaattatttgatagcacttgagtcgcaaatcttgattcactggtcaacggggtaaaggtttcatttgttgcttgtaatgtattataattattaataataatgtcttggctgttcgctttgttttctcaaattcacattagtattcgcaacttaaacaaaactaatgatcctgtcccacaatggaaatgtaaaacttgttttttaacttatctggt

SEQ ID NO: 17189 - DNA, 391 bp, Glycine max
  unsure at all n locations
ttganagacaacagaggacagtgggccccacactacgaagggcctttcgttgtaaaaagggctttctccggaatggccctggtgctcaccaacatggatgacgaggagctaccttcacccatgaactccgatgttgtcaagcgatactacgcttaagatctggggcaattgaagaagtcgctgcatgtttgttattttaattcttatgtgttcttcttggtttcccccagggattcctatcctctgtaattttctcatcgcaatcttttaaaagacaagaacgtacgattgaggttctggtcctcgtgttgtgctttacaatatgtgtagtatttgataacctgagccttttcgctcagtccatgggatgccccaagngcttaaatgaaac

SEQ ID NO: 17190 - DNA, 431 bp, Glycine max
  unsure at all n locations
nttgagcaattcanatggtcataacttttcactcgtaggtccgattcatgcgcataatatatcgagacgctcgaaattgaacaatggaagctcttgagcaattcaaatggtcataactttttactcagatgtcctattcaggcaaataatatatcgagacgctcaaaattgaacaacagaagctcttgagaaattcaaatggtcataacttttaactcggaggtctgattgaggcgcattatatatcaagacgctcgaaattgaacaatggaagctcttgagcaattcaaatggtcataacttttcactcggaggtcctattaaggcgcataatatatcgagatgctcgaaattgagcaatggaagctcttgagcaataacaatggtcataacttntatactcgaggttcgatngaggcgcataatgtatc

SEQ ID NO: 17191 - DNA, 379 bp, Glycine max
aaagcggtttctaatgactcctctacggcttccacataaggcatagaggatgggcagctcaccaagatgtcttcctcgcctgatacgatgaccagatgcccttccactacgaatttcaacttttggtcgagtgttgagggaacaactcctactgagtggatccacgggcgccccaacagacagctgtaggggggggtaatatccattatttggaaagtaacttgacaggtgtgaaggcctatctgtactgggagatcgatctctcccctaacctcttggcgggtgtcgtcgaaggcacgaaccaccattgaactccgcttaagtgggaagcattgaatggtaatttctccacagtgctctttgcatcacgtttaactga

SEQ ID NO: 17192 - DNA, 428 bp, Glycine max
  unsure at all n locations
tcgtgaattgcaattgngaagtaaccatttgaatggaactattccttctcagattggttacaagtataacttggagatagctttaaatttgagctataaccatcttcatggaccattgccccctcaattagcaataggggtggaaataggccaggtcggcctacaagagcctacgacctaacctacataaagtctggcctaaactggtctgtttaattaaaatgttaagccgagacttttttaaaagcctattaaattaaatagactatgcttaagcttattaaaaagtctcataagcctgataggtcggcctatatatatgtatatatacttatattaatttttgcgtaccaatatatacttatattattnttgggtacaattaaatttttttaaaaactattgatacacattactgttcatacttc

SEQ ID NO: 17193 - DNA, 433 bp, Glycine max
  unsure at all n locations
tgngtttgggtttgagttttctgaacctcgagggtttgggtttgggtttggattaatattaaacaacttgtcttaatgccaattgaatttgagatagaattcaacacctggcttttctgacttgtcatttctgcataatatataagtttgtgacttttgctgaaatttatcanatagtcttgacaatttttccctgagagtaacactgctacgcatatcctaatagaaagaaaccaacttatgggaggataaggaaggaaatganactcagcttcgacttagacctagacatgtgtttaaagattgaacaaaagcaaggcagatttctgacagggtttgtcagattacgattcattcacagagcgattcttacatagtgaanacaacacgaaatatagtatggataagacnaatatatttaagcatatatata

SEQ ID NO: 17194 - DNA, 418 bp, Glycine max
ttaagatgtgctcaattgtgtaaccaccatatatatatatatatatatgggtagtagttcatactcacgtaaccacaagctgcaataatgtgtgaacatggatagtgaagcgcaaaatacttttcgcattgacaataatggccattcaagttaacagcccacttttgtccgccacgttgcgttataagattgaaagtctcctctacttcaaacctttgcgattggatatcatagacgtgaacgatgttgcgaacaagcttgtcttgaattttcctaaggtctttaacaaccttagaacaatatacttgtccttcatttaaatggctttgggcttggcgaccacgatgaacaaagtactttcaacacctactatatgttgatttcaccagcgctattatgggtatgttgtgacaatcct

SEQ ID NO: 17195 - DNA, 434 bp, Glycine max
  unsure at all n locations
tgctggcctcaaacttgctaataatatgctgccacacttaccgacatttagagcttacccctaaaggaataccaaggtaagaaaaaggaaattccagttggctgcaattgagagaagaagctgcctccctacaccagcccacagatttacccaaacacccaaattggctcttattataggttatctttaaaccagaaaccaattcaaagcttttcaggatacactttaaaactttaacattatcattagtggcagtcccaaagaacaaggtgtcatcagcatattgaagtatattaacttcctcttttntctttcccacttggcagctattgaagagattcttttctactgctgatctcatcaacccagtaatgccttccaccactatattaaatagcaaaggtgcaaggtggtcaccttgccttaagcctctc

SEQ ID NO: 17196 - DNA, 322 bp, Glycine max
tcaagctctgccgatttaggtccgccagttttaggatcgtttgtgtctgataacaggcacatttgactatcctgctttgatatataagaagcctacggaaaatggagagaataagaatggggtagaaacccgtgttgtgactgtcattcctacttgggcaaattatcccactggctcaacaatatcaatactcagccaaaatcacgccttcttattacacaccaccctaccagccaagaacacccaatcatgcataaaagccacccctaaatcaaccacagaacctgcctgctgcacaatcgaggccagacaccacccctaa

SEQ ID NO: 17197 - DNA, 372 bp, Glycine max
tcagcacaattactatttctcaatctcagttttataataccaattactaagtcctttttaactagacaattgaggtggtgcatgtttacatgtgcatccctacgaagcaatagtcaaaaatcatcaatcttattttccaagcaactaagctcatgatatgatgcatgttcaatattaagcatgtagatattacctatttttctacctatgtgaacaacctcactagtttttgcttcacaaatgagacaacaattcttgttgaatgcaattttgaagcctttgtcacatagctgacttatgctcaagagatagtgcttaagttcatcaacatatagaacaattttttttattcgagaattgtgcttaatttca

SEQ ID NO: 17198 - DNA, 405 bp, Glycine max
  unsure at all n locations
tagctacacacagcccctctcataactaagctcacttccttgagaagcttccttaagaagattcctaaagaagatagagcttagctacacacacatctctaatagctaagctcacctccttgagatgagaagctagagcttagctacacaccccctataatagctaagctcacccacataacanaatacatgaaaatacaaaaaattccctactacaaagactactcaaaataccttgaaatacaaggcaaaaaccctataatactaaaatggccaaaattcaaggcccaaacaaagggaaaacctattctaatatttacaaagataagcgggctcatacttagcccatgggctcgaaatctaccctaaggatcatgagaaccctagggcctttccttagatctc

SEQ ID NO: 17199 - DNA, 202 bp, Glycine max
aaggcttgatatgtttctatacatgtaaatctttcagcctccaagcataacatttttgaaaatgagaaatacttgtgttacatagctctacatcaaatgttaaatgaatggatctcaagtgagcctattctcattcaattaggataatctatatgcatgcaccctcctgcatgtgcttataaaagatcactgctagatatca

SEQ ID NO: 17200 - DNA, 440 bp, Glycine max
  unsure at all n locations
actaagcttgtgacacgccggagattacgtcatcttccgcgcacacaagatctgtcatactgacatttgagtcacgctgacgggcggaaatacccgagtggttatccgtataaacattcttttgctgtctgtaagacaaaaagcctgatagcacgcagagactaacgtcgtcttctgcatccttcgtcaatcgcggccgacaagcccgttggcacgcggagatttacgtcatcttccgcgctcacaagatctgtcatactgacatttgagtcacgctgacggacggaaatacccgagtggttatccgtataaacattctttttgctatctgtaagatgaaaagcctgatagcatgcagagactgacatcgtcttctgcaccctttgttcccccggngacaacaagtcagttgcatgcagagatattntatggtcacccgt

SEQ ID NO: 17201 - DNA, 441 bp, Glycine max
  unsure at all n locations
gtactctagcttaaagattggctaagattttgttaaaacataagcacttanacaatgaaggaaagctggagttgctgcacatgatgtccaacgttatgtcaaagaataagatcgggctgcacaatgcacaaagcaagataaagtgtcaaatgaagaattgaagctgcaggattcacgatgtcggatataatgtccaggacatcctgcctgaaaatactggaattgctaaaagcattgaagctgcaggatccacgatgtcggatacaatgtccaggacatcctgcccgaaaatactggagttgctaaaagcatttgaagttgcagatccacgatgtcggatacgatgtccaggacatcttgcccgaaaatactggacatataaatctgttatatctttaacagattattgtgcagttagcaagagattagatgatctatctt

SEQ ID NO: 17202 - DNA, 425 bp, Glycine max
  unsure at all n locations
agtagaaacatgggaccaactcattntatttcanaaagaaagtcgtatctagtcaaggtctgagagaccatacaagtttcctaacgatntctaattatgtgggccattaagtctatcatatgctgacaatagccgagaagcccatgaatctcttcgggggcggagtaggtgtccaccatcgccttggccttggctaacaagcggngaagttcttgactcccgttcaaggtaagagcaaaccgatccatccacatggttgcctcttggtgtaaagagtcgatcacccttcctctagcctctntttctgcgtatacttgagcatactcgtccgcgatcctatgctcgtgggccgtggctagacctaactcttcttggtacttggcgatgatagctagcatgttggtctccgtctcgcataaatgctg

SEQ ID NO: 17203 - DNA, 429 bp, Glycine max
agtcacttcaaacattgattggatgcataagtactaaggctctattaagctattgttacaacctacgaccgctgaccaggttcttttattattattattattattattattattattattattattattattattattattattattaattgttttgcctctgttgaatagaatgaacaattaccctttaggaccttgattcaatgtagcatttggaaattggcctccttccttatgtgtatatcttggtctctctacttttgtttggaatttctattaattgttttgtgaacttagtataatttttgttgagcactgtactgcatttccactgtaaaaaatataatcattatatatttctaaatcaggttatacatacatctgataaacaattggttagaattgatatttttattgatgtcattgtga

SEQ ID NO: 17204 - DNA, 421 bp, Glycine max
  unsure at all n locations
tctgttctgaattcgagcatctcatatactactggaaacaatcggacatccgagtaaaaaggtttgttgtttgaattttctaagaggttatgatttcaattntgagcgtctcgatatattacgagactcaatcaggcatccgagtaaaaagttattgtcgttagatttttcttagagcttctatttccgattatgagcgtctcgatatattacgagattcattcggacatccgagtaaaaagttattgtcgtttgattttgctcanagcttctgttatgaatttcgagtgtctcgatatactacgggacacaatcggacatccgagtaaaaaggtattgacatttgaatttgctcatagcattcgttgtcaattacgagcgtctagatatattaaaggattcattcggacatccgagtaaa

SEQ ID NO: 17205 - DNA, 386 bp, Glycine max
  unsure at all n locations
ntaatactattcaatgttacaccatcatatagactatataacgattggtggcggttgtgtcggcaacgataaccgtgataatagcggtgacaataataataacgatggtggtggcgatgatggtattgatggtggtgataatggtggcaatggcgatagcggcgacaatgaaggcaacaacaatgacggtggtggtggcggcgacgatggtggcgacaatggtaggagtgacaacgccagtgatggtggtgtgatggctgtcatggtggagaagcgatgatggtggggaagatggtgatgatggtggtggcgatgatgacagtgatagtgatggggttggtgagggcaactatcctattctgttgctctctaaccaattcaccccc

SEQ ID NO: 17206 - DNA, 327 bp, Glycine max
acacgacaatatagggaaaggaatcctacagatgcagcgtatctgaccttctctgaagagaagagtcccctgcttgtttcacatcttccaactgatcttcagacagcacttcattgaggtcagcagaagaatcgagagcatttctcttactacctgccatagatgccccttctaatgatgcgtccattacagcgctattgccagaaccagaacagtcatcagaggagtcaagcagcttgatctgcccaaaaccaataataattactacaaagacataagcagctacagcacaaaaattggtgggaactgcacacctctataacatta

SEQ ID NO: 17207 - DNA, 422 bp, Glycine max
tcagaccaaagcaacacaaaatctatgtatccaattcccctcaatttaatggatgttcaaggtttgagaagtgaaattgataatggggtaaatttgaagcaaactctcacctcacacaagtctataacatcaatttaaacttgttcaaactggatttacacctaaaattccaccgaaccaaaatttgacccctcaacacctaattttaccctagaatggctctttgttcactgtaggcatttgtttctctctctagcacagcccaaactttctcataagtcttaaatgacatttcaagctaggattaactcactttaacctccaaataccactaaattcacatttggccttccaactttcaaaaactcactccttttccactcataccaccatatcacactgtctaaccctaggtaactcta

SEQ ID NO: 17208 - DNA, 380 bp, Glycine max
gtttcatgtaaaacttcaattaaatattaataattgatacacttgagccatagttttaaaactcagactagtaattgacttgattaaggtaccagattagtgggttactggttaaactagtgggatcacagattgaaccatatgaattaatataatattaaatacataatttttaaattaaaaacatactataatttattttttatcatacatataccagaatcttgtgttgctatagaggtaactatatttttaagcaccctaaggtccaataactctcaaacacctccaaaatttctctactattagacatatacgagcaacaagtgcactcatagccaagtgcatgggacaagcaacatgtgatgtcaaagctaaat

SEQ ID NO: 17209 - DNA, 391 bp, Glycine max
gctgaagctcaaggaatagcttgaagatagtttttgtagaaactttggcttttacatgcccaacttccttaagtgacatttgtattggttgttatcttaggtgctgcatcttagtacacttgatatttgtgttgcatcatgaatcatcatggttagtgggaaaaaaagtttcttcaaaggaaaaaactctatgttttaatcgattacagaagtggcataatcgattacaaccagatgtctgaatcttaaagaattgagtctcgtatcagtttaatcgattacagtagtctcataatcttgattacattgttgtttgagacaatgaatgagttatccaagaatcctttgttttaatcgattatcaagtggattaatcgattacttctctatg

SEQ ID NO: 17210 - DNA, 373 bp, Glycine max
  unsure at all n locations
cgagttcaataagataattctaatggagtctctcctcctgggtnttgagaaaagcttatctacgtggaaatgcagttaatcccatataagttacgatgcacaatgagaaaaataaaatcgcacatatgctggttactcttctatatgaaaaaaaaagataaggattaattgcaccgctagatttgctttaagctccatttctatatcgatacattttatacaatcttctaaaccactgttacttctacaaccactcttgtatctgtatattatacaacctttactccctcaactgcttcccactttcaggtactcactctattccaaataatgcatgcattaaatgttcatagataaaaataagtagctaggc

SEQ ID NO: 17211 - DNA, 436 bp, Glycine max
  unsure at all n locations
nggtgcacaatgtcggcatgaagtcactcgtgaagtaggttctataagagattgtgtttacagttccttgaacctgattgttaattttacattgaagaatatgtggggatttaaaaataataacactttgttaaagcttattgagaaggtgaattcaatatcaaaatattagcacatttgatcttctgcaacacttatagactagagattagagattaattcacatttcgcaatcatggttagcaactcttggacagcttgtggattgatagaacaaaagtaatgtaaaggcaaaaagaacttgactagaaacatatgtgatgaactaaggtctacgctaatactggcaaaaatgtcactgttgtttttttttaaataatgcttttataaccattctaaaaagctgttcaagataatgtatttttgtactagtgat

SEQ ID NO: 17212 - DNA, 420 bp, Glycine max
  unsure at all n locations
gtatgataattttcatgtaacaagctaaattatattggataactctgataaaatagtttcaactcaagacaaattgtagacatagctaaaaagtgaaaatgatcatgtangctgagaatgatggctctgaacttaatagtaggatttattaacttatagatggaggaaaagactaggtagatgctaagaactatttccctttggatgatctcctttctaaacttactcttttttcctctattatgaatgttgnttttcctctattcatttagttcattctttgctttcataattaatagttttttcctttgcggaattttctaatatatatgaccgagaatgaattttttgcattgacctattaaaaaatcatactaccattntcagctaccactattacgcctttgattataatgtcat

SEQ ID NO: 17213 - DNA, 408 bp, Glycine max
  unsure at all n locations
ttctggtgggacatcttcacttgctttccaatctgacattcaccacagattctgccttcttctattttcaaattgagaatgcctctaacagcacctttgtcaatgattatcttcatgcctcttaagtgcagatgtccaaatctttgatgccatattctgacttcatcttctttggaggatagacatgtggaggagtaactggtttcttgaggtgtccataggtaacagttgtcctttgttctgctgcccttcattagaacttcactcttctcatttgtcaccaagcattctgactttgtgaagtttacattgaatccttcatcacacaactgactgatgctgatcaagtttgcagtcagtcccttcaccagcagtactntgtccagactaagaagtccatcatgggct

SEQ ID NO: 17214 - DNA, 365 bp, Glycine max
agattgagcgagttgattttagccttagtttcactctagctatttgtcaattcaattaagaatgagaaatcccaaagagaaaacatctgattgatctttcgcttttattttactaaaaggtattttctgattattatatttatgattgtaccccttattttgatttccaacgtggttacggcacgaccgaacggtcggaattcattttaaccaaatttaacggatgatacaagtcaaacgatcggtggaaatttattttatttttagattaagcgaaaaatgacttaaataaatggcttaagcacgtcaaaagggggtataaaaagtaaatggaaacgagaataaaaatacatgaaacacaatgt

SEQ ID NO: 17215 - DNA, 407 bp, Glycine max
atagacaaccgtttgtcactgcgattttaacagtaactacaaagttttaagagtctccacgaccatgggacatttgatttctacaaattaaacagaccagttgtctaagtccatgttcaatcatcttaattggtcggattgatatgctctcttcaagcaacaagagctcaaaattttgaactaagcaagtgaaattgtaatcataagtgggtcttacaggtaccaaggttggtgtttttaaaactgtagcatgacatataatagggtccagtacactacaacacaacatctcgataggataaagagtggccatctgaaaaatcgagctcaatatattatagtaaatgatgaaaacaccagttttttaccctactacaattggtaatatatcttatgttcagcttaca

SEQ ID NO: 17216 - DNA, 407 bp, Glycine max
tcaagaaaaagatggcctcagcaaattccttatttccagaagggaattctatcaatagacctccaatctttaatggagagggttaccactactggaaaacccgaatgcaaatttttatcgaggcaatagatctaaatatctgggaagccataaaaatagggccttatatacccaccacagtagaaagagtttcaatagatggtagttcatcaagtgaaagcataaccatagaaaaacctagagataaatggtctgaagaggatagaaaacgagtacaatacaacttaaaagccaaaaacataataacatatgccctaggaatggatgaatatttcagggtttcaaattgtaagagtgctaaggaaatgtgggacactcttcgattaacacatgaaggaactacagat

SEQ ID NO: 17217 - DNA, 412 bp, Glycine max
tccatcacttttcacacagaggtcagattcgggctcataatatgtcgagatgctcggaattgaaccacggaagctctcgagtaattcaaatggtcataacttttcacacagatgtccgattcgggcgcataatatgtcgagtagctcgaaattgaacaacggaagctgtcgagaaattcaaatggtcataatttttcacacggaggtcagattcgggcacataatatgttgagatgctcggaattgaaccacgaaagctctcgagaaattcaaatggtcataacttttcacacggttgtccgattcacgcgtatgacatatacagacgctcgaaattgaacatcgaaagctcttgagaaaatcagatggtcataacttttcacacggatgttcgagtaaggtgcatcacata

SEQ ID NO: 17218 - DNA, 416 bp, Glycine max
  unsure at all n locations
gtgcggatttagttntcgccagtgtaaggattgttgtgggtctgaaaaaaggaaaatttgatcatcctgctttgacaaataaaaagcttggggcaaatagagagaatgagaaggagggaggaacccattttgtgattgttattcctacatggccaaatttcccaccagctcaaaaatgtccatactcaaccaatatcggcccttctcattacccaccatcttatccaccaagaacacccaatcaaccacaaaggccacccctaaatcagccacaaggcccgcctgccacacttcaataccaaacaccacccttaacacaaaccagaacaccaaccagggaaggaattttccaacatagaagcctatagaattcaccccaatcttggtgtcaagctaacttgctcccatatgtactc

SEQ ID NO: 17219 - DNA, 415 bp, Glycine max
  unsure at all n locations
tgtaattcagtaatacaccattaatgacagattgattcttatttcttctatgtacgttatatgcttgtggtaggaacctatgtacgttatatacatcatattggatgtttgcgattccttgtttgtagcaatgctaatgccttatagtttgatgacctgtatcaagctatatttcttaaggaatactattttgatcataccttttggttttggtacaatccatttttttgtgttgcatgttgaagtcaagtaactccattacacttgcaagcccgagtataattcattctttgtgttataagcttatgtcanactgtctgacgtctccatatgtgtgtacactatggtcatgttttggtttctagaattcatttggaatatttgttgttgattctgaataagtgatcattcttga

SEQ ID NO: 17220 - DNA, 409 bp, Glycine max
tgtaggattatggggtacccatcacatgtggtactaggtggcggtcgggcgatggtgcacaacaagttttccacatccacaaatcgcgcataaacccaccatcccctgttgcccacctccaattgagctcacgtactcccacgtagcccatatcctcatttctctcaacaccaggtccccatcaatcctcccaagcttccccaacatccaggtaattcaacatccaatcatcatggactaacaaaatcaagcaaaacagggcaaaggcagaaaactctgcccaaaacacaactcaaaatcacagcttttcacatacaaatacccgcgtaacatgtccttcgttccaattcgttaaccgttggatcgactcgaatattttactgggagtctctagtacataagcctacat

SEQ ID NO: 17221 - DNA, 399 bp, Glycine max
tctgatgttctgccagcaactctgataggtactgtctgcaaaaaaaaaaaaaaaaaacccacccttttcttttatgaatcaaaagcacacaaattcatctaaaacaaatcaaacagacatggccaaatccaaagggtgtttcaccaagagtccaagattgtgtcctttttctttttttcagttttgatctaaaaaaaaaacatcacaagaaagagaaaccaactcacctgtccacttctggattgctcctaatctgaggagaagcagctctagcaggagagaagttgggattatacaagcctgacatggctcactttttttctttaagttcttttttcctttaggattggaagaaggagaagaagaagaaaaacaaaccaaaaaaaaaaaagttgaaaa

SEQ ID NO: 17222 - DNA, 385 bp, Glycine max
  unsure at all n locations
tagtaagcgtcgttctcgtgttacttaaggatgttcttagtgtgcaacctaagtgggagattgagaatcttgtacgtgtagtactcatagaaacgctgaatcgcaatttctgggagatgtctggcatatagttttttaagagtatagagtagttacgaaagttaccagaagtagttaggatgcctagtgtaaaaccttaagggaatgtaaagtcgttagtaaggcgttgctctgttgaacatagaggggtttaagagtgagtgttcttgtcaaacgtagatggnctacaggattgctgatgatacttgtatgattaatgaggtgggatataacgagttactgccaataggggaccaaatatttttgtacaactttttttcccaaa

SEQ ID NO: 17223 - DNA, 352 bp, Glycine max
agcttcttttggaccttgaacaggcaactaactcctctttcaaaaccatgctatgtgctcgcgactggtccccttcttactttcgcaactagagttcactattgctaccccataaagctccgcgaaatttgttccggccatactctatcttgcgagccctcttggtctcttgttcaagggctcttgcaataattgcaattctcttcccgtaacccggcacacatccttccgaacgtgtgtagcggccaacttgaacttctccttggcaagttttgcctttcctaactcgcttttgagagcttggacttcttcgtcctctttcggtgcttcaaaaatctttttgctgacgact

SEQ ID NO: 17224 - DNA, 455 bp, Glycine max
  unsure at all n locations
gcgggacnttataggatctaatgcgtagtcannacactttgnaaacnnatctnntcaacganannnctggannanagtngtggtgtgggtttttatgtagatattntaagaagatatgtgtaggtatataagatatagaaaaattattataatgggttttgaaagnaaaagagaatgggaaatattggtaggaaaaattgtgattaattgtatttanaattggttataaaaaggtaatgatataaaaattatttgttaattaaaaaagataatataatgaatagtttaaattatttatttaatagatatgtaatagtgttgtaataagtaattattgtatagtataaaaaaatattgatataaaagaatttaatatatttgaagaagaaataaataatagtattataatagaaataataaaatatataatattatatgtaaattaattgaaaaag

SEQ ID NO: 17225 - DNA, 384 bp, Glycine max
  unsure at all n locations
agctttatgacactagtccttggaaaactttattttaacaccaaggcaattaccacggctgttcttaaatccatatttacagaacaaatttggggcatggggctcaatacacatcaaaaacaggttctaaatatgtattagactaacaaggcatccaattagacaaagagagacatagtgctctaagaatcaaattcgcatgcaaattgaaaattataggattaggaaaatcctcaccttttcccacctatctttactcttgaaaacccaaaatgattcaagctctagcttctcttttccttagagagaaatacatgaagaaaggatggatgaagattattcctgcacccaaatggagattctaggagctntaaaatccactct

SEQ ID NO: 17226 - DNA, 430 bp, Glycine max
agaatactcacgcttaccgaaagtaaatattaagatgtagcatttttcattctaagataattagtttatttaacatttactcttaatacgacttatacagtgactaggttccaattttcatttttaaaatgaaaatattaataacttataaaaataacaagtgcttggtggaccaatagtgtttaggaagtataagttacttgtcatgtctaggtaattgtcctattttaagttttagttaagttttaattagttaactgctagaaagtttttggtgaaattttacactattaaaaagttttctctaatgttagcattaggcacaaaacttatttgtacgtgtaagcacttaaaattgagaaacgtaaagaaaaataatcgagaggatcttttcttctgaaatttaaaattgagacacagataaggatta

SEQ ID NO: 17227 - DNA, 169 bp, Glycine max
tatgcatgctcgagcacactggaggagaaccggcttccaacctcgaattctttctatagcgcgtcgaattacaactggacgcccgccgcattacaactgaaaaggctgagaataccgtgtttgctcacaacttaatcgtcttgtctcagagtctccttttatcacatga

SEQ ID NO: 17228 - DNA, 345 bp, Glycine max
agcttccattttcaatttggagcgtctcgatatattacgggtgtcaactggacatccgtgtataaagttattgtcgtttcaatttgctcagagcttcggttctaaattttgagcgtctctaaatattacgggactcaataagacatctgagtaaaaagttattgtatgttgaatttgctacgagcttccgttttcaacttggagcgtctcgatatataacgggactcaatcggacatccgcgtataaagttattgtcgattgaatttgctaccagcttcagtattcaatttggagagtctcgatatatttcgggactcaaccagacatccgagtaaaaagttatt

SEQ ID NO: 17229 - DNA, 395 bp, Glycine max
tgtagcaatatcaaacgaaaataactttatacacggatgtccgaatgagtctcgtaatatatcgatacgctccaaattgaaaacataagcccgtagacaattcaaaggacaataactttttactcggatgtccgatagagtctcgtaatataatgggacctccaaattgaaaatggaagctcctatcaaattcaaacgacaataactttttgctcggatgtacgattgagtcccgtactatattgagatgctcgaaattgacgacacaagctctgaacaattttgaacgacaataaatatattctcggatgttctattgagtcccgtaatatatcgtgctacttccaattgtaaatggaagctcgtaggaaattcatacgacaataactttatac

SEQ ID NO: 17230 - DNA, 377 bp, Glycine max
agcttcttttgtaccttgaataggcaactaactcctctttcaaaaccctgctatgtgctcgcgactggcccctttcttcctttcgcaacttgagttcactattgctaccccatagagctccgcgaaatttgttccggccatactcttccttgcgagccctcttggtctcttgatcaagggctcttgcggtaattgcattctctttccgtaacccggcacactccttccgaacgtgtgtagcggccaacttgaacttctccttggcaagtgttgcctttcctaactcgcttttgagagcttggacttcttcgtgctcttccggtgcttcaacactctctttgctgacgactgttaacttggcgagccaatctaaacct

SEQ ID NO: 17231 - DNA, 420 bp, Glycine max
tagcctgctgcgctaagtgcccagtcaaaatttcagttttattttgatgtttttgtgaaaataacctgtgctaatctcttgtgttttgtcttatattttgcagatggcatctaagaaaaggagggctccttctacaccttcccaagtcagatttgatctgtctcagttcacatctcaagaagcttgtgagaggtatacaaatattgtggtgcctaggaaactactaccagagaggaatgtgatagtttattacactgagttcgacaagttcaaggaggaacttgagagaagagactacgatgaggagttgactgattttaatgacagcagcatagacattggcattgtgaaggaattttacaccaacctctacgacctcgaggataaatcacctaagcaggtgagggtgagaggtcactt

SEQ ID NO: 17232 - DNA, 344 bp, Glycine max
tatttttgagccaaaatcctgactcaccataaaccttgacccaatgtgagaatgcctatccttatcctcggaagcaaaataagaagagaaggaaaatttcctatcaacggataaaggagaaggaaaattttcaatcaaagaacaagagaaagaaaatttccaatcaaaggaaaaaaaggaagcatagaaatatccaatctaatagtgggagaacgaaataaatgattgaaaggaaattcccaaccaaagaatgggagaaagtaaaaaagaagaaagctcctgatcgaaagaaaacataacatatgtgcacagaggtctttggaccagacgataattgaactata

SEQ ID NO: 17233 - DNA, 260 bp, Glycine max
cctttgcatttcatctatatcatacagaattgaacatacaaatgaatccgaagactttctaggcttgtatgggttaggcagccaacaatcatgttttttaggattgaaagcttaggtcatgagagattcatctagaataccttcactttttttattcatcctaccctactcgccttatttagcacttactttattattttgacataccacttattcttctattgtcttacagtttttctacacagaaacattatatacat

SEQ ID NO: 17234 - DNA, 385 bp, Glycine max
tagctttataaacaaaaacatcataaattaaaacataagaaaagagttcaattgtatatttgaattgtttgtgaaatttttttgacaagtccaaactttgtctaagacagaagaaatgaacttttaaaaagattcatcctaaggtgaatatataaataattgtgtctagcttgtaggaacacaatttataaaatacttaagcaaaaatctttttgataacttacaaactgtacaactaaatctctcttttaattagggttaagtttacgacgattcaaccttattttaatgattatcactaagaaaaataatatcatattaaacacaattagccaacattatgtattccaattaatttgattcttataataccccaattgtttat

SEQ ID NO: 17235 - DNA, 429 bp, Glycine max
gacactatagacaactccacgcttaggattcaacattaattaccgtgcttctttcccacttgttgaattatatgcgactttatctagatgaaaacgatcgaattctactccctgcgggatattggattatatctgggccaccaatcccgtggaagaatcattggaaaggatgggaaacaacaccggaggatttgaatgatgagcagaccaaaattgagaatgtagccaaaagcctgtgctggaacaagctactggagaaggacgatatagccatttggcagaaagccaagaaccatttggattgcaaagccaaccgtaagctctctcacaatctgcctctctgcaaggcacacagtaaccctgacacggcctggtatgtgcttcatattccattgtcccttgtatttcattcacgaaatatttccatct

SEQ ID NO: 17236 - DNA, 376 bp, Glycine max
  unsure at all n locations
ttgcttctatataagcttaaccattntatcaataaagacaagtggagtnttattcataaaattagagtttatctcttttatcttagtgagagtgattctcctaaattcttgagtgattcaagaacaccttggctgtatcaaaggactttcacaacctttgtgtgttgccctcgctggacagagtgattctttccttcctttcatcttcacccttgttctttcaaaccacaattccagaaaatccacctctgcccagaattatctcgtggccataaatcccattttaagcactcaaattaagtgattcttgagcctaaattgaatttcaaaacgagacctttcacctcgttttggaatcacctcattgggagccctg

SEQ ID NO: 17237 - DNA, 408 bp, Glycine max
tctctagagctaaggatgggaataacttagattaaatttcagtcatccacctcacttagcgtgacctctacgctaagctagccatagcccatgtgctgagcgagtaacactcctcgctaaacacatcaacccccatctattggttgttggggtcccgctaagtgagacatttgcgctaagaccaaaaccttctctggttgcgcatttattgaaattaggctaagtgagtaagctcgctaagcgcgacatggtctcccgctaagcgcgtatatgtgctaagcgtaaaagtctctcaatttgggctttcatggtaattatgctaagcgaaccatctcgctatgcctaaaagtctctttggaatggcaatcgcgcttaacgagaccatcttactaagcgcaacccactact

SEQ ID NO: 17238 - DNA, 713 bp, Glycine max
  unsure at all n locations
caccctcactttctacgttaaatcgagatagcgattcgcaaattaatacggttctnntcccagcccgcacaatgaatgatgcatgtgatacctgacatacacagactgacgcagatccagactagcttgttaccagctctgctaggcttgagcaccttctgattgcttcgaaggcttgttctagacctcgaggnactactcttncaccaagactataacgagctagtcagatcatctctagacaagggaactctcatattgttactacacaatgacatggtgctgactaacatacatcacatcgctctagtgaaattcgcagacgtttgtgcataacactgtctcatgagcttccacctctncagtttgcatgacatggagagagtgatactgctcaatacgcaagtgcgataccattatctaatatacgacttcgcgtggcctcggactcatatctcgaattctctcgtggacacacgccaaatcatagctgtgtatattcagtcattacatcatgtgtacacgtcaccagtctacacgagtatcgtgntcgatcatgcgtcaatctgtacagtccactaanatacgccgcgaatagctgtgnatngtactcagatagatcgtggactcgacgttacgtaatgagcagacatgataacgtattcgatgatgatgcaccgtggaggatactatgccgacgctctacgacaccg

SEQ ID NO: 17239 - DNA, 422 bp, Glycine max
  unsure at all n locations
cagcttattgtgttntatcttcgtattatcttctcttgtaatcttttaaggagaaatttatctaaacaggatccacgtctagaactttacgtgtcttttttttacaagataagctgtattgtcttggggtcgcatcctagttctcattgttggttatcctagtgccaagttgtacatgtttgtagcgttgcttaattatactttacaatattaattatcaattttcttgcaggatggaagaattaactatgatgagtttgtagccatgatgaggaaaggcaccccagatataactcacataacccatagacgtcgcagataacccctgcattgctttgttgggttcagagtgtctacacgttttatagtataacggcctgctatttgattcattaggcacttgcatgatatttgtgggtcta

SEQ ID NO: 17240 - DNA, 364 bp, Glycine max
agcttgagatgaggaagtgtagaagggtgaaacttcctgcttttattcgttgaccacaaagtggtacctggagatatgtcgcgggggtcaggagaccttggggacgtcaggtggggtgctattgcccaaaaccaagcttgaccaatcccgacccaacccgggcatagtcagttagtgagaacctgtgatgtacctaaacaggcgagctcctggcagtcaacagataaaaggaacaaagaccacaaagcaaggaggcttgtgtggtggctggccagctgtgaatcttgtgtgatatatgggttatggcctctggtaatcgattaccaagggtgggtaatcgattacaaggcttataaatgaagac

SEQ ID NO: 17241 - DNA, 404 bp, Glycine max
  unsure at all n locations
tctacagaaggtttgttcctaatttctctacaattgccttacctctcaatgagctggtgaagaagaatgtggcatttacttggggtgaaagacaagagcaagccttttttttctcaaagaaaagctcatcaaggcacttgttctagctcttcctcacttttctaaaacttttgagctagaatttgatgcctctggagtgggagttggagctatattgttacaaggcgggcaccctattgcttattttagtgaaaaacttcatggtgcccccctcagctaccccacctatgataaagagctntatgccttaataagagccctccaaacttgggaacattaccttgtttccaaggaatttgtcattcatagtgatcatgaatcacttaagtacattagatgacata

SEQ ID NO: 17242 - DNA, 377 bp, Glycine max
tcaagcttggaaccttattcatcacaatcgttcccagtctcacaggtctcaccgcctctttggactccgacattgcaacacttggtgatctcctattctctgtcactgataatccattcaaaggttgacgtcatgtccctcaaaacttatgatcatgcgctaaaaccttatcttgcattcttttttcctgttactgcatgattttatcgtcgttactacatgcgagcgatgatctttttctcttaattatacttttgagatcatctggatactataattatgcgataataatattttcataactgtattttttctcaaaaaagaagacactgtctgccagataaatgttacaattttcgctataaaacactatgttt

SEQ ID NO: 17243 - DNA, 410 bp, Glycine max
tgcgttgtaaaaggatctgtttggtaggttaacatttgagaatggcaatggtgagcataattaaaactagccattaatttttacagaattgataaatgtttaatatgattttacatagaccgggaacatgtagagattattcaacactgaagggaatggggattgaggttagaatttttgaaatgcaaacatgtttgacaagaatacctgagttacccgattaaacaaattattcaccattgtactgagactttgtgtaaaggttgactaattctgaagtcatatgattggaagccctagaattggggtaccaagcaagatcaacaattgttgatggggtagacattactgcttgcaaataggttgaatcaaggcttgctagttgccatgagagcctgttgctgctgaaa

SEQ ID NO: 17244 - DNA, 383 bp, Glycine max
agcttctacttatgtggcagggcgagcttccttcactttcttgcctcaaccgcgagctttgaccaccgctctttctttccgtgatgcttctctttatatccgcctgagtgggtttatagcctaaaccatacttcccacgatttcctttggcatttatcaagctagttatgccgccgttgtctttgcctaaacccattccgggttcgtaaccgttccccaacataactcgggccatcattactgctgcatcggacaggcaagcttgcccagagaaggagtccacggaggaaatgcttaccacctcaaaagactggaaagcggtttctaatgactcctctgcggcttccacataaggcatagaggatgggcagctcaccaagatg

SEQ ID NO: 17245 - DNA, 422 bp, Glycine max
  unsure at all n locations
tcatgatgaatcaagatngattcaaagagttntgatgataactaagatgatgacaaaaagctcaaaagtcaagaacacttcatgataacaaagatgatgatctcaagaatcaaagaatgagttcaagattgaatcaataacacttcaaggttcaaaaggaaatttgatttcaagaatcaagaatcaagaatcaagaatcaagttccaagaatcaagatcaagattcaagactcaagattcaaaaatcaagagaagactcaatcacgataaatattaaaaagtttttttcaaaaactgagtagcacatgnaatttttctcaaaaccttttaccaaagagtttttactctctggtaatcgattaccagataattgtgatcgattaccagaagcataatgtgttttcaaaaagcttcaactgaat

SEQ ID NO: 17246 - DNA, 384 bp, Glycine max
agcttatcaacatcaaacttggagaaagagttcttggggtcaagacatgagaagcaatcaagtataatgttacttccttcactaaagcggtgatccatctccacacatattttatcaatagcaacataaaaaatctctgcacggtaatgatgaagattagtgatagtcctcccttctgctcttgaacgaccccgaactggtatttcgtcatccatatttggtaccagaatacttttagcaacacacaaaatccttggacatcggcaaaaaaattattccagccactctctctcattgtgcccaaccgagctttgacaacatcaactaattctctttgcaatatatttgaaagctcgtttgtttcctatgacctggatcacgcac

SEQ ID NO: 17247 - DNA, 423 bp, Glycine max
taatatctaagctaacagaattatagcataaagcattcatgcttgacatagaaaaggccgaagtattggaccctgttccttcgaaaatgttatcgtattcttgcaattaaagttatgtttgagaatacctaactgttggtatcttatttcaagacccgcaacaattctttcctttaatttgttatttcatatagtcttttgctttacattagacaactaagagtttaagatcaaacataatgtcagtttttatagttaatttattttctagcaaaaagtacttatcttatactaatatgtgcgattatatatgattcggtctcttactaaaatttcatattcgactcctataaattaaaaaacgtgattaaaaaagatatcattaaaagtgaacaaaattaattcatactcgatactcatgat

SEQ ID NO: 17248 - DNA, 386 bp, Glycine max
agttttcccctcgatcctccgatatcaaaaccgtctgctgcctcccagcagaatcagccacaaaaaccgaattcctcttctcgtcatcacctaaaactagtgccataaaactaattggaccaatggatagacttccatgaaacacagtctgggtaatggaaagcgaatacgagtcgacaataagaatagtgcatttaggaggcttcctaggctgagtttctctatcaattactccttcatttccttcaaaagaacacgctatacagacatatctcggcgttgaaggcaaagttcgaattatgcggtgagtgccaacccaaggtggcaatttcctcctgcaccggcaatgaccactggttttgctccaaacacacaaaaaaccatcg

SEQ ID NO: 17249 - DNA, 420 bp, Glycine max
tactgtgttttatcttcgtattttcttctcttggaattgtttaaggagaaatttatctaaacaggatccacgtctagaactttacgtgtcttttttttacaagataagctgtattgtcttggggtcgcatcctagttctcattgttggttatcctaatgccaagttgtatatgtttgtagtgttgtttaattatactttacaatattaattatcaattttcttgcgggatggaagaattaactatgatgagtttgtagccatgatgaggaaaggcaacccagatataactcacataacccatagacgtcgctaataacccctgcattgctttgttgggttcagagtgtctacacgttttatagtataacggcctgctatttgattattatgcactcgcatgaatattgtgggtctacact

SEQ ID NO: 17250 - DNA, 381 bp, Glycine max
agcttgtgaaagccaccttcacaatcgaaattgttgaaattgctacaaatttctagaatattcttaaatataatatgtatgaaaatggtagaatatcctagaactatagtgtgtatgaatatggtagaacaatctagaactataatgtgtataaatatggtagaacaatctagaactataagtgtatatataagatagaagaatctagaactatcatgatactaatctatcatgaaaactttagaaagacctaaagtaatgtagaagcattcaccaccattgagaggttggtgacttaagcctataaataggcaattggtatgttgtaattggtcatccaagaaatcaatgacatatccttctttctaaaacaattctcta

SEQ ID NO: 17251 - DNA, 421 bp, Glycine max
gcttctggtagttcttaatatctggtctgctcttgagactgaacctgcgctccttcctgcaactcgtacaatgtaggaactcatccctgtgaaagtttcgtttcctcattgcagtgtctttccagttagccacatttgcctggtgtgtgtaatatttcgtcagaggtgtcttccagagtggaactctatcttcatcttcacaatgaacccagatgttgctcttccaccttccagtcccttctttcaaagcatgcttctcaaacgcttctggagtcacattcactgatccaaataataattgtaaaactaaattagtgtaataagattatctattatctatattttactttggcttcttatgtttaaaaagttgaactttggtctgagtgtctttattagaccacattgatcctttcgtcac

SEQ ID NO: 17252 - DNA, 568 bp, Glycine max
  unsure at all n locations
cctctaccacncgtcaccacccttatgcaagtagcagggacgcacgtccactcctcaacaccncatccccggganacccctttgagtcgatgcctgcgaaacactgcaaaccngagaacgacacagtcaacagcctcaggaggaacgggcgctttccgtcgccgaaacctcatgcaggcagagactgagaagagcacagggacatatccaatcacgcataccaagacatgacacaccacgacgccatgaccggcgaactaacgtgcaaccaagagagacaacgcacaactccctccgagtccaagagaggacaaccggacgcatgcactaggcgcgaagatagacgacatcacaacgcaccgggagaggactgcgccggcaccggggacaccaacaaatcccgaacccaggcgggcgccagcgcgcctagcgtactacacacggaatattgagcgccaagaccacacgccatccgaataacaacggaggcgaatccgttcccctcaagcaggggggaaacatcccggacgccgagcacgcacaccacccgggagaaccccgcgcagcc

SEQ ID NO: 17253 - DNA, 373 bp, Glycine max
ttgctttcttaagaaaacttccttgagaagtttctttgataaaacttccttgagaagctagagtttagctacacacacccgtctaaaaactaagctcacctccttgagaagctttcttgagaagctagagcttaactacacacccctataatagctaagctcacccccatgacaaaaaaacatgaaaatacaaaaaaaatcctactacaaagactactcaaaatgccctgaaatacaaggctaagaccctatactactagaatggccaaaatacagggcctaagataggaaaacaacctattctactatatacgaagaagagtggacccaaccttggcccatgggctcaaaaatgtaccctaaggttgatgag

SEQ ID NO: 17254 - DNA, 431 bp, Glycine max
  unsure at all n locations
acactatanacaactcatgcttaagccttgaattgagtgccattaccgtgttgatttttaagggagaccatatctgtagatgaggtgtttccaggtgaacttttctacctccctaactgaaatatcttgtaatggccttgcctcagtccacttagtgaaatagtcgatggtgaccaataagaacttgaccactcctatggcttttggcaatgggttcaatatgtccatgccccatatggcgataggccaagtggaactcaagctatggtggttgttgggaggggtgcgtggaacatctgtgaattcttacctcctctgtaagtagaaggtggcagccaataatatccgatacacaacactttggttgctagggaacgacctccgatatggaggccacatattctttcatgttagtatcgcatgacatagtc

SEQ ID NO: 17255 - DNA, 381 bp, Glycine max
ttgctttgtgtaatcgattacacttatttggtaatcgattaccagtgactgtttctgataaatcaaaagatgtaactcttcaaaaggtttttgactttttcaaattggttttaaatttttctgaaagttataactctactaaatggtcttcttgactagacacgaagagtctataaaagcaaggttttgttttgcaaattaaattaatttcattctttcatactttacttttccaatcaatcctttacaagccttgaatctctttgaacttcttcttcttctttgtaccaaaagctatctgaagttttctggttttccaaaccttgaaaacttgcgctattcatcttttcattctcttctccctttgccaaaaagaattcg

SEQ ID NO: 17256 - DNA, 391 bp, Glycine max
tgagatgaggaagtgttgaagggtgaaactttctgcttttattgttgaccacagagtggtacctggagatatgtcgcgggggtcaagagaccttgtggacgtcaagtggggtgctattgcccaaaaccaagcttgaccaatcccgacccaacccgggcatagtcggtcagtgagaacctgtgatgtacctaaacaggcgagctcctggcagtcaacagataaaaggaacaaagaccacaaagcaagggggcttgtggtggctggccagctgtgaattttgtgtgatatgtggattatggcctctggtaatcgattaccaagggtgggtaatcgattacaaggcttaaaattgaagacaggaggctaagatggtctctggtaatcgattacc

SEQ ID NO: 17257 - DNA, 544 bp, Glycine max
  unsure at all n locations
ccgcgacgcagcgtcccgcgcantcagtgtgtgtgaaagaatacatatcaaaagtaccantgcataatntgnannccnnnaagggagtttatttgagcgtcgaaaacaccagaggatacgactcgcgcgggggcacctagaagacgacctgcaggcaagcttgcttaaacacccaaccccgagcgtatggatagatcacgagactatatcataaatacgagtaaaaagaaattgccggaagaaggcacaacaggctacaccaacagtgtggatgaatatggaagaacacggtacagcaacaaagagcataaataagggaaaacagcctaggacaagacgcgtagctataacataaaagaaccaacgactagcatgataccaagccatcatgagaaattcagaaagaccgaaagtgacgtataaacagtcaccaacattgagaggttggagacgaacgcctatacataggcacaaggtgagtcgcacatgctcatacaaaagaataaggacatagacttggctcataaacaaaacactacaaccg

SEQ ID NO: 17258 - DNA, 368 bp, Glycine max
  unsure at all n locations
ttcaaacgacagtaactgcttattcggatgtccgattgagtcccgccatatatcgagacgctccaaatctattgttgaagctcttagccacttcaaacgacaataactttttactccaatgtctgattgagtcctgtaatacaacgaaaggctcgaaaatgaatgctcaagctctgatccaatacatacgacaataactttttactcggatgtttgattgagtcccgtcatatcttgcgactctcgaacttgtatattgaatttctgagcccatcctaacgacagtaactctttactcggatgtncgaatgagtctcgtatatatcgacacgctcaaactgaatgtgaagctctgattaattcaacga

SEQ ID NO: 17259 - DNA, 379 bp, Glycine max
ttgcttatgagcctaaacttgaagcttcaatgcagggaaacatgcttatggctacgaatacaaaatttggtattaggattaaaaaaccatgaaaatagggacttggttgtaagaatttgggctgccccatgattggcactttgcacctaagtaacgtgggagatgcttttcaatggtgtgtagatatatgtgtaaatataaagggcatgaaattctttgcaaagggagacggagtattgaagacccttcctaaatgaatgtatgatagcacgggattcccttttgaatgcaagtatgtgcataatgttaaatatcttgccaatatgcatcagtgtgagtgaaataatgaaagattgcatggtatagatattctgagtgt

SEQ ID NO: 17260 - DNA, 562 bp, Glycine max
  unsure at all n locations
ccccaactgctcacnctaccactctcaatatatggcgctcgatgtgtattgttaatgtttagtagcgctcttactctctaccctacganaccgcggannattgaatcgataccatgtcgagaccgtgacactatccaatactccacgctcaatactgctttgcggacttgctcttacatttccatgtggacgtcttttgtgtgaatgagtgaaatgttatgacatcccgcttgaacgattaagatgaggaagccgaaggatttggctattcactatggaggtgcacatggggcaactgaaagctttatagtgcctatttatcccccaccctaaacttgtttcttcctatttgtgcaatatcttcttcatggcggccggccacccatcctcagaggtcattactaaatcatcctcggggcctggctacggacttctttcgtcaatgagcatctttttaacccacgggctaaatctgctaaatggattcttgcaccacatgtcagaaggtaagcgccacatagtcgactaagctaacttgacctatagcagagctactcctgcc

SEQ ID NO: 17261 - DNA, 379 bp, Glycine max
tgcttatcattagagatgtcagaagatagggtttaaatgtctataggcttttgaagagcttgtcgttaaagattcatcactatcctttatgggtgcttacttagtgtacaatcaaatgaaaacacattatattacaccaagagaaaaaaaaaatccaatgacaaggaatggctaattattgttaccaagtgatgtctttctgtctaaacaatgttgaagcaacatgccacacatgatgagctaatcgcttaagtagtagattggaaagatgttcgaagtttacatcaatgaaatgaacatcaaaagcactcaagaagatcatatttatgacctcgtcaagttcttttagcaatcaatgttgcacaatattatcctaaat

SEQ ID NO: 17262 - DNA, 310 bp, Glycine max
gacctatgaaactcagctgcttttgtcaaagggatgagccggcgttttaagttttggtatttcttgttggatcatttgaagtcattcacttacatttagtatttggatatatatatatatatacattgatctatgcgtgtgaaatcattgagttttccgataaatgtaaaagctacttgattcaagacattctattgctttctgcaattatttagatattggagtctatactacaaatggtgaaaatagtggttcatcagcacactaaatattctaaacgatgtctcggtgtaggcgtttattttattta

SEQ ID NO: 17263 - DNA, 380 bp, Glycine max
agcttgcctaattcacctgaaattgagagaaaatgattgttaaatacaaaaaatggaagtactaagtatttattatctatgcttaacaaaagatacttataacactacaaaataaccataaattggaagagtttgatacaacttacacaagctttatacacaaaagttagtcgtatttaccggctaacaactcccccaaatttacagttttgcttgtcctcaagcaaaaagagaacagctcacttgtcctcaagtgacaataacatgcagtgactatgtacaatggtgtatgaaacaaatgttactgattgcatgataatagaatgaagcattctgtactcatcacttgtctttcacaaaatatgcaactattcaaagag

SEQ ID NO: 17264 - DNA, 406 bp, Glycine max
tgcttgtggagcttctatggaggctggatctttaatcttcaatgaggtccttcaatggtgattttccaccatggagatgcagtggaagaagaaggaaaaggggtgagaggagacaccatccactatggaataagacatggaaaaaggagcttcatcaccaataatgtgccttggataagaagcttggagaggatgcttcaatggaggaaaagaaagagagagagaaagagagagggggggggggagcatgaaattgaaggaagaaaaaggagagagaagcttccttgataaggggcacgaaattgagttgtgtctcacaagactctcattcatcaaagttacaacaagtgttacacatgcttctatttatagactatgtagctttcttgagaagctttcttgagaa

SEQ ID NO: 17265 - DNA, 378 bp, Glycine max
agcttgttgggtcgcgattgacgaagggtgtaaaagacgacgttagtctccgcatgctatcaggctttctgtcttacagatagcaaaagaatgtttataaggataaccactcgggtatttccaaccgccagcgtgactcaaatgtcagtatgacagatcttgtgagcgcggaaaatgacgtaaatctccgcgtgtcaatgggcttattgggccgcaattgatgaagggtgcagaagacgatgttagtctctgcatgctatcaggctttctgtcttacagatagcaaaagaatgtttatacggataaccactcgggtatttccaaccgccagcgtgactcaaatgtcagtatgacagatgaggtaaaactccgtgtgtc

SEQ ID NO: 17266 - DNA, 410 bp, Glycine max
  unsure at all n locations
ntgaggatttggtctttgccagtgaaaggatcgatgtgggtctgaaaaaaggcaaatttagtcatcctgcttggacgaatgagaaaactggggcaaatgaagagggtgagaaagagggagaaacccatgctgtgactgccattcctatacggccaagtttcccaccaacccaacaatgtcattactcagccaataacaaacctcctccttacccaccgcccagttatccacaaaggtcatccctaaatcaaccacaaagcctgtctaccgcacttccaatgacgaagaccacctttagcacaaaccaaaaaacaccaaccaaaaggaattttgtagcaaaaagcctgtanggttcaccccaaattatgttgtcatatgctaaacttgatcccatatccactcaataattc

SEQ ID NO: 17267 - DNA, 383 bp, Glycine max
agctttgaacaatatacttgtccttcattgaactgtctttgggcttggcggccacgctcaacaaagtattttcgacacctactgtacgttgatttgaccaatgctgttatgggaatgttgcgacaatccttcaaaaccttattgatacattttgagaggttggttgccatgtggccatatcgacgtccttctctatcataagccatcgtccatttttcttttgaaatgagatcaatccatgttgctatggctagactcagttcacgaaatttttctagattttgatcaaaaatgtgcttgcaaggagtgtaggctgcataaaattagttatgaataacaattttaagtatatatcaaagttaaataaatgtgaccatgaaata

SEQ ID NO: 17268 - DNA, 420 bp, Glycine max
tctaaggaggtgagcttagttatgagaggatgtgtgtagatatgctctagcttctcaagaaagttttctcaaagaagcttctgaaggaagttttctcaagaaagcttctcaaggaagctacctagtctataaatagaagcatgtgtaacacttgttgtaactttgatgaatgagagtcttgtgagacacaactcaaagttcaacttctctccctttttcttccttcaatttcgtgctcccccctctctccttctctctttctttcttttcctccattgaagcatcctctccaagcttcttatccaaggctcatcttggtggtgaagctccttcttccattgcttattccctagtggatggcgcctcctctcacctcttgtcctttgtcttcggctgcatcttcatggtggaaaatcacca

SEQ ID NO: 17269 - DNA, 386 bp, Glycine max
agcttttgcatgtttagatatttctagagagagaaaggtccaagttctagagagttttgagagcttttgctgtaaaaagacttgcagagaactgagcgagaagaggaagccatcttgagagcatgaaatgagtctgggagtgattgtgaggttctagaggtggaagagacatctccactacttgtatttcttcaatccttcatttttctcttctctttgttgtaaaggaagcttcctagatatggagagctaaatcctctgctggttcttccttgtaggtacttgatgtaaatacttgtatatctatttaatgatgttttatgtgttctctgtgctatcagtacgtcatttcagtgtgcttttgccttgatcacgtagatgcatgc

SEQ ID NO: 17270 - DNA, 403 bp, Glycine max
tgaagacaaactggatgcgttggtcaacttggtaacccagctggccttgaatcagaaatctgtacctgtcgcaagggtttgtggtttgtgctcctctgctgaccaccatacagacctttgcccttccatgcagcaacctggagcaattgagcagcctgaagcttatgctgcaaatatttacaatagacctcctcaacctcagcagcaaaatcaaccacagtagagcaattatgacctttccagcaacagatacaaccctggatggaggaatcaccctaacctcagatggtccagccctcagcaacaacaacagcagcctgctccttccttccaaaatgctgctggcccaagcagaccatacattcctccaccaatccaacaacagcagcaacctcagaaacag

SEQ ID NO: 17271 - DNA, 384 bp, Glycine max
agctttatctagtaaaatgcaatcttccactttgcatttaaaccacctaaaccttagtgataaaaattcaatttccaatatcaatgcaccttatcttttatcttggaactctacaaaaccttacacttttatctttctataatttaaaattctcacttttcttttttactttttgtataaacttgtgggaatgaaattttagtagtgaatgaatatttgagaattggagaaactagaagttttggaggaagaggtctactgtataattgatcaattcttgttttttttttgcttgatacagaaaaaggaaattgaaaaataacaaaaaataattgaattctaacatatatgcactgattgaactaatcatctaaaattgtgctc

SEQ ID NO: 17272 - DNA, 415 bp, Glycine max
  unsure at all n locations
ntgaacaatatacttggccttcatttaactgtctttgggcttgttggccacgctcaacaaagtactttcgacacctactgtacgttgatttcaccaatgctgttatgggaatgttgcgacaatcctttaaaaccttattgatacattctaagaggttcgttgtcatgtggccatatcgatgtccttctctatcgtaagccatcgtccatttttcctttgagatgcgatcaatccatgttgctatgtctggactcagttcacgaaatttttctaaattttgataaaaaatgtgcttgcatggagtgtatgctgcataaacatagttatgaataacaattttaagtataaatgaaagtaaaataaacgtgaccatcatatatgaaatcttacccaatttcttcaacatttctttttg

SEQ ID NO: 17273 - DNA, 382 bp, Glycine max
agcttcaactttcaatatcgagcgtttcgatatattacgggactgaatcagacatccgagtaaaaagttattgtcgttttaatttgcttagagcttcggtattgcatttcgagcgtctcgatatattacgggattcaatcagacatcagagtaaatagttattatcgttttaacttgcttagagcttcgataatcaatttcgagcgtctcgatatattacgggactcagtcagacaaccgagtaaaaagttattgtcgcttgaatttgctcagagcttcggtattcaatttcgagcgtctcgacatattacgggactcaattagacatccgagtaaaaagttattgtcgtttgagtgttctcagagcttcggtattcaattt

SEQ ID NO: 17274 - DNA, 414 bp, Glycine max
tcttgtttatacctcgatcggccatgtttcctgaccgacgtttactaaaatttttttcgatcagtatcggtgagtaaaaattatttttacgaggttggcgaacgttttcccttccaagcaattgaaaagatgccagtgttcgccgaaacacaacttcgttgtgctcgaacgaaaaaacctagccgacctacatataaaatttttacggcaacaccgaacagatgagctacctctaccgtaaaaaaatgttatctgccagcatttgtaaaaaagttgctcacagtcgactgaaaaatatcagtcgcggccttacaacatcagacgtcggccattgtactttatattcaatccctgaatattatttggatgatgtctattaggaaatgttacatcggcgtcatccggtgacgcttc

SEQ ID NO: 17275 - DNA, 383 bp, Glycine max
tctttgcgcaacaaatattttattgttgcgtgatcagtgtaaatcactatctttgatcccaccaaataagatcgaaatttctcaagtgcaaacacaattgccagcaattctttctcagtggtggcatagttaatctgggcatcattccaaactttgctagcataatagatggtatgaaacattctgcccttccgctgccctgccctagcatagcacctactgcataatcacttgcatcacacatcaattcaaactcttgtccccagtctggtgctataatcacataagcagaaaccaatttggctttgagagtgttaaaggcttctaagcattcttcattgaatacaaacacaacctccttgttcaacagattgcttaagggg

SEQ ID NO: 17276 - DNA, 407 bp, Glycine max
tcctttacacaaagagaagagaaaaatgaaggattgtagaaatacaagtggtgaggatgtctcctccacctctagaacctcacaatcactcacaaactcatctcaagctttgttctctagaggtcatcgcataacaaaatctctcaaaactctctggactcggacccttctctctctagaatctctcacatgcaaaagctccttgagaaaatggccaaaatcctctccaaaatctgatttcaggcttaaataggtggtttttttgtgctagcgcgcttagcacgactatggaccgcttaacccgcattagtggatttcggcttagcgcgtgcttttctcgctcactggatggactgaagcggtgtgcttaactgcatgaccctttgctcagcgaacatgcacaactc

SEQ ID NO: 17277 - DNA, 381 bp, Glycine max
tagctttgtggccatgtaaacactaaggcttagggtttgttttcccccgttcaatcaacccagtgtttccaaacaatgcactttcatcaagttatgcacacatccgagtccatttaggccttcgggaaaaatctttcattgcattcgtggtcgaagccggtaagtgcaccggatcgtgcaagtagtataaaacggtaagaaccgagtgtcgaactcttgggaaacttgtgttacttggtaaagctatattcagtgaataggtgtctagtatgaaaagatatgtgtggactatgaacaagtatgtaaactaactattaaaaaggaaaatcacgtgagtaatgatgtgtaaagacaagtagacaacgtgttggtcttcctatt

SEQ ID NO: 17278 - DNA, 414 bp, Glycine max
ttagtgattgtgtgcgaccacagattttatattgagtgtcctcatttatatgttctataaccaactctgcatgaatttgtaattgtcataacatatgatttatgaatatgatctaggccttctttctttctttacatcttaagccgctggccaagcaactatcccaatgtagttatttatcatttgcaagccctttgagccaaacacttgatattttgatggaacactaacctaagataaaaatttcttgccttaccttaggttaggagagcagcggtgttttgttggggattctatcatttggtggctaatgtaatgtaaatactctgttcttaatacgggtattaagggaaaacagaaaagaaaagaacaatagaatagattagaaaagatgaatatacaggagaaggaaaa

SEQ ID NO: 17279 - DNA, 369 bp, Glycine max
tgctttgagcaaattcaaacgacaataacttttgactcggatgtccgattgtgtcccgtagtatatcgagacgctcgtaattgaaaacggaagctctaagcaaattcaaacgacaataacttttgactcgggtgtccgattgtgtcctgtagtatatcgagacgctcgaaattgaaaactgaagctctgagaaaaatcaaacgacgataactttttactcggatgtccgattgaatcccgtaatatatcgagacgctcgtaattgaaaatagaagctctgagcaaattcaaacgacaataacttttgactcggatgtccgattgtgtcctgtaatatatcgagacactcgtaattggaacagaagctct

SEQ ID NO: 17280 - DNA, 414 bp, Glycine max
tctgttttcaatttcgagcgtctcgatattttacggtgctctatccgacatccgagttaaaagttattgtcgtttgatttttctaatagcttttcttttcaattacgagcgtctcgatatactacgggacacaatcggacacccgagttaaaagttattgtcgtttgaatttgctcaaagcttttgttgtcaattacgagcgtctcgatatattacgggactcaatcggacatccgagtaaaaatttattgtcgttggatttttctcagagcttcagttttcaattacgagcgtctcgatatactacgggacacaatcggacacccgagataaaagttattgttcgttgaatttgctcagagattctgttttcaattacgagcgtctttagatattacgggactcaatcggaca

SEQ ID NO: 17281 - DNA, 383 bp, Glycine max
  unsure at all n locations
ttgcttcatatagaccaagaccagaagtatttgtaccttgatttaccatgatctcttaatacaatatctttattgttgatttttttttcctttggagaatgtcaaacgtaaatcacatttttttatcagcataaattaatttgttagttttattaaaaatataactttggaggatttgaacccacgacctctcccccctctctttccccttctccctccaccacctctcatctgtcaaccaccttatatctctcaaatataaatcacatttgttaattgaaaggaggaaaatatcaaatgtaaattgcttcttttttccactagaaatgcttacaacatgtcttttttctatactctctnttcaacattatctctacttatta

SEQ ID NO: 17282 - DNA, 419 bp, Glycine max
tatcaatacatttgaagaggccatccaccacttcattatcactgtcaatgtttggattggtgtaaaagaactttggattcagataataacccgctgcatgcaaagggtggtgaagttggcaatcccatcttttatcaatgattgcaaggatatccttatacttcccttcattgttattgaaagctctttgaattgcttctttggccctatccattgcttcataaatgaaacccattgtaggttttttttcattatccaccaacctcaacacacttacaagaggccccatagcctttaaagcataaacaacatcattccaaaatgatggcataagaacaacatctgttgcttgcttccccttgggctctttagctgccttagacttcaaccattcatctgaattaaacatccttctaaga

SEQ ID NO: 17283 - DNA, 375 bp, Glycine max
agcttttgagtccataagagaaactattaaaacttgattacatgtctggtaaaaattgtgcaaagcaataataatttgacaacttgtaatattttccccccaaatgtgtagtataacttgtaattccaagatatgtagtgttcgaatgtcctcccttctaaaaggtaaaaaaaaatagtatttattactttttttatgaaacgaaaagacattgtcttaaattgtgtgtgacttgacttaattttatactaactgtgggtggataattattgatgtgacaattaatactacaagtaacgacaaaggagcttcacccacagggtcaacaacagtagaagcaccacaagattcacctgtagacgacgttgatgaatc

SEQ ID NO: 17284 - DNA, 410 bp, Glycine max
  unsure at all n locations
tgtgggtgctccccttattcctcttcaggttccattataccatactttgactcgccccctcaaagattgttccattgtaagccttaccaatcatctatatattaatttctctttgaatttaagttgaataattcttctttgaattaaactagaatataagaggggcgagtctcataaaaaattacaaaaatcctcttttatattatttccatccttcataacaaacacaaccttataacatataaatctataacggtgatgaataactcatataaactacatcacgcaattatagtttgtgtcttggttaattctctatacatatgaaccttgagtatgtaagtatgtttttaatgtaaaaacatttanggtaattttataagagtgatgttacattgtgttatgagaaa

SEQ ID NO: 17285 - DNA, 381 bp, Glycine max
tgcttatagttattggagggagaataaaacaatccaaaatcaattgtacccttcaagtaacaaagaattctttttgcggcttttagatgaggagaggtaggagcctccgtaaagcgacacacaactcccaccgcatatagaatatcaggccttgtattggttagatatcttaaactccccacaagactcttgaagaccgtggagtctaccttctctccttcatcaaactttgataacttcatgccaccttccatatgtgttttcacgggattacaatcaagcatattaaatttcttcaacacttcttttgtgtagcttccttgtgagacaaagataccattctacgtttgcttcacttccattcccaagtaatatgacatg

SEQ ID NO: 17286 - DNA, 404 bp, Glycine max
  unsure at all n locations
tcacaactccaatactctatatgagctatgccactaatttctatctttatcctgtagtttctaagtcttgtccacttcaatttaaaatcaaaattactcaaactgagattgatttaaactatataagctaagaaaacatgagtgaatatcatgctaatttcaattataatttgtccttctataaataaagattatagttaaattctaggaaattctatggagaccaaccttggaacttctcctcaagtgacaaaatatcaccagattccttgacagttacactaggacttagcgagtgcattgatccacgttttcctatgacgccaacagttatttctacccatctgctgtgccctttccacgtgaggccatggccagttgcatcctcaaattntgatgtcaca

SEQ ID NO: 17287 - DNA, 389 bp, Glycine max
  unsure at all n locations
agctttcaacaagagtcttcacaaataaccatcatgaagcagaaaactaacaaaactacccatcatatctcccaaaaccccatacccacgaaatttaagagagaaagaagtccacccaaacctgaattttcgaagtcccactcgtagccacgcacttcacgacttcgaaaatgctctcctttcgcgatttggagcagaaatgagcaccaaaggttggagctttgttggggtttcaatggagaatggaggagaaggaaaaagcaacgtgaggaagagggagagcttctgaattttctgttttggctgagtgaggagagagaaaagctttttggttntaaataaaaggttntcctctttttctattattntattcatgctctgccacatgt

SEQ ID NO: 17288 - DNA, 420 bp, Glycine max
tctacttatgttgcagggcgggcttccttcactttcttgtctccaacgcgagctttgaccactgctcttccttcccgcgatgcttcttttcatgtccgcctgagtgggcttatagcctaaaccatacttcccacgatttcctttggcatttatcaggctcgttatgccgccgttgtctttgcctaaacccattccgggttcataaccgttccccaacataactcgggccatcattactgctgcatcggacaaacaaggctgccagagaaggagtccacggaggaaatgctgaccacctcaaaagactggaaagcggtttctaacgattcttctgcggcttccacataaggcatagaggatgggcagctcaccaagatgtcttcctcgcctgacacgatgaccaagtgcccctccactacg

SEQ ID NO: 17289 - DNA, 388 bp, Glycine max
agcttgtttaccccatgttgaatttgcttacaatagagctgttcatagcaccaacaattgttctccttttgaagttgtttatggttttaacccactaactcctcttatcttttgcctatgcctaatgtttatgtttttaagcataaagaaggtcaagcaaaaggcggactatgtgaagaagcttcatgagagagtcaaagatcaaattgagagaaaaaataaaagctatgctaaacaagccaacaaagggagaaagaaggttgtcttcgaacccagagattgggtttgggtgcacatgagaaaagaaaggtttcgaaacaaaggaaatcaaagcttcaaccaaggggagatggaccatttcaagtgcttgaaagaatcaatgacaatg

SEQ ID NO: 17290 - DNA, 424 bp, Glycine max
tctagtcgtccatagacctcctctgtggtacggtctatcaaactttgcatctgtgcattcatcgcatccactaacagacgttgagcgccgtccaactgatggtactcgtcaccaccaccacctgctccagccataattcaacaggaaaaaaaaaatgtgcaataaaaattattaaggtttcaggacctcacaacactctactcacgtctcttagatggtagtacactcgtgtttaatgctctcaataggcttttgtgtaatgtattccctcttgccttttaccactcgtgtttcctcttaagttcctggatggaccaaattagacacacaaggtaatataaaataaaaggaaagacaatataatgatcacaaacagatttgatttgggataacaacttggacttgatttggataataatatatt

SEQ ID NO: 17291 - DNA, 386 bp, Glycine max
agcttggttcgaggtacttacccgttgaagatcgaagaacgatgaagaacgaatgaagaacatcgaagaacggttgaaacctttgcgagattcctcacggaaaacgttacggaaacgtttcggaagcgcctcggcttagattttcttcacggaaacaattttcccaagcaaattcgaaagagagagaagtgccaaaggggctgaacccttttcttcttcacttcctcccctatttatagcaaaataggggaggtggttgccgcccagctcgcccaggcgagctcagctcgcccaggcgagccaggttgcttcctccagaagcaacagccttctggaggaatattctggagggcccaagtgggcctgggtgctatttgcacccccat

SEQ ID NO: 17292 - DNA, 424 bp, Glycine max
  unsure at all n locations
ttctagctnttcattggtgtatttggatctccttttgttgctctaaattgtgggagtgtgctcaaatatatggggcaattttggtttgttttcttgcttgattaggttgaattaggggtgtgtatgggatggccttaggcctataatgcatttttgaacaatgggacatgccacattgtccccgttctcttgctattgacgcctaaacgcgcgcccaccaagtgttcggtgaaatgcctcaatggcattagcgcgtgacttttgtaaggaaacaacccatggagcattntggtttgtacacattttctttttttggaatatgtattcattcctgaaaaaggctatagtaattgccccgcatatatcctatgcctangaactaaaatgttatgctaatagaacacaagaggatgtgcatattggg

SEQ ID NO: 17293 - DNA, 368 bp, Glycine max
ctgctgcatgctgcttgtcttgattagacatgattgatacacgacttatgactagtaagatatgcttagagccaaatagagtgaagacgagtgagaattctactatctgcactttatgcagaatattgcatggaaagatgtgcaccataattttggctacgtgcatagagtgttgtgcatatgcaggtgggctaaagagtaatgcaaatggagtcctggactatttataataaatgccaccggaatcagggtgcactcatgtgatctatacttccattagaagttatgagtcgatccaacggtctacgaattgcaacgaggagactgttactggggttgtttagagagaaaagcagcgatatcgagtg

SEQ ID NO: 17294 - DNA, 424 bp, Glycine max
tgcctgtccgatgcaacaataatgatggtccgagttatgttggtgaacggttacgaacccggaatgggtttaggcaaagacaacggcggcataactagcctgataaatgccaaaggaaatcgtgggaagtatgggttaggctataagcccactcaggcagatataaagagaagcattgcgggaaggaagagcggtagtcaaagcttgcggttgagacaagaaggtgaaggaagcccaccctgccacataagtaggagctttatatgcgcgggtctgggggacgaaggtcaagtggtcgcgatatacgaagataatattccgagtacattggatttggtacgaccatgccctcctgaattccagctgtgaaattggcgagtggaagaacgccccggcatttacgcgacgagcataatgtaaacct

SEQ ID NO: 17295 - DNA, 383 bp, Glycine max
agcatctcgtgccaatccttgtatgacacggtcatcttttggataatcttttttatattcttattggccgcttccacggctccattcatctttggccggtagggcgtggaattgtgatgctgggttttaaactcctcgcacatttccgccatcatcttattattccggttggtgccgttgtccgtgataatcttccttggcaaaccatatcgacagatgatctctttcttaatgaacctgaccaccacattcctcgtgacattggtatatgaagccgcctcgacccacttggtgaaataatctatcactacgaggatgaagcgatgaccattcgaggccttgggctcgatggccccgatgacatctattccccacatggagaa

SEQ ID NO: 17296 - DNA, 412 bp, Glycine max
  unsure at all n locations
ntgcacgtatcggtcaagtgtatggaccacgttgtatccaaggtgctcatcgataatggttccagtttaaacgtgatgcccaagagcactttggagaaattaccattcaatgcttcccacctaaagccaagttccatggtggttcgtgccttcgaaggcacccggcgagaggttaagggagagatcgacctccctgtacagatagaccctcacacctgtcaagttaccttccaaataatggatattaaccccccttacagctgcctgttggggcgcccgtggatccactcggtgggagttgttccctctacactccaccaaaagttgaaattcgtagtggaagggcatctggtcatcgtatcaggcgaggaagacatcttggtaagctgcccatcctctatgccttatgtgg

SEQ ID NO: 17297 - DNA, 379 bp, Glycine max
tatcttgaggatggtggcacaatacattcccatgaagaccacgagagttttagacttttagtttacaccccaaaatgtaaacattgctctaatgaagggggcaacatcctctctttatgtgttgaaggcctctagtgcagtgatatgtgtcacgctatgtgtctgccatgtcagacgttatttttccctctccgcgtctctaacatgtcagacattggggtgcctttctgttgtgtacggtggcgcagctagtccaactactatgcaaccattcacccaagttaacaaatggaaaatccttcatttgacaacttgcgattgaagtgaaaagcgagactctacagttatactattttataaacttataacataggcatat

SEQ ID NO: 17298 - DNA, 382 bp, Glycine max
  unsure at all n locations
ntgaggggttttcggtgaatgtgtgtcttgcaagtctgcgtntttattttctttttctcttcatgttgatcgtttctgaagaaaccttctgtatatgggcattgattactattacttcagcttgaaaattggctcagatggatggtttattcaacttttattccttattttttttctttgaggtattttcaactttattacctcatttccttttccaccctattgttgattgatcaaaattcagttccatcctttctcaaggattaacatctgaagttagccttttttttttttaatatgaatcttatgttaagcgaaaatatgtttatgtaatgcaaccaatgaagtgggaagcttgagaacattgtgagctatatatatg

SEQ ID NO: 17299 - DNA, 417 bp, Glycine max
taatatggaaaccccatttactatgttgatccggtgagttgggtgtactttgagacttgggtcaccctgactagccactataggacacaatttatgtagtttggcttaagtagaaggcatcagacgttaatgaagcttcttatggctaagcatatactcctagactacttcacgagttaaaaaatggtaccccttgtgcatggagaagaaaatgaggaacatgacatgcatatgcatcgtgttgcagtataatgtattgaatggtattgtgttgaaatgatataaaacttgtgtgtttctattcatggttgttgttgcattgcaagcatgtgaataatatttgtcatgtgtaatgtaaagtgacaatgtgtcaaggtcatggatatgtgtccacacaatatatgtatattgtttcta

SEQ ID NO: 17300 - DNA, 383 bp, Glycine max
tttcttctcaagtaagctaccatcactaactatgcttgatttgtgtctttttgaacctgtatttggagacccataaaaccaatatggagcatcagagctacttgttggagaggatgaagcatccaattttcttgataagtaaagatcattcatatcgtcatcatcatcaacaaaatgtttatacaagtattgacaaacccacttgtcatcaatatactataccttgtaaactcaaaaatagtcagcaataacacctctttgctcatttgtcaacctgtatgagtgaaggtagcctatttgaatttatgattgtacaaccacaagttgataaaggacaacttttgattgtttactgtttagtgcctcaccttcttgcctttcca

SEQ ID NO: 17301 - DNA, 407 bp, Glycine max
  unsure at all n locations
tagccaaacaggccctaagtgtctaagaagaagtttattcaaacaaaagtctaacaccagaatcattataattattattaaccatagtgattacacttatttagatgcaacagattctgtttggacacagcgattacactttctaaatatcattattttcgtattaagtacactctaacactaaatgagggggagtaacctaaatcttaccctcttgatttactgaaatttgcaatacactatgttctgcttgggaaagttcttttatttatttatattatttttatatcatttatagcagattgatctaaccctaaaccaaaggtaccaagattcgtgttcgatgtcacagaanaagacaacgaatgaatgaatggcaaagatgagagtgaagctttaagagacat

SEQ ID NO: 17302 - DNA, 381 bp, Glycine max
tagcttaatgattatgtaattatcttcatactgcttctctggaagaaattatgcttagagacaaagatattagaattgtttcactattttacttttatagtaaatgtaatcttattctattgtttgagtaatacacttttaagtgaaacaaaatttgtgtgtaaaactgatggatttgggctgttttctaaggagaaggtatgcattccataataattataagtggtacaagaataatgttgctttcattttatctatgcaagtattttttgtttattgtttatcttcagctctttactaatactagtatatgctgtttaatttcaaggtatatagttagaaagagcataaagagtgcagaagacatagttcgtttccctt

SEQ ID NO: 17303 - DNA, 416 bp, Glycine max
  unsure at all n locations
tccaacaagtggtatcagagcacaagagcttcaagtatgtgctccttaaagctccattagttttcagctttactttctcctccattgttgtttcttcgtttctctccatgtatctcctcacgtgtcttgtgctgaatgttgttaacataattttttagaagttccaccgattaagcttgctatagaagctaaatttgattttctatggttcaaattccttgttcttgttcttgaaccatgaattgtgttcagtttaagttcctttgagttttatattgacaattattttggctgaaacctaaaccatataattcttactaaaacattaaagtagaagaaaacctcaaaaatctagaatgacatattcacctattgtagttntgtcataaaagtcatgtctagtcatgaaacttgtc

SEQ ID NO: 17304 - DNA, 382 bp, Glycine max
agcttgagatgaggaagtgttgaagggtgaaacttcctgcttttattgttgaccacagagtggtacctggagatatgtcgcgggggtcaagagaccttggggacgtcaggtggggtgctattgcccaaaaccaagcttgaccaatcccgacccaacccgggcatagttggtcagtgagaacctgtgatgtacctaagcaggcgagctcctggcagtcaacagataaaaggaacaaagaccacaaagcaaggaggcttgtggtggctggccagctgtgaaacttgattgatatgtgagatatggtctctggtaatcgattaccaagggtgggtagtcgattacaaggcttataaatgaagacaggagactaagatggtctttg

SEQ ID NO: 17305 - DNA, 421 bp, Glycine max
tgttacggatcaacttgattcgtaagtcacttgcatatcaacttgattcgcaacaggcatatggatcaacttgatccgtaacaagcttgcggatcatctatgtcaactacggatcaaatatagcttctgcagatcaacaaaaccctatgcggatcacgtcatagcatacacggatcaagctgaatgagatgggtgcaccagcaataatgctaggtgcacctagcaacacccatttaaatttcgtgatctattcacaagtttccgtgtttcccatcgtcaccgcttagcttagggtttttttaaccaagattttcaaaatctatctataataatttatctatcccaaaatagatccgaagcccacatcacgaaataagattgtttttcaagcttcggataacacatattatcatttgatgtt

SEQ ID NO: 17306 - DNA, 395 bp, Glycine max
  unsure at all n locations
tctaagttnttagagtaaactcaatatttaaattctaatgcaagtttttaacaagtctcatcatcttcatcttcaaggtctgccatctcttcctctcagtttttctttcaccactactcctgtaggcctcttcctcttctttagtttcttcatccccacgttattcttctcgtactttgggcctgtttgtttaacctttttttaaaaataaattaagcagttttctgtttttttatgtaattttttattttgcatttacaataatttgtttttttatatttagtccttgtaaaatgagcagagttttgaatttggtcattatatttttttatgattttcatccttataaaaatttgaaataattgttattgtccctattttcatgtgataaatgt

SEQ ID NO: 17307 - DNA, 375 bp, Glycine max
agctttgaaatttgaaaaccctagcatgggataatctattaggcatcctaagagtttatgaattccatcttcagaactgagataatcaaccaaagaaagatttatttgcccttaagtctagagagacaagctccaaaagattagaaaagaatgcttctctaaatctcttaaagtgaagatagattattctgatgggtcaaacaatagttttggagattccacatatgatgaagtagctctcatgtctatgaggttcaagcaaatgatgaaaaagaaagggaagttccaccattcctccaaaagaaaggacataagattcaagatgaaatacgaggaggatagcattgaaatcatctgctttgaatgttgaaaacc

SEQ ID NO: 17308 - DNA, 412 bp, Glycine max
  unsure at all n locations
tgcttgtggggcttctatggaggctggatctttgagctttaattaggtcctttaatggtgattttccaccatggaaatgcagtggaaggcaaaagagaaaaggtgagaggaggcgccatccactatggaacaagccatggaagaaagagcttcaccaccaagatgagccttggataaaaagcttggagaggaagcttcaatggaggaaaagaaagagggatagaaagggagaggggggagcacgaaattgaagtaagaaaaaagggagagaagtttaactttgagttgtgtctcacaagactctcattcatcaaagttacaacaagtgttacacatgtttctatttatagactangtagcttccttgagaagctttcttgagagaacttccttaagaagcttctttgagaaa

SEQ ID NO: 17309 - DNA, 384 bp, Glycine max
agcttagcttgatagcttaacttacagaatgaatctggggcttagcgtaggatggcgcacttagtgcagctataataaattttcacaaagaggaagtggcacttatcacatcatccacgttaagcccactgcttaaggtgcaacttacagtgaagatgttcggcctaacgtaacaatgtgcgcttagctgaaccattcagccaatcaatcaagggtcattgcgcttagtgcgagtgatccctccccactgcaattactttttgtgttcttgtgttctatgttgtagcctataaaactaaaccctcgatccctcgtcaggctgaatatccaagcttcgtctgcagatccttcatttaagactacacccgatttatgtagccctct

SEQ ID NO: 17310 - DNA, 424 bp, Glycine max
tgaccgaatgtaagatacatcttcttcaacctttgtcattcttgactccatttcattgaagcgcatatccacttgcaattccaaggtatcaaacctctcaccaacaaaggtttgaagaccatcaaacctttccataatcttcgaaagaagagatgaatcttctccttcatgtccttcttcaccaacatttctagcacctttcttcacccaagagccatcatgctcctttatgtaaccaaaggatgctatgactgaagcgcctgtaaggaatgatctcatgattggaacataaggttcagaatcaagagggatgttgaagtgttgaaggaaaagggtaacaagatgaggataaggcaatggggcattcaatcgcaatgccttatgcatgcgatatctaacaaggtgtgcccaatcaatttgtaaa

SEQ ID NO: 17311 - DNA, 421 bp, Glycine max
tatgaatacaacctatatatacgaaaagagcacaattatatttgtatgatgattaaaacacggcgtatgcgtatattataagtacttcatcactaagggcttaattaagatattttcctgaccgcaccctgctatgcataaatgacgctgacagtcgactaactcgatttttatacctacaatcataaacttgctagagtctaccataacctcaagactttgacatcaatggtgagatgagggtccaatttcactgaagaattacgtgaaataacatccaatttacagacatgaactcacctttgcaatatgactaacatctatttaattcaaaagtttgacgtctgtataaccaatgaacatgcgcattcatcatccatccctgcagcatagaatgacaaaattccgccctctttagata

SEQ ID NO: 17312 - DNA, 382 bp, Glycine max
agcttgccctgagaaggagtccacggaggaaatgcttaccacatcaaaagactggaaagcggtttctaatgactcctctgcagcctccacataaggcatagaggatgggcagctcaccaagatgtcttcttcgcctgatacgatgaccagatgcccttccactacgaatttcaacttttggtggagtgtagagggaacaactcccattgagtggatccacggacgccccaacagacagttgtagggggggttaatatccattatctggaaggtgacttgacaggtgtgagggcctatttgtactgggagatcgatctctcccctaacctcccggcgggtgccatcgaaggcatgaaccaccattgaactcggctataacggg

SEQ ID NO: 17313 - DNA, 408 bp, Glycine max
tgagatgaggaagtgttgaagggtgaaacttcctgcttttattgttgaccacagagtggtacctggagatatgtcgcgggggtcaggagaccttggggacgtcaggtggggtgctattgcccaaaaccaagcttgaccaatcccgacccaacccgggcatagttggtcagtgagaacctgtgatgtacctaaacaggcgagctcctggcagtcaacagataaaaggaacgaagaccacaaagcaaggaggcttgtggtggctggccagctgtgaactttgattgatatgtgggttatggcctctggtaatcgattaacaagggtgggtaatcgattacaaggcttaaaaatgaagacagggggctaagatggtctctggtaatcgatttaccagggatgtaatcgatt

SEQ ID NO: 17314 - DNA, 348 bp, Glycine max
cgcttattcttatggctcgcctccggacttcaccccccgtgccaccccggaagatctatgccaagcccctactttcgaggggcaactcccaccttatgacgactatcccgggctagactatgacgaaggagatacccatcttggccccctgctccaccttaaagatccgtgctcccatgatctaccccaactgaacatagtccggcatattccggcctcacccacacccgtgaaagaatctgatctcttcccggaagataatgtaaagactgaggcgcttgaagagaggttactagcagtcgagtggccttggtcattacctcatctcggaatcagcggatctatgtc

SEQ ID NO: 17315 - DNA, 420 bp, Glycine max
  unsure at all n locations
tcaccttctggtcctcctcatagttgttgcatgagaaaacatgctctattttcatctcccactccaagtaggcctccggatcattctttcctttaaatggaggaatgttgagtttaataccatcaattcggttttgtctaggaacaccatcattccctcttctcctcctttcttcgtcattatgatctctattctccatttgatccaacctctcatggagcgcatcatctcgttgtttcattaacctctccaaatgttgcatcaaagcttgcatttggaattgcgaaagccccacttcatcattaggattagtacctgacatctcaaacaaacaaatcanacgtaacaagacaattatagttgttggttgaataccctcacccactcaagggttcacacaattatggcgtttctctaatg

SEQ ID NO: 17316 - DNA, 384 bp, Glycine max
agctttaagtgtgattcctttctttttcttgtcattctcctcatgctgattcaatcttattagttccatttcatgttcctgtaactttccaaacaaagttgcaagagacatgtttgaaagatcccttgattctgtaatagccattacctttgattgtcattccctgcttaaacatctcaaaactttattaataagatccttattgggaaatatctttcctaatgatgcaagatgatttactatgtgtgtgaatctcttttgcatgtcctgtatagtttcattaggattcatcctatacaattcatattcatgagttaggtatttattctagacctttttacatttgtagttccttcatgggttacttgtaagttattccacata

SEQ ID NO: 17317 - DNA, 425 bp, Glycine max
tgcaccaacttctcatttcatccataagatactagttcatattttaatttaatgttcagtaacaagactaaacatcataataagaccaaagatatataaattttttatttgatacttatctgtatatactaaaaggaaaactgctgaaattagtaattattgattatttttgcaacatataggaaagaagacgttatgtgtgcttttttagtgatacgatgttatgtgtttaacagactaataatatagttttacgtattgaaacatcaaattataaatattttgtataaaaattaatggtatatagttgttggatgtatttattcagaaaaaaaggttattgggtgtatttctttttattggccctccctgtcttctaagtttaagtttgtccctgcaacatgtcattgaccaattctatgttt

SEQ ID NO: 17318 - DNA, 415 bp, Glycine max
gtgagaaatacttgctcgatatggccgacgtattactggtccctgtcacataccacgctctagggcatgccatgaaccttgccatagattctcatgactaactgagctacaccaccggcggagcgttgctgtggaagtgatcccagatgagaacctttcgcaagcggtcaaccaccaccaacataactgagtgaccgtgatacgaaggaagaccaacactactgtctagagagaaatcctgccatggttacgccgaaatcggaaggggagacaggaggcctggggcacgactgagaactgacttagttggctgactggtggcagagctcgtgaccaatagatggatgcctcgatgcatagatggccagacaaaattctctcgagtacgggctaacgtcgtcattactcccatatg

SEQ ID NO: 17319 - DNA, 412 bp, Glycine max
  unsure at all n locations
ntactattacaaaccaagcttagtgtgtgtttcacataagcctaaatgcctaaaaaataagcataaaccttaataaaaatcatttttcataaaatataacctaattgaaaatttttaaaattcaaaaatattctcaacgcttcacgcgaatcaagttgatccgcaagtttcacgcaataagagcacggatcaagttgacccacaataagagcacggatcaagttgatccgtattaatcctgcggatcaacttggttcgcgtgaagcttgcggtagaacttcattcgcattctacctgcggatcatctcacactaatgcggaccatctacattcacactatgcatacgcggatcaaccacacacatacagcatctatggagacgcaaatgacaagggagtggcttaccttgac

SEQ ID NO: 17320 - DNA, 408 bp, Glycine max
tcttgttcttattttataagccttatatttttatattttaaaaaacttataatgtaatacttaagtcctaaaatactcttattcaataagatggaaaggcatgtcaaatcgaataaacaaagggaaaagaaagcaacaaaaaaaaaagctaccatcaagatctaaatctccaaggagtaagaagctttttggatagcaaagcttaaaaagaagaagaaaaacaacattttcaaaagagaggaaaatagataaatccaacatgggttcaacaaactactctagcactagcctttggaacaatttcaagcaatacaaattccaaaggttatgtatgtcttggcctttgctatctttttccggcctttggatgaaacaagaatgaatggggggtccagattcacctttgaa

SEQ ID NO: 17321 - DNA, 172 bp, Glycine max
agcttcttgcgtagccgctcttggtgctcagaaaatcccaaaaacaaatccctcttattactagctattttgaattctttagctcttgaatgtacaaccttcaaattgttgctcgttcccctctttgagaatgaggaggattctcataggacttcatccaactgatgtttgt

SEQ ID NO: 17322 - DNA, 416 bp, Glycine max
agaggagtggaatccaatttatctaatctatgggcctagtcttgatttgatagatattctattaacaccatttaaatcccttggacccaatgacaggccataatttatttcagacagactataaagacatcatgcaactaaaataataatatataccaatgacttctttcatattgatgcataggaagatatcttaaatacaatgtttctcgccatatcttgatttacaattacaaacaatgctacagaatatggacaacataaaactaagttcctgaccaaacggcctaagcagatggcaatgataaacttatcagtatcatattcacactgtcagtgctatttcctattgcaattatgactcacatatacaacatactgcgcagatgacatgatataaccacccaaaaataatg

SEQ ID NO: 17323 - DNA, 376 bp, Glycine max
agctttatcctcatcgtccctcacagtctttagatttgggagccaatccaatccttgtgttcggactctcagccacttatgatagccgccgatgatcccattactgcttcccctaagctctctgtcctttcttcacgctgcatcccatgccttgcgaactccttggagtaccctcgcgttgtggtcactaaaaccccgtgcgatgaaaggcgtgatgctttcgtctaatggcgctcctctcatggggtagccaagctgtcttatggcgagaacaggattataattaatacaaccccttgttcccatcaagggaacatttggacatccttcgcatgaagatagaatcttgattctttcttccttctagcaagggaac

SEQ ID NO: 17324 - DNA, 418 bp, Glycine max
tgtccgcaaaaaattcactaaaaaggattttaaggtttgatacttcaatttttctcactaagtaaaatggatccttttaaggtccaacgccttaaaaggaccaccttccaagtaaaaagaatcgcttgattcaccctttagaaagaactacgtaggtctgatttcctcttcgatggagggtacgtacgagcaagagccccacttttgtcgacctcaaaaattaaaaagaaataaaagcttaggaacacaatttcacacaattctaatttaaggctgttatcctttgggataaacgtgagaggtgctaataccttcctcaaacgtaaatataactcccgaatctggaatattcttcatgaccggtttccttcggtttttctgacattttccacaaataaacgttggtgacgactccgcg

SEQ ID NO: 17325 - DNA, 402 bp, Glycine max
  unsure at all n locations
tgtcccaattgagccagcttattcctcttgntgatgcaccttttgatccccaccaaaataaattcagcatcatttaaatctcatcctctagtgtggttggaagcaagtggatactcatgcaatatgaagggatttcctaattagaagttccttattactagctttggaaagatactttctcgagtagtgattgatgcattccaaaatttgatcctttatacaactgaaaatttctttatttcatttgcctatgatagaagggaggcctaagcattttctagaccctatgattgtataggcacccaaaagaaacatgatagtttgcgtcaaatattgctgagtgttggtgctgaaaaaatattatgacttgtctaaatatatcatttggtccaaagcccttcc

SEQ ID NO: 17326 - DNA, 379 bp, Glycine max
agcttgttgtttgttgccaagatgtgtagcagcacctttttcggcgtgcagctagggctgagcgtctgagcatttgtttcccttgcgaccccatttcagtaacccttgttcattcaccaactctcatgcagaaatactactcaggcaaattttctctttatataactttattgatttatttaatttaagattaataatagtataaacttaagaaatgcatttaataatttcattttcttaaaacttattatgatggacctcgatctctagatcattttggcaaatttagtcaatcacgataattaaaactcaataactaagctccaaaaaaatattttcgttaccaatggcaatttttgtcactaatgttggcgtcact

SEQ ID NO: 17327 - DNA, 409 bp, Glycine max
tgacaaaaggcctacctcatgtggtatgcgtccaatgaagttgtttaaaccgaagctaacgcgagataaggaagaaaggtttccaatccaagttgggattgttcctgtaagattgttaagacctgcagctagcactcttagatttgtgcagtggctgagattacttggaaaactgccaccaaagttgtttatgctgaagtttaggtattgaaggtatagtaaacgaccaacctcttgaggaaattcaccatggaagctattgtttaacaagttgactgtggtgaggaatgtgaggtttcctatgaagggtgtaagagtgcctcctagtctcagttgctcaaggctaaggtgtgtgactcttccattggagatgttgcatgtgattcctatccaatcgcagtgattgatg

SEQ ID NO: 17328 - DNA, 562 bp, Glycine max
  unsure at all n locations
ctcatctacatcatgcntccgtctcnttgtgattaggtagttcgtctgttgtacatctgtatnacatatnttaatctacancaactcgagacgcgaangcgtgttgtcgtgancactataagcaaactcgagcctagcgtccgggggtactgtataggtactctgtggcttgtcggcttgttcttatttatcaatccacatgaaaggaagactgggttctatatgttatctcctaccgtgtgcctcgagatgagttgctatattaatggcgatgtgttgtccttccgcccacccataggaagatgaagcctcgtggttaggtttttcattaaaggttgacgcccctacagcttgacaagcagccatattctgcccaatatattttgctttacgaggagtcacgagcagctacactctgctattttgatcaccccaagaatggtggtgtttctaatacgaaaacatacccagcagtgcttattgtgttctgctcagaaaccattttagcttccagaaagagaaggttctatgggttcttcattaacctgcttatcacaccacg

SEQ ID NO: 17329 - DNA, 414 bp, Glycine max
tcttatccaaggctcatcttggtggtgaatctccttcttccatggcttattccctagtggatggcgcctcctctcacctcttctcctttgtcttccgctgcatctccatggtggaaaatcaccattaaaggacctcattgaagctcaaagatccagcctccacagaagccccacaagcaagtttccatcaataaacttcataagattttatcaatgtgatcataattatcataatatctacctagagagcaaagctcattcagaatggtgtggaagcgtccaaacatggtttagatatcttctccttcttccatactaaagagttcatacttatgtgtcagaagactcaacttgttatgctttaccttggaggacccttcgtaggtaatggctaaggtttcccacatctgtttg

SEQ ID NO: 17330 - DNA, 509 bp, Glycine max
  unsure at all n locations
tcccaacgcatgcaccatgttacagggttcaaatattatgtgcntattattatacccgacggcgagatgatctttattcttcttggaaacaactcgttccgggatcctatgatcgactgcgagctgcagattataccttctttttctccaaaaatataatcgagacgggacaccctctgacacaagtaaaagaccatccccagcagaaagagagccagaccgactcacagacccaccgaaccccggacaataataataaaaaccactgcgcgagctatatacaagcaagctcccacacaaagactttcctccctttccgatggcatactccgagctatgacccttcttactaggagaaacatttactggcgggcatacctgcagaaggtattccagacacccctccccatagtactatgaatccagagccaaaagcgtgctatcatagaggaggtgcccgacacaatatttgaccctacctccctccacacgattaggtgaggccctcg

SEQ ID NO: 17331 - DNA, 420 bp, Glycine max
tagccgaattcagatcgaattgaagttagcttagcttatccttggccagcttagcggaccaaatcagcctcagatgcaagggttgggtgctaagcgcatgaacagagatgcacttagagcgaggcttgcgcttagcgaaaggactacttttcaaaaaaaagttttctgagttatttttcagtccttttttctaagaaattgaaacccttatgttaaacattcaaagaaaggctgatatactcctatgtacagatcatatagcaagttccaaatgattaaatgcatgaaaaaacaaagataacatacattaaaactgggttgcctcccaggaagagcttctttaacgtcattagcttgacgcatagcttaataccttcaatgtggcatgaaagtcacaaagaacacatcttccttgaagtt

SEQ ID NO: 17332 - DNA, 384 bp, Glycine max
agcttgttatgaacatccattttgtaagcagagaaaagaacgtttccacaaacaataccgaaagatagacatgttattgagggcttttgtgcaaatacaaggaaaaatgcaattaccatcttgctcctcttagcctcttcatcgatgtcattaccatcatcaccaatagctttcctggaaaagtacatggcatttataaatgtcagtacatcaataacaatatgcatatcatgagagtgaaacaacaaaacaaacagatactggacttcaaaccttctttttgtaatgacccgatcatcatgaccagcctcagcatggccatggccatggccgaattcaggaaccctgctaacaacgttcctcagaaagtcaaagacattatag

SEQ ID NO: 17333 - DNA, 422 bp, Glycine max
tagaatacctgctgccaattcagttcccaagtctaattacaatttcatttccattaaatctgtattgtcttgtaataaagaagtcattgatatttggcatttccgtttgggtcatccttcatatgataggatgcaagtgttgaaacaaacttatcctatgttgacttgtgataaaacctttgtttgtgatacttgccataaagcaaaacagagaaaacttccatttcccaatagtgactcctatgcttctagtcctttctctttgatacatgtagatatttggggtccttgtaccacaactactttgaatggacataagtattttcttacaattatggatgatcatactacgattgtttggagttttataatgacttcaaaagctcagactcaaactcatttacaagcctttgtttcctatg

SEQ ID NO: 17334 - DNA, 386 bp, Glycine max
  unsure at all n locations
agcttgttngattatggggtacccatcacatgtggtactatgtggcggtcgggcgatggtgcacaacaagttttccacattcacaaatcgcgcataaacccaccatcccctattgcccacctccaactgagctcacgtactcccacgtagcccatatcctcgtttctctcaacaccgggtccccatcaatcctcccaagcttccccaacatccaggtaatacaacattcaaacagcacaaactatcacagccaataaaacagggcaaaggcagaaaactctgcccaaaacaccaaccaaaatcacaacttttctcacttatagaccccagtaacaattccttcgttccagttcgttaaccgatggatcgactcgaagattttactg

SEQ ID NO: 17335 - DNA, 428 bp, Glycine max
ctcagcttctcaaggaagttttctcaagaaatcttctcaaggattctacctagtctataaatagaagcatgtgtaacacttgttgtaactttgatgaatgagagtcttgtgagacacaactcaaagttcaacttctctccctttttcttccttcaatttcgtgctcccccctccctctttctctccctctttcttttcctccattgaagcatcttctccaagcttcttatccaaggctcatcttggtggtgaagctccttcttccatggcttattccttaacggatggcgcctcctctcacctcctttcctttgtcttccgctgcatctccatggtggaaaatcaccattaaaggaccccattgaagctcaaagatacagcctccatagaagccccacaagcaagcttccatcaagtggtaatcagag

SEQ ID NO: 17336 - DNA, 382 bp, Glycine max
agcttctggatgaataatccacatctgcacatgaacgtcattgtcaaaacgagatccagggccaataataagactccgtgaatgaaggataattacaaaactttcctgtttattatctttggttgtgtgaattctagtgaggtctatagcttgaaattaagttattttcattggaccaacaaaagagcgagagacatggaagaccctcgtatgattaaagacaagtcactctaccaatgtgcattgggaaactgttatgatctgtacttgcataaagacaaatagcttgccataaacatttgatatgggtagccttatcatggaggtattggccgtagccatattgatagtgacatcatccaccgtcctaacctaaatgcaa

SEQ ID NO: 17337 - DNA, 413 bp, Glycine max
tatattaattaaatataaagcaaaatcattttgttaattgggatttatattccaaagtttgaaaatggaaatctttctatatggagaggggaaattcggtctcagagtttggagcaaactttctaagtaataatttcacggattcatatgaaagtactaataatttcacggagtaagacgtaagattggcaatcccaaaaagccatataattgactactaattactcatcatatagcttttgaattaagtttgcagaatttattatgttgactagttaaggtgatgaaatttcgaactaactatagtgatagtactatcttgcttctccataattcacaaagaccagcataaccaactctttgacggttgacttgagtttaaaagttctataaagaaaaaatggagattgaat

SEQ ID NO: 17338 - DNA, 257 bp, Glycine max
tgtagcaaatgcaaacggcgataacgttttatctctttgttcgattgagtcacgtaatacatcgaaacgctcgaaattgaaaacagaagctctgtgcaaattctgacgacaatacattttaactcggatgtccgattgagtcccgtaatatatcatgacactcgaaattgagaataaaagctctgaacaaattcaaacgacaataactttgtactcggatgtccgattgagtccaccaatatgtctagacactctta

SEQ ID NO: 17339 - DNA, 414 bp, Glycine max
tcttttggaccttgaacaggcaactaactcctctttcaaaaccatgctatgtgctcgcgactggtccctttcttcctttcgcaacttgagttcactattgctaccccatagagctccgcgaaatttgttccggccatactcttccttgcgagccctcttggtctcttgttcaagggctcttgcggtaattgcattctcttcccgtaacccggcacactccttccgaacgtgtgtagcggccaacttgaacttctccttggcaagttttgcctttcctaactcgcttttgagagcttggacttcttcgtcctcttccggtgcttcaaaactctctttgctgacgacttttaacttggcgagccaatctaaacctcgtatatgaactttcagccattcgtggtacccaccaatgat

SEQ ID NO: 17340 - DNA, 381 bp, Glycine max
tatcttccagcaccagcgatttcaacctagaaatcaagagtagtgtttatgttgcttaaggcttggatagttacaatttgtgtttgcttatgctcaattatcttgaataacacaattccagagagcttaagacttattttgattcacaaatccagccacaactcagcaccacaactcaacttcatcataggcatcatgtatgaaacttagaaaacaaaaaaaagttcaagaacaagactacttctaggaattgatttagaacatgttatgaactatataacatgcatgaattagactcaaaattcaaaagataggctaagaatgacaagaatacatgaacaaatgtatctagaattcaatcaactaaataaaattcaacac

SEQ ID NO: 17341 - DNA, 393 bp, Glycine max
tcctccagaatcgtggtgtgattggccgtcatgggtttgtaacgatcgtacttggaccctttggggagaggttggcgcttgtctgacttgtgcctcttgtctgacttgtgcaagtcgcccttggtgtttcctttgcgctttacgtgcttctatccggcttggtggacttctttcggaatctagacatttcttccatctggacgtagcccttaggttgttcacgcagctcgtgcatgctactggtgcacaaactgtttgcaaacttgccggggcgtaaggcgaggagcatggaatgcaatgctacctcatggttaagatttcgaatctagacagctgtgcgctcaaatttgtccatgagttttctgagggactcatcatctgcttgtcgtagac

SEQ ID NO: 17342 - DNA, 377 bp, Glycine max
tgcttggtatgaaaagttaagttcttttttaactgaaaatagttttatatgaaggaaagtagatactactttgtttcacaaagattatggaaccctaaaccctaatcatctagatatatatggatgatatcatattcggttgtactattgactctctgcgaaaggatttttccaagtttatgcaggccgagatcgaaatgagtgtgatgggagaattgaagtttttccttggacttcaaatcaaacaagcagacgaaggcatatgcatacatcatacaaagtacgtgaaggaactcttgaaaaaattttagatggacgatgcaatatatatgaaaactctcatacatccgaccactatacttagactagatgatgat

SEQ ID NO: 17343 - DNA, 406 bp, Glycine max
ttgtgtaatcgattacacttattgggtaatcgattactcagcgactgtttctgaaaaaatcagaagatgtaacccttcataaggttcttgactttttcaaattggatttaagtttttctaaaagatataactcctctaaatggtcttcttgaccagacatgaagagtctataaaagcaaggctttgatttgctttccaagacactttttacattcattcactcaatcctttacaagtcttgactctctttgaacatcttcttctgttgtgaaccaaaagctttctgaagtattctggattttcaaaccttgaaaactcgtgctatacatctattcattctatttacgctttgccacaaagaatgcgccatagactaaccgcctgaattctttttgtgtgtttctta

SEQ ID NO: 17344 - DNA, 381 bp, Glycine max
agcttgtaccaaaaacaaaatatttttttaaaaaatattacatgacaatgaaatcgctatataagatactacaaagatcacattttaaaaaaaattcatatttaaatacccatttttggcgttttttttttcgtgggtgtggcagtgccgtgagacaatggagggtggccatttctcatgtttggacgtcaaagaacccaaaaacattattcccgttctccggttctgtcaaataacagctaaaaacaaagccagaaaatccaaaaaaaataggaaagtgaccttttttcatgttcaagtacccatgtttgggaattttttccgtaggtgtggcagtgccgtgagacaatggagggcggccatttctcatgtttggacgtc

SEQ ID NO: 17345 - DNA, 415 bp, Glycine max
cttctggtgggacatcttgacttgctttccaatctgacattcaccacttattctgccttcttctattttcagattgggaatgcctctaacagcacctttgtcaatgattttcttcatgcctcttaagtgcagatgtccaaatctttgatgccatattttgacttcatcttctttggagaatagacatgtggaggagtaactggtttcttgaggggtccataggtaacagttgtcctttgatctgctgcccttcattaagacttcactcttctcatttgtcaccaagcattctgactttgtgaagcttacattgaatccttcatcacacaactgactgatgctgatcaagctcgcagacagtcccttcaccagcagtactttgttcagactaagaagtccctcatggactatcttt

SEQ ID NO: 17346 - DNA, 351 bp, Glycine max
agcttcatacaaataagagaaaaaatgtttttggtgaaagaaaatggaaaaagatgagggagaatgtcttctccagtctctctaccctatttctctctgtttttcaagtagcaaatgcttggccagattgtggatgtggtggtgactgtggtgaccttttgttttttgccaatctcagtgttgtaaaggctcttatacttctcagcacacgaaggctcgctcatcgaacatgtctcattgagtaagggtaagtgaaaatacactaagcgagctcgggcgcgctaagcgcgaaaagagacaacgtcctcattgggcgggctggctggatgctgagtgcgcagatctctaact

SEQ ID NO: 17347 - DNA, 411 bp, Glycine max
taattcaagtagaatccattaaaacaaaaatgtaaaacattagaggtcacatttaactatatgtaacattaacatcttctaggaactttcgtgcttgttcgccttccacaacactttcattgatgacagcagaagcaatatcactatctcctacataattaaatgtaaagaaaattaatagaaataatcctaaatataataaataaaatgttatctgacaaacacaatgatttaaaaggaagacaataattagaaaatagtgtcatgtgaggaagctccaaaccactgatatgtggaaaatatagcataaattttaaaaacttgacatataaaaatacaccatgagctaggaagccttgaaccactgatatgtggaaaatataaagtatccatgtacatattgcatcaaat

SEQ ID NO: 17348 - DNA, 376 bp, Glycine max
agcttaacaaccctaaattctgattgtaatttacatttagcaacagtcaaaatcacttgacgttcaatttatacactttagatgcgtcttgattataacgaatgtcttcacaatactagctagatggattattgtgatatcgtgatgtgttttttaagaatttttttaattcttaattttattggtactaatatgtagaaccatgcaatacatgagaaattagtgtttaatttttattattattttaattaatatgtaatataagcattttttattcttttctctttcaagtcaattttaaaaattatttaatgtaaagaaaaatgagcatgattttagaaaaagggagagaaaagaaaataatagcaaagaaatt

SEQ ID NO: 17349 - DNA, 412 bp, Glycine max
tccaccctgcctgtggcatggcaacaagcacatggttcactaatcatgaatgtcacgcttggtcgaacctgtcaaacattggtaaagcatcggtaattcattttaataaatcttactaaacttaactgagtgttgtgccaacaattatcagagggaaagcaacttgaaaaagaaaaatgtagttcaagcattattcttttcaatctatagccattttagcatgtctgagttcagtgagttgaatcaagttgaaagatggtgatcagtaaatttggcatactatttgagaagttatacttgaataaaaccaatggaaagttatatacaaaagaaaaagggggaaggtcgcttgatgtttcatatgaaacacatctttcttttccacacttgtctctgataatgggataacaaa

SEQ ID NO: 17350 - DNA, 382 bp, Glycine max
  unsure at all n locations
cagcttcattaatagacttcctccagaagcttcattaagaggcttctaacacactcccaacatcttttcaaagatcccaaccgtcatatcatggaaaattgtctttggaagttgcaatccaaatttcgagaagatccaacggttaacgaaggctggacagagtttttaccgagacaacttcatgtagctntctctataagcttcattaagaggcttcctccagaagctttctcgtggcttctttgagaagctatctcaagaggattctttgagaagctagatccttatctatccacacccctctattaactaaattaacttccttaaaaataattacggatgaaaataatgtaacanataatcaaacatcaaacataattac

SEQ ID NO: 17351 - DNA, 418 bp, Glycine max
  unsure at all n locations
aagcgcgggtctgggggacgaaggtcaagtggtcgcgatatacgaagatgatgttccgagtacattggatttggtacgaccatgccctcttgatttccagctgggaaattggcgagtggaggaacgccccggcatttacgaaacgagcataatgtaaacctttacggttttaaaagctctatagttgggcctaggctttagagttttttcttttgttaaggctttgtgtcttttgtttttgaatttataatacaaggatctttcttcatctgttcctacgtctctacccattctcatccatttgcatgtttacttctttatttctgaaacggcagatccgatgacgagtcccccgaaggtactaatacctgtgacccgcctatcaacttcgagcaagaaacgaatcanacggaagatg

SEQ ID NO: 17352 - DNA, 421 bp, Glycine max
ctaccaagttatcttgagcccttcttcatcaagcataggtatttaacctccattttcaactctaagcttgattttcatttcattttcttgctctattctcacatgtagtttctaaatcttatttttgcactcttgaaggttggaaacttgaatctaaactccgccattcttccctctaaatttcatggagactacaagaggtagggaggggtctccatctcttgaaccctatgtttgatgttaaacttccttgaacatgttgctgtcttgaaattcttgtgcttgcttccctattatggatctatgtgttgagctattttacttgagttttttaagccaaaaatgagttctatgaatgttagaacctaaggttagccttatatttcacttaaattggattttcttgcaaaagttatgaata

SEQ ID NO: 17353 - DNA, 381 bp, Glycine max
agcttgtaatcgattaacgtaattgtgtaatcgattaccagacataaaaaattcaaatttcaagtctaaagagtcacaaatcttcagaaactaactgtgtaatcgattaccacttttatgtaattgattaccagtaaggaatttttgaaaataacttccaagagtcacaactgttcaagaaatttgttatgaccatctaaggcctataaataggtgatttgggatacaaaattttttagagtgtttctgaacaaaattgtcttatcctctcaaaaccaaattgtcttatcactctcaaaatattccttggccaaacacttgcaaattcaataaggaatcttgagggagcttcacattgtaatatccttctcttaaagagag

SEQ ID NO: 17354 - DNA, 422 bp, Glycine max
tgtcccaattgagccagtttattcctcttgttgatgcaccttttgatccccaccaaaataaattcagcatcatttaaatctcatcctctagtgtggttggaagcaagtggatactcatgcaatatgaagggatttcctaattagaagttccttattactagctttggaaagatactttctcgagtagtgattgatgcattccaaaatttgatcctttagacaactgaaaatttctttatttcatttgcctatgatagaagggaggcctaagtattttctagaccctatgattgtagaggcacccaaaagaaacatgattgtttgcgtcaaatattgttgagtgttggtgctgaaaaaattttatgacttgtctaaattaatcatttggtcaaaagcccttccataggtatctaggaattgag

SEQ ID NO: 17355 - DNA, 382 bp, Glycine max
agctttcatccgttcttcgacgctcttcattcgttcttcatcgttcttcgatcttcaacgggtaagtacctcgaaccaagcttttcgattcattctatgcacccgtagtggtccacattgtgttccgtgcatttttattctcgttttgtttactttttataccccctgttgacgtgcttaagccattttacttaagtcatttctcgcttaacttaaaaataaaataagtttccaccgaacatttgaattgcattatccgttaacttcggttaaaatcaattccgaccgttcggtcgtgccgtaaccacgttggaaatcaaaaagaggtagaaaataatataataatcaaaaagacatcttttagtgaaataaagcggacaat

SEQ ID NO: 17356 - DNA, 420 bp, Glycine max
tttgttttcaattacgagcgtcctgatatattacggtatcttttcggacatccgagtcaaaagtgattgtcgttagaatttgctcagagcttctgtcttcaattacgagcgtctccatgtattacgggactcaatcggacatccgagtaaaaagatattgtcgtttgattcttctcagagcttcaattttcaattacgagagtctcgatatactacgggacacaatcggacatccgagtcagaagttattgtcgtttgaattggctcagagcttctgttttcaattacgagcatctcgatttaatacgggacacaatcggacatccgagtcaaaagttattgtccgttggatttgctcagagcttctgttttcaattacgagcgtctcgatatattaccggactcaatcggacatccgag

SEQ ID NO: 17357 - DNA, 374 bp, Glycine max
agcttgcctgaaactatatgagatccctttgtcgttgccttccaacgagggtgaagcttaaggagaacccaatctcctatctggtagttcacttcacgacgtttcccatcagcttggcttttcatagcagcttgttccttagaagcttatttcgaatagcttggaaagtgttatccctatcagttaacatctcttcaacggcctcaatgttcgaagaccctgtaatatattcaggaaagttaaagggttttcggccaaaggtgacaccatacggattggctccagttcccgcattccatgaagtattatgggaccattcgacccacgggaggagcttcccccccatgcttggccgacgatggatgaaggctcgc

SEQ ID NO: 17358 - DNA, 422 bp, Glycine max
  unsure at all n locations
tctaaactntatacaagaacgaagctctgataccacttgttagacaagtggcctcagatatcttaattagggggggtcgaattaagatattgcaaactatttccccaattaaaaatctatttcaatttcaatgcaagttacaagttcccttaaaatgaactcttaaataatgattcaaatagaacaatctgaatataaatgtaaagcaataataaataaaagagtttaagggaagagaaagtgcaaactcatatttatactggttcgaccacacccttgtgcctacgtccagtccccaagcaacccgcttgagagtttcactatcttgtaaaatccctttacaagttctgagcacacaaggacaatccttcctttgtgttcatatttttttacaacaagagaccctcggtctctcaatccct

SEQ ID NO: 17359 - DNA, 362 bp, Glycine max
tgcttccattttcaattacaagcgactcgagatattacgggactcaatcggacattcgagtaaaaagtcattgttatttgaatatgttcacagctactgtattcaattttgagcgtcatgatatattttgggactcaatcggacatccgtgctaaaagttattgtcgattgcatttgctacgaggcttcgttttcaattacgagcgtctcgagatattacgaaactcaatccaacctccgagctaaaagttattgccgatggcatttgctacaagcttgcgttatcaattacgagcgcctctatatattacgggacttaatccgacctccgagataaaagttattgtcatttgaaattgcta

SEQ ID NO: 17360 - DNA, 417 bp, Glycine max
tcattgcctaacaagccaacttacaacagcaagccttatgagactcagcataaggatgcacagaccaaagttgcgtatgtaaaaaaattgtatgaccaagtgaaggtgcaaattgcaaagaagaatgaaagctatgccaagcaagcccaaaagaaaaggaaggaagtggtacttgaacccggtgatgatcttggacatttgaggacaaatgttttccaagaaggagggaatgatgagaatcatgaaacaggccaaatacagtctaaaggcccaagtggagaaggacgaaggcccaagtggagaaggacaaagcccccgagtggagaaggatgaaggcccaagtggagaaggatgaatgcccagaggcagagacactatcaagactattaattgatgctgaaggccaagattaatttg

SEQ ID NO: 17361 - DNA, 379 bp, Glycine max
tttcttgcactgcaagtctcttagatcttgtagaaaagctagattgtaacggaatctaattgggaatgaaaacataatttcagatgcaagaagctaaaacaccaaatgagaacagtccaactctagatatctagcaaatcattcacatgatcatcatagctattattttccatacaatctttatcttcatcaatatccatggcagtttctctagattccatcaagttcattatcaaattaagtttcttcaagttatctagaggggcaccaacaacaacactaacatcctttcctacttgaaccaagtttcattcggagtatccaaatccaaaccaaagttatatgaaattccatcattattcctaatctaatcatcata

SEQ ID NO: 17362 - DNA, 417 bp, Glycine max
  unsure at all n locations
ntaatatatcaacagactatgatataatatataagactccatggacttagtttaaaaattattagtatgtataattaattaaatagtaaataattaatgtatttgatatgcaagatggttgttatactgttagttttttctttttttgaaacaaagagactttattacccccttcaaatactagtcaataatacaagtaggatgtgtctcaaaatcttgaaagctagtgtaacttctagaagcccgagctaataagtgagctattagatttgtttgccttggagtgaagcaaactttgtaaagcagtgaggatttcaacaaggatttaccgtgccttattatttctccaaacccggagctatctatatgctccttattgacactattcgatattctttggcagttcacttcaatttc

SEQ ID NO: 17363 - DNA, 379 bp, Glycine max
tgctttgcttttgctctcctacagattgagataaatgaagaaaaattcaaagcttcccttcaccgatccgaatgactgagatgaatgaagaaaagtccaaagcttcctttttcctcgccaacaaactgagatgacggaagaaaagagtttagtccaaaccttccatgttcctctcccacaaactgagaaatattgtagcatgggagttgttgcgactggtttagacaatcttaatgttggattttaaataacctctccccttgtaaaataaaagaaataaattatagatttccatatgctacgctgatgaaattcactcaacctttcatcctttcgtaatccataataaacccaagaaacaaattataaattagagaaa

SEQ ID NO: 17364 - DNA, 418 bp, Glycine max
  unsure at all n locations
tgcctcacagaggtccaggaaggataaggcggccgatggaactagttctgctcctgagtatgacagtcaccgctttaggagcgctgtacaccagcagcgcttcgaggccatcaagggatggccatttctccgggagcgacgcgtccagctcaagacgttaaagaagcgctactaggaggcaacctagtaccttttgaatctatgcttgttatttgatcactttttatagtaggacgcacctagttgctcatgatcctgggaatttaaataaaacaagcgcaagctcgaaaggtagtcatacctcacaaaatatatatatgtatgtttaggtagtgaaaataccttagatatgcatgtatgtaaacaaaaaaacacttcacaaaatatatatatatgtatgtntaggtagaaagatacc

SEQ ID NO: 17365 - DNA, 329 bp, Glycine max
agcttgggtttaaactctctgtagttgctctattgttgttcttcagattaaaccaatgaggaaggtgaaactgacgacgaaggtgctttgagttttttttttcctttctttcttttcatttgttcttgtttgattttatgtgttggggtttgatttcgacgatgcgatgtgttaggattgctgacgttggtttttattttgttccgacgaggaaggtgaaactgatgacgaagttgtgctgaggtttattttggtttttccttttgttcttttcgattgttcttgtttgatgttatgtgtggggatttgacttcgctggtgcagtgtgt

SEQ ID NO: 17366 - DNA, 406 bp, Glycine max
  unsure at all n locations
tccatcaggaagggtcgtccctgtgtggttcagactttgtaaaaggagttttacaaagagagtggaaaatttcaagtgggttgcttgaggactggacgtagacacgggaagtggccgaaccagtataaatcaagtttgcattccttctttccttaaacttcttttatttattgctatttatcttttgctttaaagaagtttattttgaattgtcttttgagtaattcatgttaagggtgcattgttaatccaaaaagagagagtgaaagtttaattggggaatagtctttgtattttaattcaaccccccaccccttcttaagataactgaggccatttgtccaacatcctattcttgataactcacttctctctaanaagacaaactttccggaatgataaaatg

SEQ ID NO: 17367 - DNA, 377 bp, Glycine max
agcttatctgctgttaccaaccaatggccaggagcatcatgtgggcctcgcacgacctcagctgtctccacgtatttaagtagtttaccggcgcgaactggcacaggaggaccatctggataaactccagagttaagtgcagttggagcctgttttggaggaccggtggtgccatgctgagtgaacgaaaatgttgtgctcaaatttgtgagaaaagattttcttgaagcctctggtgcagcagtccactctgacttccggatactgcaattgggtatatgagtaaagagaagccgtagatgaagcacattccttggccagctccctttgctaaggagttgtgcacctgttacaatatatacacctgcagaattaat

SEQ ID NO: 17368 - DNA, 417 bp, Glycine max
ctataaggaacatgctggagaggaattgaagttggtgtgcttccagaagtgatgccacgccaactgaataggccactatgtgatttcatatctagttaaacacctcacataaggatctaagcatcagttcactacttcagtctgcccatctattagaggacaataagcagtgctaatcttcaagagggtacctggtctctggaacacttccttgcaccagagactcatgaaaagactgtcgatgccagatactactgatgcaagataaccatgcacactcaccacttctttaatgaataactcagctactccctcagttgtataagggtgactccatgccaaaaaatgagctcacttagtcagcctatccactaccactgatatagtagccttccctagagctactggtaagccttc

SEQ ID NO: 17369 - DNA, 378 bp, Glycine max
agcttccatcaagtggtaatcataaacaagagctgcaagtaggtgctccttaaacctccattaattttttgttttaccttctcttccattgttttttcttcatttttctacatgtatctcctcaaatttcttgtgctaagtgtttttaacatgattctttagagtttccaccgattaaacttggtatagaagctagatttgattttctatggttcaaatttcttgatcttgttcttgaaccatgaattgtgttgagtttaggttcctttgagttttgtcttgttatttttttgtggatgaatcctaaactataaaattcttacaaaaatattaaagtataagaaaacctcaaaaaaatctatagtgatttgttcacct

SEQ ID NO: 17370 - DNA, 410 bp, Glycine max
  unsure at all n locations
tctcaagcaagcttccgtcatgtggtattaaaagcataagagcttcaagtaggtgctccttaaacctccattaattttcaaatttaccttctcctacaatgttgtttcttcatttttgtacatgtatttccttgcatgtcttgtgctaaatgttgttaacatgattctttagaatttccaccgattaaaattgctatagaagctagatttgatttcctatggttcaaatttcttgttcttgttcttgaaccatgaattgtgttgagtttaggttcctttgagttttgtcttgctattttttgtggctgaaacttaaatcataaaattcttacaaaaaaattgaagtagaagaaaacctcaaaagtctagagtgacatgttcacctattgtagttntgtcatagaagtcat

SEQ ID NO: 17371 - DNA, 388 bp, Glycine max
agcttgtctgcctttccaacatcaagaaccaatgcttccactatagagccactctccaaaatagttccagccactatggaatcatatcaaaatgagaattggtacttgcacttgataagaaccatccaaacatattagttaataactaaataccatgtgggaaggagaaaaattacactgataattggcaataaaaccaaaaacatcattataatgttcaaagcttataacaagtccaacatcctcaacagccttaactttgccttttgcaaccataccaatgttaaatccttcatcccactttgtatcagatgcaccagagccacagtattccaaccttgcaatctaattcaaagatgcacacaagataagaagtaatagaaaaggg

SEQ ID NO: 17372 - DNA, 424 bp, Glycine max
  unsure at all n locations
ntataaggagacattttggtagagatattgaagttggtattaatccagaattcagcccaggccaagtagttaggccactattttagtttagttctagttaaacacctcaaataaggttctaagcatcagttcactacttcagtctgcccatctatttgaggacaataggcagtgctcatcttcaattgggttcctggtctcttgaacaattccttccaaaagagactcatgaaaagtctgtctctgtcagatactattgatgcaggaaaaccatgcagtctcaccacttctttaatgaataactcagctacttccttagttgtataagggtgacttaatgccaaaaaatgagcttacttagtcagcctatccactaccactaatatagtgtccttcccttgagcttttggtaagcctccaatga

SEQ ID NO: 17373 - DNA, 383 bp, Glycine max
agcttgttccatttggtccattgctgagaagttatggtgatacaattgcaactgcaaaaacaatcggacaatattgggaagaagatctatcctgcatgagttggcttgatcaacaacctcatggttctgtcttgtatgttgcctttggtagtttcactcattttgaccaaaaccaattcaatgaactagctcttggacttgacctcaccaatagaccttttctttgggttgtgcatcaagacaataagagggtataccctaatgaattcttggcgtgtaaaggtaagattgtgagttgggctcctcaacaaaaggtgctaagccaccctgctatagcatgttttgtcacccattgtggttggggacatgctacgtgcacccag

SEQ ID NO: 17374 - DNA, 422 bp, Glycine max
  unsure at all n locations
ntgcagtagatgccactctactctaaatttttgaaagatatgttaacaaggaagcacaaatatattcatcaggaaaacatcatagtggaaggaaattgcagtgttgtgatccagaaaatccttccacccaagcataaagatcctgggagtgtaacaattccttgttcaattggagaagtcaatgtgggaaaagctcttattgacctaggagccaacatcaatttgatgccactctccatgtgttgaagattgggagagttggaaataatgcccactcgaatgactttacaattagctgaccgctccattaccaggccatatagagtaattgaagatgttttggtcagagtaaaatattttatcttcccagcagactttgtggtaatggatatctctgaagatactgacatccctgtaatatt

SEQ ID NO: 17375 - DNA, 384 bp, Glycine max
  unsure at all n locations
agcttggttcgaggtacttacccgttgaagatcgaagaacgatgaagaacgaatgaagaacggttgaaacctttgcgagattcctcacggaaaacgttacggaaacgtttcggaagtgcctcggcttagattttcttcacggaaacaatttttccaagcaaattcgaaggagagagaagtgcctaaggggctggacccctttcttcttcatttcctcccctatttatagcaaaataggggaggtggttgccgcccagctcgcccaggcgagctcagctcgcccaggcgagcagggttgcttcctccagaagcaaccgccttctggaggaatattccagagggcccaagtgggcctgggtgctatttgcacccccattnttacta

SEQ ID NO: 17376 - DNA, 419 bp, Glycine max
  unsure at all n locations
tggttcgaggtacttacccgttgaagatcgaagaactatgattaacgaatgaagaacgtcgaagaacggttgaaacctttgcgagattcctcacgaaaaacgttacggaaacgattcggaagcgcctcggcttagattttcttcacggaaacaatttttccaagcaaattcgaaagagagaaaagtgcctaaggggctggaccttttttcttcttgcattcctcccctatttatagcaaaataggggaggtggttgccgcccagctcgcccaggcgagctcagctcgcccaggcgagcagggttgcttcctccagaagcaaccgccttctggaggaatcttctggagggcccaaatgggcctgggtgctatntgcacccccatttttactaagtacacccccctctgctgttttttttg

SEQ ID NO: 17377 - DNA, 386 bp, Glycine max
agcttctttagtagcgtatattattacttacaaaatgatttatcaaagaatcactaataaaaattgaaattgatgtttgattcttctagtccaaaaattagaacttgggactattttccaattaattgtcggactggctcctccgactttaagtcaataaacagaatacattatcgttttatattaagtaggtaaattttaaggatgaaaatcgaacttgaattgaactaatattcttaaagattaattacaacgaatgaagtttttatatgtcaaatgagtttcagttcagatctaaataaaagagtctgcaagatttttaactttttaatttgaattacacacacatcatttataactcattccaaactcaacattacacacat

SEQ ID NO: 17378 - DNA, 423 bp, Glycine max
tgcttaatcaatactatgatagattgatgatggctaaccaagttatcctactatggtagtatgtgctttaacacaatgttaggaaatccaaaattgaccatattgcctacaagcttttgatcaagtaaccccaatgactaagatggaaatgtattgtgattagtgattacacccttaattaacttaatagtttattagtttattttattcccatgcaataattcatttttagaactacgatgttggggtcttattttctaaagtggtctagccttaaataactgaattttagacctttgctcatataccattaattcattactatttaaagttcatatgattttatctatttaaatgtgatatttatgttactcttatatttatattgttgactggttgatcaaggcattatatatcatgatt

SEQ ID NO: 17379 - DNA, 378 bp, Glycine max
  unsure at all n locations
agcttctcaatcctttttcctattttttttcctgtcttttttgttgggttgtatgtaacaaaaactattatttgtgattatatatttatatatttattgcaatgtgttatctaatatatctaatgtaaaggagtagtatatggagaaaagatgtagatttgaccgctatgagagagagaaaacaaataaaaaactctctctggtattttttgattattataaagatttgggacttgaaaaaaaatctaaacacaaaataacatgtagatttgattgctttgagagagagaataaaataacaaactctttctatacccaacgatagaagactagactaggaaagttacacagtanagcaaaacattcttagagagaacg

SEQ ID NO: 17380 - DNA, 406 bp, Glycine max
tgattcatgattcaattcatgtatctttccattaacaaccgaaatatcactaccaccaacagctctcttgatggagcttgggtatttcattaactgaccaataccaaaaccagaatttattttaacaccagagtctttagcaaagttcacccctttatcattgttcaaacatttattggtccttatgcccgaattggttgattgtcttcctgtgtggccgtaatcagaatacagtttcttgggcatgatagggctgccatcattccacaaattttcactagtttttgtctttcccccatattgattatcaaattgcagaaatggtgaaaaggataaacccttggccacatttttagtttctgatctagctctagcagaagcattaaccacagcagacatatatttc

SEQ ID NO: 17381 - DNA, 387 bp, Glycine max
tatcttatgctataaacatttataatagaccccctcaacaacaaaaccaacgacaacagaataattatgatctttcaagcaatagatacaatccaggttggagaaatcatccaaatctgagatgggcaagtccttcacatactacaacatcctgcccctactttgcaaaatgttgttggtccaagcaagccatatgttcctcctccaatacagcaacaacaacaacagtagcagcagtcacaacaaagacaacaagcaacgaggctcctcctcaaccttccttataagagttagtgaggctaatgaccatccagaatatgcaattttagcaagagacaagatcctccattcatagtttgacagatcacatggtgcagatggctactt

SEQ ID NO: 17382 - DNA, 417 bp, Glycine max
tgccatgtcgtcgtcgttctgacctaaacctcttcttggcttgtacccaagcctcaacattacacgggctaccatcaatgcagcactggatgaacggggttacactgggggagactcgatgtcgcaacctacccttcagcgggagggcgacgcgagactcacgggtgcatcttccaaggaaggaaaacacgcggagttgccaccaacgtttattcgaggaaaacgtcggaaaaaaccagaaaaggcgtggtctacgaactttaagtgtgaaaggttcgggagttgtatttatgcacggtgaaggtactagcaccccacgcgtacgtcacaaggtacgacagcctttaatcaagtgtgcaaatatgacttcaatttggtttatttcccctttttaggcttttatgtcttcttatgctt

SEQ ID NO: 17383 - DNA, 373 bp, Glycine max
agcttgttgattatggggtatccatcacatgtggtactatgtggcggtcgggtgatggtgcaagacaattctccacatccacaaatcacacataaacccaccatcccctgttgtccacctccaactgagctcctgtactcccacgtagcccttatcctcgttcctctcaacgccgggtccccatcaatcctctcaagcttccacaatatccaagtaattcatcatccaatcgtcatgaactaacacagccaagaaaacagggcagaggcagaaaactctgcccaaaacacaaaccaaaatcacagctttccttacttaaagaccccagtaacatttccttcgttccaattcgttcaccgttggatcgactcga

SEQ ID NO: 17384 - DNA, 422 bp, Glycine max
  unsure at all n locations
tggaattgcatttgggcacctattttgaatctcctatgctgtccctatatacataaaacagtcccacaatcccatttttacaaaatcacattcacaccccattggggcatttcaccgagcacttggtgggcgcacgtttggtcataaattgcaagagaatgggggcaatgtggcaggccccattgcttcagcatacaacataggcctaaggccttctcacacaaatcctcaactcaacaaaacaagcataaaaacaacccaaaactgccccacaaatataagtacgttctcacaatttagagcaccaaaagatgaagaaaatacaccaatgggaagctaaaaaactcaaggattgaatacttacttgttggagtgaatagaaataccaaaaagaaagaanaatgcaaccaaaagtgacttgg

SEQ ID NO: 17385 - DNA, 382 bp, Glycine max
tgcttgcataaacattatataatcatcaatttgtcaaagctaaattcattcaatcgccaaataaggcaggcaaggaaataaaaatggaatctaaattctaaatagcccttgctaattaatatactacaatcatacgtaactaaacaccatgctacagaaaatagacatttgtctacttccaaggaagatgaggtgaagataagagctaagttgatatttcatatgagaaatcccaagtattggtatgatggcctctcttgcatagcattcattttccttcacatattccagaaattgaaacaaagcattttcttactgtaaattaaaatgtggtcagtctactcaaattggtgcataccttcgatcattggttttgtcagct

SEQ ID NO: 17386 - DNA, 422 bp, Glycine max
  unsure at all n locations
tcgcctcctgcgggtcccaccatctacaccgtccatttgctccctcaacaacccaagaatggtactcctggcctccctctgagtccgcagcgattcctgcaacgccacaccgagttgactcatatcgaaccaaaaaaagagttacgaattgaagaagtgatgagggacgcgagtagtggtaggctagggccacagagatctcgtgagctggaagagcatttaaacagaaaacgacttcttaaacaagaatatatatatatatataaaattaatgtatttaaaaattataaaaaaataaacaatttttttaaaaaaatcttataattatcgatggagaataaagtaatttgctaaggatcatctattcataatattaagtgctacattntcatagtttagtaattaatttgaacacgtatcag

SEQ ID NO: 17387 - DNA, 382 bp, Glycine max
agcttttggcatcatataaaatttatggtgatcaacaatcacatcacacttgcttttcatgggttgtgttgtggtgatcacaccattatctatgggttttttaacttttattttagtaattctactaaaattataacatggtatttttttagaacttgcattttagtttatttattatacaggataaatatatattttataaattaaaattcatgattaataaatacttttaatatataaattatattataattaaatccaagataaataaatatatatacaaatatataaattatattttaaatcaacaatgaacaatttagactgtgcatggtgtaaggttatttttaattattaataatttattttaaaaaaattagag

SEQ ID NO: 17388 - DNA, 419 bp, Glycine max
  unsure at all n locations
ntagcacgattgtgaaatgaaattatgcttattttatcattaaaactcaattaccatcgttcatttttatatttccctccttttaatctaccaaaatggtactgtaattttttatttacccagtctgggatttgtgcgcgaaaacattaggtttgtgaatatgaatacaaaaattacattgggatatatctttaatcgtattcatatgcctactaccaaccagctctttcttggacttgggcttaattctgatggaaccattaaggtcaacgactcattgattctgatgaaattaattaggtaaagaatattagttaggaaaatgctaatattgaaatattaaagatatttttttatgaaaaaagtattatcaacatacccttatcaagtggttaacaggtctaaatatgaactgaatg

SEQ ID NO: 17389 - DNA, 379 bp, Glycine max
agtttataaaagtccttctgattcaatttatgcattcctaactgtatgccatgagatgaagtgcaaaggttggacctcatgttagttgttaattattgattagtttaaacacttgagcttgagtgaaacagtgactatgaggcactggttaggcatccttccatgaaatctgtctgctgattagtttcattcagttgtgttgcttaataaaaatgctcttatctctcaaaatctgcatgtcttgtgaaaaaccattgattgagtcattgtatagatttcttatcatatgattaatgttttggaagcaaacaccctttgtaaataatcactgcattatttttgcaattgaggacaagtgagttgttctttatttgcttga

SEQ ID NO: 17390 - DNA, 408 bp, Glycine max
tgtgtgtaaaaaaaaaacttgaatttcaaagttaggctaagcgcacggtgccactaagcgagcatcttcgaaaaccaaacgtcgcttcgagaaaacaaaatggcttatgtgagtgtaattgcagttacactcacatttgttggaaactgctgaactgcctgcatcttctctctcgcactcattttactgcattttcgccttcttttgcatcaaagcatcaacgatacaagtaagttccttactcccttcattttttttttgttgaaccttagggtagaaaaccatagattttagttttcagtctttagggttttcataattttagagtaggtaaaaaattaggacttttcatatgattgtgttgtgtagatattttcaattgtcttgcatgtttgataatgcctttta

SEQ ID NO: 17391 - DNA, 377 bp, Glycine max
agctttgagcaaattcaaacgacaataacatattactcggatgtccgattgtgtcccgtagtatatcgagacactcaaaattcagaatagaaggtctgagtaaaatgaaacgacaataactttttactcggatgtccgattgagtctcgtaatatatcgagatgctcgaaattgaaaacgaaagctcgtagcaaatgcaaaccacaataacttttaacttggatgtccgattgtgtcccgtaatatatcgagatgctccaaattgaaaacagaagctctgaccaaaatctaacgacaataacattttactcggatgtccaaatgaatcccgtaatatatcgagatgctcgtaattgaaaacggaagctctgagcaaa

SEQ ID NO: 17392 - DNA, 403 bp, Glycine max
tattgtcgtttgaatatgcttagaccttatgttttttatttcgagcgccacgatatagtacgggacacaatcggacatccgagtaaaaaggtatagttttttgaatttcctcagagcatcagttttcaatttcgagtgtctccatatattacaggactcaatcagacatccgagttaaaagttattgtcgtttgaatatgctacgagcttctgttttcaattgcgagcgtctagatatactaagggacacaatcgtccatccgagaaaaaagtgaatgtcgtttgaatttgcacagagcttctgatttcaatttcgagcgtgtcaatatactacgggactcgatcggacatccgagttaagagttattatggtttgaattttctaggacctactattatcaat

SEQ ID NO: 17393 - DNA, 375 bp, Glycine max
tgctgctacaagtttatgtataatctaaatttagcatatgaagaacctgatttcagttttttcttctcccaaaggtgcttctggagaaatttatccaaacaagtatcaccttgataatttggttttaagtgaaaatgttactcagttaagtcaaattggggggggggattattatacaggacaaatatatattttataaattaaaattcatgattaataaatacttttaatatataaatcatattataattaaatccaagataaataaatatatatacaaacgtatgaattatattttaaatcaacaatgaacaattcagactgtgcatggtgtaagggtattcttaattattaataatctattttaaaaaaatt

SEQ ID NO: 17394 - DNA, 406 bp, Glycine max
tttcagcacgggtttggtgcctatatttatctagttctagtgttaaattacttaaaaatatttcacaagtgacttgtttgagttttgttggggtaaacatgttttgaaatgagcttgatttgtgtgtatgatgacgttgtatcaacaatatactgattatttattcctgtatagtaagatttgaagttatttgagaatgagattatcctattcaaattgatagatattgtatcgaattgtatgaattgaatagggaattttaagattctaacaagtcatttgtcagctttttgtgtttttgttcgtggcgatatgtttcccatggttattgtatatgagaaagtggttgaataattgaatagattgttaatttggtccctaattgataatcgtttgttaagttgct

SEQ ID NO: 17395 - DNA, 377 bp, Glycine max
atcattatacatagtccgcctttgcttgaccttctttatgcttaaaaacagaaacattaagcaaaagatcaagaggaattagtgggttaaaaccataaacaacttctaaaggagaacaattagtggtgctatgaacaactctattgtaagcaaattcaacatggggtaaacaagcttcccaagtttttaagttattcctcaaaactgtcctaagcaaagttcccaaagtcctattaacaacttccgtttgcccatcggtttgtgggtgacaagtggttgaaaataacaatttagtgcccaacttgcttcacaaagtcctccaaaaacgcagatcatgaagcctaggtataggatgcgtatacttaatggcgatgtta

SEQ ID NO: 17396 - DNA, 283 bp, Glycine max
aagcaggagggccacaataaacaaatataaaaagaggccaaacaaatcaggaaaaccgaagaaactgacaagccagaaatcatggtcaaaggagagcaacagagcgacagcgaaagccccaaaccccaaaacgaagatggcacagacggaactactgcacgcgaggcgaggaacaacaacatctgactctgcgtgaggctccgaaggcagaaatccaccaacgggggacaaacgaatccctcaagcatcagacaccggaaaagaactcgatactcagcgacag

SEQ ID NO: 17397 - DNA, 381 bp, Glycine max
  unsure at all n locations
attccagcagccaaggacccctttggtctctttgttaggactngaaatggtttgggcacatgaattaacaaatataatggttgttttaaatttcataaaaactctagtgcgattttttaatattctgtctttcacattaaagatctatagggtctggtttgataaacttcttcactccataataaatgttaaaaggataaatttcttctaggagaaaaaattacaagaaaaaaaatgaaataagttgttcaatcgttttaatgttttattgatattgtaaaatgacaatcaaaatggaacaaaagaatttactaaaacgtcaaacaaaacaagacggaggagggagtacatataaaatggaatattacatgatgcagaatg

SEQ ID NO: 17398 - DNA, 342 bp, Glycine max
tcaggatttcaaaagactgctctaacagcctactggtatgacttatcaccatatattgcatgatcgatcatgttttgatttttgactcccttccatgtgaagatgcctttgctattgaaggaggagaagctacagagcttaagttctcactgcttatgagaaactgctgaggggcaccggaatatttacttgaaagctgccaagaattacttggaaaagacaccaaatgaatcttatgtagaattcttatgacttctgcaggtgctatttaattttcagatgatgcatttgtgacgatgctagcacgcatgatcgcaatgttggttctattgatatagagat

SEQ ID NO: 17399 - DNA, 298 bp, Glycine max
tcaagctggacagtgtaggtgacatagcgaacaacatcatcttttaggttcattttttggcagcgaaggcgcggggaggtcaatcatgcacacgcgtgaacgacgtggtgtcgcacgcctgactttattcctcctcgagagtgacttgggatggtttgcacccacctattgttgaagcatactcctcacaccctatccatgccaccatgactctgggaagcataccctcattattaatgacattatgaccgtggattggagggcctacgtccttagcttgaacaacatcatactattg

SEQ ID NO: 17400 - DNA, 532 bp, Glycine max
  unsure at all n locations
caccccaacgccancacacagaacgagacaaccgaatgactagcgcacgaaacacatcnnnnnnnnncnaaggcagagnngaatgatgcgtcgctagacnccgcgannnanacnagnncccggggagncganagacgagacccgaccgcacgcaatcattttgagcgagacgagggcagcacagggagagaggagaccaccngccaccacaacaagggcggcccacaaaaccgcaaagagaacaaggcaaaaacgaacggggacgagaaagacagggaggacacccaaaacagaaggaccaacaaggaaagcacgaccaccagcctgaaatgccagcccaccagaagagaccaaaaccagagacagcccaagggagaccgtagatgangaacaagccgagcaaacatacagagacgcgcccaaaacggtagcactaggacgccagtcaagaaggcacggcacaaccaagactgggaaaactcgagccaccgaaaccgcacaactcgcaaaaacaaggcagagcaggccgacg

SEQ ID NO: 17401 - DNA, 295 bp, Glycine max
tttctttctatattatgcctatgaagaaattgagttgtggtgctgagttgtggccggactgtggaattacaataagtacttacgcgctcctttatttttttacttcagacaattgagcataagaaaacctaccttgtaagtatccatgccttaagcaacatacacactactttcgatttctaggttgaaatacaggctgctgatagctttggcacactgtcttcttatctccaccgtgtcttgtatactctgaatttttcactgaaatgttaactggataaaatagacatctgga

SEQ ID NO: 17402 - DNA, 606 bp, Glycine max
  unsure at all n locations
cgannaacgcnggggttttnnaactagaataccgtgagntacagattccngtctagcactantaccanagtagctncacagntcattatantagcatgcaaagacgtntatggtgggtagccntagagggggatacgaggacngattgctcncactngtatgattactcataggaanagaagagaccgtgtcgagtgcatcgnagacacttgatgtcgtcgatcgtatagtagtctcttcgacanagccgtgatcttatagtatgctctactctcctcatatancatgtatgctagagacagaatgctatgcgagaatcattatgtcgatgatgagcatagcggtgtgatattacttgagacttgaaactgctgtcaatatgtacaaagctgttaacgatggtggagtactgtactaaataataatatagttctagtaagatatgggtgtttgcgtgtgtcagtaactgtaccgactctcacaagtatggtaacaccgttcgaccgactattcggtcttcagagaatatgctcacctagaccatgtacattcgatatgcgagcacttatacggattaaaataaggcaaatagtgagttctgtactt

SEQ ID NO: 17403 - DNA, 376 bp, Glycine max
  unsure at all n locations
ttatcttcttaangaagttttcttaagaaagcttctcaaggaagctacctagtctataaatagaagcatgtgtaacacttgttgtaactttgatgaatgagagtcttgtgagacatacttcaaagttccacttctctacctcttttattccttcaatttcgtgctcccccctctctctttctctccctctttcttttcctccattgaagcatcctctccaagcttcttatccaaggctcatcttggtggtgaagctccttcttccatggcttattccctagtggatggtgcctcctctcacctcttctcctttgtcttccgctgcatctccatggtggaaaatcaccattaaaggacctcattgaagctcaaagat

SEQ ID NO: 17404 - DNA, 384 bp, Glycine max
attcttggaaggtagtcatacctcacaaaatatatatatatatatatatatatatatatatatatatatatatatatacatatatatatatatatatatatatatatatatgtttagggagagagataccttggatatgcgtgtgtgtagcaaaaaaaatctcacaaaatatatatatgtgtgtttaggtagcgagacaccgtggatatgcgtgtatatagcaaaaatatctcacaaaacatatatacgtgtgtgtgggtagcgagatacgtgagacacacatgtatatagcaaaatacctcacaaagatatacgtgtgtgtaggtagaaaaacgcctcgtgaaaaaaaagagagcgcgctagaagagaattagaagaaaaagt

SEQ ID NO: 17405 - DNA, 403 bp, Glycine max
  unsure at all n locations
ctaagcttaacaagttagcctccatcctcatttgattttatcctgaacggaccattcaatccctggaggaccgtttgaggtcatgtgtcttatagcaaaaggggagagctttctttcattgatagagttcacttacaacaacagttatcactctaccataggcatggctccctatgaagctctgtatggtaaaaggtgtaggacacctctatgttggctaaagccctgagaagacctcaccttaggacttgaagtggtacaacaaaccaccganaaagtcaagttgatccatgaaaggatgaggactgctcagagtatgtagataagttatcacgattagaggatgaaagacttggaattcgaggatggcgatcatgtattctagaaagtcactctgtggact

SEQ ID NO: 17406 - DNA, 383 bp, Glycine max
ttaatcttgaaagttactttcaagttaaaatttcttaggtagtgtgttcttagatcttgagatttgaaataaagaagaaaaaggaggaatagatgggttttgctcttgaaactagctttttaaaaggatattttttcaaagtgttctttttttttttgaagggccacaaaatattatatatatataatttcaaagaaacatagcagcaccagaggtactgctggtggttgatacatctgagaacataggaaaataaaaagcccaaaaaacaaaactgagaaactcagatacacctttcccatacataacagaagaaattcagttagccaaagtatcgcactatattggacgaccagtagtttaaggagtcactatagtgcctg

SEQ ID NO: 17407 - DNA, 409 bp, Glycine max
  unsure at all n locations
ctggtattggcacagtcgagaaaatttaaatctttcgtctctaccccttgtctctcactatccctttgtgtgtgagatattaagatctaagggagcataagatgcaaggttgaatgtgattatactattcttatgatccatcataaagagaaaagtttattccatatgaagtgaaaagttgaatatcccatgaaaccccatataaactgcatccaaatgaattgcagaaaggaaatcagtatgcaaacaaaattccccaaaagcactggttctattatcagtaataaacacaagtaaaaccaactttctaaaatcaaaacttgaaagataaaccaaaatcccaattgcaagatagcgcctataaacacnacctcaaagtccatagataaatgcctagaccttgccacat

SEQ ID NO: 17408 - DNA, 384 bp, Glycine max
ttcttaaaaccccttgttcattactaaacaagttgaaattaatcacaaacacaagcaaggtatcctaactacacacaagagataagaatgaaaaatagaaaagggaaagaaaaagctgggttgcctcccagtaagcgctcttttaacatcaatagcttgacgcattatcctgttatccaggataaaaaaaagttcctacttcaaggaccttcttctcaggtctcctttcctccatcacatgcactttaagacagacattttggcttggtggatctttgtcctcatggaacaattcaaagctgatcttctatgcccatctacagcatcttctttcctatgtctaccacacagcttgcagtagacatgaatgggtggccaagaatg

SEQ ID NO: 17409 - DNA, 431 bp, Glycine max
gacctataaaactaagctatgctgcaacattataatagaccccctcagcttctaaaccaacaacagcagaataattatgatctttcaagcaacacatacaatccagcttggagaaatcatccaaatctgagatggacaagtcctccacaacaacaacagcatgttccttcttttcagaatgctattggtccaagcaagctgtatgttcctcctccaatacaacaacaacagtcacaacaaagacaacaagcaactgaggctcctcctcaaccttccatagaagagttagtgaggcaaatgactatccagaacatgcaattttagcaagagacaagagcctccattcagagtttgacaaatcaaatggggtagatggctactcagatgaaccaagctcagtcccaaaattctaaaaaattgccttcacaaac

SEQ ID NO: 17410 - DNA, 380 bp, Glycine max
ttcttcacgatctcacacgtcgaactacatgtatccttcattggaagaactaagaggggacatgcaaaataaataactctgacactcaaataagtacatgaatgagttgagtatgaaattgaaaagggtgaaataagatctgatctttataacgtgagataggagtttcgagtccttgattgtaagagagttattacagtgatgtaacaactctagataattcctaacttgtaaataatatatagtagaaaaatcatagcttgtaaataatagttaatagataattcatcacttatagattatccaatggattatagataatccatttattatagataattcattactagtagataagtaagtacctgtaacttgataaa

SEQ ID NO: 17411 - DNA, 413 bp, Glycine max
  unsure at all n locations
tatgaaacctaaagaaaacaagaaataatatgtcttaatattacaatngatatgatttttgaaaagaaaatattataaaaaaacaaaactaaccatgttggatggcatgtgcttaaatctgtaataacagtagtaaaaacaatcttctttaaaagacccttagacctcaaaattcgaagtggaacgtgctgcatcagtggatgcacactgattattatatctggctgatatttcattaggcctttagcaacctcgctgtaaaaagagaaaaagatattttaactgtgacatttgatgttacatcatatttgagaagagatacacatgcacaagaaagtatttttctgaaacatggaatgcagaaaaagtcaataagttttgtctaatattaacacaatgcacaacatacattg

SEQ ID NO: 17412 - DNA, 377 bp, Glycine max
atcttatatctaatctggctaggaaccgttgacagtgatgtggaagtcctccttttacggacctagttatatatatgcttcaattcatactttcaaagtcaaaacagtaacattaaagaatacattctccttaagcccagttgcaccaaataataggtagacaggcaaaaagtttcttaaattacacaatatatagcagttttggccatatgtatcttttatctctatactccataaataaaggcacgccaatagttaatataacaaagagatcaaaaattaaaatctaacaactaagaggtaaataagtgaggtttagttatgaaggtgaaattagttcacgccaaaattctaataattagaaaaacaagacaagg

SEQ ID NO: 17413 - DNA, 406 bp, Glycine max
tagtgacataagccaaacacatggtattggctaatgtccctatgaaagcccatccatgtcccaggttccaagcaaacacagccattccccaccaccacacctgctctccaaagtaatttggatgccgagaataataccacaaccctttgtcaagaatagggacctccttgttctttctactcacaaagttgtaaagctgagtatcagcaatgtatgccgtgacaatgccagatacacacacaactatggctaccaagtcccacatgctcagaggctggttcaccgagtggatgacatagaacggaagagacaatccaatcagaaacacctgcaaggttgtcttgatgtaaattaaaagtaaaagcaagggaaaatgatgactaagagtaaccttaattacctgctg

SEQ ID NO: 17414 - DNA, 381 bp, Glycine max
tgtttgcaagcttctgaaatcttggaatttaacataggagcattttgattacaaatttacaatctcgaggaatttactgaggtgaggatgatatatgcagtacgattcacttgcaaaataatctagatgaaaacaaaacatattggtcctaaaaactaaaccatattgattttctgttgtgaatgcaatcaattgtttaaatatcattcttcttaatttttttttatcttaaaattgcatggttactagtctatttttttgaaaggctaaggaaaatggttactagtctatttaagattaggagtttaggactgtcatattttctagaataacattttgcaattgctaaattccctgaagcaaaataggtgtttgaacttt

SEQ ID NO: 17415 - DNA, 421 bp, Glycine max
gctatcaggacctatgaaactcagctgcccccactaccaggcaagttaggtttctttctccagaagcaaccgccttctggaggaagaatctggaaagcccaagtgggcttgattgctatttgtacccccctttttactaaatgtacccctctttaccttttgtggtgattctttttccgtaacgttacgaaactttatgaattttgtaacgatacttattttctttccgtaaggttacgaatccttacggatcatgtattgactcttttttagctttcgaagaagttacggaaactcacggattgcgcaacaacacctccttttggttttcgccacattacagaatttcacggatcccgtaaccctgtttccttttgatttccggcgcgtctcacgacttacatattgtgcaacaaaaggg

SEQ ID NO: 17416 - DNA, 383 bp, Glycine max
atcttatcttgacatacttagtcacacaagtgtattttttaaaaacctttgtgaaaatattattttatcaatcaccggacaacaatgtttttgttctcatcaaaactactttttattcattgaacgacattgttggtaacttggtttgtgcacatctgcttgtgaaaaagttttcatttttatctaacccccttctagtgtgatatctattatttcataaagcctctatcaagatccttgaattttaagttggacagcttgctaataatttggctgaaaggattaccaaaaacatttcaaccttaactcaagaaatccaaaaagtggtaactctaaggtggtgggagatccttgaatctcctatcacacgtcaaactaatgac

SEQ ID NO: 17417 - DNA, 411 bp, Glycine max
  unsure at all n locations
cacaaattaaaatctatgaccttagagactttcggttgtttttggagactngaatcacacacgtgtcatcttcatgttggtgaatgcacaatcaccttggaagatgttgctcttcaactgggtttacgcgttgatggaaaatcaattactagcccaacatattatgattaggaacatatgtgcacataatatataggtgttgttccccccatagaatgcattaatgggatcaacacttaaactaaaatggttgaaagaaaacatgtttactttccaagaagaacccacaccacaataatgagaaacccattattgagcatatattttatgatcgatcggtagggtgtcgatgcctgacaagtcagcgaatagaattcacctaatgtatctacctctgttagcagatcttga

SEQ ID NO: 17418 - DNA, 381 bp, Glycine max
  unsure at all n locations
agctttttccagggccaaattctcgtgcatgcagaggcttcttcaagaaaaactccaaactccctttgcaaatctgatttcaggcttaaataggtggccttgttcgtgctcgtgcgcatagcgcacgtatggaccgcttagtgcacgttagtaatttttggcttagcgcacttctctcgcttagcggatgagctaaagcagcgcgcttgatgacctggagcgatgcgctcagctaacctgatagctcatcttcttctggattcttcctcgcgcttagccactgagtgtcacgcttagcgaatgctcactaagccagcatattggcttagcgagaaggtganaacaacacttttgccaatttgcctaattaacctaaaattg

SEQ ID NO: 17419 - DNA, 419 bp, Glycine max
  unsure at all n locations
agcttaaatgttggttntgtatatcgattcttccataattacacgtctttgttgtaaatnntgatacagataccatgatacttgatattttaagtaaattaacatttggattcaatcatgcatgtgtattttgttgtttgaaagttaacgattgcttcgaatagagaggcaaaaattaaattaatttgttaatttatggtatattatgtttaatttgatttgttgaggtgtaaagtttaactaaaatgatatttaaggatggtaaagtgccttttaacgtgcgattcgcattcatatttttaatcttaacatctataggcaaaaattaaattaatttgtgccctattactatcctaaggcctaaatatgctgctcacccagaacaccgggtcccttgctttcaagtttcaagagtcaag

SEQ ID NO: 17420 - DNA, 356 bp, Glycine max
tgcttttatcctaagagaagggtctttgatattgcattgctatgactttctaataaacttggtgaatgaccaaaatgcccctgttctttgttactgaaaagagtcaatgcaatgaaagcacgcgcagtatgctaggggtgttgtcgacatgaaaagtcaaacctcgccgaggcactcaattggctttgatggaacagcaagcaacgaggggcatgcggcattgaaataatgctgctatctaattaatcaaatagaattaaaataataaacatgttgaaagggatcatatactacattactagttattaaggttatacacatacacacctccataaggtaggttaagtagatccgta

SEQ ID NO: 17421 - DNA, 414 bp, Glycine max
tacatcaataggaataataataaaaaagaaggcatatattttctgccctctatagctctacgattgtataattggcccctcaaaaaattagttacacatttatcttataaaatttaataattttgaccttttgttattttgccatcaaatttttaacataaaggactaatgtgatatttaagtgataaaataacacgaatacattaatattataaatgacatgatattttaaatatagactaatatgacatggattgttcaaattgtgatcattgttactacgtcactaaactattagtgcaagtagcatatatattagattactagtttattttttatatcgcgtcaatgctatattattacttaaatatcatgtcaataattgttaaaaatcactaacgtaaaaaaatgtgg

SEQ ID NO: 17422 - DNA, 385 bp, Glycine max
ttgtatgattatggggtacccatcacatgtggtactaggtggcggtcgggcgatgatgcacaacaagctttccacatccacaatgcgcgcataaacccaccatccccttttgcccacctccaactgagctcacgtactcccacgtagcccatatcctcgtttctctcaacaccgggtacccatcaatcctcccaagcttccacaacatccaagcaaaacaacattcaaacagcacaagctatcacagccaagcaaaacagagcaaaggcagaaaactctgctcaacacatcaaccaaaatcacagcttttctcacttaaagaccacagtaacaattccttcgatccaattcgttaaccgttggatcgactccaaaattttactgg

SEQ ID NO: 17423 - DNA, 313 bp, Glycine max
  unsure at all n locations
tgattagagaaattggtgcggcagcttccatgtttatgttttcattctaacantgncgagggccaccttttcgtggctttgggtactcaatttcaacttncattgaaatgtaatgtaattggatctatcttgatgtaattacaacataaaaatgaatgtcatggattcaagtgacgctcggtcaagaaataaaagttgcattcagtttactaaagaggtttccctttatgagtatttaagttataacataagcacgaaatggaggatatttagagtgtacgctacaaatttatcgatgacactacaacttatg

SEQ ID NO: 17424 - DNA, 383 bp, Glycine max
ttcttccatcaatcatgaaagtagttgcttgtaacaacaattacaaaaagattgatcatatcgggttctttattctttatttgtctatttagtaggatttctttgtaattaataaattatcccttttaatttatttgtctaccaacattgaaatccttcattcatggttacactttgtttagagattaagaaagagtttagatttagaaatcttttgtgcaaaaagttaaactattttaataaagtgttcattcttcatttgttttgacctcttaattattttttatcactgcttaatattagtttgggtagcaatgaccatgttggaatagaccacgactatggatccggggtggacccacattcctaagccttagcctact

SEQ ID NO: 17425 - DNA, 368 bp, Glycine max
aaactcaagctaaaaaaggcatgcgaagtgggtggaattcctagtgcaattcctcttagtcatcaaacataggaagggaaaaggtaatattgtatccagtgctctttctcggcgtgatgcatcactttctatgcttgaaacaaaatggattggtctagaatgtttgaaaagcatgtctgaaaatgatgaaactattggagaaatttgtaaaaattgtgaaaaatcctcacataatggtttctgtaaacatgatcgcttacttgtcaaagacaacaaattgagtgtgccttaatgatatagtagaaatacgctcgtttgtgaagcacatgatagatgtttaatggggcatcttggggtccaaaggactc

SEQ ID NO: 17426 - DNA, 372 bp, Glycine max
  unsure at all n locations
atcttcttaanagcacttgactcgatttgcctaattctctccctactcacacccaacatctcccctatctcttgcagggtcttcgtccttccatcatccataccaaatctccatcttaccacctgcctctctcttgcattgagactgtccagagcctcttctaggtccttcttcatgaactgcttaaggagctgttcttcagctgtttcggcatcaggatcagaaattacttcctggtaaaaaacacacaagtatcagcaaaatgaacatcaaatgaaagcaaagagttttttttttttttttctggagcaaaaatttgaacgagattaggacagactgagggtttaagattctggttgatcccaatctttt

SEQ ID NO: 17427 - DNA, 413 bp, Glycine max
acccagcttacataaaacataaaagagatcgagtttgtatgttgacctcccaacatgattcaacgaatgatttgcatattgatcctctcaaagacttataatttattattaatccttccttgccaagacctggttagtacgaactttgggcttccttgccaatatgagtatgttcctctcaaagacttatgatttattaattaataacttgttttattaaaaatgattatagttataaaactataaacaattgtatagaaaaggttattctaaagacttaattcggtccctgattataaatataacttggttttattaaaaatgagtttctcagttattaaaaaatgtaagtaagttattcaattgaatccctcaatgattgaaaaattgaaaaagtagttggtttattattt

SEQ ID NO: 17428 - DNA, 381 bp, Glycine max
ttcttgtgtaaagaattaatgtcaatttctcttcaattttaggcaaaaaggagttattttgaagaagtgctaaagttgacgtctcactaagcgagctcaatgcgcttagcgagtgtcatccgcaaagagaggcatcaacgcgcatagctgataggaggaatcaagaagggaatctgtcatgctggcatgcactcagggcgtcattagcttgctccgtgagtcgtttgtcaccttccaggcttagcgcgagtttcgcgctgagcgattattcacttactcgcaccaagcgcgagaatggcattaagtgtgacgtcgaggtcagtgagcccttttttatgcctgacttgtggagaatgtaaggggggtgaagagagtggtgac

SEQ ID NO: 17429 - DNA, 413 bp, Glycine max
  unsure at all n locations
ntccctcttagacaacctccacattttctcttttgttaaaaggcacttgctagcattgccacacctcttgggcttgagtttattcctcaagtaaagaagttgttggatgagggtttggttcgcaagagcttaaatccttgtgcttttttggtgcccaaaatacgtattattaggcaccaagtccctaaaataggtggtatgatgaatgttttgagtggtgcaacactcttttgtaaaatcactcatgcacccaacatcttcatgatttgtgtacataaggacccattaggtaggtttgttcttatttttggttttaatacaaacttaagtgctcatatgggacaccttatgtttgtcatatttttttgtaggaataatcaacacanaaatatagaaaaaggtatgctttcttg

SEQ ID NO: 17430 - DNA, 384 bp, Glycine max
  unsure at all n locations
tattcttcattaagaggcttcctctagaagcttcctcgtggcttctttgagaagttttctcaagaggcttctttgagaagctacatccttatctatccatccctctattaactaaattaacttccttaaaaataattacggatgaaaataacgcaacaaataatcaaacatcaaacataattactaataatatatagatatatatatcagggtgttacacatcatatattgagacgctcgaaattgaacaatggaagctctcgagaaattaaaattgtcataaattttcacacggatgtccgatcaggcacatcagatatcgagacgctcgaaattaaaaaaacggatctcgagaaattcaaatggtcataattntcacacgga

SEQ ID NO: 17431 - DNA, 412 bp, Glycine max
tcaccggatgatgccgatcgaacatttcttaatctatcttttccaattgttattcagggattgaacagaataaacaatggccagtgtcggtcgttatatggccccgactgatatctttcagccgacattgcgcaatttcttttacaaacgctggccgataatgttcttttatttacggtagaggaagttttttgttttggtgttgcctaaaaaatttacaacgtaggacggctaggtttttccgtgcgagctcaaccgagggttcgttccgaccgacactggcatgttgttcttctcatttatgaggcccataaaacgttggcctaccccggcaaaaacaaaaaaaaacattattcacggaaattgatcgagaaaattgatagctaacgtctgcatggagagttgaccgatc

SEQ ID NO: 17432 - DNA, 380 bp, Glycine max
tattttttattatccggaatcatatcatactgtttcctataattctaatgtatatgggcatggctacgccatggtttggtctcgctgaagcatacatgacacggaagatatacaacgaaaaaatgaaaaagatgcacatgaagaacacgagggagagaaaaactccaacatgaagatttctactatcaaaacgggtttcgaggataaaacatcaagtgggtgtttctcatgggtctccaaacagcaacacaagaaaaattctcgaatttcagattacaacgaaaccctatctgctgccaattcatgattgacgatgttgggcttttatacatcttaagtactaattaatgtttctttacatgtgtcatctgtactagaga

SEQ ID NO: 17433 - DNA, 352 bp, Glycine max
acagaaaggcactggctgtttttgtcagacacagtgttaccagattcgctatcacttatttaactgtgcacaagattgcttcagctaaaggccaatcttagaatgatgtttacttcggaagaatggtagaagactaaggcagctaaagagcccaaagggaaaaagtaacggatgtgggtcttatgccatcattttggaatgatactaggtacactataacggccctaacctttcgtaagtgagttgaggtttgtggataaagaataaaacaaacttctcgaggagtttcacctctgaagcattggaggaaaatataaggatatctctgcaatcattgataaacgatgggatt

SEQ ID NO: 17434 - DNA, 412 bp, Glycine max
cagctccacccgggatccttagagtcacctgcggcaatcttcttttcgattcattctatgcacccgtagtggtccacattgtgtttcgtgcatttttattctcgttttgcttactttttataccccctgttgacgtgcttaagccattttacttaagtcatttctcgcttaacttaaaaataaaataaatttccaccgaacgtttgaattgtattatccattaacttcggttaaaataaattccgaccgttcggtcgtgccgtaaccacgttggaaatcaaaaagaggtaaaaaataatataataatcaaaaagacatcttttagtaaaataaagcggaaaatcaatcggacgttttctctttgggatttctcattcttaatcgaattgattaataactaaagtgaaactaa

SEQ ID NO: 17435 - DNA, 415 bp, Glycine max
tcttatccaaggctcatcttggtggtgatgctccttcttccaaggcttattccctagtggatggcgccgcctcttacctcttctcctttgtcttccgctgcatctccatggtggaaaatcaccattaaaggacctcattgaagatcaaagatccagcctccatagaagctccacaagcaagcttccatcaaagaccgttgtcctttaccacctctagcattgttgtggtctaggaattgtcatcctcaggaaaagcagtggctaacttcatatattagtagaatgtattagtacaaaaacttgatgatgttgaaaagagactatgttgatataactaaaactgaacatgtagcttctaatgactttgtaatgtcctacattaatatataattgttaggctgcatattcacataat

SEQ ID NO: 17436 - DNA, 371 bp, Glycine max
ttctttcacatggatgtccgattcggggacataatatatcgagacgctcgaaatcgaacaacggaagctctcgataaattcgaatggtcataacatttcactcggatgtccgattcggggacataatatatcgagacactcgaaattgaacaacggaagctctcatgatattcgaatgctcataacatttcacacggatgtccgattcggggacataactcatctagacgctcgaaattgaacaacggaagctctcgagaaattcgaatggtcataagatttcacacgaatgttcgattcggggacataatatatcgatacgctcgaaattgaacaaccgaagctctctagaaattcgaatggtcataaca

SEQ ID NO: 17437 - DNA, 358 bp, Glycine max
  unsure at all n locations
tcagctntgtccccaaagcttcatgtagactcgttttaaatcgcgaagtgaacctcggatccctgtcagatacaatactacaaggaattccatgcaaccttactacttccttgatgtacaactacactagctttgccattctatacttcatccgaatgaaatgttatgaccattcgaatatctcgagagcttccgttgctcgacttctagcgtctcgatatattatgtccctgaatcgaacatccgagtgaaatgttatgactattcgaatttctcgagagcttccggtgttcaatatcaagcggctagatgagttatgtccccgaatctaacatctgtgtgaaaagatatgaccatt

SEQ ID NO: 17438 - DNA, 375 bp, Glycine max
tgcttgcagcgcatttctgatgaactttaccagaaattgcggtaggaggtcccaggactgggaagctcccagtgaagggttctgcctttcttacagctgaaggatcatccagatcaagccttgctataagttcaccagcctgcaaaaggtgatacaattttattatctttttcaatttcaacaattgtacttcctatgtggaatagaatgctatatacctgcattgcttgaccttcagacattttgaaatgaataatcccagaagcaggcgaaagaagaggcatgcacattttcatgacctcaacttcagcatacggtgtgtcagcatcaacatgactgtcatctgcaaccaaatatctcagaagcttgcatggt

SEQ ID NO: 17439 - DNA, 409 bp, Glycine max
ttgaagtgaaaggatgtgactcttcacatttgaatttgaatttcagcgttcaagggcactggtaatcgattaccaaaacattgtaatcgattacagctttttgaaaataattggaacgttgtaaattcagtttgaaaactttttcaaactcattttgctactggtaatcgattacaacaatctggtaatcgattaccagagagtaaaaattctttggtaaagggttttttcaaaaactcatgtgctattcaaagttttgaaaaactttttaatacttatcttgattgagtcttctctttattcttgaatcttgatcttgatttttgagatcttgaaccttgaatcttgattcttgtctctagactttcttcttgagtcttgaattgttcttgatttttatcttgaactc

SEQ ID NO: 17440 - DNA, 381 bp, Glycine max
ttgtaagttatatattcaatatattttatatgttttatttatgtacatgtttatattttgataaatgaataattttaggtagtataagtcaatatatttgatatcttttatttatgtacatgtttatattttgataaatgaataattttaggtagtataagataataattttgtatagggctctttgtattgttaatgttatatatgctagattatattttgataaataaatagttttaggtagtataagattatagtttgaattgttaatgttatatggtagattagatttaggtttatatgataaattaagaatacttttacatactctaagttattaattttatatggtagattaggaatatttttaattttgatatg

SEQ ID NO: 17441 - DNA, 419 bp, Glycine max
  unsure at all n locations
tgtgtctaagctgactatgtagctgctcaatatcttagttgttaatgctttcatggggagcaagagcaattgatggagctgaggtagaagctgaagcacagttgatgattggaatgattatctgcctaatgtcaaagtcatcagagacacacacccacatctntaattggaaaagttcatcaatcctcttatcattgaacaccaactttgcaagtgtagtcttccccatgcctccaagacccactatgggaataacacacacacttttatctccatcaccatccccatgagggtgaggttgcatcaaaagcttgataatttcttccctatcattatcccttccaatcactgctgaagcatcaatatgtgaataagtcatttctcttctttgcacaagtctgtggtcaacagaaatcctc

SEQ ID NO: 17442 - DNA, 340 bp, Glycine max
atctttgatcattaatcctgactcgccataagccttgatccatggcgaaaatgccacttcttatcctcggaaccctacaaaataacgagatggagggagaccactctactgacaatggaggtggaatactcacaatccaaggagatgagacccctatcctttggtggtgcagagcttctcgatgagagccatgtttctccgtcggccaatggaactatgagggagagagtgttacctttgaggactgcgcctaggccaataaaccacactagatgtgctgataggctgttggactatactatatctcaccgggactgatgtggagcaaatgaaccaaaca

SEQ ID NO: 17443 - DNA, 375 bp, Glycine max
tcgtcagccactgtgcagcgcagcgataaaatgctttacgctgtcgaacatccaacctaaaagcgagagccggatgagatgcctcggaggttcaacacttgaggaaaagcgtgacggactgtgtctggactaaagcagacaccccatgagcaagcttctgctattcagtcgggcgatatgtccggggagacgcctgagcgtgcctatactgtacgactctgatgaggacactcaaagtgaagacaatggagccttgaagttgctcaaggctcaaacggatccctatggatggtttggcatattacgggactcaaggctacgttcgatctgcacagcataagagatataatgcgctatgaccaacagcatgcacca

SEQ ID NO: 17444 - DNA, 386 bp, Glycine max
tgtcttatgatgatgaatcaagttgattcaagtagttttgatgataacaaagatgatgacaaaaagcccaagagaatgatttcaagattgagtcaacaagtttcaagaatcaagagaagtttgattttaagattcaagagaagatgaattcaagattcaagagaagaaatcaagaagacttcacaagggaagtattgaaaagatttttcaaaaaacaaacatagcacagttttgtttttcaaaagagtttttctcaaaattttctaagttaccagagtttttactctctagtaatcaattaccagtttcctgtaatcgattaccagtggcaaagtttgatttcaaaagctttcaactaaatttgcaacgttccaattgatttcaaa

SEQ ID NO: 17445 - DNA, 413 bp, Glycine max
tgtaaaagtccttctgattctatttatgcatttcttactttatggcttgagatgaagttcaaagattggacctcttgctagtttttattgatgaatagcttaaacacttgtgcttgaatgaaacaaaagttttgagactgtggtttaagctgctttccttgatatatgtcttatgcctaacttcatctaattgtacaggttacattttattcttctctttgaacaactgcatgctttgtgaaagacaagtgatgagggcattttggttcatccttttatcatgcaatcaatcaaaactgtaaatttgggggagttcttagtcgatgaatacgactaacttttgtgtataaaacctgtgtaaattgtatcaaaatcctccaatttatggttattttgtagtgttgtaattactt

SEQ ID NO: 17446 - DNA, 386 bp, Glycine max
  unsure at all n locations
ttcttttccctatacatctcttttataagacttaatatagactacaatttattacttttggttcaacgttcgtttgagagctttccaataaaataacaaacacacacttaatcacaataaacccaaaaaccttgaatgcaggaaattaagactaaaagtatcatcaaggtcaaccgaggatttccaagttgttttgcttgaccaaaagatacactttcaagacaaaaagaacatttttaaattaatgaaattcaaataggatgttttttttaagggagaaatcaaactccgatattaaaaaatttataataactcacttgttacttaacaaattgagttaaatctctttaatatattntttaaaaaaaaaactaaaactaaaaccg

SEQ ID NO: 17447 - DNA, 422 bp, Glycine max
ttcaactgaatttacaacgttccaatcaatttcatattggtgttattgattacaatattttggtaatcgattaccagtgtgtttgaacgttgaaattcaaattcaaatgtgaagagtcacatcctttcacaaaaatgctttgtgtaatcgattacaatgatttggtaatcgattaccagtgataagttttgaataaaaatcaaaagatgtaactcttccaatggttttcaagtttttctaaaagtgataactcttctaatgtttttcttgaccagacatgaagagtcaataaaagcaagaccttaacttgcattttgaattacattttgaatacattgatttcaatcctttacaacccttgagtctctttgaacatcttcttgaattttcttcttcttcttcctttgccaaaagctttctaa

SEQ ID NO: 17448 - DNA, 383 bp, Glycine max
  unsure at all n locations
ttattcttcttcaactgcacaaggctcttaatatttgaagagtatccttgtggaaccttcacccgacgaagacactgacaaaaacttatctattccttcttggacaaagtatggcaggctgggggcaagtaaattttcttcccatcagaccttggatgcaactgtgatcgtatacccatatcagctagatcttgacgggtattcaagccatccttcgtcttgccttgaatgttaaggagcgtcccaatcacactgtcacaaacatttttctccacatggataacatcaatacaatgtctaacgtcaagatcacactagtatggaagatcaacgaaaatggacctcttcttccatatgcaactctgactnttatccttcttttg

SEQ ID NO: 17449 - DNA, 417 bp, Glycine max
  unsure at all n locations
tgcctntggtttagacatgattgatacatgatttggtacttgtatgaattgatttgggcaagattggatgagaggaagtgggattttcgaaatctgcacttatgcagaattttgctgtcaaaataggtgcagcagaattttggctttgtgcagaaaaatgcttgtgtgtggttggctgtggaaagtctagtgcagaatgagttctggatgtttgctagtagatcccaacggtcaaaatgtaggcttatgcactatagacttccagtaaaattttggagtcgatccaacggttaacgaattggatcgaaggaattgttactggggtctttaagtgagaaaagctgtgattttggttagtgtgttgagcagagtttttctgcctttgccctggtttgcttggttgtgatagcttgtgct

SEQ ID NO: 17450 - DNA, 383 bp, Glycine max
tttatctttgaacaatatacttggccttcatttaattgtctttgggcttggcggccacgctcaacaaagtactttcgacacctactgtacgttgatttcaccaatgttgttatgggaatgttgcgacaatcctttaaaaccttattgatacattctgagaggttcgttgtcatgtggccatatcgacgtccttctctatcgtgagtcatcgtccatttttcctttgagatgcgatcaatccatgttgctatggctagactcagttcacgaaatttttctaaattttgataaaaaaatgtgcttgcatggagtgtaggctacataaaattagttatgaataaaaattttaagtataaatgaaagtaaaataaacgtgaccatca

SEQ ID NO: 17451 - DNA, 381 bp, Glycine max
tctataatatttttgcttgattctctgcatattcttctacattctaagtttctcgtacttgaaacctttaacctttgatgttattttctccttctccactatgagggaaggtttctggttccaattttttccttaacttctttgtgtgtgtgggtgttttgggtttggacttacttagatggaagtttacatgtgggtttttttataattatttttaaaactttttgagagaaatgagggtgggtttacaaagagagtgagtgagagaagattaattaataatagggaagttataactttctcctttatctgatgggattcaaataacacctttttaaactggtgttagtgcagtaaacatccatatatggtacatgctcc

SEQ ID NO: 17452 - DNA, 380 bp, Glycine max
  unsure at all n locations
tttatcttgaatggtggcttanggagttgaggctgacaagcccaaattttgggctttgtgatgaactcgctaagcaagcttacctcgctaagcgagttcatacgttttgatgaatttctgggtttcaggatgaactcgctaagcgcgccttgttccgctaagtgatatcatcaaatttgtttaaatttcgtcattttgtatgaactcgctaagccattgcactacggcttagcgagtctttgaattttgcttttatatttctgggttcgtatgaactcgctaagccgatcatccgtgcttagcaaacacacttagatagttctgaaacttagaggctntttgcattccctttgtggctcgctaagcccaaatacgtctct

SEQ ID NO: 17453 - DNA, 409 bp, Glycine max
  unsure at all n locations
tgttcttgattnttcctcagttctttaactagctttgaacaatatacatgtccttcatttaactgtctttgggcttggcggccacgctcaacaaagtactttcgacacctactgtacattgattcaccaatgctgttatgggaatgttgcgacaatcctttaaaaccttattgatacattctgagaggttggttgccatgtggccatatcgatgtccttctctatcataagccatcgtccatttttcctttgaaatgcgatcaatccatgttgctatggctggactcagttgacgaaatgtttctaaattttgataaaaaaaaaagtgcttgcaaggagtgtaggctgcataaaattagttatgaataacaattctaagtatatatgaaagttaaataaatgttaccat

SEQ ID NO: 17454 - DNA, 381 bp, Glycine max
tattcttccatcagcagactcacaactgactagccgaaagtctcaacctgctctgataccactaatgtaacgacctgactcatcgctacaatatcaccattctaaatcgcgatcatttcaaattttaaatgaaaaatccattaattttcttatataaaaaaatgaaagtcatttttgtgttgacatacattcaccaaacaacacacattacttttcttatataaaaaaatgaaagttatttttgtcttgacatacattcaccaaacaacacacattacttaagtggatacgtatatattagtatagtaacttagtacacatcattcacataatggaaattaaacttgttcatacatataattcaaatatgcgatttacatc

SEQ ID NO: 17455 - DNA, 405 bp, Glycine max
ttgatggagagatatggcctcctctagtttctcattcttatacaagaatacaacagatttatgaacatttattttttgtcccgagccactacaaaagcatacataatagatctgataacctaagcttgatgtacagaagcctcaaccacgaattatgtcatcgatgaagaatacatgcaccactgtgactcctgtactattcccaaaccagaagggtttgcaattaccctcattgactgacttttaaatgagatatgctaggctctccatgtgcaagacaaagaggtacgggggtgaagggtccccttgcctcagtccccatgtaggagcaagagaattgcaattgatagctaacgaagtgctcatacaattagagagaatatcagtcatccaagagggaatctt

SEQ ID NO: 17456 - DNA, 384 bp, Glycine max
tcttctttcatggtcatcatatacaagattaatctatgttacttatattttatctattaattcttttttatcaaagttagtttttcacaacaatttcaaaatattctttatttaaaaaatatgaaaaaaactttaattatttgtaagaatatcctcataatttagtatcttacttaagtacataaatgaatttataactatatttttcctctttcaataaaaatatattttcttgaatgttaattttcatcatcataataataatttataggattaattaagttcttactcattcgactttttcatattataatcttgtgtcccttacaatattgttaacagcttttatccttcattaagttttcgtcactcacttttagtccc

SEQ ID NO: 17457 - DNA, 415 bp, Glycine max
tggtcttaattataccaagatagatgtttgccctatgagttgcatgttgtattgggaagaagatgaaaatttgcagatttgcaaacattgcagaaaatctagatggaaagcaaaaggtaataatggtaaaaagaatgtactagcagatactttcctttgaaaccaaggttgcagaggttatttgtgtgttccaaaatagcaaagtccatgagatgacattttttaaatagcaacccaaatggattgttgaggcatccaagagttgctaatgcatggaaaagttttgatcaaattcaacctgaatttgctttagaacctagaaatgttcgccttggccttgcaagtgatggcttcagcacatgccgaaccatgaataataagcatactatatggtcggtgcttctaattccataca

SEQ ID NO: 17458 - DNA, 382 bp, Glycine max
  unsure at all n locations
attctttacattgggttacaaagatgaacgaggatggaattgaaatgactatagtcacatacagtataattgtagggggattcgctaaaatgggcaatgctgagtaagtaaaccagataaatattcctcattactgcatctttgtattggatgttcgtacttgttagatattcttttgatcatataccgactctcctgaaagattaagctattaagtgaagctatataaatggattttgtctctaactcgtcccattaacttgggctcgatgcacagctaatatacatgcccactttaattgtgctgttntttttttgtaaaaaaaattataataattntataaagaatgtagccagcaagggttcaatttggactacttgg

SEQ ID NO: 17459 - DNA, 399 bp, Glycine max
  unsure at all n locations
ntgtgctccaactcaacaggtaggtgatttgatttattatagaccaattggaagggaccaatcctttgtatgctattttgtatgcccacaaagcttcatctagtttttgggaccaatccttccttgactgagcaattgttttctctaggatctcctagaattccctattagagacttcagcttgcccattggtctgggggtggtaaagtgaagctaccatgtgtttgacagtatagtgttggaggactttcttgagttgggaattacataaagaagatcctccgtcacttatcaatacccttggtgatgcaatcctaccccgcaagggcattggatagaaaactccaagtagattgggccagatatgcaagagaaggccctatggttcttatgagcctt

SEQ ID NO: 17460 - DNA, 366 bp, Glycine max
  unsure at all n locations
atctntgagccaaaatcctgactcaccataaaccttgacccagggtgagaatgtcaatccttaccctcggaagcaaaaaaagaatagaggggaaatttccaatcaaagaaaaagagaaggaaaatttccaatgaaagccaaaaaagaaaagaaggaaaattccccaatcaaagagtgggagaaagcaaaaagaaaagaaaggaaaattcccaatcaaagaatgggagaaagtaaaaaaaggaagaagaagactgaaagaaagctcctgatcaaggatcgaaagataacataagatatgtgcagagaggtctttggaccggacaatatctgaacaatacagaattgccaccaaatgaacgataaaag

SEQ ID NO: 17461 - DNA, 404 bp, Glycine max
  unsure at all n locations
gtgcggacttggactccgccagttttggttctatgtgggaccaaaaagaggctaatctgagcattctactcggacgactgacaaaactgnggcaaatgatgatggtgagaaaaaaggagaaacccatgctgtgactgccattgctatactgcctagtttaccaccaacccaacaatgtcattactcagccaaattcgaacctactccttactcaccacccatctatccagaaaggccatccctcaatcaaccacacagcctgcataccgcacttccaatgacgataaccacctttagcacagaccaatacaaataacaccaacagataggaatgttgctgcacaagcctatagggttcaccccaaattcctgtgtcatatgcgaaacttgatcccatatccact

SEQ ID NO: 17462 - DNA, 385 bp, Glycine max
tgcatgcattctttgaattctagtaaaaaaaactccacaaacatattctaatactcatgcaccttttacattcaaaaccggaaagttagattcctaggcatgagtcatccttttggcactttagtctagcttctacaaactacccacacactcacaatgcgcacaatttatttcgcaagctaagttcctcaaaatcatgcgcaaatgcaattgaggcatttcaccgaacacttggtgggcgcatgtttaagcatgaaaatcaagggaatgggggcaatgtggcatgccccattatctcataacgcaccctaggccgaaggccatcccctacaacccctcaattcaacaaaaacaagcaataattcaaggataaatccctcacgtt

SEQ ID NO: 17463 - DNA, 378 bp, Glycine max
  unsure at all n locations
tctcccctatnttgctataaataggggaagttgttataagaaaagggttcagccccttaggcacttctctctctttcgaatttgcttggaaaaattatttccgcgaagaaaatccaagtcgaggcgcttccgaaacgttttcgtaacgttttcgtaaggaatttcgcgaaggtttcgaccgttcttcgatcttcaacgggtaagtacctcgaaccaagcttttcaattcattctatgtacccgtggtggtccacattgtgtttcgggtatttatattctcgattcatttgctttttatacttccttttgacgtgcttaagccattctatttaagtcatttctcgcttaacctaaaaataaaataaatatccaccgatc

SEQ ID NO: 17464 - DNA, 364 bp, Glycine max
tgtttctaaaggcgtaagaagcaattatggagatgcaggaagcaattgtctctaaataagggtgaaatccaaatacaccttcaaaattcaaggtggattgacatgcctcttttttgccccagttgcacgtcaaaaacaaaaggcaagttcaatgagggtgttactaggtgcacccaacaccattgcttgtacatccaacaattcaagtgaagtggcaaaaatatccttcacttaaattttaaaacccctccctcctaccttgcatttgtatgccgcaccagctccgttcttgcccttcttccttcgttttgcgttttgagccatgctgccacagttaaggccagctccaccactgttatgtcat

SEQ ID NO: 17465 - DNA, 418 bp, Glycine max
ttgtggcactctgttacacacgtcagccctccatgtcagttctggcacaggagcacatatatcatgcccttagcaattggactctcaactgacaggttatctctaaccatttatattatttgaatatattgcaatctccttatcacgtggcaggtattcaattatctctaagctacacattatctataagccataattatttacttgtcattacctacaagtcggtaattatctgtaagggttgttacaacaccgtaatagcccctacaaacaatatcctgcaacttctactctactctataagtatcaggtttcatctcactcttttcatactcattcatactctcctaattaacatacttacttgagcgtcagagtcctttgttttgtaggccccccctcttgtcctcttcacaaa

SEQ ID NO: 17466 - DNA, 382 bp, Glycine max
  unsure at all n locations
ttgtgactcttggcaatttctttaaaactagtcacttaaaaagttgtgacttttgaaaaaatctttagaaacaagtcacttgaagaattgtgacttttggaaatttatttttcgaaatcagtcactggtaatcgattatgtgactctttattttaaattttgaaaattaaaatgtttagaagctatggtaatcgattacaagtattgtgtaatcgattacaaaagttgaaaatgtttaaacacaagttgtaactcttgaaatttgaaatcttaacgttttaaaacactggtaatcgattactaccttctggtaatcgattaccagagagtaaaactctttggtaatgattntgtgaaaacttcttgtgctactcaatatttt

SEQ ID NO: 17467 - DNA, 419 bp, Glycine max
  unsure at all n locations
gctacaaggattntgcgagactccttngagggaaatttaatttgtataattgctactatttccccgtctgcttgttgtatggaagaaacacttactacattagactatgctagccgtgcaaaaagcataaagaataagcctgaggtcagttaccactgctattgttccttacaagttacaattcttctaaaagcagttttaaagctttgtgtgttttttaaaaggcaaaccaaaaggtttcgaaggttgttttgttgaaggacttgtacagggaaattgatagggtgaaagaaggtacactcaccaccactattagttttggaatgtagagaagattttgtatcttatcttttgtataatatgaatattgcagatattcgagcaacaagggaaaagaatggtgtatatatttctcatga

SEQ ID NO: 17468 - DNA, 371 bp, Glycine max
atcttttttcttcagagcttattatagaagatctttgttttgcacgatagagtgaattgctcttctaaaaagaaatatatgtgatagactgcaatttaccatacttatttccagtgctcgatacaacttcagtgagaataaaatctctcgcagattatatgatagagctcctgattgcatgggtatgcaatctgaattgcgttacccaagaaatatcgcataccaataccagtaaccgtctatcaagcttatacgtcttgcatgtgagtattaatacatatattaaaaataatcggctccttttatacttaaagagaatcgttataatagctaattgagtaatacggtatacacatgcacatcttcacgag

SEQ ID NO: 17469 - DNA, 352 bp, Glycine max
  unsure at all n locations
tctcttcttatctactatccgtgtaccattanatttatgcttttttttactgataggggatcgactcctgaagcccgcggcaatattcggtggagaacagcgggcttgaaatatgaaaaaatatcccttttttgattcttatttttacccccattaaagctcttgactctcttatatcccatttccagcattgtgtgaggatactaacataaggtatgatagtgtaatgacatttcaacgacaacaaaagcatgtttaaagcatgctagtataatacaggaattaagatgttctctcccgacaagtagttttttaatgtaccatatggccccgacacagtcataagaacatt

SEQ ID NO: 17470 - DNA, 382 bp, Glycine max
ttcttgtgccaataaagatggtgaaaaaattcaagaatagttcaataccatttcatctcttgaaaatctacacccttgtggagtggatcccacctcaagagttccaatcttacatacggagagaagatcagtggaagactcaatgacatataagcatctttataggttgatgagtactctcttttccattcttccattctacttttgaccaaggatagttgaccatattcctcagaagcatcactgaaaatctcatcagcagcctgcagcaccaaatcactttgtgactgatatgcttggctctcactatcactctcatcagtgcttgattcaccttctattttatgatcatcccattccatggatgtgaccttattataac

SEQ ID NO: 17471 - DNA, 418 bp, Glycine max
tgaagaggatgctttaatggaggaaaagaaagagttatatggttgagcacgaaattgaaggaataaaagagggagagaaatgtgtctcataagactttcattcatcaaagttacaacaagtgtaacacatgtttctatttatagactaggtagcttccttgagaagcttctttgagaaaacttccttaagaagttagagcttggctacacacacccctctaataactaagttcacctccttgagaagcttgcttgagaaaattcctaaagaagctagagcttagctacacacctcctataatagctaagctcacccccattccaataatacatgaaaataaaaaagaaaaagtatctactacaaagattactcaaaatgccctaaaatacaaggctaaaaccctatactactagaatg

SEQ ID NO: 17472 - DNA, 376 bp, Glycine max
agcttgccttatgtctaaaagaaatttgtcccaacagttaaagtgagactgaagggaatatgtgggccatcatcgatgagtgcaaagagaagctaaatctagcggcaactcacgagcaaaggctagaggatgagtacgccaagatatcagaagaaagggaagcaagggaaagggtaattgattcattgcaccaagaggcagcaatgaggatggaccgatttgctcttactttgaaaaggagtcaagaacttccccgattgttagccaaggccaaggcattggcggacacctactccgcccccgaggagatccacagacttctcagctattgtcagcatatgatagacttaatggactatatgattagaaaccacta

SEQ ID NO: 17473 - DNA, 416 bp, Glycine max
tgtgtggcggctggccaactatgtatcttgggtgtgtatctggaaattatcctctggtaatcgattaccattcgtgggtaatcggttacaggggttaaaaatggagacaggatgttaaatggcctctggtaatcgattaccaattgtgtgtaatcgattacacagggtgatagggcactggtaatcgattaccagttgggtgtaatcgattacacagggtgatagggcactggtaatcgattaccatttatgtgtaatcgattacacagtgtaatttttaatttccaatgtgcaaaggctgtgtaattcgtttttgggcactggtaatcgattacatactttggtaatcgattaccagagaggaaatcccttgagaaagacattttgactatgcgtagccgttatgggacgcattg

SEQ ID NO: 17474 - DNA, 381 bp, Glycine max
tttatcttgatgcaatcctaccccgcaagggcattggatagaagagtccaagaacattggaccaaagatgcaagagaaggccctagggttctcatgagtcttaaggtagatttcgggcccatgggctaagtacgagcccacttatctttgtaaatattagattaaggtttcattatttttgggccttgtagttagggctccataatgtaggtagggtgccttagaaatataggatttttcagcccttgtattttagggcacctagactagtttttgtattaggggtagttttgtaatttcatatgcactaagtgaatatttgatcgtgtggttggaaataaatttaattgaattggtagaagcccaatccaattaaatttt

SEQ ID NO: 17475 - DNA, 413 bp, Glycine max
tgtgaatcccaagataatcaaatggtactttagatcttggttacctgaagaaatagagcccaaagtgaaatacatgaacctcaacagttgcttccacaaagaagtcaacgggtggcatctgatattatttttatacttgtaaaggataaatattaattttatacttataaattcaatgttaccgctatgagacagcatcgactcacgcgcaactgctttggggtaaatattaattttatacttgtaaagtggacattgcctctatgagacaatatcaactcgaggggaactatttcaaggtaaatattaaacaccttaaatgcttgtaaagccaacgttcctctacgagacattgttgaatggggggaaattgcttcagggttaatatttaagtcttgtaagcacaccttaaa

SEQ ID NO: 17476 - DNA, 383 bp, Glycine max
tctgctttgttgtgaaaaccaaaagtggcaatgaaaaatacttatatgtttgtaaatgttagtggaaatttgtcggttgccaagaattataggtagtctcaattgtagagacgaaccatgtaacaccccaattgggctatgaagggttttcactaaattttaatttaaaggaaattgttatttaatttatttatgaaaatacgatttagattttcacgatataattgtatatcaaagacatacattaatttacaaataattccaacaagtcatacactagatatagataatgactatgatcatagaaatatctcaaaagaaaagttaggtgaaatatgtgcgagcatcaacaatgtaaccactacctactgtattacatctaa

SEQ ID NO: 17477 - DNA, 410 bp, Glycine max
tttctatctagtgctactgcttagatggtttgttttatggaaacaacgggctttgaccacaatagttgtgttcgactaaattcgagtttcttaattgctctactcgtagtattaaactatgttgagtttatctcatcttttatgaaccatcttgaatagagtaaatgtcatgttttgtttgtatttcattgttgttgatgatttagtttggtgacagataattccttaatgaagcattgtctttaaacttttagtgtggctgaaatatctccttgcgagacaccaaaattcaaatttcaaccacttcattaatctttggcctattatgctatttcctaaattacttgcacctacgtctttaaactaattcgatgttcacacaagatgccatcattttcctccttatattc

SEQ ID NO: 17478 - DNA, 379 bp, Glycine max
  unsure at all n locations
tctttcttgtgaagttctctgtgaaatgagataatcaattacacgtttttgaaaatgcagaacaaaaatggattttaatgaattaatcaattaccctcacttgttatttctcattaatgactcttgatatgatcttatcttttataaaaacacattttaaagtcatccaagggaattactttgcatttctttaagagattcaagttgatcaagattcattcactcttcatcatgagttgataatcaaaggaagagcttgaagatgttgtgatctacacatcaagatgtattccatccaattntgatttctctctactttcttaatcttggttagggttaccaagggtttttcgagttgataggatttcaactcttggaa

SEQ ID NO: 17479 - DNA, 413 bp, Glycine max
tttagagaagaggaataagcagaaaaatattgctttgactaaggcatagaagattgaaagttcctatgatgatgaagatagcaaggaagctaggttgactaagattgttgagaaatgtcacaatcaggcaacatctttttacctgttcttatctctctttgactaagtctttgtatacttgtcattgtctgttactgactacttcggctttttcgtccagttgacagcttttggtgaagaacaataaattccatcttggggagtaaaagtttttggagataaggttattattctaagacaaagtttctcagtcattctctatacatggtttgctgcttttatctcttaattgtttggatgctggaagttattaatgttttcattttgtgaattgcagaaagcctttccccctc

SEQ ID NO: 17480 - DNA, 383 bp, Glycine max
tcattcttctacattcaatttcgagcttttcgatatattacgggactcaatcggacatccgagtaaaaagttattgtagtttgaatttgctcagggcttcggtattccatttcgagcgtctcgatatattacgggactcaatcagacatccgagtaaaaagttattgtcgtttgaatttgctcagagcttctacattccatttcgagcgtttcgatatattacgggactcaatcagacatccgagtaaaaagttattgttgtttgaatttgctcagagcttcggtattccatttcgagcgtctcgatatattacgggactcaatcagacatccgagtaaaaagttattgtcgtttgaattggctcagagcttctacattcaat

SEQ ID NO: 17481 - DNA, 411 bp, Glycine max
gtgagaaaattcaaacgacaataactttttactcttatgtctgattgagtcccgtaatatatcgagacgctcgaaattgaataccgaagcgctgagcaaattcaaacgacaataactttttactcggatgtctgattgagtcccgtaatatatcgaaaagctcgaatgtgaatgtagaagctcagagcaaattcaaacgacaataactttttactcggatgtctgattgagtcccgtaatatatcgagatgctcgaaatggaataccgaagctctgagcaaattcaaacaataataactttttactcggatgtccgattgagtcccgtaatatatcggaacgctcgaaattgaatgttgaagctctgagcaaattcaaacgacaataaacttttactcggatgtctgattg

SEQ ID NO: 17482 - DNA, 378 bp, Glycine max
tattcttgaaatcatctattcagatgtttgtagccctatacaagtagagtcccttggaggaaataggtactttgtaacctttatagatgatttcactagaaagacttggatttatatgatcaaaagaaagagtgatgtgtttaatatatttaagaagtacaaagcttatattgaaaatcaaagttctaggaagattaaagtgttgagaactgatggaggtggtgaatacacctcaaaagaattcctagaattttgtgatgaagcaggaattgtacatgagttcacaccaccctacactccacaacacaatgggttagcagaaaggaagaatagaaaaattatgaatgcggttaggagaatactcaaatgcaaggatct

SEQ ID NO: 17483 - DNA, 414 bp, Glycine max
tgttgttcttttggatgacgtgagtattatgtatattctttccctttcatcctccatttatagctactatatactccattaaaacatttcaaacaattgtggggaatatttaattcggttccatgtatcatatgttgtcttgataaaaactaaaaatcaagtagtgatactgatattagttacttttgtgggattcacacagtaggtacagcctgttctacaaaataatgtgttaactgattggagtttcccctagacttgaatgtaaaaggctgacaatttgttactaaatcctaatttgtacctttgtttaaccaaaactgttgatgcatgtttggtttaaaattatatcggagaaataaatgcttatttatttcagcattctaagagcttctgattaagagaagctactag

SEQ ID NO: 17484 - DNA, 370 bp, Glycine max
  unsure at all n locations
atcttctcattcatggttccaaaatttcattttcattcttagaagtttgaggcatcaagaacctgagctctttgttcatttgagtcattttgggtaacttcattcaaggtaaggggggtctttccacttcttgaatcataaccttgttgtatttagaagttaggcttcattgcatgttgttttgatgttcaaatattcgtagctactgccttgtttggaactagaggatatgctgttttttatggaaattttaaggttagaaatgagttctttgggtgttaaaacttangattagccttaaatttcacttaaattggagttttctagcaaaagttatgaataaaataagttgacagacattctgtagaat

SEQ ID NO: 17485 - DNA, 412 bp, Glycine max
ctgcctatttgcagcccattttcttcccattctcaatttgcaataccgttttgcaccagcttcattaatcttaaaataaaatcgaggctaaaaaaaaaagacaaatttatcaaatatcatatgcaaaataatatatatatatatatatatatatatatatatatatatatatatatatatatatatatatatgaaaaatagtaaagatagggtttctaagtggtgtagatataaaaagttatatataactaactgacatacctttaaaattgttgcagagcaatcatcaaaataagctttaagtacgcctgaaggtgcagaccatctatcataatccataagaaataatctgcaatcagctactagtgttccaagatatcctgcaagcaaggcttgtgcttcaccaattgcg

SEQ ID NO: 17486 - DNA, 369 bp, Glycine max
tttctttatgtcttttgttcctgaatttataatataaagatctttcttcatctgttcctacgtctctacccattctcattcatttgcatgtttatttctttacgtttaaaatgccagatccgacgacgagtccctcgaaggtactaatacctgtgacccgaccatcgatttcaagcaagaaacgaatcagacggagagtgaagaggacgaggatgtgggacttcccccggagttggaaaagatagtcgcccatgaggaccaagagatggggcctcatcaagaagagacaacactagtggacttagaaaccggcagtgggaaaaaggaattaaatataggcatgggtatgaccgcacccatccaagaaga

SEQ ID NO: 17487 - DNA, 365 bp, Glycine max
  unsure at all n locations
gttcaaaaccaactaatatcaaaatttactattacttttaangcgggaatatgcctaacagcactggatatgcattgaatctgcactacttcagttacaagtgcaatcaattatctaaacctatagttatttaaaagtctaaaaaactatattgggatagtctaaacagaacccaagatatgcatatgcacacgtatgcatagcaataaacaatcagtcatattctcatcacaggcataacactctcaattgtcatagtaatatgccatccttatataataattatagacataattcacaggctattagaacaatgcaaaccacaaccattctacaatagatactcctgtaatatagccttcaat

SEQ ID NO: 17488 - DNA, 350 bp, Glycine max
agaagtccctgtcaggcagacccaaagcacttgaatcactcggactcgagcgccaacgtattcctaggagaaaggacggcaatcccagcactccaagggacaacgactacctagactcaccacaaccaatcgccaaccggatgccgagggaagagccctcctcagagcgggaatccctcaaagtcggtgtaccgagaccagaaagcaaatgtagccaacggaacagaaccctcccaaatcgggaaccgccctaagcaacgaaatacagaaatgagcgccacaaactacgaagggagggcagtgccgtcctacccacgagcaggaccccccagaacaacccgacctccccg

SEQ ID NO: 17489 - DNA, 332 bp, Glycine max
ctccataccagtggcaacagttgggaagaacataatttctctaccaaagcctattggaaggatctatgagattattcttaaacttcataagtgtctcacgctcacttgggatgcacacactctctctgcatggtaagctcagcaaccaaagctggacaaagactaaaatataaatggaggaggaattcatgatcatgctacgcaaatatagaaaacaagtgtgtttttataaagctgatcgtaacaagtgtagttgttggttctgcatatcaatctatcaacttctattaatgatacatgcagcctacctgtattttctcgacattgatatt

SEQ ID NO: 17490 - DNA, 373 bp, Glycine max
ttcttctttgttttctaaaaggtttaattacattttttaccctaattttaattgattgtcactagcactacaaacagtttttggtcatcacatagaataatttttgttcaaattttaatttaatatctgtcttctgttgaaaatggacgaaaaatatgatgcttatgttatagcggactaaactagagtcattttttataccacaagcaaataaagcaatccagtcaaatatcatacggagtaaccatgattaacaggtatacggtataccaactctttttgacttgcaacctttcatacaaattctaaataactgtcgatctccttataatattatataatgtacacacaatcccacctttttcttgaaata

SEQ ID NO: 17491 - DNA, 338 bp, Glycine max
taacatggaacaaatagagcatcttacctgagccttatcatttattgttcgcaagattctagcataatctgtgcccagcatttgaatgacaagatcagcccaaaacgttccccaaagcctgttccacaaaccaaataaaatgtttagaaatactcactaagtgtgcctcagatatgacccaaatctgatatgtaaggtagttgaaatggcgctgaaaaggcctaatggtgcattgcataaaaaaagatatagctagtagaattgactaatcacttcctaaaaagttggctaatgagtcgggagacccctggacaaaaaacttgctatattgtacactg

SEQ ID NO: 17492 - DNA, 365 bp, Glycine max
  unsure at all n locations
atctttaacaaaacantcttcgtgaggaaggacccatgtatggttaacatagccaaaaaacattggccatggggagcaaacaacttcatactgcttaaagcaggcatcaaactattgctcaagaagacaatccactaaactctcccaggcttccattacataatccaatgcatttatttgaccaacaagggttctacactttgccttcacatccttatcaatgtgaaactgacacaacaaattcatggacttaaggaatacaactttcaccgcattcatcaatgctagatctctgtcggagacaataactctagggagtgcatcacgtataaagaaaagacgacgacacctatctagagcccaaa

SEQ ID NO: 17493 - DNA, 420 bp, Glycine max
  unsure at all n locations
ntaaataggcattcctatctgcaaaagaataaattttctggtagaaaataaactcaacccaagtgtgagatggttgatgcatccaataaaaaggtgagacttcataaatcataaaaatgatggtttactcaaataaattacattttatttttcaagaacaatttaaattgtgttgagattttttttggtaaatcataaaatgatgtagaaattaaatttaaagatagaaatgaaagagattgacaaggagaagtaattgaattaagacatgaaccatcaatgagttgtatatggggtttgtagtcaagaactaatctttatgtgttaattattaaatcatttaatttatatatgaaaatactagaaattttaaagacaattatttataagaaacttataatatgactatacttgattcac

SEQ ID NO: 17494 - DNA, 377 bp, Glycine max
atcatattataaattcgaatggccattgcttttcactcgaaggtccgatcaggcgcatcacatatagagacgctcgaaattgaacaacggaagctctcgagatatgcaaatggtcataacttttaactcggaggtcggattcatgcacattatatatcgagacgcccgatattgaacaacggaagctcttgagaaattcaaacggtcattactttttactcggaggttcgattcaagcgcgtcacatatagagacgctcgcaattgaacaacggaagctctcgagatattcaaattgtcataactttcaactcggaggtccgattcatgcacatataatatcgagacgctcgaaattgaacaatggaatccctcgag

SEQ ID NO: 17495 - DNA, 429 bp, Glycine max
tactcaagcttaaaggagaagttggttttctgaactctaaactttttactttacttattcaataaagatgctgaatgagagctcatatatgcttgatgaggtgctacagcttgggaagaatgttggaaaccagagaggacttgggtttaatcataaacctgctggcagaataaccatgacagaatttgttcctgccaaaaacagcactggagccacgatgtcacaacatcggtctcgacatcatggaacgcagcataaaaagagtaaaagaaagaagtggaggtgtcactactgtggcaagtatggtcacataaagcccttttgctatcatctacatggccatccacatcatggaactcaaagtagcagcagcagaaggaagatgatgtgggttccaaaacacaagattgtcagtcttgttgttcatac

SEQ ID NO: 17496 - DNA, 378 bp, Glycine max
tgagccaaaatcctaactcaccatataccttgacccaggtgagaatgacaatccttaccctcggaagcaaaaaaaaagagaaggaaaatttccaatcaaagaaaaaaaaagagaaggaaaatctccaatcaaaaagaaaaaagaaagagagaaggaaaatttccaatcaaaggaaaaaagagaagacaggaaattcccaatcaaagagtgggagaaagcgaaaagaaaagaaaggaaattcccaaccaaagaatgggagaaaggaagaagaacaaggaaagaaagctcctggtcaacgatcaacagaaaacagaagaaatgtgcagaaaggtctttggaccggacaatatctgaacaatacagaggtgccactaaatg

SEQ ID NO: 17497 - DNA, 400 bp, Glycine max
tgcctcatagaggtccaggaaggacaagtcagccttagggactagttccgctccggagtatgatagtcaccgctttaagagtgctgtacaccagcagcgcttcgaggccatcaagggatggtcgtttctctgggagcgacgcgtccagctcaaggacgacgagtatactgatttccaggaagaaatagggcgccggcggtgggcaccactggttactcctatggccaagtttgatccataaatagtccttgagttttatgccaatgcttggccaacagaggagggcgtgcgtgacatgagatcctgggtaaggggtcagtggatcccgtttgatgccgacgctatcagccaactcctaagatatcccgtggtgttggaagagggccatgattgtgagtat

SEQ ID NO: 17498 - DNA, 378 bp, Glycine max
atcttgttatttgaggcttagcgtaccatcaagcttcaacttacagagagtagttcatgcttagcgccacaggtggtaagcgtacttccaagagttcaaaaaccgtaagagattggtgcttagtgcctcctggccagcttagcccagcttaaaagctcaagttacagaatggatatggggcttagtgcaggatagcacgcttagcgctgctacaatgaaatgtatacagagaagaagtggcgcttatcgcatcatccacgctaagcccacaggttaaagttcaattaccacaaagatatggggcttatcgcagtgatgtgcacttagctgaactattcagccaaccaatcatgggtctctatgcttagcacgagcaag

SEQ ID NO: 17499 - DNA, 407 bp, Glycine max
tgcacacaagattctccttacctggcacttcaatttcttctgggtgggacatatagatgtcttcctctaaatccccatgtaagaaagtagttttaacgtgtaactgctctaagtgaagattctctacagctacaatatttagactaactctgatgatagtcatctttacaactggagagaagatctctttgaaatcaattccttgtttctgctgaaaccctttcaccataagtctcgccttgtattttcttctaccatcatattctccctttagcctataaacccacttattctgtaacactttctttccttctgacaattcaattaaagaccacgtcttattcttctgaacggatgtcatctcatctatcattgctagctcccactcaatagaatcattccccttc

SEQ ID NO: 17500 - DNA, 377 bp, Glycine max
tctttctttttagtctcagctgatgaagatgaattcgtggctacttcatgcactcctctaatgacaataacatcatttctggcactaaattgctgggagtttgaagccgtcttctcaattaaatttctggcttgagcaggggtcatgtctccaagggctccaccactggcagcatctatcatacttctctcaatgttactgagtccttcataaaaatattggagaagaagctgctcagaaatctggtggtgaaggcaactggcacatagttttttaaatctctcccagtattcatataggctctctccactgagttgcctaatgcctgaaatatcctttctgatggcagtggtcctagatgtagggaagaatttctc

SEQ ID NO: 17501 - DNA, 409 bp, Glycine max
tggagcagacaatctatatactcaaggtgtagggttagtgttaggtttactgttgtattttatcctagtgacaacaataaagttgttttagttgtatctactttggcatagtagatttaggcttttcccctatgtaatcttgtttttgtctctctgtaaccaaacatcacatatatataaatcagttgagtgtggttagtgaagtgaacaaaataaaacaaagaagggagttgaattgtgttttcaaataaacttctcagtataattttctcaaccagtttctagatgaattacttataaaagcattatttaataaatgattatagaataagcaataatagtgaaataggaagaaaatggcatagcagatttatactggttcatcccaagtcataaggctacgtccagt

SEQ ID NO: 17502 - DNA, 544 bp, Glycine max
  unsure at all n locations
gcacccgcgatactcntactacgacggcgcgcagaagaacacaggagacgacatggcggcgtaacaatattactannnnnnnnagaagaggggtctttgatgacgtggtagaacancccanggcnaaancgagctcgggaccgggggagccacnagagccgaacagcaagcaagcaatatcttgcaagcacccaccagccggagaaacgaggcggccaaaaacggagccccacccaaccacccgcacaaagaacaagctcaggacaacaccaacgccagaagacgaacacaccagagagcggcacactaaacggaccagaaccctcgcaagcagccacaggacaaaccccgacccagaaccccgcacgcgaagcataaaagaagagaccagagggaggggaacgagggccaacggcgacaagggacaaaccccaacacaaccccaaaggggaccgcccgcggctcaccaacccccagcagaggcaaaaccacacaagaagtacccacccagaccgagggcggcaacagaagaccccaaaaggcc

SEQ ID NO: 17503 - DNA, 325 bp, Glycine max
tgagtcatgtgcccttgtatgcaatgcttgagcctatgttattgcgcctggcattggatgtacgtggtgcatgccgactgtgcatgaatgcatggaccgaagacccccgagaaaaggagccccacagagcttaattgctgtcgttaaatatgtactggaatcagcttgaatactatgtttgtggactgagtgcgtgaagttcatgaaaagcatggccaagtgacaattggatatctcatgtcccacgctagagattgaatatgctttgcacctaagttaacagattggatatagatcgaagaaccctgagctagtgagtgataac

SEQ ID NO: 17504 - DNA, 382 bp, Glycine max
  unsure at all n locations
taatcttattttgcaaatattnacaatagacctcctgaacctcagcagcaaaatcaaccacagcagagcaattatgacctttccagcaacagatacaaccctggatggaggaatcaccctaaccttagatggtccagccctcagcaacaacaacaacagcctgctccttccttccaaaatgctgctggcccaagcagaccatacattcctccaccaatccaacaacagcaacaaccccagatacaaccaacagttgaggcccctccacaaccttccctcgaagaacttgtgaggcaactgactatgcataacctgcagtttcagcaagagaccagagccttcattcagagcttaaccaatcagatgggacaattagctaccc

SEQ ID NO: 17505 - DNA, 367 bp, Glycine max
tctgctcaatgtgcaatatgaacacatctctccattcattattggaatgagaatagatagtggtgcaacagatgtagctgctctcatacccatggtttttggataccgtttattggcatatctctctctaatgcgaatgaatcttctatctcgagcttaaatactacttgatcactcttgcatgtggggtgataatattaattaaacatagactcacatgtacggaggaccaataattgacgtacctagcacattacatattgaggcttcatattatgtgtcgacaatatcgtataccatttaatcagcatgttgaattaccactcagctagcgctttgttatgatcatcatacgctcgaccctatc

SEQ ID NO: 17506 - DNA, 294 bp, Glycine max
gatacccagcaggcacagaatcacaaaccaatacctgatgcaagggtccgcgggttgtgcaccactactgaccacaatacagaccggtgcccttccatgcagcaaccaggaacaatagagcagccagaagcataagctgcaaatataaacaatagacctgctcaacctcagcagcaaaagcaaccacagcaaagcaattatgacctctgcagcaacagatacaaccctggacggaggaatcacctcaacctcagaagggcagccctcagcaacaacaacaacagcctgcaccat

SEQ ID NO: 17507 - DNA, 397 bp, Glycine max
  unsure at all n locations
tactcagcggaccaatttgaagaaaattctgtttcttgctaaatnaagcaggagagctctgatacaatagactcaactcacgacaactcgtagacataactaataagtgcaaatgatcttgtatgctgagaatgatggctctgaacttagtagttggatatattaacttatcaatggaggaaaagactaccgtaatgctaagaactattgccctttggatgatctcgtttctaaactgactcttatttcctctataatgaatgtagactctcctctattcatacagttcattctttgctatcataataaatagaattttcctttgtggaattttctaatatatatcaccgagaatgaattttttgctttgacctattataaatcatactaccatttc

SEQ ID NO: 17508 - DNA, 375 bp, Glycine max
agcttcttatccaaggctcatcttggtggtgaagctccttcttccatggcttattccctagtggatgacgcctcctgtcacctcttctcctttgtcttccgctgcatctccatggtggataatcaccattaaaggacctcattgaagctcaaagatccagcctccatagaagccccacaagcaagcttccatcaaagtgtatgaattttaaaatccaatcctacagtttcttgaattaattaaattcgttattattgtttctgtaattttatgtatttttgacacactaaattcgattatatttgttatttcattcctttagttattttcgtcaattaaacaaacccatgatatttcgattaaacttgtacttaa

SEQ ID NO: 17509 - DNA, 409 bp, Glycine max
  unsure at all n locations
tgttgccattagaagagaatgagtatgtgattggtattatgactggaattgttagtcagtttgccagattgattgtgaaggaatgcattgaccgtatcccggtgagagtgtgatccttaaattttgagagaaatgactatcatttaatactgatttttgcatgaatctttgaagtatggactgaatgcatgaaattgaggatgatgaaggccatgtttgattgggatagccacttagccacgtgtttgaatgatttatcctttgcacctaatttgagctgaatgaattattgattgattgaaccctgagtctatagagtgttatctcttgctaccttgacttaggttgtaggagagcatcatccacagaaagtgtggttcanagcanatttgtcccanatnttggggag

SEQ ID NO: 17510 - DNA, 383 bp, Glycine max
ttcttgggtgatatggaatctctgtaatttggagaataaaattatatcagtagaaagaatacttcaatatactagtattccttgcgagcctccccttgttgtagaagacaatcggccagatccttcttggcccttgtatggtgaggttgacatacaagatttgcaggtagattgagttcttatattttttaaagttttgtacttttattttctttcattttgtggataattgatttataaaattcatgctaaggtttttttttcctaaatggttacaagctagtatctgaaacagaataattgtgccaacatatttaatagcataatttttacactatgtttgtaatgatgtgttgccatgatgaaggttcgttatgctccac

SEQ ID NO: 17511 - DNA, 418 bp, Glycine max
tttatgtgaaaggatgtgactcttcatatttgaatttgaatttcaacgttcaaaagcactggtaatcgattaccaaaacattgtaatcgattacaactttttgaaattaattggaacgttgtaaattcaatttgaaaactttttcaaaacaattttgctgctggtaatcgattacaacaatccggtaatcgattaccagagagtaaaaactctttggtaaacacgttttgaggaaaatcatgtgctactcaatttttgagaaaaacttttcatacttatcttgattaagccttctcttgattcttgaatctttagtctagaatcttgatcttgattcttgagatcttgagccttgaatcttgattcttgactctaaactttcttcttgagtcttgaattcttcttgattcttatcttg

SEQ ID NO: 17512 - DNA, 384 bp, Glycine max
  unsure at all n locations
tttctattactttggcttggctcatttccacccctagtggttatgattctactctacttatattttactgctgtctattttaaaagttaaccatacaaaacttgttgttagttatctactgacatcctagtacagaaatgtccgtacaatgaatatataatatttttttctaataatattctaaggtgacaataaattaatatacatgtgtttgaaaagtcacataaccaatatttaattgaaattatttgcatatattcacttttntgcatataataagtatatttaactacttatctcaaatgtcaacgtaacgaacattctacccattgatagagatttgtattcattactagtaaataattttaaaaatgacatatacaa

SEQ ID NO: 17513 - DNA, 420 bp, Glycine max
  unsure at all n locations
ttgtgtaatcaattagcactgatttggtaatcgatttccagttatagttnctgaacaaaagcaaaagatgtaactcttccaatagttttcaagcttttctaaaagttataacttttccaaatggtttttaaattcttctaaaggttataactcttctaatagttttcttgactagacttgaagagtctataaaaacaaggctatgatttgcaaaaaataacaattcttttgacaacaaacttttgccaattgatttctaatatctttgaacttttgcttcttcttcctttgccaaaaagaattcaccaaggactaaccgcctgaattctttttgtgtctctcttctcccttttccaaaagaacaaaggactaaccgcctgaattctnttgagtctcccttctcccttgtcaaagaattca

SEQ ID NO: 17514 - DNA, 53 bp, Glycine max
ttcttttcttgccccgtgctgtataccacggactcatgtccaccttcaaaaag

SEQ ID NO: 17515 - DNA, 151 bp, Glycine max
tgtctaggcagcgtggcatgagcaaacgaaggatatgtgcataggttccccaaacgatggcggttgggagaggttcaagaattcatcgcactaactcctcttcaggattcctgtcagcctgttgtctacagcttcctccccaattgacgtc

SEQ ID NO: 17516 - DNA, 379 bp, Glycine max
agcttgccacccagctcgcccaggcaagctaggttgcttcctccataagcaactgccttctggaggaattctctgtaaggccaagtatgcctgattgctatttgcacccccatttttactaaatacacctcttgctcttttatggtgattttcttccgtaatattacgaaactttacgaatttctgaacgatgcttgtttcttttccgtaatgttatgaaaccttacacattacataatcatcccttctttgcctttcggaatgttacggaactgtacatagcactaacacctccttttaatatctggcatgtcacggaacttcactgattgtgctacaatgcttaatttgacttctggcatgtctacagaactacacg

SEQ ID NO: 17517 - DNA, 420 bp, Glycine max
  unsure at all n locations
tgactaatcaaacttccattagtcaacaatggttttctcattaggtgcaccttgactaggtaactgggttaataaaaagaagacagattcatcaataatcatagggataccgtgcacctcagaaatcaaagttccatccagaattttcaaatttgagtaaaagactcgtacaagttcaggatagtaaggtagtttcaaagacataaagggaatcaacctagtgttttgaaacaattgataacaatcaaaatgtttcaccataaaaaaatttaagtctaggtacttgggatcaagaatttgcctagaggaaaagagagatgagtactgtagacgttgttcgttggataagaatagtgtggatgatgacaatcatggtggaattggtgtcggnggtgctccggtggctccgtgacgtcgatg

SEQ ID NO: 17518 - DNA, 383 bp, Glycine max
tttaatataataattgcattaatagaattaatatatatatatatatatatatatatatatacacacacatttttttctttatttactaatataacaaattgcacaatttattaaaatttaagaataattatttgtaagagacagaaaggaacaatttacaattgattaaaatttaaaatttaacgcgtcggagtcaatagcaatcagaacaccactctaaattttaacaaaataagtcgtgccttttctttacgggtcaaaataaatcaagtctatatacaattttctataaatataattgacatatagccaatcaatagtagtaattatgacaaacaagaataataacaaataaagttattttaaacaggttaagagacata

SEQ ID NO: 17519 - DNA, 420 bp, Glycine max
tctctcagcaactttgactgcaaaacttcacaggagctacatggcttctttgcaagtgacaagacaagctttggcatctgagtctcagagaacaccaccctcagtgcaaaatgcaacaacctccacaaccacaccaattagcaacaacttcagtgtgaagagtgagcaaactcatgcagtgttgccacataagagaccagaggaggagcaagagtcagaggcaaataggggtgtgaaaagggttaaggctgtggaaaatgttcctctgcaattcaagcctcttgaggaagatcacatagagcaaatgattgaggagcttcttgattatggatctattgaactctgctctgtcatttcaccccaggccctctaattgaatgtgcatgtttttgagctgaatttaaagtcacaattgtaggt

SEQ ID NO: 17520 - DNA, 384 bp, Glycine max
  unsure at all n locations
ttctttaaccgatcgtttaagtcgttatctcgcctaataaatgataaaatgaatttcaaccgatcatttgcattgtaatctcgtctaatcactgttaaaacaaaatctaaccgatcgttcacactgtaatcacggttaaacaaaaaaagggaaaaataataataaaaaaatcaaaatatcttgaaaaaaataataataaaataatcaaaaaaatcaatcggacgtttttctctgaaagtttccttggatgaattgactaataaccaaagtgaaactaaggctaaaatcaactcacaaatcaagctntgtccacaaaaatcactaaaaaccgttttaaggtccaacgccttaaatggtcctctttgcttttatcggttatcatgg

SEQ ID NO: 17521 - DNA, 411 bp, Glycine max
  unsure at all n locations
tgactaggcgagttgattntagccttattttcactttatttattagtcaattcgggtaagaatgagaaatcccaaagagaaaatgtccggttgattttccgctttattttactaaaaggtatatttttgttattatattattttttacctctttttttgatttccaacatggttacggcacgaccgaacggtcggaatttattttaaccgaagttaacggataatacaattcaaacgatcggtggaaatttattttatttttaagttaagcgagaaatgacttacgtaaaatggcttaagcacgtcaaaagggggtataaaaagtaaatgagatgagaataaaacttcacgaaacacaatgtggaccaccatgggtgcatagaatgaatcgtaaagcttggtttgacgtac

SEQ ID NO: 17522 - DNA, 380 bp, Glycine max
  unsure at all n locations
ttcttctcaagaaagttttctcaagaaagcttctcaaggaagctacctagtctataaatagaagcatgtgtaacacttgttgtaacattgatgaatgagagtcttgtgagacacaactcaaagttcaaattctctccctttttcttccttgaatttcgtgctccccccctctctctttctcttcctctttcttttcctccattgaagcatcctctccaagctttttatccaaggctcatcttggtggtgaagctccttattccatggcttattccctagtggatggcgcctcctctcacctcttctcctttgtcttccgctacatctccatggtgaaaaatcaccattaaaggacctcattgaagctcanagattcagcc

SEQ ID NO: 17523 - DNA, 415 bp, Glycine max
  unsure at all n locations
tggaaggatgcatcaatggaggaaaagatagaggttatanttagagagaggagggagcacaaaattgaaggaataaaagagggagagaagtggaactttgaagtgtgtctcataagactttcattcatcaaagttacaacaagtgttacacatgcatctatttatagactaggtagcttccttgagaaactttcttgagaaaacttccttgagaagcttctttgagaaaacttccttgagaagctagagcttagctacacacactcctctcctaactaagctcacgtccttaagaatcttccttaagaagattcctaaagaagctagaacttagctacacacacctctctaatagctaagcttaactccttgagatgagaagttagagcttagctacacaccccctataatagct

SEQ ID NO: 17524 - DNA, 383 bp, Glycine max
ttatcttctaacaagcttagaacatcttcaaattttgtctaaatattattacaactcataaccaatccatattcaaaacgacaaaagcttccaaagagctcataacattttaagtttgttctcaatatcattctagctcggaaccaatacatattcaaaacaacaaagtatttcaaatcatcaaaacagaaaaaagttccaaatgaaccaagtttaataaaaatcatcatcttcaaggcgggagattgcaacagaagtaacgtcagttatcaatggttctgtcggttcacctatattgaaaaataaaagttagaatataaatatttaacttgacaaatttaattcaatctttaaaaagaataccttcatcatcagactccatt

SEQ ID NO: 17525 - DNA, 413 bp, Glycine max
  unsure at all n locations
ntgtataatcacatcagcccacaatttgtatgtttatgctctctcaatgatgttagaggaagttcagccaaatatgggttagcatatctgcaagagggaattctttctgatatagctggtgagaatatcaaagtggataatgagcacaaaggaattccaatcctgattaggaagttgcacggcaaaagggttcttttgatacttgataatgtggacaagctggagcaattggagtatttagcaggagaatgcaattggtttggtttgggcagtagaattatcataactagcaggtgtaaagatgttctagctgctcatggagttgaaaatatatatgatgtacctacgttaggatattatgaagctgtgcaacttttaagttccaaggtaaccacgggacctgtacctgatta

SEQ ID NO: 17526 - DNA, 177 bp, Glycine max
ttcttgctcctataacgagtccacagaggaaatgcttaccacctcacaagactggaaagcggtctataatgactcctctacggcttccacataacgcatagaggatgggcagctcaccaagatgtcttccttgcctgatacgatgaccagatgcccttccactaccaatttcaactt

SEQ ID NO: 17527 - DNA, 413 bp, Glycine max
tggatcatcttttaaaaaaaaaagatattctctttgttttattaatatgggagacaaaaaataacagtatgcaatgataaaagaaagaaaaaactttcttgatttaaatcgatagtgcattcataccatatataacaaaagtactctatccactttatgaaagaatttaattcctttgaacattgaatctcccatgcaactggtgtcaaactaaggcacaattataaatatatggagaagatctggtctttgattatttgtattttttttatgaattatacgccatgactttctgctcatttcataaattaagttgcttattaaatctaacaactcaggcaaaattagattcctttccctgtataaacttaaaacatgatacgactcatttttatcaatagtcctaatcctaa

SEQ ID NO: 17528 - DNA, 378 bp, Glycine max
ttttcttttatgcttatcagaggcatccagcctatcccttacacgattcctcttacttgccatgtctgaatcagtattaacaggagaaatgctacgactactctctgtataggacattcgatttgtaggactaaccataactctcttggtttgaattacattgcaacaagagggactagcctccccattacatgttgcaacaagagaaatcttaggatgggatacatatgagcattgggtaacaatagatccttgagtctgtgatttgttgggggcaaaattcccatatgatgattgaattggagaatggggccgagaaattactttattattgattgtattacttgatggcaacaatgtgttttgacctgagagaat

SEQ ID NO: 17529 - DNA, 400 bp, Glycine max
tttaaaatttgaattaaaacgttcagattctgctgtttatcgattaccatatatgtgtaatcgattacatagtgcaaattttgaattcaaattttaatagctgttgtaaattacttttggccactagtaatcgattacatcctctggtaatcgattaccagagagtaaatttgtttgaaaaagactttttaacttaaatttcttggccaaaccttttgctacttcaattggaattcccttcctatttaatataccctttctaagactctagagactgtcttgatcatccatcttgaatatctttaatttctttgtcttgaataaagctttgagacgcatgtgaacctttggcatcatcaaaacattcagcttgatcctttgtctacaattacttagacac

SEQ ID NO: 17530 - DNA, 371 bp, Glycine max
cttgcattctttatgtttgagtgtccacatagatgtgtgttatgatcagttttgcataaatttctaatcatcatcgtgatatgcatgtcatggaaatgatttggggcattccttttattcctgagccacctgctaagcaaatatcccgacatccatcatgtctcgccatttgtaggccttttgagccaaatgtcaaactttttggtcagaaccttggcctaagatggaaatttccaacctcacccttgggagggagcacaaaaagatcttctgagagaagctccctttaccttaggttacaagtgtgagtcaagagaaaagacaagaatatgataaaaatcaatcaatcaaagattgaggaaaagcaagag

SEQ ID NO: 17531 - DNA, 389 bp, Glycine max
tgagatgaggaagtgttgaagggtgaaacttcctttttttattgttgaccacagagtggtacctggagatatgtcgcgggggtcaggagaccttggggacgtcaggtggggtgctattgcccaaaaccaagcttgaccaatcccgacccaacccgggcatagtcggtcagtgagaacctgtgatgtacctaagcaggcgagctcctggcagtcaacagataaaaggaacaaagaccacaaagcaaggaggcttgtggtggctggccagctgtgaaacttgactgatatgtgagatatgatctctggtaatcgattaccaagggtgggtaatcgattacaaggcttaaaaatgaagacaggaggctaagatggtctctggtaatcgatta

SEQ ID NO: 17532 - DNA, 371 bp, Glycine max
atctttgcctttaaggcttgtacctcatgactttcttccgaagctttaacctcattgtctctcacagtctttagatttgggagccaatccaatccttgtgtccggactctcatccacttatgatagccgccgatgatcccattactgcttcccctaagctctctgtcctttcttcacgccgcatcccatgccttgcgaactccttggagtaccctcgcgttgtggtcactgaaaccccgtgcgatgaaaggcgtgatgctttcgtctgatggcactcctctcatggggtagccaagctgtcttatggcgaggacgggattataattaatacaaccccttgttcccatcagggaacatttggacatccttcg

SEQ ID NO: 17533 - DNA, 407 bp, Glycine max
tctagccaaatggacttaccttgtattaattcctttgatagcccttttgagccttgtgtccctttccttgttttgaagctcactacaagccttaagtgaaaaaccatgatattaccatatccttaaggaattttggagctttggaattgttttgggaataagtgtggggggtttttgtttcattggacaacttgttttgttggctatgcttcatgatgtattttgggccatacttgatgtacattgtatattggttaaatgttggacatgctgaatgaaatgttgtttctcaaaggctaaagagtaaaaaaaaaaaaaaaattcgaaaaaagaaaaagaaaagcaataaagttgagtgaataagatcttaaatggcacaagaatgatgaaactcttggttctactct

SEQ ID NO: 17534 - DNA, 332 bp, Glycine max
ttcttgtatagttccccaatttatggtcattttggagtaaattttgtaaataaatcttgttttatgattaatgctgtctctagaacatttccattggatttaatgatgaaatctgtgcatttttaggtgaaaaagagactacgttttgaattgcaaaaagtagtagatgggttaagctcagcagttgggctaagcgcatatccaccgctaggcgcagcttcagcgtgcttaacgcaaaggagaatatggcagagcatcagcatcaaggttgcgcgctaagcgcgagatcaatgagctaagtgcatcccgttcctcttgccactcataccgct

SEQ ID NO: 17535 - DNA, 421 bp, Glycine max
tgtctcagcgtttacgcgagacagagaccagcatgtcagccatcgctagcaagtaccaagaagaattaaatctagccacggcccacgagcacaatgtggcggacgagtatgcccgagtttacgcggaaaatgaggctagaggaagggtgatcgactcgttacaccaagaggcaacaatgtggatggaccgatttgctcttactttgaacgggagtcaagaacttccccgattgctagccaaggccaaagcaatggtggacacctactccgcccccgaggagatccacggacttctcagctattgtcaacatatgatagacttaatggtctatataattagaaaccgctaggaagtttgtattgtcgctcagatcttgactagttataactttctgaataaaatgagtttatcccacgtttt

SEQ ID NO: 17536 - DNA, 385 bp, Glycine max
atcttgcatttggaattgcgaaagccccactccatcattaagattagtacctgacatctcaaacaaacaaatcaaacgtaacaagacaattatagttgctgtttgaatacctcacccactcaagtgtatcacacaattatggcttttctctaatgaaacactcttgccttttaccactctaattccccttgagttcttaggcaattcaagagattatggccacaacaaagaacaattcaccaatatgtgtaaggtaaggctagacaaggaaaaggttaaccaagaaaaaggctaacaatgtttttaggcacaaatgaaggaaataaaattcagaatttaagaattcaagtaacaatccttcatgcaaccaatatattaccttaaa

SEQ ID NO: 17537 - DNA, 418 bp, Glycine max
  unsure at all n locations
ntaacattcaatttcgagcgtctcgatatattacgttcctctatcagacatccgagtaaaaagttatggtcgtttgtatttgctcagagcttccacgttcaatttcgagcgtctcgatatgttacgggactcaatcagacatccgggaaaaaagttattgtcgtttgagttggctcagagattcaacattcaatttcgagcgtctcgatatattacgggactcaatcagacatccgagtaaaaagttattgtcgtttgaattggcttagagcttcaacagtcaatttcgagcgtcttgatatgttactgctcctgaatcagacatgcgagtgaaaagttatgaccattttaatttcttgagagcttccgttgttcaatttctagcgtctcgatatgttatgtgtctgaatcggacatg

SEQ ID NO: 17538 - DNA, 381 bp, Glycine max
atcttgcgttttatttcagacattcctttatttgcgcagcccaagtcagtatctagctcctctcgcatctctgatagaagtgtcttctgtagatcttccaggccattgattttgtttgatttttctctaacattggaaagaaaacttgcggcatcaaagtggttcacaatgttgttatacaaagctgtggcaagttctgtttttccgactccagggagtccccatacacccaacatgcgtacagtttcatcataaggcttcatgtctaggagtgacattacctcttccatgcggggccaaagtccaatagggttctgaccagtatgtaaaggattatgagctatgtgtttatagaccttgtcagctatcttttcaataaat

SEQ ID NO: 17539 - DNA, 421 bp, Glycine max
tgcaagttggtaggggatgagaagaataggctgttgataatgatgtatggaatccgtaaattgaaggggattatggaggtggagaagagaaagaatgattctgagaggaaggaagacactgaagcatgcaagttacttggagaagagaagaaaaaggttgctgaaaaggaaaaggaaattggtagattgaaggggtgtatagaggagaagaagagaagggttgattctgagaggaagaaagctactgaagcttgcaagttactagaagaagagaagaataaggctgccgtaaagggggagattgccagaattgaagcagagaaggcagtgaagtatagttttcagattggtcaattagagaaacaggttaatgaagcaaaaacaaagttggtgtctgagatttctacgtttagagaggcaa

SEQ ID NO: 17540 - DNA, 381 bp, Glycine max
tgtcttttgcagtttgaaagtcagacacattatccaattgtgattattttatctcattttttgttatttacttattaatttatttaatgtttttaatcaacacttttaagttttaattatagtgtctatggattcgctcactaattgttattttctaggcttttgcaatttcttatactctttgcacttgcaatttgatatctataatctatatgtatatagtatatacatacgaaatctatatttatagtatatacatatgaaaataatttataaaaggaatttatacacgtggtattttttaagagttttaatcaataaatttaattataatttaaaaataacaaaatgtcacagattaccttcttaacatcagaatag

SEQ ID NO: 17541 - DNA, 420 bp, Glycine max
  unsure at all n locations
ttgtatgggtccatttacaaggagtttgagggttatgtnttatttccgacgttagagaaacctcaaatcaaaagggcctacaacatcttcaacaagagcttctatcagagatacttgggcgcaacgatattaagctaaaaaaaatgaagaaatcaataaaaaaatagacttgggttaaaaagagttctaatatttctagacgatgttgataacatcgaacagatggagaatttggcaaaggaatgtgattagtttggtcctagaagcatgataatcataacaacaagagatacacatttgctagatcttgttggggtcgaaaagagatatgaagtgaaagtgctaaacgaccaagaatctctggagttcttttgtaagagtgcctttagaaagagttgtcctgaaacaaactacaaagat

SEQ ID NO: 17542 - DNA, 383 bp, Glycine max
ttcttattatccaaggcacattcttggtggtgaagctccttcttccatggcttattccctaatggatggtgcctcccctctcctcttctcctttgccttctgttgcatctccatggtggaaaatcaccattgaaggacctcaatgaagctcaaagatccagcctccatagaagctccacaagcaagcttccatcaagtggtatcaaagcacaagagcttcaagtaggtgctccttaaacctctattaattttttgctttaccttctcttccattggtgtttcatcatttttctccatgtatctcctcacatgtcttgtgctaaatgtttttaacatgattctttagagtttccaccaattaaacttgctatagaagctagatt

SEQ ID NO: 17543 - DNA, 420 bp, Glycine max
tacagtatgcccgagtcattcatccctatgagatgttgttgtattattggcgatcagaattgccattccttggattatagggttgaaccaagctcatgcttttacaaaaaggttcatcaagtcaagttgaaatatggaagtaaccgtcttgcaaaattggggcaaaagatgaatcgagtcacatcactgcttcgtctactgccaaacatatttaggattattgatgtccttgttacttccagtttcaccttgacaaagatgtcatggaccatgttgaaaatctaaattgattcaaccccatatcctgcgtaaaaattcgcaatacttcaactgtacatcattcgcatacatccatgcttttcattggttgcattgctcattgcattctttccttgaaaaataaaataaaatgaacttaat

SEQ ID NO: 17544 - DNA, 272 bp, Glycine max
tattcttgttaatggaggcacgttcgtcacgcttagttaccttacaggacgagaactcttcttacaccttgagaccaccgttagctctacaaatggggcgttgggcgtatgatgttgcggatacacgcacctgcaatctgacgatttgcatgtaagataacggggccctgtatcacaccttacgagcgatagatggctatctctacatgcgcatgggcaagtggtatgactatgaacatctagtatcgcactccctcttgagagacttgact

SEQ ID NO: 17545 - DNA, 412 bp, Glycine max
  unsure at all n locations
acacagctgccgcgacagatcccgtgtttatttattatttcagacggtagagcggctattgcctcctctcatagtcgaatagcagacactcgtactgcgttatatgataaagtacgcgcattaagcgttcttaataacctcgaggtgctttacccctgctatagtgcgaccctgatataggatctcatcacaccagcttgacggatgtcagtgtctttatatagcgccgcatgctgccatatagcctgtttcacgagagcctcgctcatcgtatatggctggctgatagtaggtactctcaacagctctatccagtcgttcatgtacaggttgatccatttaccatctgctgctgctgtggcggaatagacgtatacgcgcatcgttggaacatgattgggtaatgatctgn

SEQ ID NO: 17546 - DNA, 376 bp, Glycine max
ttattcttgtatgattatggggtacccatcacatgtggtactaagtggcggtcgggcgatggtgcacaacaagtttctccacatccacaatgcgcgcataaacccaccatcccctgttgcccacctccaactgagctcacgtactcccacgtagcccatatcctcgtttctctcaacaccgggtccccatcaatcctcccaagcttccacaacatccaagcaaaacaacattcacacagcacaagctatcacagccaagcaaaacagagcaaaggcagaaaactctgccaaaacaccaaccaaaagtcacagcttttaccactcaaagaccccagtaacaattccttcgttccaattcgttaaccgttggatcgac

SEQ ID NO: 17547 - DNA, 404 bp, Glycine max
tgtgtgtatgcacagttattagttaagttattcctttagttattttgaatttccaatatagttataaaatgcaattcaatgttgaagcataaaaaaactggatattaataactaaataatggtgaaaacaacaaaattagcgaagctaaaaggctaaatatttaaaagtaaatgattgttcaacatgtaaattaacaaaccatcattttaaaacccagaaaatacaaattaaaattcagtcactattgttgtcgccccaattttttttgtcttctaataacaatttcccaaattttgtcatgaagcctctggtagaatgagagttcgtatccactattgttgggtgagttcaacaatccatacatgcattctagatgttagtaggggtctatcgcatgattgtt

SEQ ID NO: 17548 - DNA, 423 bp, Glycine max
  unsure at all n locations
aggcaatcactcgaccgggatctctaagcacctgcagcattcttcttgatcctctgggctgtatatattagcatataactcattcaccatagctacatctatgcttccatcttggaggttggcaaggcgtttgtgtagattattgtttgaactcggaaagtgcaccggatcgcgcaagtagtataaaatggtaagaaccgagtatcaaactctcaggtaacttgtgttgcttggtaaagctatattcagtgaataggtgtctagtatgaaaatatatgtgtaaactatgatcaggtatgtaaactaactattaaaaagaaatatcacgtgagtaatgatgtgtatagacaagaagacaacgtgtnggttctcttattaggtgcctgattntataaggatattctttacttaacaatgctcatg

SEQ ID NO: 17549 - DNA, 412 bp, Glycine max
tgtgtggttagagggattgctaggaatatcttttattgatgaaaccgaagtatttgtattttagggttgacaataacaaatgctttttatattgaatttgagttgaaaatgaattaaaatgaaatatcaattttacttttactattactctatatttattgcttgattcatgtattatgtttataaatgccattcatatggataagacaacaattaggagtataatacgtgactttattttattttatatttagattcatactaaaccatactaatagtgaaagaggtgtggaactcacactaatagtgaaaatttctatacaattcctctccccttcttagaaaccaaacctacccttaaggaactacatctaccaagtcttgtccaggtgataactgttaaaatgagata

SEQ ID NO: 17550 - DNA, 382 bp, Glycine max
atctttagtcaaacaaaataatccgaaaatgtcaaagaattgagtgttgaaaaagcataacaagactttgtgtgattggtttaaagatacaatctttgcagatgagaatgcttcagaaacattaagaaatctagcagatgggcctaaaagaaatgttataacctggcaaggatacgacataaacaggtattcattttacacaaaagcacaagatgacaaaagtacaatgcagaacagcggggtcaccctaagggctgaatctcaacactttgcaagtgtcaatgacgccaatccctgtgtagcttccatcccttactttgggttcattgatgaaatttgggagcttaattatgtgaaatttacagtatgtgttttcaaatgt

SEQ ID NO: 17551 - DNA, 290 bp, Glycine max
ctcataagtgaaatcaggtgtagccattttcttatatttcttgatcgaggccgtacccgaatcaaataaacattaaaaatgcagtatctaggaagtgatcctaggtcgtctcccaatgagcaatggttaaccaaacattcataacagatagtaataaaatagttacgaattgggggggggggggggtgtctaactatgttgaaagaaatgatgtaatgggctatgcgggaaacgaccctgcctaatcaggcactacattgattacaatcacatcagacatgatattgcat

SEQ ID NO: 17552 - DNA, 383 bp, Glycine max
tctcttgcattcttctcaaggaggtgagcttagcttttatatcggtgtgtgtagctcatctctagctcttcaaggaagcttctcaaggaggtgagcatagtttttaaatggatgtgtgtagctaaactctagcttctcaaggaagctttctcaaagaagcttctcacggaagctttcttaagaaagcttctcaaggaagttttcttaaaaaagcttctcacggaagctacctactctataaatagaagcatgtgtaacacttgttgtaactttgatgaatgaaagtcttatgagatacacttcaaagttccacttctttccctcttttattacttcaatatcatgctcccggcttctgtctatcttttcctacattaaagcat

SEQ ID NO: 17553 - DNA, 403 bp, Glycine max
  unsure at all n locations
ntgcctttagggcttgtacctcatcactttcttctatgctttaacctcattgtctctcacagtctttagatttgggagccaatccaatccttgtgttcggactctcaaccacttatgatagccgccgatgatcccattacggcttcccctaagctctctgtccttcacgccgcatcccatgccttgcgaactccttggagtaccctcgcgttgtggtcactgaaaccccgtgcaatgaaaggcgtgatgctttcgtctgatggcactcctctcatgaggtagccaagctgtcttatggcgaggacgggattataattaatacaaccccttgttccatcaagggaacctttagacatccttcgtatgaagatagaatcccgattcttccttccttcttggagaa

SEQ ID NO: 17554 - DNA, 367 bp, Glycine max
ttcttgcatccagctcacgaatggatgattaacttgaagaagtctaagaaccaattatatgtttgttgaggaaacatcatccagagtcttgaatcattggtgatcataaggaaaaagtccagacaaggaactctttcaagcatacaactctacttttcgagatcgggccgaaacgcatagatgatgctatgtctaatgaatactgggtcaaagcaatgaaagataagttggaccagtttcagaagaatgatgtctagaagcttgtagaacttcccaaaggcatatatgctattggagcaaagtgggtgttcagaaacaagctcgatgaaatatgtaaggttgtgagtggaacaaagctaggcttgtg

SEQ ID NO: 17555 - DNA, 395 bp, Glycine max
  unsure at all n locations
ntaaaatttgaattaaaacattcataaactgctgtttatcgattaccatatatgtgtaatcgattacacagtgcaaactttgaattcaaattttaatagctattgtaaatcagttttggccactggtaatcgattaccaaagagtaaatttgttgaaaaagactttttaacttaaaattcttggccaaaccttttgctacttcaattggaattcccttcctatttaatataccctttctaaaactctaaagattgtcttgatcatccatcttgaatatcattaatttctttgtcttgaataaagctttgagacgcatgtgatcctttggcatcatcaaaacatcagcttaatcctttgtctacaatctccccctttttgatgatgacaatccctg

SEQ ID NO: 17556 - DNA, 385 bp, Glycine max
ttgtcttgcaatcttcatggtgaatcaaaggtgttttgatgataacaatgatgataacaaaagatgatgactaaggtgatgacaaaaagctcaaagatcaatcaaataacaactcaagtgaatcaaagatcaatcaaagcacaactcaagtgaatcaagaacaattcaagagttcaagataagaatcaagaagaattcaagacacaagaagaaagtttagagtcaagaatcaagaatcaaggtttaagatctcaagaatcaagagaagacttaatcaagataagtatgaaatttttttctcaaaacatgttaaccaaagagttattactctctggtaatcgattaccacattgctgtaatcgattaccactagctaaattgtttt

SEQ ID NO: 17557 - DNA, 410 bp, Glycine max
  unsure at all n locations
tgtctcanaatccttctctaagttacgaagtcatgttcataataaaaatagtgcatcatccatgattttgttagcattgaatatgtcgttagtcaagataatgttgttccgctgctgccaaatagaccatgtcaacgctagccaccaacacttccacctgttgacctttacagcctcagccaccccaaatatatgttgaaggaaatgatgttttgggttttgcgggagaggacccacgcaattcacccaagacatcgattcccaccacagcggactgattttgctgcaatgaaaaaacgcatgacctgtattctcctccagattactgcaaaacacgcaactcgtatcatttaattccacctgtcgtctgtgaaggtttgcccttgtaggtagtcgatctctaagtaacc

SEQ ID NO: 17558 - DNA, 380 bp, Glycine max
agcttatcgataaaattaacttgacagtgcaccctggattgataattgaccattttgttgtcaccttacccgtatgaccaacatttttacttactcaacataaaagcttcttggaaccatggataaccagattgtgtaaccatattgttcaccttatccgtataaccggcttaatcaacataaaagtaactcatccgtggcaatgtgtgaccagcttctttaactcacctagagggatctgtggaaatgtctaccacaaatgttactaaaagattgaccggtagaagtaaaactacatacgtagcattcaccgtcatacaaattttgcacacattcttccatcattagcaaaagataataaaaaaaaggttccagaaatt

SEQ ID NO: 17559 - DNA, 421 bp, Glycine max
tattagcaggctaaagaccaaatgtcatgtacgagtactctctgtgtcattgccaaacttttcaaactgaaaattttaatacttgcatgtttcggcacgagtccattgtaaaaataaaaataaaaaacttaactttaatactggaatcagttgattttatattatgattttaaaaatattaacaaaagaagacaaacaacttgttgatgtcaaaacctgggtctggtcttgactcgttgtaacagaagtgccggcatgactgagtcaaagaaaaacgaagtcaattaagtgggaaatcagaaaactttgtattcattcacatcttacatgatgaaatcctccgcatcattctttgaattgacctcaaattaatatgcattgtaaataccattctagacgcatgcagttcaagggttttgtg

SEQ ID NO: 17560 - DNA, 382 bp, Glycine max
ttctttgttttggaattgcgaaagccccactccatcattaggattagtacctgacatctcaaacaaacaaatcaaacgtaacaagacaattatagttgctgtttgaatacctcacccactcaagtgtatcacacaattatggcttttctctaatgaaacactcttgccttttaccactctaattccccttgagttcttaggcaattcaagagattatggccacaacaaagaacaattcaccaatatgtgtaaggtaaggctagacaaggaaaaggttaaccaagacaaaggctaacaatgtttttacgcacaaatgaaggaaataaaattcagaatttatgaattcaagtaacaatccttcatgcaaccaatatattacctt

SEQ ID NO: 17561 - DNA, 420 bp, Glycine max
  unsure at all n locations
ntaacattcaatttcgagcgtctcgatatattacgttcctctatcagacatccgagtaaaaagttatggtcgtttgtatttgctcagagcttccacgttcaatttcgagcgtctcgatatgttacgggactcaatcagacatccgggaaaaaagttattgtcgtttgagttggctcagagattcaacattcaatttcgagcgtctcgatatattacgggactcaatcagacatccgagtaaaaagttattgtcgtttgaattggcttanagcttcaacagtcaatttcgagcgtcttgatatgttactgctcctgaatcagacatgcgagtgaaaagttatgaccattttaatttcttgagagcttccgttgttcaatttctagcgtctcgatatgttatgtgtctgaatcggacatgcg

SEQ ID NO: 17562 - DNA, 408 bp, Glycine max
ccgtgatactctgagtcacctgcagcatgcattctttgagctaagtatctcttggaaataaatttagattgtattcattcttgtctgacaaaatcacaactgcaaacttaaccatcttggattttatcaaacactgaaatgaaggaacatctttcagattattggttatggagagattatgatggaattgaatcattatttggttttgatgtgggtttgccaagcatttctattttcaccaaagtcgtgatctaatttcaattaattgttataggattgaggccccttgggtaccgatcatagaaaaggagaagacatattggagaggaaaaaaatcatgtgcagagggtgtaccatattaacttgtggactagatgaatgcaaggatgtacaaaaatgatccaccat

SEQ ID NO: 17563 - DNA, 417 bp, Glycine max
  unsure at all n locations
ngaaagacgagacttttccaatgaggaagagaatgttcagaactgcttgccagggaaggtagtgatgatggtatgctggctgaggtctttgctgatgcacccctgctgtaatgtgccacttttcaacccctatagaattctgtaattttaggatttatcatattttttttccagagctgttctattatttcccttattccacgtgaaaaatattttgtgacttgtgattgaaacaaaaaaggatattggaagacacctgactgttatgtcatcttttattcaaatgaatcatctccattttccccatcttttatttggattgcttaggtttgtaaaggaggaacaattgctcgttaattagcataacaacaattcanggaagaggatggcataaagcctctacttgaataatttgta

SEQ ID NO: 17564 - DNA, 385 bp, Glycine max
  unsure at all n locations
attctttatatatatcgaggcgctcgaaattgaacaacggaagctcttgagaaattcaaatggtcataacttttaactcggatgtgcaattcatgcgcatcacatatagagacgctaaaaaatgaacaacggaagctctccaaaagttaaaatggtcataagctttcacactgatgtccgattcaggcttatattatatcgagacgctcaaaattaaacatcgaatgctctcgagaaattcaaatggtcataactcttcactcggatgtacgaatcaagcgcatcacatataccgacgctcgaaagtgaacaacggaagctcccgaaaaattcaaatggtcataactntacacactgaggtccgattcaagcatataatatatcg

SEQ ID NO: 17565 - DNA, 416 bp, Glycine max
tcttttggaccttgaacaggcaactaactcctctttcaaaaccatgctatgtgctcgcgactggtccctttcttcctttcgcaacttgagttcactattgctaccccatagagctccgcgaaatttgttccggccatactcttccttgcgagccctcttggtctcttgttcaagggctcttgcggtaattgcattctcttcccgtaacccggcacactccttccgaacgtgtgtagcggccaacttgaacttctccttggcaagttttgcctttcctaactcgcttttgagagcttggacttcttcgtcctcttccggtgcttcaaaactctctttgctgacgacttttaacttggcgagccaatctaaacctcgtatatgaactttcagccattcgtggtacccaccaatgatgc

SEQ ID NO: 17566 - DNA, 374 bp, Glycine max
  unsure at all n locations
ttcttcttatccaaggctcatcttggtggtgaagctccttcttccatggcttattccctagtggatgacgcctcctgtcacctcttctcctttgtcttccgctgcatctccatggtggataatcaccattaaaggacctcattgaagctcaaagatccagcctccatagaagccccacaagcaagcttccatcaaagtgtatgaattttaaaatccaatcctacagtttcttgaattaattaaattcgttattattgtttctgtaattntatgtatttttgacacactaaattcgattatatttgttatttcattcctttagttattttcgtcaattaaacaaacccatgatatttcgattaaacttgtactta

SEQ ID NO: 17567 - DNA, 394 bp, Glycine max
  unsure at all n locations
tgttgccattagaagagaatgagcatgtgattggtattatgactggaattgttagtcagtttgccagattgattgtgaaggaatgcattgaccgtatcccggtgagagtgtgatccttaaattttgagagaaatgactatcatttaatactgatttttgcatgaatctttgaagtatggactgaatgcatgaaattgaggatgatgaaggccatgtttgattgggatagccacttagccacgtgtttgaatgatttatcctttgcacctaatttgagctgaatgaattattgattgattgaaccctgagtctatagagtgttatctcttgctaccttgacttaggttgtaggagagcatcatccacagaaagtgtggttcanagcanatttgtc

SEQ ID NO: 17568 - DNA, 380 bp, Glycine max
cttgccatgatgcttggaatagtttatcctttgaagataaccataaccatgatctgatttttaccaactccatcaccttttcatggcctttactgccattattaaagataatggagtttctatgaagccaaataatccaactcattgtgcaccacacaacttcccatctttgatttgcaattgatccaactctcagtatatagtgctatagatagtgatcctgcggttggttatgttgagctcccatgactcccaaccatctaaaacacaaagaccacacttcctgtgaaaaagtgcaaccgaggaagagatgttgtacactttccaaatgctgagagcacaaggggcacaaatagttgttgtttggtcgtgccactttt

SEQ ID NO: 17569 - DNA, 413 bp, Glycine max
tgagatgaggaagtgttgaagggtgaatcttcctgcttttattgttgaccacagagtggtacctggagatatgtcgcgggggtcaggagaccttggggacgtcaggtggggtgctattgcccaaaaccaagcttgaccaatcccgacccaacccgggcatagtcggtcagtgagaacctgtgatgtacctaagcaggcgagctcctggcagtcaacagataaaaggaaaacaagaccacaaagcaaggaggcttgtggtggctggccagctgtgaaacttgattgatatgtgagatatggtctctggtaatcgattaccaagggtgggtaatcgattacaaggcttaaaaatgaaaacagggggctaagatggtctctggtaatcgattaccaggggatgtaatcgattacca

SEQ ID NO: 17570 - DNA, 381 bp, Glycine max
  unsure at all n locations
ttcttctcccccaattttctataaatagggggagaagtgaagtgaataagggttcagccccttaggcacttctctctctttcgaatttgcttggaaaaattgtttccgtgaagaaaatccaagccgagacgcttccgaatcgtttccgtaacgtttccgtgaggaatttcgcgaaggtttcgactgttcttcgacgttcttcattcgttcttcatcgttcttcaatcttcaacgggtaagtacctcgaaccaagcttttcgattcattctatgtacccgtggtggtccacattgtgtttcatgtatttttattctcgtttcatttactttntatacccccttttgacgtgcttaagccattntatttaagtcatttctcgc

SEQ ID NO: 17571 - DNA, 412 bp, Glycine max
tgctccagagattgaaggcttagtggctgccatattattatgtcttctgatcgcatgttcgttggacactagtgatcggagacttatatctacttttgcggagaggtaacataaggaaactagtagtttccatcttccagtaggagaagtgaccatcaccctggatgatgtggcatcgttgctacatttgcccattataggcgcattccatagctttgaggattttcttgtggatgaagtcgttttcctgttagtggaatttcttgaagttagttcagaagaagctagagctgagacagtacaatgtcatgggacatatgttaggatatcctgggttgagacatttatcgtagcaaatgtggcgcaggacagtggattgtaatagctcgagcatatttgttgtatctagtag

SEQ ID NO: 17572 - DNA, 381 bp, Glycine max
tatcttctcctttcatggcttatcctctagtagatggcgcctcatctcacctcttatcctttatctttcgctgcaactccatggccgaaaatcaccattgaaggaccttattgaagctcaaagacccaaactccatagaagcttcacaagaaagcttccatcaatattatacttagactatcctaaaaaatgatagctttttcaattggaaacccaagattgctaaccagacctttaagtcagatcccatcctttattgcttctattagagcatgcattctacctttgtagtggataaaaccacaatgggctaaagagtttccttcacactatcaagagagttgccaatgatgaatgcataccttgtcatagttctccttg

SEQ ID NO: 17573 - DNA, 413 bp, Glycine max
ttgaaagctattacggtggaaataagtttatctatttgatgttatcagcgagactagcaggattgtgtgttttgtaatccgtgtctttccaaagcagccaatggggacatcattatacatttagtacattacccacttttaattttaaattgggtccagatgtggataagaacaactaaactaagtcatttaatgtattgcttttatttaatgtatttaaattattagttattgatttgagaaaaaatattatatcttactaacaaatttaatgtggatagcatagactgccagtttaaaagtttttacattgtcaatgatcaattaaaaatattctttcgcatgactttcaaggtagttatcatcaaaacaaacaaacttatcatatatatatatatatatatatatatata

SEQ ID NO: 17574 - DNA, 381 bp, Glycine max
ttcttaaatgagtattttcagatctgtctttctttttgctctcttcttcttgcacacaatgaggtgtaaactcattgatggaccatttgtccttctgagtgttataactcactttgaattgcccaaagtgtgtagaaagtgagatcaaaactaaatacacgagcaggtcttcaccaagctctagcttaagtgctttcagttttgatgccaagttagacattttcattgtgtactcccttatataactttcccccctcttttttaacaaaaaaaataacataaaaaaaacaaaaactgcatgcacaaaaacttccctatatatattatgaacattagccatgaagagaagtgattcacaaatccaaataacgattccaaaaa

SEQ ID NO: 17575 - DNA, 411 bp, Glycine max
tgagaaagtccttttgattcagtttatacttttctgactttatggcatgagatgaaattcaaagattggacctcttgctagttgttattaatgaatagcttaaacacttgtgcttgagtgaaacagtagccgtgagactgtggtttaagctaattttcttgatatctgtcttatgattagctccatctaattgttcaaattacattttattcttctctttggataactgcataccttgtgaaaggcaagtgatgagggcattttactccattctcttatcatgcaatcagtaacttttgtagcatacacctttgtacatagtcactgcatgttgttgtcacttgaggacaagtgaattgttctctttttgcttgaggacaagcaaacctgtaaatattggggagttgttag

SEQ ID NO: 17576 - DNA, 377 bp, Glycine max
ttcttttcctctagctgttctgataaggtttccaaacgttagagaaggagaagagattgaagccttcattctactgcctgcatgcaatgaatatttctccctaacaagatcaattttcaaatcgcaacggtgaaaatatgcagaaatgaatttcgaaccaggtgtcccaatttcacaatgatccaacggttaatgagtctgggattatagttttactaggacaggttttgggtctctgcaggaaaagaaaaagttaagatgagaagggaatttctctcacctccaactctgattcgcaatttccatcggtgagaatacttgaatatgagctgcaaacttggtgctcaaatttcacaacaatccaacgattaacgagt

SEQ ID NO: 17577 - DNA, 409 bp, Glycine max
  unsure at all n locations
tcatgcaacccaataaattagcatgtcttttcctctgttgngtatataatgaccatttgtgctgatatgaaaacacttccaagtacaaaattgattgatttataaagaaagaattaacacatgtactataatttccatacattcatgctacctcgagtcatgtttttttctataaccacttgaaataaattgtaacttttctttttaaatatcaaagtcttcaattaagtagttttccaaataaagcagaagttatgtaaaagtatcatattaatgtcctacgttggtctgaacttatgtacaaattaattttttacacactcaaataatgcacaatcaacacaaaatcaccattgacccatacgaatngcaaatctataatgactntacggattcataatatgtatca

SEQ ID NO: 17578 - DNA, 370 bp, Glycine max
  unsure at all n locations
ttcttagcccaagagaggatggaccttttcaggtcttggagaggatcaataataatgcctataggttggacctcccaagagagtatggagtcagcaccacttttaatatttctgatttaattccttttgcaggtggagctgatatagaggaggaggaaccaacagatttgaggtcaaatcctcttcaagggggaggggatgatgcaatcctccctaggaaaggaccagttaccagagccatgagcaagaggctccaagaggattgggttagagttgataaagaaggccttanggttctcatgaaccttanggtagatttttgagcccatgggccaagattgngtccactcttctttgtaaatagtagaat

SEQ ID NO: 17579 - DNA, 454 bp, Glycine max
  unsure at all n locations
ntgattgaatgatccttgcattcgngacctatgaatactcaccttaccaaagaaaaactctagggctaaggccaacttatatagcttttaaaaccggaaagggttaccttattctcggtgccgaaatgccaaggccgtcctccacttaccaatttcccaacttgaaatcaagaaggcatgggcgtaccaaatcccatgtactcggaacatcatcttcgtatatcgcgaccacttgaccttcgtctcccagacccgcgcttataaagcttctacttatgtggcagggcgggcttccttcacttccttgtctcaaacgcgagctttgaccaccgctcttccttcccgcgatgcttctctttatatctgcctgagtgggcttatagcctaaagcatacttcccacgatttcctttggcatttatcaagctagttatgccggccntggcttttgctan

SEQ ID NO: 17580 - DNA, 375 bp, Glycine max
  unsure at all n locations
ttcttttccaaagtggtcttcggcattacatttaaactcgatcaattgtcgataagtacctttgcgacaacgtggtccatacatctcaccgacacatgtagagccttgttgtgtcctctcccctcaacgggaatctcttcttccgcaaacgcgatataattgttggtggttatatgattaacgatgccttcaaaaccctccactgagatatcatgtgctacatgggcatcgttaaggaccttcatcaacaacgcacgatgaggctcggagtttatgagtagttcaagcaaagagatccttgctggagtcttattcagttgctcaactaccttanactcgctttgttggatgaggcggaggaactcatgggcctct

SEQ ID NO: 17581 - DNA, 409 bp, Glycine max
tagtttaacataaggatcagaagttcccagcaaattcatgtttaaaagcttttgtgcacgaacctcattcgcatgttatatcctcacaagcttctttattgccaccctataaaagatgtgaacaaagcatcagacatcttcatagagcaaacattgttattttaaacttaaactttgtcaattcatagtaaatttttaacaatagtgaagttatgttttaaataataatatagttctagtaagatatgggtgtttgcgtgtgtcggtaagtgtaccgattcgcacaagtagtataaaacggtaagaccgactatcgtatcttcagagaatttgtttcacctagaccatgtacattcgatatgcaagcacttatacggattaaaataaggcaaatagtgagttctgtact

SEQ ID NO: 17582 - DNA, 356 bp, Glycine max
agcttgagtgagcgaaagagagagaggcacaggcttgttgctcgtgtgctgaagtgtgtgtaagctctacatgtgagcgaatatgttgaggatttgatggaacctgctatttataggagtggagcgtagctgtgggtccctgtttgtaggggttgttatagtctttgcagataattaccgacttatagataatacccgagagcttgtacataatgttagagataaattgtagcttatagataaaagctagaagataattgtaccttgtagatagtgtgtggctttatagataattaactacctaccaatagataaagatattcaaatattaatatgttagagataaccttgtagtt

SEQ ID NO: 17583 - DNA, 418 bp, Glycine max
taatcatgctaaaagatcaagaaactaggggatttttgttctttttttttacatcatatggtgaaactaaaaagatactaggagatgctaaagaccaataaaaataaaaaataaaaaacaaaaaacaattcaacaaagcaagattcatgattgatgaatgaaacttatatactcaattgttggatattataacatacaatatatcctacaaaatttgtaatatcttaggttaaaagtaattatggagatgcaagtcaagagtttgtaggggacgactaccatcttggcaagatacaatctcagagataaattcaaataaaagatggttgctgaaatcaatggaatgtaaagtaagattatagaagaatttcataaatccttccattgttttgacaagacgcatctctaagaaattttt

SEQ ID NO: 17584 - DNA, 365 bp, Glycine max
tgcttgtagaaaatactcttaaccagagcatccaactgttaaaagcaaattttcacagagagagtttcaataaaatcttatgcatccaaagataagatagaagcaactaaaaataaacaagttataatagaaattagagtaaaaacacaatgtttatactagttcactcaacttgagctacatctagttctcctttatgacaccatcaagtgttccactaatcaaattgattacaaatgagtttttactttgccactcttggttacaacaagtattttctatgccacttctagcttacccttaatctcttcccgagattaagaacacccaagtattctttgatcactaaggaacttctgactttt

SEQ ID NO: 17585 - DNA, 416 bp, Glycine max
ttgagccaaaatcctgactcaccataaaccttgttccatggtgagaatgtcaatccttaccctcggaagcaaaaaagaaaagaaggaaaatttccaatcaaagagaaagcaaaaagaaaagaagggaaattcccaatcaaagaatgggagaaaaaagaaaaaaaaaagaagaagaagaaggaaagaaagctcctgatcaaggatcgaaagaaaacataagaaatgtgcagagaggtctttggaccagacgatatctgaacaatacagaattgtcaccaaatgaacaaaagatagaaaaggaaaccatgacctaaaagtggtcttctccctttcattatcaaccaaaatcctgtgcgctagcgactttttcgccccgcactatacaaaaatagaaaaggaaaaagccaaccaaaaat

SEQ ID NO: 17586 - DNA, 367 bp, Glycine max
ttctttactatatccaagcaattcaattgccaaacatcatgaactaccctaaaccaacaaaacagggcagaggcagaaaactctgcccaaaacacattcacatattatcaactttccttactcaaataccccagtaacattctcttcattccgatttgttaaccgttggatcgacttgaaacttttactggatgttcctagtacataaatatacattttgaccgttgggatctgctagaaaatgtccagaacccaatatgtactacctttcccataaccaacaatacacatgcattttctgcacatgaacaaaaattctgctatacaaatttgacagcaattttcagcataatagggcagatttcga

SEQ ID NO: 17587 - DNA, 390 bp, Glycine max
acttgtgctattcatcttttcattctcttctccctttgccaaaaagaattctccaaggactaaccgcctgaattctttttgtatctctcttctcccttttccaaaagaacaaaggactaaccgcctgaattcttttgtgtctcccttctcccttgtcaaagaattcaaaatgacacagtctaagaattcttttgatacttcccattcccttatacaaaagtgttcaaaggactaaccgcctgagaattcttttgtatccctattcacaaagtatcaaaggtttaacagcctgagatatttgtcttaacacattggagggtacgtcctttatggtacaagtaatgggtacatctacttgggtttgactgagaacaagagagggtacatctc

SEQ ID NO: 17588 - DNA, 379 bp, Glycine max
  unsure at all n locations
ttcttgtacataacaagaggacttgcaaaaattgccccattcattcagaaccaacagagactcgtgcctaaggtgagggagcacccantgaagaacaacaaagtcatgttcaagttgaaccaaatggaacacaagtgctaactgaagtgaacaccgaacatgataattgaacacatgaaatggaaattgatgcagtgattaatctgctaacacaagctagccaaacaaatccaaacaaggtaaaatctataccattctgaggtaaaagctattgtgtatttcactttcattttcagtctttaatggtccctttaccagaaataatcaaaccttgtctcaaagaaaactggtcctgcatttgcatctactaataattctg

SEQ ID NO: 17589 - DNA, 400 bp, Glycine max
tagcgagacaacaacttttgcaccttcataattttcttctttttacctgaaattgaggtgaaatgtacattatattcataaggaaggcttctaccgagcacatatgaaaactaaactagaaatatttacaatcctaccaaaaataaccataaatttggagatttatatacattgtgtaaaagttctctatacaaaagttagttgtataagacgactaacaaacttccccaaatttacagttttgcttgtcctcaagcaaagaaagaatagctcacttgtcctcaagtgacaaaatcacagtggttattcacaaagtgtttgctccaaagaatttaattacatgaaatgaatggcatacgattcttcaatcatagctactcacaagacatgcagcttttca

SEQ ID NO: 17590 - DNA, 318 bp, Glycine max
  unsure at all n locations
ttcttttatttttgataagaagcttgntgcataattgaatctttattgaaatcactgctcttaaactttctaatttttcttctttcccgctatcactgatggattttcctgtgattattgtgtagattatgataatatgttttttcaaatgtattttgttatttggcatcaatttgtggaaaaattagggcctgattgcatactaaatactctgataataattctctccagtctctagtctctacaacttgctttgtcttttgaaatgattcttgtgattggaggtttatatggagtgggggcacatgatgaaatgct

SEQ ID NO: 17591 - DNA, 408 bp, Glycine max
  unsure at all n locations
tgcatgagatgcagggtattttctcacaaatattattcattactccaaggttttccatagttatgactttggcaagtattatttggtactccaaggtgttttttaccaagcaatatacacacacaacttaccttgcaagaataacctatgagcaactgaagttataaaaatagcatgagctctctgccaatttgcacactgaagaaattggtcaagggcttttgagtgatccccattataattataataaattgcctgcaccgccataacaaaatcattcaaacaacaataagagtcatttaaagaataatacaatactttgcaacnattccagcattagcaagcccattaatcagtaaagaacaccatgacaacaatttaattcagtttagtcataaattgatcata

SEQ ID NO: 17592 - DNA, 383 bp, Glycine max
ttcttttttttcccactcatacaatagcgtccggaccattcataccaccctaaccccaaaaaccaacaaaaaccacatcaaaatcatgataatgaaaatggaagatgataggggaaatataagagtttcttaccactaaactagccctccaactcaaatatagttttgctacatggtcccttgagcaaaggaattcaaggtctcaatctctctcgtgaaacgttgtcattgagaggaagaatatcgtacaatgaaagggttcaccatcatcttaattatgtcaaattaattaaaatcacttaatctgacattatgaaaaatagagtgttacatgaaaatatatttaaatttaaaattccaagatcacattttgactgttaaaa

SEQ ID NO: 17593 - DNA, 337 bp, Glycine max
gtgtgatcttttttgtgagtgaacgactagctgtgagtaatgatctttgcatgaatctctaaattttagaacgatatgtataatgaggacatgatgaaggccatgattgcacatacacaagctcttttgaccatataacttaccttcaataatacttgcatcttttgctcccttacatcagcacacacaacaaataagttgtatgttaaaataaaatacaaagaaagaatagaataagtgtgttgtttcaataaggtcaaaagcaacttgagaaaaaaaatattgagaaggctacgtgtataatacaagataagaccattcggataagtcaaggatt

SEQ ID NO: 17594 - DNA, 382 bp, Glycine max
  unsure at all n locations
ttctngttcataacagaatctatacattgcagtccactcaattcatacaatttctcattcaaatcaatcacaacacttcatttcatacaaaacaaaccactgaatatcatattcaatcaattcactgctcaaacatgcttttgtacaagctactactactaacaaaatactgaaatttaaagactgaaaattaaataattgaaacataatgcataaaataaataaactaataaaaataaattgctcataacgcaaaaagataaagatcctgtcaatcctcttgtggttgatcctttgcatgctcattaagatccaacactggagcaacttgtggatcctgtgagatgggctactcttgctccaatgctggtgcatatggctg

SEQ ID NO: 17595 - DNA, 411 bp, Glycine max
tccttttagtgcgtcatgtctaaaaccaagttcattggtggtacgagcctttgaccgtagtgggcgggaagtgatgggggaaatccacatccccattcagataggcccttacacttgcaatgtggtttttcaagtgatggacataaatcccgcctacagttgcctcttggggagaccttggattcatgcactgggagtggtccctttgacgcttcaccagaaattgaagttcgcggatggtggacttttggtgatagtgtcacgcgaagaggatatgttggtgagctgcccctcctccgcaccatatgtagaagcaccaaaagaatcattggaaacagctttccaatccttcgaggtggtgagttgtgcctctgtggaaacgagcccgttgctaccttctctctctaatgc

SEQ ID NO: 17596 - DNA, 335 bp, Glycine max
tctttcttctgcaagccctgttctatatgctagattgaatagtggggagcttgctcttcgacttggtgctgatcatcctgctggagatatgacattgttggaaactggcgaacctgtgtattctccaatcactcaggtttgataaatatttttttttctgtataatcactatttaaaaatactcttgtacttgagaactttgggactgtttcatgtatgaaggacctttgcttacagaaaatctaatcatggaaacagaggagtctgtgctgcggacagggaggtctgtatgctaactgagattcatccatgacacaatctgttatcttaaatct

SEQ ID NO: 17597 - DNA, 391 bp, Glycine max
agcttattaatcaattgcataagaaagccttgataatattataatagtaagcaattgagcatatatcctggaccagaattcacatcactgaatatgtacttttgcatctctttccctttgcaggttagattgcatgtggaggtgccatcattggtatgtgaggattgttacaagagggtcatagcatagtttatgaagcaagcaaaggtgctagctatggggttacacttgctttatataattatataatattataattgaatgtctttctcatattctggctcaaagaaaatatatgcatcaaattattgttgtctgtgaatatggtacactttatattttcagtcatgaggatttccagtttctaaatttgaaactataacctctcaat

SEQ ID NO: 17598 - DNA, 357 bp, Glycine max
ttcttgtagaactccccaaagtaagatctactcttggagcaaagtgggtgttcaaaagctagacaaaataggtaaggttgtgaggaacaatgctagacttgtgaccaaaggttactcacaataggaaggtatacattatattgaaacttttgctcctgttgctcatctagaggcaatatgcattatactatcctttgttgctcatcatggtatgatgtggtatcaaatagacgtaaaaagcactttcttcaatggacttatcaagaagtttatgtggaacaaccccctgcgtttgagagttctatctaccctcatcatgttttcaaaattaataaagctttgtatgtgttaaagcaa

SEQ ID NO: 17599 - DNA, 390 bp, Glycine max
  unsure at all n locations
tncacagcatgtactcaattattcttattaattattattttgaaataaactaaaaagttaccggggggtcaagatatgtaataataatagttttttgttatacatgcctatgcttctagatgttgaatatttaatggctaatcacttgagtgttgagtgtgttcacttggaggcatgtggtggataccgtgatgtgtcatctgtcagtacttgagcccacatgtactgatattaataggagggatttcatggaatcttgaaaaacaaaattcctcattttttaatattgtcgtactaattaaattctgactcaaaatacaagtatctaaaattaactcttttttatgataactattttggacagtgaaaaatatgataacctaaccgttt

SEQ ID NO: 17600 - DNA, 375 bp, Glycine max
tcaatcttatcatgtctagttttcaatgatggtcatcaaaatgacatatcatttccatatcattcccagtttacaaaatagatagtaaaggtcaaaacagaacatctagcaaaagggtcattatgtaggaattatttcaaattcatttctcactcaaattgaacgtatttaaatggattcatatgcctcaaatataatttcataatataattttacttttagcatgcaaagtctcagacattcctagcattcaatttcatgagacatgtcacaaccgagattttcacaaacaccttgtgtgcatgatttttaatatcaaacaacaaatcaatcatcacacacacacacacacacacacacacacacatacacaca

SEQ ID NO: 17601 - DNA, 400 bp, Glycine max
aactcagcttaccctatatggttaaaaggtgctattgttagcctatctctatgttcccaacctagaagtgatattctccaaaaagctataaacttcggctgagtgctcttgatggaggtgaagcataacatccatcttctgaatcataaaagactcaaaaagactccattgaggtgcaaactcatgttgagcttcagcttcaacatcttcttccatctttttagtgtttctagcaacaggctctctaggctcatcttgataatcaggtatcaagatgctataacataaggaaactcataatccaccagacggtgacacttcaacataatgctacaatcgaaaatacccaattcatcttgatacctgatttcaaaccataaacaatctacatatcatcatc

SEQ ID NO: 17602 - DNA, 337 bp, Glycine max
agtatagcttatagatcaacctttgtcattttattccatagatcaacctttttcattttattccaactctattacttgcctttccgcacttagcttttctttttcttaaatagcaacacacacacttttatattatacttatagtttttttttaaatacttgttgcttattagatgactgtgtgtagctcttttcttaccattacaagctttgaccccataattacccccaatttgggcaaatttgctttgaaccaaaattccttttatgaatgatgctttcctacaacctaagacaaaggtaaaggatataaactatacagaacttatgttcaatc

SEQ ID NO: 17603 - DNA, 408 bp, Glycine max
  unsure at all n locations
tattacaccaaattcaataagatattcatatatttatagttatcctaaaattagtgtgcacaataattacatgtcatttntaacagatcaagcattgactaaatgacttactttaactggagtccatttagcagtttccttggacttacatccttgattattgttcaatcccttcaaagcattggttaagagaaacatgcatgcatattgtacaattaanatattgatgtcaaatactaatgataaagtaaatgtctaacaaattacaactaacatgttaataattcctttcaagtagttggtgggcttattgtgcaaggaaccataccagacgacaagattgtccttatgacatataatgacaaactgccaatgttcactgcattggagagcattaagttattatat

SEQ ID NO: 17604 - DNA, 325 bp, Glycine max
ttacaatacactggccgtcagtttacaacgttatgactgggaaaaccctagcggtactccaacataatactccttgcagacacataccctctatcgacaaactggctgtaatatgcgaataggccccgacaagatcgcccttcccaacagttgcgcatcctgaatggtgaatggagcctgatgctgtattacatccttacgcatgtgtgcgagatttcacactgaatatggtgcactatcagtacaatctgatctgagccgcaagttaatccacccctaaatccgcaaccccgctgacgcaactcttcggtcagctgaatcatca

SEQ ID NO: 17605 - DNA, 385 bp, Glycine max
agctttgagtgaaaaacatactagaagttgtcactgccaaagagagactgacaacgagagtgagacctagattgagagcaagagttagaccaagagtgacagtgtcgacagtagttttagcaccacaagagtgatgagagtgagagtgagagtgatagtgagaaagggttcgagggagtaaggttgcaaagtgagggagctcgagggtgtagacaccagatcaatttttataaaaagacccaacaacatcaatttttaaaccaaaccaatgttatcaatgcattccaaaacatcaattttacgaaaactgatgttgcgaacaaaaactcaacattggtttttagaaaaccgacgttaacattatactagcaacatcgattttcgt

SEQ ID NO: 17606 - DNA, 412 bp, Glycine max
tattaagaggaatggctaatcagatcacagacattgaagttgacctatgtgttgatatccttaaatggcaaaaaagaagagctgttttagtctggtgaagaggtcttatatgggacaaacattccacacaagataaggtgagtctttaactcttgagccttttcaaattaagtctttaacttggattttgtttcttatgagacaatttttttttattcaaaaggagaaaagaatgaaatggatatttgcaaggctaaagagcaagagatttccttcaattaaatatcccctaccctcaaaaggaacaacactaagtgaggcagagcaagaacagagcaagcatgctttaacagtggtcattgcctcagcagcagttgctgaagctgctgttactgctgctcatcgcctcact

SEQ ID NO: 17607 - DNA, 376 bp, Glycine max
atcttgtaatcgattacacaagtcttgtaatcgattaccagaggggatttttagaaaataatttccaagagtcacatctattcaaatgttttatgaatggccatcaaaagtgacttggaaacacgaatttaaagagagttttcattgcccaaacagttttatgctctcaaaagattaagagtttttctgaactgaaatgtcttatcctctcaaaaagattccttggtcaaccacttgcatattcaataaggaattttgattgatcttcattgtacaatctatctcttttaagagagatttcttcttctcttcttcttatttctgacacaagatttaagagaccgtgggtctcttgttgtagagaattcttgaacac

SEQ ID NO: 17608 - DNA, 412 bp, Glycine max
  unsure at all n locations
tgcccgttagaaagccaccgctcatgcacagagaatggtaggggcaaattgggaccgactcttagcaaacaaagaaggagtgtctgtcaactggttcccttgatggaaagaaggaagaaccggggttcttatttcgtgcggaggatttctgaatgttcccttgatggggacaaggggttgcatcagttacaatcccgttcttgctataaggcaacttggctaccccatgagaggggcaccactagaggaagagctcgcgcctgtcatttcacaaggtttaaataagaccaacatggagacacttcagaagtttcgcaaggtatgagaggtggtgcaaaagaaggacaaagaactcaagggcagtaacaatatgcccatcggtggctaccgtaagtggtngaaagcccacatg

SEQ ID NO: 17609 - DNA, 364 bp, Glycine max
ttctttcattgttcaattcccagcgtcacgatatattatgcccctgaatcggacctccgagtgaaaagatatgaccatttgaattgctcaagagcttccattgatcaatttcgagcgtctcgatatattatgcgccataatccgacctgcgagtaagaatttatgaccctttgaattgctcgagagcattcgttgatcaatttcaagcgtctagatatattatgtgcctgaatcggacctccgagtgggaacgtatgaccatttgaatttctcgagagcttccattacttagtctctagcatctcgatgtattatgtgctctaatcggactttcgagtgaaacgttttgacgcattcgaatttc

SEQ ID NO: 17610 - DNA, 372 bp, Glycine max
tctagagagagctacatgaagctgtctcggtaatttcgctgcccagccttcatcaattgtgggatcttctcgaaattcggccttaaacttcacaagacacttgtcaatcatctgatcattgggatctttgagaagatgtctggagtgtgctagaagcctcttaatgaagcttctagagaaaactacatgaagctgcctcggtataaacgctgcccagccttcgttaaccgttggatcttctcgaaatttggtttgcaacttcacaagacactttaccatgatttaaccgttggtatctttgacacaatatctggagtgtgctagaagcttccgtacccgagagcatctcttatttaagcatgtcagcctttg

SEQ ID NO: 17611 - DNA, 350 bp, Glycine max
atcttctcgatatattatgcacatgaatcggacctccgagtgacaagttatggccatttgaatttttctagagcttccgctgctcaatttcgagcgtctcgatatattatactcctgaatcggacctccgagtgaaaagttaagaccatttgaatttctcgagagcttccgttgttcaatcttgagcgtctcgatatattatgcgcctgagtcggacctccgagtggcgagttatgaacatttgaatctctcgagagcttccgttgctcattttcgaccgtcttcatatattatactcctgaatcggacctccattgaaaagtttgaccatttgaattctccagagcttc

SEQ ID NO: 17612 - DNA, 385 bp, Glycine max
taaagtatgcccgagtcattcatccctatgagatgttgttgaagtattggcgatcagaattgccattccttggattataaggttgaaccaagctcatgcttttacaaaaaggttcatcaagtcaagttgaaatatggaagtaaccgtcttgcaaaattggggcaaaagatgaatcgagtcacatcactgcttcatctactgccaaacatatttaggattgttgatgtccttgttacttccagattcactttgacaaagatgtcatggaccatgttgaaaatctaaactgattcaaccccatatcctgtgtaaaaattcgcaatacttcaactgtacaccattcgcatacatccatgcttttattggttgcatagtcattgcattc

SEQ ID NO: 17613 - DNA, 290 bp, Glycine max
gtgctgatgctgtctcgcccctagtagaacgctcacaatcacgcagatctttttttttttatacaagggggagggtattttcaccacctctatcagttggataggtaatagatcatatagcaattgaagccggtacaaataactgtcgaaagagaccggatagaagaccacgacaacctaccggcggtgaaccctacgggaagatggatcctttccaacaacctatgtgatggaattagaaaagaggagaaaactgtggggttacggtaaaggcaacacccttgaccctc

SEQ ID NO: 17614 - DNA, 302 bp, Glycine max
tattctgtaaaagccggcgaaacactggaacggaacgacagagatcgacagagaggctgagagcgatagcgaaagattgaggaacagagctatcgaccttgcacacgagaaagtgacctgctagatcgccacaaaagagacaatcccgaggcacataaacaagagaggcagggaatactactctcaaacagcggagctaattgtgtggacatgcaccaatacacaccccatagacatgctattgctcattcaacagcccacgcaatcagtgcctaacaagcagcaaatttactgaaacggac

SEQ ID NO: 17615 - DNA, 375 bp, Glycine max
cttccccgtgttaccgtctttgagatatatttagttagcggtcaaccacattgcaattataagcgtatttttggaagaagaaaaaatgtttttctaaataaaaatattatctctcatacacgagtgataaataacacaagttcttgttcccctttttatttatattgcgtgactgcgacttagccgcacatgcaacagataaggaagagcaacgtcgtgccttctcttttcaatactgcttggattcagaaaacacttagagtgcaaatacttcctgtgttggagggagtggaggtttcacctgattagcagtgtaggttcggagaaacagccagaaatgaaacacagtgaatggaaatatgacaaagaaaaata

SEQ ID NO: 17616 - DNA, 370 bp, Glycine max
ttcttgctctaaatttacattgatgtttgtatttatgggaggaggttatatgccatttttgctttaagagtaacgtcccactggtaaaactaactttccaaatgtttgccttcgcatgaatggccccgaggaagcttgcctcaaagaggtccaggaaggacaaggcggccgaaggaactagttccgccccggagtacgacagtcaccgctttatgagcgttgtacaccagcagcgcttcgaagccatcaagggatggtcgtttctccgggagcgacgcgttcagcttatggacgacgagtatactgatttcccgaggaaatatggcgccggctgtgggcaccacttgttactcccatggccaagtttgat

SEQ ID NO: 17617 - DNA, 401 bp, Glycine max
  unsure at all n locations
tgtcggccgcgattgacgaagggcgcagaagactatgtttgtctctgcatgctatcaggcttttcgtcttacagacagcaaaaaagaatgtttatacggataaccactcgggtttttccgcccgtcagcgtgactcaaatgtcagtatgacaaatcttgtgagcgcggaagatgacgtaaatctccgcgtgtcaaagggcttgtcggccgcgattgacgaaggacgtagaagacgtcgttagtctctgcgtgctatcaggctttacgtcttactgacaccaaaaaagaatgtttatacggataaccactcgggtatttccgcccgttagcgtgactcaaatgtcagtatgacagatcttgtgagcgcggantatgacgtaaatctctgcgtgtcaacgggc

SEQ ID NO: 17618 - DNA, 375 bp, Glycine max
tcaattttgcagcgcatttctgatgaactttaccagaaattgcggtaggaggtcccaggactgggaaactcccagtgaacggttctgcctttcttacaactgaacgatcatccatatcaagccttgctataagttcaccagcctgcaaaaggtgatacaattttattatctttttcaatttcaacaattgtacttactatgtggaatagaatgctatatacctgcattgcttgaccttcagacattttgaaatgaataatcccataaacatgcgaaagaagaggcatgcacattttcatgacctcaacttcatcatacggtgtgtcatcatcaacatgactgtcatctgcaaccaaatatttcataagcttgcat

SEQ ID NO: 17619 - DNA, 378 bp, Glycine max
  unsure at all n locations
ntgaagtgaaaggatgtgactcttcacatttgtaattgaatttcagcgttcaagggcactggtaatcgattaccaaaacattgtaatcgattacagctttttgaaaataattggaacgttgtaaattcagtttgaaaactttttcaaactcattttgctactggtaatcgattacaacaatctggtaatcgattaccagagagtaaaaattctttggtaaagggttttttcaaaaactcatgtgctattcaaagttttgaaaaactttttaatacttatcttgatagagtcttctctttattctagaatcttgatcttgatttttgagactctgaaccttgaatcttgatacttgtctctagactttcttcttgagtc

SEQ ID NO: 17620 - DNA, 557 bp, Glycine max
  unsure at all n locations
accgtaccgnttcgcgctgcnactgaacactcggtcgcacataggactgagcaccnctnaaaannnaaaaaaanaaggagtanacttgaggcatggntgcaanancnncccntaancnagctcgcgccccggacgaccacgagagacaaacagcaagcatgcatttctgttctattcaaaaatccgcgagcgaaggcgggctagaccttgaactgcggacacgaaaactgcacacaacaagcgcgggccagaagaggaagaccaccaccgcaagaacacactcaagacacggatactcgaagtagaagacgaatagatcaccggcccatgacacaaagaaaggaccacaacgcaatgttgagacgcagccagagtggaaagcggccaatcagaccgcaaccaccacaccaacacagcaaggagactcctgcaggaaacgcccgtacgcccacgcacgaaaacaaacaggacagcccccatgaagccgaatacaccggaacaacgaccacccccaagactgcgcagacaaccaaatacccaagggccaccccacagcc

SEQ ID NO: 17621 - DNA, 465 bp, Glycine max
  unsure at all n locations
accccaaacatatattcgatggatacgaatgcacagactgacacaaaacccagggaaatgtgatctcgactcaggaaataaaaaccagctncatcagatccatcgataccactggtgtgattttaaatgttagaaccagaagacagtgaccctatagctaaccgaccacgcaactgtcggatgaaattcactacaggcagccctggaacgttacaagtaatcaattacggtatcaatgtatgcaaccgaaagatgatgctgatgctaacccattgataaggagataagatgagtcggcggttgttggtcaactgacttattagtaacattgctagaaccctacgaggctgcgaaacttaactgaagctcacacgacccctactcagaaaccccgctatagacaatgggcaggaacatgtcaaccaaaagactgagtgggggcatcgcctaggagacagctcatcg

SEQ ID NO: 17622 - DNA, 376 bp, Glycine max
tctttttttttgttccataagagaactactatcatttcatccaaagatgatagtataccacggaatggtttcaccatgatggatgcagaggaaatcaagaataccactggtgattgtcattttctaatctgaatattatattttatgttcttatccactctttttactatgttattttctttagtcctattgttaacaattatttttgagataagaaggaaagaaaatcaggcttattcaattggaagttgctgaaaagaagtacttcccacttagttcataatttaatttttgttgctaaaaaggaattggaccaatctgtgtgcatatgtatttatctatatacacttttaatgctatatgtaacgaggaattc

SEQ ID NO: 17623 - DNA, 380 bp, Glycine max
ttgatgatgttttacataaacaagatatggtttgcttatctagagtaggagcaatctcttatgtttcaagacgatctttggcgacaaaaaacgtgtattaatatgcattgttattgtgattgaaggacggagtttatccataatcttacaaaagattgatgtgctcctcatcaaattggatacttggtgcataaaggccaaagatatgacaagcatgaggacattgaatccatcatgactaatttttttttctagaatttatgcttatgagaataattgttgtgagaataatcttattcatgatcatatcatgactagaaaacccgtttcctacatcggtcgaaatgggattctacatagatgctcaaccgtttttattg

SEQ ID NO: 17624 - DNA, 290 bp, Glycine max
tctatcttgtaagattatggggtacccatcacatgtggcactatgcggcggccagccgatggtgcacaacaagattatttctcacatccacaaatcgcgcataaacccaccattcgctgatgcccacctccaactgagctcacgtactcccacgtagcccatattctcggttatctcatcaccgggtacacatcaatcctctcaagcttccccaacatccaagtaaaacaccattccaaccgcacaaactatcacagacatgacaacagagcacatgcagataactctgc

SEQ ID NO: 17625 - DNA, 407 bp, Glycine max
gtgaacaatatacttggccttcatttatctgtctttgtgcttggcggccacgctcaacaaagtactttcgacacctactgtacgtggatttcaccaatgctgttatgggaatgttgcaacaatcctttaaaaccttattgatacattctgagaggttcgttgtcatgttttcgtatcgacgtccttctctatcgtaagccatcgtccatttttcctttgagatgcgatcaatccatgttgctatggctggactcagatcacgaaatttttctaaattttgatcaaaaatgtgcttgcatggagtgtacgctgcataaaattagttatgaataacaattttaagtataaatgataagtaaaataaacgtgaccatcatatatgaaatcttacccaatttcttcaacat

SEQ ID NO: 17626 - DNA, 467 bp, Glycine max
  unsure at all n locations
gagtnaatgagctttantctttgaanncacaaaataggagaagcccaggggatataacaagaatttacgcgatttaatctattaattccanaaacnaacacacacgaggggggtgttttgtaacatacatacctcatcttcacnaacnacaacattacaattgaaacttggatgtatacggacgatatgctactagtgctgtacgtgagcatcaaatgtagtctcgcgctctctaactctgagatgacgagtcatgacgtaccgatcatatgtcgtgcggacacgctacgcataaccccgccgcggtaacgatgattatctcgaagactgataaacgataataaggatttgctgcacatgtagttaaagctggtttatgcggagtatctcagggaagggttgcacgcggccacgtagaatcgtactgaagagggaatcaccaaacggtgggcgccaaccggcgaacc

SEQ ID NO: 17627 - DNA, 252 bp, Glycine max
  unsure at all n locations
acgacaacacaaaaagggcaagcaaannaggggtgactgaccctaaanccacacaaaaacaacaatatcccaacaaaggggacacgaaccacccgcacagaccgcccaaaaagcgaaaccaagaaacgaccaacccaaaccagacgaaagaagagcaacaaaaaccaaaaacgagaccggaaaggaagcccacccgaaaccagacccaaaacgcaaaagcacccaaccaagaaagacgcgacccgccacaac

SEQ ID NO: 17628 - DNA, 377 bp, Glycine max
tgcttttctaattaacctgaaattgagagaactaagtatttattacctatattcaacataaaatacttataacactacaaaataaccataaattgggagagtttgatacaatttatacaagttgtatacacaaaagttagtcgttttcaccaactaacatctgggcatgcggtacttctcaatgaaggccctgttaatagggggccaaatgagctttgtgggtgagactgataccttgtaaaactggcagaggcctgtgatcaacgctggaaatcctagtgccctgttgaacttctctgggtccactgggtgtcttggaggtgcaatacctacaaactggtagatgacattcgagataagctatgctacatgaacac

SEQ ID NO: 17629 - DNA, 410 bp, Glycine max
ttgtatgcaacaatgcaatgcaatggaaatttgttcaatgttcatgaaattcttccctatttttgtgattttgatttgattttttttttctttttttcttgtggaaaacacaaatggactgtctcttttcgaaagatgcgacaactcatgcaaccttatcctatccttttttgcaaatctcctgggggagttgcctcagagtgtatgttctgtttgacttaattgacaaatcttagagtgatgacaatggagccattcggtatttaaacaatcaattgaaaccctagggtttgtctccccccttttttgtttaaaggcattgattattctgcacaacaagagaaatataaggctttatgaccaatcgcatgcaccattgaatgatggcaatggattgttacactttggta

SEQ ID NO: 17630 - DNA, 773 bp, Glycine max
  unsure at all n locations
accgacacgtgcacgcacacgcagacaacaaacatcgcgcgcgacnagtganaatttggacaaanacgcnnnnnaaaaaannnnanaaaggaganntnnatcgatcgcgntcgcatagccccnncnnnnnnnnatnnnannnnnacnnnnngagannacacacgacaacangaaaaaacacgncagcggaagaccaaacgacgatatacacaccgattatcagcagacacaccacnacacacnnggcggngngcaagggtgagagatagacataacaacacacaccacatcccaccncacanaccaccacctcaagaaaaaattcgacacacacacgagcaaccacaaccacgaacagttcccatgcaaacaaccaccacacacacagtcgacaagatgaanaaccaaacgatgatcgaccgncaccacaccaacaacataacacaatacacacaccatngacacacatcaacacacacgacaaganacacatagtcagcacaacaccacaaccaacaagatgacactgaccacagagcagaagacaagacacaacgcgacacacgtccacccacacgacgaccagaatgccgaagcacacaacacgcgnggcgcctcataacacacacggacaacacaaccacgctagagacaacatagagacaccgcagacacacaaacgcgagacaacaccagcaccagcagaacctaacaagccaccacaatactgaggagcaaaacacaacagacaacacgcaccacagcacgaccan

SEQ ID NO: 17631 - DNA, 455 bp, Glycine max
  unsure at all n locations
ccaatngcccgggcaaactactcccacccaaaggaccaaccaaannacanaaagggngtgatgatcgtgacacncnnatnannaggcgagcaacacgaccacaaccgacagatcattaaaccccacaaaacagggggggcgggaacacaccacccacaccacaaccacaaagcaagcaaaaaagaatagcaccacccacaacaccaccaggccacaacaaacaccacgaagaaccagaacaaccacccgcccgaagccacaacaacccgccccacaagaacacagcaacaacgagcacaaaaacgaaaaaacacgcacaaaacacggacaagacacaacagcacgaccaagaaaaacacgccaaagcgccacccaaacccacagcgaaacacaaacaccgaaccgaaaaacaacatcaaccccaacgaaaagaccacacaacggacgaaacaaag

SEQ ID NO: 17632 - DNA, 418 bp, Glycine max
  unsure at all n locations
gggggactgacgtcgatgacancaatcnntaattagacaagactcccctcntcctaacacactatgtgaaatttatttatttttgtaggagcacccgcgggggggtggggtttttttatactgattcccccctccaaccaatagaagggggaaacagcgaagaggactgcccggggtgcacaatctggacgcaagttgggtggggagcgaggagttgtagggcacttttagcgtgcgaggagtaagcatcaggcgaggcgcgccgacgtgcaggcatgagatatggaggggtttaggtgagcattatggtaccactgcacaaatatctgaggagagggtggctgactcaggagtatcctggcggtgtgcagtaagcccgagcccaaaccggctgagacccttgttccgccgcggctct

SEQ ID NO: 17633 - DNA, 515 bp, Glycine max
  unsure at all n locations
ggaaaacccgagaagagacagaagaagaaagaagaaaaggaacgagtagannaaaaannnnaaagagaaatgagactcgtagacancnnnanananannncannnggnggcgataataaaggcaagaaggagaacgaagttattttaaaaggaaacaaaagaggagggggcaacgataaaaaaatagaggaacaaaagaagaaaacgaaaagggaagataaaataaaagaacgggagaagagagaaaggaagagagaaaggacaaaaaaaaaagaagagaaaagagagagagaagagaggaaaaggagaaggagagaatagaaagaaaaagagaaaggcaaaaaaagaaacagagaaaaagaaaaagacgaaaaaagaagcaggagggaaaggggggagataaacgaagggaagaaagggggagaacaaagaagagaggagacggaagaaagggggaaaaaaaagaaagagaaaaaagggacaaaagaaagcagagggagaagaaagaacgagan

SEQ ID NO: 17634 - DNA, 451 bp, Glycine max
  unsure at all n locations
cacgaacccgctatactaaaacgaggcgacggaaataacgaggaaannannnnaaagggggtgtgatcatgacgccnacnntnnnnnanagcgagcnagaacatacacacaccgacgcatttattattattgccggaaaaaaagggggggaggaagtacacaacacaaaaaaccccaagacagcgacaagaacgagaaaagagcgaagccaacaggccggaaagcacgcaagaactgaaggacgaaaccaagcaaaacgcccgagaaaacggccacaaacgacaaacctaaacgggaaacacacggcaacaaaggcgacgcagagaccaacaaaaagcagaagagggacacacacaaaggagcgagcactgagaaaggctcgaccaagacaaaaaaatgagcgaaacagccccaaaaggacccaagcaacggaagccacgcacccaccaag

SEQ ID NO: 17635 - DNA, 291 bp, Glycine max
  unsure at all n locations
accccacacgccgaaaaccggcccccannnnanaggattggctgagcacaaanaaacacganaacaaccaaacccaattttgggcaaaacccggggggaccaaaaacaccacaccggcaagggaaaccgggaaaacgcgcacggcgcagcgggaaagggcaaccccaaaaggaaccgccacaacggcaagggcaacacgaagagagggaaggaaacagccgcacgcgaccaggccaaacacggcgggcgacagagcagacggcacgaggagaggcaaacgcggaggggggc

SEQ ID NO: 17636 - DNA, 374 bp, Glycine max
  unsure at all n locations
cgcaccctcgaacagaacaaacacgggcacaatcacannnnnaaagaaaatatgtcatcacgcancanaanaacaacaggacgaaaaggacaaacgacaaaattgtagcaacagcagagcggggaggaaagagaacccgccacgacagacataagagaacgaacacgcgagcaacggacaaagcggagaggaggggagaacaaggcagacaaagcagaaaaaggaaagaaaacaagaaagacggaaacgaaagaagaaaaaacgagacacgaaacaacaacgaacagaaacaacagcaaagcgagaaaaagagaagaacaagaaacacgacaacgaagcaccgccgggcaaaaagaagagccgacgacagacac

SEQ ID NO: 17637 - DNA, 398 bp, Glycine max
  unsure at all n locations
aaaacaccagaagaaggcgagacaaaaacaaaaaaaanaannnaagagaggatgagctcgagacacantnntaatacnacgaccnacaaaacaaaccaaaaaaaatttaaacacaaaaaacaaggggggagaaaaagcgaacacccccaacccagacaaaccacagcacaaaagaaaaagcagacgacaaccacaaacacaaaaaccgaaaaacaacacacagagcaaaccaaaaaccaacaagaacagaacaagccaagaacaaaaacaaagaaacaaaaaacaggaagaaaccacaaaaacaaaacacaccacaaacacagcaaacacaaaaagagcgcgaaaacaaacaaagacaaaacaacaagcaaaaccaccaacacaaaaacccaaaaacc

SEQ ID NO: 17638 - DNA, 59 bp, Glycine max
agcacaaaaaaagccaaaaaaacaccgaataaataaaaaaccaaagagaggggaaaaaa

SEQ ID NO: 17639 - DNA, 344 bp, Glycine max
ttctttgtgattccttaatacatccttattaattgtataattcttacttcctaaatctacgttatatacttgttataggaaccttataattctaagtatatatagttgtagtatggtgttctgccttaattgcacagatagtagggttgattgtgatttcttgttcttagtaatgctaatactctatagttggatgactcatatcaagttatatttcataaggaatactcttttgatcgtactctttatgttaattgtatgatgttaggctattttatttcacctcgctgattgaacagaatattattgtaaatttgacggccttaatttgagccgatatattt

SEQ ID NO: 17640 - DNA, 378 bp, Glycine max
tctatagaaggttcgttcctaatttctctactatttcatcacctctcaatgagctggtgaagaagaatgtggcatttacctgcggtgaaaaacaagatcaagcctttgctttgctcagagaaaagcttactaaggcacctgttctagctcttcctgacttttctaaaacttttgagctagaatgtgatgcctctggagtgggagttggagctgtattgttacaaggtgggcaccctattgcttattttagtgaaaaacttcatagtgccaccctcaactaccccacctatgataaagagctttatgccttaataagagcccttcatacttgggaacattaccttgttttcaaagaatttgtcattcatagagatcatc

SEQ ID NO: 17641 - DNA, 587 bp, Glycine max
  unsure at all n locations
ataacccgcacctcattcggtctgtaccaagatgntgtaacaaaaatgcaaactggaaacaaaannnaaagagggatgagactcgtagacaacnanataaanaannnacnnccggnnggacctaaagagaccaccggcacgcacgcattcactaaagaaaaccacatgcatcagagagcggggggaaccacagctggcacccgaacacacaaaacacaagcaccatggccgcaaagaagacaagcgcgtaatgcagcgacctcctgcgacacacactcaccaccaagacgccatggcaccctaccgaagccagcgaacccgaggaagcaaaacagagccagacccggaagacaaacgggagcgacacaagacacaacaagacacttgctcaaaccagacgcagcgagaaatccaccacagacaaagacaacaagcgaacaccggcaggaacacataccagcccagaacacgagaaacacccaaatcgagaaacggcccaaacatacgcaaagacaacagcagcgactcaccgcaccacaaaaacgcgaagcaccgcgaccaacactagcacacccaggaacaaaacc

SEQ ID NO: 17642 - DNA, 479 bp, Glycine max
  unsure at all n locations
gaaagaaccagacagaacgaaacagagcggacatagatacnaacannaanaannnaagagaggnatgagactcgagacaacgctattnagcacaccgcgggaacacagaacccccgcgacaccaattctattaaacacaccaccaaaggggggagagagagacgaaaaccccacccacaccaacctaaaagaggcaaaagcacacacctacaaggggacaaaaaaacccaaacacaaaaacaggcaaacaccaccaacagacgaagacaacaactacgaacgcaggcaacaatcagaccacacaacaaccacaaagcaccgaccaaaacgcaaaaagacactacacaacaccgaaacagataaaacagcaaacactacaaaaacaacacaccacaacaaaccgcactaaacccgaacagcacacgcagcagaacaccaaacaagacaacaaacacaagaggacaagcacacacggaacc

SEQ ID NO: 17643 - DNA, 424 bp, Glycine max
  unsure at all n locations
gataatacgatgtgtcgtactgtacaattagnanaanacangnaanaaaaaaatggtacaacaaaacaaaattttctttatgaaaaacgagcaacacggcgggagttttaaatggaaagggccaccactcactggaataccagaatgccattgtaaactgaggcgagacagtaaggaaatccggaagccatccaaatacggccttatatacccaccacactaaacgaaaactatatagggtatcccacctatggcacgcgtgcaaaagaaataccaaagatcaatggcgcgaagaggataaagacgacgacaaccaaccacaagccaaaactaaaaccacagtcctggaaggatgaaatgacagagccaacaggagaggtccagaaagtaaaactttaaaacacatctgagggcagcgacgtcc

SEQ ID NO: 17644 - DNA, 380 bp, Glycine max
  unsure at all n locations
ggccaatgatcctcgacctcacaatngaaaaaaccacgnnattgaaataattttcgaataatattttttttttttgacgaacacgagggggtggggtttctgtcccaccttactcagatgactagggaaactacgagagacgttcgcgaaagattagcccaagtcgggcgatacggctcatggcctggcgcatagtatggacacatgttcccagacggacaaacaattcaataaagagtgaacgcaaccatcgatagaaaaccgtttaacgtactcttgagtaattgtaagaggccagcatctaatcgcccgctggttacagatatttggcgaaagacggcatttagaggccaatatgctgagagtactcggcatgaacg

SEQ ID NO: 17645 - DNA, 294 bp, Glycine max
cacaaaaaaaaaggcaaaccccaaataaaacaaaggaatgagccgagaccctataaacacaacaaagccacaggagcctataaaccgaccggaagggggggaaaaaacccaacacccacgcgcaaaaaccaaccacagcaacccccacaccacagggcaaaaaaagaaggaaaggacaaccgacagcaccaacaaaccaacaacccgcgcacgcgccaaccagacagaaaacaaacaacaccagaacaacaaaaaccaaaaagcagagcaaacaggcacccaaaaacacaacac

SEQ ID NO: 17646 - DNA, 430 bp, Glycine max
  unsure at all n locations
gggatggcctgagcctgaaatctgcaattgtaagncccattataatggacaaaaaagattttttttttatcgaaaaaaacggggggaggtggaggtattaaactccttacaccgatgtataatggatctagggatatgtatgtaaagacttgaatggagatatgtgggattgttaacggaagtcatttgggtgaatagatagacgaaagttagaagtcggattataaaatgatatgtatgagagaaatagggtctactgatcgggatggaaatcaagacgacatcagatagacttgttgtcttgcactaagtcgatgataaaagaaaagtatgagcgtgtgctgaacacaagtgagataggggaatataaccagtaagtacgggattggacaatgtgaatgctgctaatcttagataactacttgatacc

SEQ ID NO: 17647 - DNA, 231 bp, Glycine max
  unsure at all n locations
acaccaaaagaagcaaaagacaaaaaaagataccaaccntataancggaaacaaaaaacatattacaacccagcgcaaaaaaccccacaaaaaaacaaaaaaggaaaaaaaaaacccaaaaagaaaaccaaacacaaaacacacaaacaaaaacccaaaaaacccaaaaacagaacaaaaccaagagaacaccagaacacaaaaacacccaaaccgcaaacacaaacaaac

SEQ ID NO: 17648 - DNA, 414 bp, Glycine max
  unsure at all n locations
caccacccccaaacacaatacgcaaagcacccaacaannnnnnnaaggaattgatcacgatgcacctaatagaacnccaaaaaaanacacaaacaatattcttacacaaacaaagggggggggagagaaaacagacaacgacacaaccaaaaaccgaaccaaaccacagagaaacaaccaacaaacaccacaaccagacccaccaaacaaacaccaccccacaacacaacacaaaacgaacaaaacaaacacacaaaaacaaccgcaaaagacaaaaacacacagcaacaccagaccaacaccccacaaaacagcaaaaaaacacgaaaaaaacgacaaaaaaaaagacaacagcacacaaaccacagaatcaccaccacaaacacaaaaaaaccaacacacaaaacaccagcg

SEQ ID NO: 17649 - DNA, 301 bp, Glycine max
  unsure at all n locations
gtgcatgtgctgtgacncnttataaaccncggggacaaggttataaatcagttatttttggaaaattgagggggtgttaaaattaactgcacagaaggaaataagggaaaggggagagtaatggaatagttggaagtagggaaggtgaaggacattagtgaataggtatgggtgtggaaggttaatggagatgatgggtgagtgttgggttgagaaatttgggtattgacaatacgggagaattagtcatgtcaatgtaaagttatgttgattaaggaaaagagaaaatggagagcgagtg

SEQ ID NO: 17650 - DNA, 702 bp, Glycine max
  unsure at all n locations
gatctaacagtaacaanntactcaacganatcngtcaccggttgntacacggaccncgaattnttcaattaactctcctccccnccaaaaannnnnccncaggagangannattgatcgcgatcgatangnacanacnnanttcanntnaanannnaccngccaaaaccanaaaacacaanaangncgcacgcacacacgcggcacagcttatttgccatttcgatatgacacgacgaacaaacggacggaggaagcgcgagcatactataaagcacactantaacgcccaacaccanacacgaagtganatgacaacacgacacacgcaggcgangnagcacactacacagacagagcagagacactgaacacaacacaantgcgaggcaacacgaagacaagaacccacccaccacgagagacaggcgcatagccacaccaacacacacatgaaacaagagggataccacccacgaggatgtaaccacacggacaacactcaccgaangtcacacaaacaaatgacgaacacgacagacagaacgagactgcgaaatgcgacacgcaacatgaaccgcgacacanaacacaatcaacgcgctgaacgcaacacgagacgacgccacacacgaaacagaaanccaaacgaganaccgatccgcacgacacaccaaaagagacacacggacgaaaagaacag

SEQ ID NO: 17651 - DNA, 468 bp, Glycine max
  unsure at all n locations
cccaccaacccatagacatagagacacaagcgcactccctaanaannanaaagaggatgtaatcgatgagncantcnttngattacaaccngcgatcaaanaaaaatcccaagagaacacttttttacacaacagccccccagggggggggtacataatagacaccccacaaaacacacaggaacgaaacaaacgcgagaacgcctatcaacagcaaaagacacgggaaccccactcaacgaagtgagacaactagaagaaaaagaggagacccacacaaaggcgagaaaaagaaaatgacacgaaaaaaacacccgccaaaaatgggaacaagcacaccggaaaacgaaacgaagagcaaagtccaacataagaagaaagaaagattaaaagggcctgtgaccaaaatacgcgacaaacagagcgcgcacagaccaaaaaaggaaggaacccgaacacacggccgcc

SEQ ID NO: 17652 - DNA, 456 bp, Glycine max
  unsure at all n locations
atgggattgatgctgatgtcttgannacccaaatatagaaaacccccggagataaattcgcgngtacaaaactttatttgatgattcatcaccaagacactggagagatgggggtgttgtggaattatacacctcccccttatctacttctggggtaatattatcggcgtgaactgatcacgtgtatatatcactgcctgaaagtaagtaattatagtgtgtagtaattagactggatgcatgagcctggaatcacctagatgttccacattactatcatgtgacttggaactatccaaatatcatgtaaaaactaaggacaatataaggatagtggtttaagagatcacacatatgtgacctgagcaccatagatgtctaaacatctgaagaatcacggatacgatcgtaagaaccatgtgaattaatcgtctatgagaatccgcctgatgatcg

SEQ ID NO: 17653 - DNA, 350 bp, Glycine max
  unsure at all n locations
ggataatatgaatgtctctgaaacacnaattggaaaacccgggtcttcaaaaattacgaattattttttttacgancacccgggggggggcttttgatccatcccccgcgagttaatactggaattacttgacaccaaccaaagttagggactcaacaggggacgaataagtactgtcgcgccaatcatgcgacagacggtcacccgcgctgcgggttagcacccccggaaaacgacatccgcacatactccgcgaagggcgacggacagagtaacgtcgaacggggggcacactgcattgaccgctgtagtgtcatatactcagtgatgtgagcaaaggagggtcagtg

SEQ ID NO: 17654 - DNA, 217 bp, Glycine max
ttctttcgttttcaattacttgtgtctcgatatcctacgggacacaatcggacatccgagtcaaaagttattatcgtttgacttttcttagagctcccgagttcaatttctagcgtctcgatatattaaagggctcaatcggacatccgagttaaaagttattgtcgttagacttttcttagagctttcgttgtcaatttcgagcgtcttgatatat

SEQ ID NO: 17655 - DNA, 390 bp, Glycine max
  unsure at all n locations
ntggagtttccaagtgccaattcgtcctcttctttagtccattcttcttctggcttcaattcatcagtgggctttccttctgtgtccagcatcttgggatgttcccagcctttgatgacagctttccaggttctgctatccagtgatttgaggaaggccaccattcttgctttccagtattcatagttgcttccatcaagaattggtggtctgttcactggtcctccttctttctccatgttcatcagaatttatctccccagatctcactctgtgatttcgagtgttggctctgataccaattgaaattctgataccagtggacagatgtcgtacaggatgtcacgacatcacgcttcaaacatgcagtttatgtgtgtccgtatgaac

SEQ ID NO: 17656 - DNA, 350 bp, Glycine max
atctttgatcggtaatttgcgaccagaggtcgttaagctcgtctctgctgatcttttcaaccttcagtctacgtctacgactcagcgcgtcaaatagttccagagcgaactccttagagtccttcatcccttcaaaaaattaaacaaagcatacaaaactcttcaaacaaggagtgaaaatgacaaaccgattaaatgcacatgcgaaacgcaagaatctgaactgaaatttgaaaaggaatcgtacctatgcattgcgcaaaatcagtgcgagaaagataaccgtccttggcaagactatagaaattgctgtgcacctcgttccacgcgttagcgccattggatttact

SEQ ID NO: 17657 - DNA, 409 bp, Glycine max
tcatatatatatatattaccttgcctacatccgttcttatactatgtaaaaatgatctatatatcaaattctatctatcctttcgtttgttatcaatcttatacacacaatgacatatcaaattataccatggtaattttgataattattatactatttttatatacgagggaagatcaaattataccagtataattttgataattattacactatttttatatacgagaataaatcaaatcataccgatataactttgataactattgcattatttttataacttgatatataatgtaatttttattgatataactgttaagttatattcacatattatcaagattgtccgtattatattttgtcaaaattgaacaacaagaaagtaatcacattatctatatgttaa

SEQ ID NO: 17658 - DNA, 314 bp, Glycine max
atcttgtcttttcccttgatatattagagggactcatgctcactatgaatgacaaatcacttgggataaaagtaatgttgccatgataccaaagcccgtactaaggcatacaacaccttatcataagtataatagttaagggtaggaccacttaacttttcactaatataagcaattggatgaccttcttgcatcacaacagccccaatcccaacatttgaagcatcacactcaatttcaaactatattgaaagttcggcaaagcaagtatgggggcattatctaactcttgcttataaacattgaaagcttct

SEQ ID NO: 17659 - DNA, 332 bp, Glycine max
taggtcatggctcagtagatagaccccttgaaccttagtctttacacaatgctatggatagacatgtagaatgttcacattacatcgaagcatgggtcaatgagtcacaacgacaagtgtacttacgagcttactagaatcagtatgtcaaaagtatgtagcacactcaaaatattttcattatacatacctaataataattgtcgaccttaaggcaccgtgacaactatgatgttctgtgtccatgggacaacattgttgcttggcttcgcgccttgaagcctgatatcaacatataaggctcaattcacagattttttcaaaatttataa

SEQ ID NO: 17660 - DNA, 157 bp, Glycine max
ttctttctttgcggtggtgctatgaccaacgatgatcattaatatgaagagaacggaatatcgtggtggtgtgaaaagcttgagctgtgaagagaagtgactgagtgaggttatttaaggttattctaaatgatgacgtctatttgggttaatttac

SEQ ID NO: 17661 - DNA, 298 bp, Glycine max
tgggttaaaaaccacccctcaccctatgccttttattttgcaatggtcgaatgacaatggtgaattggttgtggataaacaagcatcacttacattcttcataggaaaatatgttgacgatgtgcttcgtgatatggttcccattgaagactaacatgtgttgcttgtacgaccttgtcattatgatagagatgctgttcacaatggggtcaccaatcaatattctgtcttccataaatgtaaaaaggttgttctctcacctttgcctccaatgaggtgtgtgaggatcatctaaccc

SEQ ID NO: 17662 - DNA, 387 bp, Glycine max
ttctatgatccaaaatcctaactcaccataaaccttgacccagggcgagaatgtcaatccttaccctcggaagcaaaaaaaaaaaaaaagcaaaaaaaagaaaagaaaggaaattcccaatcaaagagtgggagagagcaaaaagaaaagaatggaaattcccaatctaagagtgggagaaagcataacgaacagaaagaaaattcccaaccaaagaatgggagaaagtaaaaaaggaagaaagacaaggaaggagagaaagttcctgatcaatgaagcataaaatatgtgcagaaaggtcttttgaccatacaatatctgaacaatacagatttggcaccaaatgaacaaaatgaatgaaaggaaaccatgacctaaagtggtctt

SEQ ID NO: 17663 - DNA, 407 bp, Glycine max
  unsure at all n locations
tgaagaggatgctntaatggaggaaaagaaagagataatgggggagcacgaaattgaaggaataaaagagggagagaagtggaactttgaagtgtgtctcataagactttcattcatcaaagttacaacaagtgttacacatgcttctatttatagactangtagcttccttgaaaagctttcttgagaaaaattccttgagaagcttctttgagaaaacttccttgagaagctagagcttagccacacacacctctctaatagctaagctcacctccttgagatgagaagctagagcttagctacacacccnctataatagctaagctcacccccattccaaaaatacatgataatacanaanaaagtctctactacaaagactattcaaaatgccttgaaatata

SEQ ID NO: 17664 - DNA, 128 bp, Glycine max
tctatcttttacatgcatgtgcacacagtgttgactaattttagatcaactgatgcaatctatttgaattaaaagataattcatgctactcttataatgtggtgtacaactaacaaaattaattttat

SEQ ID NO: 17665 - DNA, 408 bp, Glycine max
agcttttacatgcatgttcacaccatacatactattctttatcaactgatgcaatctattggatggaaaagatagtttatattactcttctaatgtagtcgacaactaataaaaatgtaacagacagtagtgcttaagccattcaaatcaagtcattgtgaatctcatcattactatcatgcatctcaaagagaatgagaatcatgcatcgtaatgcatagcacaacaaaacattaaaagaaaacatgtcttctaaagccaaccaaggtaaaaatgtatttatatttgtgaactttttcacaattataacacatatataaaaacatggtggaacatctgaccacatgcacaacacattccacacattattattgaaaatgagtcggaagggaatataataacgcattg

SEQ ID NO: 17666 - DNA, 361 bp, Glycine max
ttctttaacctcatcgactctcacaatcgttagatttgggagccaatccaatccttgtgtccggactctcagccacttatgatagccgccgatgctcccattactgcttcccctaagctctttgtcctttcttcacgccgcatcccatgccttgggaactccttggagtaccctcgcgttgtggtcactaaaaccccgtgcgatgaaaggcgtgatgctttcgtctaatggcgctcctctcatggggtagccaagagttggtgcacaacaaacaatacttgcgccgctcttttcacatccccggtcgaacgtgtcatacatggccaaaatggcgacgacctgggctttcttgccatgatga

SEQ ID NO: 17667 - DNA, 407 bp, Glycine max
tcaagccaaatggacttaccttgaattaatttctttgataacccctttgagcctatgttcccctttctttgttttgaagctcattacaagccttaagtgaaaaaccatgataacaccttacccttaaagaattttggagctttggaattgttttgggaataagtgtgggggggtatgtttcattggaagatatgatttttggccatgattaatgttttattttggccatggttgatgtatatatatattgcctagatcttgctttaatcttcaaattcgtactgtctaaaaaaaagagaaaaaaaatgaaaaaaaaaatcaattgctgcaaattctgcagattctgtctgttcaaaaaatacaaaaagagaagaagaagagatgcgaagttgaataaatgatgtctt

SEQ ID NO: 17668 - DNA, 349 bp, Glycine max
ttcttctcaatcctttttcctattgttttgcctgtcttatttgttgggttgtatgtaacaaaaactattatttgtgattatatatttatatatttattgcaatgtgttatctaatatatctaatgtaaaggagtagtatatggagaaaagatgtacatttgaccgctctgagagagagaaaacaaattaaaaactctctctggtattttttgattattataaagatttgggacttgaaaaaaaatctaaacacaaaataacatgtagatcttattgctttgagagagagaataaaataacgaactctttctatacccaacgatataagactatactatgaaagttacac

SEQ ID NO: 17669 - DNA, 393 bp, Glycine max
tgattcatgattcaattcatgtatctttccattatccaccgaaatatcactaccaccaacagctctcttgatggagcttgggtatttcattaactgaccaataccaaaaccagaatttattttaacaccagagtctttagcaaagttcacccctttatcattgttcaaacatttattggtccttatgcccgaattggttgattgtcttcctgtgtggccgtaatcagaatacagtttcttgggcatgatagggctgccatcattccacaaattttcactagtttttgtctttcccccatattgattatcaaattgcagaaatggtgaaaaggataaacccttggccacatttttagtttctgatctagctctagcagaagcattaaccacagc

SEQ ID NO: 17670 - DNA, 335 bp, Glycine max
  unsure at all n locations
tttctntttctgaaagatagaaatttgaaatttgaaatttgaaagctgttatcgattaccacttgtatgtaaatgattaccagtaacggaactaaaaaaattcaaattgaaaaggcatgacttctcattacataactgtgtaatcgattaccaaagaagtgtaatcgattaccagtgaggaaattataaaagttactctgaaaagtcacatcccttcataagttttcgaaaaaccaccaagggcctattaatatgtgacttatctatgatagttttgagaagtttttcaaaaccttattgtcttatcctctcaaaaacaaatcattggccaaaca

SEQ ID NO: 17671 - DNA, 392 bp, Glycine max
tgtatccctcttgaggggttttctattgggtagctcttcttgtgtctcctttgaatgttcaccatgatataattggcaagttttcttggaagtaattggcactgaagtggaatcctcaaaagacagaatgcaagactttggtttctgtggagaagcatgttgtttgagacttgtcatatcaaagctagtgttgatctcttccaaagatgaagaattgctcaaaagggtggttctttcttttgtgagatatgaattaggggagtgattttcccatgagagttctccaggatccactgaattctctccctccaatggttcttcaacagagttcatgtcacattcagtggataaatgataatcattattgtcctgcaaacatttcaggaataaag

SEQ ID NO: 17672 - DNA, 377 bp, Glycine max
tgtttttatccaaatggacttaccttgaattaatttctttgttaacccttttgagccttgattccctttccttgttcttatatgctttactttgcaatgaatatccaagaaatatgccttcatcagattttgcatcaaattttcctagattatctttaccattgatgtgccatcattttcttctatttcttaaaccctttttgcaccattttaattactgattagtcttaattgtcaaattaattaggcaattttattatttgggctcatttagctaatttgatgtgtttaatctaatttcaggaattaatgaaacattgtgcttaatccggattttggttgtggacttgatgagggaaaataaagcaatgcttacc

SEQ ID NO: 17673 - DNA, 412 bp, Glycine max
  unsure at all n locations
ctcagctttcataagtgaaatcaggtgtagccatctccttttagtcctctcacgaggtggaggttgagccatgttctcagtatgaaaattagtagttgaatgctcaaaattagaatattcagaatcaccagcaacagaatacttagaatgctcaaaatgctcaaaatgcacaaaatgaccaggatgcacactatgcctaactaatctatcaatggttctatctatttcaagatcaaagggttgtaaatcacctacattgcccctagtcatgcactctatgcagcanatcatgtgtttctcacacaagcacaaggggagggttaaaactacaactatagtcaaagatatccaaatgagctgaaattntgtgagcaacacccttaaatcatgaatagatagcacanaaattttc

SEQ ID NO: 17674 - DNA, 329 bp, Glycine max
ttcttaaacattcaatttcgagcgtctcgatatattatgggactcaatcatacatccgagtaaaaagttatcgtcgtttgaatttgctcagagcataaacattctatttcgaatgtctcgatatattacgggactcaatcaaacatacgagaaaaatgttattgtcgtttgaatttgctctgagcttcaacattcaatctcgagcgtgtcgttatatcacgggacttaatcagacatccgagtaaaaagttgttgtcgtgtgaatttgctcaaagcttaaacatttttatttcaatgtctcgatatattacgggactcaatctaacata

SEQ ID NO: 17675 - DNA, 405 bp, Glycine max
ttgagccaaaatcctgactcaccatataccttgttcatggtgagaatgccaatccttaccctcggaatcaaaaaataagaagagaaggaaaatttccaatcaaaggaaaaaggagaaggaaaatttccaatcaaaggaaaggaaattcccaatcaaagagtgggagaaagcaaacagaaaagaaagaaaattcccaatctaagaatgggagaaagaaataaagagaagtaaaaaagaagaaagctcctggtcaaagaaaccaaaagaaatgtgccgagaggtccttggactacacgatatctgaacaatacagaattgtcaccaaatgaacaaaagacagataatgaaaccatgacctaaaagtggtcttctccctttgattaccaaccaaaatcctgtgcgcta

SEQ ID NO: 17676 - DNA, 303 bp, Glycine max
  unsure at all n locations
tttcttccaagtanttaactgcttgctgggaactgtcctaagcaaagcccccaaagacctattaacaaacgaccgtttgcccatcggtatgagggtgaccactggttgaaaataacaatttagtgcccaacttgctccacaaagtcctccataaatggctgacgaacttagagtccctataactaacaatgctccttggcaaaccatggagtctcacaatctccgtgaaaacaaatcaggcacatgggaagccataataacttgtttacatggaataaaatgagccaattctaaaaacctatc

SEQ ID NO: 17677 - DNA, 315 bp, Glycine max
ctcagcttgagtaattaaacgacaataactttttttttttgtccgattgagtcccgtgatatattgagacgctcgcaattgaaaacagaaactttgagcttattggaacgacaataacttttgactcaaatgtccgcttgtgtaccttagtatatcgtgacgctcgcaatacaaaagggaagctttaagaaaatcaaacgacaataacttttaactcggatgctggatagagccccgtaatgtatcgatacgctcgatattgaaacagaaccttgagcaattcaaacgacataacttttgattcggatgtctgat

SEQ ID NO: 17678 - DNA, 367 bp, Glycine max
atcttgtaatcgattacacaagtcttgtgatcgattactagaggagattttcaaaaaataatttccaagagtcacatctgttcaaatggtttttgaatggccatcaaaggtctatttgtatgtgacttggaacacaaatctgcttagattttttcagaacaaaaaggtcttatcctctcaaaagcaaaattatcttatcctcttaaaaattccttggacaatacacttgcgattcaataaggaattattttgagttctccattgttcaatctatctctttcaagagagatttcttcttctcttcatcttatttctaaaaagggattaagagatcgaggatctcttattgtaaagcaatctgaacaca

SEQ ID NO: 17679 - DNA, 407 bp, Glycine max
tgactctggttttaatagctttgtctaaagaggtgaagaaacttgaatcccttgccatgttgtttgtgcatccactatcaacataccatacatcctttgaacctaaactatttgcttgggtagccataaagaagtgttttcaagctttagattgctcattagtgaggttgacttgatgagcaaggttgtgggtgagattgatttttcttaaatcggtggtacctctctttatatctgcagttctagcaattgttacattgaatttgaggcttccccttatgtcaacaatctttagacaagtcgtttgtccttttgcatgtagtgcaaggaggaaaattgtcccttgatataaattaggttgaactcccatcttgtttgccttttccttttgatcacctcctctttta

SEQ ID NO: 17680 - DNA, 374 bp, Glycine max
ttctttgcggatttggtcttcgctggggaaaggatcgaagcgggtctgaaaagaggcaaatttgatcatcctgttttgatgaatgagaaaactggggcaaatgaagaggatgagaatgaggaaggtgtgaatgtatgtttacatgattttgatgatgtcaaaagaagaatcaaaacaaggctcatttgcttcaagattaatacaagattgtttcaacaaacaaagccttgatttaagatttcttcaagatcaagccttgcctcaaaataaaaggtttcaagtcatccaaggcacatgtaatcgattaccaaggcacatgaaagtgtgtaatcgattacacatcatatgtaatcgattactagagactctgaaca

SEQ ID NO: 17681 - DNA, 371 bp, Glycine max
tgctgttaggatcaccgatctttggttcgttgggtctctctaacaagtctgagcaagcggaaatggtttttgttgattctgaggtatattttgtgctctctatttgattgttggattgttgttgatgtcatttattgattatatagtttgcatatttcagggtgatcaaattcatgctatttgtaaatcggaccacctcaagtcttggaaagctgatttgaaagagaatttcacttatgttatgcataatttcaaagttgttaagaatgatggtcaatttagattgtgcgaacatgagtacaagttattttttattggagtgacggttgttagagaagctgatttgcatgaactgtcttttaaggaattta

SEQ ID NO: 17682 - DNA, 252 bp, Glycine max
ttctttcttgtattatggggtacccatcacatgtggtactatgtggcggtctgtccatggtgcacaactaggttctccacatgcacaatgcgcgcattaacccaccatcccctggtgccaaccttcaactgagctgacgtgctcacacatagaccatatcctcgtttatctcaacacctgttccccatcaatccttccatgctttcacaacattcaagccaaacaacattgaccctgcacaagctatcacag

SEQ ID NO: 17683 - DNA, 384 bp, Glycine max
ctgggatgccgtattgaaagtgaatcttttttcattttgaatctccaatataggtataaaatgcaattcaatgttgaagcataaaaaaactggatattaataactaaataatggtgaaaacaacacaattagcgaagctaaaaggctaaatatttaaaagtaaatgattgttcaacatgtaaattaacaaaccatcattttaaaacccagaaaatacaaattaaaattcagtcactattgttgtcgccccaattttttttgtgttctaataacaatttcccaaattgtgtcatgaggcctctggtaaaatgagagttcgtatccactattgttgggtgagatcaacaattcatacatgcattctagatgttaataggggtctat

SEQ ID NO: 17684 - DNA, 339 bp, Glycine max
ttctatccttgccccttgatatatgagagggagctttgtgaactatgaatgacccattccttgtgatataggaaatgtggccatgctcacaaagcccgaactaatgcgtacaacttcttatcataagttaaataggtgagggtgggaccactcaactctccactaaaatgagcaattggatgggctctctgcatcaacacaaccccaatcccgacatttgaagcatcgaactcgattacgaaaaatccttgaaagattcgcgacgcaagtatgggggcaataattaacatgttgcttaacaacattgaaagcttcttcctgtttatctccccatttgaa

SEQ ID NO: 17685 - DNA, 401 bp, Glycine max
gggtaccccatgttgaatatgctgaccaaagatctgtttatagcaccactaactgtcctccgttggaagttgtttatggatctaacccactaactcctactgataattcgtctatgcctaatgtctctattattaatcataaagaaggtcaatcaaaggcgaactatgtgataaagacttatgaaaaaagccgagatcatattcggaggaaaaattaaagctatgctaaacaagctcacagagggagaaagacagttgtcttcgaacccaaatattgagattgggcgcacatgaagaaagcaaggtttccggaacaaacgaaatcatcacattaacctaagggagatggaccatttctagtgcttgacacagtccaagacaatgcctacaacagtcgaccg

SEQ ID NO: 17686 - DNA, 352 bp, Glycine max
ttcttgtctcagcgtgtatgcgagacggagaccaacatgctagctatcatcgccaagtaccaagaagagttatgtctagccgcggtccacgagcataggattgcggacgaatatgcccaagtatacgcggaaaaagaggctagaggaagggtgatcgactctttacaccaagaggcaaccatgtggatggatcggtttgctcttaccttgaacgggagtcaagaacttccccgattgttatccaaggccaaggcgatggcagacacctactccgtccccgaagagagtcatgggcttttcggctattgtcagcatatgatagacttattggccacataattagaaatcggta

SEQ ID NO: 17687 - DNA, 423 bp, Glycine max
  unsure at all n locations
cctatgatactcagctgtttatgccctctcccctcggcggagatttcttcttctgcgaaggcgagatagttgttggcagtgatattattgaccagccctccgaaaccttctaccgagatgtcttgggccacatgggcctcattcagaacttttactagcagagcccgatgaggctcggagctcatgagtaactccaacagcgagaccctggctggagttttgttgagctgttcgataaccttgaattcgctctgctgaattatacggaggaactcactggcttcctctagcgacacctcctttttgccatcccttntctccggaagacctttcgccggaatatctttattcgaagcgaggggtgcttcgtcatcttgttcctccaccacttttccttaccctagacgttcgcgggttggactg

SEQ ID NO: 17688 - DNA, 368 bp, Glycine max
tcatttcttaagaataatggcctcatcgaacgatttatttcctgaagggaattcaataaatatacctcctattttcaatggagtgggttaccattactggaaaacccgtatgcaaatttttatagatgcaatagatttaaatgtttgggatgcaatagaagtatggccctatattcccactatggtggctggaatttaaaccatagaaaagcctaaggaagaatggactgaagatgaaaagagattactgcaatacaacatagaagacacaaatataattacgtatgccttacgaatggatgagtactctaaggtatcaaattgtaaaagtgctaaagaaatgtgggataccctacaacgtacacatg

SEQ ID NO: 17689 - DNA, 402 bp, Glycine max
tgtgtgtccggtgtgcatgaagtcatggactctattatcaatggtgtttaacctggttaatatgaatgccaaatatggatggagtgacaaaagcttcactatattgcttaatgtaatgcaacgtatgcttccagaataaaacagatcgccaaatagttactatggggcaaagaagatactgtgtccgatgagtatggagtattagaaaattcatgcatgccttaatgattgcatgctgtacaaagatgagtttgaagatatgcataaatgccctatgtgtgctgtatcacagtacaaagtgatagatgatacaaatatagcagtgatgaaagcatatacgaagacccccctatgaagatgtgatggtatcttcctatcattccaaggtgtaagcatctattt

SEQ ID NO: 17690 - DNA, 377 bp, Glycine max
tcattcttgttcactaaagaaaaagtatcagagaaatcgattccatcttgatgagtatatcctttggcaaccaatgagctatgtatctatccacagagccatccattttatatttaaccttatacatccagctacaacctatacaatgcttatcaggtggtaagggaacaagtgtccaggtggaatttgcctcaagagctttgatttcctcattcattgcctgacgccactcaggatagggggcagcttgatgataaaattgaggttcatatacaactaaaatctggttaatgagagctctgtaaggggagctaagagccaataatgaacaatgatgctggatcggatatgcaatcttagatattggtgtaacatag

SEQ ID NO: 17691 - DNA, 380 bp, Glycine max
tgtgcattcaatatcctaatgagggtgttccatatgttctcaagactggactaatacatttgctgcccaagtttcacggtcttgtaggtgaagatcctcataagcatcttaaggagttccttattatctgttccaccatgaagccccctgatgtccaggaagatcatatctttctaaaagattttcctcattctctggagggagtggcaaaagattggttgtactacctttctcccagatccatctccaactgggatgaccttaagagggtgttcttggagaaattcttccctacatctaggaccacgaccatcagaaaaaacatttcaggcatcatgcaacttattggagagagcttgtatgagtactgtgaaagattc

SEQ ID NO: 17692 - DNA, 367 bp, Glycine max
atcttgtatttcaaatattatggtgtgcgcttgttgtaacatgttatgtttgctactgatttttaattctttgaccctttgaatgaccaaattggctttcgatgtcttcatgagacttgtagagaattttatcctttacattcaagcactggtatcatgttatttggaccattacaacataatcaatccttatagcattgcagttttgttatattgtgaggacaaactgacatctctatcttcatggtcagtttcttccaagatccaagccttatttgcccatgacttctccataaaagatatatatatctttctcttagctttctacaaccactgagatcatcccaaattcactcttgtagctcaa

SEQ ID NO: 17693 - DNA, 393 bp, Glycine max
tcttatccaaggcaattcttggtggtgaagctccttcttccttggcttattccctagtggatggtgcctcccctctcctcttctcctttgccttccgctgcatctccatggtgaaaaatcaccattgaaggacctcattggagctcaaagatccagcctccatagaatcttcacaagcaagcttccatcacctcttttcctgtacatgactgtgttagacgagtctatgggatgcgtgttgggtcaacatgatgactctgggaaaaaggaacaagccatttactacctaagcaagaagtttaccgcatgtgagatgaattacacaatgctggaaaggacgtgctgcgccctgttatatgcgtcacatcgtcttatgcagtacatgctcagtca

SEQ ID NO: 17694 - DNA, 380 bp, Glycine max
ttatgtttctacttatgtggcagggcgggctgccttgaccttcttgtctccaacgcgaactttgaccattgttcttccttcccgcgatgcttcttttcatgtctgcctgagtgggcttatagcctaaaccatacttcccacgattaccttgggtatttatcagtctagttatgccgccgttgtattttcctaaacccatcccgggctcataaccgttccccaacataactcgggccatcattaccgttgcatcggacaaactgtgctgcccaaagagggagtccacggaggaaatgttgaccacctcaatagactggaaagcagtttctaacgattcttctgcggcttccacataatgcatggaggatgcgcagcttacc

SEQ ID NO: 17695 - DNA, 284 bp, Glycine max
tcaagaaccaccttggctgtatcaaaggactttcacaacctttgtgtgttgccctcgctggacagagtgattctttccttcctttcatcatcactcttgttctttcaaaccacaattccagaaaatccacctctgcccagaattatctcgtggccataactcccattttacgcactcaaattaagtgattcttgagcctaaattgaattcaaaacgagacctttcaccttgttatggatcacctcatttggagccctgtagcttcagttattgccatttctata

SEQ ID NO: 17696 - DNA, 372 bp, Glycine max
tatcttaaccttggttaactaactaaaccataaatagtccctcccactcaataccactaccactttcaaatttcactttttgcattcccatccttgcactcttctaattcctaacttatataatataactttatttagaaaacgacaagattagatattgtttggtaaattatttgtggtaaataaatgtatatgtttgataatgacaacacagactatgttctcattataacatttaaaatactataacataacatctaaatattgtcatttaaaatcataattgacaaatgtttatctttggtaaaatttaattaatagagatatcaatctcttaaaatacataatcaaaaatacaattgacatgaaatg

SEQ ID NO: 17697 - DNA, 399 bp, Glycine max
  unsure at all n locations
ntaactaatatctttttctaaagctcccatttatctttatcagtatttgattccaagtgagctatttgtgaataactttttcaaatcatataatataaccttcagtatccatatccgtgcatgtctttcggaaaagagaaataatatgcgcgcggacacattcatatatgaataaatcgtcaactttgtccccgtgtgaaatatcgacgaattagttctaaattttaaatttaattattaaatatgaaaaatgtaataaattaattatacaggtcatttaatgataaattaatctggttaaattaatcttaaaaaatattacttattctcaaattggtctttaaatattataacaaaataataaaattatctaacaaaattaacaataaaattaatttt

SEQ ID NO: 17698 - DNA, 367 bp, Glycine max
tctattttgtaaagtatgaatcacctttattgtttcttctagggaccgtatcttttcggtgatatccatgtctcctgttgagttgatactgtgagcataacaaatgcatgtatcttcaattgacaaatgaacttgtataacataatgtaattacttggttaaaactcattttttagtcatatattgataaaaaaatggagacaacaaggttagtgttggcgtacacgtattgtgcatgattttcctccgaagctctggcttctttggaagcattcttctgtccccttacagctttagctatttcaagattgtgaggccaattaaatgttgaatacgcgaattatagcctatttgagtctaacatgtg

SEQ ID NO: 17699 - DNA, 356 bp, Glycine max
ggttagatagaagtaactactggtctattttgtgtgaatatatgtattagacacaaagcattttatctgctgtatgaatgaattacacttgcacttgttctcttttgagtgcatttttctgatttctgggtttgtgaatctcttgtgccaacaattggtatctagagttgatttgatcatgagggactgtgagagaaccttgagtgtacagagaaattggaaatcacaaatagagtttgagagaacccaatcctcttttagaatacccaactttttaaatggcttccaacaatgttccattactagcacctcctgtattcacaggaaagaacaacgaaatgtgggttgtgaagatg

SEQ ID NO: 17700 - DNA, 378 bp, Glycine max
agcttaacttatatatttttattgttagactaaaccttttaacctgtgatgttgcaaactacaaaagaaacacaagtcattaacaaaatgcggaaaataaaaattaaatcatatctccagccattgccatgaagtgttgtcttgttttggttcttccaagctctctctctttctctctctagatggtgtatcaaaatgaattcaaagagatgatctcaaggaccaaatacatgtgctatatatggtattctaccatcaaggatgcatttagtagccattaccactcattattggttgttataattcattagtggccattaccacccattaattcaatttggcttccaaaattgacgagcgttcaatttttcaaatgtt

SEQ ID NO: 17701 - DNA, 407 bp, Glycine max
  unsure at all n locations
ntgccatgctgaattatattcctttttgctagtgcaatattgtagtttggcttggctttttcttttgcttttgattttggcagtaggtcacatggatcttctttaggagagagagagagaaagaaatcaaaggcttataaaataatcactctaaaaatcctacaacacagtttatagttttatttgtgtgatttaattccagacaattgcatttaattcttaatgctcatgacatgacttacattgcaataaatatgtgtttatggtagttaaaaataaactgaagggtttaatatccatattgttttatttacatgtataagtgagaaaatntccagaaattaattctagagtgatatattaatcaaataatttgataaagggttaattaattagattataatgat

SEQ ID NO: 17702 - DNA, 405 bp, Glycine max
  unsure at all n locations
ggagancatgatgagtcgatagcangnccntnggtagaatacaacgcgcctatttaactatatatccactccatttattttttatgcacacgcacgcagggggggtggatataagataacacccacaaagggagcacgaaaatagacaaagatatgagtataaacagggatgtcacgtgcgggatgggagggaaatgttgtggaatgatctgcgaatagaacgggaggaaagtgatgacaatttgagctaaatacgcacatataagaaagggagataagaagataaatagaaatagtgagcgaaaaagaagtgaagcaggaaacatgaaatggatgtttagagaagataaaagtcatataggaacatgcaaatatagaagaagaatagtggacactaaacttagg

SEQ ID NO: 17703 - DNA, 435 bp, Glycine max
  unsure at all n locations
gagtgattgtgatgagtcgatgacgactggtaaataacccccgccaatccccnaagatttactagtgaatgagttttattttttttgnaagtaatataacggggggggtgtgttgtaaaaatcccgccccccataatcagtgaagagataatggacgtgagttatgcagagatgtctagaagtagttgcgataaggagagactatgagtcggatagcgcgtatgaaagagagcagaagttaagaaatgatggggaagaaaaagaaagtatatgttggcagttgagatagttttcagcagtgacataaaggtaaatcattaggggacaaaagaagaaggaattggagcgacaagcggtgagtagtgtagtgtaagcgagtgtgatcagggcaaaaacaacaggtaatattggttaagactgatgaacaaagataag

SEQ ID NO: 17704 - DNA, 666 bp, Glycine max
  unsure at all n locations
agggggcatgatgacaggctcgnacanncacaatttggttnagangancannncgcgcgngnattanttananactatatcataagggaccaccaatattatgttagtcgtttaagaagatagacgatcaaagtggaggagggtgtgttagtattataatatatcctcgcacctaataacgcatgaagtgaagtagatgagaaatagataggagaaaagcacgtgtcataattgacggatatcagatgcatcgtgtactatgaaatacgagaacagntacacgagtgtagcgatgagactacgatacattatatgaagtaagtacacatactacaagaatatagtcagcgacatatatcagatgtggtagataaactgatgttacagagtaaatgtagtcatgaggttntacaagatatacggacaatgatgtgtgtaaatcgatatcatgtgtntacgacgatagtatangngtatgnagaatgtatctatagaggtactaacatttgtgtagagagactaatcggatgtgaagttaactatacgcagagatgatagtatctacgttggatacgacgagtgacgcggtacgagtactgtactgtgcnttgacatacacatgagtgatgactagaagacgagtatactatagcaaaattacatatg

SEQ ID NO: 17705 - DNA, 533 bp, Glycine max
  unsure at all n locations
gcgtanattgatgcatggatcgnactannccnttnggtaaggnaaccccncccgcgnctcnnnnatnnngagtaaactaatctaacagagagtctctttctntgtngtngaccnacacgctcctgagggaagggtgtttatataactaaataactcgccacaacgaatatcggtcggaaatgtaaatgggatcaaacataagtgaaacgatgaacgacgtatgctgacatcgggcatagatggtatgagtaagtaccgtcgagcagctcaagggctgcactcatagataccgagactaaatatctgagaccgaacaacgtcgagcgagacggcgcaccgcgacaatatgacactacaagtatacgaccattatgctacgagatgccaaatggcaaaaaatgaccctgaaagagtaacttcgaaactaagaatggagaagacagtacgcgagaatcatgttataaatactcggagagacacgactgtacaacgaacctcggagagagacacagtctcaatattaggcgacagtg

SEQ ID NO: 17706 - DNA, 455 bp, Glycine max
  unsure at all n locations
gaggggatgatgcatcgatgacnnccntnagtaagaaaccnccgcggatcctatgagtacacattgatgcctgccattattttttaatcccagaacggcccgaggagggttttttactaatgaatacaccaaatcaccaagtaaaacatgtcattaataatatgcggaaaatacaaattaactcatacttcatatcgtcgccaacatgagaacggttgtttcggacaattttatcaataaatatcctgtaggatacagcggggtcccagcgatgctaactagatgagtgaacggaataaataacaggactaaatatggaaacataccatctgtgaagcatgtagtaaacattaggagtctacattggatgagataatgcattagaggccattaccacccatcaattcaatatagcttacaaatatgcgagcgtgtaatttacaaaatgtaagacg

SEQ ID NO: 17707 - DNA, 236 bp, Glycine max
  unsure at all n locations
gcatgctgatgtgaacctgtgacnccgcaatattataaattttttttttttaaagggggggtttgtaaccccaaaaaaggaaaaggattggatgatagagaaaattgagaattggaaagggaagtatgtaggggggttgggccagggatgaagaaaagaggacgggtatagtgataagtgaaggtaaaatgatagtggaattagatgatatttgaatggaaaatgagaaaggatag

SEQ ID NO: 17708 - DNA, 338 bp, Glycine max
  unsure at all n locations
gaggatgtgctcgtgacnncntagtagnaccgcgcaggaanattactaatagggagatataattttgcaccaagaaacggggggtttttataattcctccccaatccagtaataagacaaatgtaaaatgtgaaatgagtcaagaagaatgtaaatgaacgtattgacgaggatgatatgtagggtggaatgttttggtaaagaatatgaagagaaacagtattagggaatataaaaaggaatagaagagaaaagtgcagagttagaaaattagtaagaagaaataaggaatggaatagagttaatgggaagaaagcaagagtagagagcgaaagaaa

SEQ ID NO: 17709 - DNA, 483 bp, Glycine max
  unsure at all n locations
aaccggaccccaccccaacatgaagccgcacagggacaagcaaccacaaaacaaacnacaaacaaagaggacnntttgagcgtcgtagnacaccnccannaaaannaaanaccgcgggnanananagagccaccaacagaccgaaatcttaagaccacaacaaaccacggggggggcaacccacgaaccaccccccccaccgaacaaaaaaaacgcaaagacaaaccaccagcgaacacacaaagaacaaccacacacaaaaaaacacaacaacaaccggcaaaacccgaaacacaagacaaaccaaaccacgagcacaaccaaacacagagaccaacaaacgcaagccaccaacaacaacaaacgacaccaacgcagaaccaacacacaaacccaaccaaccgcaaaacaacgccaagacccgacgacagcaccacccccacaccagacaacacacccaccaccacccaaccacaacccccg

SEQ ID NO: 17710 - DNA, 243 bp, Glycine max
  unsure at all n locations
gggtgtgtgtgtgcatgtgtacacncctcttgatcattggcattttttttcgaggaggggggttttaatccaacatcgggggaggataatagggaaacggatcgtgggtagcgataagaggtcagggacatggtaaatcggactatgatgaggctaagggtgtgagagagataaatagaaatgagacgttgtgtgacatgttggtatcggagtagttatgaggaaaggttaatgttaattaag

SEQ ID NO: 17711 - DNA, 766 bp, Glycine max
  unsure at all n locations
tgtgaggaancgntgnattggacttcggcagtaccgattaggaacnannnccncnatnnanaatttttgtnganacgnanccncncnnntgtnnntnntantcntgacgataccgcatcattgcgagacatctttttttttcttatatattaccaacgcatacgtanacncgccgtggagatgggcgtgagtgctagcaatacatgancatatntgcctctacactcgtcgatctacatcatctgcgtactcgtatgacgttatntacacgcatagtatgatattatgcgatcgcaatgtatacgcacggacgcatcagatatgctcatgatgtatgtgatatctggatatgagtgacgccatataacgccagctccaacacgcgcgtgtgtctacagacgtgatcatctagttgtagtaggtcggctntacnaactgagttgacagtctcgagntgacatcacatgtcgcaactcgtgcggtaggtagacgcgcgacatacgtcgatgacgtgtgatgacagtctacgacggcacgtcactagtgaacttagtgangngtctactactgactcactaactctccctcgcacattaacggagtacntagtcatangacagatcctgatcgctgtgagacagggagacgatngagttctactggnagnttacgagctagtcacgccaccgatcttatactaggnagccgccgaactgtgacacggtatactataactggctcgcctcgtctcgcgatattacgccgt

SEQ ID NO: 17712 - DNA, 432 bp, Glycine max
  unsure at all n locations
ggggnatgtgcatgatcatcganactcagaaattgtaacanccacccgggatcctcagagttacctgctttgttgaattantttcaccgccgccccgggagacgggtgttaattggacccaattctcacatgatgcacctaaaacgtttgaattggttcgaccatgactctctgaattacggccgggaaatcagtgggaggagggacgcccctgcaatttgcacaacatgcatattggaaccctttatggtactaaagagttatcccgggcgtagtctgaagaaactacataagtaatagaaaagtgattttgggtaagtaacgtgataacacatcgatcctaatttacaccgaactaatcatacacatatataggcaggagtgagctttatctggcccgcgaggcgtgagaagctcctaagtctcctcccc

SEQ ID NO: 17713 - DNA, 120 bp, Glycine max
tttatcatcctctgcatcatcatggaggaaaatcaccatataaggaccccattgaacctcagagatccaacctccagatagctctccaagcgagctttcatcaatatttgcgtgctatct

SEQ ID NO: 17714 - DNA, 375 bp, Glycine max
ttctttcttgtactgatcaagacagttggaatgacgaaagctagttccacacatatagggacggcaacccttgtcatgagaagaacaaagaagaagaacagcattgtgtggatattccatgcacacagaacatgtaacatcttcccactctttcttttccaaagccttagaacatttgttttggcagaggtcctcacaaatgtcccttttgcaagaagccagtgggtatggagtcactctgaattgacgagaagcaatcctgtgtcttcccctgctaccttttgccatttccgatattccaacagaatctggaatttaaactgtcaaaatgttatcaaggaatctaaatgaaatgcattcatatattttttatgt

SEQ ID NO: 17715 - DNA, 377 bp, Glycine max
tcgacgacgccatgccgcgtttatagttgtttttgttcgacttcaactgtcaccaaacaacactcgcatgagttagctccattgttccgcttctttatcttctttttttattattatttctagttgagttcacactataactgttgtataatattagttttggttcaccaactattatacatcaaattcttttataaaaattacataataataaaatcaataaaataaaatatgaaaccatccatcaccaagtaccaaccaagcaactcatctaccacgtcacaatacttaaactagaacctttggctttttctagttactcattcatgttcctatacttgctttcactctatatataaggttaattattaatttga

SEQ ID NO: 17716 - DNA, 239 bp, Glycine max
gttggtgttttatacccaccgcacccaaaaatgctaaagttgctgtatgataaaaaaaaattatggatatgctataaaacggatagtataatcgcccggagacataaaagcatatgtactaataacaatggacatatcctcaaatagtacaggtaagcatgataacagaaaatataatattaacatgaaaaaattttggttcaaaagtaaaagatagaacctcttggaatacaatttaa

SEQ ID NO: 17717 - DNA, 754 bp, Glycine max
  unsure at all n locations
aggantgcnannnanttnggattggangttngcccgataggnnacnacnnccnacnnatannggatttatgtntganncananngccngnnancgcaanantananananagaaattatacttctangcgatgngantgagagatngtttttgtatgtgtgtatagtnangataaatagaagcgtaaaggagggcgggtgggtgtatatatatagtagattcatcatccactattcgcgagtaagagtacgaagataggtatgtggaacaatttacgtgtctgtgagagatatatagtcgttatatatggacgtatggcaggatactctatagtgtangtgcgataccgttgtagtagaagtagagatgtatagaggaatgagaatatatatatggagngtgataatgtgtnaagaggctgagaatgatagaagtgtagagttagaggatgtanatataaggatgtagtgtggtgagttatagaagtgagagacgtagtgtgatatatagatgtccggaagtacgtgtaagcggtagtagattcacgactactaacangctcgaatatatggcggtcagatagttacgtgctgagtatngtgtaagatgatntgaactcgagctatngagatcgataatgtgtatangatgatgatcagagnggtagaaacatgctgtgtagtaagaagtgactgtatgcgcaggaagataagaagtaacttgactgtcgatgcgacgatacggcgtatatagg

SEQ ID NO: 17718 - DNA, 436 bp, Glycine max
  unsure at all n locations
gagatttgatgcttgatcactgcaatcgtaagtacaccgcccccnacggttctctacgacgaacgctttatttatttcttccattctcccggggggggtggtatgcataaaaccccccctcncatccacggacattaaagactattgataatacgatcacttaaggagaacattcttatgtgaatgattgttggtaacgaataattgccacatcatctcactattatgtttcaatgagcttgaacaaattgctaggcagaggagcttcgaaagtgccttttgcaaaaaaacacgggtatggagcatattagtattgacgaacagcacagtgagttattctcatctaacatttcgcatttgcgaagtccaccgacattcggaaatgacttgttactgattttaatgtatcgtaagaaacggctatattattttattc

SEQ ID NO: 17719 - DNA, 287 bp, Glycine max
ggaatgtgctgatgcaccttgtagacacccgccacatattctacaccactttttttgtgaccctatggggggttttattaatccccctaactagataataaaagaaggggtggtaggagaaataatcattgtgaactaggagaaatttgaaggaaataagtgaaaagtgtgagtgattaacataggtttcacgaaacgtctatacatgtaaaaggaactttttgaatgctatatattctatttatttcaatgtatttagatcaaaacagaaaaaaaagagaattgac

SEQ ID NO: 17720 - DNA, 448 bp, Glycine max
  unsure at all n locations
aataatgaacatgatcactgacnncnnttatttagnacccccacctnanntnttaatatattaaaagaattattttttttttgactcacancacgggcgggttggattttatataaccaacaacaacttttgtcactagtatggcttacagccatgcatcattacatgtctgcctaaatgggcttatagcctaaaccatacttcccacaataaccttgggtatttatcatggctagattgccacccgagtattttcctaacccatcccgggctcataacctgtccccaacataactcgggccatcattatcgctgcatcagacacactgggctgaccaaaaatggaattctcggaagaaatgttgaccacctctaatgacttgaaagcagttataaccattgttatgcggcttccaaatatagcatggaggataggccacctatcacg

SEQ ID NO: 17721 - DNA, 314 bp, Glycine max
aatcagagggtgtctcttttatcttaccgagagcgatactcctatattcttgagtgattcaagaacaccttggctgtatcagaggactctcacaacctatgtgtgtcgccctcgctggaaagagtgattctttccttcctttcatcatcactcttgatctttcaaaccacaattccagaaaatccacctctgcccagaattatctcgtggccataactcccatgttacgcactcaaatgaagtgattcttgagcctaaattgaatatcaaacgagacctttcaccttgttcgcgaccacctcactcggagccct

SEQ ID NO: 17722 - DNA, 250 bp, Glycine max
ggatgtgctgtgcacatgtagaccccgctttagtcttaaggaatttttttctaaacaggggggtttttaacccccacaccgaaatcgaaagaggaagccaataggaaggatatatggatatggagctaataatgagatttattaacggagtagaacgaggaaaaataaattagctgtagccccatggaatttaaagtggtattgggtaatgctcaccgagctgtattcaaatatatttcgatgaaaatcg

SEQ ID NO: 17723 - DNA, 249 bp, Glycine max
  unsure at all n locations
gaatgatctctgtgcccttgtagaccccantgtaaatataaattttttttggagaggggggggggtatggccccacacaaataataataagatatatgagatataaagttatttaaagcgtgaaaggagtaaataagttgggtttgggaggagagagaggagaagtaaaaaggaattgatgagggaagataaggaatgaaactagaattaattaattaatagtaaatgggataggagaaaagatgaacg

SEQ ID NO: 17724 - DNA, 527 bp, Glycine max
  unsure at all n locations
gatgcnattgatgcatcgatagacanncnntttggttagatancacnccgncgacnnanttngcatactctcagcatgatagagatattaatcttatatcacacactagtcagacagagggaggggtgtgtgttaatatttgcacacccacacatcacacagagataatagtgataattcatgtctcagtcgcagaatatatgattagaagtgaacaagggaatgacggcgtagtagacagatttgtacgaatggaggagctcgagcacataatcgttatatagtgtgactatgtaggcgctctcagatagtacactatttgctaagtcgcaatatacctgatatgtggacaaataatagttatgaacgtagtgaggtaagtacgtctgatgtgcacatggggtgaacttattatacagttatatgaggtagttacactgaccgactaggtactagggtataaacatatactccagtgcgcacactgatcatctggttaggatcatgttatcggtctctacgatccg

SEQ ID NO: 17725 - DNA, 461 bp, Glycine max
  unsure at all n locations
caccaccccaaccagccgccacaagcgaaaacaacagaacataaacaaacaacaccaaaggatcgtgtgctcgtagacaccaaaannaaaaccncgcggcaaccaaaaanccaacgaacaaaacttttttaaacaacccccacacaaggggggcaaaaaaaccaaccccccccaccccccccacaacaaacaacacctccccaccaccaccacaacaaccccccaacccaacaacaaacaaccaacgaccgacaacacacacacacagcccaccaaccaaaaagacccgcacaaaaaccgacaaaacacacccacacaacccaaaaaaaacacacacacacaaacccgcacaacccaccaaccaaccacaaacaaccacaaccacaaacccacaaaacacaacaaccaacacccacacaacacaaaccaaaacacacacaaccacccacaacgcaacaccg

SEQ ID NO: 17726 - DNA, 540 bp, Glycine max
  unsure at all n locations
gagagcantgatcgattgcattcgatcgganancctcttaggttagcngagcaacccaccnnannntnananngtatatgtaactgtaaagaanaatttatttcattagtttgcacacgaagangacagggaggggggagaggtgttatatagaatgtaacactccccgtcgaggctgagattgaagataggtactaaaattaggtgtggaaacgatattatgatatacactaaggtgagtgaaaagatgatgaaagtatgaggtataggtgagtgtggagggggcgaggtatagtgaggggagaagggaagtgaggagatgtatagagagtcagctaatagaggtcgggaagagagagaggaggagggatggtgagatacgaggaacggaaggggaagggaaacgaggtggtgagaatacgggagaggaatgaaaaatgtggggtaaatgatcgaagaggaatggtgagtataagataaagagaagtgggggtatgatagagtaggaaagagtgaggcgcgagaggtatggtgatgaag

SEQ ID NO: 17727 - DNA, 422 bp, Glycine max
  unsure at all n locations
ggcatgtgcttgatcactgacanccanaaatagntaggnncnacgganaaanaaaatgatttaaagaatttattnatattagaaggggacaaacgggggggggggattttgtataccataaccaatcatgcagctaagttgatgatataagggatatagtgaatgaagtgtttagaaggcgaatgagttggagttgggataagagtgaatatagtatatgtaagttgtaggggagattgatgagaaatgtgttaaatgagtttgggaatttgtatggagaataggagtaaggtgaaaatgttagggatattaatatggatggaggttgaggtaataaatagggtaagaaggagagggaagtagggaatgagggtatatacagatatgtattgtgtggatagggaagataagagtggttgtag

SEQ ID NO: 17728 - DNA, 228 bp, Glycine max
  unsure at all n locations
ggttgtctgactgggcgtatgacccccnnnnaaatgtgatttttttacagcagggggggtttttgaacaaatgcgataggatatggaaaattgggaagaggaagtatgtagtaagtcaaggagtgaatgtggattgagaataggagaacagtgtttaagttaagaaaaaaagtttgattatgttagtattgaaagagttgatagagcataaattgtaattgaaatgga

SEQ ID NO: 17729 - DNA, 162 bp, Glycine max
ggtatgctgactatgaccccttagtaaattttttgctaggggattaatccccgatattaaaagagagtatggagtggaagagaggaaaagggaattataataggaatgagaaatatgaggatgaaaaagagtaatggaggaaagtagatagaaaaataaaag

SEQ ID NO: 17730 - DNA, 377 bp, Glycine max
agcttggagaagggaaaccagaaaatcagaatcatgccataatctttacacggggtgatgcagttcagaccattgatatgaatcaagacaattattttgaggaggctctcaaaatgcggaatctgttggaggagttcaatatgtcctacggtattaagaaaccaaccattttgggggtccgagaaaatatcttcacgggatctgtttcctcacttgcatggttcatgtcagctcaagagacaagttttgtgacactgggtcagcgagttctggcaaaccctttgaaagtacgaatgcactatggtcatccggacgtgtttgacagattctggttcttgggtcggggtggagtcagcaaggcctctagagtgattaat

SEQ ID NO: 17731 - DNA, 447 bp, Glycine max
  unsure at all n locations
gtgggacntttgaaccatcgagagcccccatttggaagnagctccccattancaaaaggaatagaaatcacacattattgttcgttgagcgacgccttagagggcggatattaattagtagtacccattatatcatagaggaatattgtgacgagatagtatatgatgtggtaatatattagcgaatcctttctaggatattaaatcttgcatgtagactgtctcggaagataataagagctagtagatttaagctatgaagagggtcagttataaatgcacaataactcttctaataaaatagtggtgcagtataatcggtgatcaattcttcatctttagcgttgaataagaaaccctcgatatgagagagaataatgtgccgtgagttatagaatatgaattgttgaggatattatcatagggggaatcggaatggagatgacg

SEQ ID NO: 17732 - DNA, 377 bp, Glycine max
agcttatgctacaaacatttataatagaccccctcaacaacaaaaccaacaacaacagaataattatgatctttcaagcaatagatacaatccaggttggagaaatcatccaaatctgagatgggcaagtcctccacaactacaacatcctgcccctcctttccaaaatgttgttggtccaagcaagccatatgttcctcctccaatacagcaacaacaacaacagtagcagcagtcacaacaaagacaacaagcaacgaggctcctcctcaaccttccttataagagttagtgaggcaaatgaccatccagaatatgcaattttatcaagagacaagatcctccattcagagtttgacaaatcagatggggcagat

SEQ ID NO: 17733 - DNA, 415 bp, Glycine max
tgccatgtcgtcgtcgttctgacctaaaccccttcctggcttgtacccaagcctcaacattacacgggctaccatcaatgcagcactggatgaacggggttacactgggggagactcgatgtcgcaacctacccttcagcgggagggcgacgcgagactcacgggtgcatcttccaaggaaggaaaacacgcggagttgccaccaacgtttattcgaggaaaacgtcggaaaaaaccagaaaaggcgtggtctacgaactttaagtgtgaaaggttcgggagttgtatttatgcacggggaaggtactagcaccccacgcgtccgtcacaaggtacgacagcctttaatcaagtgtgcaaatatgacttcaatttgttttatttcccctttataggtttttatgtctttgtatgc

SEQ ID NO: 17734 - DNA, 393 bp, Glycine max
tttcttttgaatatggttgaaactcttgtgggctgtgaacactactcttcgataaccaccgaataacttcggacagcgcagttgaggcaccgctctcttgaacatttcaaacacttactgtgtagcctagaaatatatgcactacaaaatatgcggtcttagctacgctgctcctatacgtagcaggagtacacctgtgccttaggggattctttctatattcttcaaatggtaagcgcccaaatccctcacatagaaaagagacttgcctattatcagccgggctgcccaaatggtgtactctatgagtcgattagcaagcacgcgatctgtattgaccgcgtgaaacattgttataatggagtatgcgatttccggacgtgacctaggagt

SEQ ID NO: 17735 - DNA, 550 bp, Glycine max
  unsure at all n locations
gacacgccacaactaancactnctcacaaatatgacaataaggtgaanatgaactgcgaccgaccnccaccaccccccccccccaggggngggnntttgatgcctcgacgtacgaccaccananaaactcaagctcgccaagaacgcgnaacggacgacaagcacgaaagtatttatgcccacacacggcaacgcaacgagaggaggacaggaacgaacagctcaagaaacacgaccaacaaggaacgccaagagaaacaaaacagacaacacacacgcgaggagacacccagagagaaccacagacgacgagaacagaaccaagaacactgagcgagaggccacacacactccaacggacacaagcaacaagacgcagaaacgggagaggaaaacgatgaacaaagaaacagcacaaagacaaagaaacaaacgacacgacgcgaacccagagggagagacacggcggacccgagcgggacaccgccgcagaccaaaaagacggaggacaagcacgacgacacaccgcggagaagaacgacggagagcg

SEQ ID NO: 17736 - DNA, 377 bp, Glycine max
agcttgttattgcatttgggcacctattttgaatctcctatgttgtacctacatataagaaacagtcccactctcccaattttacaaaatcatattcatacatcattggggcatttcaccgagcacttggtgagcgcatgtttggacataaattgcaagaggatggggacaatgtggcatgccccattgcttcagaatacagcataggcctaaggccttctcattcaaatcctcaactcatgaaaaccatcataaaaacaaaccaaaactgccccacaaatataagcacattctcataatttggagcaccaaaagatgaagaaaatataccaatgggaagctaaaaacattaaggattgaatacttacttgtgggag

SEQ ID NO: 17737 - DNA, 431 bp, Glycine max
gtggagtttccaagtgccaattcgtcctcttcttttttctattcttcttctggcttcaattcatcagtgggctttccttctgtgtccagcatcttgggatgttcctagcctttgatgacagctttccaggttctgctatccagtgatttgaggaaggccaccattcttgctttccaatattcatagttgcttccatcaagaattggtggtctgttcactggtccgtcttctttctccatgttcatcagaatttatctccctagatctcactctgtgatttcgagtgttggctctgataccaattgaaattctgataccaggggacagatgtcgtaccggatgtcacgacatcacgcttcataacatgcatattgtatgtgtccgtatgaacagattgaacaagtttataacacaacgagaattgtttaccc

SEQ ID NO: 17738 - DNA, 382 bp, Glycine max
agcttcatgatgatgaaccaagcaattttgatgatgccaaaagcccaagtgcttgattcaatattgattcaagacttcaagatcaagcatcaagaatccaatccaagattcaagagaagaaatcaagaagcaacaagtcaagacttcatataggataaatattaaaagaatttttcaaaaaccaaatagcacagttttgttttacaaaagaattttctcaaattttctaggttaccagagtgattactctctggtaatcgattaccaattggcattaatcgattaccagtgaccagtttggttttcaaaatgttttcaaatgatttataattttccaaaatgattttcaaatagtgtaatcgattactatattagtaatcga

SEQ ID NO: 17739 - DNA, 426 bp, Glycine max
  unsure at all n locations
tagtgcttgattaattgtctctgcgcttaatttacgttcatgcttaatgatcatttatgagtaattggtgtatgtgttgcttaatcacataacgaatgtcttatgttaaatttctcttaataatttaatttagggttggattaagtggttaaactgataaaggataaattctcgcaacctaggataagagacttgcttgtgaatcaaggggaagcaatgcattttaattctaatattttctagttcaattttactcgttgtgtaatttacaaaagcaaacaccccccccccccaatttgttgccatttcctactatctgttatgaacatttgatttatcattgctcattgggaaacgacctangatcacttcctagttactacattttaatgtttatttgattcgggtatggtctcgatcaatcat

SEQ ID NO: 17740 - DNA, 374 bp, Glycine max
ttgtcttcagaattcaatttctagcgtctcaatagattacgggactcaatcagacatccgagcaaaacgttattgtcgtttggattagttcagagcttcagaattcaatttcgatcgtctcgatatattacgggtctcaatcaaacatctgaggaaaaaagttattgtcgtttgaatttgctgagagcttcaacattcaattttgagcgtctcgatgtattacgggactttatcagacatccgagttaaaagttattggtggttgaatttactgagagcttcaacattcaatttcgagcgtctcgatattttacgggactcaatcagacatccgagtgaaaagttattgtccgttgaattagctcagagattca

SEQ ID NO: 17741 - DNA, 425 bp, Glycine max
tcagcttgagctattcaacgacaatacgtttgctctgtgtatgattgagtcccgtaatgtgttgagacgcttgaaattgaattttgaagctgagagctaattcaaacgacaataactttttactcggatgtctgattgagtcccgtaatacatcgagacgctcgaaattgaatgttgaagctctcagcaaattcaaacgacaataacttttttcctcagatgtctgattgagacccgtaatatatcgagatgatcgaaattgaattctgaagctctgagctaattcaaacgacaataatgatttgctcggatgtctgattgagtcccgtaatacatcgagacgctcgaaattgaatgtcgaagctctcagcaaattcaaacgacaataactttttgctcggatgtctgattgaggctcgtaatct

SEQ ID NO: 17742 - DNA, 368 bp, Glycine max
  unsure at all n locations
ttgcttgtcaagatcactgaggtgcatattttcatttaatttattttttgcataacttatcaatattacttactgttacgaaaattaatttaagtctttatggttatttattcaaactaaggcgttatacgagtggtttttgaacgaatttatgatagatttgtcattatcatttatgaagcattcagtcattcggtaggattatgcacttgcttaaatttatttatctgttgactactatacaccgcaattaattgagatgaattatatacttggttttagctggcacgattgcaagaggaccttcggcgcatgaatgcatagaaccaanagctgaacgagatgctcatccatgtcaacagtaacta

SEQ ID NO: 17743 - DNA, 383 bp, Glycine max
cggaactcggccttcattgccttaacccagctgtcttggctagaggcttcggcatatgatgaaggttctgtggctggtgagatggtcatcacgaagttcctatgggcaggtgagaggcgcgagtatgaaagtactgagcttagtggataacgaacaatcactgaagcttctggtgtagatgaaccaaggactctgtggtaatcctgaaggtatgtcggggaatgtcttgatcgtgttgaacgcctacggtgtgaaaggtcttgcttggttgaatgttcatcacaagagtgtattggtattatgggtcgtgatgagtggctttcttctggtgggtcaagctctttgccggaaaagggttccggacatggagatgggattgagtt

SEQ ID NO: 17744 - DNA, 376 bp, Glycine max
ttgttagaacctataagttcaagagccaaaggaatgccggaagcaaaagtgattgcacggtttaatttattaatgaaatctggatgaactctgtcggttctgaaggccttccaacaaagcaattcgagagcttcaccattggccaaaacttccacctcgtataccttgtcaaccccatgggctttaagcaaatgtctgtctctagtggtaatgatgactctgctgccagggccaaaccaatcaagacttccaacaagagctcgcaagtcatctatctcacagacatcgtcaagaaccaaaagaagcctcttcctggggagcatcttctttattagtgaaactccttgctcgacacttgtcagacgaatattgttct

SEQ ID NO: 17745 - DNA, 424 bp, Glycine max
  unsure at all n locations
ntaaatgtttagactaatccaagctacttaattattttaattgtatatatgctatgcaagtgaagttgacatcaaccaataaccataaaaacgtgacacacatgtgtatgctaattaattaaacataaacacactatattgatacatatactcatgattaacaggaagatgggttaggaactaagtcatctgatcaagtatctagcaagaatccattggacacagatagcagcacgccagcactttatagccagaaggaggagttaagaagcaacaagaggaagaagaaaacaattgatcacaacacaggacgaataatgaaagaatatgtggagatagcagacaagttaagatggctagctgaagctatgataaggtcataacaagcaagaatggactcaatgaatgacatagagaggatgat

SEQ ID NO: 17746 - DNA, 367 bp, Glycine max
tttcttgatggcgtgttacccaccatcttctcatagaataacaccagtaacgtgtctactatcattgttatcatctccctctccatcattggaggtgcttcttcagctgtcagatccctccacctttaggcatattctttgaaagattcatgctccttcttacacatgttctgtagctgccttctatccggagccatatcataattgtactaatactgcctaatggaggcaaccattatgtccttccaagaatggactcagataggtttcagattagtatactaagtgacggctgccccaataagactttcctgttagaaatgcatcaataatattgcatctttcatgtatgcacccatgatcctgt

SEQ ID NO: 17747 - DNA, 425 bp, Glycine max
  unsure at all n locations
tcganatcaaatactaaccagtcgaaggacgattatctatgaagaacggacgaagaatggcaaagaacattcacggttttggttacggaagcattatggaagcaccttggccctgattttcttcttctttctccttcttttcactaattttaagtgaaatatgcttccccagggtgttgaaccccttctttcagcctcccacacccttttatagccaaaataggggaggagcttgccgcccagctcgcccaggcaagctggtggcttaagcctgaagtaacatactcgcccaggcgagctggttgcttcatgtagaagcttcctgatgggcctaactgggcccatggctgaagaacaccccctaaattgattagctcacccccattttgagtgtttggcttttttacttccgaaacgtcgcgaat

SEQ ID NO: 17748 - DNA, 377 bp, Glycine max
tttcttggtatgatgcttcaatggaggaatagaaagagggagagaaagagagaggggggagctcgaaattgatggaagaaaaaaagggagagaagttgaactttgagttgtgtctcacaagactctcattcatcaaagttacaacaagtgttactcatgcttctatttatagactaagtagcttccttgagaagctttcttgagaaaacttccttgagatagctctttgagaaaacttccttgagaagctagagcttagctacacacacccctctcataactaagctcacctccttgagaagcttccttatgaagattcgtatagaagctagagcttatctacacatacctctctaatatctaagctcacctccttg

SEQ ID NO: 17749 - DNA, 422 bp, Glycine max
tggtggagttcaaagagaatcgtagaaggttcttgtctatgatataagcctacacgcaccgacatgaagagaaacaccctagaaaggagaggcagaagtgtgggccagcagcaaggattgcaagtaaaaggaactcccttatgtcacatcaacaagagttttgtcagcgcacgctggatgtgtgaggggtgggttgccatgatccatgatgaagtccctcaagagcaatcaaactgggtgcggccatgccctcctatgttcgagttgggaaattggcaaattatcaaacaacccataatttttgtggcaaacataatgtaatatgtgaatccaaaccctatagctgagcctcggctcgcgttagctattagatatatataaaatataatctgtcttcattttttcttgcactatcatcccta

SEQ ID NO: 17750 - DNA, 368 bp, Glycine max
ttgcttgtagaatggctagacatgatacatgtcatggtttggtttggttcaaggataaaagggatgccccacattttccatgacacaaaatgcaaaaatgatgatttggaaattttatgcaaaactggtcatgcatgcacctatgcggacactcaagtgtcaaatttttatggtcatgtgatgctagggttcaggattcatttcctctattttagtcaacccaatgtttccaaaatatgttcttttatcaatatgtgcattcctccgattccatttctggcgtccggggaaatttacagcattcacccttcaagtgtagacacgtttttttcttctaaatcggttatgatcaatgaatgaattctttt

SEQ ID NO: 17751 - DNA, 386 bp, Glycine max
  unsure at all n locations
tgtccgcanaaaatcactagaaatggattttattgtttaacacctcagtttttctcaccaagtaaaaatggatcattttaaggtccaacgccttaaaatggccaccttccaagtaaaaagaatcgcttgattcccgcttaaaaaaaaaaaagaaaagaaagaactacataggtctgatttcctcttcgatggagggtatgtaggagcaagagccccacttttgtcgacctcaaaaaataaaaagaaataaaagtttagatacactattctaatttaaggctgttgtcctttgggacaaacgtgagaggtgctaataccttcctcaaacgtaaatacaactcccgaatctggaatattctttatgaccggtttccttccgtctttcc

SEQ ID NO: 17752 - DNA, 325 bp, Glycine max
tgctttgaatgctctattcaatggagttgacaagaatatcttcagactgatcaacacatgcacaatggccaaggatgcatgggagatcctgaaaaccactcatgaaggaacctccaaagtgaagatgtccatattgcagctattggccacataattccaaaatctgaagatgaaggacgaagagtgtattcatgacttccacatgaacattcttgaaattgccaatgcttgcactgccttgggagaaaggatgacatatgaatagctggcgagaaagatcctcagatgcttgcctaagagatttgacatgaaagtcactgcaatc

SEQ ID NO: 17753 - DNA, 416 bp, Glycine max
gtaaaagattggctaagattttgttaaaacataagcacttagacaatgaaggaaagctggagttgctgcacaagatgtccaacgttatgtctaagaataagatcgggctgcacaatgcacaaggcaagataaagtgtcaaatgaagaattgaagctgcaggattcacgatgtctgatacaatgtccaggacatcctgcctgaaaatactggaattgctaaaagcattgaagctgcaggatccacgatgtcagatacaatgtccaggacatcttgcccgaaaatactggagttgctaaaagcattgaagttgcaggatccacgatgtcggatacgatgtccattacatcttgcccgaaaatactgtacatataaatctgttatatctttaacagattattgtgcagttagcaagaga

SEQ ID NO: 17754 - DNA, 377 bp, Glycine max
agctttgtgaatatcaaatttgaaagataggggatatatttttcgtatagtaccctttgaaaactaaggatcacattataaataaaggatctacatttgataaagtcactgtatacaagactaatcaaatcagaagagcctctcatagtatagtagaaaggattttagtgatgattttgtagattacaagctattggtctgcggtatgggattttagtaggatgaaattcacaactgtatccttgatttaggatagattgcaacttgttttgaagtatacttgcactgtgggtattacatttcctcaaatgattcccaactcattttgtagaaaaggcaactattcaattatgtttggaagttacagctcaggtttt

SEQ ID NO: 17755 - DNA, 430 bp, Glycine max
tcctcgacacgggacaacctctttcacccacaaatcgtctcagagcttagggggcttatgtactgtccaggacccaccaatcctacccacaaatcatcccttacccactcatagccagcgacggtaggggtggacgacggtgacccaacactcatgctaggtcgaacggggggagacgacctcacgtctccacctccaccaacctacacccctgaaagcagaaggatggagggtcacagtaatggagactggctccctggaagtagcaaaaggtcatgcccttccgtgaaggcgagaagtgcctctactatttttgtgtgaagtcttcaccttgaagaggactccccatgagaagcacctcggtgagtatccttaaacgacaaatcgtctattgagatgatctcttgatccatgatgggttgctcaatgt

SEQ ID NO: 17756 - DNA, 380 bp, Glycine max
agcttcgttcactccaagctcagttcctcgccaatcaccacaatcacatgttgctttttcttccttcaaatttctctctctctcttgtctcttctttcgatttattccaattgcgcaaatctggttggttgcagttatagcaaggaagcgttagatgtgagcgcgaagcttctagaagtgaatccagagtgctacacagcttggaattacagaaagctcgccgttcaacatcttctctctaactccgattccgatcctcactctatcttcgatgacgagctcaaactcgtgtgttctgactctcgtcggctaatttaattcaatataatactttcgataaataattactttgttttgttttttctatgaattgaatgaat

SEQ ID NO: 17757 - DNA, 433 bp, Glycine max
tgtcaaatggataaaaggctcacattcactttcttctacatcatattcaaacttgtccaaataaataataaagtcatctcgactcaaagaaaatcatataagtctcatacaattaatatagaacctatatcctaatgtcacatcctatcagagcgtggtgttcccgtgtcctctagcatgaggttcttcatagtcatccacctattcatctgctcccccgaacacaagttcaagatcatcacaggatccaaacataacaacacacagggagtgagttatcacattcctagctaatagagaaacaagacaatcaaatatacatattatataaatgagataccacttgcttaaacatagctcacgtaacttcaccacttcatcattcagaattcactttttaattatcaatcacattacacaagaatcccacact

SEQ ID NO: 17758 - DNA, 378 bp, Glycine max
  unsure at all n locations
agcttttgcatgtttagatatatatagagagagaaaggtctaagttccagagatttttgagagctttttctatgagaagactagcaaagaactgagcaagaagaggaagctatcataagagcaggagatgagtctatgagtgattgtgaggttttagaggtggaggagacatccccactacttgtatttcttcaatccttcatttttctcttctatttgttgtaaaggaagcttcccagttatggagagctaaatcctttgttggttcttccttgtacgtacttgatgtaaatacatgtatatctatntaatgatgttttatgtgttctctgtgctatcagtacatcatttcaatgtgcttttgccttgatcatgtag

SEQ ID NO: 17759 - DNA, 432 bp, Glycine max
  unsure at all n locations
ntgccttgtttggaacttttaatatccacagtaacttgaagctctccactggttcttctactccccctaactgagacaacattgaatatgccgactttgtagtgtactacctagtaggaccctccaatcagacccattgatcttccccagacttttggatttgcaccccttccaaagtaagatgaagttgttgtatcaattgagtttctcatacaaatggttccctcctccacttggcctcccaagttcacacatcatccctccacaactccattataccggataggtattcagttcaaatgagaaccccagaaccatccccactgaagaggtacccgacctcacaaataggtgagtaatccaccataaagcaaagcagatgattaatgggaaaagggaaggtttaggccactgaaacctcgattaaagaat

SEQ ID NO: 17760 - DNA, 381 bp, Glycine max
agcttgctaacccatggaagctcctaatatctcccacactttttggggtgggccattcttggatgcccttgattttctcagggtccacttgtaacgacccgcctcgtcgctacggtatccacactttaatatttgataatttcaatttttttataaaaagaactcccttaatttttgcttatgaaaatagaagtgattttgttacaacataaattcatccaacaacacgccattacttaagtgaatatacataattacatagaaacaataattcggtacttgtcatacacataacgaaaattaaatatgttcatatatatatataattaaaattccagttttacatctttaactcaacaaaataaaacttaaaaaccaact

SEQ ID NO: 17761 - DNA, 430 bp, Glycine max
ctttcctttggttgttctattagggtttccaagcgttagagagaatgagaatagattgtagtcttaatatcactgtcttcgtgcgaggggaatttctctctctacagacattattttgcaaatcccaacagtgagaatctgcgaaaatgagtttcgaaggtggtacccaaattttaggacaatctaacggttaatgagtttgagatcgtaattttactgggataaatttgggtgtatgcgagaaaaagggagggttttgggagaggatagagagaatgaatttgggaggaaggaggagtgtaaagacatatcgtaattgtaaaaattgacctaatctgtctctatttatagctagggtattctgagacgattatttttttttttttttataaaaatgaactctattttactctttcataaaataaataac

SEQ ID NO: 17762 - DNA, 355 bp, Glycine max
ttcttccatcaagtgggattataacacaagagcttcaagtaagtgctccttacacctccttgaattatcaactttaccttctactacattgcagtttattcatttctctccatgtatatcctaacatgtctaggactaaatgttggtaacatgaatctttagaatttccaccgattaatcttgctataaaagctaaatttgattttctatggttcaaaattcttgttcatgttcttgaaccatgattagtgttgagtttacgtgtctttgagttatgtcttgctattttttgtggctgaaacctaaaccattaaattctctcataaacattaaaggataatatatcctctcaaag

SEQ ID NO: 17763 - DNA, 407 bp, Glycine max
tataaaactcagctgagcaataaatcctcctacatccatcgtagtcttcattacttgcttacccacgcctacgtttggtttattagggaaaaacaccatacctaaccccgtcctaagggatccctatcgcaccatatccaaatctagaacgatgggtgatcaagaggagacgcaggaacaaatgaaagccgacatgtctgctctgaacgaacaaatggcctccatgatggaggccatgctaaatatgaagcagctcatatagaagaacgcggccaccgccgccgctgtcaattcggctgccgaagcagacccgactctcttggcgactacgcaccatcctccctcaaatatagtaggaccgggaagggacacgctggggcacgatggcagccctcacctgagataca

SEQ ID NO: 17764 - DNA, 378 bp, Glycine max
ttcttataagaacaaaattgcctcaatcatttccaaatatgcatgtgaattaggacgcataaacaagaatcaagccaaggctattgtgcaagcaatcaatggggcaaaacacaccaaatgattatgatgatggatggctcaaattctcacaaaggtaaaatcatcactttcaaattgagctttcaaaactatcatgacatgtagagaagaatcaaagatttcaagtcacaaaatgtcaagaacttttattttcaaaacaattacccatttcttgaacatatcctataattcaaagaaaaacatgcaaagtcgtacgtgcacacaaaattgacccaaaatattaaactaaaaatctgacgaaactaacaacattaacaa

SEQ ID NO: 17765 - DNA, 429 bp, Glycine max
tcttatccaaggctcatcttggtggtgaagcttcttcttccatggcttattccctagtggatggcgcctcctctcacctcttctcctttgtcttgcgctgcatctccatggtggaaaatcaccattaaaggacctcattgaagctcaaagatccagcctccatagaagccccacaatcaagcttccatcaactcctcctaagaataaattggagttgcaaagcttaatagggaaaataaacttccttaggtgattcatagaaaactcggctggaaagttgaaagctttttcaccattactatagctaaagaagcaagaagatttcgtctaggaaaggaacaacaagaagtttttgacaagattaaacaagtcttggtgtcgcaacgtgcccttttgcgggcgagcgaaagcgaagctcacgggtgcgct

SEQ ID NO: 17766 - DNA, 376 bp, Glycine max
tttctttagcctttcatttcttggaagccatctacatcaaaaaaatcaaagacacaaaattagacaggtatttattcaaattagaaagcaaaaaaaaatctgaaatttaaactaggcgcttagcgagatggattcgcttagcacgacttatgaaaattaactcatacacttagcgcgatcgaggtgcgtttagcgagttaacacagaaaactactctactgcataattggctcgctaagcccaattccaaaacagaaaacaatttgcgcttagcgcatacggtgcccttagcgcgacaacaatactagagaataattggcttagcgagcaggctcgataagcccaattccaaaaattacaaaacaggatagaaatt

SEQ ID NO: 17767 - DNA, 445 bp, Glycine max
  unsure at all n locations
gacctataaaactcagcttgcataggctcattcaatcacttagtgcaccatatgttnttggatccattccttaaaagcccgagggagttatgaaacaaagtattaatattttgcttaataccatatcaaagagaagaagtaatatgtgcccaagtgaaatgatgattgtttgcaactctagctcacaacgttaaagcccattgcacatctgtagaaactagctcccaatcaagttgccttgttgatatccaagaccaatgataaacctgaatttgactatattttgatgtgaattttcatgtcatatccatgcatattgatatattttattttggcaaaactcatggttgggtattaatttgtgaaagacatgtgcttaagacgctaaatgtggaaaagaactaaaaatcatgaactttttcacctaattagaagatcatagtca

SEQ ID NO: 17768 - DNA, 367 bp, Glycine max
tgcttgatattcacatcaaagatgcagttaacaggttaagtattaaattatacaccatttagtctattttgaactgttaatatgattataaattgatgatcatatttacattgatgttttttcccaaccagtgaaatgaagacattaaacagtacttctgttggtaaatttcaacaacctacacctcactcgattgaagtaaaggttagtcatttaaacaatgctactttaggacttctgacattttgtaactttgtaattgtctattgttaaatatatttcatattcaatttagagtcatgttcataccataggctatgagtgtggctattatgtcatgcattggatattgaacatagtcagtggc

SEQ ID NO: 17769 - DNA, 428 bp, Glycine max
  unsure at all n locations
gtngaaaatagtgttttcattataatgcttcttatgctttttccctcaaaaactactttgttttaacttctgacaaaagcactagaagaaacttttatgcttttattgctttcctcaaaacacttatccaattataataaaaatcttaaacaagtttttcaaatcatcaaaacacttttttcttttcttttaaaaagacacaaacaaacaggccttaaaatgagaattctttagttcatttccactagctttctggtcctcatgaacatctaactcaaattcaatggttttatgaaggaaaaatgccagaatcatctcatattatcagacacgatcccaacaggctagcactgcaattcataaataagtgctataatactgcagctattgacaagctcgctagtcttccttaacatgtacgtcttctg

SEQ ID NO: 17770 - DNA, 380 bp, Glycine max
  unsure at all n locations
tttctttaagttgngataattctgagaagtggttaaatgccatgaaagaagagataaattccatggaacataatggtgtttaggaccttgtagaattaccaaagggttgtaagagagttggttgtaagtgggtcttcaagactaaacgtaactctcatggcaaccttgaacattacaaggctagacttgttgctaagggatttactcagaaagatgacattgattataaagagaccttttcaccggcctcacaaaaggattctttcatgattatcatggcattaatagcccattatgacttggagctacatcagatggatgtgaaaactgcctttcttaatggagatttaaagaatgtttgtatggaccaaccaatgggg

SEQ ID NO: 17771 - DNA, 430 bp, Glycine max
aaaagttgattatatattgtgagaccatgtgttttggacattatcttttaataaatcagtcaagggagtaatgatagtagcatagtgtcaaataaattgacagtaaaatattgtgaggcccaagaagcttcgaagggtcgagagagtttttggatggtggtcacgcacaaatagtgacaacttattagggtttggctgcacactttgagttgtaatgacatgcccaaatagtcaacagagtgaacaactaacaaacatttactcatttttgcataaaaagaattatcagacaataactgcaaaataatgcataaataagtgagatgttctgaataattagcactataaattatgatatcaccaaagaataccaacacaaaatgcctcatataaggatgtagttgtcgcaacctacctcacgacgggactt

SEQ ID NO: 17772 - DNA, 354 bp, Glycine max
  unsure at all n locations
tgcttcttccccgaagcacataacctatcaaagatatttagtagcttagctatgttctcatctgggtatatatatatatatgtatctatacatatataaaataatcatatttgcttgattctaatatccatttcctttttcctcaattagaaaataacatacttaaaattaacatttttcttacagacactaccaatgtactcatccgcaccgacggaggcctactgataagcctacaggggccttctacaaaaactaattaatcctacagatacattttcattaaagtttcagcacataataatcatcatagcgctttttaaacagttaanaatatatagtagaacatatact

SEQ ID NO: 17773 - DNA, 424 bp, Glycine max
tggatactttattttatgtttgatgcattttgctcttaagcaaaaatttatatttaaactactcattactaccattagatttaataaaaatacaaagtaactcaaaaaaattaatccttagagagtaacttaatcttcacaaatgatttctccccacaacctataaccaagtaaaattatagcctgagtttaactgtcacaatataaaataattttccagttattcaatcacaaaccatatttattatgattttttaaataattttataaaaataaataaatatatcatccacatgatgcagttgaatgtcagcataaaactacttctcttattgtctctattgcatttcattttacaagcattaatgaaatacaaccaaaaacgatacgaaaataaaattcttgatgctcattgaacgcttta

SEQ ID NO: 17774 - DNA, 377 bp, Glycine max
agctttgagccaaaatcctaactcaccataaaccttgacccagggtgagaatgtcaatccttaccctcggaagcaaaaaagaagagaaggaaaatttccaatcaaagaaaaaataagaaggaaaattcccaatcaaagagtgggagaaagcaaaaagaaaagaaagaaaattcccaatcaaagaatgggagaaaaaaaaaaggagaagaagaagaaggaaagaaagctcctgatcaaggatcgaaagaaaacagaagaaatgtgcagagaggtctttggaccagacaatatctgaacaatacggaattgtcaccaaatgaacaaaagaaagaaaaggaaaccataacctataagtggtcttctccctttgattacca

SEQ ID NO: 17775 - DNA, 426 bp, Glycine max
  unsure at all n locations
cctatggactgagcaaaaaggctcaagtcatcaaatactactcatcttttaaagcacaaagcgaggattggaacctcaaccctatgttcttttaaaagactgcaatgagaaaattacagaggataggaatccctgggggaaaccaagaagaatacacaaaaataaaaacatgcagcgacttccttaattgccccaaatcttaagcgtagtatcgcttgacaacgtcggagttcacgggtgaagatagctcctcgttatccatgttggcgagcaccagggcccctctagagaaatccctttttacaatgaaaggaccttcgtagttcggggcccactttcccatatgtcttccagagcttgggagactttcttcagcaccaagtccccttcgctaaacctgcgcangcgtaccttcttgtcagaagc

SEQ ID NO: 17776 - DNA, 377 bp, Glycine max
agcttgttagaacaaggaagcagtccatttgagagagtttcgccttaggatataaatagttaatgtattagaattaaaattaaatcatttgaatattatttaaatttaagaagagttaagaaaaaaaaatcttaaagaacagatatacatgaatctacaaaccgtacggtttggtgcaaccatcagtcacgttttcaacgaaggccgaataaactatatatacataatacatggcgtgcatttgtgtcaaagctctcatccaacaaaagaaatatctttgcttttgatgtgatatttcacttgttactacctttaaggtcgttttcaagtgcatataatcatgtttatcgatttcatttcttttattttattttctt

SEQ ID NO: 17777 - DNA, 431 bp, Glycine max
tgctacacaaataacctttgattgtgtcaatctcctgtgattgtgtgtaggaactaggaagtaggaaccattagcctaggtgacatctggtaaataaccagattgagatagtttggtgtggccatgactatagttctaatagcagccatgatattaaaagtccctttttgtcaacctaaattcagtttagttaaaaaaaattcagttcccttctccctaatttttatctcctgtttcccacttttttctccaatctctcttcattatctgattttatttcaatgattcaactctctccataacttttcctgacatgttggaattttctttaacctagttagattgaagacgaggaatatcaataatgaggcataatattttgcctaaatatagttcattctatacttcaaattaaaatttgcaaacctttg

SEQ ID NO: 17778 - DNA, 380 bp, Glycine max
  unsure at all n locations
agcttgatcaaaacaaacatctaatcattccaatccactcaattcatacattttctcaatcaattcattcccaaaaactcatttcatgcaaaacaatccattgcataacattttcaatcagttcactgttcaaacaagctttttgtacaagcagtcaaacaactacactacaactgaaatttaaataactgaaacataaagactaaaagttaaatgattgaacataaatcataaaataactgaaataaactaaattgttcaaaatgcacaaattaaaatgtcatgctcctgtgattgcccctgtgcatgcttattgagatccaacacctgaactgtgacatcctggaaatttctacccgaaattntgtaaacgatatatt

SEQ ID NO: 17779 - DNA, 424 bp, Glycine max
tcatgcttatgatttatactggtcataaagagggagtgttatatgtagcacataggcaaataccttcaccaaccatagttatgatgaatgatttaaattagcatgggattaggctgtaacatagctacctattggctcttaatgagctccttgattaagtgtaattatactatgaagaagggatcagtgattaacctagagagtagagatatacaatttttctcaatctcaagatctctttttacattaatgatgcacaacctaataatgttttctttgggttctaagggtttgggcgagaagacccaccacttcacattacttgatggtgagatggttattgatacattgccagattcacagaagcaggagagaagataccttatatatgatatgatggcaatcaaccaagtatcaataatag

SEQ ID NO: 17780 - DNA, 379 bp, Glycine max
agcttgcctctgaagaaaatggtcgatgcgacattaaataaatgcattacatgcacatacttcttcatgttgagaaaccactctccatcactagtgtgttaaacactactatatgaagccacttccttttatgtctgagcaggtctgtgtagaagagctcttcttttgatggtgattgaggaattttagaacttagcttcatttattcttcataggattcaaaaattcctaggagaatgtgtctgcaaaatagatttcaaacacatggtattaaatgatctttaatttgtatcaaatcataattttatcttgctatcatctgaaacatcagacatcgacttcacaaatcatgttccgatagtgcatgagacataactct

SEQ ID NO: 17781 - DNA, 112 bp, Glycine max
  unsure at all n locations
tctaaactttatacaagaatgaagctctgataccacttgttggacaagtggcctcacatatcttaagaaggggggggggggggtgaatcacnatcttacgacttatttcccc

SEQ ID NO: 17782 - DNA, 379 bp, Glycine max
agcttgactaggcgagttgattttagccttagtttcactttagttattagtcaattcgattaagaatgagaaatcccaaagagaaaacgtccgattgattttccgctttattttactaaaaaaagatgttttttgattattatattttttttatctctttttgttttccaacgttgttacggcatgaccgaacggtcagaattcattttaaccgaagttaacggataatacaattcaaacgatcggtggaaatttattttatttttaagttaagcgagaaatgacttaagtaaaatggcttaagcacgtcaaaagggggtataaaaagtaaatgaaatgagaataaaaatatacgaaacacaatgtggaccactatggg

SEQ ID NO: 17783 - DNA, 433 bp, Glycine max
  unsure at all n locations
taacaaacttacaaatcaagtgatcatgtattccgaaatatagggggagaaaacggatgcacattttatctatatacaattgtttgttgcttgcttgaatcttgatttcaggtattgtattgtcatcatcaaaaagggggagattgtagatgcaattggctttgatgttttgatgatgatcatgatgatgtgttgcaattgatgcaaatgggcttttcaagattaaaattcaagacaatacttcaagattacaagtcacaacatcaagatgatcactagaagattaggaagggaattcctaattgaattagcaaaggtttggccaagtgatttaaaataaaaagtgtttttcaaagcttttactctctggtaatcgattaccagaggatgtaatcgattaccagtggccaaatacgtnttataacagctataa

SEQ ID NO: 17784 - DNA, 383 bp, Glycine max
agctttggtcctattcaaatagccataacttttgacatgggggtacgattgaggcccatgatatatcgagaggctcgaaattgaaaaatggaagttctcgagaaattcaaatggtcataacttttaacttggatgtccgattcacgcacataatatatcgagacacacaaaattgaaaaatggaattctcgagaaattcaaatgttcataacttttgcctcgaatgtcagatttaggcacataatatatcgagacgctcgaaattaaacaagaaagctctggtccaattcaaacggccataacttttgacatgagtgtatgattgaggcccatgatatatagagacgctcgaaattgaataatggaagttctcgagaaattaa

SEQ ID NO: 17785 - DNA, 414 bp, Glycine max
agcttcaaccaggggagatggaccatttcaagtgcttgaaagaatctttgacaatgcttacaaagttgagctgcccggtgagtataatgttagttccaccttcaatgtctctgatttacctgtttttgatgcacatggagaattcgatttgaggacaaatccttctcatgagggagagaatgatgaggacatgaccaacagcaagggcaaggatccacttgaaggacttggaggacctatgacaagggctagagcaaggaaagccaaggaagctcttcaacaagtgctgtccatactatttgaatacaagcccaagtttcaaggagaaaagtccaaggttgtgagttgtatcatggcccaaatggaggaggactaaatgacaccactttggttcaattttagagtgtttactta

SEQ ID NO: 17786 - DNA, 367 bp, Glycine max
ttcttctcaaggaagttttcttaataaagcttctcaaggaagctacctagtctataaatagaagcatgtgtaacacttgttgtaactttgatgaatgggagtcttgtgagacacaactcaaagttcaacttctctccctttttcttccttcaatttcatgctcccccctctctctttctctccctctttcttttcctccattgaagcatcctctccaagcttcttttccaaggctcatcttggtggtgaggctccttcttccatggcttattccctattggatggcgcctcttctcacctcttctcctttgtcttctgctgcatctgcatggtggaaaatcaccattaaaggacctcattgtagctc

SEQ ID NO: 17787 - DNA, 425 bp, Glycine max
tatgctgcaaacatctacaatagacctcctcatcctttcagcaaaatcaaccacagtagaataattatgacctctccagcaacagatacaatcccagatggaggaatcacctgttagacaaatggcctaagttatcttaagaagggggggttgaattaagataacaagaactattccccaattaaaattttactctctctttttagattaacaatgcacccttaacatgaattactcaaaagacaattcaaaataaacttctttcaagccaaagataaatagcaataaataaaagaagtttaagggaagagagaaatgcaaacttgatttataccagttcggtcacttcctgtgcctacgtccagtcctcaagcaacccacttgagattttccactctctttgtaaaatccttttacaaagtctg

SEQ ID NO: 17788 - DNA, 322 bp, Glycine max
agctttatgatgtggatgcataaagcgcgtggcaatatggccgcaatcaccatgaactatctatggaccaactctgtcgctgaggaacatgacactggcccaataatgtcgatatatgaataaaagctctatctgggtgagtggatgcctctatggcttgatatctatgtgtgagtcagtgcatgtgtgtataagatttctctctaggcataccatacacaactctttatacaaaaatgaaaccacctgaattattagcgaggcacagcttgcccatgatcttattgatggcactagctaagagatcttgtgctagagatct

SEQ ID NO: 17789 - DNA, 429 bp, Glycine max
  unsure at all n locations
tgacttactcttccgtggctacaggatatattgtctcttagactacttgcggaatccactacgttcatcaatgacaatagtcactcaccatagcgtagacatcttgcgatactgcttgtgaaaaatgctatccactcatcgcagctggtgatcatgacacaatgctccatgactagagcgcaatgtccagcctctccaccgcttctaatgcgattcagaagacttgggattgatgtgaacatatcttcgttagaagcgtctccactcatcaacgctcagctgtttatgtggcacgcgttcaactcaagatgtgaatcaatacctctgtggatggcacttcattatgcttagcatataatatactcatcggagtgcattaccgatggtctctgtagatgacaactagactagctgtatgtcctatgttcn

SEQ ID NO: 17790 - DNA, 377 bp, Glycine max
tgcttgcacaacaagtaactaattctattttttacaaaatgaaataactaactaactaactaacttccactaatatatagagcgactactcagaaagaagggatgagccttaattaatcccatctaatatacctaattaaactaattacacaaaacaaagcccaaattcgcagcccaattattcaagtgcggagattctaacttccaaggttaatttgaccctctaaatggcagaattggccaaagcttattggtgaaaaaatagaatatctttttgttatctttctagggactacccacaatctccattttgagttatgtagtgtcgtctaggatctacacaaggaaaataggtcaagtaaccacaaaaatccaaa

SEQ ID NO: 17791 - DNA, 434 bp, Glycine max
  unsure at all n locations
nttgctacaacctttntctccccctttggcaacatctaaaagccaaagaactcggaaatcaacacagttataacaatggagtagcaagatataagtatcagagtagtaaatacaataagccaaaaccataatcaagaaataatcaaaccaaaattcaaagatcataaaatgtcaacaaccacaaaatatccaagactaaaatttaagaacacaaaataaataagcaaagtacttagcataataatgtaaattctaagaaactaaaagccaaaatacacggcttataaaagataaatattcagaatctaaaatctaagaagacggaggaggtggtggaagatcgaaactctgacgaatgtatccgacatcctcttcaagctgtgtaagacgaatgtccataccggcaaagcgtgaatctaacgagtcaaagcggg

SEQ ID NO: 17792 - DNA, 359 bp, Glycine max
ttgtctttagacaataggtaagggaaattttatcttatgttctattgcttaatctgattggatgggttgtgtatgctccaaagcatgtttgattttctatgggtttatggaatttggtgttggattgcctttagagtcctttccctttgtatgcttttgatttgagaattcttgatggaatcttgtatatgtttaattgattgctgatttatgtttttttttggacttgtgttgagttctgagtcatttatgagtgtctggaggggttgggagtgatgaaaatgcgtttatgttcacaagaaccctgaaattgcaagttgtagagtttgcatacttgctaagcaagacaagctcattgt

SEQ ID NO: 17793 - DNA, 429 bp, Glycine max
taacaatccttgtgatctattacaggatatttctattcctatcacatagcttgcatcactcatatccttcatttcaaagttactagaaagaaacttcttagtctcatgaagaagaccaagatcattagttgcaacaatatatcatcaacctacaggattagaaaataaccttactcccactgaccttcagatatatacaccgatcaacagtattttccttaaatccaaaggaaacaatggtatcattaaacttcaaataccattggcgagaagcttgcttaaaaccatatattgatttctttaatttgcacaccatatgttcctttccctcaactgagaaccccattggttgatccatataaacattctcctctaaatctccattaagaaaggcaattttcacatccatctgatgtagctccaagtcat

SEQ ID NO: 17794 - DNA, 379 bp, Glycine max
agcttaaagtatgcccgagtcattcatccgtatgagatgttgttgaagtattggcgatcagaattgacattccttggattatagggttgaaccaaactcatgcttttacaaaaaggttcatcaagtcaagttgaaatatggaagtaaccgtcctgcaaaattggggcaaaagatgaattgagtcacatcactgcttcgtctactgccaaacatatttaggattgttgatgtccttgttacttccagtttcaccttgacaaagatgtcatggatcatgttgaaaatctaaattgattcaaccccatatcctgcgtaaaaattcgcaatacttcaactatacatcattcgcatacatccatgcttttcattggttgcattg

SEQ ID NO: 17795 - DNA, 428 bp, Glycine max
  unsure at all n locations
tgcctcanagaggtccaggaaagacaaggcggtcgaatgaactatttccgccccggagtacgacagtcaccgctttaggagcgttgtacaccagcagcgtttcgaagccatcaagggatggtcgtttctccgagagcgacgcgtccagctcagggaggacgagtatactgatttccaggaggaaatagggcgccggcggtgggcaccactggttactcccatggccaagtttgatccagaaatagtccttgagttttacgccaatgcttggccaacagaggaaggcgtgcgtgacatgagatcctcggttaggggtcagtggatcccgttcgatgccgacgctatcagccagctcctgggatatccgatggtattggaagagggccaggaatgtgagtatggccagaggaggaaccggtctgatgggt

SEQ ID NO: 17796 - DNA, 369 bp, Glycine max
agcttgtgtatgacttgcttaaatatatgaagcttgagttcaacttgtttagtatgtatatagcttgattattttcattccctttatcaaatctctcaaagtattttttaagtttaataatttggtatttttacactagaataacgtcaaaatagaattacaattttaaaagtaaaagaagtaattaagcctataccttttgtatgcaacattttcatttcttttaaatgaaattttactatctatatgaagggaaagtagcactatgccttttgtctcaactctcaagtctaaagttgtgccgattaatccctaaactttaactaatgtcccatatattctttcatcaatatgtcattctagattctt

SEQ ID NO: 17797 - DNA, 425 bp, Glycine max
  unsure at all n locations
tgtgcgaatcaaatcactcctgcattntatctctagcatgcattttttctttctttacccactcctcacgtttggttttttagggaaaaacaccataactaaacgcgccacaaggcatccctatcgcaccagatccaaatctagaacgatgggtgatcaagaggagacacaggaacagatgaaagccgacatgtcgactctgaaagaacaaatggcttccatgatggaagccattgttaggaatgaggcagctcatggagaaaaacgtggccaccgctgccgctgtcagttcggctgccgaagcagacccaactctcttggcaaccgcgcaccatcctccctcaaacatagtaggacgaggaagggacacactgaggcacgatggcaaccctcatctgggatacaaccgagcggcttacccttat

SEQ ID NO: 17798 - DNA, 365 bp, Glycine max
tttcttcaagaatcaagatcaagattcaagattcaagaaccaagagaagacttaatgaagataagtatgaatcttttttttcaaaaactgagtatcacatggatttttctcaaaacatgtttaccaaagagtttttactctctattaatcgattaccagattattctaatcgattaccagtagcaaaatggatctgaaaaagttttcaaactgaatttacaacattccaattaatttcaaaaagctgtaatcgattacaatgtgttggtaatcgattaccactgcctgtgaactttgaaattcaaattcaaatgtgaagagtcacatcccttctcacaaaagctttgtgtcatcaatgacactga

SEQ ID NO: 17799 - DNA, 413 bp, Glycine max
taagttcttcatctgatgtcggagccatcttcatcattgtttgaaggaattccgggggaagctcatgtcctgatgtaatcagtcaaaaccatattgtaagtctttcatacaagcggaacaagacaactaaacaatttctcttttaaacttcaatatattatcattcctgataaataaatttcatcatgatcaatcatgtaaagttcaaagcaatcaatccactggttacagaaataatcatctcaacagcatagccaggacatgactaccacaatctatcttccccggtttttaaacatgatgatcaataataatgttaaacagcattcaaacctatcaacaacaccacagcaatctatcccctcaactgcaaagacatgacgataagagtccatattatactgcaagtctac

SEQ ID NO: 17800 - DNA, 379 bp, Glycine max
agctttcttgagaaaacttccttgagaagcttctttgagaaaacttccttgagaagctagagcttagctacacacacccctctaataactaagctcacctccttgaaaggcttccttgaaaagattcctaaagaagctagagcttagctacacacacctctctaatagctaagctcacctccttgatatgagaagctagaacttagctacacaccccctataatagctaactcacccccatgacaaaatacatgaaaatacaaaaaaagtccctactacaaagactactcaaaatgcctcgaaatacaaggctaaaaccctatactactagaatggccaaaatacaaggcctaaacgaaggagaaaacctatcctaaaa

SEQ ID NO: 17801 - DNA, 453 bp, Glycine max
taggacacttaaatctcagcttccatatatctctcccaagagaagcgggcatgtaacttatggtgacaacaacaaaggtagaaagaattcttggagttggaaaaacaggtacaaattattcaaactccattgaaaatgttctacttgttgaaggccttaagcacaacttgcttagtgttagtcaattatgtgataaaggctatctagtatcatttgattctcaaaaatgtctcattgaacataaacatgatactaatataaaacatatagggtatagagtcaacaatgtttatatgatagacataagccaaaaattagataataataaattttttcttagcaaagatgatgatccatggctatggcataaacgtattgctcacataaacatgaaacacttaaataaattaatttcaaaagatttagttgttggtttgcctaaattgaaatttg

SEQ ID NO: 17802 - DNA, 372 bp, Glycine max
agcttgttttgaaagtcagactcttgccgtgcactgtgattatgacgctagtcttatatgggagtgcagagcatcataacttcttctctttcttgttcttgagaggttggtctagagaccttgaagcgaaaaattgttgctaagcatgcacacccttcaatatatccttgggcattctcaattgtcaccggaatcttgtctcatgttcacgagacacgatgaagcttgatatctgctcgagagacctgcattcttggacgcacccttctcttgggagtcgtgactatgacacgaacaggggtcgatccaagtcttgatgcctatgcttggatttaacctctttgaacactgtgatgactcaagaaaatgtgc

SEQ ID NO: 17803 - DNA, 380 bp, Glycine max
  unsure at all n locations
tgtagtgcgagagaggactagggacgccaccatgattatttgtgaccagcagtgacgaggaccatgactgaggtccaacgatgatgatgccagtgatgggcaacggctttagattcataactgctgngagttttttatattaagcacaacatgaaatctcgactcgcgaggcttggactacctcatctcgataatgacgtcggttcatacactatgtaaactggcagactcctctcacacgtcagagtctaccctaactcgaactattctagtgcagtataattttacttatatcacactagttaacgtgcgattttaactagcatgcactacagtgctactcgtcactctagcacttctcattagcatagattcttgct

SEQ ID NO: 17804 - DNA, 381 bp, Glycine max
agcttgaaggcaaactggatgcgttggtcaacttggtaacccaactggccttgaatcagaaatctgtacctgtcgcaagggtttgtggtttgtgctcctctgctgaccaccatacagacctttgcccttccatgcagcaacctggagcaattgagcagcctgaaacttatgctgcaaatatttacaatagacctcctcaacctcagcagcaaaatcaaccacaggagagcaattatgacctttccagcaacagatacaaccctggatggaggaatcaccctagccttagatggtccagccctcagcaacaacaacagcagcctgctccttccttccaaaatgctgctggcccaagcagaccatacattcctccaccaatcc

SEQ ID NO: 17805 - DNA, 423 bp, Glycine max
atggccccctgcattcagaacaaaacccctaccatggatgcagagacgggaagcaaactcttgaggatcaatcctcatcctcgtaaatctggaataggtaggcagtgtctcaccctcctctaaaactattggggtttcaaagaaggtatttaggctgtcagcatcaatcttgattaagtgtcctgatgcaatcctaccccgcaagggcattggatagaaaactccaagtagattgggccaaagatgcaagagaaggccctagggttcttatgagccttaaggtagatttcgggcccatgggctaagtatgagcccacttatctttgtaaatattagattaaggtttcattatttttgggccttgtatttagggctccataatgtaagtagggtaccctagaaatataggatgtttcagccctt

SEQ ID NO: 17806 - DNA, 380 bp, Glycine max
agcttcaacttacaaagagtagtttaggcttagcgcaacaagcgcgctaagcccactgcttgaagtttaattccaatgaagatgttgggcttagcacagtgatgtgtgcttagctgaactattcagccaactagccaggggtctaagcacttagcgcgagcaagctcaggcttagcatgtgaagatatggcgcttagcgcaatggttgcgcttagcggatgggtaactgaaaattttttctgagtcttttttgtccatctcttcacctaggcttaaaaaccccccttgttcactactaaacaagctgaaaaattaatcacaatcacaagcaactatcctaactacatgcaagagatacaaaatgaagaatagaaaaggga

SEQ ID NO: 17807 - DNA, 433 bp, Glycine max
tgcatgcaaaatagacaaaaaaggttgctttagtttgcaattttcatgttctttattaattaattaattattatcatcattttttttttgagtttgcgtatcatatgtttatgccataactgtccttgatttcagcctagtcactccccttcacagtctcatgtaccagatttcgaagtcatcaacacctctttactttaattctcaccaagtcagcattctctgcatgtatagcaacaatattttaaagaagaggtaagcttactcattttttctcatttcctagttgcaattttttgctcaagaataagccattaataatttcttgcttgaactattattgaatctcttaagtgattacttaagtaataaaattatttaagtaatctatgaagtattgatcaatatttattactttaaggactaaattgaa

SEQ ID NO: 17808 - DNA, 380 bp, Glycine max
agcttgtatcaaattcaaacgacaataacgttttactcggatgtttgattgcgtctcgtaatatatcgagacgctcgaaattgaaaacggatgctcgtagcaaatgcaaaccgcaataacttttaactcggatgtatgattgagtaccataatagatcgagacgctcgaaattgaaaaaagaagttctgagcaaattcaaacgactataactttttactcggatgtctgattgagtcccgtaatatattgaggagcacgaaattgagaacagaagctctgaccataatcaaaccaaaataactttatattcggatttgcgattgagtcccgtaatatatgaagacgctccaaattgaaaacagaagctctgaacaaattc

SEQ ID NO: 17809 - DNA, 430 bp, Glycine max
  unsure at all n locations
cttgagccaattcaaacgacaataactgtntactcgaatgtctgattgagtcccataatatatcgagacggtcgaaattgaatgttgaatctctgagcaaattcaaacgacaatagctttttactcggacgtctgattgagtcccgtaacatatcgagacgctcgaaattgaatgttgaacctccgagacaattcaaacgacaataactttttacgcggatgtctgattgattcccgtaatatatcgagaccctcgaaattgaatgttgaagccctgagccaattcaaacgacaataaatttttactcggatgtctgattgagtccccgtaatatagcgagacgctcaaaatggaatgttgaacctttgagccaattcaaacgacaataaccgttttactcggatgtctgatggagtcccgtactatatc

SEQ ID NO: 17810 - DNA, 363 bp, Glycine max
ctttttatagaatatatactagaagaacagtgacgattgaacagtctatacatgtttcctttgatgagtctaatgccattcttccaacgaaggatcttttatatgatatcttccattccttaaaacatacacatattcatggaaataactctcacgaaatatatgactgaagccatgaacattctcaagataatggggctataggaaataatgaactttcaagagaatggaaagcctctagagatcatcctctcgacaacattattggtgatatatcataaggggtctcaactgcacattctcttaaagatttatgcactaatctggctattgtctctatgactgagcctaaaaatatgaaag

SEQ ID NO: 17811 - DNA, 427 bp, Glycine max
  unsure at all n locations
ntgcttggagcttcaatggagaatgaagaagataatggcaacgtgagggagagagagggctgtctgaaattttgtggggctgagtgaagagagagagagttgctttttggttttaaatgaaagggttttctcttttttctattattttattcaagctatgccacatgtcttcatttgagtggagcaagaagggcccactttccctttttaattgtgactcatactcaaccacaaaaagtgagaaaaacctgacctttgaaacgctaaaatcctgccttggtttgcgtgccgtttctctggttccagttcctcacgtttctctgcgtccgtcggggccagttttcgaaagcaagcaatatatatatcaaaatgctcagaataaaaccccgagcgtggttcagaggttggttttcgtaaattctaagtc

SEQ ID NO: 17812 - DNA, 374 bp, Glycine max
agcttgaagctcaagaaaaagtttgaagaagttttttggcttttacatgtccaactcctttgagtgacatttgtattggttattaacttgattattgcatcttagtacatccgatatttattttgcattgtgcatcatcatagtgtgagtgaagaaaattttctaagttagaaaaatttcttcagaggcaaaaactctattttaatcgattacaacaagttgtctgaagcttaaagagttaagtctcgtattggtttaatcaattatggtagtattttaattggttacatttttgtttgagacaatgactgatttttcaggagtctctactttaatcgattacctggtggattaatcgattacttctctctcat

SEQ ID NO: 17813 - DNA, 429 bp, Glycine max
tgtaggattatggggtacccatcacatgtggtactatgtggcggtcgggcgatggtgcacaacaagttttccacatccacaatgcacgcataaacccaccatcccctgttgcccacctccaactgagctcacgtactcccacgtagcccatatcctcgtttctctcaacaccgggtccccatcaatcctcccaagcttccacaacatccaagaaaaacaacattcaaacagcacaagctatcacagccaagcaaaacagagtaaaggcagaaaactctgctcaacacatcaaccaaaatcacagcttttctcacttaaagaccacagtaacaattccttcgatccaattcgttaaccgttggatcgactccaaaattttactggaagtctatagtgcataagcctacattgtaaccgttgggatctact

SEQ ID NO: 17814 - DNA, 379 bp, Glycine max
  unsure at all n locations
atctttaaagcacttctcagtactaaaaatcctaactatacatacaaatgggtgatcaagccacaaacatgcaaaaatgagcatagatagaagcaatgaacacataaaaataacattaaatagatagtaagataattttatatcaaaggttcagcagaactccccaatcaagaggtttagccttccattacaagtaatgagctttcaatacaaaggccagattttgagggaagaaaatggctaaggagggttgaggatgtctccttcaacctctagaaccctaatctcactcttcccacctagactctcttggtggcttcgtgtttgtcgctctagcttctcccttggctctgttnttcgactcctctcttagtttcca

SEQ ID NO: 17815 - DNA, 444 bp, Glycine max
  unsure at all n locations
ggacctatgaaactcagcttncatactggcgctcanaaggatttgacctgtgaggatattcaggtatttcaactaaattttgaatgttgttataatatgttgcactaaaaatcttaatttgtaattgactaactacaaaatgtatttattatatcatagactaaatttgatattcctgaatcatctaatttgagtacaaagaaaaagaaacttcagatcgtacgagagaagtggatgcaatctaaatcagatttgacctccaaatatgccctggcacacgacaaggagggcaaggatgacaaagtatgcaagaagtatgacataagcaaagagaagtggacccagttttgtcagagacgtagagacccttcatgggaggataattgattatcattgtgttttaaacttcatatgtacgtattattgtcgactgtattaacttac

SEQ ID NO: 17816 - DNA, 374 bp, Glycine max
agctttattctcagatccctcttgttggactagacttagcttgaatagcttatgaaagtttagactaatttagcctaagctttgtcctcagatccctcttgttggactagacttagaccaaacaacattattgtaacagcatacttaaaaccaaaacttaatccgcagatccctcttgtaagactaagtttcaattatgcttcattcaagttctaaggaaaccatacattttccaatgttaaaatcacctaagtatgcacacaaatggctgatcagacaaaagcatacaaaatttaagcacggaaagaagcattgaacacaagatacccaatcaattagatatgataataattaaatctgttgttcagtagaaa

SEQ ID NO: 17817 - DNA, 427 bp, Glycine max
taacaaattgtttctatagtttgagcttgacctttttatttataaaagctttttaaaaaacttgagtttaacctttatagtaaataagccgaaccgagccgagccttacataggccgagccaaaggcccttgacaagctgctcggctcatttccacccctattagtgactatataggttcacctgtgtatctttatctattttattcgaacatgtatggttgggttatgtatttattttactcgccgactcagagtattaacgcgttgaacagttactacattttattatgcacattttaaagatcaagtgatgttttatgaaattggataggaaagtttttaatctcccaaaaatttccgctattttttataatctttcaagttaaccttatggaacactgatgactatctttttcttaagtaaat

SEQ ID NO: 17818 - DNA, 379 bp, Glycine max
agctttatcctttgacattagcttattgtgccttctgaaacacacaacaacctttattgtgaaattgtaaaactctcatacccttgattttgtaaaacacgccaagtccttctatagttgcattattgtttgagaaatctaagaaacacattattttttgcatatttttttattggtcaaaatttattaaaaataatgaaattgattaaatgtgatagttataattcagaatataagatagtgatctaattattgttggtcattatttaatctcatttttagttgagataaattagacaaacacttttagaatagataaccatgtgaatttaataatccaaggctgactaaaacggccttccagtctcacgcagttgat

SEQ ID NO: 17819 - DNA, 430 bp, Glycine max
tgtccttggtttaaacatgatttatacatgatttatgacttgtaggattcaatttgggcaaaattggatgagggcaagtgtggtttcgaaaatctgcactttatgcagaattttgctgtcaaatatgtgcagcagaattttgtatatgtgcagaaaaatgcttgtgtatggctggtggtggaaagggtagtacatatggggttctggatatttgctagcagatcccaacggtcaaaatgtagacttatgtaatagagacttccagtaaaattttcgagtcgatccaacggttaacgaattggaacgaagagaatgttattggggtatttgagtgtgaaaagctgtgatattgatttgtgttttgggcaaagttttctgcctctgctctgttttcttggctgtgttagttcatgatgcttggatgttgaat

SEQ ID NO: 17820 - DNA, 370 bp, Glycine max
agcttcagctgacattgggaagcaaaaacccatacctctcatcatagtctttcttgtgtatgccgattgaacttgcaggtctgttgtgatgtggctttgacatgtcacattgacatatcaaacttttcctaataagtaaattcaaaaatttggagccggtgttattgctaaatgttagatgcattaattttttaaatgatgaaaataccaccaaaaaaattatttgaataagtctttcaacactgtgtcatgactacaacattttaaaaaaacagaccccgagtgtatttgttcatcactctcaccgaaattaataaacattcatgcttctagtgtcttttaactggtcagataacgtcggcgacccatg

SEQ ID NO: 17821 - DNA, 425 bp, Glycine max
agttacctctaaacagggtcttctagtcacgtggataactgacaatatcaactttttgttctctgttaggcatttcaatgttgaaatatatcttgaagcctttcttcttgccttcatcacagatgggtaaccttgagtaggttctgttacgaaccatcttcatgtcaatagctctactgatatgaagaattggtggataagatgtagcttcattaaaaaatgtacatctgttcagaattctagctatcatatccaactcaatctgtgagggatttagatcaacaggattattgcatagaaatcttgtaataggcgtacggatgttaacatttttagaccactaaacctaagaagatgagttctcttgagatggatccattttgtttcttgaggatgtaacaatggagatcttctcaaatggatca

SEQ ID NO: 17822 - DNA, 376 bp, Glycine max
agcttatggggagggtaggccacaatctcaaccatgattgatggtggaaggtacccttgaaacaacacaatgtcccaaaaaccctcctggtcaacaaggtcacccactttggactggagaaggtcctttggcaaatcatgaataaaaaaatcataaacaacattgccttcaagtcataaatctaaccaaaagtttacaaactatccatttcccactaaccttgttcttgatcaatgctggattgaggatgtcccaagcgaattagaccaaatcattttgagtgatgtaatttctcttctattcattaataaaatatccagcgtattgatcctaaaaaaaaaaaaaacactctgttgatagcacaaactaccattac

SEQ ID NO: 17823 - DNA, 425 bp, Glycine max
  unsure at all n locations
ntactgaaaatggatcgtgtgtctttcttttttaattggattgatgtgttgagttggggcttgaatgaatcaaatattaaattggcactttttgctgatggctcactgatagtgccgtgttgcaggaagtcagccgtttgcttactgggcttaattgtggaaaagcacttgaagcagtttctctcccagaatctgcaacttccctctctgcggaacatggttttgacatccaggtatgattcaatccactttttactatatggttttttcttgtgttgtgttgaactttttttttaatgtacttggcttatgtagtacttgtgttgtgcttaactcttttttaatgtacttggcttaaatgtatttgagctgtgttgaacttttttttgaagaaataattgattnttactattgagaaattcttg

SEQ ID NO: 17824 - DNA, 377 bp, Glycine max
agcttccgttcctgagagaaattctcatttgagcgtttcagcctttgctttcgtgtagcttaggaaaaacgccatttcttctcctctcttccttccaaaaccatttctaacgtcccaagcactttctccatcacccacaaccaccattagccaccacaaaccgccgttgttctccgttgcaaccccacactgagagaaacccttcgaccgaagcggaatcttccaacttggctcgcggtttcggtagagaatgaaatcctagtctgacctttcgttttccttcgaggtaaccatggttctacgcttgtttcttgttagtttcaacttgtctttgtatcttttctgactttggaaccgtcattgcatgttttacgttt

SEQ ID NO: 17825 - DNA, 424 bp, Glycine max
  unsure at all n locations
ntaaccgaaacactaagaaagttgccaactaaattgcatgttagtcaacctttaccttcatctattttgcaggttacaggttgcacactttatggtggagctcatgggtcaggcttgtgtattcccactaaagaaacgtctcatgaagttaattacatgggaaaccagcctggacaaaattttaatgcaggtggattttctggatttcaacatggccaaccttaccagcaacataatcaatggagaacttaccctggtaattagttcaataaagtccagggtgggccacctaacaggccacaacaacaagggcctagcttatctgagagaacaacaaagctggaagaaactcttgctcagtttatgcaggtgtcattgactaatcataagagcacagagtcagccataaaaaatctagaggtct

SEQ ID NO: 17826 - DNA, 375 bp, Glycine max
agcttgtttaggatgctttaatggaggaaaagaaagagagaagggggtagcatgaaattgaaggaataaaagagggagagaagtggaactctgaagtgtgtctcataatactttcattcatcaaagttacaacaagtgttacacatgcttctatttatagactaggtagcttccttgagaagctttcttgagaaaacttcattgagaagcttctttgacaaaacttccttgagaagctagagcttagctacacacacccctctaataactaagctcacctccttgagaagcttccttgagaagatttctaaagaagcttgagcttagctacacacacctttctaatagctaagttcacctccctgagatgtgaag

SEQ ID NO: 17827 - DNA, 428 bp, Glycine max
  unsure at all n locations
ntgacttgagtcatcaagagattataaatatgtgaccttgacatgagtttcaataatcatcaatcatctttgaatcatctatctttcaatcttttttcaacatcatctctcaaacatctttcaatcaatctttcaatatctttctaaagaattttctgattcatttctcttcttctttctaagagtttttgttcaatacattctctttcaagaaaagttcattgttcaaaaacttgtgctattctttttcttcattctcttctccctttgccaaaagaatagaaggactaaccgccagaattgttttgtgtatcccttctctctttacaaaatattcaaaggactaaccgcctgagatatcttttgtttcccctttcaaagattcaaaggactaaccgcctaagaattctttgtgccaacacattgga

SEQ ID NO: 17828 - DNA, 542 bp, Glycine max
  unsure at all n locations
agtggtgtagtncctgatgtcatcgcacactccacggcgatatatgaactcgtgcccccgggggatcctctatgagtcgactctgcatagcactgcatagctttgttgtatgtattgtcaccacagacatactaacgagttctgtcacctgtatcttgcaaagatttcactactcaacatatgataactttgatcgctagtaatcggttactcatctgtgttaataatagaggaatgtttctccgcatatactatccgaggaccatactacactgtacccctgacgcatattatcataccttcatcataactctaactgaactcttgaaacaaataaataagatattataatgtacctttcttaatataaatgcatactaacttgtataaacatatctttcctatattttaaatgacatcattttttaaataccttctatctttcaaatggtctaattggaactgaatatcttaattacatcattttagtgacatattttactttccaaaaatattaaatattaatatctcattatctaatc

SEQ ID NO: 17829 - DNA, 432 bp, Glycine max
ttgtcttttaagataccttgattcgtcagccatttcttatttcttaattttgcactactaccattaccaattcgccacctaacaccctccttgacatccttccagctagatcatatgcccttccagaaatttgagctattcatcttttttttccaccactggaaggaatgccattatttccacacttatacttggctctcactacatcggcccatagagaattcccgtttagtgcaaattctccaaccagatatcatacaggacttattcatagcgagagaagatcttaagcccacaccaccaatctatgttggcttacatacatccttccaagctattgcatgaactgtcattgcgttctcctcctcacacacgaacgctctacatttgtcatcaatctccttacaaatgtaagctgggatttcgacgatt

SEQ ID NO: 17830 - DNA, 352 bp, Glycine max
agcttattctgcaaacattactaatacacctcctctacagcaaaaccaataattgcataataattatgacctttcaagcaatagatacaatccaggttggaggaatcatccaaatctgagatggacaagtcctccacaacaacaacagattgtgcctcttttttagaatgctgtctagacaagcatgccatatgttgctcctccactacagcagcagtcacatcaaagacaacaagcaactgaggctcctcctcaacctttcttagaagagttagtgaggcaaatgaccatacagaatatgcagtttcagcaagagacaagagtcttcattcagagtctgacgaatcacatg

SEQ ID NO: 17831 - DNA, 424 bp, Glycine max
tgaccctgttgtaagagggtaaaaagtgaaagttaatctgttgcaccaacaaagttcttcaaggaccagaaaaaaggtaccatatgattgaaatcttgctgtagcattgatcaactcatctagaacgtttagaccgtatttccaaaaccattatattaaagtgataattgatcatcccattcaacgagtaaagagaaaatctaagcttacaagtacaatggtagcgtggatagtcgaactttttgagttcggtttgaaatttgagccaagaggtgccatcaaagggtagtacttggtcgacttcatggacgagctacttcccaatgaaggctacaacgaacgttagtggacattatacattgatggaacttctaacaacaatagtactggtgttggggttactctgataggaccagatgccatc

SEQ ID NO: 17832 - DNA, 375 bp, Glycine max
agctttttctgaattggagagtgatttgatctgcagcatatgagattcttgagacaacagttagggaagttgtccatccaagttgatgttgtcattgcacgatcaagcttctcaagaattttgttgggggaacctttgctttttgtcgtgcattgcttttttaaatccagttataagataatttgggtgagggttgagaccttacttttcatcacgagagagtatgtcgttgaagtcatccatgatacaccacgggagagtgttgtcacacgaaatggttcttataaaattccaagagttcctccgacgagttctgtaaagatagccggaataactagtatagcgccagctagggcttccaatcacagagatccc

SEQ ID NO: 17833 - DNA, 433 bp, Glycine max
tgctgtgtaacttgagttaattattagaactacaatttatccatataagcagcacaaagcgaccgagagtgctcactgtgttttcccctacatagtacagaaaagagcaagttgataaactcaaagtagccaccacttatacatggaccatacatgtcacagaagacaaagaactggtacttactgtgagcaaagaacatggttgaaaaactaaacctgtcaaataaataacaaatagaagttacaaccatatccagagctaaacgaatcaaaaatgaaaaccctaccgttggttgatatgattactgtatgtatcatcaacatgggtaggctcaatatagagagcctgagaaagggaggagggagaaaaagaccagatttccttaccacaaaattgtgaccatttgttgtttgggagggcccctaatatcat

SEQ ID NO: 17834 - DNA, 370 bp, Glycine max
tttcttcaagccagggtcagattctcgtgcatgcataggcttcttcaagaaaaactccaaactccctttgcaaatctgattttaggcttaaataggtggccttgttcgtgctcatgcgcttagcacacgtatggaccgcttaacgcacgttagggatttttggctcagcgcgcttctctcgcttatcagatgagctgaagcggtgcgctcgatgacttggagcagtgcgctcagcgaacctgacagctcatcttcttctggattcttcccaatttgcctaattaacctaaaattgagagaaattgtttattaaacacacaaaacatacgtattaatgatctattacctatatttaacaaaaggacttatt

SEQ ID NO: 17835 - DNA, 423 bp, Glycine max
  unsure at all n locations
ntntggagtagagacatgggaccaactcattttattttaaaaaggaagtcgtatctagtcaaggtcttagagaccatacaagtttcctaacgatttctaattatgtgggccattaagtctatcatatgctgacaatagccgagaagcccatgaatctcttcgggggcggagtaggtgtctgccatcgccttggccttggctaacaatcggggaagttcttgactcccgttcaaggtaagagcaaaccgatccatccacatggttgcctcttggtgtaaagaggcgatcacccttcctctagcctctgtgtccgcgtatacttgggcatactcatccgcgattctatgctcgtgggccgtggctagacctaactcttcttggtacttggcgatgatagctaacattgtggtctccgtctcgcat

SEQ ID NO: 17836 - DNA, 369 bp, Glycine max
  unsure at all n locations
tatctnttgtacagagggggccgaagccagtttgtgatatatcttaattcatgttccacaatcttaaaaatccataattctccagaccatgaccatgatcatatacaagatacatattaacctccaagcacaatttatttcatactctaagtttaaccaggattcatatcctaaatcatttgattatgagacacaagactctattacctatgtcaaccgttattgattttgaaaagctcattagattactataatgctataggataagatttgatgataatataatattcttatttattataatatgttatctgatgtatatgcaaacataactattgtttcgtatcttattcctatctaatccttata

SEQ ID NO: 17837 - DNA, 380 bp, Glycine max
tgcgagcctaaacttgtagcttcaatacacggaattatgtttatggctaggaatccaaaattaggttttaggattagaaaagtatgaaaatatggacttgtttgtaaaaatttgggctgccccatgattggcactttgcacctaagtaacatgggagatgtttttcaagggtgtgcggatatatgtgttaaaatatatggcgtaaaaaatatgttgcaaagtgtgtgaatatatggtacaaaaataccttgcaaagtgaatgaatagaaaataatgcattacacaatatgtatgtttgtggatcagtagcataaagagtctttcaaaaaatgtgtacccgtgccaaatatgggacgagaatgctctccgaatgcatatat

SEQ ID NO: 17838 - DNA, 330 bp, Glycine max
ggcaatcagctcgcccgggatcttagagcgacctgcggcatgctttctttcatataaagcgaagcaattcatggagcttgtatactcacaactataatttctaaattcggaatttgcttgtgaaacctatgttgttgtccttatagtgcgatttgcagaagatccctgtctcattcaagccttataagctatacatgaagacgtatgaatctataactcagcttaatcaccgatctttctatgatttgactctttacaaagaaataacactcttttaatttaatacgttctatggtcctgctagtaaaaatcatcaactgttaacgatcc

SEQ ID NO: 17839 - DNA, 225 bp, Glycine max
cgacgagcattgaaaaagcgaacaccccagaggtgaccaccaaaaacagcggaaaagccaatatcgcgggcaacggagaacacaaaaaaaaaaggggaaagccagaagaaaagagaaagaaagacaaacaaaacaaacaaaagaagaaaaggggagagaggagcaggaagagaaaggaaaaagaggaacggaagagaagacgaaacgagaggaaaaggggaaagg

SEQ ID NO: 17840 - DNA, 357 bp, Glycine max
tagttttcatcaagtggtaatcagaacacaagagcgtctattatgtgctccttaaacctccattaattatttactataccttctcttccattgtcgtttcttcatttttctccatgtatctcctcacacgtcttgagctaaatgttgttaacatgattctttatagtttacaccgattaaactcgctatataagctatattcgatattctatggttcaaatttcttgttcttgctcttgacccatgaattgtgtcgagtttaggatcctttgagattgtcttgctattctttgtggctgaaacctaaaccatataattcctataaaaatatttaagtataataaatcctcaaaaatc

SEQ ID NO: 17841 - DNA, 426 bp, Glycine max
  unsure at all n locations
gtagttcttaaatttcttgcngaatattgattagaatatataacacaaaaatctaagtgtaaatcactttattcatgtagtcttagagtcatgtatagtcataataattgtcacattatgttctaagtttatgttcaattttgattttgttgattgaattctagatacatttgttcatgtattcttgcaattcttagcctattatttgaattttgagtctaattcatgcatgttgtttagttcataacatgttctaaatcaattcctagaagtagtcttgttgaactttattttttttgttttctaagtttcctatatgatgcccatgaagaaattgagttgtggtgctgacgtgtggctggatttgtgaataaaaataatttcttaagctctcttgaggtatattattcgagacaattgagcata

SEQ ID NO: 17842 - DNA, 377 bp, Glycine max
agcttgctttaagttgatatcaatctgaaaatgtcaggaacaggacacgatatcctaaccataatatatatgattacccattctatcttgctaacttactagtggtaaaccttggtcaccataaaaactaaaaatgcttaaccttaagacatgtgtcttatatagaaggctactataagagtaaaaatacaagtaaaccagtatttttttttttgaaacatacaagcattgttgctctgctcctcaaaagatgctagacatcactttattctgtcaaaaatgcagtgtcataaaattggtactctgtccaacccagagaaatgaatatattgaagcccttatttagagactaagtttatgttgcttgatagatgcta

SEQ ID NO: 17843 - DNA, 432 bp, Glycine max
ctaagcttctcaggaggtgagcttagttttgagaggggtgtgtgtttctaagctctagcttctcaaggaagttttctcaaagaagcttctcaagaaagcttctcaagtaagctacctagtctataaatagaagcatgtgtaacacttattgtaactttgatgaatgagagtcttgtgagacacaactcaaagatcaacttctctccctttttattccttcaatttagtgctcccccctctctttctctccctctttcttttcctccattgaagcatcctctgcaagcttcttatccaaagctcatcttgatggtgaagctccttcttccatggcttattccttaatggatggcgcctcctctcacctcttttcctttgtcttccgctgcatctccatggtggaaaatcaccattaaaggacctcattgaagc

SEQ ID NO: 17844 - DNA, 369 bp, Glycine max
tgcttgtgtctacaccgctttgcactggataactttttctttaattattttttttatatagaagtgtttaactggaattagaatatttgatgtataatgtttggattttctttgtataagtattgagaactctgtttggttatgattatcaggcaagcaaaggatgttgttaaaggtataaagaagcggattggaagtaaaaattcaaaagttcaacttcttgcactaactgtaagcaagagtgttgtaatacaaccttttttctcttaaactctgttgatggcattgatctaaattctttttgtatctaagcatgtttgcttcaattgcaccattttgaccttctaaactttacattcttgactgatt

SEQ ID NO: 17845 - DNA, 424 bp, Glycine max
ttaagctagcttcaaaatgacactaataatatatttaaaaaagataataaaaaaattgaataaatattttaaggatataaaaaataaaatataaaaagctataaaaattagaagttgacgttttaaaagacattactttatgtagattttaaaaaacattagaaactactaaaaaacgttaaaaactacttaaaaatatttgtttatgaacaatcaaataaatttttgggttagtaaagaaaagtagaaactagttatacacataaacaaattaaagaattcaatttgaattgtaagcatagaaatttacataagtgaaggctcacctccaaaagcagtgctatagcatgcaacggcacaagtctgaattatggtattctcctgtctagtgaaaggttctgacacaacattagctttctcaaga

SEQ ID NO: 17846 - DNA, 374 bp, Glycine max
agcttgagtcctttaagcttagaaactatatgagacatttccatgatgtactctctaatttttttcccgttatactttatggaaatcaagtggtgtagcaatgtacttgtttttgccttatcgcttttttcaaagcatttctctagtttatcaaggaaatccttagcattggtgatcccttcggtcattgcaccccttaaggattttggaatgccacactacaatcttggtttttatattttgttgaacaaatggtctcagttatcttaagaagggggggttgaattaagataacaagaattattccccaattaaaatttcactctctctttttggattaacaatgcaccttcaacatgaattactcataagac

SEQ ID NO: 17847 - DNA, 413 bp, Glycine max
tgtagacaataggtaaggaaaactctaccttatggtctattgcttaatctgattggaagggttgtttatgcttcaaagcatgtttgatttttgtgggttggtggaatttggtgttgggtttcctttagagtccttgccccttgtatgcttttgatttgggaattcttgatgaaatcttgtatatgtttaattgatggttgatttatgtttttttggacttgtgttgagtattgggatggttttgaatcatttgtgagtgtttggagaggtagagagtaatgaagatacgtttgggtttgcgagaaccttgaaattgcgagttatacagtttgtagactcattgggtgagacaagcttgtcgtgtattagtgaattttttagagcattactcactaggtgagcctaaccttgtt

SEQ ID NO: 17848 - DNA, 310 bp, Glycine max
agcttatctgttttcccatatcctattgtaggattctggtcaatcttacccccagcttgttgtttttttgtcttttgaacatttgcttggacttgccttatcttagaaggtgtgctgtctatacaagtttggtcattcttttgatatctgcccaccccatcattatcttgggaatagcgatcttatttgtctttcttagaaccctagttgtctttataactctggccaggggctatattatttcttatcttattatgcttgtgggtatcactaccttggttctccttaggacccatgatgcgattagaac

SEQ ID NO: 17849 - DNA, 434 bp, Glycine max
tgattgcttataattctcctgaaattaaattaaaatttcatatttagtccagtaggcccaaatgataaaactgcataattaatttgacaattaaggctaatcagtaattaaaatgctgacaaaaagggttaagatataggataaaatgatgacacatcaaatcccctcacacttagccttttgcactcctgtgcaaaattaaataataaaaaaacaaagcaaggaacaattccagagacattaaagagaaacaaacagacgctaaaacaattacatatttctcaatgaatctcaaggaatgaaaagaatgggtaacatccaacacataaagagttaaagaatcaaggccgtcatgaaaatcattcaagcatttcaaacatggcaagatagtcaatcaactcatcattgaaaagtgataatagcctcacaagata

SEQ ID NO: 17850 - DNA, 370 bp, Glycine max
agcttgctctaaatttacattgatgtttgtatttatgggaggaggttatatgccatttttgctttaagagtaacgtcccactggtaaaactaactttccaaatgtttgccttcgcaggaatggccccgaggaagcttgcctcaaagaggtccaggaaggacaaggcggccgaaggaactagttccgccccggagtacgacagtcaccgctttaggagcgttgtacaccagcagcgcttcgaagccatcaagggatggtcgtttctccgggagcgacgcgtccagcttatggacgacgagtatactgatttccaggaggaaatatggcgccggcggtgggcaccactggttactcccatggccaagttgat

SEQ ID NO: 17851 - DNA, 415 bp, Glycine max
cactgacgaagggcgcacaagacgacgtttgtcactgcatgctatcatgcttatcgtcttacagacagctaaaaacaatgtttatacggataaccactcaggttatttcgcccgtcagcagtgactaacatgtcaatatgacaaaacttgtgagcgcggaagatgacgcaaatctccgcgtgtcacacggcttgtcggccgcgattgacgaaggacgtacaagacgtcgttagtctctgcgtgctatcaggctttacgtcttactgacaccaaaaaagaatgtttatacggataaccactcgggtatttccgcccgttaacgtgactcatatgtcactatgacagatcttgtgagcgcggaaaatgacgtacatctatgcgtgtcaacgggcttgtcggccgcagattgacgaat

SEQ ID NO: 17852 - DNA, 381 bp, Glycine max
  unsure at all n locations
agcttgcttgtggggcttctatggaagttggatcttttgagcttcaatgaggtcctttaatggtgattttccaccatggagatgcagcggaagacaaaggagaagaggtaagaggcggtgccatccactagggaataagccatggaagaaggagcttcaccaccaagatgagccttggataagaagcttggagaggatgcttcaatggaggaaaagaaagagggagagaaagaaagaggggggcgcacgaaattgaaggaataaaagagggagagaagtggaactttgaagtatgtctcacaagactctcattcatcaaagttacaactagtgttacacatgcttctatttatagactangtagcttccttgagaagcttt

SEQ ID NO: 17853 - DNA, 383 bp, Glycine max
tccttgagaatctagagtgaggctactgacattcctgcattagctaagctcacctcgatgccaaaatacatgaaaatacaatgggaaacttccttgagaagcaaggaaggtagcttccttgggaaaaaaaggaagaaagcttctttgagaagctagaggggggcgactgattgaggccgtacccgaatcaaataaacattaaaaatgcagtatctaagaagtgatcctaggtcgtctcccaatgagcaatggtcaagcaacgtttataatagatagtgataaaacagtaacgaatgggggggggtgtttgttcttgtaattcacacatcatgcatattctagtagaacatttctgaatcctaacatgttgttgccccttgatt

SEQ ID NO: 17854 - DNA, 381 bp, Glycine max
agcttgtatactgaaggaatatacaataaagaaggcatatagagatcttcatgcacttgcctttgttctgattccaagctggtatgccaatgctgaggacataaagcgactctgcaatatttgaagcccatcttccacccatctttacaacaattttagtgctccaattctattcttatgtatgttataaattagacaatgattccaccaacaaactagtttcggtatatataaaagcttaacttctattacaagaatctatttagaatacaatattccatcttttctctcatttggatataaatttaactataagaaatatgttcccggtattagtggtttgcttagcttcactttgcaaccttcatctagttagtaatg

SEQ ID NO: 17855 - DNA, 435 bp, Glycine max
tgcttaattcttttcaaaaaggagttcaagctttatattcactttcacaaacaagtttgaaaacaagtaacttgaaaaacaagacaacttgtatgtttgcaaaccaaattttctctttccaaatatgataccaacttctcttattagaatgagaatgggcagaaccaagggttgtgtttatgcagcaaatagaaacacccttgaataagtttttggcaaacaagtcttgaaaaccaattaagttttagtttctcaaggagaatgatctcaccaaaaagttttcaaaaccttttctttttggaccaaaaacaagctatatgaatatgcactttcaaacataagttaaaaataccatattcaaatacaagctaataaaaaaaatataacaatgagagaagcatcacatttatcaaaaaatgaactatattctgagca

SEQ ID NO: 17856 - DNA, 382 bp, Glycine max
agcttctatatagtgagatgttgtggaagggaggtgcttgatactattatacatgagatattagatgtcaatatatatataaaaaatcaatctccttaatttataatgttttttgtaaaatctcaatttaaataaacaataacggttggattaaaattaatagttaggataaattttaacaaaagtcactgtattaattgtacagttttactttccatattttttaggttacattaaagcatccgggagttacaagctctactcatatataaaattgaattgatcttgcaaaggagaaatagtggtatccgtaactgtgataataattacaatttaaattttaattcaattaagcacaaaaatagttacaggatggtcgtag

SEQ ID NO: 17857 - DNA, 411 bp, Glycine max
cttgatgtgcagaagaaattccgagacggattggttattatagttgtagatcgcaactttgtgcaaagttgatgagcttttgctctaattaacttctgaaaatgatcgtgaattttctcccacacttgaaacacatgaatggaccctagtacacacgataaaattgagctacaaagagatgattgaagccacgtgaggagcatttaatcttgtatctcccatgcaatgtacgcaggattcatggtgcttgaatcctgatcagcttcatttgcatatctgagaggaatgtttggatacactagatatctgtgtaattgatgcgctttgatcactggtacgtgttgcctccacagcaagaagtttgaatcagagagcttcttagtgattgagtgcacgaaagcaaaagatgaa

SEQ ID NO: 17858 - DNA, 371 bp, Glycine max
  unsure at all n locations
ttgcttattaaatataaaaaattaatttaatggttataaaaaatacttctagataaatctttattccaacctaacaaaataacttacaaaaaatgtgtgatactacataaatttcgaaaatcacctaacaaaataacttacataaaatatgtgatcttccaaaaccatctaacaaaataacttacaaaaaaaattgatatcccagaaattatcaaacccacgaaagcaaaaacgaaagctactgcaacagccaaaacaactgataaaaaatggtgaatgagggctgtatttaaagaccctaaaacgccaacaccatttgcgcttcctccctgctcctggtctgccaaagctgttgtgctngctgcaaacct

SEQ ID NO: 17859 - DNA, 418 bp, Glycine max
tggcggtcatctccaaagtttgagtggtcatgttattataggttcatggtgaggtggtatacagcctcttcaaggcggtttagggtggctatagtgagtgggtatggtggaaggtaagggttctggtaggtagaggcagccatgggcggcaggtcgaaccaattgttatgagcagaggggagggagaaaactacacttcttggtttcgaggaccaaggcctcctttgaaagcaaagtatcgaaaattcttctctgccttattcattctttcacattgcttttatacacaattgtacatgtacaactgaatgataattgttacaactgaatggtaactatattaacagaataataactgctctaagtatgtgatactattcttatgatagacttccatggcagagctttgtcataacta

SEQ ID NO: 17860 - DNA, 373 bp, Glycine max
ttcttctagttttagcacaaaaaaaaaaaggaaataaaaataggaatttgttgatgaagtgggcaaaggaaactcatttatttgttgcagagagagaaagaaaaggtttttgcaacccttttaatcatatttgattcatttttgacatttaagcttctggtgtttttcttctgataaacatcaacttgtaaggccaagttaaatgatttaaataataaaatcgatgataatatgtatagagacactgaatggataaactgctatacattagaattactatgcagtgtttctgtgacaaattgctagaagcatatcatttattaattgagtaaccaagcatatgtactataatatatattaaacttgtgttttt

SEQ ID NO: 17861 - DNA, 433 bp, Glycine max
cagcttgccaccataggaagccatggataagagcttgatggtatgagaagatgaattgagggagaggggaagaaggagcacgaaattttgtgcctcaaaagaggtttgaactttgaattttaattttcaaatgattaaagttcaaaaaaaggtacacacatgacctctatttatagcctaagtgtcacacaaaattcgagggatatttgaattttacttggatttgaaattaaatttgttgagccaaattttggaaccaaaatttcactaattatgattagtgaattttagttatggttcagtccactaatccaagatcaagtccaagattttccactaagtgtgcttaggtgtcatgaggcatgtaaagcatgaaggacatgcacatagtgtgactatatgatgtggcaatggggtgtagcaagcaaatgtt

SEQ ID NO: 17862 - DNA, 376 bp, Glycine max
ttcttctcaaggaagttttctcaagaaagcttctcaaggaagctacctagtctataaatagaagcatgtgtaacacttgttgtaactttgatgaatgaaagttttatgagatacacttcaaagttccacttctttccctcttttattccttcaatttcgtgctccccccttctctctttcttttcctccattaaagcatcctcttcaagcttcttatccaaggcaattcttggtggtgaagctccttcttccttggcttattccctagtggatggtgcctcccctatcctcttctcctttgccttccgctgcatctccatgatgaaaaatcaccattgaaggacctcattgaagatcatagatccatcctccatag

SEQ ID NO: 17863 - DNA, 426 bp, Glycine max
tcagctatagtatgcccgagtcattcatccctatgagatgttgttgaagtattggcgatcagaatagccattccttggattataaggttgaaccaagctcatgcttttacaaaaaggttcatcaagtcaagttgaaatatggaagtaaccgtcttgcaaaattggggcaaaagattaatcgagtcacatcactgcttcatctactgccaaacatatttaggattattgatgtccttgttacttccaatttcaccttgacaaagatgtcatggaccatgttgaaaatctaaattgattcaaccccatatcttgcgtaaaaattcgcaatacttcaattgtacatcattcgcatgcatccatgcatttcattggttgcattgctcgttgcattctttccttgaaaaataaaattaaaatgaacttaat

SEQ ID NO: 17864 - DNA, 381 bp, Glycine max
agctttgatggtgttgagaagaaatcacatgtttgtcatcatcaaaaagggggagaatgtgaatgtatgtatacatgattttgatgatgtcaaaagaagaatcaaacaaggctcattttgcttaaagattaatacaagattgtttcaacaaacaaagccttgattcaagatttcttcaagatcaagccttgcctcacaatgaaaggtttcaagtcattcaaggcacatgtaatcgaataccaatacatgtaatcgattaccaatggtttgaaagtgtgtaatcgattaccagagactctaaacgttgggaattcaaattttaaatgaagggtcacaactgttcaagaaaaacaattgtgtaatcgattacactaattatgg

SEQ ID NO: 17865 - DNA, 426 bp, Glycine max
  unsure at all n locations
tgtcgtgccatcaccatttctgcctaaacccattccgggttatactcatcccttaacataactcaggccacttttaaggaggcaccacatcaacgtggctgcaccagaagagcctccatataagaatttttcacaatttctagtgcttgaaaagatgtttccaatgactcttccgcagcttccacatagggtataaaagatggacatctcactagtatatcttcttcgctcaatacgataatcagctgaccctccaccacaaacttcaatttctggtgcaacattgatgggaccacaccaacagaatggatccaaggccgacctaacaagaaactgtaagcggtgtttatgtccatcactnggaaagttatttggcacatgtatggcccaatttgaatcgggagatcaatctctcctctcacgtca

SEQ ID NO: 17866 - DNA, 379 bp, Glycine max
agcttgtgagttgtcaccccactttttccctattcgatgaagtcttcattcttgtgggtttttctttaacattatttcattgtgtcatttgtttgtttaataaggatacacatagacaaaaccaaaattaattatcacaatccatccttagatcatgattgacgcataaactatgattcacttagcttgactagcttgttagaccctcattatcaacatatatgaatactttatctaagaatcaaacagttcatacataataatcttcataattttttaaaacattgtagttatataattagcattagcacatttacatggtaaaatcaccaacaactaaaaatacatagatcgtctctatctttatctttattcatat

SEQ ID NO: 17867 - DNA, 414 bp, Glycine max
tctagatctatttcattccagtgtgaattcaccgatggtcttacatgcctatcaatttttatttggttagtcttcgaaccacatcatactttgagagaggtatgctctgatacccacaaacctactcacacataatgtctggttgcttttaggattgttggttgttcccataaattaatataagactttttggtatgttttgtccacacttactaaaaaaacttctcagaaggtcacccatcccataattactttaagctaaccatgtttgactatagagttcttaagtgatggattaccgaaaaatatattcatctcgttagtataggtaatactaattaatttctaagttatcctcaattgtgcagtttcatacttacaccatctttagatctctcttattctgaggtgcat

SEQ ID NO: 17868 - DNA, 200 bp, Glycine max
aagtgcgcccaggaaactcatttatcttgttgccagagagaaagataaggcttttgccgcccttttcatcatatatgattcatttttgacatttaagcttctggagattttcttctgagaaccttcaacttgtaaggctcagtgaaatgatttaaataatagaatccctgatattatgtttatagacactgaatggataa

SEQ ID NO: 17869 - DNA, 338 bp, Glycine max
  unsure at all n locations
naatgaacaaggaanaacacttgacttgtttatatgttaaatcctatncttgagaaagctccttgagggtggaggatatcatgcactaattgaaaattttctccagaataggatgattgatggctgtaagttttatgagagaaagacattacaatgactctattgttacaagggatgctcatcaaaaggggaaagaataggaaatgatctctgcatcccaaagtatgtttctaacacccgatttcgcacctacactcttcttttttaacagaacatattacatcacccatgtttgaaatatatttgcttaacaaatacgtcatagagacataaattat

SEQ ID NO: 17870 - DNA, 375 bp, Glycine max
tagctttatgcatatggaatcaaaatataacaaatgacatgtatctcatgtcaaaaaattttttacacttcttcttaagaatttcctattgacaatttaaggtaatattatccattacgaaattctccattgagtcagttcaatggtcacattcatatgcacataatttatatatgtaaattaataaatgagatctattaatgttcattcaatgaatactatcacatatgtcaatctatccaaattattaatgtcatattcataataatcttaggatcaagaacaattaaaattaaaattatgagagacttttttctcattttcataatctctattatgataacaaatctttaattttaatcaaggaccttatca

SEQ ID NO: 17871 - DNA, 414 bp, Glycine max
  unsure at all n locations
aatgaggctaaagattctgggctcatgacaatanaatccggtggagaacaatccatctgggccttatttgtcacaagatagtgacatggagtggatggtaaatatttgtcacaacaaaggagctttatctcaacctaatttgttgcagcactctatatttatatattacaattattcatgtttggcatttgcatgtaggtccctgcaactattgttccaccaatagcaaggaataagctaaccataacaagagccaaacaaaggaaggttgctgataaagatgatgcagtataaagaaaattgaagaccaattttttgttgcattatgaaagttgctgagttagaaggttgctgatgaagacaaccgaagaagcatttttttgttgcattatgatattaagatatgcagttgta

SEQ ID NO: 17872 - DNA, 333 bp, Glycine max
agcttgatgattattcagtggagatacgactgggctatggagatggatctttgaccgacacaaacatgatgaccatggtcatgcaggcaagctctaaaaccacctcaataacaactagagccaactagaaccaattctaaggaacaactatctataaagacaagtcttgactatcgattaacgttaatatgtacgagatgatatcttaggatctaaagctacacaactctcatctcgattgaggaacccagacttattgatgatgctatggctgatgagaaataagcatgatccgtgcttgacgaactatgacaactcatgaagaatgatgta

SEQ ID NO: 17873 - DNA, 429 bp, Glycine max
tcatgatatgccttatggcgttcaatattctgcgcgttatttatgaccatatatgtgtaatatacatcgcagtgcaaataatcaatgaatatttgagtagctgatgcatatcataatggtcactgcccatctaataccttctctgcttattaattaccataaagtatacctcttgcataagaactcctgaactcagaccatatgtgataaccttgtgctactttgatactgaatcatcatcgtatgatgtataccctacataagactctatagactgtcttgaacattcatcttgactatctttaccacctcagccttgaatgaagctatgactaacatgtgatcctttagcatcatcatatcattccgcttgatccttagactactgccccaatccctcaatcctagcgactatacacatacctattg

SEQ ID NO: 17874 - DNA, 375 bp, Glycine max
agcttcaccttttggtcctcctcatagttgttgcatgagaaaacatgctctattttcatctcccactccatgtaggcctccggatcattctttcctttaaagggaggaatgttgagtttaataccatcaattcgattttgtctaggaacaccatcattccctcttctcctcctttcttcttcattatgatctctattcttcatttgatccaacctctcatagagcgcatcatcttgttgtttcattaacctctccaaatattgcatcaaagcttgcatttggaattgcgaaagccccactccatcattaggattagtacctgacatctcaaacaaacaaatcaaacgtaacaagacaattatagttgttgtctga

SEQ ID NO: 17875 - DNA, 433 bp, Glycine max
tcctcggggccatttcctgcgaaggcaaaaatttggaaagttagttttaccagtgggacactactcttaaaacaaaaatggcatacaacctcctcccataaatacaaacatcaatgtaaatttagagcaagcttatgcgcatatttccttacgaacgttcacttgcacaagacatcctatcaactaagaaaaatgcacccatatacaatcaaggtagcttcattacctagattatttacatgtacttcctaggtgtatttgttatttacatcacacacgcctccttggctgaatttacatacatacatactcaaagcattttggggtaccaaaaattgcacatgcgcccatcttggtatttctaatacccatacatatacaaacttcacgatgaatcttgactacctacacaataaggtgctacatttcatgc

SEQ ID NO: 17876 - DNA, 379 bp, Glycine max
agcttgctcataaccgtttgacatcttctttcatacctttccaaaataaattggaagtcaacctccgatatgtcctataaaaacccgaatgaccagcctgaggagtagaatgaaattcctctagtaacttctgaatccaaggagatttctcatgcaccaccaacctccctttataaagcagcactccctgattataggagaaaccggtatgggcctctttatcctgtcgcaaatcacaaataacctttttccagtgggtatcttgctgcacctcatgagtcaactgctgccaatctaaccactcaagataagagatcatattagtcaattcggcgtcctccaaactccttgacagggcatcagctcctttattctcgtt

SEQ ID NO: 17877 - DNA, 433 bp, Glycine max
  unsure at all n locations
tgccattnttaaaatatcacaattgcaaattgatgataccttgttgataatagccttagaagttgattatcacaagtcaaattgaaaagttgcaccattacaatgccatactatttaaccacaaaagaggatttaatagaaagtcacactaactgtaacttacaccacgcctacttaagacactaagtataaacattgcatgaaatatacatgcattcagtgtaaaactaaaacctcgtggttgaatgatcttgctacattaaaacatcagttgatttttttatcatacaatagtgatgttttaattcaatgggcaacaataaactcttacactatcaatacaatattgcacatagtaattaacaaacacatgtagtcttaaactaaaaccaagtaaataaaccatatctaaagaactcatgttgcaagctaa

SEQ ID NO: 17878 - DNA, 380 bp, Glycine max
agcttttcttttagcaaagcaaaggcttgctcttgtttttcaccccaggtaaatgccacattcttcttcactagctcattgagaggtgatgcaattgtagagaaattaggaacgaaccttctatagaagcttgccaacccatggaagctcctaatatctctcacactttttagggtgggccattcttggatggccttgattttctcagggtccacttggaccccatttctaccaactacaaaccctaagaaaaatatattatctacacaaaaagtacacttctctatatttgcatatagggtatttttcctaaggactgaaagaacttgcctgagatgtcctaagtgatcatctaggctcctactatacactaaaatatc

SEQ ID NO: 17879 - DNA, 432 bp, Glycine max
gtgagaatttcccaaactctcttttcatttctgatttaaggcttaaataggtggccttgttggtgcctgcccgcttagcgcaaatatgggccgcttagcgtacataagtgaatttcggcttagcgctcgtattctcgcttagcagatgcatgcaagcagtgtgtttagcgggatgagccctcacttagcacgtgtgtccagctcatccttcttccatattcttcctcgcgctcagccgcaagaggggtgtgctcagcggatggctcgctaagccgacagattggcttagcgagaagctaaaaattagcacttcacaaacttgcctaattatcctgaaattgaaaggaaatgattattaaatacacaaaataggagtattaagtacttattacctatatttaacaaagagtaattacaacactacaaaatgac

SEQ ID NO: 17880 - DNA, 383 bp, Glycine max
agcttatgctgcaaatatttacaatagacctcctcaacctcagcagcaaaatcaaccacagcagaacaattatgacctttccagcaacagatacaaccctggatggaggaatcaccctaacctcagatggtctagccctcagcaacaacagcagcctgctccttccttccaaaatgctgctggcccaagcagaccatacattcctccaccaatccaacaacagcaacaaccccagaaacagccaacagttgaggcccctccacaaccttccctcgaagaacttgtgaggcaaatgactatgcagaacatgcagtttcagcaagagaccagagcctccattcagagcttaaccaatcagatgggacaattggctacccaattga

SEQ ID NO: 17881 - DNA, 428 bp, Glycine max
ttgacttgagtcatcaagagattatagagatgtgaccgtggcatgagtttcaatgaatgatctctcatgtatcatctatctttcaatctatctttcaatatctgctttcatctctttcaacagatctttctaaattatttctcttcatgtttctaagagtgtttgtcaacactttctcttccaagaaaagtttttggttcaaaaacttgtgctattcatctttttcattcacttatccctttgccaaaagaaccaaggactaatcgcctgaattcttttgtgtctctcttctcccttacaaaagattcaaaggactaaccgcctaagaattctttggattcttccctttcccttaagacaaagatgaccaatgactaaccgcctgagatatcttttggttccccttacaaagattcaaaggactaact

SEQ ID NO: 17882 - DNA, 375 bp, Glycine max
tgtttaagttctctaaatacatgttcattggacatagaagacaggggacttttgtatacttttgcagacaaatggcataaggaaactagtagcttccatatgctcataagagagatcagcataaccctcaatgatgtggcatcagtattacatctacccattataggtgttttccatacctatgatgcaatagatgtagaccagattgtggagttgctagttgagttgcttggagtgactacacaaaaagaagtagatgagatacaacaatgtaaaggggcatgtgttcgccttgcctggctacaagacatttaccgtacgatatgtctcacaaggcaatggacactaccaactaaagcatatttgttgcatatt

SEQ ID NO: 17883 - DNA, 429 bp, Glycine max
  unsure at all n locations
ntgaatgctctattcaatggagtggacaagaatatcttcagactgatcaacacatgtacagtggccaaggatgcttgggagatcctaaaaatcactcatgaaggaacctccaaagtgaagatgtccagattgcaactattggccacaaaattcgaaaatctgaagatgaaggaggaagaatgcattcatgacttccacatgaacattcttgaaattgccaatgcttgcactgccttgggagagaagatgacagatgaaaagctggtgagaaagatcctcagatccttgcctaagagatttgacatgaaagtcactgcaatagaggaggcccaagacatttgcaacatgagagtggatgaactcattggttcccttcaaacctttgagctatgactctcggatagggctganaagaagagcatgaatctg

SEQ ID NO: 17884 - DNA, 376 bp, Glycine max
ttgtctttcaagtttttaagttcttcctcagaactgtcctaagcaaagttcccaaagtcctattaacaacttccgtttgcccatctgtttgtgggtgacaagtggttgaaaataacaatttagtgcccaacttgctccacaaagtcctccaaaaatggcttatgaacttatagtccctatcactaacaatgctccttggcaaaacatggagtctcacaatctccttgaaaaacaaatcagccacatgggaagcatcattaacttttttacatggaataaaatgagccattttatgaaacctatcaacaaccacaaaaatggaatctctaccattgcttgtttttggcagccccataacaaaatccatggattaatc

SEQ ID NO: 17885 - DNA, 428 bp, Glycine max
tgcattaatagcaacaaatacagagtaattggtgattatgaaaaactgatcagaattcaatagtaataacaaaacctcaaagagagttatgcttgatcctcaagagaaaacaacgttggagacttagccttccattaatcagttgaaaacaaaattgtagattgaagtagaaatgaaattgcagaaattgaaattttattctacgtgaacagtgtgcatgaacaataaaaactggaattctaaaattctagaattattctcctcttcgacaaactctctctaaaactaaaaccttggtgctgttatataggtcctcagccccaaagcttacaaatctgttttaagtccaagcccataaataaaataaaatctggacaagataagataagattggatgaaataaaatctagatgaaataaaatctggat

SEQ ID NO: 17886 - DNA, 371 bp, Glycine max
agctttatcctttgacattagcttattgtgcgttctgaaacacacaacaacctttattgtgaaattgtaaaactctcatccccttgattttgtaaaacacgccaagtccttctatagttgcattattgtttgagaaatctatgaaacacattattttttgcatatttttttattggtcaaaatttattaaaaataatgaaattgattaaatgtgatagttataattcaaaatataagatagttatttaatttttgttggtcattatttaatctcatttttagttgagataaattagacaaacacttttagaatagataaccaggtgaatttaataatccaaggctgactaaaacggccttccagtctcacg

SEQ ID NO: 17887 - DNA, 423 bp, Glycine max
tgtccttggtttatacatgatttatacatgatttatgacttgtaggattcaatttgggcaaaattggatgagggcaagtgtggtttcgaaaatctgcactttatgcagaattttgctgtcaaatatgtgcagcagaattttgtatatgtgcagaaaaatgcttgtgtatggctggtggtggaaagggtagtacatatggggttctggatatttgctagcagatcccaacggtcaaaatgtagacttatgtaatagagacttccagtaaaattttcgagtcgatccaacggttaacgaattgtaacgaagagaatgttatcggggtattagagtgtgaaaagctgtgatattgatttgtgttttgagcaaagtcttctgcctctgctctgtaatcttggctgtgctagtgcatgatgcttgtat

SEQ ID NO: 17888 - DNA, 379 bp, Glycine max
tttcttctttatgaagcctcttaatgaagcttctagagaaagctacatggagctgcctcggttaaaacgatgtccagcgttttgtagccgttggatcttcgcaaaatttggtttgcaactccacaagacacttttccattatctgaccgttgggatctttgagaagatgtctggagtgtgctataagtatcttaaagaagcttctggaggaagcctcttaatgaaagcttctagagaaaactacatgaagctgcctcggtagaaacgcttcccagccttcgttaaccgttggctcttctcgaaatttggtttgcaacttcacaagacactttaccatgatttagccgttgggatctttgagaaaatatctggagtgtgc

SEQ ID NO: 17889 - DNA, 415 bp, Glycine max
tcctcggagccatttcctacgagaacaaacatttagttgttagttttacaagataatgcttgtcttaacgcaaaaaaatgtcatgctaatccctccggtttagaacgaactcatgcgcacgtttaaagtaacacatttatgcacatgtgtatgtgtagaatatcctactattcatatcaacatagaggccatccaacacattctaattgtcatacatatatatgcatttgaaaagaacacacattctcacgattaaggcattgcgtcaaaatttacacttaactatgtcctagacatttgctatcacaaactaccaacacacactcgaaatatatataccatacaaactttcattgtttcactcacacttatgcatattggcaagatatttacattatgcacatacttgcattca

SEQ ID NO: 17890 - DNA, 378 bp, Glycine max
tagctttggacaaacaaaacatgcaaactagaaaatgaaatcaaaaactaaaaactgaaacataaatataaacctaaattataaaatgtactaaaagtagaataataataaaagtgttcaaaagaaaggaaaatagaagtcctgtcatgggtcctgtggtgcagaaggggcaaaatccatggctgtgacatcatcctcatcctcaaagagctccagcacaggcgtgcctactagtgatgcctatggggaagacaactccagcacaggtgtggtcactggtgatggctgtggagttgtctctggagtagcctctgcagcgtcctcctgagtagttgggtcaggctctgggatctctacgtcaacctctggatcaacatt

SEQ ID NO: 17891 - DNA, 417 bp, Glycine max
gtgagcaaattcaaacgacaataacttttaactcggatgtccgaataagtcccgtaatatatcgagacgctcgtaattgaaaactgaagctctgagcaaattcaaacgacattaacatttgactcggatgtccgattgcgtcccgtaggatatcgagacgctccaaattcaaaacggaagctttgagaaaaatctaacgataataacttttaactcggatgtctgatcgagccctgtaatatatcaagatgctcgaaattgaaaacggaggctctaagaaaagtcaaacgacaataacttttgacttggatgtccgattgtgtcccgtaggatatcgagatgctcgtaattgaaaacggaagctcggagaataatcaaacgacaataactcgaaattctgataccaggggacagatg

SEQ ID NO: 17892 - DNA, 398 bp, Glycine max
atagctctagaggcgagctgccggctttctctcttgaaattgaacaacaaaagctgtcgagatattcaaaatggtcataacttttaactcggaggtccgattcaggcgcatcacatatatatacgctcgagattgaacaacataatctctcgacatatacatatagtggtaacttttaactcggaggtcctatttatgcacatcatatgtcgagacactcgaaatcgaacaatggaatctcttgagctattcaaatggtcttaacttttgactcagaggtccgatgcaagcgtgtaatatatcgagacgctcggaattgcgcaaccgaagctactgtgaattgaaaatggccgttacttttcacttggaggtccgatatacgcgcatacatatttaga

SEQ ID NO: 17893 - DNA, 422 bp, Glycine max
tctagtcgtccatagacctcctctgtggtactgtctatcaaacgtcgcatctgtgcattcatcgcatccactaacagacgttgagcgccgtccaactgatggtactcgtcaccaccaccacctgctccagccataattcaacaggaaaaaaaatgtgcaataaaaattattaaggtttcaggacctcacaacactctactcacgtctcttagatggtagtacactcgtgtttaatgctctcaataggcttttgtgtaatgtattccctcttgccttttaccactcgtgtttcctcttaagttcctggatggaccaaattagacacacaaggtaatataaaataaaaggaaagacaatataatgatcacaaacagatttgatttgggataacaacttggacttgatttggatagtaatatatt

SEQ ID NO: 17894 - DNA, 377 bp, Glycine max
  unsure at all n locations
agtttgttatgcaaaatggttgactatcttacctttccagacctttggtcaggaacttgaaactaaagatgaccaggagcaggttcattaacagtgatagttatgaaaagctggaatgcacaagcattaactaacattagtgaaatggtcataggaatataaaactcatttgtagacaaaaagacattaaagaagaaaacatgaggaaacacccttcaacctcagcctacacataaccatgtccatgacagtcccattttcaatctttaaccatgtccatgagaaaactgcatagttttcaacaatgtacacttcatctaaaatattcattggactatcttcagagagtatgtttcttanatgaaaaagtcatgata

SEQ ID NO: 17895 - DNA, 428 bp, Glycine max
tcaacgactttaacacgtacctgctagttgtatttttctgtagtgtttgaatacaggttttaatacatggtttacacatatacatgtatatataaaaagtagtaacaatgtgctttacctgtacttgatataatgaaacaactaccacaagaacaccaatggacaaaccaacttcaactacaacaaagtaattcagcttcacctggagttcatataatgattaatggcattagaagaagtcaaagccaaaccaacttcaagtacaacaaactaattcaactttttatcaaccaaactatgtcaaactactttttggctattaaaagtgttagttattcatgtgacaggtatactattctagtttctattcatcattaagattcacacagcacatatagtgttctcatagcaataccacacacagacag

SEQ ID NO: 17896 - DNA, 378 bp, Glycine max
agtcacacaagttacccaggactacgtaggtctgaattcctcatttgaggatacataggagcaagagcctcgcttttgtcggccgccccacaatttctgtcatactgacactggagtcacgtgacatgcggagatacccaagtggttgtccgcactttcataaacattcttttgctatctgtaggacagaaagcctgatagcatgcagagactaacatcgtcttctgcacccttcgtcaatcgcggcccaacaagcccgttgacatgcggagatttacgtcatcttccgcgctcacaagatctgtcatactgacatttgagtcacgctgacggacggaaatacccgagtggttatccgtctaaacattcttttgctat

SEQ ID NO: 17897 - DNA, 432 bp, Glycine max
tgtcactggagctgacccatcaattgccctaactctttcagactggtgattcctaggctcttaaccttgacttgatagaacctctttttaagagaaggtgcctgactcgatcccatgttttactaaagtgaaacaaaacccagtgcgaatcaaaactccgacatctatcatgggtgggatggatgaatgcattaagaaatgcatatgacacagatgcaatttatgaatacgggagcccgggaaattgtcgccttcttagatacaacatttgggcagcatggcgctcgacatatgtatttaagaaggcgacacggaccctccgtcggtttgacaaagtgaggggttcaagacagaatccgtgcatgatgcatatgcgaaaggcacaacacgaggatgtacatagtacgacaatatccacaaaaaaatataagc

SEQ ID NO: 17898 - DNA, 378 bp, Glycine max
agcttgcctatccgatgcagccgtaatgatggcccgagttatgttggggaacggttacgaacccgggatgggtttaggcaaagacaacggcggcataactagcctgataaacgccaaaggaaatcgtgggatgtatgggttaggctataagcccactcaggcagatataaagagaagcatcgcgggaaggaagagcggtagtcaaaactcgcggttgagacaagaaggtgaaggaagcccaccctgccacataagtaggagctttataagcgcgggtctgggggacgaaggtcaagtggtcgcgatatacgaagatggtgttctgagtacattggatttggtatgaccatgccctcctgatttccagctgggaaattg

SEQ ID NO: 17899 - DNA, 430 bp, Glycine max
  unsure at all n locations
nttcgcanagcttacggtaaaatctgggacctagccatggtagaaatctccacagaggccattgcctccctcgcccagtattatgatcagccgttgaggtgcttcacttttggggacttccaactatcacccatggtggaagagtttgaagaaattctgggatgcccactgggaggaaggaagccatatctttcctctgggttctatccctccatgacaagagttgccaaggtagtgaaaatctcagcacaagagtttgaccgtgtaaagcaaaacaggaatggggtagtcggagtaccaaggaagtgtttggaggaaagggcaaagaccttgacaaatcaaggcgaatgggcttcttttattgacatcttggcgcttttgatctttggagttgccctctttccaaatacggaagggttagtggacctag

SEQ ID NO: 17900 - DNA, 382 bp, Glycine max
agcttgacgtttatctcaaaattgcaaagacatgaccttgtgagaggtttaccaaggatgtcatacaaagatgaaacaaattaaaacctctttttcaagcaaaaactttgtttcctcaagaccacttgaactattacatattgatctgtttggctacaatgaatgactacattagatggacatgggtaatgttccttgctcataagaatgagtcctttgaggtattctttaaattttataaaagagcttaaaatgaaaaaaaagtatgcgttacttcaattagaagtgatcatggtggagagtttgaaaatgagaactttcgtctattctatgaagaaaatggaacttttcataatttcttcatgtcataccctaatttcat

SEQ ID NO: 17901 - DNA, 420 bp, Glycine max
tgtagaatggctagacatgatacatgtcagggtttgttttggttcaaggataaaagggatgccccacattatttccatgacacaaatgcaaaaatgatgatttggaaattttatgcaaaactggtcatgcatgcacctatgtggacgctcaagtgtcaaatttttatggtcatgtgatgctagggctcaggattcatttcctctattttaaatcaacccaatgtttccaaaatatgttcttttatcaatttgtgcattcatccgagtccatttcgggcgtctaggaaaattttcacagcattcacccttcaggtgtacacacacattttccaaaaattagtgaattttttcaaagaaaagttggaaatcatctcttttcataagcatgtcggtttttcagctagacaacttatttttctt

SEQ ID NO: 17902 - DNA, 384 bp, Glycine max
agcttctcagctcgtgccgggaactcatcgaatttagcacccatacagcctagagcgcccgcctccatccaaagggaggccccccaagctctggctccaaccacgactcgcccggctggcaatgcccactttggcaccgtttccaacgcgatgaggaactttcccccgaggccaattccagaattcaccccgatcccaatgacgtacgaagacctcttgtcgtctctcatcgccaaccagatggtcgtgatatctcccgggaagatctaccaacctcctttcccaaagtggtatgaccctaacgcaacttgcgcgtaccatgggaaaaccccgggccactccatcgaaaaatgcctggcccttaaatacaaggtccaacatttg

SEQ ID NO: 17903 - DNA, 436 bp, Glycine max
ctcagctctgatttataggtccgcttcaatcaagtatccattgtttctaaacagacatattgcctttcttaagcttgtgtctgaaaaatgtggttgttggggcattaaatgcgtgcattcaatgcacatacttcttcatgctagaaaaccactctttgtcactcgtgtcttgaacactacaataggaaaccacttccttttgtgttagaacatgtttgggcaatagaactcttcttttgatggaaattgaaaaattttagaacttgacttcatttattcttcatatgattcgataaatcataggagaatgtctttgcaaaatagatcttaaacacagagtattaaatgaagtctaatgaaaactctaatattgtatcagatcatgattccatcttgctactatctggaacatcagatgcaaacttcgcggaacatg

SEQ ID NO: 17904 - DNA, 377 bp, Glycine max
agctttcataagtgaaatcaagtgcaaccatttcccttagagtcctctcacgaggtggaggttgagccatattttcagaatgttcaaaatcagaatgctcaaagtcagaatgctcaaaatcaccaaccacagaatgctcagactcaccaataacaaaatgctcaggatgctcaaaaggtacaaaatgttcagggtaatcaagatgcacactatgcctaactaatctatgaaatgtcctatccatttcaggatcaaagggttgtaaatcagatggattgcctctagtcatacactacattcaacatgcacaattagttgccttctcatgcaagtaacagtgtaggtttgaactacaactatcatcaaatgatatccaa

SEQ ID NO: 17905 - DNA, 420 bp, Glycine max
tgcttgtggagcttctatggaggctggatctttgagcttcaatgaggtcctttaatggtgattttccaccatggagatgcagcggaagacaaaggagaagaggtaagaggcggcgccatccactagagaataagccttggaagaaggagcttcaccaccaagatgagccttggataagaagcttggagaggatgcttcaatggaggaaaagaaagagggagagaaagagaaacgggggagcacgaaattgaaggaagaaaaagggagagaagttaaactttgagttgtgtctcacaagactctcattcatcaaagttacaacaagtgttacacatgtttctatttatagactaggtagcttccttgagaagttttcttgagaaaacttccttgagaagcttctttgagaaaacttccttg

SEQ ID NO: 17906 - DNA, 375 bp, Glycine max
tttcttctcccccaattttctataaatagggggagaagtgaagtgaaaaagggttcagccccttaggcacttctctctctttcgaatttgcttggaaaaattgtttccgtgaagaaaatctaagccgaggcgcttccgaaatgtttccgtaacgtttccataaggaatttggcgaaggtttcgaccgttcttcgacgttcttcattcgttcttcatcgttcttcgatcttcaacgggtaagtacctcgaaccaagcttttcaattcattctatgtacccgtggtggtcaacattgtgtttcgtgtatttttattctcgtttcatttactttttatacccccttttgacgtgcttaagccattttatttaagtcat

SEQ ID NO: 17907 - DNA, 425 bp, Glycine max
  unsure at all n locations
nttgcaagctgactagttctaggctcttgactttgacatgatagaaccgttttttaaaagagagcgcttggttcgacccctatgtttgctagaatgaaaattgtgatgatgaatacaacagggaatatttatgctatgcatgacaaaacacgcttacctacggacgcaagagtccggaagaccagcccttcttatccacaatgcattaggcatcatggttcatccgcagacattaccatggtgcccaaatgcatgcaattaagaaggtgatgcggaccttctagctccccgtgacaatgatgatgagacaaatgcgaagcgtgagtgatgacactgtgggagtatgcatgcacgagagcatgtggtttgtagcacanagagaaacatactagacgaacgagcatgacaacataataaaataatgc

SEQ ID NO: 17908 - DNA, 376 bp, Glycine max
agctttatgtgtgtattagagtgctctcaaactcggtgtgtcttttctccttggcttgactccctttttatagctgctggagtggactcgggcttgactccctttctatagttgctggagtggacttgggcctgatgccaaaaaatcttccttatttatatttttgatcatttctggattatttttttttgcttttaatccctcattttcatatctgtaagtcataaataagaaaaatatcaattcctaacatttaagtcaaaaataactgctaaataaatatttttaaagatattttcaatatatttttatcataaaaaatagctcatatttaacagttataattttttttgtcgatgttggtttggactatttt

SEQ ID NO: 17909 - DNA, 429 bp, Glycine max
tatatattaactattgataatttcttttgaaaatattattcaattcgattttgaaatgaaaataaaaaatataaactattcaatgatatatatatcaaattcaatgatgtggaaaaaaaatgaaagaaaagttattttatatgtacaaaaaggtaacataagaacacgggtctacattaagcatcatggcctatagtgtcgtgtccctacattaaattgaatagagttgtcaattccgtttagactgacccatttgagctaatccatcacggatcaacacatttttgtgcgaatcacgttatgtcaagccaattaagtgacaagctaaaattttgctaatccagtacagttattaacaaactgtaagccaaattaatgaactggctcatgaaccatccatttaatttttaaaaatgtataaactattaa

SEQ ID NO: 17910 - DNA, 336 bp, Glycine max
cataaattgcaagagaatgggagcaatgtggcatgccccattgcttcagaatacaacctatgcctaaggccttttcattcaaatcctcaattcaagaaaacaagcaccaaagcaaaacaaaactgccttacaaatataagcatgttctcacaatttaaggcaccaaaggatgaagaaagcacatcaatggaaagcaaaaacatcaaggatggaatacttacttgttggagtgaattgaaataccaaaaacgaaagcaaaatgcgatcaaaaggcttaggggagcaagaaaccgcaagcctttgtgttctctatctttgaatgaggcggggggggag

SEQ ID NO: 17911 - DNA, 422 bp, Glycine max
tgtctcagcatctatgcgagacagaaaccaatatgttatctatcatcgccaagtaccaagaagagttgggtctagccacggcccacgagcatagaatcgcggatgagtatgcccaagtatatgcggaaaaagaggctagaggaagggtgatcgactctttacaccaagaggcaaccatgtggatggatcggtttgctcttaccttgaacgggagtcaagaacttccccgattgttagccaaggccaaggcgatggcagacacctactccgcccccgaagagattcatgggcttctcggctattgtcagcatatgatagacttaatggcccacataattagaaatcgttaggaaacttgtatggtctctcagaccttgactagatatgatttctttttttgaaataaaatgagttggtcccat

SEQ ID NO: 17912 - DNA, 378 bp, Glycine max
agcttatcgtaatcgattacataattctttttgagacaatgactaatttttcaggagtccctactttaatctattaccaggtgatataattgattacttttctcttaaatgtatttcagaagtgatcaagaacactttaatcagttacattgagaatctaattgattacattgttcttgaaagttttccaattttttggaagaacactttaaaattacttctttgaaataatcgattgcattgtataaatagccaccttgtatcctcacttaaaacaacttctaaatgagctagaattaggagctaatattagtaagataaagaagaggaaaaaaaagtgttgaaatatagtgtgactcataacttctaaccgctcat

SEQ ID NO: 17913 - DNA, 427 bp, Glycine max
  unsure at all n locations
ntgtatggtagaaggtgtaggacacccctatgttggttatagcccggagaaggcctcaccttatgaccagaagtggtacagcaaaccactgagaaagttaagttaattcaggaaaggatgaaaactgttcagagtagccagaaaagttatcatgataagaagaggaaagatctggaattcaaggttggtgatcatgtattcttgaaagtcactccgtggactggggttggtcgagcattgaaatctcgaaaactcacacctcgcttaattggtcctttccaaattcttaagagagttggccctgtggcataccaaattgcattacccctgtctctttctaatcttcacaatgtctttcatatgtctcaactccataagtatatctgtgatccatcccatgtgattgaattggatgatgtacaagtga

SEQ ID NO: 17914 - DNA, 375 bp, Glycine max
agcttccatcaacaaccataacaagaaataaatatccatcgcccccccccccctcaaaacatcacacaatatcaccaaaaggttttatacaacaaaatattacgtcacagagtatagaaatcttcccaccccaaatatacatcaaaaagggaaaactatcctacactcagagcagtcagtacccaaggcccacaactacctcctgaggaatcgtgttactcgtcggttgaaagcatctctccctcaagtatctcttcaccaataacatccatgtagtaggcaatctcagacggtgtgagattgtcatcatcactgaaatctccaacatcctcgtaaactttaatggtcctgtcctggcaaaaggtagatctagta

SEQ ID NO: 17915 - DNA, 429 bp, Glycine max
ttatggttgtccaaattggccaccattgtcaaggatttatttcaaaaagctaagaaaaaggataaaaagaaggccaatgatgatgatgaagactatgtacctgaatatgaagggggacttagatcaaattcttcaagtgaaaattacgagaacgacaaacatgatgagtttgctattacaaatgatcttgagtcacgaaaaaggaaggtaagtcttgaaattttttcaatataatgctaatatacattattttgttaataaatgagtggggtggttttgtgagtgagattaagatatatattgtgtttattgatgatctacacaagttttcaatgcaagaaacaattcagttaaaaacaatgtacccatgtaatagatataaaattgcagtgctctatgttatgcaatgcaatcaatatgcaatatgcg

SEQ ID NO: 17916 - DNA, 373 bp, Glycine max
agcttggacttctttgtcctcctccggtgcctcaaaactctcttcgctgacgacttttaacttggcgagccaatctaaacctcgtatatgaactttcagccattcatggtagccaccaatgatgccattatgaatgcctctaagttcttgatctttccttaacggggtttcccatgccttatggattctttgtatagtcttagaattttgtgcgccaaaatccctcacaaggaaaggagacatgccttcttccgttggtgctcccctcatggggtaccctagttgtcttatagcgagcgcgggattgtagttaatacaacccctcgttcctatcagcggaatgtttgggtatcctccacatgagaaaaggact

SEQ ID NO: 17917 - DNA, 428 bp, Glycine max
  unsure at all n locations
ntagccttaggttgttcaccatgttgctccccctatctctaccaatctcccccttttgggctttgatgatgccaaacatgaatacaacattaagtgcatttggagtcttaagattggattggagacttgatcacttagtcttatcctaaaaaattattaacacttgagaagagattaattcatcatcatcatatatgtcaatacatcatatatatatatatatatatatatatatatatatatatatatatatatatatatatatatatatatatatatatatcaatgcatcatcatgtatatcaatcaagaatgcagtcaatatcttcttctccctcttgtggcattaacacgggaaaaaagttaattattcacaaaacacaaacacacatgtaagaagagatataaaaccttatttcattaaactg

SEQ ID NO: 17918 - DNA, 375 bp, Glycine max
ttgtttgtggaagaatgtgaaaacctctgaaatattctagagatgtatggaaccttctggaactttataaaagaatagagaagagagtagaagagtataaagactcctaaaatgtgtggaacattctagagaattaatctccaacctaggatacaagtaatcttcaccatccattatagaggtggagtaatataaataagagtaggagcttatattcctaactatccaaaaaagagtgaattcatttcttagagtgagaaagttagaaagttaaatagtctctttgatagagaaaataaatagctgggaaaatctttattctcaagcttgagtaagtcaccgtagaatgagtgcaatttataattacatccttat

SEQ ID NO: 17919 - DNA, 365 bp, Glycine max
tgtcattctccatggtgtgaagcgaccggtgagctcttcgccggagaatagaatcgatcctcgccgcgagcgcgcccgaagttcaacccagaacccaacattcctatgcccaatgaaagagaaggagaaaaaaaggggacccaggaatcaaaaaacggtgcttttatggataaaaactcgggtgtgtgtggtcaacggtgtttcagatagaaagaaattgtggggaattggattgggaacgatgaggatctgtctgtggcgattctagggtttgggggaaaggggtttctgattttgttgttatgaggaagaaaggtttgagtagagaggagttgcttctgtgaatcggaaagaatgaaagaaaa

SEQ ID NO: 17920 - DNA, 380 bp, Glycine max
tagcttgttgaatctaaaatcaaagattctaaaccaaaacccaaccgtccattttgcatcatacttctactactcaactttcatccccaccccttcccaagttacaatccctaaaccagccaccccctaacttcccatacctacaatgaaatcaacctaaatgcaagaccataaaacactaagtttattctacaactgcgatgaaaagtatgtgcttggccataggtgtagtgcgaagcattttctcctgttgttggtcgaggatgatgctgattctaaaaccattgacccagcaactcctaacccaccccccttgatgaccagtcagaacctatacatttccatttttccccataagcctttactggatccccttcccc

SEQ ID NO: 17921 - DNA, 350 bp, Glycine max
  unsure at all n locations
cggctttggtttagacatgattgatacatgattttggacttgtaggatttgatttgggaaagattggatgaggggaagtgtggttttcgaaatctgcactttgtgcagatttttgctgtgaaattgtgcagcagaattttgcacaagtgcaaaaaaatacttgtgtgtgattggctgtggaaagagtagtgcagaatgagttctggatgtttgctagtagatcccaacgggcaaaatgtaggcttatgtactagagacttccagtaaaatnttggagtcgatccaacggttaacgaattggaacgaaggaattgttactggggtctttaagtgagaaaagctcgtgattt

SEQ ID NO: 17922 - DNA, 376 bp, Glycine max
tgcttctaaactttgtacaagaatgaagctctgataccacttgttagacaagtggcctcagatatcttaagaagggggggttgaattaagatattccaaactttttttccctaattaaaaatctatcttactttttacttaagttatgaattcccttaatgacaatcttcttaaatattaattcaaatgaagcaacttgaatatgaatataaagcaataataaataaaggagattaagggaagagaaaatgcaaactcagttttatactggttcggccacacccttgtgcctacgtccagtccccaagcaacccgcttgagagttccactaacttgtaaattccttttacaagttctaaacacacaaggacaaccc

SEQ ID NO: 17923 - DNA, 431 bp, Glycine max
tatgagcatgaaacctttctccaccaaccgagatagtaacatctaatgattcctcatcctctaacaacatcccaaaatgttcaccaatatcagattcaggaacctgtattgtgtttaactgagaagaatctatggacgacactaaaaccgcaatagtgcaatttatcttcaagcagtcatccttgagaaaatttgacgtctcaaggtgtctccgtttgaaaaaccgcgtatagcccctattacgcaacaagtgcatcattgatcactatatacgtaatgtacaccacaaaaaatggatacaagagctaataaatcatgatgatatccaaatcatatcaccaaaatcacaaggttctctagttcctttggaaatttaatttttatgtcttatattctaataaaagagctatctctttaacccctgacaatag

SEQ ID NO: 17924 - DNA, 379 bp, Glycine max
tgcttggctcaagaaggactggtaagtagaaggccaccatactcttagagcaagcaactccatggcagaccatttagcggctaagggcaatactttatctattagcttacacgtctattcacactcttattactgactgtaatctccaaatgtggagtgattgtataggggttactctacctagaaacgttcctgcgtaatggcttttagcctcctttgaataacaataaaattgtgcaaaattttattaaaaatatttctgtgaatttttatttttataacttgaaccatgcataccacttatacaaactgcacgtgattcgcattattgatgcatacaattaaattagtatgaaactcattcaactaacaaaagtca

SEQ ID NO: 17925 - DNA, 405 bp, Glycine max
gaaactcaagcttgtataagtgaaaggccccagggaccgactctcttatcagcttagagcatggctattgctgcgtttggattatggattgacgattgatgttcgtaaagagaaacctttgtagatctacacaaatgattacaagttgcttaaaagttctatacattgaagtttattgctctggctcattcttcatcgcgagaggaaattcactttgatcgcactttttcatttacgagcattactcttgtaaagaagaggaactgctctataccatgaatgaactactctacatcgaaagtagctcctcccgaacagaagtataccacgatagagtcaatgaactaatgacgtattggagcccaagtcaaaacacattcatgctagcatgctttcacttgctga

SEQ ID NO: 17926 - DNA, 548 bp, Glycine max
  unsure at all n locations
ccacacatactaactacataaccgaatagttaactaatctaatatagaatgaatagtatatgaaatataaaaaaannaaaaagagatggtgactcatggacatacgaanacanatggcgatatnaccgcgggaacctctagagccgacaagcaggcatgctagctcagtttgttaattagagaaacagcactcctagaaataatatgtaatattcactcctccccaatcatatacatcacccaacctttaatacttgtgcaaacatcaacaggcaccttctcgtaccaaactagacatgaccacacaaactatcgctgcattgtacataagtacactaataacctcagtaaatactcgctaccaaggactgtcaatgaaacatacaattcgaaaccgcacaacctgcatgttacatgtgacgacagagatataaatcctgtcacaaagaacacgaaccacaaacgaggtgtgactacgatgaatcaacacacaaaaagttaataaatcctaaaacgatcaaaactgctattatgattccacacacccg

SEQ ID NO: 17927 - DNA, 512 bp, Glycine max
  unsure at all n locations
cccgccctcccacacacggggcggcaataatatcagctatatcgccacncccncnncagagagaatgacctgaaccctgaaactaagaactcagcatctcaggcgctctatatatagacggcttttcaccagtggtcacaggactctgcgagtgaagagagagactaccgcaaactgtcagagacaaccgagccgccgtggatgatggagaaccatcgacgcacgcacaacttggctgctggtgctaggaaataatggaaaaacatcatctggcgtggcctgaaggagaccgaaaggaggacaccatctatagcccataagggtgctacaacggccaacggacctgagaaaggagcattcgcaaacaagccgttgtgggaagaagacatataagccaaggagcatagagctctgaatcatgaacactgacatattactcatgcatgtccactcgggccccaaataaaacggcacgctattggccgaaataaagtgcaaatgcacgaggctcg

SEQ ID NO: 17928 - DNA, 382 bp, Glycine max
tgcttggagaggatgcttcaatggaggaaaagatagagggagagaaagagagaggggggagcacgaaattgaaggaagaaagagggagagaagttgaactttgagttgtgtctcacaagactctcattcatcaaagttaccacaagtggtacacatgcttctatttacacactaggtagcttccttgagaagctttcttgagaaatcttccatgagaagcttctttcacaaaacttccttgagaagctagagcttagctacacacacgcctctcataactaagctcacctccttgagaagcttccttaagaagattcctaaagaagctagagcttagctacacatacctctctaatagctaagctcacctccttatgatgag

SEQ ID NO: 17929 - DNA, 417 bp, Glycine max
ctgaatggaggctctgatctcttgttgaaactgcttagtcattgtcctcacaagttcttcaagggaaggttgtggaggggcctcaactgtttgatgtttctggggctgttgatgttgttgctgtcggattgctggaggaacgtatggtctgctcgggctatcagcattttgacaataagtctgctgttgatgctgctgctgctgtgaaggatccgaccatctaaggttgggatgattcctccatccgggattgtacctgttgctggagaggtcataattattctgttgtggtctgtgtggttgccagcataggagcataaaccacagagtctggcgacaggcgcagattattgattcatggccatttgggttaccaggttaaccaaggcatctagtttaccttcaagcttcttagtc

SEQ ID NO: 17930 - DNA, 83 bp, Glycine max
gaaacccatcatcaacaaccgatatatttcatttaatgatgcctcatcctctgacaacatcacaaaatgctcaccaatatcaa

SEQ ID NO: 17931 - DNA, 360 bp, Glycine max
acacataaacatgtatagaaagttaaataaattaagaagtaataggtcaaataataaattgaaattgagacgaaaattaagtatcatttcagaattcaacacataaaatacttttatatgcactctttagtttaattatttattaacccttttaaattgaaaataatagtaggttaattgtaatattatacaacattattgtgtcaatgtaaatattaatattgggggaagtgtatatgattcatgaggtgtgataacatgttgcgctaagattataacactgtgattgagaatgagtgaatgtgataaacgaataatgtttgaatcggaagatatatgtgtactgagattttatatgca

SEQ ID NO: 17932 - DNA, 245 bp, Glycine max
gcattatttaatcatggacatgagactcttgtttaatctatagcatattgacacgtggatgaagcattgcccacacttggataaactcttcatctgggtgagtatattgttagacaacccttaactaattaacaatacctactcatgtgattgtaaaatcctatccatcgactattagcagctacggttatactcacaccgacaaacagcgtcttcaagacgaggcacctcttcataaacatggc

SEQ ID NO: 17933 - DNA, 371 bp, Glycine max
ttttttgaggtggaagccatgtggccaatggctaacttggagctgtaggtgagttcctgctgggataagaggggaagagtccaggatttggatctgcacctgtccctaccacttgctctaaacttgtatatatttgaagctgatcatttgtctgtaaaataagtgaaagattgaaagaggattctaaaattatcaaaagtgaattttaaaaccacatcagtggatcagaaattaaccaaaacacgaagtccttacagttcctatattcaatctcttgttgtcccaatcataaaccaactcttttgaagctaaccgctttgtcccaagtgcttcacacctataaagtggaacaacggttagttaaacgtaat

SEQ ID NO: 17934 - DNA, 422 bp, Glycine max
tgtacgaatgtgagaaacatcttcttctaccttggtgagcctggacttcatctcattgaagcgcatgtccacttgtaactccaaagtatcaaacctttcaccaacaaaggtttgaagaccatcgaacctatccaaaatcttttgaagaagagaggaatcttctccaccatgtaaatgtccttcttcatcaacgggtcgagcaccatttttcacccaagagccatcatgctctttttgataaccaaaggatccaatgacagcaaagcctattacaaaggatctcttgattggaacataaggttcagaatcaagagggatgttaaagtgtcgaaagaaaagggtgactaagtgtggatatggcaatggagcatttaattgcaatgccttatgcatgcgatatcgaactaagtatgcccaatcaa

SEQ ID NO: 17935 - DNA, 372 bp, Glycine max
  unsure at all n locations
ttctttaatataataattgcattaatagaattaatatatatatatatatatatatatatatatacacacacatttttttctttatttactaatataacaaattgcacaatttattaaaatttaagaataattatttgtaagagacagaaaggaacaatttacaattgattaaaatttaaaatttaacgcgtcggagtcaatagcaatcagaacaccactctaaattttaacaaaataagtcgtgccttttctttacgggtcanaataaatcaagtctatatacaattttctatatatataattgacatatagccaatcaatagtagtaattatgacaaacaagaataataacatataaagttattttaaaca

SEQ ID NO: 17936 - DNA, 412 bp, Glycine max
  unsure at all n locations
tctctcagcaactntgactgcaaaacttcacaggtgctacatggcttctttgcaagtgacaagacaagctttggcatctgagtctcagagaacaccaccctcagtgcaaaatgcaacaacctccacaaccacaccaattagcaacaacttcagtgtgaagagtgagcaaactcatgcagtgttgccacataagagaccagaggaggagcaagagtcagaggcaaatacgggtgtgaaaagggttaaggctgtggaaaatgttcctctgcaattcaagcctcttgaggaagatcacatagagcaaatgattgaggagcttcttgattatggatctattgaactctgctctgtcatttcaccccangccctctaattgaatgtgcatgtttttgagctgaatctaaagtcacaa

SEQ ID NO: 17937 - DNA, 340 bp, Glycine max
ttcatgctattctgtacggttaaagtctcacgattgtcacatgtcgatgcaacaatggttattcgtggctatacaagacatcttgccaaacaaagtcaagttagccataactcgcctgtgcttcttcttccatgccatatgtagcaaagtcgttgatcctgtcaagcctgatgaattggaaaatgataccgcaattatactatgccatgtggagatgtattttccccctgctttctttgacatcatgattcacttgattgtgcatttggtcatagaaatcaaatgttgaggtcctgttcatttgcggaggatgtacccggttgagcgatacttgaagatc

SEQ ID NO: 17938 - DNA, 424 bp, Glycine max
taaataagtgtactaggagtagttgtctatccgctcgtccattctcaaccaattgttactcgacctcaatttgcaccttcactaccaccaagctaaccaccaccgccaccatctcaacagtgatgatgatgtccttcaaacattatggctcggttcgaaccctgtcttttctttaatgacaaaagaaagagaaaatataacgagaattttgatgtaaaacaaaagatgtattaatatatgagtagtttggtattcatgtgttttcacgtccatatatatatatatatatatatatatatatatatatatatatatgcctatttatctttggtctactcatttttacatgcattaagattgttggactcacggagagttcttacagaacctatgtacatatatactctgatatagctcctgcaca

SEQ ID NO: 17939 - DNA, 362 bp, Glycine max
ttgcttgagctgtgaagagttacttaatcatttagtgctaatttctctacctttgattgaagcaagaaatgactgaaagtgcccatgttgtgagtatctctaaagacaagggttaaaggaaaagaatcgaggagcccaagaatgaaataagcctgaacatgtaaagaagaaatgtaccaaatatcatgcctggagtgcaaagaaaggtatgtttgttactttggtatgttctgaggtcaatttaactttagtacctagaaacacttggtggttagattttggtgccactactaatatcaagggttccatgcaaggttgcctaagctatcaaaagccaattgattctaacagatggatctatg

SEQ ID NO: 17940 - DNA, 412 bp, Glycine max
tcgtcctcagatccctcttgttggactgagcccagtttagacagccttcctaggtttagactaacttaaactaagcttcatcctcatatccctcttgttggactagacttagcttaaatagcttacgaaagtttagcctaatttaccctaagcttcgtccttagatccctcttgttggattagacttagaccaaacaacattattgtaacaacatacttaaaaccaaaacttcatccgcagatccctcttgtaggactaagtttcaattctgtttcattcaagttctaaggcaacaatacatttctcaatgctaaagtcacctaactatgcatacaaatggatgatcagaccaagagcatacataatttaagcactaaaagaagcattgaacacacgaaacataatcaatta

SEQ ID NO: 17941 - DNA, 357 bp, Glycine max
tgcttgcctgtccgatgcagcagtaatgatggcccgagttatgttggggaacggttacgaacccgtaatgggtttatgcaaagacaacggtggcataactagcctgataaatgccaaaggaaatcgtgggaagtatgttttaggctataagcccactcatgcagatgtaaagggaagcatcgtgggaaggaagggcggtggtcaaagctcgcggttgagacaagatagtgaaagaagcccgccctgccacataagtagaagctttataagctgcggtctgggagacgaacgtcaagtggtcgcaatatacgaagatgatgttcctagtacattggatttggtactaccttgcccttc

SEQ ID NO: 17942 - DNA, 413 bp, Glycine max
tcgcacttgataatggatacacatgaacagcgctaatcaatgacattcatggtgctccgaataaaggtggagtatggaggattgccttgagggtcctctcttatgcaatcatggaacacagctccaaactcgaaagtggaggacacatgaacaaccctaagcaataacattcatgtggctctggaacacgatgagaatggaagattgccttgacggtcctctcttaggcaatcatggaacacagctccaaactcgaaagtggaggacacatgaacagccctaagcaataacattcatgtggctccggaaccggatgagaatggaagattgccttcagggtcctctcttacgcaatcatggaacacagctccaaactcgaaagtggaggacacatgaatgacaacgcaattcaa

SEQ ID NO: 17943 - DNA, 382 bp, Glycine max
agcttagccgccacaaattactttagaccaaaccatttcataggtcacaaaatcaacatcaaacgttgtctattaagatgcaaacatactagtctaacgtcttatagatacacaatattaagctcattgtctttttctctcaggatttacaagatattttgaaagctttttacaacttaaaaattttgaattcagagacttaaaagatgaaaaatgaatttgacaaaaaaaaaatactaataatttcatcgcaacaaaattcacaacaaaggttgtttgagggaattgtcaaacaagtatggaaaggtagaacttgcaaaagtctttgacagtcatcgtttttaaacttttatgttatactttccaaagtcattcattatgt

SEQ ID NO: 17944 - DNA, 412 bp, Glycine max
tgaaggtaggagaagatgagtgaaaggagagggatagaaggagcacgaaattttgtgcctcaaatgaggtttgaactttgaagtgtaattctcaaatgaccaaagttgaaaaatgcacacacatggcctctatttatagcctaagggtcacacaaaattggagggaaatttgaatttctattcaaatttcacttgaatttgaaattgaatttgtggagccaaatttaggagccaaaatttcactaattatgattagtgaattttagctatggttcagcccactaatccaagatcaagttcaaaattctctactaagtgtgcttaggtgtcatgaggcatgtaaaacatgaaggacatgcacaaagtgtgattatatgatgtgacaatgaggtgtaacaagcaaatgctcacc

SEQ ID NO: 17945 - DNA, 363 bp, Glycine max
tgcttggtttgtgagtggatgttagccttagtttcacttggttatttatcaactcattcaaaagaactttcaaagtaaaatgttcgattggagcttatttaccccctttttgctaaccgaggttatagtgtgaatgatccggtgaattttattttaacagtgattagatgagattacaacacaaatgatctgttgaaattcattttatcattttattacgtgagataacggcttaaaggatcggttgaagctcgttgaaaacggaagaaaaggataccaacagtaaatgagatgaagatgaaagcatacaaagcaagaatggaccactaatggtgcatagaatgaatagaaagctttgagatc

SEQ ID NO: 17946 - DNA, 220 bp, Glycine max
ggggggggtggccgaatgaagattgggcctactagtcccccaactcagaagcgctatcgctgtgtattcaagttatcattgtctcttaatgacgatcttattgaatgtgaagccaaatacaccagtgcttatatgagtattaaagtgtcaccaatacgggagattacgggaggagagactgcaagctcagattcatactaggaatgcctcgcgcttgtgc

SEQ ID NO: 17947 - DNA, 377 bp, Glycine max
tgctttacaaccaattcgttaagtacaaattattataagggcttaggccttttttctactctcaaaacttgtggccataaaatagtataattattggaagttggctctcccaataacacaaggcagccaatcacactttacacacaaccaaccaaatttgaacatctcgtttgcattttcaaaatgggacaatctattctaaattcagattccaagccttaggttgcactggtgcaagctcaaaaatgatatgcctaaggcactgctcactaataaaaataaaaataacagctagataattctgtctacaaatcttcttaattttatctgcccattttaagctcaaccaagtaaacgtacattcgacatcttttatt

SEQ ID NO: 17948 - DNA, 377 bp, Glycine max
aagcatagcctacatcattgaagaaaaaatggtaaaattccacataaaacatcagaggatccagacatacaaggtcttatttaccttgcattactcaaagaagttttaactaaaaatttcctataagccttatcattttgatccaaggtgcctggagatgagaagcagatagtgtaaacagatatctcaaagaaggcatggtgactttttttgtattaataatcgaaatgaatgtgaacagagtacatacccatcactctttaagattgctagcaaacacaatataaggtaaatgcaaatgcgatgccctctacattgtaaacgaaactggttatacacattataggagcataaataatattgggaagcactgaatt

SEQ ID NO: 17949 - DNA, 379 bp, Glycine max
ttgcttatatgcaacataaagtaactaacatatactctaattaagagggtcaattacctggcttctaggctctttgttggtctgagattaattggtttcttccttgctttaatgcctaatccgcttgaaacggtgattggtttaggtatatgtgctggccaatgtaagtctgattctgcagaatcactagttgcaatctcaagctcatcagattcatatgtggtggccatatcaaacaattcttggttatcctttctatgcaaggagtggtccatgcatattttagaaggctctgagagaaaggttggacttgacattggagaagattgttgctttctgcttccactgccccacgagactatcatcactaggtaagctg

SEQ ID NO: 17950 - DNA, 399 bp, Glycine max
tgggaggtcacgacgaatcagatacactgaatatcttggataactgacacgtgagtgtcatgcatgactttattataccgttctaagaacatactaagaccttgagcatccattgctgcataatccttcatatataccataggccaaagccgtaatatctgcgtcagcaatgctatttgcatccacaatccgcttcgggctcctacaagtaaccaagtttaccctcacgtgatatactatgggcgaaacaccaatagacacatgctcactgacgaaggacgtactcaaatgtgccgctagactactaggatgtgactactaatactactttactatgctcatacgttaagatatattcatgattcacataaacatattccccaccccccacccccgaag

SEQ ID NO: 17951 - DNA, 377 bp, Glycine max
tgcttgtaaatatttattggtataattcgcctgttccattatgctcttgatgtctttagaggttacttcctcgttgacatcttttgtcttgaatggaattgccatgacaggtttattgttactgtctttgatatttggtagttgatattgtgttgcgggaggtaattccgattggattaactcaccatccttaacttgccaatttgttatgacatttgttgttggatcacctatgatgtcttgtttccaagggtaatctatattctttctgatggcataagcatgaaaccaatcaaagaacaggacattaattttgactcgttcgacaaattcgtacaacttgtcttggatttgctttctgtttgacacctgtaatg

SEQ ID NO: 17952 - DNA, 435 bp, Glycine max
ttggttgtcatgatgaattagattcattgcatagtaatgataacagaaactttattgtcatacaagactttcttagtacattagaagaaattcctagttccttgagcatccattgcaacaaaatccttcatatataccattggccaaagccctaaattctgcttcagcaatgcttctagctaccacaatctgcttcttgcttctccaagtaaccaagtttcccctcacgtgatataatatggatgaaacaccaagatacacaagtaaacagatgaaaaataaatccaaatgtgcagctagacaacttgcatgtgactactattactaatttactatgcacatatgtaaagatatattcattattcaacataaacatatccccccaccccccccaccccagaagaaaatgtactacaagggaaaggtataccatta

SEQ ID NO: 17953 - DNA, 367 bp, Glycine max
  unsure at all n locations
tgctttgcggatttggtcttcgctggcgaaatgatcgaagtgggtctaaaaagaggaaaatctgatcatcatgcattgataaatgcaaaaaaactggggcaactgaagagggtgagaatgagggagaaacccatgatgtgattgccattcctatacaaccaagtttcccaccaacccaacaatgtcattactcagccaataacaaaccttctccttacccaccacccagttatccacaacagccatccctaaatcaacccccaaagcctgtctaccgcactttcaatgacgaacaccacctttagcacaaaccanaacaccaaccaagaaatgaattttgcagcgaataagcctgtacaatcacccc

SEQ ID NO: 17954 - DNA, 416 bp, Glycine max
tatttaaggttatgagaggagtacggtagcattattagtgtcccagatgccccggaagcccattttttaacaaaacggggaaggtggttgccacctaactcgcccaggtgagctaggttgcttccaccttaagcatgaaattgcccagaaacctctagaaggacccaaatctgaaaattattatttgcacccctcattttactaaatacacccccctttttacttaccttttatcggacatagcaggaaagtaaagataagacactgatttcgtccgccttagccttttccgtaattaatctatgataaattccaaaggtcatcctttgcccatcatggggatttaattgatcttaatcacaatagttccatccaaaacgatatgaaataattgactcccgtctttgctttttctt

SEQ ID NO: 17955 - DNA, 367 bp, Glycine max
agctttggattcaaacattttccttaagagagagagagaccatttcattccaacaaaagatcaaacacactatatatactagagaaagagaataaacacaccagaagtaaaacaaaacttatttcttaataaaacaattaagctccagagacatgaacctgcaggaagattcagagctttcatactggcaatagcgcaggaggggcaaaatagcattagggaaatgtttgtcttctgattgtttgttggttccaaaagcatctccatagtgatcactattttcagaatttgcagggccagaatcttctctggctgttgtcctatcatttacaggatcagtaagcaagacatcatcataattgattct

SEQ ID NO: 17956 - DNA, 415 bp, Glycine max
  unsure at all n locations
ntgcgattcgggccagacgccagtgtcgaggacatcgatgacgacgtcgtgtgaggcctggtggaggtcttgccagaaggcggaatgggcctggaggcccaggaactcgggggtgcgagtggtgtgaagcgtgtagcgcgtgtcttcgtagacggccaagacggaatgggaagctcgaagcgcgtgggcttgttgagggtcgagagtggcagcgaagccgttgtaagcggcggtgtaggcatagaggagagagtctggagaagaatcgagtgtggcagtgtaccagtcacggtgcgtggggtgcacggtggaatcgtggcggtgtttcatgtgtactatgtaagtcttcttggtcgcagatagtagtgtgagttggaggagaaagaatgagaagaaggaaagggaaattgatgac

SEQ ID NO: 17957 - DNA, 390 bp, Glycine max
cttaagcgactgcatctgcattctttaccttaaggatatttttttgttgattgacttatcctttaaaggatatgtttgccacactgataaagcttactgcaacattttgggaattaaatcttagaagataagagatggaaagacaaaaatcttgtgtttaataaaaatttaatttaatttttaatataaaagacataaaatatggatttaagacgattacacatgtttaatatgttactcttttgttataaacattacataatttcattgattaatttttttaaaagaaatcacttatttttttctgtctctccagaaagttcctttgcaggatgcatctaatactaagctaggagcatttttaaccatctatatatatatatatatata

SEQ ID NO: 17958 - DNA, 357 bp, Glycine max
ataatatccattgattagatattatagaatcttcccaccgaagatagaggcgcgttttggtgtacataatttttaaattttctaaattcgtaacgcatcggtgttaagaattacctgagattattaagtgtgcccaaaatgattttgggcctatttgagctataacccttccagatttagaatgaggtgcctattaattacatacttcttattcatttgttaatcctcatttgcctcttcgacttacagcaagagggttgtgagccccactacttttatgcggagctatacacatattagatatacggttcttaatactcattactgaatagtaaagatcatttctaatgtcatcta

SEQ ID NO: 17959 - DNA, 371 bp, Glycine max
atcttcttatccaaggctcatcttggtggtgaagctccttcttccatggcttattccctagtggatgacgcctcctgtcacctcttctcctttgtcttccgctgcatctccatggtggataatcaccattaaaggacctcattgaagctcaaagatccagcctccatagaagccccacaagcaagcttccatcaaagtgtatgaattttaaaatccaatcctacagtttcttgaattaattaaattcgttattattggttctgtaattttatgtatctttgacacactaaattcgattatatttgctatttcattcctttagttatcttcgtcaattaaacaaacccatgatatttcgattaaacttgtac

SEQ ID NO: 17960 - DNA, 376 bp, Glycine max
tgttgccattagaagagaatgagcatgtgattggaattatgactgtgattgctagtcaatttgccaaattgattgtgaaagaatgcattgaccgtatcccggtgagagtgtgatccttaaattttgagagaaatgactatcatttaatactgatttttgcatgaatctttgaagtatggactgaatgcatgaaattgaggatgatgaaggccatgtttgattgggatagccacttagccacgtgtttgaatgatttatcctttgcacctaatttgagctgaatgaattattgattgattgaaccctgagtctatagagcgttatcttttgctaccttgacttacgttgtatgagagcatcattcacagaaagtgtg

SEQ ID NO: 17961 - DNA, 460 bp, Glycine max
  unsure at all n locations
agagatcttatcttacatctgaaactatnaaacccgactccaggcggagtatatataagatgatttttgctattaacttgctgcatgcagattgttgttgtcactcgacgagattgcgtggtttagatggtatacctatgctacacaatataccatatatgtttgatccctgtggtaagtacagcatcacattgattgagacatacacaaactggcgcttgataagagcatgaacatctattacagaactcggggttagtacatcgatgatcctatgcacatatcgctgggtaccatacacaatacgattatgacatcgagtgaagacaagacactgtgcctggaccatcgttcatgaactacaatgcactaatggcaagctatatatttgaatcatcagttcgcataactcaccttccagatgcgactacatagagtcaaaattgacagtatactatcc

SEQ ID NO: 17962 - DNA, 371 bp, Glycine max
tttcttttccaacgatgtccatcatctctacaaagacatcaccgccttgacgaacatgaaattatagaacaaggaaacgcagacctaccttggtaagctcgaacgattaattgctgattataacactttcatgccctttacgaaagacacaaagacttctaataagaagcacatccagcactttatggcccttgtccttgctggtcagacattcctttgctctttgctcgcattcttctaatagcggagggcaaagcaaaagtcgtggaggtcaaatgatgaaccattcatgtgcaactatcgctacatttaggggcatattaagtccattgttgcaacaagacttgcgatcaaacaaaatctatgaatgt

SEQ ID NO: 17963 - DNA, 359 bp, Glycine max
tgaaagcatgtaacctaccatcatctcatagtcaatcaccagtgacgtgtctactatcattgtgatcatctgcctctccatcattgagggcactactcgagctggcacaaccgtccataattggatgtatgtctttgaaagattcacgctccttattacacacgtacttgaatcccattgtattcgtagacatatcagaatggcagtgatactgcctaatgaaggcgaccattcagtccttccagaaattgactcaagaaagctcctgattagtataccaagtgacagttgccccacacagactcttctggaagaaatgcatcaacaaatattcatttttccagtatgcccccattttc

SEQ ID NO: 17964 - DNA, 142 bp, Glycine max
tttcttgtctggacggggcccaagttatgattgcccttgttatgtaagagaaagtgtttacatcccgaactgggtataggcttaaaattgggttgtatagctactctagaactgggcttgggaaggagttacaatggtgtat

SEQ ID NO: 17965 - DNA, 324 bp, Glycine max
gctatagagctctttcactcgctgagacgctgcattattttatgcatacgttccttacaagcctgagggcgcaattacatcacatcattaaccttttgctcaatagggtctattagacaagcagatggctgtgccacccagtaacgatgattgattcccactgtaactcacaacgaagagtcccgttgcgcatttgtcactacgagggaccgtgctaatagcgttgagagaattcaagacgatgggcatgacggagttggactatatattgatgagggtgatcatgacataaccatgcatattggtgaagatgactctggcact

SEQ ID NO: 17966 - DNA, 295 bp, Glycine max
agcttagcctctacgaactactacccaccagaccattagattcgatactgagccttcatcccacgacgcttattaataggcgagcatagtacatttacggcatacaaatacacaatattatgctcatcgactatttgtgttacgatggaccagataatcgggaggctcctaaagagggcataatctagcacatttagacttaccttatggtatatgattacgtctggaaattgctactagtactctactcatttcgcatgcctcatgaaaagctgtgctgtgggaattgatgtac

SEQ ID NO: 17967 - DNA, 318 bp, Glycine max
tgagcgctggagactgcgcgtggctgttaaagtatagagagagtactagaggaaccgcctcccgtggaggacgctgtctgaaacgtatttcttacttgaccgacgtagtatgacgcgctcgcgtcgcctctatttatttcctatcggaccttcgatgctgctgggatcgtatactcatttttgctatatcactgacaagtatacattccatccttggagctcgccctaaagagccaagatcgcactaatcacgctgactcatacatatctctggatctgcctactattactacatcgtgttacatatacattactcca

SEQ ID NO: 17968 - DNA, 376 bp, Glycine max
tgctttaaataccctagctttacaattacttatacaacctgatggattgaagatcaattaatattggctttcaaggttggtttctcatcataaaaaaaaggaggagaaattaaatgtaaaacatgacctcttgtactttaagacactactaaaaaaataggtttttacgacgatgtttaaagtcggttgtagaaaaattgtcattgtattagtttcggtggcaattttgtaaatactgcccacatttcaaagacgtggaaaatcgtttttgaaatgttggtagtaatcaaagacagttttgcgaaaattgtctttgaaacttcattttttttcattcttcatttttaatgcctcatcttcattatagaagcccacg

SEQ ID NO: 17969 - DNA, 435 bp, Glycine max
taatactcataatcacatctataggactaaggtcctttatattttaattactagataagaaagacttcacatcatttatgaaatgcataccactaccaaatatcaatatgtcatccacattcacacatttatcattattattgatttgaaaaccatacaaaagaacaacttgatcaaacttttcgtgtcattactttggagcttgtttcaaatcatataaagatttaccaagaatctataagtagtactatgcaaagaatatccaacaaaaacataatcaacagtctttggtccaattttccttttcttattaatagggatgttaacctttgctagacacccacacactttaagatattttagatttgattatctttttctccatagctcaaaaggggtattttttaaaaaataattataaggtaccatattaaa

SEQ ID NO: 17970 - DNA, 365 bp, Glycine max
agctttagcctttcatttcttggaagccatctacatcaaaaaaatcaaagacacaaaattagacaggtatttattcaaattagaaagcaaaaaaaaatctgaaatttaaactaggcgcttagcgagatggattcgcttagcacgacttatgaaaattaactcatacacttagcgcgatcgaggtgcgtttagcgagttaacacagaaaactactctactgcataattggctcgctaagcccaattccaaaacagaaaacaatttgcgcttagcgcatacggtgcccttagcgcgacaacaatactagagaataattggcttagcgagcaggctcgataagcccaattccaaaaattacaaaacag

SEQ ID NO: 17971 - DNA, 440 bp, Glycine max
actcagcttgcataggctcattcaatcacttagtgcaccaatagtttttggatccattccttaaaagcccgagggagttatgaaacaaagtattaatattttgcttaataccatatcaaagagaagaagtaatatgtgcccaagtgaaatgatgattgtttgcaactctagctcacaacgttaaagcccattgcacatctgtagaaactagctcccaatcaagttgccttgttgatatccaagaccaatgataaacctgaatttgactatattttgatgtgaattttcatgtcatatccatgcatattgatatattttattttggcaaaactcatggttgggtattaatttgtgaaagacatgtgcttaagacgctaaatgtggaaaagaactaaaaatcatgaactttttcacctaattagaagatcatagtcaaggtg

SEQ ID NO: 17972 - DNA, 381 bp, Glycine max
agcttgtctcgctaagtgggagtccactttttgcgcttagcgtgacaattcgtgcttagcgtgactccctctatgctaattctcgcttagtgcactaattcttgctcaatgcaattccctctcgggttggaattgtgcttagtgcgctcctcgcgattagaaagacattagttgttattatgttcaaaatcccaacggtcagaatgtggagaattgtcttaggaacctccagacaaaatttaaagataatccaatggttaacgaatccaggatcacgattttacagaaataggttttggtaaaatctgaaatctcataatttcaacttagctcagccaaactccacataactcaacatccacattaagaaattcacacatg

SEQ ID NO: 17973 - DNA, 433 bp, Glycine max
atggatgagttgcgtaaacgagccaagggatacatttagatggaggaaatgtctagattcaggaataaagatagactagcaggacaaaagtgtgacaagcgagaaggaaacaccaagaccgacttacacaagtcgaacaagaagcacaagccagacaagcattaacctctgttagtcgtcatttacgactaacttttatattgaagagcactatgaaatctatgtcttttccccaatttatagttctttttgtaagttcgtacatatttttatgtttagtttaatttttacacagtagatattcccttcaatgtgaattaatgtgttttcaacttcaatttcaggtgaaaagatgaagaataagaaggttgctttggctggtgtctcactaagcgaggcatatgcgcttagcgagtaacattcactaagcgag

SEQ ID NO: 17974 - DNA, 93 bp, Glycine max
agcttctaccgctgttgactatcaacagggggcgaaacgaatctgataacggctcaacccctcaggcacttctatatgtatcgaatatgcgta

SEQ ID NO: 17975 - DNA, 399 bp, Glycine max
tgctagacatggatcaacgagccggtgaagctctttcttgcatggctcattccctaggggatggcacaccctctcacctcgtctccttagccttccggtgtatcagcatggcggagacatcacctttactacaccgtcttgaagaccaaccatccaggcttcatagatgcgtcacaagcaagctggcataggagccgcacattatcgccatgacacagatgctgcgatggaccattatgaaactttatgcagaacgggcgtgcatgcacctatagtgacactcatcatactatttttatggacatgtcacacggaggcttacgatacatgatcactattcaaggcgaccaactggtacaaaaatatggtgtttatcaattcgtgctctatgcgagacct

SEQ ID NO: 17976 - DNA, 369 bp, Glycine max
atctttctagcttttcattggtgtattttgatctccttttggtgctctaaattgtgggaatgtgcttaaatatgtggggcaattttggtttgttttcttgcttgattaggttggattgggggtttgtatgggatggccctatgcctataatgcattttgaaacaatgggacatgccacattgtccccgttctcttgttattgatgcctaaacgcgcgcccaccaagtgttcggtgaaatgcctcaatggcattagcgcgtgacttttgtaaggaaacaacccatggggcattttggtttgcacatattttctatttttctgggacgtgcattcattctcgaataggctatagtgattgccccacatata

SEQ ID NO: 17977 - DNA, 420 bp, Glycine max
tgtcatttgtgtggagcctactacatcggtcttcttgggagctatttgaagcatttttcgtgaatcatgaagaacaagttgaagcattccaaaactgcaacactgagtgcaagatctatgagtgaaaaatctatgttttagcttgaaccctcatagggagagtgacctatttctaatttatgcttacaaagcttgtaataatcttagatagaagtgtgagattaagttcttgagtgaaatccctcttgtgaggtgaaaatttgtattatgtgcactcaaacacaaatctatttctctgtaaaattttagcgttggctggcaaaggtgaaacctagtggtgtagctagtctagtcaaggctaagactgaaatctagtggggaactgccaggttgttgaaacccagtggtttgctagtttag

SEQ ID NO: 17978 - DNA, 364 bp, Glycine max
  unsure at all n locations
cattcttcatgatgaatcaagaattgattcaaagaaggtttgatgataataaaggggatgacaaaaagcttaaaattcaagaacacttcatgataacaaagatgatgaatctcagaatcaaagaatgagttcaagattgaatccagaacacttcanggttaaagaagaaatttgatttcaagaatcaaagaatcaagtttcaagattcaagttccaagaatcaagatcaagattcaagaatcaagagaagacttaatcaagaaaagtattaaaaaggttttcaaaaactgagtagcacatgaatttttctcaaaccttttacccagagtttttactcttggaatcgataccagattattgaatc

SEQ ID NO: 17979 - DNA, 425 bp, Glycine max
tcctcggagccattcctgcgaaggcaaacatttgtaaagttagttcttaccaagaaatgctacccttaaaacagaaatggcatacaaccccctccaataaatacaaacatcaatgtaaatttagagcaagcttatgcgcatacttcttcacgaacgttcacttgcacaagacattcttataactaagaaaaatgcacccatatacaatcaaggcaccttcgttacctagattatttacatgtacttccaaggtgtatttgttacctacatcacacacatttcctttgctaaattcacatacatgcatactctaagcactttggctatcaaaaattgcatacgtgcacatctttgtatttctaatacctatacatacacaaacttcatgatgaatcttgactatctacacaataaggtgctacatt

SEQ ID NO: 17980 - DNA, 356 bp, Glycine max
ttcttattcccgcattcccagtaagcccttcacgtggtaatcgcgcaaacgcagtggtactttcttggtacgcgctggtctcggggtggcttggcatatgtcgatgttgctaacactgccttcctccctaaaatccaccttgtcctcaaggtggtaggtcttacacagatcagaccacatttcccacgaagtgtcttctggtggctcaccttcccactgtgtaagcaccaggcgagtgggcggtgttgtcgactggtcaagtttggagtctagaaagcacatgggacgttgaaggggcttggtttccaaaacctgtaagggccaaccataatctgtagccggtggtggaccatgat

SEQ ID NO: 17981 - DNA, 404 bp, Glycine max
aatcttcctaatgtagcttctcaacgaggtgagcttagctatgatgtgtaactaagctctagcttctcaaggaaggtgtctcaatgaagcttctcaaggaagttttctcaagaaagcttctaaaggaagctacctagctctataaatacaaccatgtgtaacacttattgtaactttgatgaatgaaagtcttatgatatacacttcaaagttccacttctttacctcttttattccttcaatttcgtgctccccccttctctctttcttttcctccattaaagcatcctcttcaagcttcttatccaaggcaattcttggtggggaagctacttcttccttggcttattccctagtggatggtgcctcccctctgctcttctcctttgccttccgctgcatct

SEQ ID NO: 17982 - DNA, 373 bp, Glycine max
tgcttgatgaattctaggtaaagactgaaatcaggactttgcttcttagatagaccacaatctcttacttctataccctctagtttctattccttgttcattgttattatagtgatttaaatcatccaagtttcacataggttacaaaattgatgtaatgcatgggaggaacaataaaatataagactaagaagaaaacaacattgtcttattttttctatcttctttttattcactgttgaagttatgttctggaaatgtcctagaaatattagacaggaactgcaacttattttgttatttcaaatgatccaaggtaggattgttaagttggttcacgaatatttgttattaataggaagatctaaaccct

SEQ ID NO: 17983 - DNA, 227 bp, Glycine max
ctcatgcttctaacctacggaatccttttcgggcattgttggcgctacaactttaaaaaccagtgcaagacttcatcgtccatttcgataagcatgcaccattggtgaagggggaggatgaaccgctcctggagaaagtgtttgttagagggcttctccaagagatccacactaaagtccagctctatgaaccggaatacttgatggactctatggacgttgcttgt

SEQ ID NO: 17984 - DNA, 266 bp, Glycine max
ttgtcatgcatgcttatgatgatcccatatggttggaacattctctcaaaacagagtaaccctgactggtcaccttatgattttacttactgagagtgacctgacatacccattgtgtggtgtgttttgttatgtactcttaaacaccctagtgtggttttttactgatatgggaccacattgcatataggcttgagttttataataattgttgcataatgcacgtgaattgtttattatgaaatcaatgagtgttgtcatgcctc

SEQ ID NO: 17985 - DNA, 425 bp, Glycine max
  unsure at all n locations
ntgaaagtagagctcgaagagtcaagagtggtgaatgagaagttgagggtggtagtcactagggtcaggaaaaaatgtgatgagctgaaagatatcaacatgaccacggtggaagcgttagagtgggaaataaaaaaaaggcccgaaaggaagaatggagcaggaacaagttccaaggggctttgtggggtagcattaaggagctcaaacttataaaggccgagagggacaaatcaaggatggaaagcatggtgttagaggataaatcaaagagttttcatagatcgaagagaattntgatggaacagttgagcaaaacagaagagaatatgttggcaatcatcaatgaatataaagaaaaggtgaacctatccgctagtcatgggtagaggctggaagatgaacgacacatgtatcgtttctgt

SEQ ID NO: 17986 - DNA, 356 bp, Glycine max
tagctttgagccaaaatcctgactcaccataaaccttgacccagggtgagaatgtcaatccttaccctcggaagcaaaaaagaatataacggaaattttcaatctaaaaagaatagaaggaaaatttccaatgaaagcaaaaaaagaaaagaaggaaaattccccattcaaagagtgggagaaagctaaaagaaaagaaaggaaattcccaatcaaagaatgggagaaagtaaaaaaggaagaagaataaggaaagaaagctcctgatcagggatcgaaggataaacagaagaaatgtgctgagaggtctttagactggacaatatctgaaccatacagaattggcaccacatgaa

SEQ ID NO: 17987 - DNA, 412 bp, Glycine max
  unsure at all n locations
tgccacccagctcgcccaggcgagcacggttgcttcctccagaagcaacaaccttctggaggaaggatcttgaaagcctaagtgggccacattgctattcgtaccccccctttttactaaatgcacccccatttatttttttggtaattctttttctgtaacgttacgaaactttacgaatttcgtaacgatacttattttccttccgcaaggttacgaatccttacggattatgtatttactcttttttggctttcgaagaagttacggaaactcacggattgcgcaaaaacacctcttttcgatttccgccacattacggaatttcacggatcgcgcaagcctgcttccttttgatntctgacacgtctcgggtcttcatttattgtgcaacacaggacgccaagtatct

SEQ ID NO: 17988 - DNA, 367 bp, Glycine max
ttcttttgcatgtgtaggaagttatagagagagaaaggtccaagttcccgagagttctgaaagattttgttgtgtgaagatctgcagagacgagagctcaatgcgaaagccattctaagagctttagatgagtttgtgagtgactgtgagatcctagaggtgaaggagacatcctcaccacttgtattttttcaatctttcaccttgttcttctctgtgttgtaaaggaggtttccagactatggaaagctaaatcctctattggatcttccctgtaggtacctgatgtaagctccattggagcttgtaagcctaggatcttcttcatcaatggattccttggcttattggaagatgaatggcagcg

SEQ ID NO: 17989 - DNA, 395 bp, Glycine max
  unsure at all n locations
tctcactaanagggcaaggaaggacgccgcaagttatggatctagtgcagccccacaagcagagattgagtttgacggacaccatttttgaagtgaggagcatcagcgccgcttcgaagcaatcaagggttggtcttttctcaaagagagacgggtcaaagtccaactaagggagggggaatacataaaattccacgaggaggtttcctggaggcaatggactcaactgacagagcctatggctaaatatgacccagagatagtcatggaattctatgcaaatgcctggcccaccgaagaaggagtcatggataagcgctcctgggtgtggggccaatggatcccctatgatgaagatgctatcaaccaggtcctggggcatccattggttctag

SEQ ID NO: 17990 - DNA, 381 bp, Glycine max
  unsure at all n locations
tgcttcgaaacctcacgggattaaaaagttgaaaatttcatatgatgatgctttgctaaggctggaaagaattccagatgttattggcatcaatgatgctccaagtgttggtgaagataatcctgaagtttggcatgttcaggtaattagttatctaataatgctgaataaatattttgattttctagaagcaattattttctcatttactctaaaatgaaattatcgattatgtctactttggaatgtagatatttcgttcaattgattcaaattccgttaaggggtttccaaaggatccaaaagatgcaacgagcaaggtgaatgaaaagccttgtgtttcaattnttgtttgtcagacttggtttaacctatcaaacc

SEQ ID NO: 17991 - DNA, 434 bp, Glycine max
tcatcagatgttgcatttcaatatcacttcctcttatggaagaacaaaatgcacttcttgcattgtatatctgtttaatggtcgtacaactattggcattgtgttccttcagagttagtagaatgtttcttggcttcaccatggacttcgtcatatcaacaataagtgttttttcagctttagtcaatcgctccgcatatggatgtccaactaatgagttgaccaattcatgattatgtactgcacaaatcaacttcaccatccagccttctcctccaaccactggcttgcaacaaagcttgaagggacacccacatttcctagtcctagtgtctcttctgataagttattttttcctacacctatactcgccactactttcacagctaattaacacaaacaaagtcctttctctactacctgtgtttgtgtct

SEQ ID NO: 17992 - DNA, 380 bp, Glycine max
  unsure at all n locations
agcttttttccttactcttattctggaggatctggtcctcgaatcctagccttgttctgtagttcacaacatccacattccaaatttcattagaaaattatgagtagtattgtcttctctgcactcaagggtagtgccgtaaaaggttactgacatgtgaaggaacgcanaactagtaaaacataattctctcgcttcaataaggaaccgtgaattggttcatgcataccaattcacatgacatttttaaaccggtttggtaaaatttagtgaattcgtgaaagcaatgaatcaggaaacatcacgagtttgactttggaactcttaaagaacataaacagctaagcttgttagttgttacagagagaaagagaggattt

SEQ ID NO: 17993 - DNA, 423 bp, Glycine max
tctagcttgtagggtcatgcgtgagggagcttgttatatacaagttataaagaaattcctgatccattaccttacatcttaagattttaggggaatcagtccttcacactgaacttatcattaaaaattgttgtaattgggacttgttttcattttcatttgataacttttatttacatatggtgtgcttgatgtctaattcttggtacatacattttgaacatgttttagaacttagacaccttgtgtttcaagttattcaataccttatttaaaaatgattttttttggcttcttataggtttgttccatgtatccaaattgattggttgtgacattgaagatctcaagttgatactatcaactcgcaaaatgaaagttggtaatgataatattgtccaaaagttgacgctatcacaggta

SEQ ID NO: 17994 - DNA, 370 bp, Glycine max
agcttgtaggattatggggtacccatcacatgtggtactaggtggcggtcgggcgatggtgcacaacaagttttcctcttccacaatgcgcgcataaacccaccatcccctgatgcccacctccaactgagctcacgtactcccacgtatcccatatcctcgattctctcaacaccgggtccccatcaatcctcccaagcttccacaacatccaagcaaaacaacattgaaacagcataagctatcacagacaagcaaaacagagcaaaggcagaaaactctgctcaacacatcaacccatatcacagcttttctcacttaaagaccacagtaacaattcctttgatccaattcgctaaccgttggatcg

SEQ ID NO: 17995 - DNA, 259 bp, Glycine max
agccggtttcataaatattatatgtaataacctcctgggctcccgattttgtttacctacaccaggtgtagggctctggggacatgacacgatatacgcctttatagggagtgcttactttacaaagacacccaatagatgtgccacatgatgatgtgggactatgttacagtcactacgaggaccttggacacgataggccctgctgtccatgaatccacagtttctcatgaacgcccttatgacttttgggtacatg

SEQ ID NO: 17996 - DNA, 380 bp, Glycine max
  unsure at all n locations
agcttgtaaaaacttaagtctgaaatttctctatagataaggaacaaaaatggtcagaccagaccaacatcttttcacaatacagtgtttctgatatttttgactcagaaatttccattcatctcattggaaaagtccaacccacatttcactgtatattagattcaacttcttgatatcatgtgctaacgaagcacaagatttagactcatgatattgagttcgggatactcagaaatttaatctacaatgggcattntgttgaataaaaagcaggcaaaaattaaaatgaacaaaatcatgccaataataactatagaacattagacaacactgacaaacttagtcgcattagccactaattgaataacagagcttag

SEQ ID NO: 17997 - DNA, 429 bp, Glycine max
tcttgacgacctatccgccaactgttttgtgagctgtcccacttggacctccagattctttatggcagactctgtgctcttctggttagacatagagacctgcataaattgaactggagtcttttccatcttcgtggtgcgatcatagagactacgtccttgttgttgcgaccttatggatgatcccccctggtctctattgaattgattcccaagatggttcttccattgtgcctgttgtaggttgcattgctgtccatgctggaatccagacaatccacctgcattaaaattgtttctaagctggttccccgtgtaattgacttcatgtgtgacttgttcttcattagggatacaatatccagatgcatgagctccaccacatagtgtacatcctgcaacctgcgtaacagaagaatgtgatgtatg

SEQ ID NO: 17998 - DNA, 364 bp, Glycine max
agcttcttttggaccttgaacaggcaactaactcctctttcaaaaccatgctatgtgctcgcgactggtccctttcttcctttcgcaacttgagttcactattgctaccccatagagctccgcgaaatttgttccggccatactcttccttgcgagccctcttggtctcttgttcaagggctcttgcgcgaactgcattctcttcccgtaacccggcacactccttccgaacgtgtgtagcggccaacttgaacttctccttggcaagttttgcctttcctaactcgcttttgagagcttggacttcttcgtcctctttcggtgcttcaaaactctctttgctgacgacttttaacttggcgag

SEQ ID NO: 17999 - DNA, 407 bp, Glycine max
aacttatcacactgagctccgattcagtcttacaatatattgagaccctcgaaattaaacatcggaagctctcgagaaattcaaatggtcataacgtttcacacgaaggtcagattcaggcacataatatgtcgagatgctcggaattcaaccacggaagctctcaagaaattcaaatggtcataacttttcacacggatgttcgattcgggcatataatatgtcgcgatgctcggaattgaaccacgaaagctctcgagaaattcaaatggtcataacttttcacacggatgtccgattcgggcgcataatatgtcgagatactcgacatagaacaacgaaagctctcgagaaattcaaatgggcataacatttcacacggatgtcagattcggcacataatatgt

SEQ ID NO: 18000 - DNA, 357 bp, Glycine max
agcttgtagaatggctagacatgatacatgtcacggcttggtttggttcaaggataaaaggggtgccccacattatttccatgacacaaatgcaaaaaatgatgatttggaaactttatgcaaaactggtcatgcatgcgcctatgcagacgctcaagtgtcagatttttatggtcatgtgacgctagggctcatgattcatttcctctattttaaatcaacccaatgtttccaaaatatgttcttttatcaatttgtgcattcatccgagtccatttcgggcgtccggggaaattccacagtattcacccttcaagtgtagacacatttttttcataaactagttatgatcaatga

SEQ ID NO: 18001 - DNA, 360 bp, Glycine max
  unsure at all n locations
ngtgtaaattactcggaattggtaactacattctttatgctgagagttctactgaattttgtcgaccttcggaccagacttataaaaatagaaccaagcgatttggattagagaaaaaaattacaaaaatcacacaagttggatgaaaaatcacagtccaggaaaataacagagaaaaggaagtgcgcttgttgttttagctcataattttttctataattggagcctactttataccactcctagttctgaaacttcaattgataataattatgaaaacaagtgcccaaaatagaggtgtcttgagtctttatttcgatcttctttgatagttgttctactctactctatagcctttct

SEQ ID NO: 18002 - DNA, 374 bp, Glycine max
  unsure at all n locations
tgcttataagaacaaaattgcctcaatcatttccaaatatgcatgtgaattaagacgcatcaacaagaatcaagccaaggctattgtgcaagcaatcaatggggcaaaacacaccaaatgattatgatgatggatggctcanattctcacaaaggtaaaatcatcactttcaaattgagctttcaaaactatcatgacatgtagagaagaatcaaggatttcaagtcacaaaatgtcaagaacttttattttcaaaacaattacccatttcttgaacatatcctataattcaaagaaaaacatgcaaagtcgtacgtgcacacaaaattgacccanaatattaaactataaatccgacgaaactaataacatta

SEQ ID NO: 18003 - DNA, 356 bp, Glycine max
catatccaaggctgatggatcgggttaaactccttcttccatggcttattcgctactggacggcgcctcctacatacctcttctgattagacttccggtgcatctccatggtggaaaaatatcattaagggtcctcattgaagctcaaagatccgacctccatagaagccctacaagcaagcttccatcgagctctctatagcatcactggcctaatctacttaaacactgtaatccaaagcccttacggagtagatagcatcatgcgcattgactcaagtgcaagcacaaaacttatgagccatgaccctgcaataggtctattgatcctaaaaatagccatatcaatgtgcatc

SEQ ID NO: 18004 - DNA, 371 bp, Glycine max
agctttaacctcatcgtctctcacagtctttagatttgggagccaatccaatccttgctttcggactctcagccacttatgatagccggcgatgaacccattactgcttcccctaagctctctgtcctttcttcacgccgcatcccatgccttgcgaactccttggagtaccctcgcgttatggtcactgaaacctcgtgcgatgaaaggcgtgatgctttcgtctaatggcgctcctctcatggggcagccaagctgtcttatggcgaggacgggattatagttaatacaaccgcttgttcccatcaagggaacatttggacatccttcgcatgaagatggaatcttgattcttccgttcttctagcgag

SEQ ID NO: 18005 - DNA, 373 bp, Glycine max
acaacatccaagcaacacaacattcacacagtttaagctatcacagcccagcaaaacaaagcagaggcagacaactctgtcaaaacaccaaccaaaaatgacagctggacccactcaaagaccccagtaacaagtccttcgatccaatttgttaaccgccggatcgactccaaaagattactggaagtctatagagcataagcctacattgtgaccgaagggatctactagcaaacatccataactcattttacattactctttccacaaccagcaaaatacatggatttgtctgcacttgcgcagaagtctgctgcacaattgtacagcggaatctgcacaaagagtatatttcgaaaaccacactttccct

SEQ ID NO: 18006 - DNA, 372 bp, Glycine max
  unsure at all n locations
agcttgccatgatgcttggaatagtttatcctttgaagataaccataaccatgatctgatttttaccaactccatcaccttttcatggcctttactgccattattaaagataatggagtttctatgaagccaaataatccaactcattgtgcaccacacaacttcccatctttgatttgcaattgatccaactctcagtatatagtgctatagatagtgatcctgcggttggttatgttgagctcccatgactcccaaccatctaaaacacaaagaccacacttcctgtgaaaaagtgcaaccgacgaagagatgttgtacactntccaaatgctgagagcacaaggcgcacaaatagttgttgtttggtcg

SEQ ID NO: 18007 - DNA, 410 bp, Glycine max
tgagatgaggaagtgttgaagggtgaaacttccttcttttattgttgaccacagagtggtacctggagatatgtcgcgggggtcaggagaccttggggacgtcaggtggggtgctattgcccaaaaccaagcttgaccaatcccgacccaacccgggcatagtcggtcagtgagaacctgtgatgtacctaagcaggcgagctcctggcagtcaacagataaaaggaaaacaagaccacaaagcaaggaggcttgtggtggctggccagctgtgaaacttgattgatatgtgagatatggtctctggtaatcgattaccaagggtgggtaatcgattacaaggcttaaaaatgaagacagggggctaagatggtctctggtaatcgattaccaggggatgtaatcgatta

SEQ ID NO: 18008 - DNA, 372 bp, Glycine max
  unsure at all n locations
agctttaagttgcaattgtgttccatgatttcaacataattgtaaatatacatcttaatgggtcctcttccctcttccattgcttcatcattttaagtaaatttgttgttcttctagccttcaaaaatcgaatatggtttaatcttactcgcctcattttgaaagtattatcaaacctatcttgttcaaaaaagtgtgtcaacatttaccttgtataaggctccgacctgcacgctgcattgattgtgatggttctattaaattaactttntctaaagattttggccaaacttcttgcagtgccctacatcatcagatttganaggcaatanaaaagttcaaaaacattaataaaattataatatcaaagtt

SEQ ID NO: 18009 - DNA, 348 bp, Glycine max
  unsure at all n locations
aacatctccagtgttaattttgcccgaccctaagagaccatttgaagtgtattgtgatgcaagcgggcaaggcttggggtgtgtgttaatgcaagagggaagaatagtggcttatgcttcacgccaattgcgtcctcgtgaagttaactatccgacccatgatttggaactagcagctatggtctttgccttaaagatttggaggcattatttataccgtactggttttgaagttttcagtgatcacaagagtctcaaatacttgtttgatcagaacgaactcaatatgaggcaatgaagatggatggagttcctcaaggattatgattntggtctttcctaccatcc

SEQ ID NO: 18010 - DNA, 369 bp, Glycine max
  unsure at all n locations
tatcttcggggacaggcgtgggtttgtttcagtgaagtcactgctgcaagcaatgcagtgcgacaaatgcaaaacttccctttctatgacaaacctatggtaattgttagattacacttatctagtatttattattacaccgaaacttatgattctgattcatatgtaattacctaatggtaatcaacttatagtgctgttgataatttctttacagttctgttcataactctattatatcttgtaccaaactttnggaaccatttctagtaaccaatgttatcttactgttcttttccccttttatcttgtatgttctagattctcttacttggctactagggatttatgttcgtgcccaaaaaatac

SEQ ID NO: 18011 - DNA, 414 bp, Glycine max
tgtgaaggaataccttgaagataattccaaaccattagtaattgaccgtaactttgtgattgatgcgctaccttcgggaaaaatcaatgaccttcgcaaaaatataaagctggtaatgggcgttgggtttgcaaaggagtgctacgaggtgtactgtaactggaggagggaaagcttaaaggagtgcttaataaatttattaggcttgccagagattaatgtggaggagaaaagtagattgttggaatttgaaaattacattcttagaagacgtattgaggctatccaggtcgctcttggaacactaattcccagtgagcgacgactctgtgatagcgtcttccaggggttctcttatgtggctgatctttgtttcactgatatttgtcggggaacctcaattcaattgctgaa

SEQ ID NO: 18012 - DNA, 370 bp, Glycine max
ttcttggaggattatggggtacccatcacatgtggtactaggtggcggtcgggcgatggtgcaagacaattctccacatccacaaatcacgtataaacccaccatcccttgttgcccacctccaactgagctcacgtactcccacgtagcccttatccttggtcctctcaacgcagggtccccatcaatcctcccaagcttccacaacatccaagaaattcaacatccaatcatcacaaactgacaaaaccaagcaaaacagggcaaaggcagaaaactctgcccaaaactcaaaccaaaaatcacagcttgttctcacttaaagaccccagtaacatttccttctttgcaattcgttcaccgttggatc

SEQ ID NO: 18013 - DNA, 413 bp, Glycine max
  unsure at all n locations
tatccttatggcttgccttcggacttcactcccctgtgccctctggaagatttaagccaagcccctacttctgaggggcaactcccgccttatgacgactatcccgggcaagacgatgaggaaggagatacccatctcggccccctgctccacctcaaagatccgtccccacatgaactaccccaaccgaacatagtctgccatatcccggcctcacccacacccgtaaaagaatctgttcccttcgcggaagataagggaaagatagaggcgcttgaagagaggttaagagcagtcgtgggccttggcaattacccattcttagatttagcggatttatgtctcgtgcccaatatcgtcattcctcccaagttcanagtgccagactttgatacgtacaaagggacgacatg

SEQ ID NO: 18014 - DNA, 374 bp, Glycine max
tatcttatgatgattcattctattactccttctcacagtggtgcctcaacaccgaagcttgcatattaggtgtataatttgtagcatggagagaggtgggaaagacgaataactgtaaggtcattgtatggttttttttttggtggatacaggggattctagtatacatacagactacatacatatatagtacatatggtacattgatagtgggtctttcattgcttttgttgcctttgggtatagtttctttggctataaccaatgttatatttgcaagatgtacttgagtacttcttggttagtatactgtgtacttgggtacttcatgtgcaatgttttctctttcagaataatttatagtcaacaagatt

SEQ ID NO: 18015 - DNA, 424 bp, Glycine max
tatagccccaagaccattaaacatagccaacaatgtagaactaatcgtttttgaatctgactttctttcatatggcctataaggtcacgcctctactggcaacaacaaatttgcaagtgtttaatgcttggctttttaccaatccaaagttcataaggggtttcgttaactgctttacttgacaccctattaaggatgtaaagtgtggtctttaatgcttatccctaaagtgactctgacaaagaagaatgactaatcatactcctcatcatattcttaagtgcaaaagttttcccgacatagtgtattgcggaacaatttcagactctttgaggaaaagtgcaaaaggccccagacgttattctattaatccaccatatcttccatagtactcaccaccacgatcagatgtggtagccttaat

SEQ ID NO: 18016 - DNA, 381 bp, Glycine max
tgcttgcccttcttgcacgatctgcactaagacaagaggggagggaaataataactactgagtttaaacagcatcttctaaccccaaaaccaaaagaagtttcacattgtgcttctttttatctgccatattagttgcattcaacttgcaaataagagagaaattacaagtctgcaaacatactcatactcctctggcatgtttttcttgatttctgcgttatgtcataccatcacacacccctgcgtttatctcatcaagtgcacgccattgtatctaacttatagatagtaagtcaaaatgtgtacatttgtcaacctatttctcgtgaaataaatagcatgactgtacacaaccataaacttaagtatgacactaacc

SEQ ID NO: 18017 - DNA, 433 bp, Glycine max
tagacgcttagcccttaatgcaacctatattatttttttaacatcatactaactaaacaaagaaccaacaatcattaacaacaactaacgtaagtaatcaaaataaaactttctaagtcctctaccctagggttcaaaagcgaaaatcaacaagagagggaaaaaagataacttacttggaattgcaagagtagagtggacaatgaaaggcacgtagagtgatgaatagtgcaaatagaaggtggaatgagatgcagttatatgaatgaaaatgtaactgcctaaggcagttatgatcttcttttgcagtttcgatttgctcgctaagcgcgagtgtctcgctaagcgagaactctgtgacattagaattttcagaatcggaattcatgcgcttagtgagatagactcgcttagcccaattctaaaatatgtg

SEQ ID NO: 18018 - DNA, 342 bp, Glycine max
ttcttacgaaagttcttctgattctgttatacattttttactttatggcatgagatgaagtgcaaagattggacctcttgctagttgttattaatgaatacttaaacacttatgcgtgagggaaacaatggtcatgagactgtggtttaagcttctttccttgatatctatcttatgcctaacttcatctaatcgttcaggctacattttattcttttctttggataactacatgccttgtaaaagagaagtgatgaggtgcattacttcattctcttatcatgcaatcatgaactcttgttgcatacacctttgtacatagtcactgcatgttattgtcac

SEQ ID NO: 18019 - DNA, 511 bp, Glycine max
  unsure at all n locations
tactcgtcctangatgcctgcacggaaggcgatgagatgaatgtacgcgttacannncaccccccaagacaggttgaactggaacgctgaaacatggaaacccacggcgctggaccacaaggagaaaagcgtgtcaaggatgaccctttgaccagcaggaaataggctctaagaacatgagactccaacttaacaccaaggacgcggcccccttttaagcaagacatacacatcccgctacggaatatcccgggggaatgctgttccctcttgatccaagctacccgaacatagtctgccatacaccagaaagcacccacgacagaaaaataagcgagtcacttcgtggataaactcggaacacaaccagcgcaacgaagaacgtgccaagcgtatgggtgacggataaattctcgcttcaaatgaaacaaaagccagcgccgtaacaattgggcaagactacccagccccataagccagaagtcaaatgactaactgcctgcacatctag

SEQ ID NO: 18020 - DNA, 379 bp, Glycine max
tgcttgtttagttatgtctcgtatcggcttaatcaattacagtcttctcgtaatctattacatagttgttctgagacaatgactgatttattcataagtctctgctttaatcgattaccatgttatataatcgattacttctctttctttaagtacttcaaaagtgaacaagaacactctaatcgattacgctgaatatctaattgattacattgttcttgtgttgtttccaagtgtttggaagaacactttaatcaattaaaaagataatctattcgattgcttcattgaattaatcaattaccttatagatttaatcgattataggcagttataactgacttctctataaataacttgcctgtgttctcttcataat

SEQ ID NO: 18021 - DNA, 219 bp, Glycine max
gccctactataaaaagtgaccaaaaaacaagcatacattccaaacgtactaaggtgcctcctactcacgcttttctaacgtcttgagctagactcctgatgactcgccggtcacagacctagtacgttgcttacatttggctttggatggggacacctattggtcgtccatgtgtcatatgcaactctctaacctttacatggatgatctgatgtgaac

SEQ ID NO: 18022 - DNA, 292 bp, Glycine max
tgcttgcttttgattaatccttagttctgtaacaagctttgaacaatatacttggccttcatttaactgtctttgcgcttggcggacacgctcaacaaagtactttcgacacctactgtacgttgatttgaccaatgctgttatgggaatgtttcgacaatacttcaaaaccttattgatacattctgaaaggttggttgtgatgtggccatatcgacgtccttctctatcataagccatcgtccattgttcctttgaaattctatcaacccatgtggctatggatggactc

SEQ ID NO: 18023 - DNA, 662 bp, Glycine max
  unsure at all n locations
acaccctgcgctctcacnttctgcatcggtacgcgaagtctcttagtttatgcctgtttncggctcaacncccccccncccagaggagagttganacatagaatacgcaagagacactatanaacactacaagcatagtgacagcgctactataagtgttagacagcggacgacttgcaactctctgtgactgattgatgaccttacatcgttatgaggcagatcatattgaatctcgatacataaactaggcgactgtgatgtcctagagttgttgcttgcaaagatacgatagaaatgttcggcgctatagctcgccgtgcagcattagctggcactcttgcaatgctacactctaaaagacatactacagtgtgatatactattaatcaacatagactcttagctgaactagagcatgaacagattctaaacatacgagaactgagaaataaaaagaattgacataatatacgacgagaccattaaacaccatttgatagatcaagcattatatactgtatatgtagagcacacgagagatgccatttgtctctacattcgcggtcactcataggatgctattgaatcacaatcacaatctattgactgatcgattgacgacgacaatactgaatacgagaagtgccttactgaaggcg

SEQ ID NO: 18024 - DNA, 365 bp, Glycine max
tgcttgcccttcttgcacgatctgtactaggaccagaggggatgggcgaagaaaatgctgggtgggcccatatttaaggagagtgagccggtggtacggaagtcaactcatgtgtggaaaccgagagtcattggccaagcttgtaaaattacaaacggatccatgcatgaccaaatgggtggcgagctgaagtatgaggcaaaggtggatgatatgaagcgtctaagtaaagctatggtcggcgttgtgatacatttcggccaatcttatcttatacaagaacattttgctatgcaaggggtgtctacaactttagttactcccttaggagctaacatggttctcttagaatgtagtgttgatga

SEQ ID NO: 18025 - DNA, 346 bp, Glycine max
taccagaacagcccatgcgggcaccgagttttcattaaaaatgagtaatgcatcacaaaattaactagaatttttattaaaaaaaatcaaatactaccgcgtgagatgaacaatttataaaattgacaaaaataatgatgaaactctgaattttattcttctgtggaccactttatttgattttgagagtatgctctgccaaactcatctcattcgattttactaatagactaatatctattttgttatcagatactttggggatgaaaaataaacaaataaacacagtgctactgctaccactacatacgagaaaaggaaatgatataaagcggaatccgagaga

SEQ ID NO: 18026 - DNA, 315 bp, Glycine max
cttcttctaaccaaatggtcttaccttggattaattcctttgatagccctttttaaccttgtttccctttccttggtttgaagctcactacaagccttaagtgaaaaaccatgatattaccatatccttaacgaattttggagctttggaattggtttggggaataagtgtgggggggttttgtttcattggacaacttgtttggtggctatgcttcatgatgtattttgggccatacttgatgtacattgcatattgggtaaatgttggacatgctgaatgaaatgttggttctcacaggcaaaaaaaaaaaaa

SEQ ID NO: 18027 - DNA, 376 bp, Glycine max
  unsure at all n locations
aactcaagcttgtaggattagggggtatacatcacatgtgggactttgnggcggtcgggagatggtgcaaaacaattttccacatccactaatcacggataaacccaccattccctggtgcccacctccaactgagctcacgtactctcacactagcccttattctagtacctctcaatgccgggtccccataaatcctccgaagcttcgacaacatccaagtaatgtaacgtccaatcatcacgaactaacacagccaataaaacagggcaaaggcaaaaaactctgccaaaacacaaaccaatatcacagtttttcacattcaaataccccagtagcatgctcttcattcatattcgttaaccgttggatcgac

SEQ ID NO: 18028 - DNA, 370 bp, Glycine max
ttctttttctttatgattttgatctgaagctattgtatggcattcacaaggcttcatcttctggcgccatgaagcttgaacccaaagcttttggtggcaaatttcctgctcaggttagtctctttcattttcctgtctaattaaattatcctgatcctgtcgttgattaatatgctgatggctcatggctaacaccttcaggtgcggttcaaaattgcttctgattgtgttccattacccgaaagcattttcaaaaaagccatcaaggataattataatgaaaagcacaagttcagaacagaacttaccgttagacaagtaagaattaaatgtaacctctggtggcctgtctgtctgtttctatcattct

SEQ ID NO: 18029 - DNA, 430 bp, Glycine max
  unsure at all n locations
ctatanagactcagcttgtaaaccttagaggtgatcttagtttgaagattttacccttttgggtcaaaacactctaaatattagtccaattaatcaacatgacgaagcacagtttcttcacaaataatccaaagctctttatgaaataaaaaaaaaattacagctagaaataaactattgaaattgctttgcaccttgatccagacaacaaggccattggattcactgccaataaatttcagtccataaaatgctttctgactgcactgctgtctaagctctcaagccaccaacaccgattcagacccaccttgagctcctgtgagagctatgtaattattgcttacaatgaatattactcaacatgtattttattattggtcaaaatgaatatatcttcataaacgatatgcacatcaatctagcatat

SEQ ID NO: 18030 - DNA, 368 bp, Glycine max
tttcttgtgagaatagtaaaaaaatcacggagatttatttttaaacacttggagaattaaaaacaagaacggattaaaattacctgggtgtgttcctctttgtattaccatcctctagacagcctgttgaaaattttagaggcttgtatttacgtattttgctttctctcaccacaagttccgtaatcaccctaaaagtaagatattgctcctttcttaagagtgaaagtccattctttctcattttctactaatttatctctacagagaaagcattttatgctttgaagagaatgcaaccaaagacaagaaagattgttgatcgtcgtgcctcaaaatgtccgaagataaggtattgaaagattact

SEQ ID NO: 18031 - DNA, 52 bp, Glycine max
caagacacggcgcggaaagagagaaacccaagtcccgacacgagaaggcaca

SEQ ID NO: 18032 - DNA, 353 bp, Glycine max
ctaacattgaatttagagcgtctcgttatattatttgtctctatcagacatgcgagtgtgaggtgattggcgatagaatgtcctcggaggttcagaagtgaatttccagcgtggacatatattacaggactcaatcaaacatccgggcgagaagttattgctgttagattagccttcagcttcacaattcttttgcgatcgatctacatattacgggactgtatcagacatctgcgtaaaaagtggttgtggtttggaatttgtcgaaagcttagacattatttttgcacgacttcgcacattgatgattagaattgggccatacaggtaaaagggtatggtcggttgaatat

SEQ ID NO: 18033 - DNA, 372 bp, Glycine max
ggtgtagcgctgcgatctactaatatatggaactttccattgctttgcctgagaataacaattggttgaccacaacagcgctgggggcggcaacggacaatggactttcaaataaacatgttggacatgaacaaacattatatcatgtgctgaccgcgccaaacgaaccagcgaagacattgcataattgatacactaactatattccatgtacctgaacaaaatgatttccaaacacgtgaccgacacatatgatgcggtggccataacagtcacgtggtggttgactactaagagggaaaaatgacatgctttgttgctgagacaactatacaaggatcactctttaccgggagcaatcacatatcccat

SEQ ID NO: 18034 - DNA, 370 bp, Glycine max
tttcttgaataacctcgggatattgaagaaaacttgagcaaaatgaagaaaatttggaagtgtggtgtttagcatcaaataagatgaaaaaccaaatttgttgttatctttggttggaagagagaatgtgactagaattaacctatatatggtaaaaaaaagtgtagtacgttaataaagattataaatatcttatttattttaattataaatctttggtattatccacttaagttacattattagataaatagtataaaataatatttaatcatgttaaataaaggtttgataaattgggtctcccatggtataattataagttgacttaagtatatttaaaataaaattatatcaccagtttatccta

SEQ ID NO: 18035 - DNA, 414 bp, Glycine max
  unsure at all n locations
taaagttgttaacccttgctaactccatatgttagtttgtcgngcccatggaaatacccacaacatgcataagttttagtcaaatattttagctggttgaaaaggtaatgaaatggaagaaaagcacgagaacataccttgaagtaacagtcccaaaaggaaaagcatagtgtcctcgatatgactttctttatggcttttcctcttcttcgtggcgttggaagacactgtgtgatggggggttttgttttcaagagattgcggttgaaggagagggcgacgtaagaacgaaacgacggcgtaagactacggttgaaggagagggggcgacaacggacgagagggcgacgtatgaatgaaagaacctttgtgggctatgttaaaaagtaaaaagatatacaaagacggtctttc

SEQ ID NO: 18036 - DNA, 380 bp, Glycine max
tgcttttcaaagatgtacttaaccgggtccatccttgatatcaaccaggtggtatggctcagcatgtattgtcttaggcggtgggacgcccagactaaagcacaacacgttctttcgagtagggagtaattcatttcacgggccgtgaacttcttactcaagttgtagacagcgcgctctctcttcccggactcatcatgttgccccagcatacatcccatcgactcgtccaaaatcgtcatatacaagatgagaggccttccgggcactggcggcataagcacaggagggttcatgagatactgtttgatccttccaaacgcttcttgacaatcctcgttccagcaaacggtttggttcttgcgtaagagtttgaacag

SEQ ID NO: 18037 - DNA, 428 bp, Glycine max
tagcagctaactcttgaggatcaggcctcaagagtgaaaatctataataagcacaaagattttccccctcttccagaatcacttgggtcttcagaaaagtgtttaaagtatcttcatcaaatttgatcagatgacctctgaccctcacctgcttaagtgacttgtcttctgggtcatagaggttggcataaaattccttcactatggcaacatcaatgttgccttcatcaaaattagtcaattcttcatcccatttccttctctcgagttcctctttgaaatcatcaaactcagtgtaatatactaccacattcctctctggaagcagtttcctaggcacaattatatcagtgtacctctcccaagcttcttgagaatgaaacctagatctgtcatatcttgcttgggtagaggaagaagcagaagac

SEQ ID NO: 18038 - DNA, 379 bp, Glycine max
ttcttcatcattcaatttcgagcgtctagatatattacaggactcaatcaaacatccgagtaaaatgttactgtcgtttaaatatgcttagctctccagctttaaatttcgagcgtctcgatatatgacgggactatatcagacatccgagtaaaaagttattgtcatttgaatttgcttagagattcaacattcatcttcgagtgtctcgttatattacgggactcaattatacattcgagtaaaaagttattgtcgcttgaattttctcagagcttcaacaatcaatttcgagcgtctcgatatattacgggactcaatcaggcatccgagtaaaaagttattgtcgtttgaattggctcagagcttcaacattcaa

SEQ ID NO: 18039 - DNA, 433 bp, Glycine max
  unsure at all n locations
tcacaccacagcaacacaaaatctaggtgtccaaaacccctcattttaatggattctctaggcttgagaagtgaaatttagaatgaggtaaatttgaagcaaactctcacctcacacaagtccataacctcaatctaaacttgctcaaactgaatttacacctaaaattccaccgaatcaaaatttgactcttcaacacccaattttgccctagaaatggctctttattcactttgatcatttgtttttctctctagcacaggccaaactttctcccaagtcctaaatgacatttcaagctaatattaacnnnngagaatcttcatataccacagagttcanacntnnccnnncnnccctcaaagcctcactctttttgcactcataacatcacattctcactttctaaccctacgttaactctaccattcat

SEQ ID NO: 18040 - DNA, 378 bp, Glycine max
tgcttgccatggtggtggcagacctcgaggctcaactaaaggagtcgaagtccaggctggaggagtctgagctgcggctgttcatggagatagaggttaataggaagcttgaagaggagctgctgatgtacaagaaggagactgtggaacagcatgaaaagggctttcacaaggtcgctaggtaggtcgggttctttgtcaaggcccttaacttgggtctttttgaccctttcaaggacatgaaggacggtgttctgcttgacgaggaagatattgctgctgaggatgacgctggtgacgagcacagcgatgattgcaatgtttacgttgccttttcgttatttccttctttgttgattttggctaccatggctatgt

SEQ ID NO: 18041 - DNA, 328 bp, Glycine max
gatgatgaatcacgttgatgcaagtcgtcttgatgatgttatagatgttgacaaacaggccacagaatgattacaagattctgctcccatgttcaggatcaagatgattttcacgtttcgtgatgggaaatcaggacgattcccgactcaggagaagtttgatctcaagattcaacagagggacccttctatgattctcgataagagatctagacgacttcgcaagggaagtagtgaactgattgttcagaggtctagcataccacagtttgcggttgaaaggaatgtgtctcataatattctaacttacccgagattctactctctg

SEQ ID NO: 18042 - DNA, 380 bp, Glycine max
tgcttgagatgaggaagtgtagaagggtgaaacttcttgcttttattcgttgaccacagagtggtacctggagatatgtcacgggggtcaggagatcttggggacgtcaggtggggtgctattgcccaaaaccaagcttgaccaatcccgacccaacccgggcatagtcagccagtgagaacctgtgatgtacctaaacatgcgaggtcctgacagtcaacagataaaaggaacaaagaccacaaagcaaggaggcttgtgtggtggctggccagctgtggactttgattgatatatgggatatggcctctggtaatcgattaccaagggtgggtaatcgattacaacgcttataaatgaagacaagagactaagatggt

SEQ ID NO: 18043 - DNA, 434 bp, Glycine max
ctcagcttgtccaagtagccttgggcatggcatggagggaatagccattgtcaacaagcactgtggccactatgtggtctaaacatttgacggatacatgcgaggctctgttggccgtgacgttgttgattatgcccctaaaacactccatacatatgtcttgagctatgtgggcttcgctcaaaatcttgaccaataacgctcgatgaggctcaaagttcataagcagtcccaacagatagatcctagctggggttttatttatttgtttaatcaccttgaactcgctctgctggatgattctcacgaactcggttgctacatctgaggatattccctttttgctgaagatgacctctatcttggaaaaccttccaaccgggacctcgtcattagaaatcaagcccgccttatcactctcttccacgcccgcc

SEQ ID NO: 18044 - DNA, 379 bp, Glycine max
tgctttgataaatgcccaaactccctctccatttctgatttcaggcttaaataggtggtctcgttggtgttctcatgcttagcgtgactctggctcgcttagcacacataagtgaatttcagcttatcgcgcgtcttctcgcttatcgaaagcatgcaagcagtgcgcttagcgggatgagccctcgcttagcgcgtgtgtccagctcatccttcttccagattcttcctcacgctcagccgtaggagtggtgcactcagcggatggctcgctaagccggcagattggcttagcgagaagctaaaaattagcacttcacaaacttgcctaattaacctgaaattataaggagatgattattaaatacacaacatgtgag

SEQ ID NO: 18045 - DNA, 408 bp, Glycine max
  unsure at all n locations
nggactgtgctagagaaaacaacaaatgaccaatgtgaaccttgagccatttctagggcaaaattgggtgttgaagagtcaaattttgatttggcggaattttaggtgtaaatccagtttggacaagtctaaattgatgttatagacttgtgtgaggtgagagtttgcttcaaatttgtcccattctcaatttcacttctaaagcctagaaaatccattaaattgaggggttttggacacctacattttgtgttgctgtggtttgaagcttgactttggtttatacatgattgatacatgatttgggacttggaggatttgatttgggcaagattggatgaagggaagtgtgattttcgaaatctgcacttatgcagaattctgctgtcaaaataggtgcagcaagat

SEQ ID NO: 18046 - DNA, 368 bp, Glycine max
agcttgtgaaaacaaaaaagtgcaacacatttgatatagtttataggcttctgaagttggctctagtcttgccagtagcaagtgcaagtgtgaaacgtgttttttcagctatgaagtttgtgaagagtcaactatgtaacaaaatggatgatcaatggttaaataatcgtcttgtaacttttatagaaagagatgttcttggaacaatcaacaatgaagttattttagctcattttcaaaaaatggatagtagacgatttttattgtaaatacatttccttaaacaacattatttcttattttcaatatattttagtctattagttcttttatattttacccacactgatatttattgtctggatccg

SEQ ID NO: 18047 - DNA, 418 bp, Glycine max
tcattagagaatcacaataacaacaatactaccatatcgtttaccaccactatcaatgtcagagagcacattctcagacataaagcataggcgttgtgatgccgtcaccacctcacccgcgtttcgtcttcttgaaaccaaatatggcttatttgtcacgaggtatggagaagatgaaacacgactaaggtgatgacagcataacgctggaatgcgatgaacagagaaagagtgagtcactgaccagaaacggagaacaccctaagaggaagaaagagagaacaacaatgcattggcgagaagatggaagagaaaatggaaatggaaagcgtgagaagaggatgaaggagaataggcgagaaatactaatggagagacgacgacaatgccacaacgcttggacgacgatgagagagtg

SEQ ID NO: 18048 - DNA, 200 bp, Glycine max
gtaaagggaagccatcgtgggaaggaagggcggtggtcaaagctcgcggttgagacaagaaagtgaaggaagcccgccctgccacataagtagaagctttataagcgcgggtctgggagacgaaggtcaagtggtcgcaatatacgaagatgatgttccgagtacattggatttggtacgaccttgccctcctgatttca

SEQ ID NO: 18049 - DNA, 347 bp, Glycine max
  unsure at all n locations
ctcncactcgataatggagacacatgaacagcgctttgcaatgacattcacggagctccaaataagagaggtatattgaggaatgtcttgagggtcctctcttatgcaatcatggaacacagctccaaactcgaaagtggaggacacatgaacaaccctaagcaataacattcatgtggctctggaacaggatgagaatggacgattgacttgagggtcctctcttaggcaatcatggaacacagctccaaactcgaaagtggaggacacatgaacagccctaagcaataacattcatgtggctccggaaccggatgataatggaggattgccttcacggacctctc

SEQ ID NO: 18050 - DNA, 372 bp, Glycine max
  unsure at all n locations
ttgcttggaccctcaagaaattttggtgctactattgaacaaccttccaacagtacaagttctgatcttaatattgtcttagtttctcaagttgcacagccttctgatgctcctttgcagttttcaacttctttcctttcttttgctagtgtttcaaatggaaaaaatgagggtttggatgttggaatctcacgtgaggatgagatggaggaagaagctcctgagacaagtaacaacacaactgaacttattttaagaagctntggcgggtttgcgattaactcaaaccctaacccatcaatgcctaagacaaatccttttgggggttcatttaataatttagcaacaagtttatcatgctctacagttaca

SEQ ID NO: 18051 - DNA, 413 bp, Glycine max
tggatttccttttagtaaggaatctatccttccttatatggagccaaacctagtcccccttattaagaactagctcctttcctcctctattgcctttagttgaataaacctttgtttggttctctatttggttcttaaccctctcatgcaacttcttcacaaactatgacctacattccccttctttatgtataaaagaagtgtcaagtgggaagggaatgaggtctaagggtgttatgggattgaacccatagacaacctcaaaaggggattgctaggtggttctatgaacccccctattgtacgaaaattttacatgaggaatatactcatcccaagacttatggttgccttttagaagagcccttaaaagggtggataaagacctattcactacctctgttggcccctta

SEQ ID NO: 18052 - DNA, 375 bp, Glycine max
tgcttggaaggatgcttcaatggaggaaaagaaagagggagagaaagagagaggggggagcacgaaattgaaggaagaaaaagggagagaagttgaactttgagttgtgtctcacaagactctcattcatcaaagttacaacaagtgttacacatgcttctatttatagactaggtagcttccttgagaagatttcttgagaaaacttccttgagaagcttctttgagaaaacttccttgagaagctatagcttagctacacacacccctctcataactaagctcacctccttgagaagcttccttaagaagattcctaaagaagctagagcttagctacacatacctttctaatagctaagctcacctccttga

SEQ ID NO: 18053 - DNA, 412 bp, Glycine max
tcttttagaccttgaacaagcaatcaactcctctttataaccatgctatgtgctcgcgactggtccctttcttcccttcgcaacttgagatcactattgctaccccatagagctccgcgaaatttgttccggccatactcttccttgcgagccctcttggtctctcgttcaaaggctcttgcggtaattgcattctcttcccgtaacccggcacactccttccgaacgtgtgtagcagccaacttgaacttctccttggcgagtgttgcctttcctaactcgctttcgagagcttggacttcctcgtcctcttgcggtgcttcaaaattctcttcgctgacgacttttaacttggcgagccaatctaaacctcgtatgcgaactttcagccattcgtggacccaccaatgat

SEQ ID NO: 18054 - DNA, 360 bp, Glycine max
tgcttgtagaatggctagacatgatacatgtcagggtttggattggttcacggataaaagggatgccccacattatttccatgacacaaatgcaaaaatgatgatttggaaacttcatgcaaaactggtcatgcatgcacctatgtggacgctcaagtgtcaaatttttatggtcatgtgatgctaaggctcacgatctatttgctctattttaaatcaacccaatgtttccaaaatatgttcttttatcaatttgtgcattcatccgagttcatttcgggcgtccggagaaatttcacagcattcacccttgaggtgtagacacatttttcaaaaatttgttatgatcaatgaattttt

SEQ ID NO: 18055 - DNA, 420 bp, Glycine max
tcaaagtcaaaaactaaccgggtgaagatcgacttatgatgaataatgaatgaggaacgccaaagaatagcgaagaacgtccatggaattgatcacggaaacgtcacggaagcgttatggaagcgcctagacttggattttttccttctttcttattttcctcactaattttaagtgaaaactgaatatcctaagtgttgaaccccttccccttagcccaaaatgctattttatagctaaaatgagggaggtggttgccgcccagtctagctcagctcacctaatcgagctcagctctaccaagcgagctatgtagcttccacctgaagcaacctccctccagaatattctagatgggcctatgactacgtacacccccctatattgatcagttcacctccctttatcatatttttgtca

SEQ ID NO: 18056 - DNA, 344 bp, Glycine max
ttgcttgtctcagcgcttatgcgagacggagaccaacatgctggctatcattgccaagtaccaagaagagttaggtctagccgcggcccacgagcatatgattgcggacgaatatgcccaagtatacgcggaaaaagaggctagaggaagggtgatcgactctttacaccaagaggcaaccatgtggatggatcggattgctcttaccttgaacgggagtcaagaacttccctgattgttagccaaggccaaagcgatggcagacacctactccgcccccgaagagattcacgggcttctcggctattgtcagcatatgatagacttaatgggccacataatta

SEQ ID NO: 18057 - DNA, 398 bp, Glycine max
tgccacccagctcgcccaggcgagctaagttgctttctccagaagcaacaaccatctggaggaatcttctggacggcccaaatgggcctggttgctatttgcacccccatttttactaaatacaccccccttgcacttttttggtgattccttttttcgtaaagttacggaaacttacagattatgcaacgatacttgttttctttgcgtaattttacggaaccttgccgattacataatcattcccttttttgacttacggaatgttacggaacctcactaattgtgcaacgatgcttacttttgatttccggtgtgtcacggaaccttacggattgtgcatcaatactttctttcggttgtccgcacatcatggtacttcacaaattgcctaatga

SEQ ID NO: 18058 - DNA, 309 bp, Glycine max
tgcttgccgagctcaccgtgaattgagagacatggacactttggcacacctcatgtacgatcttaggatttattacctgttcttagcacataatacgtgtgacactacgagataaccctaaatcggtataggtcgatacaatatacactagttttattcataaatgttagtcgttttcacagacgaactctgtacagtgtctatcgctttagagtgtattgtatgaaagactcatgcccatgtttgcatatgatctagaactgcctgctataaggatgatatcaaaacggtactggtactgtataatga

SEQ ID NO: 18059 - DNA, 251 bp, Glycine max
ttggagatcttgctatcctacgactcgtggacaacctcatcgtgaagaggaagtcatcctgacagcatgagatgatattgacagtgattattatgctctctaaggggatgacacatcctcactgcgtgtatggcatgcatacttcatacatctctttcttgtgttgggcaggaagcttaccatatatggacacctaagctctctgttggggcatccttatcagtacgctgatgtaaatgactggaaagcca

SEQ ID NO: 18060 - DNA, 373 bp, Glycine max
atcttgagagatatacatacaagtgagatgagatgagaaagacaaccgaactgagtgagcttgagaattctaaaattctatgttttgagatgaaatttataattctctgtagttgattgaaatttcttattaaagttctccattttaatttcctttcaataaaaaaaaccaaaaaaaaaaaacttagcataatcaaatcccctaaaaattactttcccctcttaaaataccttatcaaaacaaactcattcaaccgctaccattcaccgtcaattttgacagttaaacggtctataaagttagttgttacattgttttctcattctttcaagttagttgttacactgctttctcattcccctgcatgtcaaat

SEQ ID NO: 18061 - DNA, 431 bp, Glycine max
  unsure at all n locations
tcttanattaagctcaatgaccgtggcaaaagatctcaggatgaaggacccaaatgcattaagttggtctattttaaaagtaaaattcacgtttgtcagaaataaaaaaaataaaataatagaaaaaaatctataaatttaaattttaagattttaaattaaatataatattaaattcatttgcataattactcataatatattgatctaaatcttccgagtgattaaccctgtgaaatcagaacacatcttccatatatgtgaatttgcgattatttaattttattctatatatattgagcataggttagtgttaaactgttagttaattaattaatcttgcacgacaccttatccatcaatgcgtaaaaatgggttgtaccaaaaacgaacgttcaactgagtcatcanagtccatatggtttcacgtt

SEQ ID NO: 18062 - DNA, 535 bp, Glycine max
  unsure at all n locations
ccaccgccccacgcgcggcagacgagagacttatcgataccacacccccccccccagcgaggatgacctgaaacgcagaaancaangacacacaagacgccacccggacncaagagacagagagggttttaccttttaacgccacatacccggccgagggacaattaggcacctgagaccctcgaagacacaaggctgtatctcgtcgcgcgcaagtaagatcccgcacaaatacgccgggctaatgggaccttcgcacagagacccaaagaacagggggcgaagtcgccaacaagcgcgggcacacgcgaccaaacgcaccgctcagaagaagacggcaaaaccgccaacgaccgcacgatacagcgataccgtgagagaaagagaccgcataccttaactgtcagtacatgagcaggcccatgacagaccactggatcggacaaaaagcgcggagcaaccaagcgcaacccctcaagtccgaagagaagggcgcgcgccatctatcagcgaggcacgaccacgaggtcctacg

SEQ ID NO: 18063 - DNA, 375 bp, Glycine max
agcttgtcactggagctgacccatcaactgccctaactctttcagactggtgattcctaggctcttgaccttgacttgatagaacctctttttaagtgaaggcgcctgactcgatcccacgctttactaaagggaaacaaaacctagtacgaatcaaaactctgacatctatcatgggtggaatggacgaatgcatgaagaaatgcatatgacacatatgcattttatgaatacgggagcctggggatatgtccccttcttagatacaacatttgggcagcacggcgcccgacgtacgtatttaagatggcgacacggaccctctgtcagtttgacaaagggaggggatcaagacgcaatccgtgcatgatgcat

SEQ ID NO: 18064 - DNA, 416 bp, Glycine max
gcacgggtctgggagacgaaggtcaagtggtcgcgatatacgaagatgatgttccgagtacattggatttggtacgaccatgccctcctgatttccagctgggaaattggcgagtggaggaacgccccggcatttatgcaacaagcataatgtaaacctttacggttttaaaagctctataggtgggcctaggctttagagtttttccttttgttaaggctttgtgtcttttgtttttgaatttataatacaaggacctttcttcatctgttcctacgtctctacccattctcattcatttgcatgtttacttctttatttctgaaacggaagatccgatgacgagtccctcgaaggtactaatacctgagacccgcttatcaactttgagcaagaaacgaatcacacagaagatg

SEQ ID NO: 18065 - DNA, 378 bp, Glycine max
agcttgtaggattatggggtacccatcacatgtggtactaggtggcggtcgggcgatggtgcacaacaagttttccacatccacaaatcgcgcataaacccaccatcccctgttgcccacctccaactgagctcacgtactcccacgtaacccatatcctcgtttctctcaacaccgggtccccatcaatcctcccaagcttctccaacatccaggtaaaacaacattcaaacagcacaaactatcacagccaagaaaacagggcaaggcagaaaactgtgcccaaagcaccaaccaaaatcacagcttttctcacttaaagaccccagtaacaattccttcgttccagttcgttaaccgttggattgactcgaaaat

SEQ ID NO: 18066 - DNA, 429 bp, Glycine max
tgcgctggttttattcaacttcctaggatcatgatcagctatgtgtgtcctactatgacttgagaaataaaagtgatcaaataacaagcagatatttaaaaggtactaagttgcctcctagtagcgcttctttaacgtcttgagctggacgcatgatgacttgtcggtcacggacctagtactttgcttacctttggtcttggacttggtcgcctatttgtcgaccatgtgtcgtaggcaacgctctaacctttttgtggataagctgaggtgaactctataggtggtggcggcgcgcttattgcccactgccggccatccccaggctgttgtggtgtttcgccctgcgcctgcctgggggcgcagtacttcttgatgaaagctcggttagtatgacttgatgaccttgctggaggtgacaggcacacc

SEQ ID NO: 18067 - DNA, 380 bp, Glycine max
  unsure at all n locations
agctttacagcagattttagtaatgacccactaacctagaattaaaataacttaatgccattaacctatggaattaaaacaaacttaatggctgagtgtaactgatattgtggcaaccaaaagtcacccccaacagccaacaagtcagccaccatttggtctcccaaaaggctgatgcctatgttgccaattgggcccttattacaacttgaactaaagcccttttagttgattaacccaaaacatatttttggccagccaactttacaaggattgggccattatttagacaaactaaacactctaanattgaaataaagtggtgtcatttagtcctcctccatttgggccatgatacaactcacaaccttggacttttc

SEQ ID NO: 18068 - DNA, 414 bp, Glycine max
actcaagcttcctctgcactaaaataagacattatcggccagcgagcgttttataaaagaaattgcgcagtgtcaactgaaaaatatcagtctggatacttcacgacagatgtcggctattgagttgtatattcaatcccttaatgaaatatgcatgatgtcggtaaggaaatgttcgatcgacgtcatgcggtgatgcttccttgttaacctggatcggccatctttcctggccgaagtcgacaggaatttttttcgatcaatatcggtgaaaaatatttttttgccgagatgggctaatgttttcctggcctaatcaatgcaaatatgccagtttctgccgaaacaaaactgcctgtgagctctcttaaaaaaacttagccgacctacattgtacattgtttatgcaacacc

SEQ ID NO: 18069 - DNA, 352 bp, Glycine max
  unsure at all n locations
acgtttgctttcttacattgagaaaccatgcatccagagtactgatagctactgaccttccgaatctattcaggaattgtttttgctgcatattattaaaggacatacatctcttctatttgcttcatgatcacgcccatttttcctcagcaatactctcgtaatgctgtgatatgaanttaagtgtctgtactacgattgaactttccatttgtcatcgttcacgatctctttcttaatatccaatgtcacgactgattatagagttcagaaatctcactctgttatatattctgaaatctgatgatagctaagaggtaatatcttatgggacaatcctttatttaatatt

SEQ ID NO: 18070 - DNA, 293 bp, Glycine max
gagaccaccggcatgactgactatatggtcaaagagaaccacaaatctgcgtaagaagaggaagatggctcacaaactactaaaggtcacagccatgaatcacctgtcacacgttctcctcctttatgcggcagccgcaaagattatgcttataagggcacaaactatcagcttgaagaagcagtatcacagatcgacttcgaacggtatagcaatatcctgcaagctagaggatctttgcttagctctcagcagaacaagatggaccctctcaactgttacttgaaagataa

SEQ ID NO: 18071 - DNA, 295 bp, Glycine max
  unsure at all n locations
cagctttcattcagaccggtggtggttcaaaatccccattataattaccaaccttaaaggggccagaactacttcattagaataatttgaagtccactaaattcaactaacaataccaataagtcccagtacaaaaccttttgatcaataaaaaactctaaactggttgattgaaaaataaagacagaattttattactaagcttgtgggcaaattggacccagggtttnactttttaatcttttttcgaactggtatgtttgaaagaaataccaaggggtctggttttctaagc

SEQ ID NO: 18072 - DNA, 404 bp, Glycine max
  unsure at all n locations
tagctttgtttatctttaatggcctaatgtttgacttaatagttttcagacattcccttcaagaccaacaaggttgggcttgtgagtctggaagacccaattctttttctcttcagtttttgttggatcggtacaaattgttaggctattggactttgcacaggaccaaaatacagggtgggtgtagactagattgtggtatacggacaaattacattttgaaaagtttattgtaaaatgtaatggaaagtacaagaaataatagtgagagtgaaggaaattttatccctaaactgtatctacatgatcatgcataagactgtatactgtatcgtccaaaaaattcgaaccaattaagttcaacccctctattcttaagtgaacttttgctttntatttattta

SEQ ID NO: 18073 - DNA, 374 bp, Glycine max
  unsure at all n locations
tgctttaatctaaacatgcatttagtgtttagaataaatatgttagcagatatagtaagttgttgcaactacggtatttttttttcctaatgcgataagcttgctattaaaaccaatcttgtgtatctatcaaaactcgtttgaactggagttggtttctccttttactgaggttaactagaataccatggtcgcgggtgtgaaaggaaaagtggtgctaaaaaatattcattgggattattattctataaattaataagactgtgtttggcaatgacatgacttgatttattcaatntatgatttataaatcagacaggaaaatggagcaatgaattacttatccagaatgttgaagcacctcaagtacaatg

SEQ ID NO: 18074 - DNA, 427 bp, Glycine max
  unsure at all n locations
ttgaaatgttagattctcagactcggattatggatgccacagctggagactgaatgttgatttgttatgtgtgcatatatagtcagttcttgatgtaaatttcattctttaggtatcatcttattggagattttaacattttatatgtacagtctagcaattttaacagcatatctcttgtagggctcatgttagactacaaagaagttaccctatctcactttagttntgctagcttctttctgatgttcaacactgggactttatgtccatattgatgttttgcttccttttggtatttgagagaagcaaaatttgatctaacttctatttaaccaaaagatataagcctctcatggaaaaactctctatgggtttgatgtactttgatcttaaacaagcgtccaacatatggttacctggttgg

SEQ ID NO: 18075 - DNA, 369 bp, Glycine max
tgcttctcttggaccttaggcaaatcctcaattcatccttcaagatcaaactgtctactcgtgattggtccctttcctctctccggagcttaagctcgttgttactgccccacagagcccctcggaatttgttccggccatgttcttccctacgggcccttttggtctcttgttctaaggccttggtggtggctatatttacgtctctcagttcggcattctcctttcggatcttaagagctgctgatttgaacttttctttgactatttgggctttctcgatttctgtcttgagggcctgcacctcttcgtcctcctccggaacttcaacttccacccactcagtggttctctaactcgggagccaat

SEQ ID NO: 18076 - DNA, 393 bp, Glycine max
tgcccaagcgagctaatgcttagctctgaaggaatgagctcacccaggcgagctggttgcttatgcatgaagccatttcatggccaatgcgagccaaatgctatcctgtgggagctagggtctataaaaatccaaaaaagacccttttgcccccttctttggtatctttttgttttcttgatcaaaacactaagtgattccttgcttcgtactggaactagcgccaaatatcataattcgactagcaagaatcaaaatatcatatcgaacgatattccccggacaaaattagggtctgacattttcccctctctacttatcttttattgaagatgaaaaggtgagtaaagataaagacactaatttcatttgagcaatcttgctatttgaaat

SEQ ID NO: 18077 - DNA, 369 bp, Glycine max
agcttctcaagaaggtgagcttagttattagaggggtgtgtgtagctaagctctagcttctcaaggaagttttctcaaagaagcttctcaaggaagttttctcaagaaagcttctcgaggaagctacctattctataaatagaagcatgtgtaacacttgttgtaactttgatgaatgaaagtcttatgagacacacttcaaagttctacttctctccctcttttattccttcaatttcgtgctccccccttctctctttcttttcctccattaaagcatcctcttgaagcttcttatccatggcacattcttggtggtgaagctccttcttccatggcttattccctagtggatggtgcctcccctct

SEQ ID NO: 18078 - DNA, 408 bp, Glycine max
  unsure at all n locations
tgtaagattatggggtacccatcacatgtggtactatgtggcggtcgggcgatggtgcacaacaagtttttccacatccacaaatcgcgcataaacccaccatcccctgttgcccacctacaactgagctgacgtactcccacgtagcccatatccgtgtttatctcaacaccgggtccccatcaatcctcccaagcttccccaacatccaattaattcaacatccaaatcatcacaaactaacaaaccaagcaaaacagggcaaaggcagaaaactctgcccaaaactcataccaaaatcacagctttttctcacttaaagaccccagtaacatttccttcgttccaattcgctaaccgtnggatcgacccgaaaatattactggaaatctctagtacataaggata

SEQ ID NO: 18079 - DNA, 370 bp, Glycine max
  unsure at all n locations
ttgcttcangctttgcatgttattgaaatgtcatatgaatttgaagaaaactttcatctcaacacacgacaacgtcaatgtcaatggataatagaatgacagcggaaatgaaaaaaaggtcaaactttctaaacgcatgagtgatattactattcttatgctgaatataaatgaaatcgctattgacaattgttaagatcccaacggataagtgctatctgagtccgacagtaatatctatgttttgtgcttctcataccctctctttaatttggagtatatgcatgcattcatttttctttattctgcatggtctatcattacctcataatatccatgtctttgaattagtaggccctgtgattcatgt

SEQ ID NO: 18080 - DNA, 410 bp, Glycine max
tgtggctcttcacgtctggaatatgaatgtagcatatagatccaaagacccttagatgctttgctgatggcttcttcccgttccaagcttcaattggagtcttgtcttttacagacttagttggacatctgctgagtatgtaaacatcagtgtatactgcttcagcccagaatgtgttatgtagtcccttcttcatgagcataaatctagccatctccataactgtgcgattctttctctcagacactccattttgttgaggagaatatgcgactgtaagatggcgctcaatgccttcatcctcacataatctatcgaactcgcgagaggtgtactctatgtcgcgacactgcttaatactttatcacctttcactttgattttaacaagggccttgaactgttagaata

SEQ ID NO: 18081 - DNA, 369 bp, Glycine max
  unsure at all n locations
agcttcattctacacctgaaaaagaggatgagctagctgcacaaaagagaaagcttcctgatcatgagggagctaacacaaattttcatgcaggtggaccttctttgagtagttctgacttgtagcagtctcctatccctcttccatttccacctagagcaattccaaacaaaaagatggaagaagtggaaaaggagatcttggagaccttcaggaaagtagaggtgaacatacctctgctagatgccatcaagcagattccaagatatgccaagtttctaaaggagctgtgcacccacaaaaggaagctcanaggcaatgaaaggattagcatgggcagaaatgtgtcagcattgataggtaaatcta

SEQ ID NO: 18082 - DNA, 347 bp, Glycine max
  unsure at all n locations
agtccttgatttagacatgattgatactngatttgtgacttgtacgattcaatctgggcaaaatcggatgagggaaagtgtgatttctaaaatctgcactttatgcagaattttgctgtcaaataggtgcagcacaattttggctctgtgcagaaagtgttgtgtatttgctggctgtggaaagagtagtacagattggtttctggacgctttctagcagatcccaacggtcataatgtagatttatgtgctagagacttccagtaaaattttcgagtcgatccaacggtttacgaattggaacgaacagaatattactggagtatttgagtgtgaaaagttgtgat

SEQ ID NO: 18083 - DNA, 371 bp, Glycine max
agcttcgtttatggcccaagctaacctccaaaaaattccctcgtgaaaagtatttagctttgaaaacacgagttacggtagcatcatgattggttgaaaattgctaaccttccctaacatggaaaagttagaaccataaagatgtcgaaaggaatatccttgctcatctttctgtttagacctcacctgatgtgacaaatactctcaactcatcaaattaatatctttgtttaccaagataaatcaagacccagagtcactcttatttcatcaattcttctagaatatatctctgtttcacacataaaatttgcattcgattggtacgtccaaatgaggtcacgaaggtaaagaattggtaagttcagatg

SEQ ID NO: 18084 - DNA, 433 bp, Glycine max
tgtgtaaaatgtaaagaatcactgaaggctggccaagtggaaagattattggcttgtccaaaatttatgatatattctgatcaggattatgaatctgactgagaatatcagtatcttagaaattaaggggaaattaattggattccctaatactgggtctcctattccttggctctatatagaccattaactttttgatcaagacattaacacgagatattttatatgcttttgtataatgcaagtgtaaccttagacactagacaaatgattttgacccatgaaaaaatatataatttttgttataggaccttgtgctaaatcctagatggacttatgtcacattgttccttaatttaatcataatgttgtattttctttttatttaaacagctctggcgtgtttgttagtgcttctgaggataaaacaggg

SEQ ID NO: 18085 - DNA, 358 bp, Glycine max
ttgtttagaggtgttgcacgaaatgaagaaatgttccagggattttgtactcaatccacccctcgggcaagtattagactagctcatgtttctatgatttgactcgagaaggacagacaaagagttgtgcctaatctgccaaaggaagattttaatgttttggtggacattgcactttcaaatccaattgaagtcgaaattttgtaccactgtagagttatcttattagttttgcaaccaagcataatctgaatgagtggtataaataccatttttattgccatcccaagcaaatgagtcatgaacatcatgatgaagaatagggtgatgagagataaaactttctatgacttcatca

SEQ ID NO: 18086 - DNA, 320 bp, Glycine max
ctcagcttcaaaatactctggaagagcgccaatttcaaaatttcaaaattgctattagcaccccccccatttttgatcagttcaccccccttctttcgtaatttatggaaaagttacgaaagtctataggacttgattttcttcttttatctcttctgtctcacccatattaagtgaaatatgcttatttacggttatggaaattttacagaagcattacgggtgtcccagaagcctcggaagcccattttttaacaaaacgggggatgtggtggccagcttcctccccattgcgtccttctgagattcactattctacc

SEQ ID NO: 18087 - DNA, 380 bp, Glycine max
tagcttataacttacaagccttcaactaacttatccgttagttttatcaaacataaccatactgaagtttcattagtttttttatttcatatatttactagcaacattctaaactctagtttccacaacttacttgtttagcttctaaaaattagtttttaaacatatttacataattctaaaaaaacaaattatgaaaatataaccttttacttatagagtataatttcaaaaattttaaatttagtcatgtatacaagagcatctttagaagaaagttttttttttcttttataaaaaaaggtcaaagctgtatttaaaaaaaaattcaaaaaaaaaaactcacatatatacgtcatcattgatcgaagccttactat

SEQ ID NO: 18088 - DNA, 411 bp, Glycine max
tctagattcatcctaactaaccctaacagaagctaaacaactaactgaagggtatcttagccttctaaccccttgatcatgctcacggctcactcgataagcttcacacgttccattctgcatggcttctgtcgtaaccttctggatacgctggggtggacctttcccttcgtggtctcgcactccttgcttcctgcacctcctttgctattgacaccccttcccttacatttcccgtaacagaatccaaaatattaacatgcttggatactcatggaaaacccgttaaacgggaaaaaaaatataattttctagacatgaacgtacaagtgtaaagagtgttacttttgaaaaaaacgttgttacactgaacaaaacattttttcaaacacgcgttaagacattaggtct

SEQ ID NO: 18089 - DNA, 382 bp, Glycine max
agcttaaacattcaacttcgagcgtctcgatatattacgagtctcaaacagacatccgagtaaaaagttattcgtttgaatttgctcagagcttcaacgttcaattttgagcgtctcgttatattacgggactcaatcagacatccgagtaaaaagttattgtcttttggattggctcagagattcaacattcaatttcgagcgtctcgatatatcacgggactcaatcagacatccgagtaaaatgatattgtcccctgaattggctcagagcttcaacattcaatttcgagcatctcgatatatgacgggactcaatcagacatccgtgtaaaaagttattgtgcgttggattggctcagagcttcaacattcaatttcc

SEQ ID NO: 18090 - DNA, 432 bp, Glycine max
tctatatcagctgaaccattttatcaataaacacatgttgcgttttattcagaaaattagaggttatctcttttatcttagtgagagtgattctcctaaattcttgagtgattcatgaacaccttggctgtatcacaggactttcacaacctttgtgtgttgtcctcgctggaaagagcgatccttccctttctttcatcatcacccttgttctttcaaaccacaattccagaaaatccacctctgcccaaaattatctcgtggccataactcccattttacgcactcaaattaagtgattcttgatcctacattgaatttcacaacgagacctttcacctcgttatggaatcacctcatttggagccatgtagcttcagctatcgccatttctatatttctgtccagccaccacttaacctacgtcttacc

SEQ ID NO: 18091 - DNA, 365 bp, Glycine max
agcttgaagatctgtctgaaatagcacacagtggtcaatgtctcagcatctctgttatacaattgtggattctataagtcaatttacactattgtttattacctaacttattattttaaattcatacataatttactttatgttaacaacaataggcatatgactgagacaagtatgcgagcggggaataccaatgtgtatggattcctcgagccacaatccatccagagatctggccaatcacaatttgaattaaaaagttacattaagaactgaatgcagaattcaaaacgggatgtgtaccaaggagcctacctgaatgggtaagttaaactaaacaaatgaattaaataatgtataatgct

SEQ ID NO: 18092 - DNA, 366 bp, Glycine max
gtggtaaagcattgattctatactgcttctctcatcatgtggatcatgatgtccacaatttaatgatcctttgctaccctgcagtgagacacacacagatacacatacacacacacgtggagacaatgacacgcagacacaagcactgacacacattcacacttggagatgcacattgacactcacacagagtcacgctcacatatagacgtagactatgacacaaacacactgagccatagacgcacacggagacccacacacaaagacacacacactgagtcataaacacacacatacagagtcacgctcgcacacatggacagacactcacacacataaagagacaaacgcgacacacgcaca

SEQ ID NO: 18093 - DNA, 268 bp, Glycine max
ttctttgaacattcgaaccctaatggttgttgcgatgaaaaagggtgtaattgaaaacataacaaaaaacaaacggtcaaactcaaattggttttggggggcttcccttacatggaaaagttataaccataaaaacgtctataggaatatccttgctcatcttttctgttaaacctcacctgatgtgaccaatactctcaactaatcaaattaatatctttgtttaccaaaatatatcattacccagattcacctcttatttcatgaa

SEQ ID NO: 18094 - DNA, 423 bp, Glycine max
tgcgctgatgattcggagtgttagggttaatgtgttgaaaggaagtttagtgcagaaattaataatctgaagagattgagagatcttgaggaagtaggatgatgttgactctatagtgaaattcaagatgcttaaggattagctagtggagcttctggtaaaagatgacatttattgaatgcaaagagcgaacattgagtggctacaagaaggagattctaactccaaattctttcattacatggccttctcttgtagaaagagcaacaatatttcttagcttcacaatgattctggaatgttattaacgactcaacacgatcttaatcaagtagcaaagaattattttgggaaccttttcaattcatattcagattctcttgatgaggtgctagaagttattcatccaagtgtttcagatat

SEQ ID NO: 18095 - DNA, 117 bp, Glycine max
  unsure at all n locations
ttcattctatgtaccccgggtggtccacattnttgttcatgtatttttattcttggtttcatttactttntatacccccttttgatgtgcttaagccatttatttaagtcatttctc

SEQ ID NO: 18096 - DNA, 422 bp, Glycine max
tcttggggttggctggctattatagaaaattcattgagtgattttctaaattggcactgcctctaactaagttgactcgtaagaatgagaaatttgtctggaatgagaagtgtgatcaaagtttccaagagttgaagaggcggttgacaacagctccagtgttagttttgcccgaccctaagagaccatttgaagtgtattgcgatgcaagcgggcaaggcttggggtgtgtgttaatgcaagagggaagagtagtggcgtatgcttcacgccaattgcgtcctcatgaagttaactatccgacccatgacttggaactagcagcggtggtgtttgctttaaagatttggaggcattatttatacggtactcgttttgaagttttcagtgatcacaagagtctcatatacttgttcgatcag

SEQ ID NO: 18097 - DNA, 372 bp, Glycine max
agcttgcttcttcagaaattcgtaggccgcttttttgtttttccttgaataaacgttcatggtgatttcgcgcgtttttcttccttggaaaatgcaccgtgagcctcgcgccgacctcctgttgaagggtaggttgcgacaaggtgtacacacattaacagaaagaataactagaagcagataatgtcaaatcacagcagaaataacaaaataagccaaaagcaataatgtcaaatcataatggaaataacaaaataagccaaaagcaataaagtcgacagaagacaaatcagaagtttagtgatccggccgtatagccctatctcctcacaggaggaagtctatcaggtcagccatgtccctgcgggccct

SEQ ID NO: 18098 - DNA, 423 bp, Glycine max
tgtctcagcgtttatgcgagacggagaccaacatgctagctatcatcgctaagtaccaagaagagttatgtctagccgcggcccacgagcataggattgcggacgaatatgcccaagtatacacagaaaaagaggctagaggaagggtgatcgactctttacaccaagaggcaaccatgtggatggatcggtttgctcttaccttgaacgggagtcaagaactttcccgattgttagccaaggccaaggcgatggcagacacctactccgcccccgaagagattcatgggcttctcggctattgtcagcatatgatagacttaatggcccacataattagaaatcgttaggaaacttgtatggtctctaagaccttgactagatacgactttctttttgaaataaaatgagttggtcccatgt

SEQ ID NO: 18099 - DNA, 370 bp, Glycine max
agcttgtgtggggctagtgaactttggagaatttttatctgaaggaatctaaatcatggtggcttgcttggcctcctcttctcccctcatgtcaacttaattagattcttgggggagacaatcacattaaataatgtcctttcggttggctcaattttaaaactttgattctaaccatggtatcatgtagcccatctcacatgatacgataagattttattgatgttggtgatggttgactcaatttatttgtttctcttttcaaatataatgacaattgatactacccatggttatcaaacttttggttaactcgctaactcttacgattttatgagttcacttattttctgtgagttgattcgtgtgt

SEQ ID NO: 18100 - DNA, 407 bp, Glycine max
tgttgaggccattattcttgaagcttctaaactttatacaagaatgaagctctgataccacttgtttgacaagtggccttagaaatcttaagaatggggggttgaattaagattatgcttactattcccccaattaaaacctactcagatttttatgcaagttctgagttccctttataataaatgacttagatgatgaatcaaatgagcaaactgaaatgagactaataaacaacagctaatataagagataaggggaagagagaatgcacaaccagatttatactggttcggccacacccttctgcctacttccagtctccaagcaacccgcttgagagtatcactatctttgtaaattctttactagtattgtaccacacaacgactttctgatgaaaatcctg

SEQ ID NO: 18101 - DNA, 372 bp, Glycine max
  unsure at all n locations
tgcttcgacactatgatacattgtgcctcctcgttattgaatggagcagcttcaaaattgataatcgacaagaaagttctcagaaattttgctctaccaacaacatcaaagttgtccaagactgaagaattgaatttcgtaaatgacaaatgacgagtcttggtcttgatctttgtttctttcccaagttcttctgatctaaagtaaaaatctccaccgagtgatgtggctagatcatgcatgaggtcatgcatcacaaaacatttgccataaggccaactacttctacttgtgtttgaacgttgganaaatgatctcgaaaccaaatcatcataatactcatgaccaacctcttctaaagtcctacctttg

SEQ ID NO: 18102 - DNA, 385 bp, Glycine max
taataaatgtatatattgtttagaacaagcttcccgtcagaggtaccttaagtttcatgggataatttcttcatttggttttgatgaaaaccccatggatcaatgcatataccacaaggttagtgggagtaaaatatgctttcttgttttatatgtagatgatattttactagcagccaatgatcggggttcgctacatgaggtgaaacaatttctctctaagaattttgacatgaaggatatgggtgatgcatcttatgtcatcggcatttacattcatagagatagatctcgaggtattttatgtgtatcacacgaaacctatattgacaaaattctagaagagatatcggatgaaagattgtcaccaactgttgcccccatt

SEQ ID NO: 18103 - DNA, 387 bp, Glycine max
gtagagctgacctgcaggcatgcttatctccgtaatttgataaatatagtcgcgtagggggattagaggtcagttaacttactctatgcacctgactaagttcaacattggtgtttggatgactttctgcgaaaatcgacctcgtcttgcttaccatgaagggaggggggaaccaaaattggtcatcaatcgctgaaacttatacggggatcgtgggatagttaaaggttcaacagcaaattgcgtggaccgcagacttacaatgaattctatggaccgatggaggtgcacaacctgtatcataagatagtgatcgtctgtcttgacaatgtatgcccccttgtgacgagcttatgccattgattcaaagaattaatcgctataacc

SEQ ID NO: 18104 - DNA, 351 bp, Glycine max
tctaaatgtttcaagcattggacgattcttatgaagaattaaatacgatagatcgtgaagtgtcttatgatagacaatgacttggaattctattctacgaaattcaatgaattctatcaagattaaggcatcacaagatagagtaacttacgctatactttgtctcaaactggagtaactgatagaataaactagaccctattggaaagggcgcaatacattctatccaatgtaggagttgaataggagtgtctgggctgaaacattcaacgcaacatactatctcaagaatcattcaccatgcactatcataaattttagaactcgtagtgaagaatggtctaacaaact

SEQ ID NO: 18105 - DNA, 367 bp, Glycine max
tgcttttatgaccactatgtatttgtgtttacgattgctaagacaactttatattttggtattatttgagttctagaagcttttattctttgctttgcggaactgatatctatgacccttcatttttattaatttcttgagcaaagtaatgcttagcctagctaggtatatactttaactaatgtttggttttcttttatatgacagccacaaaatgttccaagaataggccattattgtgttataatcaaagcgtattggcctaaatgattatattgtatataggtggcaaccaaaacaaatggtattttaaaaaaatatcactttctaagtcgattctattggtaaccgtcttagaatgtaggcc

SEQ ID NO: 18106 - DNA, 396 bp, Glycine max
ttagaccagagcaacacataatctatgtatccataacccctcaatgtaatggattgtcaaggggtgagaagtgaaattgataatggggtagagttggagcaaagtctcacctcacacaagtctataacatcaatttaaacttgttcaaactggatttacacctaaaattccaccaaaccaaaattagactcctcaacacccaattttaccgtagaaatggctctttgttcactttgatcattagtttttctctctagcacatgccaaactttctcataagtgctaaatgacattctaagctatgattaactcactttaacctccaaataccactaaatccatatttggtcttccaactctcaaaacctaactctctttgcactcataacaccatat

SEQ ID NO: 18107 - DNA, 377 bp, Glycine max
  unsure at all n locations
tgctttggaacgtgacaaactttagttaaggttttaacaacaccatcatgcatattgatttgtacagaacctataccaacatacttacgaggagtattgttacccataaggacattaccaccaaacttctcctcatatgtcacaagccaatttttgtgtagacacatatgataaaaacaacctaagtccaatacccattgttcaaaatgttgtagttgttcaccaatgaccataaccaaatcccttttcgataaagagtcattctgaacaagggcagcaatataatagttctttactttctttggacaatctcgctcccaatgacccggttnntttgcagtaattgcagatgtccttatgatcaatttatctcttct

SEQ ID NO: 18108 - DNA, 415 bp, Glycine max
agtcaaaatccatggcaaacacgtccccagtccattgcgtgttaaacccaacgttcacccttggtgagcctttcttttgctaagttcgatctccataggaactcaagttacgcaaggtccacccttgacaatctttcttattcctaactcttattcgtgcaagaacgcaagaacatcaaaaacccaaggtccacccatggtacgcactcctatgaaacccaaggtccacccttggtaagtactcgttcaaacccaaggtaccctccttggttcgctcactccttaagaaccatgttgaccataacaaaaggtctagtgtccttaacgctaagcacactaccaccagactggatggcgagaccttcaaccaggtggaagtgatcctaactccttataaccatcatgggaaaagctc

SEQ ID NO: 18109 - DNA, 349 bp, Glycine max
ttctttaatataataattgcattaatagaattaatatatatatatatatatatatatatatatacacacacatttttttctttatttactaatataacaaattgcacaatttattaaaatttaagaataattatttgtaagagacagaaaggaacaatttacaattgattaaaatttaaaatttaacgcgtcggagtcaatagcaatcagaacaccactctaaattttaacaaaataagtcgtgccttttctttacgggtcaaaataaatcaagtctatatacaattttctataaatataattgacatatagccaatcaatagtagtaattatgacaaacaagaataat

SEQ ID NO: 18110 - DNA, 412 bp, Glycine max
tctctcagcaactttgactgcaaaacttcacaggtgctttatggcttctttgcaagtgacaagacaagctttggcatctgagtctcagagaacaccaccctcagtgcaaaatgcaacaacctccacaaccacaccaattagcaacaacttcagtgtgaagagtgagcaaactcatgcagtgttgccacataagagaccagaggaggagcaagagtcagaggcaaataggggtgtgaaaagggttaaggctgtggaaaatgttcctctgcaattcaagcctcttgaggaagatcacatagagcaaatgattgaggagcttcttgattatggatctattgaactctgctctgtcatttcaccccaggccctctaattgaatgtgcatgtttttgagctgaatttaaagtcacaa

SEQ ID NO: 18111 - DNA, 320 bp, Glycine max
ttctatattgtgaatcaaaggtgttttgatgatgacaatgatgataaccaaagatgatgacgaaggtgatgacaaaaagctcaaagatcaatcaaatatcaactcatgtgaatcaaagatcaatcaaagcacaactcaagtgaatgcagaacaattcacgagttcaagataagaattaagaggaattcatgacacaacaagaaagtttagagtctataatccagaatcaacgtttaagatctcacgaatcaagagaacacttaatcacaaaagtatgaaattcttttctcaaaacatgtaaccaaagagttttactctct

SEQ ID NO: 18112 - DNA, 419 bp, Glycine max
  unsure at all n locations
tgtctcanaatccttctctaagttacgaagccattccataatttaaatagtgcatcatccatgattttgttagcattgaatatgtcgttagtcaagataatgttgttccgctgctgccaaatagaccatgtcaacgctagccaccaacacttccacctgttgacctttacagcctcagccaccccaaatatatgttgaaggaaatgatgttttgggttttgcgggagaggacccacgcaattcacccaagacatcgattcccaccacagcggactgattttgctgcaatgaaaaaacgcatgacctgtattctcctccagattactgcaaaacacgcaactcgtatcatttaattccacctgtcgtctgtgaaggtttgcccttgtaagtagtcgatctctaagtaacctccatgcgaa

SEQ ID NO: 18113 - DNA, 333 bp, Glycine max
tatctttattcaaacagaatagtccaaagatgtcaaagaattgggtgttgaaaaagcataacaagactttctgtgattggtttaaagatacaatctttgtagatgaaaatgcttcaaaaacattaagaaagctagcaaatgggcctcaaagaaatgttataacttggcaaggatacatcataaacaagtattcattttacacaaaagcacaagacgacaaaagtacaatgcagaacagtggggtcacccttaaagctgaatctcaacacttcgcaagtgtgcatgacaccaatccctgtgtagcttccatcccttactttgggttcattgatt

SEQ ID NO: 18114 - DNA, 385 bp, Glycine max
ctgcagatatggccttcgccagtgaaaggatcattttgttttccaaaagaggcaaatttgatcatcctactatgacgactgacaaaactggggcaaataaagagggtgaggatgaacgagaaacccatgctgtgattgccattcctgtacggccaagtttcccaccaaacccaacattgtcattactcattcaatatcaaacctcctccttacccaccacccagttatccacaaatgccattcctaaatcaaccacaaagcctgtctatcccacttccaatgacgaacaccacctttagcacataccaaaaacaccaaccaataagtgaattttgcagcgagaaatctctgataattcaccccaatcccagtatcctatgctgac

SEQ ID NO: 18115 - DNA, 168 bp, Glycine max
  unsure at all n locations
ttctccttacgcatctgtgcggtatttcacaccgcatatggtgcactctcagtacaatctgctctgatgccgcatagttaagccagccccgacacccgccaacacccgctgacgcgaaccccttgcggncgcatngaatataactncntataaatgatcgcttacgag

SEQ ID NO: 18116 - DNA, 292 bp, Glycine max
  unsure at all n locations
tttttcttgtgaaagtccttctgattctatttatgcatttctgacttgatgacatgagatgaacataacagattggacctctcgctcgatgagattagtgaacaccttagacattaatactcgactgatacttatattgtgagactgtggtttaagctactctccttgatatttgtcttatgcctaactatatccattggtacaaatgacgttntactcttctctttgaataactgcgtgctctgtgaaagacagatgatgaaggcactttgcttcattcttttatcatgca

SEQ ID NO: 18117 - DNA, 412 bp, Glycine max
  unsure at all n locations
tctccctcttttccctataaatagggggagtagtgtattgaacaaaaacgttcaaccctcttggtatctgaggatcacttaaaattagtgagaaaaattgtttccgtgaagaaaatccaagccgaggcgcttccgtaacgcttccgatacatttccgtgggtgatttcgcgaagattttccaccgttcttcgtttgttcttcgtcgttcttcggtcttcaactagtaagttcccgaaatcaaactttncaattcattctctgtacccttggtggtccccactttttttccgtacttttattttcatttcatttactttttgtacccccttttgacttgctttagtcatttatttaagtcattctctcgcctantcaaaaataaaataatattccactgatcattcatattgt

SEQ ID NO: 18118 - DNA, 441 bp, Glycine max
  unsure at all n locations
aggcgtgggttcaggcgtcatgcntngcanngccnaancnagctcggacccgggatcctatacatctacctgcatgcattctttcttgtctttgagagnngaantgagccgtactgtgactttagatatcagacaatccaatcaagaaagagaaatccaaaagtgaaacatccgatagatcgttccgctttattttactaaaagagatcttttaaggatagcatgaatggatcctctccagttgccaacgtggttacagtactacggaacggactgatatcattctagcctccactaatggatataacaaacaaacatcccgggacattacggtatcctttgtcacgacatatacgacttatgtaatgacagagcacgtcaccaggcggcgaaaaggtatgaccccaagtatagtacaagaacgtcgggtacccgcgtgcg

SEQ ID NO: 18119 - DNA, 318 bp, Glycine max
taatcttttgctgaggggttttattattctagatatcataaccttctatgaagaagatggcaaatctatagagggaaaccaaaataagtacctgttagtcatcatctacaactaactttggtataaaaaagttttataaaatgtttatcgtttccccaatttatggttctttttgtaggttgggacatagttttaggtttagtttaattttgttcagtagaaatacccaacattgtgaatttaatgtgtctaactttaatttccggtaaaaaggatgaaatttgggaagctagcagctggtgtctcgctaagcgaggc

SEQ ID NO: 18120 - DNA, 407 bp, Glycine max
tcatgatgaatcaaaggtgattcaaaggtgttcttatgataacaatagtgaccacaaatgtgatgaacaaaaagctcaaagatcaatcagagaacaactcatgtgaatcaaagaatatctcaagtgaatcaagaacaagtcaagagttcaagataagaatcaagaagaattcatgaactccagaagaaagtctagagacaagaatcacgattcaaggttcaagatctcaagaatcaagatcaagattcaagaatgaagagaagactcaatcaagataagttttaaaaagtttttcaaaactttgaatagcacatgagtttttgacaaaccttctaccagagagtttttactctctagtaatcgattaccaactagtaaatgagtttgaaaaatgtttcatactgaat

SEQ ID NO: 18121 - DNA, 308 bp, Glycine max
tctttcttgtgttatcttatcatcctgcaacaaaaaagaaaatatcgttcaataatatataataatttattatccaagatacaggtttggacttcaacaaccctagttcctatacatatacaatagctaccatcctatctagttttggactgcagttacttcatggctcacaagtcaatcaactgcttgagatagctagcttcgcaaaacttgcaagtcaacatttttaacaaaatgttaatcaaataaattctcactaggtaaaccactgtactggtaataaatcacatagatagatatcccatacc

SEQ ID NO: 18122 - DNA, 413 bp, Glycine max
ttggaaaatggtttctatacaaaagttatttttttattgtgactaacacgctcccccaaatttacaattttgcttttcctcaagcaaagaaagaacaattcacttgtcctcaagtgacaaagacagtggctaatcaaaagaaaatggtgtttgattcattaaggacatcaaccatatgaactgaataccatggaatgcttaaatcaattacttctcacaagcatgcagttttttcaaagataagagcacaagtattagattcatagctgaaataagctagtaagcatgacagaaatcatggaaggatcatcaaccaaaatctcacagtcattgtttcactcaaactcaagtgtttaggcttattccatcataaacaaccaacacaagttccaacctttgcatgtcatctccta

SEQ ID NO: 18123 - DNA, 453 bp, Glycine max
  unsure at all n locations
cgacgttnnnctcgattgatgcnctgacnaancaaggcaattaagcgcgatcccgggagtctaccggcgaccggattgttgcattctgagcgtgacctaccgagggtggtgtaacaacggtgatcactatacccggcgtgaaattgacagactttgaccatggcggacatgctacaaaccggactcataacacgtactgcacgtggagcctaccaatggagctatgggactgtagcgacaatgctcccactgcctattgtacaattgtgagacgttggttgccacgtggacatatggacgggccaacgtaacataagccgagtgccatatgttctttgaaaagcgatcaatacaatgtggtatggctggaactcaaagacgaaaatattggtaatatagaacgaatgtgcccctagccaggagtgtaaggccgcctagaattgcccatgaacg

SEQ ID NO: 18124 - DNA, 399 bp, Glycine max
tattgttttcgtgtgtaaagcgcactctgctcactatatcagcacttgcaactgcaaaattaacatgttgcatactgccatacaaagtgcagcataagccatcccatattgattgcagagatcaggctctccaaaagggttgcctttctgcttacatatagctggaataatgatcatcgacaggtttcctaaatttcctgttcatatcaatctaaaaaatcagatcaaccataaaatgcatcaatcaactaatgatgcaaaagttcgatgctctaataaaaacaatgatgcatagcagaattttgcaagatgtattcttagtctaagtggaacttttgtgggtataacaagtctaacagttggatggattttaatcaaatgaatcatgaatggatcata

SEQ ID NO: 18125 - DNA, 335 bp, Glycine max
tgcatgctttcttgttcaccaatcacactggcaggttcaatctggttattaacataaagctatatccaacttttagtaattggagaataagatcacacattaattattaattgcaattgaaataatatcttacatatgccatgcatgaggacattctgtatatggatgtgccaaatgttcgaggaaatctttggaacaacatattctacgattagacaatgagggttttgtgtcagcaattccataatggatacaaacagcagctcatgtacaacgaagagaataaaatcagaattccttccaacttacttctggcacaaagatccccctcctaa

SEQ ID NO: 18126 - DNA, 341 bp, Glycine max
caaacatcatagtgcgatacaaatgtatattcatatgttacagagaagaaaacatctgggggaaacaatacaataagaaagaatactaaagaataacggagaaaaacagtcaaattactaggttctcttctaaagagattacagcagtcagattcagtaatcacagtatacgaatgaaatagcacccctccccccagctgctttaattagcactttatgctgtaaatcgaccgcactgatagcttggcatggcatccataaggggcatccatgcgatacacagctgtcaactcttctgaccctcataaaccaacactaggaaatgtaagtgaggcccatag

SEQ ID NO: 18127 - DNA, 375 bp, Glycine max
  unsure at all n locations
ttcttataagaacaaaattgcctaaatcatttccaaatatgcatgtgaattaagaagcatcaacaagaatcaagccaaggctattgtgcaagcaatcaatggggcaaaacacaccaaaagattatgatgatggatggctcanattctcacaaaggtaaacttatcactttcaaattgagctttcaaaactatcatgacatgtagaggaaaaacaaggatttcaaatcccaaaatgtcaagagacttttattttcagaacaattacccattacttgaacttatcctataattcaaagaaaaacatgcaaatttaacacaacaaaactaacaaaattaaactagaacccaacaaaactaacanaattaaactaattt

SEQ ID NO: 18128 - DNA, 413 bp, Glycine max
  unsure at all n locations
taatgaccctcaatctttcaatgattatagacctatctttcttatagggtgtgtctataaaattgtggcaaaagttttggccaagaggctggccattgtattacctcatcttatagatgaaaggcagacggcttttatgaaggggagacacatccttcatggtgttttgattgccaacgaggctttagctgaggccaagtctagaaataaaccttgcatggtcttcaaagcggattttgaaaaggcatacgattcggtttattggggatttcttgactacatgctcatgaggatgggattctgtgaaaggtggaggaaatggataaatggttgtctatccactgcaaccatatccattntagttaatggaagcccatctaaggaatttgctcctaagagaggtctaaggcaag

SEQ ID NO: 18129 - DNA, 324 bp, Glycine max
tgcttcttatccaaggctcatcttggtggtgaagctccttcttccatggcttattccctagtggatgacgcctcctgtcacctcttctcctttgtcttccgctgcatctccatggtggataatcaccattaaaggacctcattgaaactcaaagatccagcctccatagaagccccacaagcaagcttccatcaaagtgtatgaattttaaaatccaatcctacagtttcttgaattaattaaattcgttattattgtttctgtacatttatgtatttctgacacactaaattcgattatatttggtatctcattcctttagtt

SEQ ID NO: 18130 - DNA, 416 bp, Glycine max
tgttgccattagaagagaatgagcatgtgattggtattatgactggaattgttagtcagtttgccagattgattgtgaaggaatgcattgaccgtatcccggtgagagtgtgatccttaaattttgagagaaatgactatcatttaatactgatttttgcatgaatctttgaagtatggactgaatgcatgaaattgaggatgatgaaggccatgtttgattgggatagccacttagccacgtgtttgaatgatttatcctttgcacctaatttgagctgaatgaattattgattgattgaaccctgagtctatagagtgttatctcttgctaccttgacttaagttgtaggagagcatcatccacagaaagtgtggttcaaagcaaatttgtcccaaattttgcggagtaattat

SEQ ID NO: 18131 - DNA, 354 bp, Glycine max
  unsure at all n locations
ttctttgatgtatgagaagatgagtggagggagagggagagaaggggcacaaaatttatgcatcaaataaggtctaaactttgaagtgtgatttcttaaatgatcaaagttgaaaaaatgcacacacaaaagctttatttatagcctaaatgtcacacaaaattggagggaaatttgaatttctattcaaaattcacttgaatntgaatttgtggagccaaaattttgctaattatgattagtgaatttcagctatggttcagcccactaatccaagatcaagtctaatattctccactaagtgtgcttagatgtcacgagacatgtaaagcatgaaggacatgcacaaagtgt

SEQ ID NO: 18132 - DNA, 415 bp, Glycine max
  unsure at all n locations
tgtaagattatggggtacccatcacatgtggtactaggtgtcggtcgggcgatggtgcacaacaagttttccacatccacaaagcgtgcttaaacccaccatcccctgttgcccacctccaactgagctcacgtactcccacgtagcccataccctcgtttctctcaacactgggtccccatcaatcctgccaagcttccccaacatcaaagtaatacaacattcaaacagcacaagctatcacagccaagcaaaacagggcaaaggcagaaaactctacccaaaacaccaaccaaaacacagctttcctcacttaaagaccccagtaacaattccttcgttccggttcattaaccgttggatcgactcgaaaattntactggaagtctctagtacataagcctacatttggacc

SEQ ID NO: 18133 - DNA, 361 bp, Glycine max
  unsure at all n locations
ttcttgtatttaccactaaacctttaatctcaggtgcaagctttccaaatttcttaaccttgctcccatgaaaggcccactttaactcagcatgttccttgcaataattataaataagtatgtaaaggtaattgaccaataaaatttaagtacaatataattacaaatacaactacctctcctgcccacacttttgttgtcacatgatccacatatatgaagtaaacattgatgtatcttgaggcccacctggaaaactctgtgaatcatcacatacatcactcgtaactggatcataanggctctcatgaggctcgtcaacaacatgattcatattctcaatatcctctgcaacagctgc

SEQ ID NO: 18134 - DNA, 417 bp, Glycine max
tccatcaagtggtatcagagcacaagagcttcatttatgtgcttcttaaacctccattaattttttgctttaccttttcttccattgttgtttcttcattattttctccatgtatctcctcacatgtcttgtgctaaatgttgttaacatgattctttaaagtttccaccgattaaacttgctataaaagctagatttgattttctatggttcaaatttcttgttcttgttcttgaaccatgaattgtgttgagtttaggttcctttgagttttgtcttgttattttttgtggctgaaacctaaaacataaaattcttacaaaattattaaagtagaagaaaacctcaagaatctagagtgacttgttcacctattgtacgtttgtcatagaagtcatgtctagtcatgaaacttgt

SEQ ID NO: 18135 - DNA, 375 bp, Glycine max
  unsure at all n locations
tctttctttataaattcatcactcttaatattctgtacacaaaaacttaaatgatgttaatttaacaattattttctcagatgaaaaattagaagagaataattacaaattcctctataatttaacccccaggatatattcatgattagcagctatcaaactcccgccaatttaaatctttgtgtgtcctcaagcaaaacgaaaaagtgtagagtttaccaatcacaattcatgagatgactacatacanttccaaaagcttcattggtcaattctcaagtttacaattgtcataagttcatgaaaggagtagaacaagatgtacttcanatgaaatggttagcaagaatgacaaatcactatgaataatcacca

SEQ ID NO: 18136 - DNA, 409 bp, Glycine max
tgacctcatttattcttcataggattcgacagattctaagagaatgcctctacaaaatagattttagacacggagtattaaatgaagtcttaaatgtcatatcaaatcatgattccatcttgctatcatttgaaacatcagatgcagacttcacgaaacatgttctgatagcatataagacataacttttaacctttgtatttgtttacatttaatcaaaataatcaagggtcctggttcatcttttgacttaacaatctctccccccccccccctcttttttttatgtcaaacaaacacaaatttaaaagttgaaggcaaatttataagatttcacattaaagtgttagtcagtcttatcagatgcagaaagtatatatcataaatagatcataatacatcataagat

SEQ ID NO: 18137 - DNA, 362 bp, Glycine max
  unsure at all n locations
atcttgaangtgtgtaacccaccattttccatagtaaaatactggtaatgtgtctactatcattgtcatcattttttcgtcaatgaggtgccacttgagctgccaagttctccacctttgggcgtattctttgaaagatccgtgccccctttttgcacatgttttgtagttgcatcctatccaaagccattatactgacgcagcctaacaaaggcaaccattangtccttccaagaatggactcgggaaggttccaagttagtgtaccaggtaacagctaccccagtaagactttctttggaaggaatgntataaaaattcctcatcttttgcgtatgcccncatcntccgacaatacatct

SEQ ID NO: 18138 - DNA, 413 bp, Glycine max
ttgatgatatggtcttcaccgacgaaaggatcaatgtgggtctaaaaagaggcaaatctgatcatcatgctttgataaatgccaaaaaaaaactagggcaaatgaagagggtgagaatgagggagaagcccatgctgtgactgccattcctatacagccaagtttcccaccaacccaacaatgtcattactcagccaataaaaaaccttctccttacccaccgcccagttatcaacaaaggatatccctaaatcaaccacaaagtctgtctaccgcacttccaatgacgaacaccacctttagcacaaaccaaaaacaccaaccaagaaatgaattttgcagcgagaaagcctgtagaattcaccccaattccagtgtcctatgctgacttgctcccatatctacttgataat

SEQ ID NO: 18139 - DNA, 487 bp, Glycine max
  unsure at all n locations
cagaccacacacaaaagcacggggaaaaggaagacaaacaacaccancaccgaaagggantggacccctgcaacacaanccnnaaggaacnngaccaagngacagagagaacccaaagagacaccgcacgagtttgccataccaggaacaggaacaccaagggaggagggaacaaagaaccccaacgcgacccccaagggagaacacaccaccacggagaagacacgcacaaacaaaggagaacacgagacacgaagccccacccaacaaggaaaaagccacggaacaaagaaccgccaccccaacacgagccacggaaaagaagcaagcgacgacgccccaacggaggaaaagacaagagggagacaaagagagaggggggagccaccacaccgaaagaacaaacgacggagagaagcgcaacacagaaacatgccgcacaagaacccccgcaacaaagaaccacacaagaacacaagccacgacg

SEQ ID NO: 18140 - DNA, 430 bp, Glycine max
gacctataaaactcagcttccaggatggccccctgcattcagaacttaacttctaccagggatgcagagacgggaagcaaactcttgaggatcaatcctcatcctcgtaaatctggaataggtaggcagtgtctcaccctcctctaaaactattggggtttcaaagaaggtatttaggctgtcagcatcaatcttgattaagtgtcctgatgcaatcctaccccgcaagggcattggatagaaaactccaagtagattgggccaaagatgcaagagaaggccctagggttcttatgagccttagggtagatttcgggcccatgggctaagtatgagcccacttatctttgtaaatattaaattaaggtttcattatttttgggccttgcatttacggctccataatgtaagtagggtaccctagaaatat

SEQ ID NO: 18141 - DNA, 361 bp, Glycine max
  unsure at all n locations
tttcttggttgagtaaggccattagaaggatcttcagttggcatcgtatcaacatttcctctagtgccatcttctatttcaaacctggtactagaagatgattccaaatctcttgtttccacatgagcagtaaagccttgccaatctaaattcttgcaaatggttccttgtgaacaaatctaatcacctgatatctcaagtccgttgcttacccagctattaagttcanattgttgagaatgtacagtggggactacttgtcagcagctagctcccaatttctacatagtattaacatcaataataatattctatgacgctccaaccacgtcggtctcaataagctgtcgttgaacaaaac

SEQ ID NO: 18142 - DNA, 402 bp, Glycine max
  unsure at all n locations
tcaagaaaaagatggcctcagcaaattccttatttccagaagggaattctatcaatagacctccaatctttaatggagaaggttaccactactggaaaacccgaatgcaaatttttattgaggcaatagatctaaatgtctgggaagccatagaaatagggccttatatacccaccacagtagaaagaattacaatagatggtagttcatcaagtgaaagcataactatagaaaaacctagagatagatggtctgaagaggatagaaaacgagtacaatacaacttaaaagccaaaaacataataacatctgccctgngaatggatgaatatttcagggtttcaaattgtaagagtgctaacgaaatgtgggacactcttcgattaacacatgaaggaacta

SEQ ID NO: 18143 - DNA, 220 bp, Glycine max
ttgttttctttcttatcagacggctgtgggtactcgtcaaatcaataactgacggtagcaacaacagcggtggtggctgcaccgaagaaagaaaccatgggatccgggaaccgcacaacgctagcaagctgatctgggtactctacaaatccatcccaagggattaagctatatgtttataaggagaacgtgggtgctgatactgaagggatgactcctg

SEQ ID NO: 18144 - DNA, 403 bp, Glycine max
  unsure at all n locations
ntgagactgatccttgccccaccactctttgtatgaaatgtgatggtgacatgtgcaggcaactgtgtcctaataaagttctcattctctcaattattcaaccttggaataaatgctagctgacagtttttattctttcctttgtttttttccttgcccttttcctttaactcttttgaatttgatggatgaatgtatcattccctgatctctttgtctatcgtgtgctatgattttttttctaccttgaggaaaaagtataatccacaagacagtgatggattttaatactatttacgcaattcatatgtaaaactacagctcttttatcactaaacaatcactgaattaaatttccccaaaagaaaaaagtgacattactattagcttaatcatgtcaaat

SEQ ID NO: 18145 - DNA, 343 bp, Glycine max
  unsure at all n locations
ttcttgcttgtggggcttctatggaggctggatctttgagcttcaatgggatcctttaatggtgattttccaccatggagatgcagcggaagacaaaggagaagatgtgagaggaggcgccatccattaaggaataagccatggaaaaaagagcttcaccaccaagatgagccttggataagaagcttggaaggatgcttcaatggaggaaaagaaaagagggagagaaagagagaggggggagcacgatattgaaggaatanaggagggagagaagtggaactttgaaagatgtctcacaagactctcattcatcanagttacaaccagtgttacacatgct

SEQ ID NO: 18146 - DNA, 406 bp, Glycine max
tgccgccacggagttttccgactattctcttgtgtggtggaacaagctacaaaaggagagagcatgatatgaagagccaatggttgatacatggacggagatgaaaaagatcatgaggaagcggtatgttccggctagttactcaagggacttgaaattcaagctccaaaaactaacccaaggcaacaagggggttggggagtatttcaaggaaatggatgtgctcatgattcaagcaaatattgaagaagatgaggaggtaactatggctcgatttcttaatggtttgactaatgatatccgtgatattgttgagctgcaagagtttgttgaaatggatgatttgctttacaaagcaatccaagtggagcaacaattaaaaaggaagggagtggctaagaggagt

SEQ ID NO: 18147 - DNA, 367 bp, Glycine max
  unsure at all n locations
ttcttctatataagctgaaccattttatcaataaacacaagttgagttttattcagaaaattagagtttatctcttttatcttagtgagagtgattctcctaaattcttgagtgattcaagaacaccctggctgtatcaaaggactttcacaacctttgtgtgttgccctcgctggaaagagtgattctttccttcctatcatctccacccttgttctttcaaaccacaattccagaaaatccacctctgcccaaaattatctcgtgaccataactcccatttcacacactcaaattaagtgattcttgangcctaaatgaatntcaaaacgagacctttcacctcgttttggaatcacctcatttg

SEQ ID NO: 18148 - DNA, 413 bp, Glycine max
tcctctgccgtaaaaaagatattatcggccagtgtttgttaaaaaattgcgcaatgtcggctgaaaaatatccgtcggggctatttaactaccgatgtcggctattgttttttctattccacccctgaattatatttggatgatgcctattaggaaatgttcggtcggggtcatccggtcatgcttctttttgaggcctcgatctgtcgtctttcctagccggccgacgtcggctagcatttttttcgatcaatatctgtgtgaatcatgtttttttttgccaaggagggctaatgttttcgtggccgacaaaatgaaaacatgccagtgtcggccgaaacacaatcccgcacgaaaaaccctaaccgacctacattgtaattttttcaggcaataccgaacgacaaaacttc

SEQ ID NO: 18149 - DNA, 351 bp, Glycine max
  unsure at all n locations
ttcntcaactgaatttacaacgttccaatcaatttaaaatggtgtaatcgattacaatatattggtaatcgattaccagagtgtttgaatgttgaaattcaaattcaaatgtgaagagtcacatcctttcacaaaaatgctttgtgtaatcgattacaatgatttggtaatcgattaccagtgatatgttttgaataaaaatcaaaagatgtaactcttccaatggttttcaagtttttctaaaagttataactcttctaatggttttcttgaccagacatgaagagtctataatagtaagatcttaacttgcgttttacacacattgaatacattaatttcaatccttta

SEQ ID NO: 18150 - DNA, 415 bp, Glycine max
tgttcatcatttatattgaatttatgcttttctatatgactctctaagccactacgcttaggcttagcgagtgtttaaatttccagttttacttctaagtttgtataaacttgcttaggtggcatgccgtgctcagcgagttagtttagttaggtcagaatgtttgaggcttttggtattttgttggcggctaagcgagccgcgctcgctaagccaccatgcctctgaggtttgaataagcttgggctaagcgagtcagtctcgctaagcccaaggcaatttagtgttctgaaattttgttcatgcactaagcgagtcatgctcgctaagcgcaatttcttctctgtctttgaataaggcttagcgagccagactccctaagccaattatgttctagtggtcaagttgggctaag

SEQ ID NO: 18151 - DNA, 338 bp, Glycine max
  unsure at all n locations
ttcttgcagcgcatttctgatgaactttaccagaaattgcggtaggaggtcccaagactgggaagctcccagtgaagggttctgcctttcttacagctgaaggatcatccagatcaagccttgctataagttcaccagcctgcaaaaggtgatacaattttattatctttttcaatttcaacaattgtacttcctatgtggaatagaatgctatatacctgcattgcttgaccttcagacattttgaaatgaataatcccagaagcangcgaaagaagaggcatgcacattttcatgacctcaacttcagcatacggtgtgtcagcatcaacatgact

SEQ ID NO: 18152 - DNA, 414 bp, Glycine max
  unsure at all n locations
ntgaagtgaaaggatgtgactcttcacatttgattttgaatttcagcgttcaagggcactggtaatcgattaccaaaacattgtaatcgattacagctttttgaaaataattggaacgttgtaaattcagtttgaaaactttttcaaactcattttgctactggtaatcgattacaacaatctggtaatcgattaccagagagtaaaaattctttggtaaagggttttttcaaaaactcatgtgctattcaaagttttgaaaaactttttaatacttatcttgattgagtcttctctttattcttgaatcttgatcttgatttttgagatcttgaaccttgaatcttgattcttgtctctagactttcttcttgagtcttgaattgttcttgatttttatcttgaactcttgaa

SEQ ID NO: 18153 - DNA, 342 bp, Glycine max
  unsure at all n locations
atctttgtttgcttgaaaagttttcagtcgcattagctaagactgacaaatcgaaagttggtaaatcaatccctttcattctctttacttttctgaaattctgcttggaaaaatttcttgcaacccctgatacgttggaaaataagacttaaaacctttgcaccttatatgcacattttttagtgcctaatttcttgtaatagatgctaaataatatgcatatacatacctggatttttaattatccatatccacacatatatgattattaatccaaaagtagtcacaccacagtgatngctactgtctttatcttgagtttctatggtcactgtatatgat

SEQ ID NO: 18154 - DNA, 422 bp, Glycine max
tgttgattttagcgttaaggatgagatgggaattgaattgtaagatgcatagcaaacaaacaaacaaatctttaattatataagagtaaaaaatcaagaatattttttagttgcttaagagggacaaatacagcaaactagaagcaacaagtaacacatcacatacctttttctgacttgatcccggaggagtgcaaagcaatgtcggtgatgccggtgtcggaagagtggaggtggcatccatagttgatggttggagttagaatgttggaattaaaattggaaagaacccaagtgcaagtagaagaagagtctcaaaagtcaaaactcattaataaataaagcatcatcatttgatgatcattgcatttgatggcctatatattgtgataactcatactcattaattactagatcatttt

SEQ ID NO: 18155 - DNA, 265 bp, Glycine max
  unsure at all n locations
ttttcaatataacaataatttttctctcgcttttattcattatatataaatgaagaactacaaaatttaaaaataaattaataatggtgtaagattaatttataaaaataatattctttcatttatttattattttttcttggtctatatanaataacttaggatganaattatattatntaaaaataaacatatttattccgtagcatatctattacaaaatcaatttggattaaccctaaattgttcaaaatatggtagagaa

SEQ ID NO: 18156 - DNA, 417 bp, Glycine max
tgtacgtgatgccaccgtgatctgccatcgcgtttatctgcttcccaacacggtgctggcgtgcatctacttctcacggacctccgtcggactggcaaccctctcccattggccagtggcggggtcgaggaccaggtgtcagcgacgtagccgccgaggacatagatcttgtcgtggaggactcccgcggcggcgaattcgcagccaacgcgcatggagggacgaccgtggagctagtggttgaagcggcagtcgaggagccaaatgttgggggatgggacgatggggacagccatggcggtgacaacgtcaacgaccttaatggcagccttctagagaacgttgccggagacattgcttcgtccctctcacaaaggctatggaaacctaaaaggggagtaaagagagaggggaagt

SEQ ID NO: 18157 - DNA, 366 bp, Glycine max
  unsure at all n locations
tcattcttctatataagctgaaccattttatcaataaacacaagttgagttttattcagaaaattagagtttatctcttttatcttagtgagagtgattctcctaaattcttgagtgattcaagaacaccttggctgtatcaaaggactttcacaacctttgtgtgttgccctcgctggaaagagtgattctttccttcctttcatcatcacccttgttctttcaaaccacaattccagaanatccacctctgcccagaattatctcgtggccataactcccattntacgcactcaaattaagtgattcttgagccctaattgaatttcanaacgagacccttcacctcgtttgggaatcacctca

SEQ ID NO: 18158 - DNA, 414 bp, Glycine max
tttgcttgggagaaagaaggacaaccttgttaaatgcctcaggctatagtgaacttcacagtgcaaagtcttggtgatttgcttattcaagaaggatgatgatagttcataggcctttattggtaaatctgacatgtccatctatttgcgactacatttaaatgtacacttaatattctttcatctgcatttcccttgcgttaatatgggggttggtcttttcagatgatccttttattcttactaagtcgtattataatgtcttaatcatgttttgttcaagtcacatgcctcaagtcaatctgacatcagtagtctccaaaacttaggataaaatattcttaaaacgtgggggtataaatagcaagataaggggtgagaattacaattccctaaaatggttgggttagttat

SEQ ID NO: 18159 - DNA, 414 bp, Glycine max
ttgcagatttggtcttcgccagtgaaatgtatattgtgggtccgaaaagaggcaaatgcgatcatactactaggacgactgagaaaactggggcaaataaagagggtgaggatgagggagaaacccatgctgtgactgccattcctgtacggccaagtttcccaccaacccaacaatatctttactcagccaataacaaactttctccttacccaccacccagttatccacaaaggccatccctaaatctaccacaaagtctgtctaccgcacttccaatgacgaacaccacctttagcacaaaccaaaaaaacaccaactaaaaggaattttgcagcaaaaagcctatagggttcaccccaaattccgttgtcatatgctaaacttgatcccatatccactcaataattcaat

SEQ ID NO: 18160 - DNA, 342 bp, Glycine max
tcaatctttgaatactccagtcctagtcctagaggaccatccaatgctcctattctttttgccttcaatctctctctctacccaaaatacctaaaaacaagggtaaagaatgaagagaggggaaaaaaggtcatggttcaaattctttgttaaccaaaattaataaattaataaattaacaattaatattttttttttttttaaaaaaaaaactatgacatgttccgtgtatgtaatcaatcaccaaacttagttgtactcattttaatcctgactgtgtggtctatccaacaagctaggctcatcaaaatgggaccagtttcttgaaacaaactgcatcac

SEQ ID NO: 18161 - DNA, 401 bp, Glycine max
tcttgctcttaatcctgtgagtgtttaatttaatatgctcatttttttggctgttctagctgcttcagcattttggttcctccattctgccatggtatagtggcccaataatagataattcatgtacttcctatcaaatgcaggaaaaagttaacgtgtatggtggagctgtgtcattggggcatcccttgggttgcagtggagctcgcatcttagtcacattattaggggtaacttgtgaccttggttactttgtatatcattttctttcacccttggcacacaaattcttatacttctccagttagtattcagtatgccatgcagctgttatccattacattttataatcctggcttgattgctacactttccagattattgtgatctgtggatatctc

SEQ ID NO: 18162 - DNA, 300 bp, Glycine max
cattttttttgtttgggggcttctatggaagttggatcttttgaacttcaatgaggtcctttaatggtgaatttccaccatggagatgccgccgaagacaaaggagaacaggaagaggcggggccatcccctacggaataagccatggaagaaggagcttcaccaccaaaatgagccttggataagaagcttggagaggatgcttcaatggaggaaaagaaagaaggagagaaagaaagaggggggcgcacgatattgcacggattaaagagggagaaaagtggaactttgaagatgtct

SEQ ID NO: 18163 - DNA, 307 bp, Glycine max
tccttgagaatctagagtggggctactgacatttctgcattagctaagctcacctcgatgccaaaatacatgaaaatacaatgggaaacttccttgagaagcaaggaaggtagcttccttgggaaaaaaaggaagaaagcttctttgagaagctagaggggggcgactgattgaggccgtacccgaatcaaataaacattaaaaatgcagtatctaggaagtgatcctaggtcgtctcccaatgagcaatggtcaagcaacgtttataatagatagtgataaaacagtaacgaatgggggggggtgt

SEQ ID NO: 18164 - DNA, 258 bp, Glycine max
  unsure at all n locations
gctaacccatggaagctcctaatatctcccacactttttggggtgggccattcttggaaggacttgattatctcaagttccacttggaccccatttctaccaactacgatacctaagaaaactatattatctacacaaaaggtacacttctctatatttgcatagagggtgttttcctaaggacagaaataactttctgatatgtactaatgatctttangctcctactatccctaaaattcatcaaataacaacaca

SEQ ID NO: 18165 - DNA, 405 bp, Glycine max
tcatgctcaagtatgtatggcaaaacttataattgttgttcaagacatacaagtgagcttgttacaaatcttctacacttggagtgatgacatgcagtcctcttgaacctttaccaccgactatgacctcatgccaacactcaagacggccaagacgtatatccttctcaatgtagactcaacaagagtcaattgctacttctgcgcatatacctgtgaacaatagatgcttctggatgatacaaattctttatgtatccttttaagatcttcatgtatcactcaaccgggtacatccaccgcaaataaacaagaccacaacatttgatttctctgaccagatgcacactcaagtgaatcatgatgtcaaagatggtagggggaaaatacatctccaactggcat

SEQ ID NO: 18166 - DNA, 425 bp, Glycine max
  unsure at all n locations
cgaccaggggactcgntgcatcgccnnacantnggntatgnacccgccatcccgggattctattagtcgacccgcttcatgtcttcttagcnatattnnnaaggcatgtttcaattgtttggttgccctttatgattatggttaatcatttttctgtgacttagatcacttgttatgtgatgtttgatgaagtaagaacgccctgtcataatgcgtggactgactcaatctgtaaggttatcctatgaatgaaatgatgggtcttcctccatgcaatactatattggcctctttatgtagctataacttttggccttggtggccaaaaggcgacgcacgtttctttgaagaacctacattgatacttctcaattgattaggatatgaacataacttgaccttcttttaggctcaaaccttacgtc

SEQ ID NO: 18167 - DNA, 407 bp, Glycine max
ttccgatatatatattgccccacctattctagtttggttattatagtttcgatcatacttttcctcaatgcactgattcttctttgaggttgtagctttttctctcccttcataagccaagaaatatgtaatataagagagttatcggtaaggatatcaacatgccaaagataaccctgcaaagaaaaaatacaaagagcaaatgttaatatgaatgttaatctatacttgcattggttatgaaagttaatatgaaagcaatatcttacatcgtgaataacgaaaataacattaacttgacttaatttgacctaaaggatcactagaaaggtagtctacatatttacgcatcacatggtggggttgaaagcccgtgcacgatcaagttttgctagaaagcattctct

SEQ ID NO: 18168 - DNA, 333 bp, Glycine max
tttctttgagccaattctaacgataataactttttactcggatgtccgattgagtcccataatatatcgacacgctcgaaattgaatgttgaagctctgagccagatcaaacaacaataactttttactcggatgattgatagagtcccgtaatataacgagacgctcgaaattgaatgttgaagctctgagccaattcaaacgacaataactttttactcggatgtctgattgagtcccgtaatatattcgagacgatcgaaattgaatgttgaacctacgagccatttaaacgacaataacttttacttgggggctgattgagtccgaata

SEQ ID NO: 18169 - DNA, 397 bp, Glycine max
taaacattcaatttcgagcgtctcgttatattactggactcaatcagacatccgagtaaaaacttattgtcgtatgaattggcttaaagcttaaacattcaactttgagcgtctcgatatattacgggactcaatcagacatccgagtaaaaagttattgccgtttgaattggctcagaggttcaaaattcaatttcgagcgtctcgatatatttcgggactcaatcagacatccgagtaaaaagttattgtcgtttgagttggcttagaggttcaacattcaatttcgagcgtcccgatatattacgtcactgaattggacatccgagtgaaaagttattgacgtttgaatttgctctgagcttcaacattcaatctcgagcgtctcgatatatta

SEQ ID NO: 18170 - DNA, 345 bp, Glycine max
ctgcatcttcttataagctgaaccatattatcaataaacacgcgttgagttttattcagaaaattagagtttatctcttttatcttagtgagagtgactctcctaaattcttgagcgattcaagaacaccctgcctgtatcaaaggactttcacaaccttcgtgtgttgccctcgttcgaaagagtgattctttccttcctttcatcttcacccttgttctttcaaaccacaattccagataatccacctctgcccagaattatctcgtggccataactcccattctacgcactcaaatcaagtgattcttgagcctaaattgactttcacaacgagacctttca

SEQ ID NO: 18171 - DNA, 417 bp, Glycine max
tcgccggatgatgccgatcgatcatttcccaatttacatcttccactaattattcacggatcgaatagaataaacaatggccggtgtcggtcgctatatggccccgactgatatccttcagccgacattgcgcaatttcttttacaaaagctggccgataatgtttttttacgtgagaagaagttctttgtttttggattccctacaaaattctacgatgtacgtcggctaagtttatccctgcgagctcaacccaggttgtgattcggacgacactggcatggtctcattcattaggcgcccaaaacgttagcccactccggcacaaacaaacatcatcaacggagattgattaaaaataatgataagtgacgtcggcgtggacagatgaccgatcgagggctctacatgaagcat

SEQ ID NO: 18172 - DNA, 373 bp, Glycine max
  unsure at all n locations
tttcttgcttcaatctaggaactgtatttgccccctttagaaggcacataaaaatctttgggttgagaattttccaagaaaaataaggcaaagaccccaaaccttagaagcccaaatagaaaccaggatcttagtttcagccatcgcaatccatgcaatgcaaaagattctatctttgttaggcaacacagtcatagtagagtgtccatttcacatgtagccaaaacaagttcaattctgatgttntggactgtgtcaactgatgaatgatgcaaaaaccattagaggtggcactcttangaccccaaaagttacaaccatgatattgtgatgagtcaatcacgtgtcatgcaactaggttgaaaaataatgc

SEQ ID NO: 18173 - DNA, 427 bp, Glycine max
aatactcaagctgttgactctacctgagtcagtggtccctacctttttatttcattaaacaacaccctcaaatcctatcaaaattctggccttattttgttatctgtgtaacattacttatgttgaaattactgtttaaagtaaattatttgatagtgtacaattttagggtaacctgttcaattctaagtctctatcaggattacaaataaaagcaagtcatttatgaataatccttatccttactactctaaacatgacaactacacaagacaagtttcattgaccactacttttactagaaatcaaagccttgaattctggaggtacaaaagtcgaaaaatcaatgcttcatattaagttttttgttgtcaccaccaagggtagaataacatttactcatgattataattaaaataatgaataa

SEQ ID NO: 18174 - DNA, 340 bp, Glycine max
  unsure at all n locations
ttcttctgttatcttggaatttaacataggagcattttgattacaaatttacaatctcgaggaatttactgaggtgaagatgatatatgcagtacgattcacttgcaaaataatctagatgaaaacaaaacatattggtcctaaaaactaaaccatattgattttctgttgtgaatgcaatcaattgtttaaatatcattcttcttaattgttttttatcttaaaattgcatggttactagtctatttttgtgaaaggctaaggaaaatggttactagtctatgtaagattangagtttaggactgtcatnatttctagaataacattttgcaattgcta

SEQ ID NO: 18175 - DNA, 385 bp, Glycine max
tgccacccagctcacccaggcaagcaaggttgctttctttataacaaccgccttctggaggaagaatctggaatgcccaagtgggcttgattgctatttgtacccccctttttactaaatgtacccctctttaccttttgtggtgattctttttccgtaacgttacgaaactttatgaattttgtaacgatacttattttctttccgtaaggttacgaatccttactgatcatgtctatactcttttttagctgtcgaagaagttactgaaactcacggattgcgcaacaacacctccttttggttttcgccacattacagaatttcacggatcccgtaaccctgtttccttttgatttccggcgcgtctcatgacttacatatt

SEQ ID NO: 18176 - DNA, 329 bp, Glycine max
atcttcttaacggttctttctccgccatcatccctaacggaagaaaaaaggttggatttaaaaagaaaaaggaaaaatagagggaaagaggaaggtggtttacatacggagggttgattccgttacgggcggggagggagaaggacttcttttgatggcgtttggtctttttgttgatggaggaagcttcagtgctgctcattcttcttcttctctctgtgtttcgatgaatgaatgttaatcagatttcgcgcttaaattttttctgtgtgaatgtgccaaatttttatgatcctctttctctctctcttctcttcatgcaaatcacg

SEQ ID NO: 18177 - DNA, 419 bp, Glycine max
tgtgatgaatgcaataacttagtcgttagtttatataggctgcaaaatcaaattaataatttatgattttttttaatatcaaacaaattcacctaagttgcgtgagtatgtgcataaagccaacaggactgtgcaaacggatgaatttggataatttttattgggtcatcagcaaatgtacagttagataaagataaatgggtgctttcgatttcttcacgcacacattatatatataaatatagagtgggattaactcactcatattataattttaaaggaattatttttatcttaataatttattttcttaaaatttaatgattaaaattggttatttgttataaatattagattttaagaaaataaatgtttagaatgaagagtaattataagagttattcttgaaataagtttat

SEQ ID NO: 18178 - DNA, 358 bp, Glycine max
  unsure at all n locations
gatgatgattgcatgatccttatgcatctttgcttctcatgagaaattcagaaatatctcctttgttgacttttaaaagtgattttagaagaatagatcgcaaaaagactcataagagagaanaaacaagagagggtatttatagatnttnatgatnaaaccgctataatcgattaccaaatcttggtattgattatttcaatcaaataccctttgtttgcatttccaggatcgtggtatcaattacaccaactagtaatcaattatatcaatcaacaaagagcaaacaaaactctttagaagtagttgtaatcgataactgaaagtggtatcaatatctcgatgtatagagtttctt

SEQ ID NO: 18179 - DNA, 413 bp, Glycine max
tcttagtttcagatgatgcagatgagtttgtggctacctcatgcactcctctaatgactatagcatcatttctagcgctaaactactgggagtttgaagccatcttcttaattaaatttctggcttcaacaggagtcatgtctctaagggctccaccactggcagcatctatcatacttctctctatgttattgagtccttcataaaaatattggagaagaagctgctccgaaatctgatggtgagggcaactgacacatagttttttaaatctctcccagtattcatataggctctccccactaagttgtctaatacttgaaatatcctttctgatggttgtggtcctggaagcagggaaatctttttctaagaatactctcttgagatcatcccagctcgtgatggacctt

SEQ ID NO: 18180 - DNA, 361 bp, Glycine max
tcattctttttggagtagaaacatgggaccaactcattttatttcaaaaaggaagtcgtatctagtcaaggtctgagagaccatacaagtttcctaacgatttctaattctgtgggccattaagtctatcatatgctgacaatagccgagaagcccatgaatctcttcgggggcggagtaagtgtctgccatcgccttggccttggctaacaatcggggaagttcttgactcccgttcaaggtaagagcaaaccgatccatccacatggttgcctcttggtgtaagagttgatcacccttcctctagcctctttttcgcgtatacttgggcatattcgtccgcaatcctatgctcgtgggc

SEQ ID NO: 18181 - DNA, 412 bp, Glycine max
tatgctgcaaacattacaacagacctcctcaatttcagcagcaaaatcaaccacagcagaacaattatgacctctccagcaacagatacaatcccggatggaggaatcaccctaatctcagatggtctagccctcaacaacaacaacagcagcctgctccttcctttcaaaatgatgctggcctaagcaagccatacattcctccaccaatccaacaacagcaacagccccagaaacaacaaacagttgaggctcctccgcaaccttccctcgaagaacttgtgaggcaaatgactatgcagaacatgtagtttcaacaagagaacagagcctccattcagagcttaactcgccagatgggacaattggctacacaattaaatcaacaacagtcccagaattctgacaagtt

SEQ ID NO: 18182 - DNA, 334 bp, Glycine max
  unsure at all n locations
ttcttgcttgtggagcttctatggaggctggatctttgagcttcaatgaggtccttcaatggtgatttttcaccatggagatgcagcggaaggcaaaggagaagaagataggggaggcaccatccactatggaataagccaaggaagaaggagcttcaccaccaagaattgccttggataagaagcttgaagaggatgctttaatggaggaaaagaaagagagaaggggggagcacganattgaaggaataaaagaaggaaagaaatggaactttgaagtgtatctcataagactttcattcatcaaagttacaacaagtgttacacatgcttc

SEQ ID NO: 18183 - DNA, 415 bp, Glycine max
  unsure at all n locations
ttttcaaagtcaagtttgaaaatcatgcttgggttatttttgaatttagcttcagctaagacctcattagctatcattacaccatggaggatatgtctgcctttgaggaaagcaatttgcacagaactgtatctttcaagtgactttggatagggtaagcactaatctcatccaagaaagccacagttactccctcctcatgttcaaataggtgtctcctccatttcaaatcccatctccaaatattctggtagaagctacccatggttgaaataagatcgttctgctgcttactaatggtgaagagctaagggtatttgtgatccagactgcagccctctcccagccaattgtctttccaaaatcgaattttatccccacaacctgccttccacaccagattntgatgaataat

SEQ ID NO: 18184 - DNA, 521 bp, Glycine max
  unsure at all n locations
accacgcgctacgcgaaggactacgcgagacgccgacgagaattggataaacgaaacaaaccacaacacaagannagagtgnattgatgacgtcgtaggaaccaccagangagcgaaacgagccccgcacccggagatcctcaaaaagcacagcagcaggcatgcatgcttaacaaggaggtctaaaccaaacaacccaacggaagaaaagaagctggacccagccccaaaagggaatgcaaaaaggagacacaaagtgaaccaacaacaaccacagcataacgatgcaggacgcgcaggaaatacaccgacatgcaaaggggagggggaaagcaaaacccaaagggcccaatcccaaagcagcagccattactacctctcagctgagaagaaagagccctcagggaaggaagggacgaggaagaaaaaacgcgaacgtaaccagcccaccaccacacgaggaggaaacggaaaaggcacaaaagagaagagagaaccaagaacgaaaagaacaaggaggg

SEQ ID NO: 18185 - DNA, 396 bp, Glycine max
  unsure at all n locations
agcgaccnataaaactcagctnacggagcactaagaccgagcggcgatatccctaagttctaaacaccgaagaatccgaaagggccttaccttactgactcaggtccaacccctaaaataatttttgcacgcatacactgctgatgaatcatacaatacccacgacctcacactcgtgttgcaaacacgtttaacacattgcgatacaatataacactttagactcctaactaggaatcctacacttatcctttaacattgcgcataaacacttgtctcaaggtaaacacgagacaggatatcgaataattcacaagctacaatacaaatatcggcacatcaagtgcgacccaccactaattcacacccaaattgcatgtctacacactaacatat

SEQ ID NO: 18186 - DNA, 334 bp, Glycine max
tcttgcttgtactcacatcgttcgcgtgtatgatatccactccacaaggtttgaagtataggagagcttctaccctataacgcaacgtggcggacaaaagtgggcaataaacttgaatgatcgtcattgtcaatgctgaaggtattctgcgctacactatccatgttcacacattattgcaactcgtggttacgtgagcatgaactactaccactatatacatgttgtttatactaacgaacacatcttaaaagcttactccgcacaatggtggcctcttgggaatgaaagcggctattactccttctgatgacacatggacacttatccctga

SEQ ID NO: 18187 - DNA, 412 bp, Glycine max
tggattgcagatccagtgcactcaacatattcatttttatctacaatgtccgcaaaaaattctgtgggattgagtaactaagaatcaccaacaaagttaattagtttattaatcaagtacttttttttatcaatttataaatacatacgtgttgcattattaattaatttaatacttacttctaaccactcttgagctcctgcaggctcccatgctgctaaaccaccttttttactctgcaataaaaaaaatgtggtttagttaaaaataaatgtggtagtaaaagtaaataaagcatcaatgatcaaagtcctttgtcaaccctaacttattattgatcaaatattaagtaacaaagaaaaggggccattagttgattgatgattggttaattaaaaggatatggacataa

SEQ ID NO: 18188 - DNA, 362 bp, Glycine max
  unsure at all n locations
tttcttcttatccaaggctcatcttggtggtgaagctccttcttctatggcttattccctagtggatggcgcctcctctcacctcttctcctttgtcttccgctgcatctccatggtggaaagtcaccattaaaggacctcattgaagctcaaagatccagcctccatagaagccccacaagcaagcttccatcaagtggtaatcagagcacaagagcttcaagtaggtgctctntaaacctccattaattntttttttctttaccttctcttccattggtgtttcttcagttttctgcatgtatctcctcacatgtcttgttctaaatgtntgtaacatgatntcttagagtttccaccga

SEQ ID NO: 18189 - DNA, 413 bp, Glycine max
ttgctgatttagttttcaccgacgaatggatcatagtaggtatgaaaagaggcaaatttaatcatcttgcttggatgaatgagaaaactagggcaaatgaagagggtgagaatgagggaaaaacccatgctgtgactgccattcctatacaaccaagtttcccatcaacccaacaatgtcattactcagccaataacaaaccttctccttacccaccacccagttatccataaaggtcatccctaaatcaaccacaaagcctgtctaccgcacttccaatcatgaacaccacctttagcatgaaccaaaacaccaaccaaggaaggaattttgcagcaaagagcttatagaattcaccccaattctggtgtcttatgctaacttactcccttatctacttgataatgcaatgg

SEQ ID NO: 18190 - DNA, 274 bp, Glycine max
aggcaattcagctcggtacccgggatctctaagcaccgcagctgcttctttgctgagggttatattctaatttctaaccttctatgatgaagatggcaaatctatacagggaaaccaaaataagtacctgttagtcatcatctacaactaacttttgtatagaaaagctctatacaactgtttatcgtttccccaatttatgggtcttttcgtaagtttgtacatagttttaggtttactttaattttgttaattagaaatacccaacattgtg

SEQ ID NO: 18191 - DNA, 411 bp, Glycine max
tcatgatgaatcaaaggtgattcaaaggtgtttagatgataacaatagtgacaacaaaggtgatgaacaaaaagctcaaagatcaatcaaagaacaactcaagtgaatcaaagaatatctcaagtgaatcaagaacaagtcaagagttcaagataagaatcaagaagaattcaagaactcaagaagaaagtctagagacaagaatcaagattcaaggttcaagatctcaagaatcaagatcaagattcaagaatgaagagaagactcaatcaagataagtattaaaaagtttttcaaaactttgaatagcacatgagtttttgacaaaaccttttaccaaagagtttttactctctggtaatcgattaccagtagtaaaatgagtttgaaaaagttttcaactgaatttac

SEQ ID NO: 18192 - DNA, 363 bp, Glycine max
  unsure at all n locations
atctttgtgttatcgattacactgatttggtaatcgattaccagtgatagtttctgaacaaaatcaaaagatgtaactcttccaatagtttttcaagtttttctaaaagttataacttttccaaatggtttttaagtttttctaaaggttataactcttctaatggtctcttgactagacttgaagagtctataaaagcaaggctntgagttgcattttatttttcattcattctttagacaacaaacttttgccaattgatttctgaatctctttgaactccttcttcttcttcctttgccaaaagctttcttaaagtttctggttttctaaacctttgaaacaaaacttgtgctattcatc

SEQ ID NO: 18193 - DNA, 419 bp, Glycine max
tataagtacaaaattgcctaaatcatttccaaatatgcatgtgaattaggaagcatcaacgagaattaagccaaggctattgtgcaagcaatcaatggggcaaaacacaccaaaagattatgatgatggatggctcaaattctcacaaaggtcttatcactttcaaattgagctttcaaaactatcatgacatgtaaaggaaaaaaaaggatttcaagtcacaaaatgttaagagacttttattttcagaacaattacccattgtcgcaacgtgcccttcgcgggcgagcgagggcgaggctcacgggtgcgctttccaaaggaggaaagatgcgcggagttgccaccaacgtttatttgtgggaaacgttggaaaaaccgaaagaaaccggtcaaaatgaaaattctaagttcgggag

SEQ ID NO: 18194 - DNA, 229 bp, Glycine max
  unsure at all n locations
ttcttggttcccanagctctgatcaagctctcgcacaatctagaggtaaacatatgatctctatcatacactgatgcaatcctacccaccaccggtgttgaatagataattccaaaaggcttgagctacaccttactagacaggccctacggttctcatgaaccttacggcacattttagaatccatgggtcaacgatggaaccacttctttttgcccatctaccaata

SEQ ID NO: 18195 - DNA, 398 bp, Glycine max
tggtagatttggacattgcctgtgaacggatcatttttgttctgaagacaaggcaaattaagtcatcctacttgtacgaatgacaaatctaaggcttgtgaatagggtgataatgatggataaccccatgttgagactgctattcgtatacagcctaacatcccaccaaccgagcaatgtcgttactcatccaataacaaaccttgtccttacccacctggccagcatccacataggccatccctaaaatcaaccacgaaacctacctacaccacttgcactgacagacaccacctttatcagcaactcaaacacctgccaataaatgaatttctcctggagatagcctgtcaaaaacaccccacttccagtgtcctatgctgacttgctccatatct

SEQ ID NO: 18196 - DNA, 300 bp, Glycine max
  unsure at all n locations
atcttacaaatatgttntaaatccaagcccataagtaaaatcaaatcaaatctagataagataagataagataagatctagatgaaataatatctagatgaggtcaaatctaaataatatctagataagataagatctaattttatagaataaattagtctgccctcttcaagtccaagcccaattctagattcaggcccaatgcttcattaattcctgcaattagaataaaaacatcaaattagctgaatgggcccaaataatanaactgcctaataaatttgacaattaagactaatc

SEQ ID NO: 18197 - DNA, 417 bp, Glycine max
  unsure at all n locations
tctaaactttgtacaagaatgaagctctgatacctcttgttttacaagtggcctcagatatcttaagaagggggggttgaattaagatattccaaacttttctcctaattaaaaatctatcttactttttacttaagttatgaattcccttaatgacaatcttcttaaatattaattcaaatgaagcaacttgaattatgaatataaagcaataataaataaaggagattaagggaagagaaaatgcaaactcagttttatactggttcggccacacccttgtgcctacgtccagtccccaagcaacccgcttgagagttccactaacttgtaaattccttttacaagttctaaacacacaaggacaacccttcctttgtgtttagagattctntacaacaagagactcacagtctc

SEQ ID NO: 18198 - DNA, 233 bp, Glycine max
ttctttgaaatctcggataaaccaaatcatgttgataaattgcaaaaagctctttatggtttgaaacaagcccttagggcttggtatgaacgcttaagtaaatttcttctaaaaaaagaattctctagaaggaaagtggataccacattgttcatacaagaataagcataatgatattttggctggtccaaaaatatgatgatgatataaattttggaaccactaatgattca

SEQ ID NO: 18199 - DNA, 415 bp, Glycine max
tgtgcattcaatatcctgatgaggatgttccatatgttttcaagactggactaatacatttgctgcccaagtttcatgatcttgcaggtgaagatcctcataagcatcttaaggagttccatattgtctgttccaccatgaaatcccttgatgtccaagaagatcatatctttctaaaggcttttcctcattctctagagggagtggcgaaggattggctgtactaccttgctcccaagtccattaccagctgggatgaccttaagaaggtgttcttggataaattcttccctgcatctaggaccactgccatcagaaaagacatttcaggcatcatgaaacttagtggagagatcttgtatgagtactgggaaagattcaagatattgtgtgaaagctgtcctcactaccagat

SEQ ID NO: 18200 - DNA, 253 bp, Glycine max
gcagcattcttttcttaaataggtcagctgaaaagatgacggaagcacgatgttgggcccgctagactcgtgggtcatgccaaaccaaccacatacagagccaaccaacagccaaaccaagaggtcgctggaaagtgggttgagtgaaaacgtaatgtgccacaaaggggatcgtgcgtgaaggtgacatgtcggagtctggggagcgtggtggcacatgcggaggcgttggggttgttggagagagacactt

SEQ ID NO: 18201 - DNA, 416 bp, Glycine max
aggacctataacactcagcttcatgcaggaaacatgctatggcttttttttcttaattcggttttagaattagaagaaacatgaatattaggatttgcttgtgagagttttcgctcgaatatgggctgccccatgtttgatactttacatagaggtagtgtggaaaacaccttgcaatagtgtgtatacatatgtaaatataaggagcatgaaattcctagcaaagtgtgaatgattgtcttcctaaatgaatgtatgatagtgtggaatacctttttgaatgcaaatatgtgcaggatgtaattagctttccaatatgcatataaataaatatgagtgaaacagtcaaaatttgtatggcgtacttcaaatgtatgtaagtagtttgtgatatcaaatagttaagatataaatta

SEQ ID NO: 18202 - DNA, 253 bp, Glycine max
cattatttctttcgctggagctgacccattaactgccctaactcctttagactggtggtccctaagctcttgaccttgacttgatagaacctttttttaaacgaaggcgtttgacttgatcccattgtttactaaagtgaaacaaaatttagtgcgaatcaaaactccgacatccatcatgggtggaatggatgaatgcatgaagacatgcatatgacatagatgcaatctatgattacaggaccccggaaat

SEQ ID NO: 18203 - DNA, 401 bp, Glycine max
gttttggttgtgcatcttcttctctgtttgttgattcttttcatggctaggctggtaaatgccaacaacttctcctgtcacagttgggtgttcccaaaacatgtctctcaccttttcaaaataaccgtagctcaaggatgtcatcagcacagcttttgatttcggctttcctggtgaattaacaatatcccccttttggttaacatcaggcaaaagattctccttcaaagtgcaagctaagatctgatccaacacatgttgaaatggtccagttctagtatcaaacactcttatttggatgcctactctttcatcaacgtcagctaaataagcttgatagtatctgctaacaagtcctcatactttgttggtagggtggaacagatatctacccaagaaat

SEQ ID NO: 18204 - DNA, 351 bp, Glycine max
ttcttctcgatatgtgatgtgcatgaatcgaacatccgagttaaaagttatggcgatttgaatttctcgaaagctttcggtatttaattttgagcatctcgacacatgatgcgcccgaattggacatccgtgtgaaagttaagaccacttgaatttctcgagagcttcgctattcaatttggagcgtctcgatatgttatgcgcctgaatcatacatccgagtgaaaagttatgaccatttgaatttctcaagagcttccgttgttaaatttcgagcatctcgatatgtaatgcgcctgtatctgacatccgagtcaaaaggtatgaccttctgaatttctcgagagcttc

SEQ ID NO: 18205 - DNA, 384 bp, Glycine max
tcctctaccgtaaaaaaaatattatttgcctttgtttttaaaaagaattgcgcaatgtcggcagaaaaatatcagtcgtggctatataacgaccgatgtcaggtatttttgtttcaattcaatccctgaataatttttggatattgtccaataagaaatgttcgatcggcgtcatcaagtgatgcttgctttttattttagacctgctggatcggtcatctttcctggccgacatcgactatcattttttttatcagtgtcggtgaataatgttttttggccgaggtgggctgatgtttttctagccgagtaaatgagaacacgccagtgtctgccgaaacacagcttcggttgagctcgcacgaaaaaacaaagccgacctac

SEQ ID NO: 18206 - DNA, 293 bp, Glycine max
  unsure at all n locations
ttcttgtagacaataggtaaggaaaactctaccttatggtctattgcttaatctgattggaagggttgtttatgcttcaaagcatgtttgatttttgtgggttggtggaatttggtgttgggtttcctttagagtccttgccccttgtatgcttttgatttgggaattcttgatgaaatcttgtatatgtttaattgatggttgatttatgtttttttggacttgtgttgagtattgngatggttttgaatcatttgtgagtgtttggaaaggtagagagtaatgaagatacg

SEQ ID NO: 18207 - DNA, 403 bp, Glycine max
tgaagctccaggaaaagcttgaagatgttttgtttatgttttggcttttacatgcctaactcccttgagtggcatttgtattggttgttatcttggttgtttcatcttagtacattttgatatttgtattgcatcatgcatcatcgtggtttatgtgaagaaaagcttctaagttagaaagtttattcagaggaaataactctctattttaatcggttacatcctcatcgcaatccattacaacaagttgtctaaagcttaaagagttgagtctcatattagtttaatcgattatagtagtcttttaatcgattacactgttgtttgagatagtgactgatttattcaggagtctctgctttaatcgattgccttgagcagagtacttattagacctattttg

SEQ ID NO: 18208 - DNA, 331 bp, Glycine max
  unsure at all n locations
agctttaatgtgatgcatttggggcaggcataggtttgtgttgatccaagaagggcatcctattgcatatttttttagaaactgaatgaagctgctcttagttattctacatatgataaggaattgtatgccttaattagagctttgtagacttagcaacattatctcttgcccaaggaatttgttattcatagtaatcatgagtctttgaaatatttgaaaggacaaggaaagttgaacaagaggcatgaantttttattcactatgatcatgagtctttgaaatatctgaaaggacaaggaaagttgaacaagaagcatgctcttgttg

SEQ ID NO: 18209 - DNA, 415 bp, Glycine max
tgtaggattatggggtacccatcacatgtggtattaggtggcggtcgggcgatggtgcacaacaagttttccacatccacaaatcgcgcataaacccaccatcccctgttgcccacctccaactgagctcacgtactcccacgtagcccatatcatcgtttctctcaacaccgggtccccatcaatcctcccaagcttcccaacatccaattaattcaacatccaatcatcatggactaacaaaaccaagcaaaacagggcaaaggcagaaaactctgcccaaaacacaactcaaaatcacagcttttctcacttaaagaccccagtaacaattccttctttccaattccttaaccgttggatcgactcgaaaattttactggaagtctctagtacataagcctacattttgacc

SEQ ID NO: 18210 - DNA, 361 bp, Glycine max
attcttttctatgcagagaatatccaaggaaaataccttcatctgacttagcatcaaattttcctaagttatcttttccattattcaatacaaaacatttacaaccaaagatatgaagatgagagatgtttggttttctgccattgaccaattcatatggagttttctttaaaatgggtcttattaaagccctatttaaactgtagcatgcagtgttaacggcttcagcccaaaagtattttggaagaggagtatcatttaataaagttctagcaatctcttccagagatctatttttcctttcaacaacaccattttgatgaggggctcttggtgcagaaaaggtatgcttaatcccatg

SEQ ID NO: 18211 - DNA, 412 bp, Glycine max
tctagcacactctagatattttctcaaagatcctttgtgttaatcatgtcaaagtttcttgtgaagttgcaaaccaaatttagagaagctccaacggctaacgaaggctgggcagcgtttctaccgaggcagcttcatgtagttttctctagaagcttcattaagaggcttcctccagaagcttcattaagaggcttctggcacactccagacatcttctcaaagatcccaacggtcagatcatggaaaagtgttttgtgaagttgcagaccaaatttcgagaagatccaacggttaatgaatgttgggcagcgtttttacagaggcagctacatgtagctctctctagaagcttcattaagaggtttcctctagaagcttcctcgtggcttctttgagaagctttctcaag

SEQ ID NO: 18212 - DNA, 281 bp, Glycine max
  unsure at all n locations
ttcttgttgtttgataatccctacaaaattganagtttaattctttaatctaatccgatttgaagttcatacaaaatccagtaaacagtaggtttttatccaataagttttaatttgaaccaaaactttccttatttctctcctttccactttcaaaattatttgaaatttaaaaaatggatcactggatcataattgataataaattagttcaaaactacaggtaatacaaaggtaattattttggaatgacttcaaatttatcttaattcacataaacc

SEQ ID NO: 18213 - DNA, 415 bp, Glycine max
tgtaattgattgttttcctcataaattaaaaaattgaattatttataaaggaggaaaagtacaactaagacaagttatcctccaatggtggcggcttgtgttttgccattctgtttatgtggaacatgtttctgctttctagttcttgggctaccatttttgatgtggttaacgtagattattaccatcttttatacccagaaaatacatgctgctatgttgaaatttttttttttaggaagaaacctatagtacctgacgtgctatcccaccaacacatcacaatgttatctcggctgtttggtattttgtttccactggacttcaaatttatttggttttagatgcttgccatgttttgttactattgaacagaagtgtaattcacttagttaacaatgatcttattcttgat

SEQ ID NO: 18214 - DNA, 323 bp, Glycine max
  unsure at all n locations
atcttgagccatcacccaatcttgcaacacaatgttgggtccaaggttatcaaactcgacagtttacgtaaactcgtaagagttccatagactcaactcgtagacttatacgagtccacttcatataaaaataataacaaaatatctataaataacataccaattaaacattttaacaatataataaagcaaaatagtaaatcataaatttcacaatactgaaataaccaagtctagtaatgcatcactactagataataacttgcagattntatagtagtggtagagcattcccatcaaggatntgatgttattagagaata

SEQ ID NO: 18215 - DNA, 415 bp, Glycine max
tgaagtgagaaagtatggaagagtcagtcttcctacttttattcattgaccacaaagtggtacctggagatatgtcgcgggggtcaggagaccttggggacgtcaggtgaggtgctattgcccaaaaccaagcttgaccaatcccgacccaacccgggcatagtcagtcagtgagaacctgtgacgtacctaaacaggcgagctcctggcagtcaaccgataaaagaacaaagaccacaaagcaaggaggcttgtgtggtggctggccagctatgaatcttgagtggtagttggaatatgacctctagtattcgattaccaagggtgtgtaatcgattacaaggattaaaaatgaagacaggaagttaagatggtctctggtaatcgattaccaatggtgcgtaatcgattacca

SEQ ID NO: 18216 - DNA, 341 bp, Glycine max
  unsure at all n locations
ttcttgatcccaaaccggtgagagtgtgaccttactctgtgagtgaacgactagctatgagtgataatctttgcataaatctctgatttttagaatgaaatgtataaatgaggacatgatgaaggccatgattgtacatacacaagctcttttgaccaaacaacttaccatgaatgataattgcatcctttgctccctttttgagctgaatgatattgtcaaaaatttgaaccctgaacttaaataattatctcctgattccttgtttagattttagaagagcatatggttcaaggcaaatttactctanattttgggagggaagtcaattagaaatgaaa

SEQ ID NO: 18217 - DNA, 418 bp, Glycine max
tattgatttgtcatgaattgaaccctgaactttaaatgagtatctcctaaataccttgtttagattctaggagattatatggttcaaggaaaatttactctaaatttgggggaggaaagtcaattagaatgaaaagaaaaaggttaagcatcagcacacacaacaaataagttgtatgttaaaaaaaataagttgtgttgttacaaaaaggtcgaaagtaacttaagaaaagggaatagtgagaaggctatttgtacaaaacaagaaaagatcattgggattagtctaggacttgtgctctcttagaatctaaacttttgaatcctagaaaaaccagtgaaaatttttgtagccacaacctcactacaagcctgagaaagtccttctgattctatttatatatttctgacttgattac

SEQ ID NO: 18218 - DNA, 348 bp, Glycine max
gcatttctgatgaactttaccaaaaattgcggtaggaagtcccaagactgggaagctcccagtgaagggttctgcctttcttacagctgaaggatcatccagatcaagccttgctataagttcaccagcctgcaaaaggtgatacaattttattatctttttcaatttcaacaattgtacttcctatgtggaataaaatgctatatacctgcattgcttgaccttcagacattttgaaatgaataatcccacaagcaggcgaaagaaaggcatgcacatttttatgacctcaacttcagcatacggtgtgtcaccatcaacatgactgtcatctgcaaccaaatatct

SEQ ID NO: 18219 - DNA, 413 bp, Glycine max
ctgaagtgaaaggatgtgactcttcacatttgaatttgaatttcagcgttcaagggcactggtaatcgattaccaaaacattgtaatcgattacagctttttgaaaataattggaacgttgtaaattcagtttgaaaactttttcaaactcattttgctactggtaatcgattacaacaatctggtaatcgattaccagagagtaaaaattctttggtaaagggttttttcaaaaactcatgtgctattcaaagttttgaaaaactttttaatacttatcttgattgagtcttctctttattcttgaatcttgatcttgatttttgagatcttgaaccttgaatcttgattcttgtctctagactttcttcttgagtcttgaattgttcttgaattttatcttgaactcttga

SEQ ID NO: 18220 - DNA, 334 bp, Glycine max
  unsure at all n locations
tagcttcacatggagctacatcacagcagctgctactgtgcacccaacattgtcgcttcttctcttcgcgcctcttctcctcattcgtgcttccttcacgagtctcttctccacctctacaagtctcatctcctctgtcatcatgagtagtgttgtgtcgtcgataatgagtttttattttttggactctgtntactccattcagatttgcaatccatatgggacatgcgaaatacgaaatacaaaatacaaaatcataacttatatggattgacaattcgtatgtttcatacagattagcataaattgaagttacaaacaaaaaaactaacct

SEQ ID NO: 18221 - DNA, 415 bp, Glycine max
ttgcggatttggtctttgccggcaaaaggatcatatctggtctgaaaagaggcaaatttgatcatcctactttgatgagtgagaaagctggggcaaatgaagaggatgagaatgaggaaggaacccatgttgtggctgccattcctacatggccaaatttcccaccagcccaacaatgtcatcgcttagccaatatcagcccttctcattacccacctcccagtcatccaccaagtttgctagtcgcacatccaatgccaagcgcaaaccaaaacaccaaccaagaaatgaattttgcagcgaaaaagcctaaagaattcaccccaattccggtgtcctatgctgacttgctcccatatctgctcgataattcaatggttgctataacccccgccaaggttcctcaacctccttt

SEQ ID NO: 18222 - DNA, 329 bp, Glycine max
  unsure at all n locations
cattctatcttacgattaaaaacactatgacaaattacattgacacccgttatagtttcttgaaattttacacgatattcattgtcccctaccttttttaagcttatagtaactccccttaattgtttgaaaaacattaaaccctgtaccctttatacctaagaaacacattacatcataaatccctgacactcctgtggtttcttgaaattttcacacgatactcctagtccactacctttntaaggtaactcctttgaactgtttgaagcacattggacaatgtatccctattatccaagaacacataacatcttgcatcctataat

SEQ ID NO: 18223 - DNA, 415 bp, Glycine max
tcatgatgatgaatcaagttgattcaagttgttttaatgatgaaaaagatgatgacaaaaagcctaaagaatgatttcaagattaagttcaagatcaagattaatttcaagattcatcaagaagattcaagattcaagaataatcaagatcaagattcaagactcaaagattcaagaatcaagagaagacttaatcaagataagtattaaaaagtttttcaaaacattgagtagcacaagaagatttcacaaaattattaccaaagagttttactctctggtaattgattacaagaatgtagtaatcgattaccaatgtttttaaaacgttaagattttcaaaattcaaaatgaagactcacatctgttgatgtgtaatcgattacaccttaatggtaatcgattaccagtgact

SEQ ID NO: 18224 - DNA, 263 bp, Glycine max
tctttcttttacctcatcgtctctcacagtctttatatttgggagccaatccagtccttgtgttcggactctcagccacttatgatatccgccgatgatcccattactgcttaccctaagctctctgtcctttcttcacgccgcatcccatgccttgcgaactccttggagtaccctcgcgttgtggtcagtgaaacctcgtgcgatgaaaggcgtgatgctttcgtctgatggcactgctctcatgggacatccttcgcatg

SEQ ID NO: 18225 - DNA, 403 bp, Glycine max
ttataagcgcaggtctgggagacaaaggtttgtgttttcgatatgcgaagatgatgttcggagtactttggatttggtacgaccatgccctcctgatttccggctgggaaattggcgagtggaagaacgccccggcatttacgcaacatgcataatataaacctttacggttttaaaagctctatagttgggcctaggctttagagtttttccttttgttaaggctttgtgtcttttgtttttgaatttataatacaaggatctttcttcatctgttcctggtctctacccattctcattcatttgcatgtttacttctctttctgacacggcagatccgatgacgagtcccccgaaggactaatacctgcgacccgcctatcaccttcaagcaagaaatgaa

SEQ ID NO: 18226 - DNA, 246 bp, Glycine max
  unsure at all n locations
ttttgcttgaaggtgtgtaacccaccattttccatagtaaaatactggtaatgtgtctactatcattgtcatcattntttcgtcaatgaggtgccacttgagctgccaagttctccacctttgggcgtattctttgaaagatccgggccccctttttgcacatgttttgtagttgcatcctatccaaagccattatactgacgcagcctaacaaaggcaaccattaggtccttcaagaatggactc

SEQ ID NO: 18227 - DNA, 414 bp, Glycine max
ttgatgatatggtcttcaccgacgaaaggttcattgtgggtctaaaaagaggcaaatctgatcatcatgctttgataaatgccaaaaaaaaactagggcaaatgaagagggtgagaatgagggagaagcccatgctgtgactgccattcctatacagccaagtttcccaccaacccaacaatgtcattactcagccaataaaaaaccttctccttacccaccgcccagttatcaacaaaggatatccctaaatcaaccacaaagtctgtctaccgcacttccaatgacgaacaccacctttagcacaaaccaaaaacaccaaccaagaaatgaattttgcagcgagaaagcctgtagaattcaccccaattccagtgtcctatgctgacttgctcccatatctacttgataatt

SEQ ID NO: 18228 - DNA, 349 bp, Glycine max
ttgcttgtcttcttatataacaatagagaattctcggtgacacattctaaaacacattttactgaactcattattattgagtaaaatttattacaaattacaaaattttataattctataagtataatttcctattcgagctccacttataatttacaatttctgattaattttaattaaaaaataaaaagtgtgttaaaaaaaagttcgttaaagagtggcttactgatacttgtgtcctctcaacataataagttgtaacatggacatgtgacaccttgttatgggagtggtttctcaatatatggtctctcattttaaatcagatctatgtttttcgtattcaact

SEQ ID NO: 18229 - DNA, 405 bp, Glycine max
tatgtatccaatcatttgcattttgttttgtatttatacgataatgattttcatgtacccatctcttattcctgtttgtttctcttcttgcctttatttttatagcgttataattactatttatttgttttattttatttctatttccttctctttttctctttttctttttctcaccacaaacatacattatctgtatttaggctattgtatcctgcatttttattattgtatccgatgctttccaatgcattcgggaaaacttattttggaatttaaaatgaaaggtgtcggatgtaaaatacatttcacaatataacagaaggtgtcggatacaaaatagtaagagtgataaaaataaacttcctgtatttatagagaataaggcctgttggaagacttcct

SEQ ID NO: 18230 - DNA, 341 bp, Glycine max
  unsure at all n locations
tttctngaggatagagacttcttaagctatttatcttctctcttagagaggcttactcaagcttgaggatagagacttcccaagctatttatcttctctctcagagaagctctctaactttctagctttcttactctaagaagtggattcactcttgtcttggatcgactcactctacggtggctcactcaagcttgaggatagagacttcccaaactatttatctcanaaatcctcccaactacttcaaaaatttcctttgtactattaaacccactctaataatatttttctaagctatggataacactactcaatcgtcaactatttctgtccctatc

SEQ ID NO: 18231 - DNA, 411 bp, Glycine max
  unsure at all n locations
ntaggagaaaccataaaaactaaggtagttcctttacaaaaatcaattgaggaagcttcgccaagtatccctattgaaaaacctttattcaaacctttcaaagttagtgagaaggctaaacgaaaatttagggaacttagaaaaactagatccttaattgaaggcgtaggtgataaccatagtgaattacttaacaagattggtagtttacttaaggtcattccagatactcctcaagcctcggaaaatacttccaaaatggtaacaagaagtacctccaaattaattaatgttattaatgaagatagtgaccaaaactcagataacacaactgagataggatcagtgtcagaaaagaatataaatccaattaattccaaacactggataacaccctccaagttatattat

SEQ ID NO: 18232 - DNA, 355 bp, Glycine max
ttctttaaatatttcagatgaagtcattcgattattgttacttcataagtagcagcttggaggagatatatatgtttgtcaaatgttgttgacaatgtagaaacattgttaggcatgacaaccggatcgggttttgcttatcctatctcagtccccgattcctcatttccttctctacccctgtccccgaaattcaatgggagtgcatatttatgtgcatcccagtctccagtgaggttgagtatttaccgtcccgtcctgcccccgacatatttataaaattgtattaaaaaatctaatatttcatagaatgaaaaatataattgtaaataaaaatcacaatattgtacatgac

SEQ ID NO: 18233 - DNA, 419 bp, Glycine max
tgtacaggagataatgacaatttcgactttatgtttgcttggttgtccgtttgtcttattttattagaattaatatagaaattttgttattaacctcatctattattttattagaattttctttttttgtattattttattagaattattaattgttttaaaaaaacaaagacattctaagatggttctttgaaaaaccatcttagaaagtatacattctaaaataatttttgaaaaaattatcttagaattcttaatatttttaattgaaaaaaaaacgttctagccatcttaaaaaatataccttttaagaaggttctttgaaaaagtgtcttagaatccttaaatttttttgtttgtttaaaaaaagaacaaggattctaagacagttttgcagagaactgtcttagagagtttat

SEQ ID NO: 18234 - DNA, 239 bp, Glycine max
tcttgatgtcctggatcgtcttcatcaatggagtcctttgattcttgataatccctggctacagatttggtaaggcagaaaggtgattgtaaacgccactttctggagaaaatgagtcaacaacaagctcaccaccatatgaagccgtggataagagtttgaagtatgacaaaatgaccgaatggagagagagaggggggacgggggctcacagtataaatccctttgatgacgacctg

SEQ ID NO: 18235 - DNA, 408 bp, Glycine max
ttattctttgtacagtgaatacactcttattactctctcgaatatcccgagagaagagagtgagagcttagatcctatatccgtctatgagacaattaagaactagttagtgagccaaccaagcaccaaatcttctagtttgttttagagttaacaatggcttggtaggacaaagaatactacattgttcaagcttaatgataaacttggactgtaagagtcacaagtgacattaaaaaatacttataactttgaaaagttaatagaacttgtggtttaccaagaactggacgtagtatcaatgacaaagataaatcaatataaaacttcatgtgtctaatctttatttcattatgtgtgtaattgaccttaggtttaaatatgatttctgttttggaaaagttttta

SEQ ID NO: 18236 - DNA, 347 bp, Glycine max
  unsure at all n locations
atcttgccatccagctcgcccaggcgagccaggtttcctaaaaagcccaagtgcgcttggtttctatttgcaccccccatttactaaatacaccacttcctttttttgctgattcttttttcgtaacgttatgaaactttacgaattttgtaacgatacttgttttctttccgtaatgtcacggaaccttatgtattatgtattcatccctttttgggcttccggaaagttacgaaacctcacgaattgtgcaacaatgcttccttttgactntccgcaatgtacagaacttcacggattgtgcaacaatgcttccttttgacctccggcatgtcacggaacttcat

SEQ ID NO: 18237 - DNA, 416 bp, Glycine max
tcaatggaggaagagaatgagagagagagaaagattgtgtcgtgggaatgaaggaaagagagggagagaagtttaactttgaagtgtgtctcacaggactctaactcatcaaagttatcacaagtattacacatgcttctatttatagcctaagcagcttccttgagaagctagtgttacacccttccaatagctaagctcaccctcatgccaaaatacatcaaggaagaaagcttgcatgagaggcttccttggggaggaagtgttacacccctccaatagcaaagctcaccccatgggaacacacacccctccaatagctaagctcaccgccccccaaaatacaaaaaaaaagaccctactacaaagactactcaaaatgccctgaaatacaaggctaaaaccctatactacta

SEQ ID NO: 18238 - DNA, 331 bp, Glycine max
  unsure at all n locations
atcttgttgtgacccttaatgggccttcccagttgggaccaagcgttggggaatcttttctagcttcgcctcaaactcacagtacgaggtcactgggttgaaaggctcgtggttgaacctttgtattatatctctttatcactcagagcttcgtagtttattctctgatcctggccatctcttagacttcatctattgtcttgagttctacctttatgttttcttcattntgttgttgttggaacaatagtctccttgtccacagttcccctacttcgatggngatcatggcatttgtgccatatgtgaatcaataaggattttcattaac

SEQ ID NO: 18239 - DNA, 412 bp, Glycine max
  unsure at all n locations
ttttgaaatttcaaaaatatggtatttactctctttgttttaattaccagaggatgtaatcgattaccagtggccaaagtagtttctgaaatgttcttaaaattttgaatttgattttaaaagcctataatcgattacacaagacttgtaatcgattaccagaagttctaaacattttataaaagtctttagaaatttgaatttaaatttcaaagcctgtaatcgattacagcttgtgtgtaatcgattaccataacttaaaattcaaatttcaagtctttagagtcacaactctttagaaaaataactgtgtaatcgattacaccattttggtaatcgattactagtaaggaattttcaaaaataactcccaacaatcacatctattcaaatgtntttgaatggccatcaa

SEQ ID NO: 18240 - DNA, 328 bp, Glycine max
  unsure at all n locations
tttcttgtatgcttaaagtctcacgattgtcacgtgctcatgcaacaattgttagccgtggctatacgagacatcttgccaaacaaagtcaggttagccataactcgcctatgctttttcttccatgctatatgtagcaaagtcattgatcctatgaagtttgatgagctggaaaatgaggctgcaattatactgtgccagttggagatgtattttccccctgctttctttgacatcatgattcacttaattgtgcatatggtaagagaaatcannatgtgtggtccctgttatctacngtggatgtnacccggtgagcgatacatga

SEQ ID NO: 18241 - DNA, 413 bp, Glycine max
tgagtataattcattctttgtgttgtgagcctacttcattcatttggattattgatgtttctgtcacaatcaagcaattgttaacgttctcatatgggtgtacattgtggtcatgttttcgtttctagaattcattgaaatattattgttgattctgaataagtgatcatttttttttatttcaaaattattgtctcctaatcaatcgagtgttcatcttattattgatttctcatcttccaatcatgtcttgttaaactgcttgatatattgtgatgttgttattttgttacgaataaagaaagacttcactcttgttaatcacattaaggcattcgagaggaaatccttgagtaggcatgatccttgtacttacagatgaaagtaaacttaataagtcaagtacttgtgct

SEQ ID NO: 18242 - DNA, 336 bp, Glycine max
  unsure at all n locations
tctttctttaccctatatttatgatacatctagttcaacactagtttttttataattttattattatttatcttcaatctataaaaaaaataaacatatttttcttggttgatcaaggacgtgatacatgaaaagactatcttcatttgtccttgattgtttaaaaaaagacctacataagatattattaaaatattccttaccaacttctataatactcctactatatgttgaggacaatgcaaaaattgttaaaccatcaatctatactaagtcttataaaagtagtaatgcgcgatttagtctttntattttatatggtggggtatgtgatta

SEQ ID NO: 18243 - DNA, 412 bp, Glycine max
ttgataaatcttcggtagtaaccagtcaatctattataaccctttaactattagacattggtaggcttcggccaatctaacaccgcttgcaccttcccagcatccaatgctactccagctccagagactttatgaccaaggtattccacctcaagtaatccaaatgaacacttagagagttgagaaaataaaacatactattgtagtgtctgtaagacatactccaaatgacacaaatgagtagactaggaagggctatagaccagtatatcatcggaaaaaaacaagcacaaattttcctaactcattttgaaaaataatgttcatcaaacattgaaaggtagttggtgcatttgtgagtccaaatggcataacaagccattcataatggccatgatgagtcctaaaagca

SEQ ID NO: 18244 - DNA, 335 bp, Glycine max
ttcttgtccttttgggctttcactaagggtggaaatgagtgagccaaacttgaattgagttgaacacataaggcttgagtttgactaattatctctaataggcttaactttgtcatacataaaagtctagcttggcgagtctaattaaaagcttgcttaaagacgtctttgatcaattaattattttaaaatctagtgaaatactaactaaaaaaaagaaacttataaaatttaatatgagtaatgtacaaatccaaaaataattgataaacaaaatcatattgaattcaagtagttaaaatacaaagaatatataaaaaatgaaaaaaagagag

SEQ ID NO: 18245 - DNA, 410 bp, Glycine max
tggccgatggtccgcaacgaattgatcaaagaatttggcaaatggtcgcatgactacttcatcttcttcggtggaacacaaagattcgaacaattaaggatgtcgctacatgttgatgggttctcccaagtatgttgcatttgctaattttttttaaaaaaaacaaagttttaaaataattacatgtgtatgtttctttgattcaggttagtgtggacaagtggatggatataatggacataggatatgtcattgtatctaggtataacgtaatcgttatcccgacaacaaagcatgacattttttcctctgagaagtcaaccaccaccaaattattttattcaccgcatgatatgtgtcggtcacatgtttggaaatcattttgttcaggtacattgaatataattatt

SEQ ID NO: 18246 - DNA, 343 bp, Glycine max
  unsure at all n locations
tttcttctgagagtgccttattgtgtgctttttttttgggtaagaatactttgggcttacaagcttctgagggtgccctattgtgtgctgtttttttttttagacaaattcccttatcaatcccccaaattaaggacttatcataacttgaaacccttatgctttcttagaaccctaaaacaaggtcaaggatatcaaaattaagctcaggggtttattcaaacaaatcattattacttttggctcaacaggggtgcaagggataaattcatcacaggttagcttnttggctgagtggctaaaataaaaagaaacatggccttgatcatatccaccttatgta

SEQ ID NO: 18247 - DNA, 411 bp, Glycine max
tgccacccagctcgcctaggcgagctcatttcgttcatgcgagctaggttgcttcctccagaagcaaccgccttctggaggaatatcctggaaggcccaagtgggcctggttgctatttgcacccccatttttactaaatacaccccttgctctttttttggtgtttttttcgtaacgttacgaaactttacgaatttcgtaacgatgcttgttttctttcagtgatgttacaaaatcttacggattacataaccatcccctttttttccttccggaacgttacagaactttacggattgcgcactaacacttccttttaatttccggcatgtcacagaacttcacagattgtgctacaatgctttcttttgactttcggcatgtcacggaacatcacgaatagcctaacg

SEQ ID NO: 18248 - DNA, 334 bp, Glycine max
  unsure at all n locations
tttctttaacataaagagcatacttatttttacaacgaacaaacccattgtcttggaagtacttgtcaatgcgactattccatgccctcggtgcttgctttagaccatacaacgccttgttcaatttcaagatatttccttcttgacctttgatgagaaaacccattggttgttcaacataaacattttcttcaagatagccatttagcaatgccgattntacatcaagctgaaaaactctccacttcatttgagctgccaaggaaataaaaagacgaattgtctccatgcagacaaccggtgcaaacacttcatcataatcaactccatattg

SEQ ID NO: 18249 - DNA, 409 bp, Glycine max
  unsure at all n locations
taaattgcctcttggatcaatggttcatattgttatccatgtttctcagttaaagaagtttaatggtactgctactgctgggaactttagtccttcacctttattggatacttctcagaaggaacctgcagctatcattgacagaatgacagtcaagagagaaaatcgtgctgtaaccaaagttttggttcaatggaaacatcaactacctgaagatgcaacttgggaattcttttatgacttgaatcagaagtttcctcactttaatccttgaggacaaggattcttttgggtgggaggaattgatacaggcttangaaggtagttagttagttagactcgattctgttaacttctgttagttggaaagtagttaggcagttagtggttagaagctataagtagcaat

SEQ ID NO: 18250 - DNA, 116 bp, Glycine max
  unsure at all n locations
actctcagtacaatctgctctgatgccgcatagttaagccagccccgacacccgccaacacccgctgacgcgaaccccttgcnggcgcatngaatataacttcccataatgtatgc

SEQ ID NO: 18251 - DNA, 353 bp, Glycine max
ttttttttttcttcacaataaggccaacttatttacctccgttcgttaacgaaatgaaaatgacaaagtaatcataatttcataatacatggatagcaacgtaagcaaaaacatgatagagtggcaatcatagaaagcacctcacaacaatgtaatatatttattgacacataactgtcaataatagtagaaacttgtttacaatatttaaacaattgtatcgaaaacaacacattcattcttcctatgtcatgtgtaactatctacaccggatgttcttaacttttagaaaatatgctactcatttcttgtgaattgtgtcatggtctccaagtataacggcgggccatcaa

SEQ ID NO: 18252 - DNA, 410 bp, Glycine max
tactgttgacaaaaatcttattgatgttggttatttaatggttttacttgcagtgataaggccttaactttttacttatatgcacattttctaattatttttgtttaaaccaataaggtttttacaaaaggagtggatgcggatactgtggttttgatggcagctcaagcttcaagacttgagaatcaagatgcaatagacactgccatagttggaatgttggctgatccaaaagaggttagtcattgatatattattcaccgcgattcttttgatgacatatttattagctgcaagcctctaactgtaatctgcagatcatcataattgttactgtattttagtttgcgttttaattttcttgtctaacttactgctacaaaggctcgtcttggtatccaagaagtaca

SEQ ID NO: 18253 - DNA, 360 bp, Glycine max
  unsure at all n locations
tgcatgctatcttangaacccaaacttgtagcttcaacgcaaggaaacatgcttatggctaggaatccaaaatttggttttagaattagaaaagcatgaaaattaagacttgcttgtgagagtttttgctcgaatttgggctgccccatgtttgatactttgcatagaggtagcgtggaaaacaccttgcaatagtgtgtatacataggtaaatataaggggcatgaaattctttgcaaagggtgaaggagtattgaggtcgctttctaaatgaatgtatgatagcacgggattcccttttgaatgcaagtatgtacataatgtaaatagcttgccaatatgcataagtgtgagtgaaac

SEQ ID NO: 18254 - DNA, 407 bp, Glycine max
tctggtgggacatcttgacttgctttccaatctgacattcaccacagattctgccttcttctattttcagattgggaatgcctctaacagcacctttgtcaatgattttcttcatgcctcttaagtgcagatgtccaaatctttgatgccatattctgacttcatcttctttggaggatagacatgtggaggagtagctggtttcttgaggtgtccataggtaacagttgtcctttgatctgctgcccttcattagaacttcactcttctcatttgtcaccaagcattctgactttgtgaagtttacattgaatccttcatcacacaactgactgatgctgatcaggtttgcagtcagtcccttcaccagcagtactttgttcagactaagaagtccatcatgaact

SEQ ID NO: 18255 - DNA, 318 bp, Glycine max
ttcttcagaaaactatagaggataatgccacggcgaccgcctccaatacagctagggaagcggaactggtgctacatcccgcaataaacttaggccaagatagaaacacgatggtgttcggccggaggtatagtcctcaagcttacccttatggcttgcctccagacttcactccctgtaccgctccggacaatttgaaccaagcccctaccttcgaggggcaactccctccttatgccgattatcccctgcaagaagacgatgaagaagatgcccgtctaggccctctacttcccctcaaggatccggccccccatg

SEQ ID NO: 18256 - DNA, 420 bp, Glycine max
  unsure at all n locations
ntgatgacctgaaactcactcaaagaggatctctttcagtttgaagtaagataactgtcccacaagcaaaatatgagcaaacataaggatcattgcttgctgctatgagacaaaaagattatgaaagcaggcttgattgtggcaacttaagatcgcccaaaccacaaagataaaactagcaagaacaacatctttagcttgcaggtgaacaactaatttgccaacaaccaggataagatccataggagaagcaagattaaaaccatgaccagttaagttatagatgataaccaagaccaaatctaatctccaacccaacttcttctaaaagagagcatactttgtgcaaagcaagaatggtcaaaattctttgtaacatttcctagaaatggaaagacattaaaaaaatatatgaaaaat

SEQ ID NO: 18257 - DNA, 321 bp, Glycine max
  unsure at all n locations
ttcttttcatggaggtgagcttagtttttagatgggtgtgtgtagctaagttctagcttctcaaagaagttttctcaaagaagcttctcaaggaagttttcttaagaaagcttctcaaggaagctacctagtctataaatagaagcatgtgtaacacttgttgtaactttgatgaatgagagtcttgtgagacacaactcaaagttcaacttctctccctttttcttccttcaatttcgtgctcccccctccctctntctctccctctttcttttcctccatttgagcatcctctccaaacttcttatccaaggctcatct

SEQ ID NO: 18258 - DNA, 417 bp, Glycine max
tatggtgaataccaatgtttttgtagcatcatatctggtaggctcatcttacgtgattctgccttggctttatctacacagacttcactcaagtcagagaaacagaaagctgatgactttgaaagaaaatacaacgaagcccaagtttgtagcgaagaaagaggtaaaaaactggaagacacggagaagaagacacgtcagcttcaagaatcactgactaggtaatataaataatgaaaagtatgccctgatgtaattgttttcccgtgataatcaatgatgtcttgcaagggagagccttgtcacaatgttaaggttgttacttgtaaccctgaggttaccagtacaaatcttggaaacagtctctctgcttatggagttacagctgcatacatttactactccagaccctacttg

SEQ ID NO: 18259 - DNA, 343 bp, Glycine max
  unsure at all n locations
ttcttgtgttacgtcggtagaacaaaccctcagctgccatcaacagaaaacatacttagccgatgtcagcataaaaataacaatgactaacgttaaccgaaaacctagcctatttgaacaaaaaaatatccataaaatgactctggcaaataccctagcttgatgtcgaccaataaacctatcatatgtcaaccataaaatggcattggcatcgaccaaaaatagccttgaccattgtcgaccgaagaacatcatcaactgataaggtctatcctattttaatgtgtacttgtttactcataatggttcttgttgcgcagtccaaccattntgaatgatgtga

SEQ ID NO: 18260 - DNA, 406 bp, Glycine max
  unsure at all n locations
tcttgcgtagccgctcttggtgctcagaaaattttaattttttatccctcttattactagctattgtgaattctttagttcctgaatgtacaacattcaaattgttgctcgttcccctctttcttttctgcaaaaaagaaaatcaatatcaaagaaaacatggatgaagtcctaagaaaatcaatatcaaagaaaacatggatgaaatcacaattaaaaagcacaactaccaatctttcagagtcctttggttaatttgtcttgtctccttatgtggtggggttctgtttaataatattatacttttgccttccaaaaaaaacttatgactgatcctcttttcattaatcctattntgtatgttattgtataaaagatcatgggttctccacctacctccactcct

SEQ ID NO: 18261 - DNA, 337 bp, Glycine max
agctttgttgattctgcctataaggtggttaagcacttgttgttggttcgcttctgtcttgagtggttaagcatcatgtttggcttatgctctggatggttaagctttgttgcttctacctatatgatggttaagtacttgttgttggcttgcttctatcttgagtggttaagcatcatgcgtagcttctgctcttgatgattaagtttggtttgcttctaccttttaggtggttaagtggttaagcattgtgttgtggcttctgcttaatggttaagcatattccaattgtctttgaatgttttcagtcattgtcaatctgttgcccaggggagtg

SEQ ID NO: 18262 - DNA, 413 bp, Glycine max
ctcctctccctctccctctccctttatgtatgttttgcgttcctcctctctcttcttcttctccgccattgtatttatttaattacttaaatttgtttttttaagttggtttttaataattaattaattcaataaaaaattaatttattatttttgtttaatcaatttaattatatttgatatttgaaatagttatttgtaaaatatttaaatatcattgattccaaatttgtataagtatatattgtacatattagtttgacaagaaaatttatagttgtaaatgacaaaaaaaatttattgatatagtgatataaatatttttatactaatagtaataaatatttatataaatagtattttaaagtgtaaaaaatactcatttattggaaattaaaaaatttgtagtaaga

SEQ ID NO: 18263 - DNA, 337 bp, Glycine max
  unsure at all n locations
ttgttgcattcttgcatcaatcatcagcaaacttagaataacaatatgatataaatagtataaatagcaacatacttttggaggcaccaataattgtgtcctcaatttagctacttttttctttgaactgcctgggatgatactctgcaagtaccatattcaaattcaaatgcattaaattatcaaagacatagaagataaaccccanaccaaaattagaccataatgcaaagtgagagaaaacaacatgggaaaaatcactttttgagagcaaaaaatcagattcggaaaaaatattgacagagagagcataaacttctgtatccaatataaaaaa

SEQ ID NO: 18264 - DNA, 405 bp, Glycine max
  unsure at all n locations
tttgctcatgagccaaagataggtttagcttctctttgtactaccctattatagctagcatgctttactccgtggcttctaagtgctgggccaaactcctcttggatcttgagcaagcagctaactcttcttttaagaccatgctatgtacttgtgattggtctctctcttccctttgaagcttgagctcattgttgctgccccacaaagctccatggaatttgtctcggctatgctcttccttgcgagccctcttggtttctcgttcaagggctcttgtggtagctgcattttcttctcgtaactcggcacactctntccagacgtttgtagtgactaactagaatttttctttggcaagtcttgctattcctagttctggttttagagctcggacttcttcat

SEQ ID NO: 18265 - DNA, 299 bp, Glycine max
attttcaccatcaccatagccagccaacactcccctcaacattcaatacctccgatctgcactttctactcctaatgaaatccatcttgctgagttacccttcaactctacccaacacggtttgccatccaacatagagaacaccgagaagctccctttcactcacatagccaaactctttctttcaacactcagccttgaagctcctctttgctccttgatatcacagatcacagaacaagagggtcaccctccactttgcgttatatctgacgtgttccttggctgggttaacaaca

SEQ ID NO: 18266 - DNA, 415 bp, Glycine max
  unsure at all n locations
tgtagtgcagctccagatttcataattggttcattatcaggatgatagtcacagcctgcttcaaggatttgcttaccagatgacagtaaagttggaactttgtcatgacgaacctgcttctgattctcttttaactcaaaatcattagcataaggaagattagtatgtccattaaaataaccattgtttattgcggaagcgtcaagaagtgggttaaagaactgaaaaataaaaccagctgccaaacttgaacggtaagtggtttttgaggtatcatctttaggtacaatagtggctgtaaccaagatgacagcatcgtatagaatgctagcacttaaaagctttccagctaaaaactcctcaacattntttgctctgattgcatgcttactcccataagcaccaaaagacaacc

SEQ ID NO: 18267 - DNA, 295 bp, Glycine max
  unsure at all n locations
ttcttcaaaaagctgtgaaaagatgtaattgaatatttgaattgacgaagaaatcgagttttgaatatctaataagaagacttaaaaatgactagatcttggcgttgtaaaagaattagctgcaagtcgttttaaggaggaaatattaatataaaagcaagacttgctgtcataaaaaagttgtacgtaatgggaacgcataaatttgaaagcaagacttgttgacatatgtngcatgagtcctctgtgattcattccgtcttccaaaattccatcaatctggttttcatattat

SEQ ID NO: 18268 - DNA, 414 bp, Glycine max
tttgcaagtattttacccaagaaaacaggaaagttttataaaaggaaaacagaaatataatagagatgaagtccaacaatacatacatccaatgcgctcagcttcaaccatacgaagatctaaaggaatttcttgaaactgtgcagcaatttgatgatctccaagagataaattgtgtgaaacatatgcttttatggtgcctgctccctttgtgaatcctgtgtcaacggtcaaatggataggattgggtacttctcgagaataaaattcatggattaatgcactaccaccagttactccaagaccagttgaatacctgcatgaaataaccataattagctacagtgaaaggaggttcataaactggtataatagaacattctctaagaacataaagagtaagaaggaataaaa

SEQ ID NO: 18269 - DNA, 234 bp, Glycine max
  unsure at all n locations
ttcttcctttgcttagattatgatactaaaaggggaagtgatcttttgtcatatttacaatttggtaacttttgtgagtttttcagatgtgtttgcatcgttttatgtactagttatgttaattaattntaaaaatagcatagtaatgcttggaagaatgagccatgtgttgatttttaatacctcatacttgtgtgtttgatgttggttcattatgcagcttanactagtctc

SEQ ID NO: 18270 - DNA, 399 bp, Glycine max
  unsure at all n locations
tcaggctgctcgattgctccaggttgctgtattttaggcaaaggtctgtatggtggtcagcagaggagcacaaaccacaaacccttgtgtcgcaacctacccttcggcgggagggcgacgcgagactcgcgggatgcgtgttccacgaaaggaatacacgcggagtcgccaccaacgtttatttgaggaaaacgtcggaaaaaccggaaaagacgcgatctacgaacttttaagtgaaaggttcgggagttgtatttacgcacggggaaggtattagcaccccacacgtccgtcccaagggacggcagcctttaatcgaatgtgcaaacatgactttgattttttatgttccctttntatgtccttatatcctttataccctttttatanttntctctt

SEQ ID NO: 18271 - DNA, 278 bp, Glycine max
tcttgcaaaatgtcaactaagaaaacataagatagagtgtaaagtacattgtaaaatttagaagacatctaattttaggtgtcttagtttaaattatgcaatatactataataatttaatgtgaaatcaaacaaacgcataagagaaagggtaaaaatataatttttgaaacaaatattctcctatcagatgaaatttattggaattatgaattttttcttgctatcagtgtcacattttggttaatagattttgggataatgctataaagtttaatg

SEQ ID NO: 18272 - DNA, 405 bp, Glycine max
  unsure at all n locations
ntgaaaattgaacacctcaaaatgaaaattcggtgtttatgttgttaatggcgtttgtttggaggcaaaatgatagaggcatgtgggggcaaaagcaaatattatttcatcaatgaatttggccccacttcaaacccagctttttagtttttattttctttttggtgatcagcattttaatgtctctgtagcatgagaagtgagaattcagattacatagttaaattttagctgttgctaaaacttagccacatgtccatactccatactccacagttctcttctccaatccttccattttattttccacatcttttatttccagaaaaaaaaatcatatgatttttgtcattaatcagcatgaagggtctcattcattgccatagttttctagtaacttttaat

SEQ ID NO: 18273 - DNA, 352 bp, Glycine max
  unsure at all n locations
tttcttgcattcttggaatagatacacggaaaacattctcagcctgaatatccttcaggagataaatgttaagatttatcatactaagtttgatgagttcaaagtggagttggagaggcgtaatttacacaaacgcctcaccaacctccaggatggaagcataaacatggttatggttaaggaattctatgctaatttatacacctcagaggaccaagctccaaaagcagctagagtaagaggacacctgatcaaaatagatgccgacaaccctaatgagtntctctagactccagtggtattagaggaggaggaatctttacccacctgttttatcatgtggcctctgaat

SEQ ID NO: 18274 - DNA, 406 bp, Glycine max
tttgtgtgaaaggatgtgactcttctcatttgattttgaatttcaacgttcaaaggcactggtaatcgattaccaaaacattgtaatcgattacagctttttgaaattaattggaacgttgtaaattcaacttgaaaactttttcaaatccattttgctactggtaatcgattacaacaatctggtaattgattacgagagagtaaaaactctttggtaaacatgttttgagaaaaatccatgtgctactcaatttttgagaaaaaccttttcatacttatcttgattaagccttctcttgattcttgaatcttgatcttgattcttgagatcttgaaccttgaatcttgattcttgactctaaactttcttcttgagtcttgaattcttcttgattcttatcttg

SEQ ID NO: 18275 - DNA, 327 bp, Glycine max
ttttctttgaatgggctaatgaggatagctgatgccagctccattggagcttgtaggcctaagatcttcttcatcaatggattcctttgcttcttggaagatgaatggcagcggaatggagaaagggagagagagaggagacgccacttcaaggagaagatgagtctagaagaagctcaccaccatatgaggccatggataagagcttggaggaagaaggagatgaatgaacggagagggagagaagagcacgacattttgtgctccaatgaactttgaatctgaagttaatatcaaatgatccaagtcaaaaaatgccaccctgac

SEQ ID NO: 18276 - DNA, 407 bp, Glycine max
ttttttagtagtgaacaaaattatattcctctattaaatttgacttcagaaggtgcatgaaaaatcccaaaaaaatctttccaatcaagagatttacctcttgcatttgtcgaagcaatggtagcttccataacccataaaaaaggattcatcataaaatgttttcataaacgaccaaaaaaatataaacgtatcctgatttttcactccctcactagctttggctttcactactctttcacaaacccttaaagattaataagctctgatatcattttgaaaaaaacattaaacaaaacataaaatggagtttaagatcaaatcataaaatgctaccaaacacctgcaataacttatataagggatgtttgttacgaacgctactctattgctatactactactaag

SEQ ID NO: 18277 - DNA, 343 bp, Glycine max
  unsure at all n locations
ttcttggaatccaaacatgcagtaaatatcaatgaggaagttttcaaaacacatcaccgtatattacaatatacaagcaaaactaacaaggatttgcaaataataataataataataatagtaaattaatgaatgaatgaatgaataaatgaacgtacttgtgcattgtagcacatgcatgatacaagatccataatttaattatttgaattgaccataaacttgtctagaaaatcagaaaaaatggaaaaagaaaaggccaagatccataataaaaatcaagatagaagagaagaggacccttacgctaatctgaagaagaagaaaganaaatgaattgaat

SEQ ID NO: 18278 - DNA, 410 bp, Glycine max
tcaacatcagaccacgaccagggtgctggaactatttcacatggacttgatggggcctatgcaagttgaaagccttggaggaaagaggtatgcttatgttgttgtggatgatttctccagatttacctgggtcaactttatcagagagaaatcagacacctttgaagtattcaaggagttgagtctaaggcttcaaagagaaaaagactgtgtcatcaagagaatcaggagtgaccatggcagagagtttgaaaacagcaaatttactgaatactgcacatctgaaggcatcactcatgagttctctgcagccattacaccacaacagaatggcatagttgaaaggaaaaacaggactttgcaagaggctgctagggtcatgcttcatgccaaagaacttccctataatc

SEQ ID NO: 18279 - DNA, 381 bp, Glycine max
agcttggcttgtgtagaattagggtacacaacttttataatacccagggcgcagaattccacagagaccacaatgcctatttcgggaaaaaaaactctggaggaagcaagaggagcagcttttgcaaggatacctaagttttgtaatctcatttttattattattaaaggtttttctgtaatggcttgctaaacacccttgttggggatttctaatgaacagctgatgtaattattttaatatctattgattgtgtttcttgtgttcaatgcttctttcagtgcttaaatttcgtatgctcttggtctagtcacccatttgtgtgcatagttaggtgactttagcattgggaaatgtattgttgccttagaacttgaatga

SEQ ID NO: 18280 - DNA, 437 bp, Glycine max
tgacactataaatctcagcttccatacgagctgtcctttgaacacccagatgacctcccggtgtggaagaatgatagaactgcaggactgagtctgtctcatgatctggaatgcatcgtctaatgacttgatcactgcacaatttccacaagtaggggtcatcccaaataaaatgcttagcatcacttttaattttatctttttgggccttagatgctaagggaggaaaaacagaagcaactaaataattgacaatgttagcaaaccagggagtagaaaaagaatcagaaatactatacagtatatacaaatgatcatccgagaaatcatcccgaatgggtgaattctcatcagacacatgttcgatccgactcaaatgatcaacaactaaaatttgtgctccgctcctatcaccgatctccaagtcaaactcttgg

SEQ ID NO: 18281 - DNA, 371 bp, Glycine max
attttggtcatagttttgtcaaagcctactaatcattggataacaaaagttgtaatagttactaaggaggataagttatttaatgaactaatcagtcgctatgctcataggggaaccattgatcctaagtatgatgtaaaggatagactaatatttataaaagggaaattgatgattcttgaaaattcatttttgagaaaccagattttacaagaatttcatgacactaaattgtggggccatgctggaaagactaaaaccattgctagaatttgcagtcaattttattggcctaaaatgcaagaagatattaagtgctatatcagatgttgcagtatctgtcacaggctaatgtggatcaagcagtacct

SEQ ID NO: 18282 - DNA, 401 bp, Glycine max
ttatacagatgaccacttgcgtattttcgcctgccctttaacttcacgggttattattgacagagattgatggtgcgcggtatatgacgtatatctctgcacgtcacctgagttcagagtcagtgtgacacaaattgcggggcggccgacaaaagtgagtctcttgctcctacgtatcctcaatttgtgatgaggaacttaaacttacggtattcttgatactgtgagactaaatagtctcggtgttttttcactacaatgcgaacatgcattagtaaagaaacaaaacttccaactgatcaaagcaacatatgcttttttctatgaagacaatgtgtctattgcggaaagagagtgtactgataataatttcacataaccatatatgagattttgatgat

SEQ ID NO: 18283 - DNA, 361 bp, Glycine max
tcatttaatagactagattattatcctaaactagaatagagtttttctaataagccaataataaaactaagtgaaagcaatgttgcaggtgaatgcagaccttgacatggaactaaatccccaagcacaaccatggccatatcaagcgaagagccttaatagaatgtttggaaatggtaatcctcacaacatttgcaaattgcaaggacacatatcactaacagttccctcttcccatgctaaatttaattaagagcatgttgttccagtttttcttattttcatcctctagtgtgctcaacataggagattatgtgactgctgacagaagggtagtagtactagatcatgtatctatcat

SEQ ID NO: 18284 - DNA, 392 bp, Glycine max
gatgaaacggtggccttctcatggactctttcgaatgaaaatagcagcatttcttgcactgaagttgtgggagtaggaagccatcttctcaatcaaattcctaacctcagtatgggtcatatcaccaagagctccaccactggcagcatcaatcatactcctctccatgttgctaaggccctcatagaaatactatataaggagttgctcagaaatctagtggtgaggacagctcgcacacaatttcttgaatctttcccagtactcatacaagctctctccactaagttgcctaatgcctgaaatgtcttttctgatggcagtggtcctagatgcaaggaagaatatctccaagaacacccttttaaggtcatcccagctgagaatggatc

SEQ ID NO: 18285 - DNA, 347 bp, Glycine max
  unsure at all n locations
agtgntttcgcattttttcgcgtgtatgatatccactccgcaaggtttgaagttgaagagaccttccatcctattacgcaacgggggggacaaaagtgggctgttaacttgaatggtcattattgtcaatgcggaaggtattctgcgcttcactatccatgttcacacattattgcaactcgtggttacgtgagcatgaactactaccaatatatagatgttgtttacacaaacgaacacatcttaaaagcttactccgcacaatggtggcctcttgggaatgaagcggcctattctccttctaatgacgcatggacacttattcctgacccaactacaattcatgc

SEQ ID NO: 18286 - DNA, 307 bp, Glycine max
atcatcttacttataccccatgtcctgtcaacaggatgtgtcttatcattaaaaccaataacaacctgtcaaataactacataaggtatacatattcttcgattattagcgaaaataattacagaaaacaacttcttgattgatcatttctgaaagcccaaaatgttcacgtgataaaatgttacctgctctcattcataccaatgagaaaatgttttgctacaaacgattattgatactttaatttgcggtatctatacctgagcctaatattgatatttcagagatacatatatgtgaagtgtcc

SEQ ID NO: 18287 - DNA, 358 bp, Glycine max
gcaatctttggtggttttgtattccaaagcttgtatgcatctccagccattggtaggattgtgtggtcatacataccatcaagttcatataccctgatgctcatcataccaggccatacagtatctccatctcgagttactgtatctggattaatatcaagaatggatgtatttgaagtctgcaatgctgtacattcccgcaacacagtcaattcaaccatattcttccttttattataagaaaaccccatccttagcaacagcaagtaactcatcataatacatgagcagaaagaattccaaaatgaatatattgtatgagtaaacctattttataccttgacagacaccacagacc

SEQ ID NO: 18288 - DNA, 428 bp, Glycine max
  unsure at all n locations
tactcacgcttgttgtattagtatcttcaacaactgatttcaaacttgcttaatttagtttgtgaagaagattatttaattttttggttcatattttattttcttaaaagtgttgacggagaagtntattcaataagacctatatgaaagtgagatgaacccaacattttcaataggtgaaaatgaacttatgcaattcaggttctatattacgctgcaaaagaagttctaacaacaaaacaatgaccatgaacaattcaaaaatcaagatttgtgacttgtgaggaactcacgaggtggaataaacttcttgctgagtagcagaatctggaaacgctgcgtcgaaggtaaagtggcgtccgcgaagcctattgagtctaatgtaatcgttttcattagcaaactccgtgagataaacgtcacggcga

SEQ ID NO: 18289 - DNA, 409 bp, Glycine max
gctcctcccaggatcctctaagtcgccttttgcctgctatcttgacaatggcctgctagattttgagcctctggtgcagaatgcctctgacgacttttaagtctttatctgtaagacccctgtggacgactgaagaggagcaacctttgccaagatacctaggttccgaaatctcaggtttcataaaaagaaggcgtagttatagttggggaactgaatctccctggtgatttttatatcttgaatatggaaaatggattttctcaaggatcaggtcccatcattctatgcagaccctttatgaaaactgctagaactaagatagatgtttatgcacgcacactgtccatggagtttggtgatataactggtcattataatattctggatgctatgacatacccatctg

SEQ ID NO: 18290 - DNA, 354 bp, Glycine max
gatcttcctttcgggccttcttggtttctcattccaaggcttcatcggtggccatatcgacgtgccttagttcatcatactctcttcaaactttgatggctatggacttgaacttctctttgactacccgggctctttcaagctttgcctttaaggctagtacctcatcactttcttccgaagctttaacctcattgtctctcacagtatttagaattgggagccaatccaatccttgtgtccggactctcagccacttatgatagccgccgatgatcccattactgcatcccctaagctctctgttatttcttcacaccgcatcaaatgccttgcaaactccatggagtacct

SEQ ID NO: 18291 - DNA, 363 bp, Glycine max
ccctatttttctattaatagggggggaagttgaaggaaaaaactgtcaacccttccggttattcgagatcaattgaaattagtggaaaaaattggttccgtgaagaaaatccaagccgaggcggttccgtaacggttctgttacgtttccgtgggtgatttcgcgaagattttcaaccgttctttcacgttggtcgatcggtctttgtcattcttcggtcttcaaccgttaagttctcgaaatcgaacttttcaattcattctatgtacacttagtggtcctcatttgttttcacgggcttttattttcattcatttactttctgtacccccttttgacgtgctcttgtcatttacttaagtc

SEQ ID NO: 18292 - DNA, 397 bp, Glycine max
  unsure at all n locations
tgggcccatgataaataanagtatgtgatagacatgcaaattaagataacgtgagagagttgactgttagcaaatcacacgtgatggttgtgtaacttatgtgtgaacttgtgcaagaattttgtttggatattttggaatggattgttggacctttatgtcatatttgtttgctagttcatgcgggagaatagagactcacctatacacccaacatttttcagataaacttatagatgtagttcgtttatcaaagaagaaatggatttcactacatcaatcactaccagtgtagatggacttgttcgtgaaagaaagacctttcaaggataccgttagacattggatgacccaaccatctcttagagttttgatgaggacaaagatataaatatgt

SEQ ID NO: 18293 - DNA, 385 bp, Glycine max
agtcaccttgttgctgcattctttctagcttttcattggtgtattatgatctccttttggtgctctaaattgtgggaatgtgctcaaatatgtggggcaattttggtttgttttcttgcttgattaggttgaattgggggtttgtatgggatggccctaagcctataatgcattttgaagcaatggggcatgccacattgtccccgttctcttgctattgatgcctaaacgcgcgcccaccaagtgtttggtgaaatgcctcaatggcattagcgcgtgacttttgtaaagaaacaacccatggggcatttcggtttgacatattttctattttttgggacatgcattcattcccaaagggctagataatttcccacatatttct

SEQ ID NO: 18294 - DNA, 405 bp, Glycine max
tctagccaaatggacttaccttgttttaattcctttgatagcccttttgagccttgtttccctttccttgttttgaagctcactacaagccttaagtgaaaaaccatgatattaccatatccttaaggaattttggagctttggaattgttttgggaataagtgtggggggtttttgtttcattggacaacttgttttgttggctatgcttcatgatgtattttgggccatacttgatgtacattgtatattggttaaatgttggacatgctgaatgaaatgttgtttctcaaaggctaaagagtaaaaaaaaaaaaaatctaaaaaaaaaaaaaatctataaaagaaaaagaaaagcaataaagttgagtgaataagatcttaaatggcacaagaatgatgaaa

SEQ ID NO: 18295 - DNA, 229 bp, Glycine max
  unsure at all n locations
ttatctattcgatcttagcgagagtgattctcctacacgcttgagcgagacaagaacaccctggctgtatcaaaagactatcacaacctttgtgtgtggccctagcaggaaagagagagtgggtccgttctttcatcttaccctagttatttgaaaccacaattccagaaaagccagctctgcccaaaattatctggaggacataactccngctctacgcactcaaatt

SEQ ID NO: 18296 - DNA, 353 bp, Glycine max
tctatatatgctgaacgcatttcatcaatacagcacttgtttgagtatatattcgagacaattataagcgggatctctttctatcttagatgagaagtgattcctcctgagattcttgagtgatttagaacaccctggctgtatcaaaggactttcacaaccttagtgtgtggccctcgctggaaagagtgagtctgtccttcctttcatcttcaccctagatctataaagccacaattccagaaaattcacctgtgcccagaattatctagtggccatagctcccattttacgcactcaaatcaagtgatcctgcgaggctacattgaatttcataaccagacctttcacct

SEQ ID NO: 18297 - DNA, 374 bp, Glycine max
ttcttgcaacatatcacctatgttcaccactagggttccttcacatgggtttatatctatccactctcccttatttgatctgacttgaagccctcctatctcatgttgatataagatagtaatacaactcatatcaatgtgcatcccaagcccctcaacttgatcttctataacttctggagctgagtaatcgtttacccaacatatccaaccatgaacactccttcatacttgattcacttcttgtctgttcttttggttactttcatccgatagtcttcatgatgcaaaccatttaccttccaaaagtttacctatacctcaatttttgctactgcacatggtaattggtaagcctaacaagtacatggaaa

SEQ ID NO: 18298 - DNA, 396 bp, Glycine max
  unsure at all n locations
tgttcattagattnttcaaaaattattataaaatattccaagcatcataagcataaatgcataacacaacaaatctattctcataaacaacaacaaaatccgccgacgaaatttcttgatgataatgcttttttgataaactaatcaacgacgctaagaaattgagttaaaccttgattcctaatcagaaacagaatcctcaccatgaagcagttccaaggccactccgtcccgtcctctctcgaaaccttcggcctcgaaatcccccaataactggactccaccacgctcttctcagactcggccttctccttctccggaaacttcgcttccgccggcgaagccatcgtcctcttccagtagaagaaccctccattcgcgccgccagcgcagagt

SEQ ID NO: 18299 - DNA, 473 bp, Glycine max
  unsure at all n locations
ggcgatgaccctggatgcctcgtcgannncatgagtccatacganaactttcgangtaganaagctcccccgcgttgatatgctgagttctcctgaaggtatggctttcttgaacggcggctatgcaacatacatcggtattacgtttagatgattactggtgatccccaaagaacccgtgtatcggaaactcatgtcttgtgttaagcaagtcgattcctacgctacagcttctattttggccttttttgacctatgtcgttggtcattacacttataagtatctccttgcctaccgtgccaacgcatcttccgccaagtagacacacccatcctactgagcgcaccctgcacgatgctctggataacattgatgcaaacgaccatacattgtattagatcaattaatgagacaacatccatgctctacattggtataataacatggtcgcatgagaaactagcccactacg

SEQ ID NO: 18300 - DNA, 349 bp, Glycine max
  unsure at all n locations
tatctttacagcagattntagtaatgacccactaacctagaattaaaataacttaatgccattaacctagggaattaaaaaaaacttaatggctgagtgtaactgaaattgtggcaaccaaaagtcacccccaacagccaacaagtcagccaccatttggtctcccaaaaggctgatgcctatgttgccaattgggcccttattacaacttgaactaaacctaactaaagcccttttaattgattaacccaaaacatatttttggtcagccaactttacaaggattgggccattatttagacaaactaaacactctaaaaattgagacaaagtggtgtcatttagtcct

SEQ ID NO: 18301 - DNA, 399 bp, Glycine max
tagagaggaagcttctatggaggaagagaatgagaatgagagagagagagagagagagagacaatgacgtgggaatgaaggatagataaggagagaagttaaactttaaaaagtgtgtctcacaagactctaattcatcaaagttatgacaagtgttaaatatgtgtctatttatagtctagcacatgagaaacttccttgagaagctaggaaggtagcttccttgggaagctagaggaagaaaacttttttgagaagctagagggggctactcacacccctccaatctaagctcacccccatgccataatacatgaaaatacaatgggaagcttctttgagaagcaaggaagatagcttccttgggaagctagaggaagacaacttccttgagaagat

SEQ ID NO: 18302 - DNA, 380 bp, Glycine max
  unsure at all n locations
agcttatgctgccaacacttataatagaccccctcagcagcaaaagcaacaacaacagaataattatgatctttcaagcaacagatacaatccaagttggagaaatcatctaaatctgagatgggcaagtcctccacaacaacaacaacctgtccctcttttccagaatgttgctggtccaagcaagccatatgttcctcctccaatacagcaacaacaacaacaacagtcacaacaaagacaacaagcaactgaggctcctcctcaaccttccttagaagaattagtgaggcaaatgaccatccagaatatgaaatttcagcaagagacaagagcctncattcagagtctgacanatcagatggggcagatggctactc

SEQ ID NO: 18303 - DNA, 392 bp, Glycine max
catcacatgtggtactatgtggcggtcgggcgatggtgcacaacaagttttccacatccacaaagcgcgcataaacccaccatcccctgttgcccacctccaactgagctcacgtactcccacgtagcccatatcctcgttcctctcaacactgggtccccatcaatcctcccaagctttcccaacatccaagtaatataacattcagacagcacaaattatcacagccaagcaaaatagggcaaaggcagaaaactctgcccaaaacaccaaccaaaatcacagcttttctcacttaaagaccccagtaataattccttcgttccaattcgttaaccgttggatcgactcgaaaattttactggaagtctctagtacttaagcctacattg

SEQ ID NO: 18304 - DNA, 387 bp, Glycine max
attctttgcagagttatatagtatacacacgagttcattagaaggggcttgatcttaagattgataaaacgcctttcttacaaaaggtgttattctttacatggaattataaagctaaaatataactaactaattataattaactgtaactaactaaacaattaacgacagctcagctataactaacaaaactaacactcttaactgaaaactataactgaaaaatgattattctgtcgacagaaattagtactcatgagttaagactactctaatttccaaaagcatgcttttgtacgtcggcttttttccttatgcactaggcaataagcacatatatgaagttcttaaagccatgtcaatataactggtatactattggagata

SEQ ID NO: 18305 - DNA, 373 bp, Glycine max
ttcttgttgacacgctgagatttacgtcaacttttgtgctcacaagatttgtcatactgacatttgagtcacgttgacgggcggagataccctagtggttatccgtataaacattcttttttgctgtctgtaaaacgaaaagcctgatagcatgcagagactaacgtcgtcttctgcgcccttcgtcaatcgcggccgacaagcccgttgacacgcagagatttacgtcattttccgcgctcacaagatctgtcatactgacatttgagtcatgctgacggacggaaatacccaagtggatatccgtataaacattcttttttcctgtctgtaagacgaaatgcctgatagcacgcagagactaacatcgtct

SEQ ID NO: 18306 - DNA, 416 bp, Glycine max
tatgacaatttgaaattttcgagagcttccgaagattaatttcgagcgtcttgatatattataagtctgaatcggacctccgtgtgataagttatgaccatttgaatttctcgagagctttcgttgttcaatttcgagcgtctcgatgtattatgcgcctgaattggacgtccgagttaaaaggtatgactatttttatttctcgagagcttctgttgttcaattttgagcgtctctttatgtgatgcgcctaaatcagactttcgagttaaaagttatgaccatttgaatttctcgatagctttcgttattcaatcttgagcttctctatatgtgatgcgccagaatcagacttctgtgttaaaagttatgaccatttgaatttctcgagagctttcgttgttcaatttgatatg

SEQ ID NO: 18307 - DNA, 356 bp, Glycine max
attttgggatgaaacagatgtgattcatcaaaaattacatctctgctgagaagaactttcctttcagttggtgaccagatcctatagcctttcactccatcaccataacccatgaacagaccctttctacattaacatgataataagcattgcagccaaatactcttaggtttgagtagtttggtggtttgccattccatatttcaataggagttttaagtcctatagcagtagagggtgttctattaattagaaagcaagttgtattgatagcttctccccaaaaacttctgttgagaccagcataggacaatagacatcttgttctttccaggagtgttctattcattctttca

SEQ ID NO: 18308 - DNA, 418 bp, Glycine max
  unsure at all n locations
tggatggaaacaattcacctcaagcagtctccanatggtatgacctatttaaggggtgccacaattcagggaggaaagctagttccaacatggcataagatggaatagagtcttattcaaaagctagattttgggaagatggatgggcagctgatgggatccctttaaaggaaaagtatcctagactgtacctaaactcgaaacaaaaaaaagcaatacattttgcaaataggagacagttcaaaagggaaatgggaatggtgtctacagtggaagaggctattgttcgagactgaaataagtatgtgggctgattttctggaggaaatacaagatattaatgtaaatctccagctatcggataaatgggtatggacaaatgataccagtggaaaatacacagttagaagtgcatacc

SEQ ID NO: 18309 - DNA, 349 bp, Glycine max
ttcttgccgccattttttttccgactatgttcttgtgtggtggaacacgcttcaaaaggagagagctagaaatgaagagccaatggttgatacatggacggagatgaaaaagatcatgaggaagcggtatgttccggctagttactcaagggacttgaaattcaagctccaaaaactaacccaaggcaacaagggggttgaggagtatttcaaggaaatggatgtgctcatgattcaagcacatattgaagaaaagacgaggtaactatggctcgatttcttaatgggttgactaatgatatccgtgatattgttgagctgcaggagtttgttgaatggatgatttgct

SEQ ID NO: 18310 - DNA, 387 bp, Glycine max
ttgaacaacggaagctctcgagaaaatcgtgtggtcataaattttcacacagatgtccgattcggggaaataatatatcgagacgcacgaaattgaacaacggaagctctcgagaaatttgaatggtcataacatttcactcggatgttcgatccggggacataatttatcgagacgctcgaaattgaacaaccgaagctctcgacaaattagaatggtcgtaacttttcacgcgaatgttcgattcggggacataactcatctagacgctcgaaattgatacaacggaagctctcgagaaaattgaatggtcataagttttcacacggatgtccgattcgggaacataatatatcgagacgatcgaaagtgaacaacggaagctct

SEQ ID NO: 18311 - DNA, 330 bp, Glycine max
  unsure at all n locations
cttagttcttagttatgaacagacacaattcacatgcagtaccgtttggttcatattgctgctggagaattacttacggcagaaattgccactggaagtgataatggaaagcgagccccacagtatatggagaagggacagttggtccctgacgaaattgttgcgatggtatgtatgtatgtatgtcgtgactaatttctcttcaattcttgtttctcatatcatatccttgcttctgtttatgctatatagatggtaaagagcgtctcttgaaaccagattcnaaagagaatggttggcttttggatggatatcccacgagcttatcac

SEQ ID NO: 18312 - DNA, 407 bp, Glycine max
  unsure at all n locations
ntgcgataaaatgtaatctcaatacatctcaggcctttaaatggatagattacttgacagccctaagcaaggtgcaaatccaatggtaagtggtaaacttgagcttataaaagctaagatcacagttcatgacaatgattcgtattatagcacccaaaaattcgtattgtgctgcttagcatgaggcaaagcatgcaacctgtaccctgcgcatcatctcattatggaggccaataggtttcaatctgttcactgctaaaaataatgcacgtaccagagatgccccactacatcaaatccgcacacactccacaagtttacaaatcctggtcttatttctttactacttgtttcacatgattgaccactccctatatccattctaaaacactcagatcatgcaactc

SEQ ID NO: 18313 - DNA, 373 bp, Glycine max
atacccaaaatcttatctacagaaccaaggtctttcatatcaaaatttctagacaagaaaaacttcacatcatttatgaaattcatttactaccaaatatcaatatgtcatccagatacataaaatgacgcatccattatcatcaaattgtttcacatacacacatttatcactatcattaatttgaaaatcatacaaaagaataacttaatcaaacttttgtgtcaatgatttggagcttgtttcaaaccatacaaagaattaacaatttatttttcaagaaaaaatattttcaaagaaagtcacatctatagactccataatagtaccattagaaatttcaaatacttctgaattaataattaagaatcta

SEQ ID NO: 18314 - DNA, 403 bp, Glycine max
tctcatttgatccaacagaggatgagcatacaacctatttcactcaagtcacacccacggaattcaagcacaagagacttgatcattgccatcttgaaagaatgctaaacatgaaaaaaagaaaatatgcaaaagaaaattgaagaagtttcaaatggaagaatgcaagtctgttagcacaccaatgaatcaaaaggagaagtttagcaaggaagaaggtgttgataacattgatgaaggatattatgggagcttgattggatgtctaatgtatctcactacaacaagatcaaacattctatttgctcaaaagaacaaaactggaatttttgttgacaatcaagtagccattgctattgcaaacaatctcgtgtgtcatgggaagactaaacatttcaacatc

SEQ ID NO: 18315 - DNA, 368 bp, Glycine max
  unsure at all n locations
atgcgaaccaggaaaaatgaaatgaacagaaaacgcttgtgggattatcgtctacgggccttatacagagaaacgaatcaaggacctaaaaagggattattaaagaggttaaaaaaacggaaattgtaaaacaagaataacataataacagtattttacttgagtcataacataatttcttttatatttattatttgataatcgatacacattataagtatttagttttactatttatattggttactagatataaaacttagacggaatatacgcgttaaccgtaaaaatcataaaaatgtctttcgatagataagtatatnttcatgctagaatttattgacacatacgaattttgtgtatcatga

SEQ ID NO: 18316 - DNA, 401 bp, Glycine max
tttgggctatgtggttgcttggtttatcactctctagggagcaatcatgctcaattgatagaggaggatcttctccttagttgactcatgcacgggaaattgaagattaattgggtcaacattattattgatgacatgatgaagaccacgatgattaggtcttttatgtgtccctatgcaatgttgatctcaagaatccttgattacttcggagttgatacccaagaagaagtctttgcttttgttgaagttgaatttaaggtgaagtccaaagttttgaagcagatggggtaatcaatctaaagcatctggagttggataaattgagataaacaaagaggatcacacaacacaacaagatctagaggagacgcctatgagccccttggagcagatgatgc

SEQ ID NO: 18317 - DNA, 362 bp, Glycine max
atcttataggagtcaacgtgtcatcatccaactcgcaatgtgacaaaactttgacggtcagctcaacctatacaagctcgtacctcacaatccccaacgtaaagagagacccactgagcttacccaacacaactgtgagattaattgcttaaccggagacattaaggcaatggcataataatgatagcgaataaaggaaagggagaagaatccgataattgacggtgcggtgcgtggagtgtattgcgacagagatggacgccgtagcaacaggatcggagctgaacaagtccggaagcggaggttcggaacgaagcgatgacagcggaggaactggacgaagatggatatttgagtactct

SEQ ID NO: 18318 - DNA, 407 bp, Glycine max
tatgacacaaccacctgcacctttataaaacccacttggccaattcagtggagaccaaggggtcatgaagtggattcaactaggactccccgtgattaccatatagctctagggttacccttttatgactactccttctatagtagtgtaagattaatagttaaatacatgtatgaaaaaaaaaataacaattaaaactaaaatattacaagattttaaaattaattataaaaacttctaaatatattttcatcaataaaataaaattaaaaatatatataaatatcatataaatatctatttttgttattccgtatttatactagataggtatttggttagggcaaccaagtacttattggatccgcccttctatagagacaaaacaattatgcttatgagtaatc

SEQ ID NO: 18319 - DNA, 372 bp, Glycine max
  unsure at all n locations
tttttgttangcatctaacgagctctggtgagtacacagtcaagtaagcttaccatcacctaatggaaaagatgattcaaaatcaaggctcacgggttagtggaatctggatgcatatttggaaacttcaaatcccaccaaaagtcaagcatttcccttgacgtctccttcgtcattgcttgtctactcaagctcatctccaaacaaaaggtgtgcaatgtccttgcttatgtcttttttgtgataccaacattgagaacgaatgagacactttctttggatgtgattaagttgtacattatggggcagctactggtcagtggaacaccatggctaggtatgttgatcaggcgaaaggaacaaatgaattga

SEQ ID NO: 18320 - DNA, 366 bp, Glycine max
  unsure at all n locations
gtatgatacagcatatgnnttttctttcttctatggttttttttgtacgtttggatatatttctaggcttactttgatttttatgcagtatatatgcccatcaatgtgagttaatgagttttcaacttcagtctcaggtgaaaagatgaagaaataaatggccgttgtaggtggtgtctcgctaagcgaggcatatgctcttatcgagcaacatctgctaagcgagacatcatcccgcttaacgagtgaggagaatctggaaaagaatctgccatgcatgcacacgttcagtgtgccatcagctcacccaccaagtagtttgtccttctggccctcagcgaaaaattactaactcgcgcttagcgc

SEQ ID NO: 18321 - DNA, 361 bp, Glycine max
tattcttcttcacaatagtttctttcagacacatcggtttgtttcaaacattaaatttatttttacctaaaattagtcttgattttgcttattttaattgttgaaatttgctttgcttatgaggtgtttgacaaaatgtttaatttctaatagaatcaaggtcttttttggtttaattttttagtttcagattttgtatattgttccttttttggtataaggcttgactaggttgcatttttgtgttttgtttgaaaatgactttattaagcttgaaagacccgagaagcttcttcacaatagtttctttcaaacttcacaccgatttgtttcaaacatgagatttatttttatctaaaat

SEQ ID NO: 18322 - DNA, 354 bp, Glycine max
  unsure at all n locations
tttcttgtagaatggctagacatgatacatgtcagggtttggtttggttcaaggataaaagggatgccccacattatttccatgacacaaatgcaaaaatgatgatttggaaactttatgcaaaactggtcatgcatgcacctatgtggacactcaagtgtcaaatttttatggtcatgtgatgctagggctcangattcatttcctctattttagtcaacccaacgtttccaaaatatgttcttttatcaatttgtgcattcatccgagtccattntgggcgtctgggaaaatcttcacagcattcacccttcangtgtatacacattntttcaaaaactagttatgatcagt

SEQ ID NO: 18323 - DNA, 420 bp, Glycine max
  unsure at all n locations
gctatcaggacctatgaaactcagcttnagtatgcccgagtcattcatccctatgagatgttgttgaagtattggcgatcagaattgccattccttggattataggattgaaccaagctcatgcttttacaaaaaggttcatcaagtcaagttgaaatacggaagtaaccgtcttgcaaaattggggcaaaagatgaatcgagtcacatcactgcttcatctactgccaaacatatttaggattgttgatgtccttgttacttccagtttcaccttgacaaagttgtcatggaccatgttgaaaatctaaattgattcaaccccatatcctgcgtaaaaattcgcaatacttcaactttacatcattcgcatgcatccatgcttttcattggttgcattgctcattgcattctttccttg

SEQ ID NO: 18324 - DNA, 357 bp, Glycine max
atttatgatccgttttctacgactgacacttgttactctgagctcttcatgatggtgacagtcttttagtaccattctcatgctggaagtgaaaaagcattttttttattcctaatatattgcttgctatttattctgtagattcttattataagattttcagtgtgtgggcggacatatatggttcagttggccatgttcgcatctatgcgaatataataacttgctgataatctttgtcattgtttcagccccttggaaaaggccttttgcagagactcattgtaaacttatgtgcacatagtggtacaagggccactcttatttatcatttgcctgcatgattaaatctgaact

SEQ ID NO: 18325 - DNA, 424 bp, Glycine max
ctcaagcttgctgcccaagaggctgcccttgccgcccctaagcttttgttccttctaaaccaaatactgctatggaagcatccgcttccactgacaacaccaacatgggtaccatatcacttctttctactctatagtttatgactttattccttccctttgcattgcttatgtgaaatgtgtggattaatatgaattttctgagtaattctgattatatgttgatttttgtgaaagaatgttggattgattctctaagttaaaatgttagattaatcaattatatgaagcctttctcaaagttaaaatgcagaattttgttcagttaaaagaactttgataatcaaaattcaaaatgttggattgattcttgctgaaagaatgttactatgctccacatcagtaagcccagaattaaatctgt

SEQ ID NO: 18326 - DNA, 387 bp, Glycine max
  unsure at all n locations
atcttaaagatgctccaaattaagatttcaaccactcgtttcagagtcttaatttcattattagattctacatgcatgtacttgtgtatatttcatgtgttgttgcataccgtaaagataataaataaattaaagtagcaaagattacaacggttatgcttactagcatatttggaatattattaaatagaaattntattaaaaatataataaatatactgataatattaaatgttatacacattttaatacatattttcatttaatgttatagtataattatccatctatttattcaggggtttggatcaacctctgatccaacccgattcaatccaattaaattagattgaattttttaagtgtttaagtcaaattcaattcaac

SEQ ID NO: 18327 - DNA, 433 bp, Glycine max
ctatagacaactcaagctttgaacaatatacttgcccttcatttaactgtctctgtgtcttggcggctacgctcaacaaagtacttcgacacctactgtacgttgatctgacctatgttgttatgggaatgttgcgacaatccttcaaaaccttattgatacattctgagaggttgattgtcatgtggccatatcgacgtccttttctatcataagccatcgtccatttttcctttgaaatgcgatcaatccatgttgctatggctggactcaattcacaaaatttttctaaatttcgataaaaaactgtgcttgcaaggagtgtatgctgcataaaattacttatgaataacacttttaagtctatataaaagttacataaacgtcaccatcaaatatgacatcttacccaatttcttcaacatttcttttt

SEQ ID NO: 18328 - DNA, 366 bp, Glycine max
  unsure at all n locations
tttttgcgtccagtgcactttntggcatcgtattgcccaaaatcctgagccaacatcacaaaaacccaattacatccaaaataaaagttacattacatgccatatgaatattaagatctgaattcagagatgacaatacagtaataccaaacaaaattgaagaaacttttcccaatataattttttgccaacagaaataggagcagaggcatgacagaaatccataaaaatttcttaattntttttctaatgcaaactgattagttaccataagttttgatgaanatgaaactgttattattgtgaatcacaataataacagtaaaagacgaaccanaccaatccaccttataaaaacagttcagt

SEQ ID NO: 18329 - DNA, 417 bp, Glycine max
  unsure at all n locations
tgtctttgtaaacgtatgctttgtttaataaaaattatattattagcataaacattgtagaattgtactaataatatgatgtatcataacgtaccaatgacatgtattaatttcctataccaacaatagatgtcatgggtagtataacatgtaataatgttagtaggataaccgtttaatttttaatatataaagtctaaactaagcataataagcccaaagattaacatttttttccttagtatatgaatgtgtgaaatggaattgaactattgtattgatagtatatgagtggtgggacacacctgatctttcgctaacaaagtgtcccagtcgttatcctccaacagaacccttgtttcttcataacttanagccacccgataattcaaatctccaagccatattattcgactg

SEQ ID NO: 18330 - DNA, 346 bp, Glycine max
atcttcggaagcagaacaatcttgagcatcctctatctgataacattatcaaatcaaccatttttgctagtgttttgcaatcataaatcacataattttagaatagctccaaataaatttcatcaaagatcaattaactcctattgccttagatggttataacagtttctctgataaagactgttgggtgatacttgctggcagaggatatatgcaagactcatagtatacttaaattttgacagcaaactaagtttaagtaaaatcaatctaagttataactcacatacatttaaatatagatatttctgtagaaaggttcgagtaaaatctatctatgattctt

SEQ ID NO: 18331 - DNA, 407 bp, Glycine max
tggtgaagtaggagtgccagcggtgattaccgtattggggagattactgacaaatggtttaaacattgttgagagttgatgggaagtgaaattggctgaatggctgatctagcagccagcctttgaagctcagttctcgccttgtaagccacgccacgaattaaatggtctggcagtgaagccaacttcaccatcttttgctcaccatggtcttggagaaggagataccctatgatctttgtagtatgctcaggctcaaatctttgaagtttatcaaaaacaatcctcgtgtactccgaaatatccatagcttttcgtcactgcaagaagtcataacaaccttaacagagatgaacaagcactggtgagaaaataggcatagagatacacaattgcagattgagcat

SEQ ID NO: 18332 - DNA, 372 bp, Glycine max
  unsure at all n locations
agggtggggagggtgcgaatgtctgaccaagagaggaattggaggaggacgtggtaacgaaggatgttggcaaggacagtcaaggagaactggttgtcggcaaaaaggtaggagttgaagacgatgagaatggagagggaggatgagagatccgttatgaggggcatggcagaggtgagaagagagatgaataaggataatattatatttctatttttgttagacaatgaacaagaagtcgtaccaaaatttagtgagttataagtttttaggtatttgtcaagtccatcattnttttttattttgtactattcctcaatcattttttaaatcaaacatttataaatattctttttggtatccaatctctta

SEQ ID NO: 18333 - DNA, 404 bp, Glycine max
tttggacatttattaattgggatcttaattattagcatgctccataaatccaaagttaaggagtaaaatatcatttattaatcactaacacccaccacatcgtaggcgtacgtacgtgttcgccctaatctcttgtaaatagattaataagtcaacaaccagctgtgattttatcttttgtaattattcatagcagggcattttagtgttgaagtagaagtggttgcagtttcaagagaaggccacaaatggaagataagaggcacagctccaactaataaaagccgacctttgagcctcaaatggctccgatcagaacccccaacagccactggacccaccccttcaccaccgtgtcctaataccagtcattcttggccttttacccacgaagatcatactcg

SEQ ID NO: 18334 - DNA, 290 bp, Glycine max
ttgcatgcaagtttatatatacgaccatcaaatcaggagggaaccagactcgttatgcgtccatctatcgtagcaagaattgcaatctggttatgttttgccttgcataaaatataattgtgtaattatattagcttctagccttctacaaaaattacttaatgatctgtgaagtgagtattatattgtggaaatattgatgtggctatcgggaagggatcttctgcatggtgaaggattaattggaggagccacaattattctcttctgctgcataccgcatctcacaa

SEQ ID NO: 18335 - DNA, 370 bp, Glycine max
ttctttgaatagtatgaaagaccctcccttctactttgtaaaatagattcaatagaaactaggaaaataaacaaatatattcgccgagaaataggagagagggatttgaaccctcaatagttctttttttcgaactatattgattttcaagactgaagttgtcaaccactcaaccatctctccaaaagataatttatattctatatttatttcattgaataaaacatgagcatataaattgatacttattatgtgtgtacccataagggttgaacaactaccaagggtatggctgagaaccttttcggtcaaagccaaacacccccagccataaccagatatcccaaggtgactaattacccctcgggct

SEQ ID NO: 18336 - DNA, 392 bp, Glycine max
  unsure at all n locations
ctgganaatgatttcttttcaaaagttagtcgtattatgcgactaacaaactgcaaataaagcaaacaaagaatggtaaatttattagtcagtcaaaatattgcaaagaactaactaacaagtttgggatggaaaatgctaaacacatggccactcctatgagcactgcctgctatctggataaagatgaaaccgatcagtcaatagatataaagaaatatagaggtatgatcagatctcttctttatttatttgcaagtagacttgatataatgtttagtgtttgtatgtgtgcaagataccaagcaaatcccaaagaatctcaccttagtgcagttaaaagaataatgagatacttattaggcactataaatctatgattatggtatcct

SEQ ID NO: 18337 - DNA, 345 bp, Glycine max
ttttaagcctaagatacttatctgtggggggagttcgtatcccagggaatgggactatgccaagttcaaacaggttgctgataagtgtggggcagtgttgatgtgtgatatggctcatatcagtggtcttgtagcggctaaggtgatttgaattttctgtcttttctctttgttcttgttgaattatgttatcgattttatggttgtttatgcatctgaattagttttctttggagtgtagaggcagatgtattgtatgctctagaactagtatagatggagttgatagaacaatttacgtgcctgtactatgaaccaacatcttcagacttattcctgtcttat

SEQ ID NO: 18338 - DNA, 403 bp, Glycine max
  unsure at all n locations
tgtttacaatgctcctttaatcttattgatacaatatacgcaacaaggtttaattatgcttaagctcgtgccttttggagcaaaaggatccatttgattcttatgtactangattgcaaaaagtggaagtagtgagtttgttctgattgttctgagatgcaattttcttttgtttgcaggtcagatcactggggcaaatcctacaattcctggaatgtttccaaatatgtttccgttggctacaagtcaggtattttttgtttcttttttcccagctatggttatttagtgtcaagttcttattaatttcactctattcttgtttttttccttcttaagatgcagcaatttagtgctctccctgtcatgccagtgcaggctatgactcaacaggtaaaaatgc

SEQ ID NO: 18339 - DNA, 365 bp, Glycine max
  unsure at all n locations
tttgcatgcattcttgaacttttaaagcgtaaagttacgttactgtgttatttattaagattaatcctttagaaagcgtaaacatgttgttgtgcttgaattatttattaaaattaattgtatgtttattttggtatttaagcatacaatattaagctaaactaaataatttatgcatattaaatttaatggttaagagtttatatgtttcaaatattagataatcatatgcatataatatttatttaattctgaagttttgtgtgtatgatttatgattttatacatgcganattatcttgaatattntatacaatattatttggtttatttacattatttaaaatattatataaataattagc

SEQ ID NO: 18340 - DNA, 404 bp, Glycine max
tcctattcttctggtgaagtaaaagtgagattgctatgataaagtagttcttgatctgatttacaaagccatggaaccagcaaagtcactttctgctttgcagattgtgataaatatgcagctcgaaatagcgggtttacaactgttcccgtcatccaaggaagagtatcagttgtcactattgcaacatgtctttcattgtccaatggatgatgctttgcatggtctgtccataatccaccttcataccagtgccctatgctctgaaggacacttgttattggtaaatccaattgatcatttatgtttccattccctagaacagaagattcttccccaaagagggaataacaaatcgagtaaatcttaaactgtataaactagctgactgcctataaaactac

SEQ ID NO: 18341 - DNA, 385 bp, Glycine max
  unsure at all n locations
tttgcatgcattctttgatgatgtcgaaaataaatcacatgtttgtcatcatcaaaaagggggagaatgtgaatgtatgtatacatgattttgatgatgacaaagaagaatcaaacaaggctgcttcaaatgataagcatttgcttcaagattaattcaagattgcttcaacaaacaaagccttgtttcaagattcactaaagaccaagccttgccttanaacaaagtgctttcaagacatgcaaggctttggtaatcgattaccaggaagtgtaatcggttaccagaagacagggttgagaaatagctgttgaaaaaggttttgaatttgaattttcaacatgtaatcgattaccatatgtctgtaatcgattaccagcaacga

SEQ ID NO: 18342 - DNA, 406 bp, Glycine max
  unsure at all n locations
ntcataagtgaagttaggtgcaaccatctccctaagagtccgctcacgaggtagagattaagccatgttctcagtatgaaaattagtagccgaatgctcaaaattagaatgttcagaatcaccagcaacagaatgcacaaaatgatcaggatgcacactatgcctaactaatctatgaaaggttctatctatttcaaaatcaaagggttgtaaatcacctggattgcccctagtcatgcactatatgcaacaattcatgtatttctcaaataagcaccaaagggggtaaaactacaattatactcaaacgataaatgacttgaaaatttgtgagaaacaccctaaaatcatgaaaagatagcacaaaaattttcagacaaaaattcaaagtctgactatganaaat

SEQ ID NO: 18343 - DNA, 317 bp, Glycine max
atcttttcctctagctgttctgataaagttgtccaacgttatagaaggagaagagattgaagccttcattctactggctgcatgcaatgaatatttcttcctaacaagatcaattttcaaatcgcaacggtgaaaatatgcagaaatgaatatcgaaccaggtgtcccaatttcacaatgatccaacgggtaatgagtctgggattatagttttactatgacaagctttgggtctctgcaggacaagaaaaagttaagatgagaaaggaagttctctcacctccaactctgattcgcaatttcatcggtgagaatac

SEQ ID NO: 18344 - DNA, 391 bp, Glycine max
  unsure at all n locations
ntagattagtgattacatgaaagagtgcataatattttataagcattgagtttgaaatgcgatagatatcaaagtgtgaatacatcctaaaatacatataatggaaattgatgattgaatgttcaagcaaaatgtctaaaaactaggcctacccatacatatacgaaagatagagaacacactagtctcaaagcagtcaccactaaacccaaacccatggcaaggaactacacaaacgtgttgagataagagctcaacaattagaagagcccccataatgggactcctgagaggaaacatcacacatgacctcatcaagatcctctacaggaccctcatcattgctctccttaatgagccatctgtctcttccctaaggaaactctctact

SEQ ID NO: 18345 - DNA, 356 bp, Glycine max
tgtcttaacatcagaccacttccagggtgctggaactacttcacatggacttgatggggcctatgcaagttgaaagccttggaagaaagaggtatgcctatgttgttgcggatgatttcttcagatttacctgggtcaactttatcatagagagatcagaaacctttgaagtattcagagagttgagtctaagacttcaaacagactgtgtcttcaagagaatcaggagtgaccatggcagataatttgaaaacagcaagctcactgaattctgcacatctgaaggcatcactcatgagttctctgtagccaatacaccacaacaccatggcatagttgaacggaaaacaagactt

SEQ ID NO: 18346 - DNA, 365 bp, Glycine max
  unsure at all n locations
gttgctntctcttccatgtggcgactcggtatcctctaccaccccatttctattgttggtacagtcggtccattcttgcgccgagatcttgaccccttttgctaactcttgacatggaggggtatatcccagataatagagacgacttccttccacctatcgggcatcgcaggatcccttcaaactctactacggttggtattaactgaaagtcccccaacgtgaagcaccttaacgactggtcgtaatattgagtgagggatgcaatggcttcaacaaacacttctatcatagccaagtcctataggtttccatgtcttgcggaaggcttgacgatgaagaggatccattcgttaccctagctc

SEQ ID NO: 18347 - DNA, 382 bp, Glycine max
  unsure at all n locations
ttcttctcaagcaatcttccatcatataggacactaccaaatgccaaatggtgaatatgagtaatccctagaaagctaagggaaaaagctacaattgttttaaaaataagcttaggccaattcttttgttttgagggtcattttaggcttggaagtcagagcctttgcacttggataattgggctgcgaaattaggttttgctttgtgtaattagcttaattagatagattagatgggcctaatcaagacccatcttttccttccaattagtcacaatatatattagtatagttagttagttatttccattttgtatgaaatagaatttagaaacttcttttgcaagcttttagaanaaactcttttctctctttttctctc

SEQ ID NO: 18348 - DNA, 425 bp, Glycine max
actcacgcttctcccattcaggtctcttgtcatttggaacgaaatcagaagctttctccaagtggtcatgatgaccttgatcgagaaaccaaagtaccacggaagcagaccatgagggataattcttccaattcagcttagcagtagtgatggtcggagtcccagagaaggagaaaacgggtccagaagtagccattttggcccacaagatgaaaccctaaaggggtaaaaaagagagaagaatggggtgatacgttccaggcaacaaaactcaaaactgagggctggaacgaactcagaagaggccgacgagcagataggtggcggcacggcgcaattccggtgacggcatggaggcgcgtgggcttcacgcgccgaagaacgcgcgtgagaaaggtggcgtgtggagactcctttggcggcac

SEQ ID NO: 18349 - DNA, 380 bp, Glycine max
tgcttcaagaattattttgatgatgctaaggaatttcaaagatcattcaagatggatttcaaggatgaagaaagcaagatgtcaagcaaaagaaaagatctcaagataagaattaagataaactcttagaaaagtttttgaaaagcacaactgattggccaaatgagtttttatcttaacaaaaattttgcaaagcattttagtctctggtaatcgattaccagaaggtagtaattgattactagtagcccaaatatttctgaaaatggtttttcaaaggtgtaatcgattaccatggctttgtaattgattaccagtgcttataacgttcaaaaataatttgaaaaaccttgtaatcgattacacaaaacatgtaatcg

SEQ ID NO: 18350 - DNA, 417 bp, Glycine max
  unsure at all n locations
tgttaacattggtgttttcagtaacattggttttctgtaaaaccaatgttaacacgagtttgttaacgtcgattttttaaaaaccgatgctaatgaactcgtgttaatattggttttttatcaaaaaccaatgttaacaaacttgtgttatttacgagattgcccttgtgtttttgttaacatcggttcttggtacaactaatgataacttagcgatgctaaaaccattatttgtagtagtgtgtgaagtgttcaagtgacaaaattctaatgaatgcatgaatatgtcaaagaacctcacagaattgaagtggcacaacagacacacaagttgtaagctggtattttttattccatgataganaatagtgaaaacaataaaataatgaaatgaaaataatatgatttttataatta

SEQ ID NO: 18351 - DNA, 301 bp, Glycine max
ttcttggttcgaggtacttacccgttgaagatcgaagaacgatgaagaacgaatgaagaacgtcgaagaacggttgaaatctttgcgaaattcctcacggaaaacgttacggaaacgtttcggaagcgcctcggcttagattttcttcacggaaacaatttttccaagcaaattcgaaagagagagaagtgccaaaggggctgaaccccttccttcttcacttcctcccctatttatagcaaaataggggaggtggttgccgcccagctcgcccaggcgagctcagctcgcctaggcgagc

SEQ ID NO: 18352 - DNA, 388 bp, Glycine max
  unsure at all n locations
cgctttgagaaactcanatggtcattacttttcactcggatgtccgattcatgcgcatcacatgtcgagacgctcgaaattgataaatggaagctcttgagcaattcaaatggtcataaattttcactcgtacgtccaatacaggcgcataatatatcgagaggctcgaaattgaacaacggaagctctcgagaaattcaaatggtcataacttttcactcggaggtccgattcatgtgtataacatatcgagacgcttgaaattgagcaacggaagctctcgagaatttcaaatggtcattacttttcacttggaggtccgattcaggcgcataacatatagagacgctccaaattgattaacggaagctctagagaaattcaaatg

SEQ ID NO: 18353 - DNA, 356 bp, Glycine max
  unsure at all n locations
atctngacaggtttatgtgcaagtgctgctactggtggaggcacttgaatttggttgccagacctcaaggtgatggcactcacattttttggattctgcaaagtttgtgaagtcaatttgtcagaattttgggactgagcttgattcatctgagtagccatctgccccatttgatttgtcagactctgaatggaggctcttgtctcttgctgaaattgcatattctggatggtcatttgcctcactaactcttctaaggaaggttgaggaggagcctcagtttcttgttgtctttgttgtgactgctgctgtattggaggaggaacatatggcttgcttggaccagcaacattctg

SEQ ID NO: 18354 - DNA, 420 bp, Glycine max
tataatactcagcttgtccgaaaatactaaaaccgtttaagttctcaccttacactgtcctctttgcttttgtcggttaacatggaccgttcaaaagcataaaagtccatacatcactttactgcctttcgcgagaactacgtaggtctgatttcctcttcgatggaggacacgtaggagcaaaagccccgcttttgtcgacctcgtgagatggttagaggtccaatgccttagctttctcaccaagtaaaatggatcattttaaggtccaatgccttaaatgacccccttccaagtaaaaagaatcacttgattcgccccttttgtaagaactacgtacgtctgatttccttatcacaattgaggaatacgtaagagcaagggaaacacccttgtcgaccacataaagataaaaaaata

SEQ ID NO: 18355 - DNA, 340 bp, Glycine max
  unsure at all n locations
tgcttcagaccaaggcaactcaaaatctaggtatctaaaacccctcaatttagtggattttcaaggtttgagaagtgaaaatgagaatggggtaaatttagagcaaactctcacctcacacaagtctataaccttaatctaaacttgctcaaactggtttttcacctaaaattccaccaaatcaaaatttgactcctcaacacctaattttaccctagaaatggcttttgccttcactttggtcttttgtttttctctcttgcacagcccaagctttctcataagtcctaaatgacatttcaaactangactaactcactttaacctccaatttctactg

SEQ ID NO: 18356 - DNA, 418 bp, Glycine max
  unsure at all n locations
nttcctatggttgttctactagggtttccaagcatcatagagaaggagaagggattagagccaccatttcactatctccgtgtgagggaaatttctctctctatagacattatttcacaaatcccaacagtgaaaatttgcagaaatgagttcctaacctggttttcaaatttcatgatgatctaatggttaacgagtttgagatcgtagttttactcagacaaatttgggtgtatgcgagaaaaagaaaggattttgagagagggagaagggaaaacgaatttgagaggaagagagagcgtaaagacatatcgtaaatgtaaaaactaacctaatatgtctttatttatagttagagtgatctcagcctattatttactctatttttcttaaatttataaaaagaaactctatttta

SEQ ID NO: 18357 - DNA, 377 bp, Glycine max
  unsure at all n locations
ttctntagacaaaggacaacagtggaaatcaaaatcaaaactttattgtcgcttctctttaattctaccattggaggtaaccctaacgactgcgtgtagattttaatcataaaatcattgggccctaccaattaacattgatttgggaaagttgcctagggtgtgaaagaaactttagggccatctaatcaaatcatagaagaaaaaagataatacaattaatgcaatgaagaacttgctcttattaatcaatttaatttattatagttaaactcttggtaggagacaagttcctctcataatggacgaagatgggtatgatttctgctttctgtcaaaagctatacttcaataatgaatacagcttcaaccaaaaa

SEQ ID NO: 18358 - DNA, 373 bp, Glycine max
ttctcataagtaaaaaattggtacacccaaaaatacaaataattggccagctttacataattattccaagggtcttgcttaacttttctgaacaaatcattgctgcttatatgtaaagaaatgaaactgagtaggattttggcaattcttctgatgctgccatatcttgaaatggtatttataccattctgggagatcacaagttggttccagtctagctcttgcttcccaaaacatggttgcgatttacagaagcttctctttgatgtttacgcatttgaagtctaaatgttaaaattccccttcatatttgtgataatggaatggagtctgtgttgtgtctgaaattaggtgaacttgtcccgtatcaggg

SEQ ID NO: 18359 - DNA, 293 bp, Glycine max
ttctttatagttgaaagcacgagtcaaggtgtgaatatatgagggacgactgaacagattctttatgataaaagtacgggagagctatgcgggttttaaggagacgaattatttactggtttatattaaacatattatacgtataggatatattaatttctgattaatgtgatttttatatcatacatgatcttcttgattaaatttcttatttacgatattctgtttcatataccattctttgtttgatttgacattaattatttttcgattgtatagattctgcacttgct

SEQ ID NO: 18360 - DNA, 404 bp, Glycine max
  unsure at all n locations
tctgtgggtccggatgcgtgtggcagaacctggaatatgttgtgtagtgctccccttgctccaaaaccaccatggtctccaagaatgtgttcagtgactccctaacaaactttatcaacttgtccatgttgagatcggacgtatgagaggtgggggcgaggttggagtatgatagcacattccaggtctgggcaagtgtagtaaggtccttcctcagaagcttccaaggtgcgccctcaacgttcagaacaagtcctcaccttggaatgcagagcttggatgcaagctcttgtgggtttggatgcgtgtggcagaacctgcaatatgttgtgtagtgctccccttgatccanaaccactagggtctccaagaatgtgttcagtgactccccaacaaactttatc

SEQ ID NO: 18361 - DNA, 344 bp, Glycine max
  unsure at all n locations
tgttgcatgcaatctnttcgcaaagcttacggtaaaatatgggacctaaccatggtagaagtctccacagaggccattgcctccctcgcccagtattatgatcagtcgttgaggtgtttcacctttggggacttccagttatcacctatggtggaagaatttgaagagatcctaggatgtcctctagggggaaggagaccataccctttctcagggttctatccctcattagctagaatttataagatagtccaaatctcagcgcaggaattagaccacagaaagcaagtcgaaaatggggtggttggaataccgagaaaatgtttggaggcaaaagcaagaat

SEQ ID NO: 18362 - DNA, 394 bp, Glycine max
tgtaatcgattacacacatattgtaatcgattactataggagtttttcagaaaacattctcaacagtcacatctttttgtgtggttcttgaatggctatcataggcctatatatatgtgacttgagacacgaatttcataagagtttttcagaacaaaaagatcttatcctcttataaagcaaaatcgttttatcctcttacaaattccttggccaaattacttgtgattcaataaggaattatttgagtgctcaaattattcaatctatctctttcaagagagatttcttcttttcttcttcttcattctgaaaagggattaagagaccgagggtctcttgttgtgaaagaattctaaacacaaaggaagggttgtccttgtgtgtttagaac

SEQ ID NO: 18363 - DNA, 382 bp, Glycine max
tttgcatgcaatcttgccacccagctcgttcaggcgagcagggttgcttcctccagaagcaacagccttctggaggaatcttctggagggcccaagtgggcctggttgctatttgcacccccatttttactaaatacaccccctgccccttttttggtgattcttttttcgtaaagttacggaaacttacggatttcgcaacgatacttgttttctttccgtaatgttacggaaccttgcggattacataatcatcccccttttgacttacggaaggttacggaacctcactaattgtgcaacgatgcttgcttttgatttccggggcgtcacgaaaccttaccgattctgcatcaataccttcctttgatttccagcatgt

SEQ ID NO: 18364 - DNA, 404 bp, Glycine max
tctcaaaagacttgtgtaatcaattacagatagttgataatcaatcaaaatagagaagttttatatattcgggtttttagaaaatatatctataactcctcctagattctcttaaaaaaataaattggctattattaatagtttaatattacctcctaaatattatttttctacttactcattttatttaaaaatatatataataaatttttttaggctaaatactttcttctttatataaattttctatttagttattatccgggattgtccaaaaataccacctaccatttctttaaaaaataaataacaaatatttctttctttaatattgcgcataattataaaaatggttgaagactcaaccatggccaaattagaagcctctaaaggcatagatatta

SEQ ID NO: 18365 - DNA, 376 bp, Glycine max
ttctttgatgcaacatttggagaggttaatgaaacaacaagatgatgcgctccatgagaggttggatcaaatggagaatagagatcataatgaagaagaaaggaggagaagagggaatgatggtgttcctagacaaaaccgaattgatggtattaaactcaacattcctccatttaaaggaaagaatgatccggaggcctacgttgagtgggagatgaaaatagagcatgttttctcatgcaacaactatgaggaggaccagaaggtgaagcttgccgccacggagttttccgactatgctcttgtgtggtggaacaagctacaaaaggagagagcaagaaatgaagagccaatggttgatacatggacggagatg

SEQ ID NO: 18366 - DNA, 407 bp, Glycine max
tgtacattcaatttcgagcgttccgatatattacggtactcaatcggacatccgagtaaaaagttattgttgtttgaatttgttcagagcttcaacattcaatttcgagcttttcgatatattacgggacacaatcagacatccgagtaaaaagttattctcgtttgaatttgctcagggcttcggtaatccatttcgagcgtctcgatatattacgggactcaatcagacatccgagtaaaaagttattgacgtttgaatttgctcagagcttctacattcacattcgagcttttcgatatattacggactccatcagacatccgagtaaaaagtgctttgcggttgaatttgcttagagcttctacaatcaatttcgagcctttcgatatattacgggactcaat

SEQ ID NO: 18367 - DNA, 285 bp, Glycine max
tgcttgagccagttccaaatcactatgttgccttgagccatccccgacaacagttcctgagccataaggggacccacctttgaccttctccatctcatacatgccatctccaaatgtgtacccaaccggaacataaatcattccatggagaacaagctgagtgacagaggtcaacggggtctcttcttgtacacctccttgagaactagtgcttgagaagaaccctgcaggtttttctgctagtgcctgtgtatgccacagccctatagagccttctaaaaatgc

SEQ ID NO: 18368 - DNA, 400 bp, Glycine max
  unsure at all n locations
tctctttctttctccatcaacaaagntaccatcttgagactctttgtctctgtctttctcatgcattgaattcctcaacaacaatgcacagaatgtagaacatagactaggttatcaagaaagggaagatggagtttgatcttgaagacccactagtcagcttggaagaagagcaaacctttactatatcagaactctttgcctccgaatctgaacacgtgccctcaccaaactgcttaagttcaacacattttcacgttttctgtggtgaagccatatctctcattcttcaggtgaaagttatgtctatgtaaaaggttcagctccccctccttcatgccacatttgctacattatgttatattgttatgtttcttcaggttcaggtttcttgcacatt

SEQ ID NO: 18369 - DNA, 355 bp, Glycine max
  unsure at all n locations
cnagaccggcacaangcgcaaacaggcgcaaagangaaggccgncgcggaacgagnggggagcgngcacgcgaaaggaaaanngaacagagaagacacaacaccaacgaagaaaggcaacnctctaactgacaggtggaagaagaatgcctccccatatcatctctcaagaaggcatttactatgcctctattcgcagacctataccgcgccttacaaaggcccttaatgcctgacgcatccacgaaaggcctcatctacgcctgggtaggggaagacatcatcataccatcgtggctaaaagccaagccctactggggcttatggaaccaaacaggcccgctacatggtctact

SEQ ID NO: 18370 - DNA, 310 bp, Glycine max
ctatcaatactcagctggattttgcctgattaatacaatatatgtatgttctaaccatgtatacttatatacttatgagttatttaatgacggtgctcttgccatgaatctcaacatattacgaattaatcattgcattctggatggagtgggatactaatgggagctaaccatcgcacttcttatcctctttctttaacagacacctaatatggtttttaagggctattacatactgtgaaatattaattgcccgccttatgaaattaaaagtaggttatatggcaaacccgctgactattatctctat

SEQ ID NO: 18371 - DNA, 387 bp, Glycine max
  unsure at all n locations
atcttttgaaaagtggtgcttctaacttgtattttctaggctccaaaaccttgaccttgagctactccaaattcctttatattaaaaagacttcaaacgttaataatttagcttaaactttaaaagactagttaattaaattcctaaatagttacattctaactaaaaatgggccaaacatagttttaaattaaggttaaatgaaataattgatctcatacatacctaaaaaggtagacataaaatgcaataatcatacatcatgttttttatacaacacatgttcaccattntttaaacaaagccttaanaataagaaataaaaatagaaattcttgtaattatttgtaaacaacagaaactggaaaataaactagctttggtggt

SEQ ID NO: 18372 - DNA, 399 bp, Glycine max
atcatgaagtctcccttgactatttcctacaaagtccatcttggctctctcttcttcttttcactagactagagaccaggcgacctactcttctcattggtgcctcccatggccttctttttacgtggctaaaccaccttaattttctgacatcttttcctcaatcgatgctacaccaattcttcttatatataaatattttggatcttgtcctttcttgcgtaaccacacttccatcttaacattctcatttttgctactcctgcatttctctctcatcctttaaagcttagcattcactattattgtgaaaaattcaagtcctacattagctagagataacgccaagatagagtatataagtggtggcaatccctaccatatgagctagtttttggg

SEQ ID NO: 18373 - DNA, 294 bp, Glycine max
gtcacctgcggcatgcattttgagtttttcttcatggacgtcccgtggtgttcgtatgaatcttttggtgattcttacgggaagatggtgatgtagctccatgtggagcttgtatgccatcgatcttcttcatcaatggagtcctttgctccttaaagcataatgacatcggaatggatttggaacaatgatgatcggagacacctcttcatggagaagatgaatcaagaagaaacccaccaccataggaaaccatggataagagcttgaaggcttgagaacatgaatggaggg

SEQ ID NO: 18374 - DNA, 350 bp, Glycine max
acatggctctataatctggtctaagatctccaactgtcactctcaccaatggtcaactcatattacagagggatctttgttctaattctcagtatctcacagtaggagatgtatcagctctcacttattgtagccatactatggttcctcttccaacttctgtcactttattgcgggacccatgagtatggatctaccttttgtacgtgttagtacctctgagacttctatcaatatataatactttcgctgatcaaaaaaaacacaaaatattcacccttaaggagaaggaccacttgacaagacaagacattctggtggcttctactacacgataagcccgaaaacta

SEQ ID NO: 18375 - DNA, 381 bp, Glycine max
  unsure at all n locations
tgtttgttaaacatcttagaaaaaatcaagattttagcttgttcgcacatcactcacatgtatgatatccactcgacaaggtttgaagtagaggagaccttcaatcctataacgcaacgtggcggacaaaaatgggcagttaacttgaatggccattattgtcaatgcggaaagtattctgcgcttcactattcatgttcacacattaatatttcttctttntagtctttgtaagttcacactaaaattgaaaaaaaaaacttagagggaccaaattgaaaaattacacacttatatgaactaaaaatgaacaaaacaaattccatgcataaagattgaaaaaaaatgcaacttatgggaactgaaataaataaaaaaact

SEQ ID NO: 18376 - DNA, 405 bp, Glycine max
gctggaacacagagctgccactcttctcaagagaaggatgtataatctacagccaaagactcagaataggggggtcattccgaaacatctcctatggtttttcaagaaggcgagaaattacaagatttcagtgcaaatgagtctcatttggccgctgaacctggtcctccacagcttaattctgaaatcaatcagagaccaaaaagggtcactaaaccttctgaaagatatggttttgaagacctggctgcctatgcattacatgcagctgaaaaaatagattcaaatgaaccagccacttaccaagaagctatcaatcatcctgaagctgaaaattggctgttagcctatgaaagaggaaatggaatctttatataagaatcagacctggaaacttgttgaact

SEQ ID NO: 18377 - DNA, 372 bp, Glycine max
attttcgaatctcttcttgaagctgacattctgagcaaaccgggttgagataatgttgtatacaatatacctgcatcattgacaaaagggggaaattggatcaatgatactttctagattttaagtaagcgaactcatctccatatatgatagagcagagatgaaacgattgtaataaggtattttattgaatgtgtgaataatggaaaactgaatacaaaccagagccaagctcctcatcagagaacaaactctctctagctgcctaaccacaagggtgaaagcaaaatgaataatctccccccaatactaattcccactactctacttattgaaggaatatcctaaccgaatgccacctcagctatcaca

SEQ ID NO: 18378 - DNA, 431 bp, Glycine max
tatacacaactcaagcttgttttgctcactttctggatttgattttgtcacaatttttggttggtcttaaccaattaaaaggaaaacaaaagtgtttcaatttgtctgccttaattactcttcaatctttaacaattggttttggttctaggcacaagttttcgactcaaacttacgaagttaagtcttcttttacaactattgtacttcagtcatagttgtgcacaccatagcactaccatcatcatactccttgcttttgttgacgaccatctttcaaggtatgtatttgatagtcccactcctatggttattacatgcttgttgatatatgactattgttttatataagcatttatgcacattgcgagtgaaccttagtctcctgtttgagattgaatacgatgattaatactaacaatttgctttaa

SEQ ID NO: 18379 - DNA, 455 bp, Glycine max
  unsure at all n locations
agagaaggcntttgaagaatgaatgacncttttgannncacnngctcancgagatccctagagtagacctgcaagcatgcatatctttggctggcttctgagaggggaccagctttcattgatggtgtaacactataggagtcccgacttgtcactctttcacatatggatgggccagatggatctaaccgacaatcagtggttatcatggctagcaccataacacagaaaaaaccggtcggagtgggtttggctgatgcctatgacacattctaccgaagatgctacaaagacacaccgagaagtgacagtaatacacccgctctttatgtatggctggctcttaattttccctcatgaaagacacccctttccccctacaagcctacgccttgtgctgagaagggaagccaataggaaaactcatgcagaccgagaagctcagtactggtccc

SEQ ID NO: 18380 - DNA, 383 bp, Glycine max
cctacaagggctatctttattaagcctagtttaacaagaaggatctgaggatgaagctagcattgattcaacctaactaggtgatcaaggtttagtaatttaagctaccacatataacaccaagacatgattgattatagaaacatctttatatacatcagcttgtttgttagaaagacccagcacttgtacctactgttgtcaatcttacttacttgcattattactctttttagcctacactgaggctaattttgactaaaccatcaattatcaaagtttccttcaacacgccctatttatgaatctaaccctgcctaatactagtttcttgaggtcgatacttcgattcatccattctaattatacatatccgatgatcc

SEQ ID NO: 18381 - DNA, 373 bp, Glycine max
  unsure at all n locations
ttctttgatatgncgggtgtgtaaacagcgatatatacacttattgngattggcaataaatagttactaacattaactggttctcaaattatatttataaactgggtaaaaatatgtctcacaatagcttatacatttgtttgatgccagattattggggcctggcaaaaacctgttatggttattgtaactgaacttctcttatgtggaacattgcgcaaatatctgcggagtatcccggccaatgtgctcggatgttcgcgcaacaattggatttgctctttgtattgcccgagcaataggaatgcttacactctcatgggatcattcaccgcgaccttaaacctggtattgtatatgaatgtccaacttg

SEQ ID NO: 18382 - DNA, 521 bp, Glycine max
  unsure at all n locations
gcgcgacgtacttaacatacctttcaaccggttgtacggcgagatctagatannnacaanncagaagacgaatgaaccttgatgaccctttggaancagcgacatacaaatactcagctctcgggttgaaaaatatgacattatccaagctctatattgaggaccccaggctctctttatgggaagagatttaggctagactacttctattagacactgtattcgttttggaagaaaaattatagcattctacgttctctactgactaaaggaaggctacaactccaacgatgtattctctagaggatcaagcacagctctccttgaggctctattattactattaaatcctgataagtgtccactctttaccaaatactctgtatttgatgctataatccatgcatgctaacggctcgattaaccgtctctgcgcttaatttacgtacatgcttatagagcggccatgattaaatggagaatggggcggtaaaccaatcatggaaatcatatgctaaacg

SEQ ID NO: 18383 - DNA, 374 bp, Glycine max
  unsure at all n locations
tttttgtcttanaatcaatattctttgtgctaccaaatcactacactctaaacaaatcaataagattttttggagatttgcacattcactaaatttgtaatcatcttatagacggataaaacactcaacgcttttagtttttttctctcaagttatacaaagtattttaagagtttagtatctatacgaagatttacaaaaagctttacaagaaagaatgaaaaaaatatgtttgtgtagatgattcatcttcaagtattctttgtctcacaatagttggatttttcactctgctcttcatctaaagtcaagttcgttgaagaatttcatgtttacattacatgcacatcccttcttcatgcaangttcatgat

SEQ ID NO: 18384 - DNA, 399 bp, Glycine max
tcaagaattatggcctcatcaaactacttggttccttaaggaaattctataaataaacctcccatctttaatggagtgggttaccactactggaaaacccgcatgcaaatctttatagaggcaatagatttaaatatttgggaagccatagaacaaggaccttatgttccctctataatagccggaagtgcaacaatagaaaaacctagagcagattcgactgaggaagaaagaagattagtacaatataatttaaaggccaaaaatattattacatctgccttaggaatagatgaatactttagggtttcaaattgtaaaagtgctaaggatatgtgggatacactacaagtaacacatgaaggcacaacaaatgttaaaagatctaggataaacact

SEQ ID NO: 18385 - DNA, 260 bp, Glycine max
gagcttgactgtgacctgaacagcttgacccccggtactaatactttgtcttttgctccagtccaggtgtacaacatcagccattaagcttgtaatggctttgatttgcgaagaatacaaggccttgtacgtttgaaaataaacttggctagaaaaacgaatcgtacatttatgaacgccttgctgtataatgggctgtcagtttttttaatgagctgaaacatttaagtttgtatgtaagatgatttgaaccctgcatg

SEQ ID NO: 18386 - DNA, 394 bp, Glycine max
tggagaggatgcttaattgggtgttaagagagagggtgagacagagagagggggcagcattgaggttgaaggaagaacaatggagagaagttgatctttgagttgtgtctcacaagactctcatttatcaaagttacaacaaggggtacacatgcttctatttatagactaagtagcttccttgagaagcgttcttcagaaaacctccttgagaagctttcttgagaaaacttccttgagaagctcctatgagaaaacttccttgagaagctagatcttagctacacacacccctctcataactaagcttacctccttgagaagcttccttaagaagattcctaaagaagctagagcatatctacacacacctttctaatagctaagctcacct

SEQ ID NO: 18387 - DNA, 340 bp, Glycine max
ttgcatgcattcttctagccaaatagatttaccttgaattaattcctttgatagcccctttgagcctatgttcccctttctttgttttgaagctcattacaagccttaagtgaaaaaccatgatatcaccttacccttaaggaattttggagctttggaattgttttgggaataagttgggaataagtgttggggggtatgtttcattggaagatatgatatttggccatgcttaatgttctattctggccatgcttgatgtatatatatattgcctagatcttgctgtaatcttcaattgctggcaaaaaaaatatatatcaattgctgcaaattcgta

SEQ ID NO: 18388 - DNA, 387 bp, Glycine max
aatatacaatttccaaattcggatgtttattaacacaggagaaagaaactgtaaaagcatgatgaatttcccgttggcacatagaatcatatcagatatataaacatttgcattaactgagttgagttatttcacacaagaaacttttttgagaatttcctactctaatgtttcggaaccagttaatcattctgtacaactatgtgaaaatatcttaactcatttcttctagaatttcattagccgtctcaaaaagaggtgtgggagcttttaagcttggtgattttatctctgctacgatttctcttttgttataggatcagcagtcaaactgaacttctcattcttttccattcttagaaattctcctattattgagaaaaatta

SEQ ID NO: 18389 - DNA, 406 bp, Glycine max
  unsure at all n locations
ccgtgatcctctacgccaccttttgcatgcattcttcattacttcatgatgatgaatcaagattgattcaaggtgtttcgatgataacaaagatgatgacaaaaagcccaagagaatgatttcaagattgagtcaagaacaattcaagaatcaagagaaagattcaagaatcaagtttcaagtttcaagaatcaagaatcaagaataaccaagatcaagattcaagactcaagattcaagaatcaataaaagactcaatcaagataagtactaaaaagnttttcacaacattgagtagcacatgaagttttcacaaaatcttttagcaaagagtttttactctctggtaatcgattaccagtttactgtaatcgattaccagtggcaagttttgttttcaaaagct

SEQ ID NO: 18390 - DNA, 349 bp, Glycine max
tgtaaatcaaattccccttctcttcatcctcagttatctgcaagtactcggccgcgcttcgcgcggccacaatgttgtaagcactgagagtgatggttatgccatagcagaacttggcacacagctcaaatgcttccaccccacccggaaaatcacggagtcggactatttggtgctgtggagaatcagaactctctgagcataacctttgcaggcgcaaacatttggacaatagtggaaactgaacaacatcatgaacttgtgtgactaagcaatataaagattgaacaagtcttgttcaaaacacaaaatggactgagatatacaacttgaagagcttctaattttc

SEQ ID NO: 18391 - DNA, 343 bp, Glycine max
ttttctttgcatgtctagcgagctcttgagagacttaggtcctagctttacatagtctgagagattttgttatgtgaatatctgctcatactatagcttgaagaggaagccgacctgagagcttgagatgagtttgtgagagattgcgacgtcttaaaggtggatgagacatccccactacttgtattgctgcaaagttttatctgtctctcgtcttcgttgaaaaggaagctttccagggtcggatagctatatcctctgttggattttccttgtaggcatttgacgtaaatatctttctatctatctaatgatggttagaggcgtcttatgctatcagtat

SEQ ID NO: 18392 - DNA, 328 bp, Glycine max
tgaactatgcatactccgcttactaacgcttgtctttggagctgactttccttttgccctaactatattagactggtgattcctaagctcttgtccttgactggtaagaacctttttttaagcgagggcatctgacttgtgaccatgttttaatattgtgaatcataatcttccgcgaatctagactccgacttctattttgggatgaagggacgtacgcctaaagaattgcatatgatacatatgctatttattaatactggagcctgggagattgtctccttcttacatacaacgacttggggtatctcagtgcccaacgtatgta

SEQ ID NO: 18393 - DNA, 362 bp, Glycine max
  unsure at all n locations
ttcttgaaagagcccgggtagtcaaagagaagttcaagtccatagccatcaaagtctgaanagagtatgatgaactaagggacgtcaatatggccaccgctgaagccttggaacgagaaaccaagaaagcccgaaaggaagaacacgaccaaagcaaagttttgaggggctttatagggcagaaatagtgagctcaagctccgaagaggtgaaaggaatcatcatgggtcaaaggcatgatcttgaaagacgagctaaaggcttgccttatgtcgaaaagaaatttgtcccaacagttaaagcgagactgaagggaatatgtgggccatcatcgatgagtgcaaagagaagcttaatctacc

SEQ ID NO: 18394 - DNA, 400 bp, Glycine max
tgtaagattatggcgtttacatcacatgtggtactttgtggcgggcgggcgatggtgcacaaatagttatttatttccacatccacaatgcgcgcataaacccaccatcccctgttgcccaccttcaactgagctcacgtactcccacgtagcccatatccttgtttctctcaacaccgggtccccatcagtcctcccaagcttccacaacatccaagcataacaactttcacacagcacaagctattacagccaagcaaaacaaagtaaaggcagaaaactctgccaaaacaccaaccaaaaatcacagctttttcccactcatagaccccagtaacagttccttcgatccatttcgttaaccgttggatcgactcccaaattttactggaaggctata

SEQ ID NO: 18395 - DNA, 379 bp, Glycine max
  unsure at all n locations
agcttccatcaagtggtaatcagagcacaagagcttcaagtaggtgctccttaaacctccattaattttttgctttaccttctattccattgttgtttcttcattttttctccatgtatctcctcacatgtcttgtgataaatgtttttaatatgattctttagagtttccaccaattaaacttgctatagaagctagatttgattttctatggttcaaatttcttgttcttgttcttgaaccatgaattgtgttgagtttacgttcctttgagttttgtcttgttatttttttgtggatgaaacctaaaccataaaattcttacaaaaatattaaagtagaagaaaacctcanaaatctagagtgacttgttcaccta

SEQ ID NO: 18396 - DNA, 419 bp, Glycine max
  unsure at all n locations
nntaaaattgaattanaacgctcaataaactgctggtaatcaattaccatccatgtgtaatcaattacacattataaattttgaattcaaatttctagtaactgttataaacattttcagctactggtaatcgattaccagaaagtaaatctcaattttaaatgatttagatagaattttttggccaaaccttttgttttttcaatttggaaacttcttcctaagattctagagatcaacttaatcatatatcttgattttcttggattcttggattcttctcttaaacttagaagcacttgatcctttggcatcatcaaaacatcaaaacatcttgcttctacataggattcatttgacttaatccatcaactgaataaatccttcaactatttctcatccttggaaaattctttttg

SEQ ID NO: 18397 - DNA, 252 bp, Glycine max
  unsure at all n locations
tttcttccacccatttcagccaancgagcacaggtgcttgctccataagcaacagccttctggaggaaggattcgtaaagccccactgtgacgaaatgctattaccacccccctttttactaactgcacccccttatattagtatggtgagtcataatacgtaacgctactacacttgatgaatctcctagccatacttaataacgaacgcatacacctgaatccttacggattatgcagctactctatttt

SEQ ID NO: 18398 - DNA, 389 bp, Glycine max
agagattaagatctgagtttgtgattttttgtgcgcatttccagcatctttctatccatatcagactatgcatgattgcagattacatgaatggcctcctctatatataccaggatgacattattcttaacagatttccattcccataaagtatggcgtaaaataaaatgtgtcactctgaccactaatctttcataactccatatcgtggctggtccatggagactggtattcagtcgtgagaaagacatccctactgaggcatagatctccatgctgtcccagccttttgcacaaggatagtgtaattaaatgaatactgccatgcagatcaatatgatctttccccacaatgactgatccaattgaataaagaatggttacactca

SEQ ID NO: 18399 - DNA, 341 bp, Glycine max
  unsure at all n locations
atctngtgggctataccttcgaccaaacactttcgtgtttctgcctcggcccaaatttaaagcgggctgcaacaccggctccgcttccctaattgtactggaggcggttgccgtggctttatcctctatagttttctggagttttgacatgacctccgagatggaagccatttgatcttttaaggccgatggatcggccttcatttgttcctgcacgccctcttcattatccattattctggattgagtgttataggggtgcctttgtgctttcttagttatgatgaaattcctaaagacataaacaacggtgagtatgccaccaaaacatgaatatgcaa

SEQ ID NO: 18400 - DNA, 273 bp, Glycine max
aaataggagagaatgaaaatttccattccaggaaaatgatatgataggaaattccctatcatagagtgggagaaagctaaaagaatagaaagatcatttccaaccaaatagtgggagaaagtactaggaaagaaaaaaagctcctgatcaaggatctgaattatctcagaaaaaatgtgcgaataggtctttgtaccggactatatctgtatactacagatttgtcaccaaatgaactagacgaacgaaacgaaaccacgacctgaaagtgct

SEQ ID NO: 18401 - DNA, 387 bp, Glycine max
  unsure at all n locations
tgtttttattcttagttttgccgaactgatcaaaattcaaatgatctatggcccttcatttttatttcttgagcaaactaatgctcaaacttggtactttaactaatctttggtcttcttttctatgacagccacaaaatgttccaagaataggtgagttggctcttggtccgctcatgcttggggcttcaaatacactgcttaacgctgaccattacggtgtctatttcaaaggaatgcctctcttgaatggaaaggtgggcataccattctcctttatgtggtaattgggtatctggggtacctgaaaacttaacggtgagtttgtctaatcaggtattacggaggcatggagatgtatntgagcgtactgctagaggatactat

SEQ ID NO: 18402 - DNA, 417 bp, Glycine max
  unsure at all n locations
nttacttccttggtntcgtttttaattaattaaaaggaacgcgaaaaagttttgggctggttntgaacccttgccctgcaagcatgaaaggactccctttgccactaagctattgcaatttaattgtttaataggtgcagttcatgtgtattcataacttctgtaggataaatcatttgtgcacaaactgtttaaaattgtgtgtctctaagttatgctgaacatgcaatattatgttaaatactgatatgcatcggattaaatcctttaaattttattacatgttgaatgaatatacgtgcaatgttattttgaattggtatacatgtaatctttatgattcaatattgagcacatttgcattattaagtatgtttatgcaaggattattttgaatgttaagtgattaatataatt

SEQ ID NO: 18403 - DNA, 387 bp, Glycine max
agtcttctatagaatgttcgttcctaatttctctacaattgcatcacctctcaatgagctggtgaagaagaatgtggcatttacctggggtgaaaaacaagagcaagcctttgctttgctcaaagaaaagcttactaaggcacctgttctagctcttcctgacttttctaaaacttttgagctaaaatgtgatgcctctggagtgggagttggagctgtattgttacaaggtgggcaccctattgcttattttagtgaaaaacttcatagtgccaccctcaactaccccacctatgataaagagctttatgccttaataagagccctccaaacttgggaacattacctttgttccaaggaatttgtcattcatagtgatcatcaatc

SEQ ID NO: 18404 - DNA, 422 bp, Glycine max
  unsure at all n locations
ntgcggatttggtcttcgctagcgaaatgatcgatgtgggtctaaaaataggcaaatctgatcatcatgctttgatacatgcaaaaaaaactggggcaagtgaagagggagagaatgagggagaaacccatgttgtgactgccattcctatacaaccaagtttcccactaacccaacaatgtcattactcagccaataacaaaccttctccttacccaccgcccagttatccacaaaggccatccctaaatcaaccacaaagtctgtctaccacacttccaatgacgaacaccacctttagcacaaaccaaaaacaccaaccaagaaatgaattttgcagcgagaaagcctgtagaattcaccctaattccagtgtcctatgctgacttgctcccatatttacttgataattcaatggtagc

SEQ ID NO: 18405 - DNA, 374 bp, Glycine max
  unsure at all n locations
ttctngatttgaacctgacttattattgagttatgtctactacaattgtataaatcactttacgcttgtccaaaagtacttacaaatgtatgtccttgtctgtttttaggtggtactgttaatgagaaacctgtgcatgattttaactagctgagatttttagcatcatgtaagtattgatggtctgacctttagattgctataaatatgtaacatgtcatgctgagtaattgtctgccttgtataagcaccattagagttcatttttggtaaagtgttatcttggtttttggtctgtaaatatgtagtatgtcatgctgagtaattgcctgacctttattttattaaatttgctcaacactaaactatgatgc

SEQ ID NO: 18406 - DNA, 364 bp, Glycine max
atggctgcgcaacagctctgatttcgtgagtatttatagaagatgacgcatgtgaatcgattacaggaattgctaatcgattacaggcccaataagccttctggttatcgattacaagatgttgtaatcgattacaggctggctgttcatgtgtaatcgattacactggatggtaatcgattaccaaagcctatcctaagctatactctaataaaatatctatattcatgctcaaatacatcctatctgactaattatcactactactacactaaatccgatcatgtcattactatatacacactaaatcataacttctatcatcaatacaagaatgcgaacaagatcaatcataataatctac

SEQ ID NO: 18407 - DNA, 373 bp, Glycine max
  unsure at all n locations
ttcttctaacaatttcatgtattattacgtgtttaacatatttattactcattgttttgccttttgccgtaggatatgatgcaatcctacccctcaagggcattggatagaagactccaagaagattgggccagagatgcaagagaaggccctaagattctcatgagccctatggtagattttgggcccatggactaagtatgagcccacttatctttgtacatattagattacgatttcattatttttaggccttgtatttagagctccataatgtangtagggtaccctagaaatgtangatttttcagcccttgtattttatggcacctagactagtttttgtattangggtaagtttgaatttcacatg

SEQ ID NO: 18408 - DNA, 408 bp, Glycine max
tttctcatagatagcgatggatgtatagttttttgattacatgcataagagaaatgaaacaaaataaaaagaaagaaaggaaaagaaggattcccgatcaaagatcggaagaaagtaaaaaggaaaagatcagaggaaaacagaataattcccgatcaataaaggaaaccaagaaagagaacagaaggtcttcggaccagataaattttcagcgaggtaaatgaccgccgacaaagggaaaacccatttcaaagtggttcttcctttgtgattgccattcaaggtcgctcccaactggcgatgtcccgccccacataaacaaagaggaaaagaccgaaacacccagtttcctctccaaaaacactaccctcgagaaaatcctattgatccgtgatcgcgcgtgtaatc

SEQ ID NO: 18409 - DNA, 323 bp, Glycine max
gatcaaaacaaaatctatacattctagtccactcaattcatacaattactcattcaaatcaatcacaacacttcatttcatacaaaacaaaccactgaatatcatattcaatcagttcactgttcaaacatacttttgtacaagctactactacaaacaaaataactaaaagttataactgaaacttaaataactgaaacataatgcataaacaaaataaactgagtaaaataaactgttcacaatgagaaaaagaaaagatcttatcaatcctcctatggatgatcctctgcatactcattaagatccaacctggagcaact

SEQ ID NO: 18410 - DNA, 404 bp, Glycine max
ttgacttgagtcatcacaagatataaatatgcgatcttggcatggattgtttaaaaaataacaatcaagaaatctatctttcaatcttctctctcaacatcattcaactctttcaacagattgtttctgattcatcttctcttcatctttctaaaagtttttgttcaaaactttttctttcaagaaaagttctttgataaaaaacttgttctattaatctttttcattctcttctccctttgccaaaagaacaaaggactaaccgcctgaattcttttgtgtctctcttctctctttccaagagaattcaaaggacctcgcctgagaattcttttgattcttcccttccccttaaacaaaagatctcaaaggactaaccgcctgagatatcttttgttcccctt

SEQ ID NO: 18411 - DNA, 340 bp, Glycine max
atctttcttgagaagcttttatggaggctagatctttgagctctaatgatgtccttcaatggcgaattttaaccatggagttacactggaagataaaggagaaaatattatatgaggcgtcatccaccaggggatgagccatggaagaagaagctttaccaccaagataatgttttggataagaagcttaaagaagaagctctattagaggaagagaatgagagagagagagagaaagtggcatgggaatgaacgacaggtacggagagaagttgaacgttgaagtgtgtctcacaagactctcattcatcaaaattaccacaagtggtacacatgcttc

SEQ ID NO: 18412 - DNA, 403 bp, Glycine max
tctagccaaatggacttaccttgaattaattcctttgatagcccttttgagccttggttccctttccttgttttgaagctcactacatgccttaagtgaaaaaccatgatattaccatatccttaaggaattttggagctttggaattgttttgggaataagtgtggggggtttttgtttcattggacaacttgttttgttggctatgcttcatgatgtattttgggccatacttgatgtacattgtatattggttaaatgttggacatgttgaatgaaatgttgtttctcaaaggctaaagagtaaaaaaaaaaaaaatcgaataaagaaaaagaaaagcaataaagttgagtgaataagatcttaaatggcacaagaatgatgaaactcttggttctactc

SEQ ID NO: 18413 - DNA, 375 bp, Glycine max
agcttgtaggattatggtgtacccatcacatgtggtactaggtggcggtcgggcgatggtgcacaacaagttttccacatccacaaagcgcgcataaacccaccatcccctgttgcccacctccaactgagctcacgtactcccacgtagcccatatcctcgtttctctcaacaccgggtccccatcaatcctcccaagcttccacaacatccaagcaaaacaacattcaaacagcataagctatcacggccaagcaaaacagagcaaaggcagaaaactctgccaaaaaaaaacccaaccaaatcacagcttttctcacttaaagatcccagtaacaattccctcgttccggttcattaaccgttggatcgact

SEQ ID NO: 18414 - DNA, 409 bp, Glycine max
ttcttaagaaaacttccttgagaagcttctttgagaaaactttcttgagaagctagagtttagctacacacacccatctaaaaactaagctcacctccttgagaagcttccttgagaagctagagcttagctacacacccctataatagctaagctcacccccgtgacaaaaaaacatgaaaatacaaaaaaaatcctactacaaagactactcaaaatgccctaaaatactaggctaaaaccctatactactagaatggccaaaatacaaggcccaaaagaagaaaacaacctattctactatttacaaagaagagtggtcccaaccttggcccatgggctcaaaaatataccctaaggttcatgagaaccctaaggccttctttatcaactctagcccaatcctctt

SEQ ID NO: 18415 - DNA, 249 bp, Glycine max
tgctttaacctcattgtctctcacagggactagattttgggagccaatccaatccttgtgttcggactctcagacacttatgagagccgccgatgatcccattactgattcccctaagctctctgatcttgcttcacgacgcatcccatgccttgcgaactccttggaataccctcgcgttgtggtaactgaaaccccgcgcgatgaaaggcgtgatgctatcgcctgatggcactcctctcatggggt

SEQ ID NO: 18416 - DNA, 364 bp, Glycine max
  unsure at all n locations
tgttagtttcagatgatgcagctgagtttttggctacctcatacactcctntcatgactataacagcatttctggcgctaaactactacgagttgaaagccatcttctccattaaatttctggcttccctacgaatcatgtttccaagggctccaccactggcagcatctatcatacttgtctccatatgactgagaccttcataaaattattggagaagcacctgctctgaaatcttatagtgagggctactgacacataaatttttaaatctctcctagtattcatacaggctctctccactgattcgtctaatacctgagatatccttcctgatggctgcggtcctggaagcaaggaaatg

SEQ ID NO: 18417 - DNA, 366 bp, Glycine max
tgcattcttatccttatggcctgcctccggacttcaccccctgtgccaccccggaagatttaagccaagcccctacttttgaggggcaactcctaccttatgaagactatcccgggcaagacgatggggaaggagatacccatcttggccccctgctccacctcaaagatccatccccgcatgaactaccccagctgaacatagtccgccatatcccggcctcatccgcacccgtaaaagaatctattccctttgcggaagataagggaaagattgaagcgctcgaagagaggttaagagcagtcgagggcctcggtaattacccattctcagattggcagaattatgtcttatgcccaacatcgt

SEQ ID NO: 18418 - DNA, 399 bp, Glycine max
  unsure at all n locations
tgcctcanagaggtccaggaaggacaaggcggccgatagaactagttccgctcctgagtatgacagtcaccgctttaggagcgccgtacaccagcagcgcttcgaggccatcaagggatggtcatttctccgggagcgacgcgttcagctcagggatgacgagtatactgatttccaagaggagataggtcgtctgcggtgggcatcactggttacccccatggccaagttcgatccagaagtagtccttgagttttatgccaatgcttggccaacagcggagggcatgcgtgacatgaggtcctggatgaggggttagtggatcccgtttgatgtagatgttatcggccagctcctgtgatatctgttggtgctggaagagggccaagagtgcgagta

SEQ ID NO: 18419 - DNA, 385 bp, Glycine max
ttcttggagggattgatggggacccggtgttgagaggaacgaggataagggctatgtgggagtacgtgagctcagttgaaggtgggcaactggggatggtggatttatgtgtgatttgtggacgtggagagtcgacttgtaccatcgcccgatcgccacctagtaccacatgtgacgggtaccccataatcctacaagcttgaagtgaggaagtgtggaagggtgagacttcctacttttattcgttgaccacagagtggtacctggagatatgtcgcgggggttaggagaccttggggacgtcaggtggggtgctattgcccaaaaccaagcttgaccaatcccgacccaacccgggcatagtcagtcagtgagaacctgtgac

SEQ ID NO: 18420 - DNA, 412 bp, Glycine max
  unsure at all n locations
gggttacctccttcactacatcaagaatcaccgagttgactcttctatgtggttgtcttactggtttagccccatcctctaaatttatccgatgcatacatgtggatggggtaataccaggaatgtccgccagggtccagcctatagccttcttatgcttcttgagaactgataacaacttctcctcttgctcatcagcaagggaggcatatataattattggaaaacttttgctatcatccaagtaagcatattttaaatttgatggtagaggcttcaattctggtgtgggcggctggataatggtagaaagagatggtttctcagcctgtacctcataaagaaagtcagaggtatgtgtacttcctgaaacatggttagttctatctgactctaganaatctatctcaag

SEQ ID NO: 18421 - DNA, 351 bp, Glycine max
ttcttccaaattagtgtaccacactaccgcaactccggccaagctatcctgaaagaagtgtattaatagcttttcatctttagagtgggcgcccatcttacggcagtacatcttgagatggtttttgggacaagtcgtccctttatacttgtcgaagtccggtactttgaacttcgggggaataacaacatcgggtactaagcaaagattcgtcatgtctgcgaacggataatccccaaatccttcgacggccctcagtctttcctcaaggagatcgagcttcctcctttcttcagttgctggaggcggcccttccgtggacaaaactattggtggtgctgcgatgttggg

SEQ ID NO: 18422 - DNA, 416 bp, Glycine max
tcttatggaccttgaacaagcaattaactcctctttcataaccatgctatgtgctcgcgactggtctctttcttcccttcgcaacttgagttcactattgctaccccatagagctccgcgaaatttgttccggccatactcttccttgcgagccctcttggtctcttgttcaagggctcttgcagtaattgcattctcttcccgtaacccggcacactccttccgaacgtgtgtagcggccaacttgaacttctccttggcaagttttgcctttcctaactcgcttttgagagtttggacttcttcgtcctcttccggtgcttcaaaactctcttcgctgacgacttttaacttggcgagccaatctaaacctcgtatatgaactttcatccattcgtggtacccacaaatgatgc

SEQ ID NO: 18423 - DNA, 381 bp, Glycine max
  unsure at all n locations
atcttataatgaattaagattagggtgtgattttgtgattttgtaaaaataataatttaacagagtcaaagaattacagagcttgtcttttgtcagtgcttgttagaaataatggcactttgttgcgttcttgtttcatgttaataaactattttttattagcaataaaagtgaatctctgtgtccctactaaaatttaacaaagctaatctttgtgtatcttttccttttttctttcttttgaagtacaattgtctttcttatctggcagcaatcagtattggtattaacttctgattaaattgttccatgacaatcgtgctgctaatgctgacagggcaagctaaaacancacacaacctgttcctcaagtcctcaaat

SEQ ID NO: 18424 - DNA, 403 bp, Glycine max
  unsure at all n locations
tgacaanatagggaaagaacatcagaaatttgttcttagagttattgaagaaaaagtntagttatatggatcaagatatcaaagaaagatgagaactatttttataagcttttcaaggatgggtaaggattgacctgtaagatggaaggattagaatgctaagaggacaaacaaattctgacttattattgtggattttgagttggagaagtgaaagaaacctgttagaagatgaataatggtaaagttgttggtcctattggttcagagaatttagtttttaacagaatccaatggcattgtgtgatctgtataacccacaaaaaagtgctttgtaattgatggatcctagaaaatccaatggcatgggcaagtttgcaacaacaatgtatagatgtcaaag

SEQ ID NO: 18425 - DNA, 362 bp, Glycine max
  unsure at all n locations
gacatagtcagatcctgaaatactagtggcgacgatgccttagttacctctaggcagcctaccataactcaactctcatacaatactctgcatgatagcgtggctgttcaatctctactgtgtctcgaggaggtatcacaccaataagtctctgcaccactctgacactcagatgaatgcttactacagcacataaaaacgcagacagggagaactctctctcatggctgacgacaagctatagagagtgatgcagaacacaggacgatcggtcactcacattctggttcgcttagccgaattacgagcaatagggctacacgccccttctatctaaaccatgaagtggaagcgagcactan

SEQ ID NO: 18426 - DNA, 254 bp, Glycine max
tccttgatgcgtcttttcgacaagctatatacaatatctatcgacacccctctaatatctaaagcaaccttcttgaaaattaaacacgcatcattatacacttcattatctagcgagcaccaaacattattgctgataatatcttatggtgctacactgctcccgcatcttatctgtgctgatgactatgctgtaatggacagttgaagaagatgcagatcttcccttaattttgggacgtgcatgtatgtcta

SEQ ID NO: 18427 - DNA, 321 bp, Glycine max
  unsure at all n locations
attttgcttgtggatcttctatggnggctggatctttgagcttcaatgagatccttcaatggtgattttccaccatggagatgcagcggaagacaaaggagaagaggtgagaagaagcgccatccacttaggaattagccatggaagaaggagcttcgccaccaagatgagccttggataagaagcttggacagaatgcttcaatggaggaaaagacagagggagagaaagagagaggcggggggggggcacgatattgaaggaataaaagagggagagaagtggaactttgaagtatgtctcacaagactctcattcatc

SEQ ID NO: 18428 - DNA, 373 bp, Glycine max
tcaatcatgatatgtattaaaaagttttttcaaaaactgagtagcacatgaattttttctcaaaaccttttaccaaaaagattttactctttggtaatcgattaccagattattgtaatcgactaccagcagcaaaatggttttcaaaaaaaaatttcacactaaatttacaacattccaattaatttcaaaatgttgtaatcgattacaagtatttggtaatcgattaccagcgtgtttgaacgttgaaattcaaatttaattgcgaagagtcacatcttttcacaaaaatgctttgtgtaattgattacaatgatttggtaatcgattactagtgataagttttgaatgaaaaatcaaaagatgtaactct

SEQ ID NO: 18429 - DNA, 366 bp, Glycine max
ttcttcctctacccggggaaatatattatcggccagtgtttttaaaaagaattgcgcaatgtcggcagaaaaatatcagtcgtggctatataacgaccgatgtcaggtatttttgtttcaattcaatccctgaataatttttggatattgtccaataggaaatgttcgatcggcgtcatcacgtgatgcttgctttttattttaaacctgctggatcggtcatctttcctggccgacatcgactatcattttttttatcagtgacggtgaataatgttttttggccgaggtgggctgatgtttttctagccgagtaaatgagatcacgccagtgtcgggcgaaacacagcttctgttgagctcgca

SEQ ID NO: 18430 - DNA, 402 bp, Glycine max
tctatataagctgaaccattttatcaataaacacattttgagttttattcagaaaattagagttcatctcttttatcttagagagagtgattctcctaaattcttgagtgattcaagaacaccctggctgtatcaaaggactttcacaacctttgtgtgttgccctcgctggaaagagtgattctttccttcctttcatcttcacccttgttctttcaaatcacaattccagaaaattcacccctgcccagaattatctcgtggccataactcccattttacgcactcaaattaagtgattcttgagcctaaattgaatttcaaaacgatacctttcacctcgttttggaatcacctcatttggagccctgtagcttcagctattgccagttctatatttct

SEQ ID NO: 18431 - DNA, 369 bp, Glycine max
atcttggacgaataaggtttgcacttaggaaacacaacaacaaacaggtatgaaaatgttcattttttattagggttgatgaattcatggattttaattgttttttgtgtatttgaaatgtagggttgaatttgctcattgttatttgggatgccatgaacaacatgataacgctgcaacacactgaagttaaggcatcctttgagacaaatacacatgtggttgtacatgtttttaaagttaccttatacaagaggctacttggcatggtatcaaggtatgctttaaatcagattgctgctgagtatggccgtgcacattatgctggaaaaaaacccttctcattgtggatgtgtgataagaactacc

SEQ ID NO: 18432 - DNA, 399 bp, Glycine max
  unsure at all n locations
tcaatggaacttacatcatgtggtatcaagagcatcttcatctangtgatgttcttttgcttcctctatctttttgttcggtgaattctctttaattccttgttcttcatcttattctccatgtatatcctccatttccttgtggtttggtgctgtttagagtagattcaaaaaaaaaaaatcgattaaatcttagatctacacttgttcttgtatttctatggttcaaattttgtagatctactcttgaatcatgtttttgtgttgattttaggttctatcatttttcattcataatattcttgtgctgaaccttagatctaaagtttattccaaaatattgattagaaaaaaaaaacacaaaaatctaagtgtaaatcacttaatccatgttgtctt

SEQ ID NO: 18433 - DNA, 264 bp, Glycine max
ttacacatacttgctgatctatatttcgattctgcccttttaaagactggcattttgatctttgggacacatgagaatttagtgatctttatcgaggctcttgggataatatccgcatgcaattcatcaacgataagcctacttgattatagagttagatacattaaccccataacacatgtaaatattgggtatactcattttgaggtttatctcaattattttcattatataaaatgccctatactatatatataagaatct

SEQ ID NO: 18434 - DNA, 402 bp, Glycine max
tggtctgagatcaccggtttgtctgtcacctccacatagttgtgagggggagaattattaggtcttttgggttatcttcctatgtggagtaaagacccacataagaaggcaagtatgtctcacttatttaagcggagaggaatcatattatagagtgagacacactgagagagactcatttgagagggaaaaaaatctatcgagagagaaaatcattgggatgttcgtatacctaccggagagcgttttttagattgcaactgcggattcgatcaccgttggatcgggttgatttttggacaacaggttctacacacttgaaacttcaaattgtttggctggatcgggaaaaagatatctacagagagagataactattgtacattatttgctctatatttt

SEQ ID NO: 18435 - DNA, 388 bp, Glycine max
tttgcatgcattctttgcagagactgctccatatcccaacaagccatcactgcctccatggcatgaacacggacatgctgctgcagttgttctttaaaggcacagagcaacagaacataatgggtctgcaacaaacaaaataacaaaactcataaaaaacaagctcttcacattaacatttaagcacattaattaagaatgagaaacaaaacccatcaaaaggacaagaactgagaaggactatgtaaatacaagtgtaaataaaccccaagatgccaaacttatataaatgtccctacaaagttaacaaaatgttatagtgattcagtactccaatcattatatgtagagtggatattaagtcagaatcaaatcttaactttaatat

SEQ ID NO: 18436 - DNA, 417 bp, Glycine max
gacctatgaaactcagctatgaccacccctgccctttaaaaacccctttgccaattcagtggagaccaaggggtcatgaagtggattcaactaggactccccgtgattaccatatagctctagggttacccttttatgactactccttgtatagtagggtaagattaataggtaaatacatgtatgaaaaaaaaaatagccattaaaactaaaatattacaagattttaaaattaattataaaaacttctaaatatattttcatcaataagataacattaaaaatatatataaatatcatataaatatctatttttgttattccgtatttatactagataggtgtttggttagggcaaccaagtacttattggatccgccctcctatagagacaaaacaattatgcttatgagtaat

SEQ ID NO: 18437 - DNA, 360 bp, Glycine max
tgcttccttaagaagattcctaaagaagctagagcttagctacacacacctctctaatagctaagttcacctccttgagatgagaagctagagcttagctacacaccccctataatagctaagctcacccatatggcaaaaaaacatgaaaatacaaaaaaaaaagtccctattacaaagactactcaaaatgccccgaaaatacaaggctaaaaccctatactactagaatggccaaaatacaaggcccaaatgaaggaaaaacctattctaatatttataaagataagcgggctcatacttagcccatgggctcgaaatctaccctaaggctcatgagaaccctagggccttcccttg

SEQ ID NO: 18438 - DNA, 401 bp, Glycine max
tgtgaaagcattatatgggttgaagctagttgtaatagcttggattgagagactaagttcattcttagttcataatggtttctctagaggaatagtagacactacactatttagaaagactcgtaaagaggatctgctaattgtacagatcgatttatgtagataacatcatctttggggctactaaagaaataatgtgcaaagaggtttatgagctgatgaaagaagaatttgaaatgagcatgatgggagacctaaagttctttataggacttcaaatcattcaaaaatatcatgacatttttatccatcaagagaaattcaccaaggaccattcaaagaggttcataatggatgaagctaaaccaatagctacccctatgcatccatctactgtcatt

SEQ ID NO: 18439 - DNA, 325 bp, Glycine max
ttcttgcagtttctgggaggctttgccaaagttttcttcgtgtttggtcatgtgctcaccataactctctgtttgcttccgtacatctgagggatctacatggtaaaaaactgggaaaacaagttgtttcatctcactgatcttggactgctccaggatcttaacaagttcatcaaggcaccatgtggaggatgcgtagttcttagaaaacacaatgattaaaatcttagattcttcaatggccttggatagagaaggtgaaataacattccccaccggcaggtccctatcatcaaagaaaattttcatcccttttccggacaac

SEQ ID NO: 18440 - DNA, 396 bp, Glycine max
  unsure at all n locations
tatattgctagtggaagtgaggattcacatgtatgtatcttcaatcatcattgatcaaaatgggaaaatattcgccagtgtaatattttataatttgcaaattgaaagccttgatgtttatatgtctctgttaaatgttttttatttgctaattttttattgctggctcaataatttgttaaaataagttcaacatgcacttgatgcatgctatcgaggatcactaaaatattggcataaaagacccatgaaatggttctttgtggtctgatttactggacttgaatgaattgaactacaaattgttataatgttcaagagttacgggcttctgcaatattattctagtttatcttgataaaactangaacatcttgactgataatgctggaagtc

SEQ ID NO: 18441 - DNA, 354 bp, Glycine max
  unsure at all n locations
ttctngcctaattaacctgaaattgagagaaaatgattatgaaacacataaaatgaaaatactaagtatttattacctatacttaacagaaaatacttataaccttacaaaataaccataaattgggagagtttgatataatttatacaagtttcatacacaaaattagtcattttcaccgactaacaactcccccaaatttacagttttgcttgtcctcaagtaaaaagagaacaactcacttgtcctcaagtgacaatgacatgcagtgactatgtacaaaggtgtatgctacaaagtgactgattgcatgataagagaatggagtaaaatgcccttatcacttgtctttca

SEQ ID NO: 18442 - DNA, 390 bp, Glycine max
ctgagatccatagatctaatgcaaggtatatgtttcatagaagggatttcgttgcttgtgttggttgattccagagccatctattcctttatatcctgtgtgtaagtagaaaaacttaagcttttctgtgtcttctttaaataaagatctagtggtggagacccctactagtggctatgtgataacttcttatgtgtgtttgaaaagtcctgcggagatgtctaggagaacattcttgattgatttgatttgtttgcctttgaaccagattgatgttattcttggtgtggactggatatcttccaaccatgtcttgttaaactgtattgataaaagagtggtgttcgatgattctgtatccgagtaagatatgaagttgatctctgccaa

SEQ ID NO: 18443 - DNA, 390 bp, Glycine max
ttctttgtacaacctctgcattgttgagcttctgcagcttactaacagaagttgctgccctgattttaccaacatcattttctgaaaacacaaagctaccggatatatcccatagctccacagtcccctcatcatgcaaggtcacgaacttgacaccagtaagaatgagattcttcacagcagacaggaagtaaactttattagaattcaaaaacatgatttaaaattatagagttagcactatcatctttaaagcttgaacctaaatatcacaaccatcaaacaaaaaatcaagtcacacacaaatgataaaactataacctaagttaacaaaaaaaaattacaactgtcaactggtaatcaaggtttaaaaaaaaaagtctgcaacat

SEQ ID NO: 18444 - DNA, 411 bp, Glycine max
  unsure at all n locations
tcttggttgtggagttctgctgaaaccttgatgtaacactctttcactatctatttaatgttatttttatgggttcattgcttctaactatgcttattttacatacttatggcttgatcacccatttgtatgtatagttaggatttttagcattggaaaatgctttaaagccttagaacttggtagagcaagctagaaatctgtatgtctaggaatggagtatagtgatctagttcatattatgttgtagacttaatgcaattcttttagactaagtttgttgagggatcaaggacgaagtttanagagagttaagcttattcactagagggatcttggtttgagtagtttctcagcataagaatactatgataacgttaaatagagaataatacacattatcatcaagag

SEQ ID NO: 18445 - DNA, 382 bp, Glycine max
tttgatttgatactgcttccctcatcatgtggctcatgatgtttacaatttaatgatcctttgctaccctgcaatgagacacacacaaatacacaaacacacacacatagagacaaacacacacacacacacacataaagatacacacacacacacacacacacagagtcacacacacataaagacacagacaaacacactgagccacagacacacacagagacccacacacaaagacacacacactgagtcacaaacacacacatacacaaacacactcacacacatagacagacatacacacacataaagagacaaacacacacacacacacacacacacagataaagagacaaacacaaacacacacacccacacacag

SEQ ID NO: 18446 - DNA, 436 bp, Glycine max
  unsure at all n locations
ctatagacaactcaagcttcatgcatgtatgtaacaattnttgctattgactatattaaattgaatatcaattcaattcattgaacataagccttacttaagattgttgcttgtcaagtcgtcctaatgactatgtaattaagcgctgcaacaatgatcttgtgatacaacgtacaatattttgtaagcactagggagtagatgcctcctagattcaattatactttattcctcattttgactttcatccttgataagcttgatcatgtcatcaattcgaaggatagtagcttcagttgcaaactggggaaataaaaaaacttcatgctcatgcagttgtgtaaggaagctgtatattgaagtcaacaattgttgatatttaactaaatacatacctgaataatttttactttgctcattgcaggctcaatgactc

SEQ ID NO: 18447 - DNA, 320 bp, Glycine max
  unsure at all n locations
agtcttncatcactccgtgacaaaattaaactttccaacatccctaaatcatcttaaacatagccagacctgcatgaaaaatcccgaaattgagactcaaagaagaagcttgatgaacttgattttcaaagaggaagagcattatcaatgagacttagcgtaggtgtcatcattgttgtgatcatgaaggtgtcacgtgtagaagcatatgtaatatgaagttttgatgatgccaaagatgaaagctattcaagtttgatccaagtcaagaatcaagaaattcaagaggaacgatgaaattagtccataggatgttaaaa

SEQ ID NO: 18448 - DNA, 419 bp, Glycine max
  unsure at all n locations
taagaaatctatatatggtttanaacaagtgccctgttatggtaccttaagtttcatgggataatttcttcatttggttttgataaaaccccatggatcaatgcatataccacaaggttaacgagagtaaaatatgttttcttgttttatatgtaaatgatattttacttgcagccaatgatcggggtttgctacatgaggtgaaacaatttctctctaagaattttgacatgatgggtatgggtgatgcattgtatgtcattggtatttagattcatagagatagacctcaaggtattttaggttcatcataggaaacctatattaacaaaattttagagagattgcagatgaaagattgttcactaagtgtcgctcccattgtgaagggtgataggtttaatcagaaccaataccca

SEQ ID NO: 18449 - DNA, 324 bp, Glycine max
  unsure at all n locations
gaaacttctttgagaaacttcattgagaagctagagcttaattacacccccctttaataactaagctcacctccttgagaaggttccttgagaaactttcttgagaagcttcctttgaaaacttccttgagaagcttccttgagaatattcctagagaagttagagcttaggtacacacacccctctaatagctaacttcacctccttgagatgagaagctagaagttagctatacacctcctataatagctaagttcactcccatgccaaaatacatgaaaatacaaaaacattcctactacanagactactcaaaatgccct

SEQ ID NO: 18450 - DNA, 417 bp, Glycine max
  unsure at all n locations
gacattctaacttgttntgaaggtttggttaaacttataagttttttttttatggataaatgcttacgagtctacttacatgatctagttgatttgaaggcttaataataatgagatcatgattttttatttttctaaatattcattatagacttaatttatggtgtcatctttaacttaccatcacttatgactatcacccaaaaaattataaccaagattatattacatattacttttcatcaaatcatgtttgacttgaataagcctcacttgttaaaaaaatctaaaatcaaagaccatcaagtatttatcatatatttcacttgttaggcttgacttaatcattcttagcttatatagttatgtatgtcaaactacttgttaggggttggactttcaaataggacaaatcat

SEQ ID NO: 18451 - DNA, 353 bp, Glycine max
ttcttcatgtatgtaattggtaacagtactaaagactaaagagtgaagagtagtggtttagtgggtgcggctcgagagagaggaaagtaaaaggggctatagaatgtggatgtctacggtgggccacgttacagttaaagtcaattgggaccggtgtttaaggagcgatgattacgggttggattctcaatcccatttgtgtcgtttctgttccttcatcattcattcactgcaacggatccagggacttgttactatgccaataccctcacaactccaaactatattaataatcaattaaatcttcctcaccctaccattacacacccgctcttcaccataataattattct

SEQ ID NO: 18452 - DNA, 401 bp, Glycine max
  unsure at all n locations
tgtactctacatcctgtgataacataataagcaaattcttactaagtagattaagtctcttactaagtaaatgcttatgaatccctactactaccatatgcagtgaatagattacaaattttcaataccaacttggtaaatgcaaagataaaactatatatagttgttgatgtttcatctcaaaataacactaatcacacaactttgaacattaacattttcaggtatcaataattgatatcatgaaaccttgacaaataaataatattctttccaccaattatcatggcataaaaaagcataacataaaataaatatcatatttaaatgttaaatttgctgaatgtgaatggaaaaggctaattaccatctttntcaaggttttctcgaagcttctagat

SEQ ID NO: 18453 - DNA, 372 bp, Glycine max
  unsure at all n locations
atcttgcatgcgtttcatgcaaggcttttgccatgaacaggcttcgagtgtgcattgtcttctctgttgtacgtggtacaacaagaggcaagtgatgaggacattgaagctcaaggattgacaacaaggattaggaggacctatgactagagccagaaccagaaaggcagaggagaccctacaacaagtggtagcaaccattcttgaagttgcacttgcaataaagaacactgaacaaaaattattccaatacatgattattattgaagacccatgagctagagggtgttgatgctaactttntatttttatttttttagaattaaataaagntgtatttcttttattttattttcaattttcttttattta

SEQ ID NO: 18454 - DNA, 407 bp, Glycine max
tgcttgtagggcttctatggaggctggatctttgatcttcaatggggtcctttaatggtgattttcgaccatggagatgcagcggaagacaaaggaaaagaggtgagaggaggcgccatccattaaggaataagccatggaagaaggagcttcaccaccaagatgagccttggataagaagcttggaaggatgcttcaatggaggaaaataaagagggagagaaagagagaggggggagcacgaaattgaaggaataaaagagggagagaagtggaactttgaattatgtctcacaagactctcattcatcaaagttacaacaagtgttacacatgcttctatttatagactaggtagcttccttgagaagctttcttgagaaaacttccttgagaagcttctttga

SEQ ID NO: 18455 - DNA, 357 bp, Glycine max
ttgcaataaacgtgttttcatgacaaatggaacgaaaatgaggttttgaaaaggtaaattgatgacactccatttttatattctcctaatcttctttataaatttttgaaatatgatgaattatttactttctattatttattctttcgtttttctaaaactaactctcttttttaaattaaagtatttcacccaattatttaatctacaaaagcaaaaccattaaatagttgttcaaaacttcaagattatacattttcctgtatttttaacacaatattatgtttgaatttaattcttattttaatatatcttattctttatgcgaaaaaaaaaacataaaactcatgtctatat

SEQ ID NO: 18456 - DNA, 401 bp, Glycine max
taccacctcgtgatgccttctggctttggaccttctcttatatttatagtcctctagctcaaggagggctaaccaccctttgtaaatcgaaagagacatagatcattcccttgtttggaacgatccatcatcgctatatgctaactatcaatatgaacaactttattttaatttatttcaaactcttcaattagattattcatgaatgtcaatcgtcaaaaactaaaactcacaatttcaagatgaaatgcctaaatgtaaaacgatcaaatgaataaaatcatgtgcctcatgatagttctacatgttatcataagatgcattaccagaacaactcagcatgaagttacacacacaacatgcatacatgtgtatatatatacaactcttaaaaagaaaca

SEQ ID NO: 18457 - DNA, 407 bp, Glycine max
  unsure at all n locations
cccgggatcctctgagccgccttttgcatgcaatcttgtagggttaaagtctcactattgtcacgtgctcatgcaacaattgttagccatggctatgcgagacatcttgccaaacaaagtcaggttaacgataactcgcctgtgctttttcttccatgctatatgtagcaaagtcattgatccagtaatgtttgatgagttggaaaatgaagccacaattatactgcgcctgttggagatgtattttccccctgctttctttgacatcatgattcacttgattgtgcatctggtcagagaaatcacatgttgtggtcctgtntatctacggtggatgtacccggttgagcgatacatgaagatcttactagggtatacagagaatctatatcgtacagaagcatcta

SEQ ID NO: 18458 - DNA, 408 bp, Glycine max
taaaggagcactcaaatcgggtgtatttacccccatggcctagactccgaagagtccgtcagggcctctccctcctgattcaggtccaacccaaaaaacattttagcacacagactttatctatgaactgtacaaaatacacgactcctcaattgttctcaaaataattttatctaatcgcgcttgtgattaaactcgtcaggtcccaacagtggttcccatcataatactcgccacgcattaactcgtcgcccttagattcatagttcacaaatcagtgcacacaacatctcaatgcacatatatattacaagtcaatacatactcaatttatcacatacatttggtctcaatcacagtggtataatctcaatttaacatgttatcacacctcatgaatcatataca

SEQ ID NO: 18459 - DNA, 347 bp, Glycine max
aagctcaatctgaccttcatgattttcttcgaggtaaccatgattttaagcttggtccttggtagtttaagcttatctttgcatcttttctgactttggaaccatcattgtacgttttacgcttccttcgaaaaaacttaaagaaaaagacttttgtaaagttatctttttatgaaatggatgttattttcgtgaccttcactgaactctggtcacattggcatgatcgaaatttcaaaatgatattccttttcgtaaaatccgaaacaaccctcatccctttcatgtagtgacatgagtatttgactcagagtattgggtgtaactctatttctgaaatccatagt

SEQ ID NO: 18460 - DNA, 403 bp, Glycine max
tgacttgcccacttacatcaaccagtatattagcattcttgatatccctttaaaattgaataattgaattgaaatgttcagaatgtagcaaatcaatgcaaattcaagatatttaagaagtcaatttccaagcactgcatccaactttcatcttttgtaatgattgaaagtcaaacatttttcactgtctgaataaaatctgttaaagcaaaactctgcttcccaagcggagaatcatactcagtatctggtttctcaacaattttctcaatataaatatatgtgcaaatagagctataacatatcctctaatatatgaacataaatacaataactatgggtaacacatgactagaatgctaacttgcaagagagagaagtatatgataggaattaatgtact

SEQ ID NO: 18461 - DNA, 355 bp, Glycine max
ttcttgcctaattaacctgaaattgagagaaaatgattattaaacacacaaaatgaaaatactaagtatttattacctatacttaacagagaatacttataacattacaaaataaccataaattgggagagtttgatacaatttatacaagttttatacataaaagttagtcattttcaccgactaacacatagttgctagttaaattgaagcacaagttgaaatatatcatagttgcctagttatgttttatgctgggttttttttcctaatgtttgtttttaagtagttgcctagttatgttaaactcagcatgtacagggagtattgttccgtctataagggtattgatata

SEQ ID NO: 18462 - DNA, 391 bp, Glycine max
  unsure at all n locations
tgtccattntaagggtcatagagtgcatggtatcgtcaagacgagcaaaggaatcatcgaggttgtgggagaccataaggacaaacgagagcatcaaatgttacgaacaaaacataatgcaggaaattaaagagttggcttcgaggcaccagaacctccagaggaagaagaagagtagagaggagagtaatttgctaatttcattcatgcctgatgctattattacatagtcatatatgtactgcattctatgtaactaattttggcattttgtgatttctagaatgttcagaactcagcaatttggttattcttgtcccttaaaggccaacatcaaatcttccatcctgcacacaacactcctgcacgatcatgctcaaatgaagtcact

SEQ ID NO: 18463 - DNA, 230 bp, Glycine max
  unsure at all n locations
ccggctgcctgtgcctgtcctgtctgancccctggaaccccttttcgcttgccccgtttcggagagacggcacgcaaagacagccccaccatgcccaggcgttaacttgatgtattacttcaataccctcttaaaacccttaaaaagttccccttttattcacacctataagctctcgaatctccgttaccttttgatattatacatattgcaaaactattgttccacac

SEQ ID NO: 18464 - DNA, 398 bp, Glycine max
  unsure at all n locations
tctcccncaattttctataaataggggagaagtgaagtagaaaagggttcagccccataggcacttctctctatttcgaatttgcttaggaaaattgtttccttgaagaaaatccaagccgaggcgcttctgtaacgtttccgtgagtgatttcgcgaaggttttcgaccgttcttcgacgttcttcattcgttcttcatcgttcttcagtcttcaacgggtaagtacctcaaaccaagcttttcaattcattttatgtacccgtggtggtccacatttggtttcatgtatttttattctcgttttcatttactatttatagccccttttgacgtgcttaagccattttatttaagtcatttctcgcttaacctaaaaataaaataaatttccaccga

SEQ ID NO: 18465 - DNA, 343 bp, Glycine max
  unsure at all n locations
tgctttagacacactaaaaaaatatttattattagattttttaaacaaaaaaatcacatatgttgaaaaaatattctacatagttagcaaaaaaaaaaaaaactcaacataaaactttcatttaaagtaaaataaaaattcttaaaagttgctttagatttcagtttcagttggaccaacccttggacagagatgcctatttaacaagccgcaatagaaattaacttttgctgtatattgtaaagcaataccttcttatacaatggaccgtttctgtcaaaagtatttntatatgtaagaaaacagaagtaggtggggtgaagatcaaacacgaagtgtcaat

SEQ ID NO: 18466 - DNA, 398 bp, Glycine max
aaaactcagcttgggcttcccatcttgtgaaagacatgttgaaattggaagggaaaatttcttcaaccaatgtagatgttgccatatatgatagtttgacacattattttactttgctggttctgtgcttaatcttccatttatattgtttatattttgaaactatttttcactccacaatgccattttttgtttacaaagttagggatctgtaaatacatttttcagaatgtgcttgtcacaacttaaaatagcatgagaaactatctttcccctcctgtatttgacacatacacactgaaccttcaacccaaaaatggaaaacaaaaacaatgacctgtattggcttttacgaaagcgattgcatttggagttacctatctctgatctaaatttct

SEQ ID NO: 18467 - DNA, 385 bp, Glycine max
agcttctcatccttgtttttcactcgtcttgagtatcaagaagtttgcagctaaggttgttttttttttttttttccattggaggcacacattggtttatctttaaattaccagtttaggattaatgatatcgttccatcctttatatcaaacgttctagcggatgtatcttcgatcgtgtttcagtgaggtgtgtttaattgagatgtgccggggggaatccccctgttcccacaaaacacacacacacacaaagtactctaaaatttaagttgaagaattatgttgtttttagagatcttattcaacccgagcttgataagatgaataaatgtttcagaaacatattcacttctgggtatgaaaataaaaagaaaataatgtt

SEQ ID NO: 18468 - DNA, 381 bp, Glycine max
agcttgttcatccaataccctgatgaggatgtcccatatgttcttaaaactggactgattcatttgcttccaaagtttcatggccttgcaggtgaacacccgcacaaacatttgaaagaatttcacattgtctgctccaccatgaaacccccagatgtccaagaggatcacatatttctgaaggcttttcctcattcattagagggagtggccaaggactggctgtattaccttgctccaaggtccatcacgagctgggatgaccttacgagagtattcttagagaaatttttccctgcttccatgaccacagccatcaggtaagatatctcatgtattagacaactcaatggagagagcctgtatgagtactgcgagaga

SEQ ID NO: 18469 - DNA, 425 bp, Glycine max
ggatatattcattagagagctgtgagtctctatgtctttgtgtatagggattggtgtctttctcttttgcttcttactcctttgataggcctaaggtagcttaatttccacgcgacctcgctcttagtgcgggcttttgtgctaagcgtgagctagtcgttaagcgaggagaagtgctaatgacaatcctacaactgcccaaatacagggacctatgaccaggagtaggaccaaataatcagtggataccctccaacaaatggtatcaggcatacttaacaaggcccaagtggagaaaaatgaaggcccagaggcagaggcacttccaagaatcttaattgttgttgaaggcccacactattctgaacgcacatgccgaactatttttttgtcattttggcccaaactaatttgaaggcccatgc

SEQ ID NO: 18470 - DNA, 371 bp, Glycine max
tcgcattgagaaggaccatactgtatcaccagacccaccacacagtcacatcatactaatgctgcacctatatatgctgacagaattcataacgcattgaagatacccaacgtataataaccagagtacgattaccatctcaatctacaagtttatctcggtgtgatactgtatatccagtgatgttacacgctcatatgccaaattatcaacgctaactatcactatgaccctagtgcttctgaccctactctatttctatgagatgcatgatcttggtaatgatgacaaaaaaccacgttcggatatatacggctcccaaggggatattacataacaacctgaatagcacccttttcgtgtaccatacg

SEQ ID NO: 18471 - DNA, 308 bp, Glycine max
tatcccatgcctttatagcggatgtagcatcacaaatcttcttgtacgcatcatcatctaatgctcgatagatgatgaacagagctttcttgcctctctctcttgaatccttaaaagtacttctttggtgcttggaatattgaagtctcatgttgcggctccttatagcctttttcaaccatttcccacacattatgtgctccaagacgggcttccattttgatgctccaattgtcatacgtgcccccctatacaagtggaacttggaaggatgacgtccatttcttacattactctagaggaatttc

SEQ ID NO: 18472 - DNA, 386 bp, Glycine max
agcttatgagaattccaaattctacaaggacaagaccaagatgatacatgacagcttgataggtaataaggactttgtggttggacagaaagttttaatgtataactctaggctcggactcatgagtggtgagttgaggtcaaagtggattaatccttttgtggtgactaatgtttttccttaaggtacagttgagatcaaaagtaaatccacagatatgagcttcaaggtcaatggacatcggctgataccattcctcacaaatccttccttagtggatgtagtggtggaggagacctccttacttcaccctacttctcttccgccatgacttagggagtatttctttttctatctccttctttacttttattgcacttgtccaa

SEQ ID NO: 18473 - DNA, 397 bp, Glycine max
ctctccactaaattgcctaatgcctgagatgtcttttctgatggcagtggtcctagattcagggaagaatttctccaagaacaccctcttaaggtcatcctagctgaaaatagacctgggagcaaggtagtatagccattcttttgccactccatagaatgatgaaaagcctttacaaagatatgatcgtcttggacatccgggggcttcatggtgtaacaaacaatatggaactccttaagattcttatgaggatcttcacctgcaataccattaaacttgggcagcgaatgtattagtcaagtcttgagaacatatggaacaccctcatcaggatattgaatgcacaagctttcataagtgaaattaggtgcagccatctccctaatagacctgt

SEQ ID NO: 18474 - DNA, 384 bp, Glycine max
agcttctaaactttatacaagaatgaagctctgataccacttgttagacaagtggcctcagatatcttaagaagggggggttgaattaagatattccaaactacttacccaattaaaaatctatttcactttttattcaagttataaaatcccttaacaatgaacttcttaaatattaattcaaataaaaaaattttgaatatgaatataaagcaataataaacaaaggagtttaagagaagagaaagtgcaaactcagatctatactggttcggccacacccttaatgaattgagcactcaaataattccttaatgaattgcaattgaattggccaaggaattcttaagaggataatatgattttgctctttgataggacaaa

SEQ ID NO: 18475 - DNA, 422 bp, Glycine max
tgaataagttataagttgtttggttctctagttcttatattgtgctattgcattatattaaaatgttggtacaaagatgttaaccaatttttctaaccataataataaattgtttcaccaagttaaagtaatttccaccaagatgtcaaataaaaatatattcaattaaaacatggaaaacaaaagaatcaaccaaatttgaaggagaggaatgaaatggggaaaagaacatgcaattagcagcaaaaagtggaagatgaaaagttatctatagaatagtttttaccatatggatgccatcacccttcctccctctatacaaggatcatagttgatatagataacaaatctttttcttttttgccaactacttgttggtaaggtgctatgagcaaataatcaacagatcaaatcatagaaag

SEQ ID NO: 18476 - DNA, 373 bp, Glycine max
cttcttctgcttgcaatttcgagcgtctcgatatatgaagggactcaatcggacatccgagtatattatcttttttgcattgtgaagcacgcaccgagcttctgttttcaatttcgagcattgtgatgcattacgtgactaaatagaacattcaagtaaaatgctattgccgtttgcatttgctacaagcttctgagttaaaagttattgcagtttgcatttgctacaagcttccgctttcaactacgagcgtctcgatatattactggactcaatcgatcatcagagcaaaaagttattgtcgttagaatttgttcagtgcttccgttttcaatttggagcgtatcgatatattacgggactcaatcggaca

SEQ ID NO: 18477 - DNA, 424 bp, Glycine max
acagcagattttagtaatgacccactaacctattattaaaataacttaataccattaacctagggaattaaaaaaaacttaatggctgagtgtaactgaaattgtggcaaccaaaagtcacccccaacagccaacaagtcagccaccatttggtctcccaaaaggctgatgcctaggttgccaattgggcccttattacaacttgaactaaacctaactaaagccctttagttgattaacccaaaacatatttttggtcagccaactttacaaggattgggccattatttagacaaactaaacactctaaaattgaaacaaagtggtgtcatttagtcctcctccatttgggccatgatacaactcacaaccttggacttttctccttgacacttgggcttgtattcaaatagtatggacaaca

SEQ ID NO: 18478 - DNA, 247 bp, Glycine max
gcagcctgcatatttgtgcattttgcctagtgagtacatgactttatgtgttaatacgtatgtaattcacaatttttgtacttttctggttgaaggttcttaagcatctatacagatctgggaataatcacaaatttagtgctcgtccagcgagcgcacgcattacgccaagactgcgttattgactaagctgtacctgggcttatcaacggatatgcgctggacccacattccgtccattgttcaa

SEQ ID NO: 18479 - DNA, 375 bp, Glycine max
tttcttcgtgggtagaggggctctgtctcatataatggcttgatcactggctgacatattctcaattagctctgttgcttctttcggggtcttcagttttatctttccccctgtacaagcatctaatagttgcttggtttgtggtctcaacccatatataaacatattcaattggattggctaagaaaacccatgagtgggagtttttcttaacatgcctctgaatctctccaatgcttcactcagagattcatcacgaaactgatgaaatgaaaaaattgcagcttatccttctacagacttggactctgggaagaatttctttaggaactcttcaacaacttcttcctacgttttcagactgatacccttaca

SEQ ID NO: 18480 - DNA, 244 bp, Glycine max
tgttttattcttgagcaagtcttagtgaaagcagaacaatggtccatcccttatgagtctagcaactgcacaaagggtgaaagataatacaaatcatctccaaatgatcaatcttgatcacacaatatacatatgtgtttaaaatctgatatatagactatgtgtaaatacaaatggcaaaagctctgcacatgtgctgcttacaataaatactggcctccgtaaactactattaatcatccca

SEQ ID NO: 18481 - DNA, 331 bp, Glycine max
cggtcaagtggatacggaattgtttataaggtatgttgatttatatttttcatggaatcacatatcttgataataatttgagaattacatatgcgctagactttgaaatattgtatttattagggtacgctctctgatggacaagaaattgctattaaaagattgtttatcaattctaaccaaggagatacataatttaagactgaaatttcgctaacaggaaagctttagcaccgaaacttaattacactacttggcttctgctttgctaaaagagaaagatatttgattatgagtttgttcccaataaaaacctagatttattatattt

SEQ ID NO: 18482 - DNA, 736 bp, Glycine max
  unsure at all n locations
caactcgctctacttcactactacantatctacacactgatagngnagtaatatattacantaagtcactgtataantanagcaacacnncnnnaaacaagaganagnngtnngattggtggaacgtccgttgacacanntanangngacacatacnntatcntacgtcaccacgagagcactactattagtagtctgagacgtagcaggacctagactgtgtctataacaactgaacacacgctcatgagaacgctatcgcagggacaccgatantacaagtggctcgtgtggacgacatatatgagacatagtcactctttgtatcataacagaaacagagcagactgcaagctgattgatnctaaacaactgttgatacttacaacaagtcggtggtcatatacacagcttcgcatagtagccacgttacaatatgagcatgcacatgaacgcttcgtactacacaaatacaacctcgagtgatgcgcaacgacacatgtcgcacgtacgagagatacatgagcaagagtatagacactcgacaactgattgactgcaatggtggaacgtacatgacctcggatgtaacaacgacgacaagcatactgagcggaccactaacactatcatactagcaaaggatatatactctacgcgtgtaaacaacgcgcagaaaactacttcgatgcggtcgcaccaaactgagagctcaaatccctcttgctgcgggtcg

SEQ ID NO: 18483 - DNA, 504 bp, Glycine max
  unsure at all n locations
cccactttacctcctctgatcacattgaattcaatataattaaacacaanacagagggcgcgtgtgatcatcgatacacacaaaacattctcaacggcttgcgcccaaattgagcaagctatccattgatctcgaacacaatcctagcgaaaaccgtactagtgtcataatgtacaaacactggtacccaaatatatcttcctgggaacgacaacattgaaggaatcccatctcaactcatggccgccacgcacatggtaagacaactctagatttagctcaactagccttatgagtagctgagacccctccatcatacacgattaggctcctgccctaactaatttaatgacactttattcgaccctatatatctatattcaagcccagtgtacctcccatgtcagtaataacaatgttcaaacctatctacgaatgcaggcatacagcgcaccctcagttgcgaaatgaccggatacttcacatacatcgtatcgacaaacg

SEQ ID NO: 18484 - DNA, 541 bp, Glycine max
  unsure at all n locations
ccacccactacaccaatatcncatccctctatactactcctcactcactaataaatatcacactaaaaacaaaaaaacgagggtgaaattgatgcgtcgataaacaacaagacnaaaacacaacgacccaggatccacaagagacgacccgcacgcatgctttcttcattaaccatcacataagcacacagtagtcataagttcgcgaaaggtacacaataaaatccactccatatgaaacgggtcacaacaaagacaaaacacaacgaataatcaccaccatcataccacacaacgctagtgaaactctcaatcccacaaaagtccctgaaaatgtgtcagaaacatgacaacctggatcgtaaaaaactaaacattgcacaacagctaggtcaactcaatcattcaagcacaatgcgaataactagtgacgcgatcatggtaagcatgtggatgggcacacaaaaaaaacatggcttactcggaaaagaaaaaagagctacgcgacatcaattccctaacccacaacaaacccaatccn

SEQ ID NO: 18485 - DNA, 225 bp, Glycine max
ccaatgcgctgatcattttacgaagatctgtgatttcctgagtgatcgtgagatctctataggtggaggatacatcccacctcctttgcacggaagcaatttgtcttggtcgctcttcttcattattaaaggaacttccttgctatggaaggctatatcctcagatgtggattcctgctgaataatcgttgtatactctttccctacttaacaaatgatgtttat

SEQ ID NO: 18486 - DNA, 701 bp, Glycine max
  unsure at all n locations
ccatcaaccacccatacncnnactatctcccacgagaagcagtaccaacaatacgggcagatggtaaatacacttgcgacatcacnanannaccaagaggagcacgnagttgtagaccctgtanacactngagagaacacaggcnnaacacacgctaggancatcgcggaatacaaaagaagtggacacccgcgtgtttgtcaaacattcgatacactaattgaatcgacggagtgagactacgatgcatcgatactaacatcactaacacaatcagagaatgacactgcaaccgtatctggacgagggagacacagaacnagtcaacaactcacacacacggctacagaatatttagtgaccgacgacgagcgcagaggtatatgatgtgcgtggtgtgagtacacagcagcggaggcgaaacgagtacagcttaggacgaccgcgaggngataacagacgagacaggatagatagtttggcgccagaagatatagaatgggcaacaccgncgtgacgagatacataagcgaatacacagcgcggcggcgaaccttggacgacgaacgatatacggcagtagcgagatccagtcgcgtcgccgtgtcatcgcatgcaagatcgggcaagcaactatcggcagtagcgaagggcgcgtacagagaattggcgcggcacatgaggaagagtaaaaacatccc

SEQ ID NO: 18487 - DNA, 375 bp, Glycine max
agcttatctgataatatctgtgagttctacactctaacctatcaatatcttctatgtttgttaactttttttctgctatcataagtaattgatgcatttcatgtgtgaatgctaacaaactgttctgccagaacctgggaaatgtttgtcttggcattctaaacggctttgaagtacggttggaggaactgaatctagttggaggtaggaattttgttgtgttgttaccatctcttttcttctagttcccataccactcgcattacaattcctaacttcatcagcagttttcatcaaaatgatgtgtaaactctgcactatgtaaatcttggtatttattgtttatgcagacatattcatgcaagacaaagtgat

SEQ ID NO: 18488 - DNA, 418 bp, Glycine max
  unsure at all n locations
ntgaacatgactgtatgatcaagttaagcctaggcttgtgaaagaaataaagttgaagaaattgaacttaatagcatagttcatatacactcttacccaatttttccttgttggcaatggcaacttcaaaggttgcccttctcaattcatggcattcatgacatggttattaaattctcgagttaactcattaactcttacgagtttttgagtccacttagcatatgcgagttgattcatgtgtaaactctttttcagtagactttgagtagactctataaatcttaagtaaatccgaatttaccaccgagtcaatgaattaacaagttaaaaaaattatatccaaatgtaagtcatttagagtcattcttagttttgttagtgctcaacatacctttcattaacgtgttattttcaa

SEQ ID NO: 18489 - DNA, 384 bp, Glycine max
agcttgccacccagctcgcccaggcgagctaggttgcttcctccagaagcaactgccttctggaggaatattctggaaggcccaagtggggcctatttgttatttgcacccccatttttactaaatacaccccttgatcttttttggtgattttttttccgtaacgttacgaaactttacgaatttcataacgatgcttgttcgctttccgtaatgttatgaaaccttacggattacgtaatcatcccttttttgccttccggaacgctacaaaactttacggattacgcattaacacttccttttaattttcggcatgtcacagaacttcacggattgtgctacaatgctttcttttgacttccggcatgtcacagaacttca

SEQ ID NO: 18490 - DNA, 429 bp, Glycine max
  unsure at all n locations
tgtaggattatggggtacccatcacatgtggtactatgtggcggtcgggcgatggtgcacaacaagttttccacatccacaatgcgcgcataaacccaccatcccctgttgcccacctccaactgagctcacgtactcccacgtagcccatatcctcgtttctctcaacaccgggtccccatcaatcctcccaagcttccacaacatccaagcaaaacaacattcaaacagcacaagctatcatagccaagcaaaacagagcaaaggcagaaaattctgctcaacacatcaaccaaaatcacagcttttctcacttaaagaccacagtaacaattccttcgatccaattcgttaaccgttggatcgactccaaaattntactggaagtctacagtgcataagcctacattgtgaccgttgggatctact

SEQ ID NO: 18491 - DNA, 383 bp, Glycine max
  unsure at all n locations
agcttgatagtttacttagagtcatccctgaaactccccaaacttccgaaggaacatcataaaaaagggtaacaagaagtacctccaaattaattaatgttcttaatgaagatagtaatcaaaacttagaaaacacatttaagataggttcagtatccgaaaaatacataaatccaataaattccaaacactggaaaacaccctccaaattatattatcaaagaccaactgcccccgaccttctactagaagaaataggtgaaagtaattntaaaagttttagtgcaaataacatctatgagtggaatatagatgcccaaacggagtataatatcatgaatacactccaacatatgaccatggtagccatagtctaccaagca

SEQ ID NO: 18492 - DNA, 427 bp, Glycine max
ggtcaactcgcacgaacaaactttgtcccacttgcatataagtcctagtgtcttccatatttccatgccaaaaaacccgtaacaagaaagttcactgcaagcttgaaccaattgactattcgaagttgagctaagaacaacgtagatccataagtatagttcacttattggacaattttatacgatattaaatatattacctgtaagttaactacacctccagacagagagataaaaaaaataatataaaaaggtacaagtaaacaactagaatatataaagcttcaaactcgagactaaaaaacagaaagacaagttatagaaagatacaagtaaactcggtagccaataaatggttacatctttttctagtaattagagcagcttctactatgcctcatctgaaaagaataaattaattaattat

SEQ ID NO: 18493 - DNA, 388 bp, Glycine max
agcttcaaagaatttgtttcagataaggacatattgactgtcttaacatgttacagacaaatacaatgataaagctcaaagtcgaaactctcaggatgtacaaggtgttttgagagttgcgttcgaagttagaacaaaatttacaaagaatttgaatgcttaagaatgctttgtccacacgttggtttctctaagttcagctcatcaaatcttcaactatttgtagacttcagtaaaaggtaaccattgtgactgtaatgacctccatcctcatcttcgtctattggtaaaggtgttcgttgaaacatttaatgcatattaccaacttgccaaactaatatgataaaacatgttgcttatcttcatttacctacattccacaagtatg

SEQ ID NO: 18494 - DNA, 424 bp, Glycine max
tgtatttcaaatattatggtgtgcgcttgttgtaacatgttatgtttgctactgatttttaattctttgaccctttgaatgaccaaattggctttcgatgtcttcatgagacttgtagagaattttatcctttacattcaagcactggtatcatgttatttggaccattacaacataatcaatccttaaagcattgcagttttgttatattgtgaggacaaactgacatctctatcttcatggtcagtttcttccaagatccaagccttatttgcccatgacttctccataaaagatatatatatctttctcttagctttctacaaccactgagatcatcccaaattcacttttgtagctcaagtagttttcaaattattgcacacatatgaaactgtcaaggcaaaccagcgtctttaacttc

SEQ ID NO: 18495 - DNA, 384 bp, Glycine max
agcttgtatggttaaagtctcacgattgtcacgtgctcatgcaacaattgttagtcatggctatacgagacatcttgccaaacaaagtcaggttagcgataactcgcctgtgctttttcttccatgctatatgtaggaaagtcattgatctaatcaagtttgatgagttggaaaatgaggccgcaattatactgtgccagttggagatgtattttccccctgctatctttgacatcatgattcacttgattgtgcatctggtcagagaaatcaaatattgtggtcctgtttatctacggtggatgtacccggttgagcgatacatgaagatcttaaaagggtatacaaagaatctatatcgtccagaagcatctattgttgaga

SEQ ID NO: 18496 - DNA, 442 bp, Glycine max
ttacggacactatgaatctcagcttacatggagctacatcaaggatgatggtatatatggttccagaaaccccaattgcaaatcaaactacttcaacatagcctttggtgcagcttttgtctacttttatccaagttatccatggaatacttttgaaatttttctatttttggtcttatattgatggcatttggtgcgctgatgatgagtttttgaagagagaagtgctatctttctttaaaaatctttttcaatcctcaaatcaatgcaaacctggtagtctacaattgatttccattcctcaagtagaccaaaatctgtatgatttataactatctcatatttccatggatgatgttcaaaatgtcactttttttatggattcctacaaagcccttaatgtagatgagttccaacctatcttttttaagacttactggga

SEQ ID NO: 18497 - DNA, 747 bp, Glycine max
  unsure at all n locations
gacctcgcttcaantacatctactatcattcgtcacacactacnttatgccagagtcaaaaacgcaatntatcantacntanctacacaaaaanannaacgaggagacaacnnctggttgaccattcgatagactctacggaganactcanagactcagtnaccgcgcgcgacngctcatcggtatctcactctagcatagacatcgcatagctgtgttnatgactgtctgtaagtcgaatgcaggacaatatctatagcgcgagagcatctactcatctacacaaatcgacacgaagctgtactacagatacatatcgcatggtataggctagtaataagtgtggacacacaagttgacccatctataggaatgatagacaatcacaaacagactctgagctacatacgcatcactaccacctttaggaaccaccacgagagatgtcgctagtctgcatcgcatgcgttcacttaacagagctccatctattgtgagagcacgacatataacggcacaccgacctgcttcatctgcgctacaaagatactacgtgaggatacgatcagcatcttcatatatctaggacagcatagctgacctcnacacgatgatcgaggcatatgatcactagatatgactcaattatatactgtatcgacgcatgctacgtnttacaagcgcgacaccacatcactcttggctctacagttcaacgaactcgtcgactgagcaatgacgatatcg

SEQ ID NO: 18498 - DNA, 518 bp, Glycine max
  unsure at all n locations
ccactcctttcttatttaatatagtttgattatatccaancaccaacaagaggggcttgtgctcctgacgacaccaatattatagagcccccgccctatggactgaacaagaatgagatagatgtgttttcttatttgggccgataaaaacacggacatagttttaactctcaatagagtctcactaaggaacacattctgataatgacctgacccttgtggcacatgggacctttgaaagtgtatatgaaatactaagtgaatgcgcgtgtggagagctgtccatatagtaacatatatgataaggtagagcttaatggctcaactcgtcatactcgatagctcacgtttatgacaagtttcctggataagctatagcatacttactgccacccatctagaagctatactacactccttagcaggagaagctaaagcttagctccgtacaccgctctagtagactagcataccacatgccggatgtcttgtagatacactacaaagatggtagcacg

SEQ ID NO: 18499 - DNA, 451 bp, Glycine max
  unsure at all n locations
ccaacgcacttgacaaaagatatataattagtactaaaatacatacctcatananacgaggtganctgtgctcgtaaacacgggcacaaacgcgccggaggacctagcatcaccggcagcatctttttaacaccttaagctacgactaggtagttggcccaaaaggaacggctcctgaggaaaaatctagaagccccaacaggacacaaggtgcaaacaaccgagacgtgcgcggacaaaaaaatcctgatatagcaaggaacacgtagccctaaagcactctacaagagaaaaaaagctctcaaatattacatacagaaaaggggtaagcccgaaacctcctaacatcgtcccaaactaaaactaattgtggacccttaacggggttgacttctgacaacaaaaaaaacgaggaactcaagacttattagatcgaccataaaaaaatacg

SEQ ID NO: 18500 - DNA, 370 bp, Glycine max
agcttctctagaattttaacattttgaattgggcttagtgagcagatgcgctaagcgcaagggctcttaaaactcaaacgtcatatgggcacgctaagcgcagctgtgcgctaagtgcaccatacgaaactgccaaatattataaggtacctgccgtaggtagttaccatttcactcttgttgtgcattaaggccattcattgcatctaccctcaacttgcttcatttccctgcattcctgcacctttgctattctttgcattcatctacacaatccaagtaagtttctttactttacttcatttcgttctaagttttcaaccttaggatagataatttagtgattgttaggtagaatctctgtttatgc

SEQ ID NO: 18501 - DNA, 425 bp, Glycine max
  unsure at all n locations
tcttatccaaggctcatcttggtggtgaaactccttcttccatggcttattccctagtggatggcgcctcctctcacctcttctcctttgtcttccgctgcatctggaaaatcaccattaaaggacctcattgaagctcaaatatccagcctccatagaagccccacaagcaagcttccatcagaatggcaggggaaaatggtcctttttggtaacctggttcagcctgctatagtcaatgcagactctccaactgttctgcacccaagtaggaatcagctcctccttctcattntttatcacggtgaggccggttttcttcaggattacctggacagaactcacccattggctgtcggagataggataaatgattccagttngcaaaagcttggttacctccttcttcactacatcaagaatca

SEQ ID NO: 18502 - DNA, 384 bp, Glycine max
tagctttgagggaagaaacctcaagaacactttatgaagcttggaagaagaagaagaaaatggattcctctccctcccatgaagaactcgtgcacaacaatggagaatgaaggttctaagtttgatttttttggagaagtgaagagataaggctttaaggcttgatccaaatgaaacttggttagtttaatgttgataaaatcaaattgacaacttgaatgatcattcaatagccatggtggacatgccaaatgcagccatgcataatgagtattttaccttttgaatttttaaccagaaatgactaaagtatacttaaagcaaaaatggtaaaaattgtttttgctaaaactagtaaatcttatcctaatcttctagattagt

SEQ ID NO: 18503 - DNA, 404 bp, Glycine max
  unsure at all n locations
tgccgcccaactcgcccaggcgagcaaggttgcttcctccagaagcaacagccttctggaggaatcttttggagggcccaagtgggcctggttactatttgcaccccttttttactaaatgcacccccccttctatttttttggtaattctttttcgtaacgttacgaaactttaagaatttcgtaacgatacttatttcccttccgcaaggctacgaatccttacggattatgtatttactcttttttagctttccaagaagttacggaaactcacggattgcgcaaaaacacctcttttcgacttctgcctcattacggaatttcacggatcgtgcaagcttgcttccttttgatctcggagacgtctcgggacatcatntattgtgcaaccaacgacgcca

SEQ ID NO: 18504 - DNA, 385 bp, Glycine max
tatcttaccttgaattataattgtatcctttgcaccctttgtgagctaaattacattttcaaaattgaaccctggacttgaatgaatatctccagataccttgtttagattctaggagagcagatagttcaaggcaaattacctcaaatttgggggagttgattgggatgtaaagtaaaaggtaaagcatcagcacacacaacaaataagttgtgtgttaaaaaaaatgttgttgtaataaggtcaaatgcaaattaaagtgaaaggctggtgagaaagttaattgtattgaaagaaatatctggatgaatctaggatttgtgctctcttataatctaagtctttgaatcctagaaaaaccaattaatgttgtagccgaacctca

SEQ ID NO: 18505 - DNA, 315 bp, Glycine max
  unsure at all n locations
nntcaataataaggttgtagcccagatatgtattcataatctcaaacgcattcatgactggcactggtggtgctgaagaccctgcttcatccaccttatcaacacgcttnttgtgaatcccgtgcccaaaattaggcccactgacttcaaggttaaaaggataaatcttttccaaactttggttagccatttttaagccagaataaagtttaaaccaaagtttttaccttaacaaaactaaaattttgccctgaaaaatctaggaggctgataattttgcatgacccattcattctcaaagatctcatccattgt

SEQ ID NO: 18506 - DNA, 376 bp, Glycine max
ttgcttctcgcccaattttctataaatagggggagaagtgaagtgaaaaagggttcaaccgcttaggcacttctctctctttcgaatatgcttggaaaaattggttccgtgaagaaaatccatgccgaggcgcttgcgaaacgtttccgtaacgtttccgtgaggaatttcgcgaaggtttcgaccgttcttcgacgttcttcattcgatcttcgatcttcaacgggtaagtacctcgaaccaagcttttcaactcattatatgtacccgaggtggtccacattggtgaacgcgtatcattattctcgtttcatttactttttatacacccttttgacgtgcttgagccatggtatttaagtcatttgtcgcttaa

SEQ ID NO: 18507 - DNA, 339 bp, Glycine max
tgttggatgatgggacacccatcatatgtggttctttgtggcgagcgggcgatggagcggataaactctcccacatcctcaagtctaacatgaaccacccatacccagttgcacaccttcaactgagctcacgtactcctacataatgcttatcctcattcctgccaacagcgggaccccatgaacccctacaagctgccttagtatcccggcgatccgatctccactatcatgaggttccctataccaagagaatagggcagaggcagaaaactctgcccaaaacacattgacatcttatagcttatcttactcaaatgcgccaatcacattctctct

SEQ ID NO: 18508 - DNA, 367 bp, Glycine max
  unsure at all n locations
agctnnttggagtagaaacatgggaccaactcattttatttcaaaaaggaagtcgtatctagtcaaggtctgagagaccatacaagtttnctaacgatttctaattatgtgggccattaagtctatcatatgctgacaatagccgagaagtccgtggatctccttgngggcggagtaggtgtccgccattgctttggccttggctagcaatcggcgaagttcttgactcttgttcaaagtaagagcaaatcggtccgtccacattgttgcctcttggtgcaatgaatcaattaccctttcccttgcttccctttctgctgatatcttggcgtactcatcctctagcctttgctcgtgagtcgccgct

SEQ ID NO: 18509 - DNA, 415 bp, Glycine max
  unsure at all n locations
tcattaagaggcttctagcatactccagacatcttctcatagatcccaacagtcagatcatggacaagtgtcttgtgaagtttaagaccaaatttcgagaagatccaacggttaatgaaggctgagcatcgtttttaccgaggcagctgcatgtagctttctctagaagcttcattaagaggcttcctctagaagcttcctcgtggcttctttgagaagctttctcaacaggattctttgagaagctagatccttatctatccacacccctctattaactaaattaacttccttaaaaataattacggatgaaaataacgcaacaaataatcaaacatcaaacataattactaataatatatagatatatatatcanggtgttacaaggaactaacagatttgaggtcaaatcct

SEQ ID NO: 18510 - DNA, 377 bp, Glycine max
  unsure at all n locations
agcttacaaaaatttgtaaagggtgtcaatgagatatttggacaagagtacttgagaagacccaacaacaatgacatcaatcgcctactacaaattggagatggacaagggtttccaggtatgttaggttttattgattgcatacattgggagtggaaaaattttctgtcagaccctaattttgtccaaggacaatcattcatggatattttgattctcgctagccaaattgagctgtttgacaccagttaccgcgcaagacgaaagatcattcgatgttttggtcaagggtgtgaaagatactaaaagggaggggcaaaagggtcttttcanggttatttctagaccctggctcgcccaggctagcctttggctct

SEQ ID NO: 18511 - DNA, 421 bp, Glycine max
tgctcaagacaaaacctaacattccaatccactcaattcatactatttctcattctaatcaatcacaacacttcatttcatacgaaatcaaaccactgaatcattttcaatcaattcattgttcaatcatgcttttgtacaagctactactacaaacaaaataactaaaatttaagactgaaatttaaataactgaaacataaacataaaataaactaaaatagaataataataaactgttcaaaatgcaagacaagaagataaagatcctgtcaatcctcctgtgggtgatcctctgcatgctcattaagatccaacaccggagcagctggtggatcctgaacaataggctgctctggctccaatgctagtgcagatggatgagaatcatcaataactggagctggagagacaggaattg

SEQ ID NO: 18512 - DNA, 537 bp, Glycine max
  unsure at all n locations
gcgccaccacactcacttccactacatcgttaatgagatggctgattaaataaatacagtcgaaaaannaacagagaganatgatgcttcgaaaccacgacgncacaaanaaccggngcccgggattcngcagagtcaaaatggacgcatgtatcttgtggtggaaagaaggcgaccaggacaagctaccttatatttcattcaatggacatccaatgtacattaatgacgaggaagaccagaccgcgaagacatcatactaactaatcacagagcgatcgttaaggatgaaaatattgtcactaattaacgacacagagcgcgaaagtcatgacggggagggaaaccgggaccccataggtactagcaatgccaggactgaaggaaagaattgaccctccccgaaaatatgaagacattgtagcgaaaataatccttacaaaagccgtataaaacgaatggaaaaccagcgagccacactcaaaaagtatggggcgtgatgcaagcacaagaagagaaggaccccaaacaaccacc

SEQ ID NO: 18513 - DNA, 388 bp, Glycine max
agcttgttcattcctttctgcaatgtagttttatgcaagttaatttaaacaaatgatgatggagaaggttaacacctttgtaataaagaagtagtttgaagtccctaagaatctatccaaaatatactcaaggagcaaaagatgttaaaacaggaaatttaaagaggaatgtaatttcaagttttgcaattaacatggtaaatgatatttagttttctgttattccttgattcttctatacataatgcacaccagctgcaaattcaattgcagtcacatatcagaaacattgtcttggatcaatctgcttcaacacgttatacccgcattataatatcttttaagctagctagcttataatgataaattttaagggtcttcacatttt

SEQ ID NO: 18514 - DNA, 425 bp, Glycine max
tggacttaatattctgtagttggtggttgatccatcacactacggattagaaggcaacgggaattatggcaccgaaccaggaatcttaaacataaaaatagaatccaattactagttaaattagtagaaaacgacaagaaatcttctacactatattgcaatataaaattcaactatcctatgaagtatgaaccttccgttttctattcgttaagctgtatgtttatgaatatgattagaagtaggaacgatgtttacctacccacaaacaataacatcaattgaatagaaataccccctttttgctccctatcctcctatgatattgataactaattgaattgaatttgattttaatatatcaacagttttttttttacaagtataaattattttataggaataagaatataagatgaattaat

SEQ ID NO: 18515 - DNA, 384 bp, Glycine max
agcttatagaagaataagaaaggggcaaacagaagactcaccatcctgtcactgaaaacactcctctccatcaaacgaagaggcttgattccagcagatgactctctttcctgcatgacccgtgtgacaaacacatagttctgaaaggtgtaggcataccgttgcggctcggcataaaaagcatccaaaatgttaaagtgatcaggtccaacatcctgccacttgctaatgggttcatgaaccacctcaacaagatcacgcaactcgatcgtttcattcgctattctctggaggaaggtagtcttgccaacgctaatgttaccctcaacacagaatgttaagcgcttcttctgaacagaggaagaggaattgtcttccaactcc

SEQ ID NO: 18516 - DNA, 423 bp, Glycine max
  unsure at all n locations
tctaattntgtaaccttattctatttgggtagatgttcatttcaaggcaatttgttttactgaaccagtttatttagtattcaatgaaatgattgttttacgttaatattacatcgtttttactagttaatttccttttactcatatttcctctaaaaaaaaaaaaacttttactcatatttgaggtcatatatatgtaaatcgataccaaaataaaagcgaaggtagaatgacgataagagggcccagtaaattttttaatgtcaattgctacaaatagatcgactttattaaaataaggttttggttaattatgattaattgattatcagttcatttggttgtttttattaataatattattattggtctattaagcaatatgttggtatgagaaaaaatttcataattttaaatatatgt

SEQ ID NO: 18517 - DNA, 381 bp, Glycine max
gaattatacaataacacttttcgcccaaccatgaagtccttcttaattatcatgctatcatggaacttcttggtcttttctttgtagaacttggcattctcatacgcttctaggcggatctcatctaactcactcagttgcaactttctttcatcaccagcttgatccatagagaagttgcaggtcttcactacccaatatgctttgtgctcaatctcaactggaagatgacatgcctttccaaaggcaacccgataaggagacattcctatgggtgctttgtaggtagtcctatgtgcccaaagagcatcatcaagcctggtactccaatctttcctgcttggctgcacaatcttctctaaaattctcttgatctccctg

SEQ ID NO: 18518 - DNA, 427 bp, Glycine max
ttcataaaaaataaaaggttcatagaccaaaagaaaaaccctttatcctaattgttaactccaatcaagacttaaaatttataagttccaacacatggtaatcattttataaagttatataaatataaatttgatacaagaagtttttttttaagaaaacaattcacgccacgagatccacgataacaatagtcatcagggaccatgatagctgtcacgtacctacatgcaatgatagcaacattcaataattgcctacaaagataaagatgaataagaaaatttcataacaaaacgtgtcccaccacccaaacaaataaaaaaaagaaaaagaaaagagcccctttcaactatgaagagcataatgaactgatagtggccattggcttttatttgttatatgacacatattaccttcatcaaccca

SEQ ID NO: 18519 - DNA, 222 bp, Glycine max
agctttggggctgaggacctatataacagcactagggttttagttttggagagtttttggagagaagaataattctagggttttagaattccagacactgttcacgtagaataaaatttgttttccgcaatctcatttctacttcaatctacaatttcgttttctattgattaatggaaggctaaacctctctagttgttgtctcttgaggatcaacctcaa

SEQ ID NO: 18520 - DNA, 422 bp, Glycine max
ttggctgcgcagcagctctgatttcgtgagtatttatagaagatgacgcattgtaatcgattacaggtattggtaatcgattacaggcccaataagccttctggtaatcgattacaggatgttgtaatcgattacaggctgcctgttcatgtgtaatcgattacactggatggtaatcgattaccagagcctatcctaggctagtttctaagagaatatctatatttatgctcaaatacatcctatatgactaattctcactactaatacactaaattcaatcattcaattactatatacacaagaaatcataaattctatcataataacacgaattcacacatgatctaactatataatctacaatcaaaaggtaaaagtaaatcaaccaatcaatccctattgttctaaatctcttacat

SEQ ID NO: 18521 - DNA, 383 bp, Glycine max
tttcttgtggtggaaaaaagggtgaacaattttcaactatagatatttttttattagactccattgacatttgtatgaggaaatctgatgtgatgaaatctccttaatctcctatatttatgttatgatgaaatcttgtctctaatttatgacacaggtgtgacggtcatgcataaattgaaaccttgtttctttatgttttttctatgtctggattgcttgaaagtattgttgagtattgttaagcactgattactttttagtgaaaattttccttaaaattaccttcaagtaagactgtgattaccagtgaccacacactcaaactgtagtctgttcctgattggatagcaattgtgtgaagtggatatgttattcctgat

SEQ ID NO: 18522 - DNA, 408 bp, Glycine max
  unsure at all n locations
ttctgtgtctnttttaaataaagatatggtggtatataccccaactagtggttctatgttaacttctaatgtgtgtttgaattgtcctgtggaaatttctggcagaacatttgtgattgatctaatttgtttgccctttagccaaattgatgttattctaggtatgaactggttatcttccaaccatgtcttgttaaactgttttaataaaactgtggtgtttgatggttctggagtaagtaaggatatgatatttatctctaccaaccaagttgtgacatctttaaaagaagattctcaagtgtacatgatcttgtctaacctagaaataaagaccaaggtttccatgtgtgaccttcctgttgttagagagttctctgaagtgttccctgaggatatatctggtct

SEQ ID NO: 18523 - DNA, 379 bp, Glycine max
agcttatggcgtttttagttaaaatatttttatcatttcttatatcaatatttgtaaacgagatacaaagtgaaaataatgtgatattttagtaattgaaaaaaaatatataaaaaatatttatatgaaccacagtaccaagcacatttaagtttctgcatccaggtaatgatttcctgtggccatcattcataaattcaaattactttgccaactctacaatcacttgcttcatgaaaggacagaaagattgcatccataattctgcattaagctcatctatatgctctggcggtttccaaatataatgtgcaatgaagaggatgtgttaaaattttattgcaggggaaaaaatagctcctctaaagtaaatttttct

SEQ ID NO: 18524 - DNA, 418 bp, Glycine max
  unsure at all n locations
taaactntntttaccatgtatttacagggaaaattgctttgagttcagcaagtcatcgtaaaattgatgacgatgatgataacttagacgagtttcttgaggggatgttttcgcgatcctggctaatttgattgtggtaacaaaaggattcatcaaaagagttaagaaaaactcctattgagttcttgtattagagatactctaaaattaaactaagctaaaataaacatgtagtatttaacttaaacttatcatattttttatattaaattctcacattaagtaatgtcacatgatatcttttttacatttacaacaacaagttgatatgagatctatctagaacaagttgcagaatttcaagagaacattctcaaacatatatattcgatatgagatcttactgacaagaataaaa

SEQ ID NO: 18525 - DNA, 384 bp, Glycine max
  unsure at all n locations
tgcttatgcaaaaaaagaccccaaagatagagaaaaaggagagatttttcaataatagggaaaagcataactacattgtaatgaaaaatgaatgaataataataagagagatgaggtgaacaagttttaaacactttgtgattatgattttttttataatgtagaagtttttaaagtctccatgattgtaattgtagtagcattggttacatttatatgtaatttctctcaatatcaaggtttgtgacaaaactgtgacaacaatttaaagccctaatataaaggattaccttaaatgatttaggcaaaaatgattcatgatttacaaagaaacaactaaatttatttttcanactaccaaactaagcaataacaactacattt

SEQ ID NO: 18526 - DNA, 403 bp, Glycine max
tctggttatataggccttcttcaacaagtgtttattgtctttaaatggatagatttcttcacttgagctcgcgtttgaagattgtgatcgttggaacatttaatgtttgcattcaatgcacatatgataagtgccaaatttaagttatttttgggattaaattgttagcacttatcctttaattgtaatagttttcttataaactacccttaaaactagttgtaactatatattgtacattcactaatattattgcttaaatatgaaagattcatccataattttgtaagttttgatggttgtttgttatatctagaaacatagctaaaaggaagggtgaaatggtcatttcacgaagatttttgatcctaaattcacccaggctatcaattacatcacttat

SEQ ID NO: 18527 - DNA, 241 bp, Glycine max
tttctatgagtcaatactaacgataataacttactactcggatgtccgacagagactcgtagtatatagacacgctccaaattgaatggagaagctgtcatcctattacaacaatagtaacggttaactcggatgacagaatcttagacgtaatatttcgggacgcttggaaatgaaagtagagcatgtgagcactccccaacgacactctaatgttaactccgacgtgggaatgactcgc

SEQ ID NO: 18528 - DNA, 417 bp, Glycine max
taaacattcaattgcgagagtctcgttatattacggtactcaatcagacatccgagtaaaaagttattgtcgtatgaattggcttacagcatagacattcaactttgagcctctcgatatattacgggactcaatcagacatccgagtaaaaagttattgtcgcttgaatttgctcagaggttcaaaattcaatttcgagcgtatcgatatatttcgggactcaatcagacatccgagtaaaaagttattgccttttgagttggctcagaggttcaacattcaatttcgagcgtcccgatatttacgccactgaatctgacatcccaggaaaaagctattgtcgctagaatatgctctgagcttcaacattatattacgagcgtctccatttttttcgggactcagtctgacatccc

SEQ ID NO: 18529 - DNA, 384 bp, Glycine max
  unsure at all n locations
tgcttccatcaagtggtaatcagagcacaagagcttcaactaggtgctccgtaaacctccattaattttttttgctttaccttctcttccattgttgtttcttcatttttttctccatgtatctcctcacatgtcttgtgctaaatgtttttaacatcattctttagagtttccaccgattaaacttgctatataagctagatttgattttctatggttcaaatttcttgtttttgttcttgaaccatgaattgtgttgagtttaggttcctttgagttttgtcttgttattttttgtggctgaaacctaaaccataaaattcatacaaaaatattaaagtagaataaaagctcanaaatctagagtgacttgttcacctattg

SEQ ID NO: 18530 - DNA, 418 bp, Glycine max
tcgagcacactccagataacgtctcaaagatccaaacggtcagatcatggacaattgtcttgtgaagttgaagacctaatttcgagaaaatccaacggttaacgaaggctatgtagcgtttttaccaaggcagcttcatgtagctttctctagaagcttcattaagaggcttcctccagaagcttcctcgtgggttctttgagaagctttttcaagaggcttctttgagaagctagatccttatctatccacacccctctattaactaaattaacctccttaaaaataattacagataaaaataacacaacaaataatcaaacatcaaacataattactaataatatatatatatatatatatcggggtgttacaagggaggcaaagaattgggaagtacaggcggcccccattttgt

SEQ ID NO: 18531 - DNA, 378 bp, Glycine max
agcttagattatactaacagaacctgaaatgcatagtataatttttctaacaaaggaagcttaaatcatacaacagaagagaatcctgtatagactagaagcaactaacaagaatgatagacaagaccagagcactaagaagctgcaataagcagtccttcaaaggccacccagggtcccacagccaatgccaaattctatgatatgccccctcttctctgtacgcactcatatatagcaaatagcgttcttttcccccatgatggccaaatccactgacacatttatgagatgccaccagtccttgctctatatacttgcctctcctagtcctatcctatgaaggtcttccacctccttgctcctttcattgattag

SEQ ID NO: 18532 - DNA, 382 bp, Glycine max
tgttaatgtctaccatgaaaagcggttaccttgttgtattgggttgaaaaaaaatatataatttaggaatgattacatatcttgtattaccaaatgatagaattttttacgaacatccaataattgcattgactaataaataaatatttaactataactaattattatatataaaagaaataggatgtttagatgtacattgtattatatctattttatctttataactatattcataacttattatttgatttatattattacctgatataatcacccgctaactaattattatttttcattgaataaataaacatgaataaacagttacacgtgcatgtttattcctaaaatgttataataatatgtcattacctcaaca

SEQ ID NO: 18533 - DNA, 379 bp, Glycine max
agcttcaaaccacagcaacactaaatctaggtgtccaaaacccctcaatttaatggattttctaggcttgagaagtcaaattgagaatgggacaaatttgaagcaaactctcacctcacacaagtctataacatcaatttaaacttgtttaaactggatttacgcttaaaatctcaccgaatcaaaatttgactcttcaacacccaaatttaccctagaaatggctctttgttcactttggtcatttgtttttctctctagcacagcctaacctttctcataagtcctaaatggcatttcaagctaagattaactcactctaacctctaaatactaccaattccagatttggccttccagccctcaaaaattcactatt

SEQ ID NO: 18534 - DNA, 417 bp, Glycine max
tgtagaatggctagacatgatacatgtcatggtttggtttggttcaaggataaaaagggatgccccacattatttccatgacacaaaatgcaaaaaaatgatgatttggaaactttatgcaaaactggtcatgcatgcacctatgcggacactcaagtgtcaaatttttatggtcatgtgatgctagggctcaggattcatttcctctattttaatcaacccaatgtttccaaaatatgttcttttatcaatttgtgcattcatccgagtccatttcgggcgtccggggaaatttcacagcattcacccttcaggtgtagacacattttccaaaaattggttatgatcaatgaacttttttttggaaatcgtctcttttcaaaagcatgtcgttttttagctagacaacttattttc

SEQ ID NO: 18535 - DNA, 365 bp, Glycine max
agcttatgcaatcctaccccccaagggtattggatagaagactccaagaggattgggctagagctactaaagaaggccctagggttctcgtgaaccttagggtagatttttgagcccatgggtcaaggttggatccactcttctttgtaaatattagaataggttttttcttcttttgggccttgtattttggccattctagtagtatagggttttagccttgtattttaaggcatattgagtagtctttgtagtagggacttttttttattttcatgtatttttggaatgggggtgaacttagctattatagggggtgtgtagctaagctctagcttttcatctcaaggaggtgagcttagcta

SEQ ID NO: 18536 - DNA, 426 bp, Glycine max
gggccccaactgggaaggtttttcgaacccgacaagtgctccggatcgcgcaagtagtataaaatggtaagagcagagtatcgaattctcggggaactagtgttacttggtaaagctatagtcagtgaataggtgtctagtatgaaaagatatgcgtggactatgaacaggtatgtaaactaactattaaaaggaaaatcacgtgagtaatggtgcataaagacaagtagacaacatgttggtcttcctattaggtgcctgatgttataaggatattctctacttaataaagctcctgtgttctatggtgtctcctgaaatgctaaaccctgattcctcatgatagtctagcctaatcctaatcaagcatcatccttagattcctctttttggactaaactcgaccaaaaccgtattaagacaaac

SEQ ID NO: 18537 - DNA, 383 bp, Glycine max
  unsure at all n locations
agctttgtcgatttagttnttgccggcgaaaggatcgaagtgggtctggaaataggaaaatttgattatcctgctttaatgaatgggaagcctgcggaaaatggagagaatgagaaggagggaagaacccatgttgtgactgttgttcctttatggccaaatttcccaccagctcaataatatcaatactcagccaatatcaatccttctaattacccaccaacctattaaccaagaacgcttaatcatccacaaaggccacccctaaatcagccacaaaacccgcttgccgcacatccaataccaaacaccacccttaacacacaccataacaccaaccatggaaggaattttctagcanaaaagcctgtagaattcacccc

SEQ ID NO: 18538 - DNA, 416 bp, Glycine max
tgtgactcttggaaatttctttaaaactagtcacttaaatagttgtgacttttgaaaaaatcttcagaaacaagtcacttgaagaattgtgacttttggaaatttatttttcgaaatcaatcactagtagtcgattaccattaaggtgtaatcgattacatatcaacagatgtgactcttcattttaaattttgaaaattaaaatgtctaaaagctctggtaatcgattacattgtgtaatcgattacacaagttgaaaatgtttaaacacaagttgtacctcttgaaatatgaaatcttaacgttttaaaacattggtaatcgattactatcttctggtaatcgattaccagagagaaaaactctttggtaatgattttgtaaaaacttcttgtgctactcaatgttttgaaaaa

SEQ ID NO: 18539 - DNA, 371 bp, Glycine max
agctttgtgcatctcatcgtgcattgtgtctaagagggagacaaccataatattgcatccttgaggagtgcctgttgccggacagatatatttgaacatgaaacttatatctgatcattcgccttggaattcttccaattaaccttattataatttatgccttggctgatgctatatatatatatatactatatacttattacacaatatacgtgtatgtgtatacgattcataaagaataaatagtctcatgtttaatgattatatattgtggagtgataaaccattcactagttagagagacaacgggactgctacttttattatgtatctgataatgactaagacacactgttgactataagtttgtt

SEQ ID NO: 18540 - DNA, 440 bp, Glycine max
  unsure at all n locations
cacttagaaactcagcttgggcatgaatgtctgcccaagtctatttccatgtttgacctgctccaataacaagtcaatgaggcatcggtccattgggggtgtccaatatgttctagtacgatcagtgccacttgggttgcgacttccttttgtttcaccttcagaaagatatacgaccacagaggtaactactcagttctccaaagatcttatggcctaaaatatgaattataacatattcaagaaatgacaagtgcaacatggggatcacaattacaatctacccatgctaattatgtaagtcattcaaaaatttacacatctcataattagattcataaatatacagttctaagaagttaaaaaattataatatctagataacaaacatgtcctaggtatttccatgctatanacgcgtgaagtgactaagtgacaat

SEQ ID NO: 18541 - DNA, 382 bp, Glycine max
agcttgatatgaggaagtgttgaagggtgaaacttcctgcttttattgttgaccacagagtggtacctggagatatgtcgcgggggtcaagagaccttggggacgtcaggtggggtgctattgcccaaaaccaagcttgaccaatcccgacccaacccgggcatagtcggtcagtgagaacatgtgacgtacctaagcaggcgagctcctggcagtcaacagataaaaggaaaacaagaccacagagcaaggaggcttgtggtggctggccagctgtgaattatgtgtaatatgtggattgaggcctctggtaatcgattaccatgggtgggtaatcgattacaaggcttaaaattgaagacagggggctaagatggtctct

SEQ ID NO: 18542 - DNA, 418 bp, Glycine max
tatgcgcatatttccctacgaacgttcacttgcacaagacatcctattaactaagaaaaatgcacccatatacaatcaaggtagcttcattacctagattatttacatgtacttccaaggtgtatttgttatttacatcacacacgcctccttggctaaatttacatacatgcatactcaaagcatttcggggtaccaaaaattgcacatgcgctcatcttggtatttctaatacctatacatatacaaacttcatgatgaatcttgactacctacgcaataaggtgctacatttcatgctcttttttttttttttttttttgaggggaatattaaccatgtcccctcccttctcatggattagcatcttgcctaacttgaacttacttaggttagaattatgcgttgattacttatt

SEQ ID NO: 18543 - DNA, 383 bp, Glycine max
agcttgctgcatggcatgatggaacttgcagttatcctttcacctttgttattcacggaaatgtatgtcttcctaggtttttctatctgttcaggaatcatatacaaataccattattactagcattaatcatatattctctttcgttatttttctcttttgtagtacttctcattatgctaggtggaggagagcgaggacttgaattatttattataattttgccactcattattcattcataatattatccttccactgttatcttcaacgcatttatttgaattttgtgggggaactcgagtaagttgaggagtttgacaaaatcaaagtctatagactatagcaaacgttaaattcctagttctgatgtttgacaaaat

SEQ ID NO: 18544 - DNA, 423 bp, Glycine max
tagcccatcatcaatattgatttcaagaaacaaaaaagcaagtagatatatcagtgaactgagccagaccaaggaaaaatacatcaaagaaaataaataatctagtatagctaattttataatcagataaagcatctgagacctgctgccatgtggtatcaacaggaggctgccgccgagcatcgccagcatcaaaatccagtacaccataatccctcaaccgaatctacacagcaataactaaaatcagaagtctttttgaggattaaatgcatggcattatctataagacacatttttcaaattgagacaaacccgaaggaaggcacggattctttgcaaattcccaacaccaccaccaagagcagcctaccattagataaaaaagcaagcagaaattaagtgttgataacaaatacaaat

SEQ ID NO: 18545 - DNA, 379 bp, Glycine max
ttattgtgagcatctctcgtgatcggatgataaatctttcctacaatgagctttccacccagcctaagggagcttcggcagctaccgtacctctaggtggaccacaacctcatcaaaggaacgctgtctttggcgctggtcaactgctctatgcttttgcatctgagcatggagggaacgttcttaccggcgtccgtccattggcgattacggcacttccatagctttaagtgatgtcactctctagaacaatctcactagctccattctgggttccgctttctacaacagtaatatccacgtgtcgacgctagatgtttccaacagtgcactgtctaacgacatatattactcctcaatccgattgctatcatcaaat

SEQ ID NO: 18546 - DNA, 424 bp, Glycine max
ctagagagttctacactactctagagttctccaggtcattcaagaaaattttacacttttctagtctctccaattaaggagggatcccaacaaatctccccctcccgacttaattgggaggtagtagcaaaccggcaccttgacagcaatcttcaaatgtctttgtcggtagtactttggtcatcatgtctgatcagttctcgtttgtgtgaaccttgtcaagatgtactttcttttcctcgaggacatctcggatccaatgataccttatgccaatgtgctttgtatgggaatgaaatgttgagttccttgccaagtaaattgaactttaattatcgcacttcaacacatacctatcttgatctattcccagctcctgcaacatgttcttcatccacaacatctccttgcaagcttcagtgga

SEQ ID NO: 18547 - DNA, 365 bp, Glycine max
  unsure at all n locations
tgcttctctctgatctgcctttagctacggggagagatgcatttggcaatggtccagcctcctangctctattctctctttcgaaaaagcttcagaagcttgctttctcgaagaaaatacaataccatgcgctgacatagccactccgttaccatggcgagactgattacatgccagatctctaccgtggatctgactgattaattgctttttcagctggacactgttagatacatcattccctgctttcactatcttactatgttccagcagtggatcaccacatgttccatgagatgtaagattcgtaaacatatactgatcatactctctttatacgagcccaaacatttgatctacatgac

SEQ ID NO: 18548 - DNA, 405 bp, Glycine max
  unsure at all n locations
tgcctncacagaatgcctagaccgagagacacatgttatctatcgctacaaacccctccgtcgtggacgaatgactgaaatagagctccttactgctaacatgtctattctccacgggacgaaccgagtctaccatatactatgtgcgcctttgtaacacctacacgttgaagaggttatattgatgatgcaattgttcctactacaccaatagtgctacagagctgactgtgtgaagataagctaaaggccgaagcagatctatcaatatctgaaattcaacaaaccaaatccttgtgtgcctcctaagaacacttatttaatgtcttagtttgaacctgataggagaataacgatctccttcttcttgaagctttttaattttcccagtgtcggctgaaaaat

SEQ ID NO: 18549 - DNA, 382 bp, Glycine max
  unsure at all n locations
agcttgaagatgttcatgttaatagtgttgaatcataacagaataatctgagacaaaacgaacaagtgttgcaacgctgtcagtttactgaacaaaggaaacttcaggaaattgagtgaatcttagctttgctaagttagtgagtttcattgtattcgagcttattatgtaaacactctttgagtgattaagaatacattctctatcaaacatatattatttttgaaagctaggagtgccttagtgacaaagaatacttgggtcttaatctcaatggaagattaaatgtagtgtcaagagtggcctagagagtactctntataatcaaaagtggcatagataatacttggttgtaatcaaagaaattcttagtggaaccctt

SEQ ID NO: 18550 - DNA, 416 bp, Glycine max
tctcagtcaattgactcaccttctccttaagttgtccattctcttctcactcttgttgcgcaaaagcttttgagtctctagcttggattttcagcttgttacattctcctattaacacatgatcttgctcttatgccttcttcaaggcaacatccttctcctctattggctttaatgggttgatattacctacggactgcctcaattctagaaaacattttatatcctagggtaacatgggtgagatactctttcacccctaccaagattgatatggtagaatctaagctggtatgattgttttttagaacaatatcccaattctcaaacaaaataagacgatcaatctcctcactcaaagacatcaatatgaggggaccgccaaacatcctggtaggaaccaagctagaattgga

SEQ ID NO: 18551 - DNA, 385 bp, Glycine max
tgcttataagaacaaaatttccttaatcatttccaaatatgcatgtgaattacgacgcatcaacaagaatcaagccaaggctattgtgcaagcaatcaatggggcaaaacacaccaaatgattataatgatggatggctcaaattctcacaaaggtaaaatcatcactttcaaattgagctttcaaaactatcatgacatgtagagaagaatcatggatttcaagtcacaaaatgtcaagaacttttattgtcaaaacaattacccatttcttgaacatatcctataattcaaagaaaaacatgctaagtcgtacgtgcacatgaaattgacccaaaatattaaactgaaaatacgacgacactaacaacattaacaaattaaca

SEQ ID NO: 18552 - DNA, 423 bp, Glycine max
tgtaggattatggggtatccatcacatgtggtactatgtggcggtcgggcgatggtgcacaacaagttttccacatccacaatgcgcgcataaacccaccatcccctgttgcccacctccaactgagctcacgtactcccacgtagcccatatcctcgtttctctcaataccgggtccccatcaatcctcccaagcttccacaacatccaagcaaaacaacatttaaacagcacaagctatcacagccaagcaaaacagggcaaaggcagaaaaactctgctcaacacactaaccaaaatcatagcttttctcacttaaagaccccagtaacaattccttcgatccaattcgttaaccgttggatcgactccaaaattttactggaagtctatagtgcataagcctacatttggaccattggg

SEQ ID NO: 18553 - DNA, 381 bp, Glycine max
  unsure at all n locations
agctttatagatttagtgtttgctagcgagaagatcaaagtgggtctgagaagacgcaaatttgattatgctactttgatgaataggaagcctggggaaaatggagagaataagaaggagggagaaacccatgttgtgaatgtcgttcctacatggccaaatttcccactagctcaataatatcaattctcgaccaatatcagtcattctcattacccaccaccctaccagctaagaacacccaatcatccataaaggccacccctaaatgggccacaaaacccgcttgctgcacatccgaggccaaacaccacccttaatacaaatcaaaacaccaattagggaaggaattnntccagacagaggcttgtagaattcacc

SEQ ID NO: 18554 - DNA, 421 bp, Glycine max
tccacatcaagcaagttcatctcaaagctcttatgctaacaatagaattcaaaagttggagaatttgcttgaaaaccttgttgttgtccttaaagtgcattttgcagaagatccacaaattaatcaagtcttagaagctatagatcaagaggtatcaatatataatccaacttattcaaagatttaactatgatatgatactttacaaagaaaaaacattgttctaatttaggtacttacaaatggttctactagtaaaaatcatcaaactacaaacgatctgaactagaggtgagttgaaatttaataattaatatattgacaatatcatttttgttagcatatggtatagcttgtaatgtatccgtactatctatgtatataataagttgacatttaataattaacatgttgaaaattt

SEQ ID NO: 18555 - DNA, 361 bp, Glycine max
agcttctgttgttcaatttcgagcgtctcaatatattattggcctgaattagacatccgaatcaaaagttatggttgtttatattatccatgtgcttcaatgttcaatttttagcatcttgatatattatgcagcttaatcgggcatctgagtgaaaagttatgtcatacgagttagccgagaacttcgttgttcgatttcgagcatctcgacatattatttgcctgaatcggacatcagagtcaaaagttatggcagtttaaactttccatgtgcttccatgattaattttgagcatctcgatatattatgcacctgaatcggactactgagcgaatagttatgccatatgagatagctg

SEQ ID NO: 18556 - DNA, 416 bp, Glycine max
tcaccttttggtcctcctcatagctgtcgcatgagataacatgctctattttcatctcccactccaagtaggcctacggatcattctttcctttaaatggaggaatgatgagtttaataccatcaattcggttttgtctaggaacaccatcattccctcttctcctcctttcttcttcattatgatcactattctccatttgatccaacctctcatggagcgcatcatctcgttgtttcattaacctctccaaatgttgcatcaaaggttgcatttggaattgcgaaagccccactccatcattaggattagtacctgtcatctcaaacaaacaaattaaacgtaacaagacaattatagctgttgtttgaatacctcacccactcaagtgtatcacacaattatggcttctctct

SEQ ID NO: 18557 - DNA, 372 bp, Glycine max
agcttgatttcgaaaatctgcaaaattatgcagaaaagctgtcaaattgtgcagcaaatctgccaattatgcagaaaaaaaaatggttgtgtagtgttggtttctgctatcacgggaaaggtagtgtatctcgcgttatagacattatttagcagatcccaacggtcaaaacttagatttacgtattagaaaccctcaattaaaatttcaaggcgatccaatggttaacgaatcggaacaaagaggattttactgaggtatgtgggtaggaaaaactctgtggaatttgaatgaatcttgtgtaaagatttctgcctccactttgtttttaaggtagtttcatgacaaatggaattgtattgtttggatatt

SEQ ID NO: 18558 - DNA, 417 bp, Glycine max
tcgttgcaagccagaggttggaggagaaggctggatggtgaagttgatttgtggagtgcataatcatgaattggccaagtcattagttggacatccatatgtggggcaattgactaaagctgaaaatacacttattgctgatatgacgaagtccatggtgaagccaagaaacattctgctaactctgaaggaacacaatgccaatagctgtacgaccattaaacagatatacaatgcaagaagtgaattccgttcttccataagaggaaacgatcttgaaatgcaacatctgatgaagcttcttgaacgtgatcagtatattcattggcacaaaataaaggatgaagacgtggttcgtgatatcttttggtgtcaccctgattcagtgaagttagtcaacacatgtaatttggtgtt

SEQ ID NO: 18559 - DNA, 361 bp, Glycine max
agcttttggaatatttattctgaaaattgctattcatattctggattgattggcaatttctggaataattctgaaaacttgctgtaatccggagaccacttgatcttccataatactcattttggaacagttttataagactctggattaccttttcggcttttccagaaagaaagattgaacaaaaatgttttagaattttaattccgaaatgctccaccttccccacggtaaatcatccatttagccattttcttttataaaaccaatacttgaaagttctttctagtttcataataacttccacgcagaattatttttcctcttattacacctcattctttctagtgtcatagatata

SEQ ID NO: 18560 - DNA, 409 bp, Glycine max
gattattgaaaaacatctctttagttactttcccctcatggtgtcaaatttatcaggttaggaagccacaaaagaatgtaaaactcccaataatagaaagtgttgtaggaactcttgatttgaatatcatatatttgcggcgaggggagacctttcctggggtatgctatatatatcacattgtttttcttcctctttgatggttttaatgctcttctaactaacaatttctggacgaactcgtggattctcctcctttttgtaagatcgaccgaacagcatcaagcagatatggttatattgcacacttgtgtgttgccaaatcactttatcgcaagggtgttgcaagcaaaatgttgtatcttgctgtggagtctgccaaatctactggtaatgtgagagaacattt

SEQ ID NO: 18561 - DNA, 177 bp, Glycine max
agcttgatagtaggacttgtatagaggctagaccttctacctttaatgatgacctttcatggggacctgtcaacatggagatgcagtcaaaagcacatgagaacatgagatgggagactctatcccctaacgaatattcgcaagtagaaagagctctcccacctagaattgccttgg

SEQ ID NO: 18562 - DNA, 277 bp, Glycine max
ctgactattgactaatacttctgtttgcaaggtcacatactagctctttctgcgactaacatacggacttgctcaatctcatgacaagaaagcaccacatccatgacagacagtgcattccctcccaaatgaattcataacaccaattgtcacacccagatcaaaatgtggcactacctaaccatccaggtcgagtataactgttccatctgcgtcacaacgtgcatactaattatccacgggcagaaatatcacctgtctataaacattatccgca

SEQ ID NO: 18563 - DNA, 373 bp, Glycine max
  unsure at all n locations
agcttcaaagaatacgattcagataacgacatattgactgtcttaacatgttacagacaaatacaatgataaaactcaaaatcgaatctctcaggatgtacaaggtgttttgagagatgagttcgaaggttgaacaaaatctacaatcaacattaatgcttaaaaatgctttgtccacacgtaggtttactctaatttacactcatcatatacttatctatgcgaacacttcagtaaaaagtaaccatagtgactgatatgaccaccatcctcatcttcatctactggtaaacagagtgaatgatacattaatgcatattatccactagccaaactaaaatgataaaacatgaagnttaacttaatctaccta

SEQ ID NO: 18564 - DNA, 421 bp, Glycine max
tgtatttcatatattatggtgtgcgcttgttgtaacatgttatgtttgctactgatttttaattctttgaccctttgaatgaccaaattggctttcgatgtcttcatgagacttgtagagaattttatcctttacattcaagcactggtatcatgttatttggaccattacaacataatcaatccttaaagcattgcaggtttgttatattgtgaggacaaactgacatctctatcttcatggtcagtttcttccaagatccaagccttatttgcccatgacttctccataaaagatatatatatctttctcttagctttctacaaccactgagatcatcccaaattcacttttgtagctcaagtagttttcaaattattgcacacatatgaaactgtcaaggcaaaccagcgtctctaac

SEQ ID NO: 18565 - DNA, 386 bp, Glycine max
agctttgaaatggtgctaaccaagcgacccgtgcgtatgcacgggttgcatactagttaacataaaatcacaatatctataaaccaatatggtcagtctagtttgcataaggtcattgaagcaaacactattaccattgttgcgcatgttctaaaaaacaaaaactaagcatataatgagtagctcactctatgattagttaaggctcgaattctcacaaaaggaaacgtatctgatcttctcttacaagaaattgtatctataagataatatttgtgaaaacaatacattaactagtattttaacgtgaatttatatcatttaaagtgaactaaaatatgtaaatacatgataaccaaattattgatacatgttaattaattaat

SEQ ID NO: 18566 - DNA, 407 bp, Glycine max
cctatatatactcaagcttgtacgcacatcgttcacgtgtatgatatccactcctcatggtttgaagtacaggagaactacaaccttatatcgcatcgtggcggacaaaagtgggcagttaacttgaatggtcatcattgtctatgccgatagtattctacgcttcactgtccatgtctacacattattgcagcttgtggttacgtgatcatgaactactaccaatatatagatgttgttcatatcaaacaagcacattttaaaagcttactccgcacattggtggcctcttgggaatgaagcggctatatctccttctgatgacgcatggacacttatccctgacccaatctcaattcttgcgataggtcggccaaaatcttccaggataacatattatatggatt

SEQ ID NO: 18567 - DNA, 387 bp, Glycine max
agcttttatccaaattcctgactcaccataaaccttgacccagtgtgacaatgtcaatccttaccctctgatgcaaagaaaataggagagaaggaaaatttccaatcaaaggataaaaggagaggaaaggaaattcccaatcaaagagtgggataaagcacaaagaaaagaaataaaattcccattcaaagaatgggagaaagaaaaagataaggataagaaggaaggatagctcctgatcaaggatcgaaagaaaacagaagacatgtgcatatgggatctctggaccagacaatatctatacaaatacagaattgtcacctaatgaacaaaagaaacacaatgaaaccatagcctaatagtgagcatatgcctttgattaccaac

SEQ ID NO: 18568 - DNA, 417 bp, Glycine max
  unsure at all n locations
cttgatttanaacaaaatactcataagcattaagaagtattccatggcatgagcaaccaaaacaatgtcatacataaataaaagcacatacaaaattgtcttagaatttgggcttatgacctaactcaatcccacaaaaccagcttgattgatgtggaactaaacaccaagcaattaacacagcccccaaagatgccgcaaataaggtatgttaggggtgaccgcaattaaggtgactttccaacattttctgaaaacagtatctttaatggatttgacactcaatgtactactgccttgatccttaccaccaaattaaataaaccacatagtcatcatttacgttaagaatttaaaatcatatcaaacaggaaatttatttataaaattccacaatgaagctagtcttacacaaaa

SEQ ID NO: 18569 - DNA, 369 bp, Glycine max
tttcttgccagattttaaactactatacgttgtattaagaaatgtttggcacggctccaaaaccctaccaccacctacatcaacgaattttataagacaatatcttatcagcatcaagtaatacatagctgtttattcttcaatcaatcagaaaagctctccaaatacaaatacgcttcaccagaagaacgcgactgaaacaaactatcacaaaaagtggcatccaagcttctatatattgccaccacgttttacacgatagggatgtgccctacatctgccaccactgaaaagtataaggcagatgtcaaacctcaaaagtataaattcggaagaaaaattaacctacgttaagccattaaaaagaaa

SEQ ID NO: 18570 - DNA, 399 bp, Glycine max
cactatataatactcccgcttctctcactttatttaatattatacattacattacatttatttgattatgttgctgtaactgtcattatttttttaccatcattctgtcaaaaccagtttttacttctttgtttctcaattattaattaatgtgtatttgatacaacaacgtagtttctattatgagggatgtgctgcaggtcccacaaagagctagtaatgttccaaacatgcttattctttgtttttaattttcaacgaatttatttttttcaactttctttgcagctcttgattcgtggttctgacttacatatgctcctcactgcggcatgagtaatgaactttgtatcacattatcgggtgacaaatatgtataataactatttgagctttgcc

SEQ ID NO: 18571 - DNA, 296 bp, Glycine max
agcttgtgttataaaactggatcgagaagctagagctcagctccacacacccctctcgtgactaagcttacctgcttgagaagctgccttaagacgatgtctatagaggggagagcttagctacacatacgtgtctaatagcttatctcacctacttgagaagagaagctcgaacttatctacacgtcccctattctatctgagctcacccccatgacaaagggcatgaataggcgaaacgaggccttacttctaggactactcattatgccccagcatacatggctaaatcccta

SEQ ID NO: 18572 - DNA, 406 bp, Glycine max
  unsure at all n locations
cggcaccacaagcatacaaactgttactgcctaagtcggaaagaaatnaataaggagaaatgtgctcgaanacacgaaataaatgtcggggacatactaaatcgcgatgacaattttgcacgaagaatagacaggggctgtcaggcaagcccacaaaacaccaaaaccggcgaaaacgcgattaggtgtgaaaagagcggcgaacactgactatagaagagaaactagagacaaagaagtatacagagaaggaaccgcagcagcgcacggcaacaacactgagtaacgaaaggacagtcctaatgcatgaagcacagaagatccggagatcagggaggaaaccgaaaagaaaagtaaaccgagtaaaaaaacgcagaactggtggaccagcgatatcaaaccgaag

SEQ ID NO: 18573 - DNA, 527 bp, Glycine max
  unsure at all n locations
tgctccgaacactaacacctaccaacnacataatcccgttacgaatagacgatgatgtaacaagaacncncggagaggagcatgtgacgcgtagaacatcacaggcaaacaaaaacgcaccccgggatcctcaaaagtacacctgcacgcacgctatctacgcttcgcgagacatccgtacgcgacggtatccttacctgtgcgacaccacaacaccacagaccacttgagaaaaccatcatacgcgactgctcaggcgcttatggcatgcgcaaccacatcgttagagcataatgaggacagcattagacaagcaacccgctggataaaccctctgcaagatcccacataggcctagacaagacacaaacttgcaaatcaggaaccatgagcccagagaccccacgcaaggacagtaacagggcgcgcatgaccaaccgacaaccaaatccaaccgaaccaaatgaagagtagaacaacaccatcataaatgcgagaactatagacaccggcgagcatagacatac

SEQ ID NO: 18574 - DNA, 385 bp, Glycine max
tgcttgtatgcctctatcttgcttctgttttggaactatacgtgagtaacgttgttctatttgatatggttggaaaccttcgggttctcctctgtgctacttattttgctcacgatgacattaatgagtcatgaacccatcttattggagaggccggagatgttcgcgcacgtgacgccgaaccactagcatggcatcgctatcatttcagtcagagaaagcggcgttcccaaaggcatccacgacaaactttaaagtgagaagtgcgatgtcgtccgaggagagagaaacaaaggggtgaaagaagaatatgaacaacgtatacggaaacttatatatatatatatatgtatatatctatatatatatatatatatataatacg

SEQ ID NO: 18575 - DNA, 416 bp, Glycine max
tatcagtggtgtactgttaatacatgtctgaacgctccttatatgatgctaggtagagtgtggatacaaaaaattaaaattcagaggaatatgtaagacatggaaatgcaattatattagctaatcgatactatatattatttgaataaaataatatcaatttggtcttaacattattttgatgatgtgtgaaatataatcaacattattccatggactgggcggatgaaataagtggtgaactcttcaattcgcctctaagtgaagtcggttatattttcaacctacttcttgctgtatcctccttaatgctgagtgaagatacacagaccgatggactcactttgccatgctatttgagagagagagagaggaggaccatgtgtaggacaaatgtgataaaaatggactacaag

SEQ ID NO: 18576 - DNA, 89 bp, Glycine max
agcttctaaactttatacaagaatgaagttctgataccacttgttggacaagtggcctcagatatcttaagaagggggggggggggggg

SEQ ID NO: 18577 - DNA, 426 bp, Glycine max
gtgcatatgatctatttgctccagctcgtatgaggtagtgcagaatgatcgaatcatttgtctttgtattcttatcacatagatcggaaacttaaactctgatatgccatattcatcaaggcactattcgagaagtacactgatcatctctcctctcatctcatttttgtatcccatatatatgtaacatcttgaatcttataaatctgtgaaagacaatgacgttatgattcctcctcaccttcatttcaagaatttcattaataaatatgatcctaaccggactcgttgactctaccctggaaaccggctgcataagatttaacaatccacttcgatcttgtccatactgctcaaaagtgagtttctcctcagatacccatgagaagactacactcgaatctaatcttactgtcacattaaaag

SEQ ID NO: 18578 - DNA, 376 bp, Glycine max
tatgcttgaaatgaggaagtgtacaagggtgaaacttactgcttttattcgttgaccacagagtgatacctggagatatgtcgcgggggtcaggagaccttatggatgtcaggtggggtgctattgcccaaaaccaagcttgaccaatcccgacccaacccgggcatagtcagtcagtgagaacctgtgatgtacctaagcatgcgagctcctggcagtcaacagataaaaggaacatagaccacaaagcaaggaggcttgtgtggtggctggccagctgtgaactttgattgatatatgggatatggcctctggtaatcgattaccaacggtgggtcatcgattaccaggcttaataatgaatacaggagactaa

SEQ ID NO: 18579 - DNA, 418 bp, Glycine max
acagcttctggaggaagtagacaaaaatgacagttgtcatgaagtgacaactaacagggtcatcctaaagtggtcattctcaagaacctttctgatgagcattttgaggtaacattagaatggtaattctgatgttagctgagaaaggatccatacttgaagtatatcctttagatgaagtcaactgttatgtctttctgaagtaggatagcttcatcaatcttaacacatcttcacaggttaaagcattcttaagtagattgcttcataaggttaaagtgaagcaacagctgttggtgtgttagtgttctacctaaggttagactatttaacgtatccaatcttccattttggtgatccatatcagatcttctcatggacgacttcaactttcaacttgattgcattttctaatgca

SEQ ID NO: 18580 - DNA, 387 bp, Glycine max
agctttacattactcctcatgcttctcaccatgtctaataaggttcgatttcttcgttctgccacactattatgatctggagaactatgcatagtgtattggacaacaatcccatgttcttgaagaaatttcgcaaatgaacctggtgcttgtccatcctctgtgtatctaccataatactccccacctctatctgatctcacgatcttaatttgttttccacattgtatctcaacttcagccttaaaaactttaaaggcatctaaagcttcattcttagaatgaagtaagtatagatacatatatcgtgaataatcatctatagaggttatgaagtatttcggacaatatgcattcatgtctggacaacatatgtcttgtatgtat

SEQ ID NO: 18581 - DNA, 385 bp, Glycine max
cttgcattctgcgcggtgttatgctgtggtaaaaggttttctatggccagaaatgagccttcaatgctgggaggtgcactgccactgcgattgggtgccgcattctttccaccaccttggaacctatggcccttcagaagtatacccatatcctccgtcgccatgttacgagacgatgaaccaaaagctgcagcttccttgtgagaaggccatttacccccagcttccgagattctaatcagactctcagttgccatactactgaaagattagctgcccccttctttagtaatgaagattacaaatatcacattggcgcctaaagaccacccaaaatcgtcaagtcagtatgtattacaagacatttacctcaacaaccttcatt

SEQ ID NO: 18582 - DNA, 382 bp, Glycine max
agctttatacaaagcatctggaggccttgattgaattacacaatatgactgggacctttgcaaggaatattcagcacttattttctgtttctgatgtccggtttttaatggatgtgcttaaatctgtgtacttgccttatgaatcgtttaaacagaggtaaaagcgtattttaatttaaagcataattgaaaaaaaatgattaattaagtttggctgattatgccttttggcatttggcttcagtattatagaagaattgggtgggtctatgggagagagcttcatatctcacaatatattgtctcaaatgtataagtatgaaataataggaacagatagataaattttaataatccactggccttatgatatgtcatgctt

SEQ ID NO: 18583 - DNA, 372 bp, Glycine max
tattctatctaaaggaaaccctcattttgtgtgtgatgctcgagtgcttgttaagccttacaaggagaatggcatagtcccatacaagtacaggcaccccctctttctactcttatgttatcttttttttgtatttgttattcccttgagtttgttttgaatgtgctcactattgtttcttgtgatttgcaggaggctgcagcatcatcaggtagattgaggagatttttcaccatgtggtactcctactggattagatgccatagaccaccaatttgatctttaacttggtagttgaaccttccattttgttgtcttttcagattgtgttggtgaaacctactctacttaacacgtgtactgttttaattg

SEQ ID NO: 18584 - DNA, 377 bp, Glycine max
agcttattttttgcgtctggttggtacttccaatgttcaatggagcggcttacatatatgagaattatgtgaggcaatacataaagaatattggaacttccaattattctgatgagtacaagaaggtccttcacatgatgaccttcgatgcaaggaaagcagttgaacgctataacgatagatatggccctgatgcctttgatagagtagtcagagcggcatgatacaaaactatgaattgcttcatcctaaagctcatctatatatctgtgtttttaacgtttttttttgttaactttcatatgatcaggctgaaaaagaagcaaagaagcgatgagtgagtgactatcgatttgaccaagttggaatgaaacgaa

SEQ ID NO: 18585 - DNA, 421 bp, Glycine max
ggtcgtcaggcttcaatttcaattttcaggtctatgcatataagagaatgtttgtgtctccaaagattagtatctaactctcaaccagaatactctcagcactcaatttttttatgtaacattataaaattacttttataaaattcttaagcttgtttatcatgagaattaacaaatttactatatatgagaaagtttgtgattagattctccctacatatattatatatttcttttgaaattggtcaagtgtagtagtcttttattttaaagggtctaattaactagcttgtggctatgtgaattcctattctcagatcaagtatgtggggaatgagcaagacaagggaagcttacagatggaaggattgaatctaatggacaaaactttgtctgttcaaggagctcgtatctcgtttag

SEQ ID NO: 18586 - DNA, 381 bp, Glycine max
agcttatttatatatttacacatatcaaatatatataacacaccactatacaaatacatgtaatactaaatatatatatatatatatatatatatatatatatatatatatatatatatatatatataattataataacaataatgataaatatattattagataaatattatatatataagtacaaaaaaataattaaacgcattatatatatatgtgagtaattaaatttattataaatattaatatatatatatatatatatatatatatatatataagtaattgaacgtactaaaagcattgagataaatatatatatatagtatttaaacacattatatatatatatatataaaaaataagaacgtgtgaaatata

SEQ ID NO: 18587 - DNA, 384 bp, Glycine max
tggttcgaggtacttacccgttgaagatcgaagaacgatgaagaacgaatgaagaacgtcgaagaacggttgaaacctttgcgagattcctcacggaaaacgttacggaaacgtttcggaagcgcctcggcttagattttcttcacggaaacaatttttccaagcaaattcgaaagagagagaagcgcctaaggggctggaccccttccttcttcatttcctcccctatttatagcaaaataggggaggtggttgccgcccagctcgcccaggcgagcagggttgcttcctccagaagcaaccgccttctggaggaatcttctggagggcccaagtgggcctgggtgctatttgcacccccatttttactatatacacccccct

SEQ ID NO: 18588 - DNA, 387 bp, Glycine max
agcttattagaacaaaattgcctcaatcatttccaaatatgcatgtgaattacgaagcatcaacaagaatcaagccaaggctattgtgcaagcaatcaatggggcaaaacacaccaaatgattatgatgatggatggctcaaattctcacaaaggtaaactcatcactttcaaattgagctttcaaaactatcatgacatgtagaggagaatcaaggatttcaagtcacaaaatgtcaagaacttttattttcaaaacaattacccatttcttgaacatatcctataattcaaagaaaaacatgcaaagtcgtacatgcacacaaaattgacccacaatattaaactaaaaatccgacgaaactaacaacatttacttattaacaca

SEQ ID NO: 18589 - DNA, 410 bp, Glycine max
aataagactcttctcttgatgaagggaaaattatatgtccatgtgctacataagaaaggacgatagtttttcgagttgaaattgtgaaacttcacctttacaaagatggattcatgcctaattacatggtttggattgatcatggtgaaaagatgccacatgttgataatcatcacatgggtgttttaagtagtggtgtagatgtggcctaaggtgaaccatttatgttaatgcaggagatgatgtttgatgctcttaggcagcccaaaatatttgaagcaccaaaatcagataacatggaagagcctataaatgaagaagctcaaggattttataatatgttggtagaggcaaataacgtcattgtttgaagggcatcagtctctaagttatcaatgttcacttatagc

SEQ ID NO: 18590 - DNA, 689 bp, Glycine max
  unsure at all n locations
caccatcctccgacgtactcaccaaatantacatantangtntaatagcggtnnntgtagtagtantgancntatcgtctcactgntgtancanannannaaaaaancgnnantcacnnnanccaagaatgatgatantcnnacatttagggtaccgtccngatcagagcacaancctganngcncncanacngcnanaacatcccgctaaccgcagnngcggatnanctncatagnaactgacgtacacctgtcnancgcnactagcatagtacttagtantagaggacacgtgggtgtagcactatcacacgcgagcatattgggatgccaagacttggcgctccacacaccagatcactgaacacttcgcacgtccagaaccaatgacacgaggagggaacacacaccaactctgaagcaggaagcaatgaaatgcacgcgcgaccacagcgagtgagccacctgcgagacatgacccgctgctgaatcccagacaaaaacggggaaaaagcgctccacaaccagcacgaagagccacaggagaagacactgtcatgacaagagtgccagaagacgcacaaagtactcacatccgacgagacaaaacacccgagggagtaaatcccatgagtaactcgtaaaccatcagcactgaagacacaagccaccagccccaaacccgtggc

SEQ ID NO: 18591 - DNA, 329 bp, Glycine max
tgatcaatcccgacccaacccgggcatagtcattctatgaaaacctgtgatgcacctaaacaggcgagcatctgtcagacaacaaaacaaaggaataaagaccacaaagcaaggaagcttgtgtggtggcaggccagcagtaaatctcgtgtgataaatgggtcatggcctctggtaatcgattaccaagggtgggtaatccaatacaacgcctaaaaatgaacacaggacgctaagatggcctctggtaatcgactaccaagctagaaaaccagatcaggaagctaggggagcacctggcaatcataaccaccggaagaatcgatacc

SEQ ID NO: 18592 - DNA, 384 bp, Glycine max
agcttttgcttcctccagaaggttcctgatgggcccagggctaagtacacccccctaaattgatcagttcacccccattttgtgtttttttggctgatctccttcccaaatgttgtgaaactttacggattacgcggcgatgagtgttaagcatctcaatttggtcaaccaaagttcatatgttgacaagcaatgtccccagacgaaattagggtatgacaagggattctcaaacctccccttcatgggaacgaggcgttgtatcaattatagtcccgtccttgccataagacaacttggctagcccgtgagaggagcaccgtcagaagacagtatcacacctttcatcgcgcatggtttcatcgaccccaatgcaatgatatt

SEQ ID NO: 18593 - DNA, 418 bp, Glycine max
  unsure at all n locations
ntataagtgcgggtctgggagacgaaggtcaagtgttcgcgatatgtgaagatgatgttccaagtacctcggatttggttcgaccatgccctcctgatttccagctgggaaattggcgagtggaggaacgccccggcatttacgcaacaagcataatgtaaacctttacggttttaaaagctctatagttgggcctaggctttagagttttcattttgctaaggctttgtgtcttttgtttttgaatttataacacaaggatctttcttcatctgttcctggtctctacccattctcattcatttgcatgtttacttctttttctaaaacggcagattcgatgacgagtcccccgaaggtactaatacctgtgacccgtctatcaacttcgagcaagaaatgaatcaaatggaagatg

SEQ ID NO: 18594 - DNA, 384 bp, Glycine max
  unsure at all n locations
tgctatataatgaactttctcttcattgctactaacattaataatagtaacaaacttctcttccaacatagcaagatcatgatccaaaacaccaaggtggacttgctcatttcantcagagaagttaagctcattaaaatgggtacacatgatacataagaattcaactaattcaaaacatgtattacataataaaattcacataagtgttttgagacataaaatacatgtcatacatatgattcattcaaataacggtcaatgtatattgatgttctcctttggatgatacaccaacacacaacatacaaacataatgatgctaataaaatcttaacattatttggtaattaaatatgcaccaattagtagtatctatttcct

SEQ ID NO: 18595 - DNA, 413 bp, Glycine max
tgtcgctcccctatttggggcattttgtgcctctatctagatgcttacaattgctacctttgcattagtaaaaccaatcgcatgctattatgtaaaatgtaaaatataataaaagtaaagaattaaatatgtactaatggttagtcaatttctcatctcattagtgtcgacttgtggcatttaacgattattttcttctcttattgacggacatacactcactacatgaattctaattctacttgcttaggaaggtaactttgactataataatggtttaagtaaataatatataacggaaaaactataaatgttgtctttattaaagggtgacagataccaacgtagttaattatcaaaatgaaatataaataagacaataatgttagatcactaaggttaaacctttgttc

SEQ ID NO: 18596 - DNA, 372 bp, Glycine max
agcttcatgcatgttgcatgtgatttacttgaatcttacctggtccatatctgggctgaagcattattctttggaatacttttcagaatgcggctgagatccccttttggaattccgtttattaaataggaactcatgaatttggtggaaattcttagataatgatgtatggactatagatttctaatagatatgaatacaatgaatgaagactatttctgccattgatacattgatccccccctctcccttgtcgcgtgatgactgcattactatctttgcctggctcagagcatggtacaaatatgtctgacataaataatggcctactccacgtttgtataagttatatataattcactacagcatgca

SEQ ID NO: 18597 - DNA, 408 bp, Glycine max
tgcagaagtttggtatgttacaatcttattgacaagtgttatttcggatagaagtattatgtgaaattattgacaaaagtgatggatgcacattctatgacaaaagcaacctgcctttcatttttatattatattatttcaaaagccacctcattgtttaaaaagctttcatattttgcatgaaaaaagagaggtataaactaagatagacagtgatgatcttttatcatgttggttcagataagagactattagacagttgcaaaaggaagctgccaggcttgaatgggagttacgaagccctgacctttctgtgaattcatgtctaaggtcattgctagctgaaaaggagtcgaaaattaggcaggtacaaacttcattcttttgtcttaacgtttatgtgttaca

SEQ ID NO: 18598 - DNA, 382 bp, Glycine max
agctttaatattccttcgatacttgttttaaccttaaaaaaataacacattctataatacgataaacaagtgcttaatatataacgtggcttacttctaaatgtaacgttaatttagttggtagtggtacaaatatattaatagtaacgccatttcatcattagctcatgcagaaatgcagatcatacacaatgaccataacaatttcaatgcagcatgcaacgtttctaatcagacaacaccatcaaaaattccatgtcatctatatgacttatttatcgggcttcaaaaaaaaaaaagaaaaattacatatatgttacttactggaaagcaaaacacaaaataaataaatgatgaagttgctaaaaaatgattgcatatt

SEQ ID NO: 18599 - DNA, 421 bp, Glycine max
tatgctgcaaacatctacaacagacctcctcaacctcagcagcaaaatcagccacaacgaaacaattatgacctctccagcaacaggtacaatctcgggtggaggaatcatcctaaccttagatggtcgaatccttcacaacagcagcaacaacaacaacagccttattttcagaatgctgctggtccaagcaaaccatacgttcctccaccaatccaacagcaacaacagcaacagccccagaaacaacaaacagttgaggctcctccgcaaccttcccttgaagaacttgtgagacaaatgactatgcaaaacatgcagtttcaacaagagactagagcctccattcagagcttaactactcagatgggacaattggctacacagttaaatcaacaacagtcccagaattatgacagat

SEQ ID NO: 18600 - DNA, 382 bp, Glycine max
  unsure at all n locations
agcttttctttcacaatcaatctgtctactgactaacaattctaattgcaagttctcattcttgttctttctttgtctaacatacacacttgctcaaactcatgaaaagaaacacagattccatcacaatcatgcattctattcaaaaccaagtcatacaccaattttcacaaaaagataaaagtgttttactgctatgtcatcaaaatcaagtcaaactgttccatatgcttcagaataagcaaaccaactactaaaaaataaaactagcagtgtatataaacataaaagaaatactgtattgaaaccataagcataataataatgatccacanagcaaaataaaaaaaacaaatatcatcaggaattcaaaattcctgtg

SEQ ID NO: 18601 - DNA, 414 bp, Glycine max
tcttattcacataacaccaatagtattccatttataagcagagattgacgattcaaattacatatttataagagaccaaccaaacacaaagcaaccacagcttaaaacacccgtaacaaatcctagaacatttgaatttgcaaaggcgggccatgaccactttattctaaaacttcaaacacaacacatacttattatttattgatacatgtattacagctatctctgcttgaaggttatgcatgttgatctcacttgcagctgcatgggtcgcaagtgcagtttgatccacagttgcagccaccgttctcagctgcaacacccatttcagcaccctcgaattgggccttcaccggcccaacacccaaaactagagtctcatttgtgatcttctcaacgtagtcaaaagagtac

SEQ ID NO: 18602 - DNA, 375 bp, Glycine max
agcttgctttttgcaattctaagacactagagagcttccaagtatatgacatgtcccacttgtactttttctatctaatttgcatcctgcaaaatcagaatatgaaaaacctgttatgtttaaggaggtacctttaggataccacataagcaaacacttagcatgatatccaatctacttgcagttaggtagagaagtgattcaatcatacctctgtatcttgattcatccactaatttacctttctcatcaaagtcaaggtaggttgatgtagacataggagtagatgcttctttgcattttttcataccaaatttctttatcggttttatgcaatatttggtttgactgaggaaggttccatgtttcaattgc

SEQ ID NO: 18603 - DNA, 416 bp, Glycine max
tgcttgtggggcttctatggagactggatctttgagcttcaatggggtcctttaatggtgattttccaccatggagatgtagcggaagacaaaggaaaagaggtgagaggaggcgccatccattaaggaataagtcatggaagaaggagcttggagaggatgcttcaatggaggaaaagaaagagggagagaaagagagaggggggagcacggaattgaaggaagaaaaagggagagaagttgaactttgagttgtgtctcacaagactctcattcatcaaagttacaacaagtgttacacatgtttctatttatagactaggtagcttccttgagaagctttcttgagaaaacttccttgagaagcttctttgagaaaacttccttgagaagctagagcttagctacacacaccc

SEQ ID NO: 18604 - DNA, 381 bp, Glycine max
  unsure at all n locations
agcttgataacacgcagagactaacgtcgtcttttgtgaccttcgtcaattgcggccgacaagcctgttgacacgtggagatttacgtcatcttccgcgcttacaagatctgtcatattgagttttgagtcacgctgacgggcggaaatactcgagtagttatccttataaactttttgttgtttgtaagacgaaaagcctgatagcacgcagagactaacgtcgtcttctgcgaccttcgtcaatcgcggccgacaagcccatttaaaagcggtgatttacgtcatcttccgtgctcacaagatctgtcatactgacttttgagtcacgctgacgggcgcanatacccgagtggttatcctaataaaatntttgctgtct

SEQ ID NO: 18605 - DNA, 406 bp, Glycine max
  unsure at all n locations
nttcgtcttacagaatgcaacaagtttatacggataaccactcgggtatttccgcccgtcagcgtgactcaaaagtcagtatgacagatcttgtgagcgcggaagataacgtaaatctccacgtgtcaacgggcttgtcagccgcgattgacgaagggcgcagaagacgacgttagtctctgcgtgctatcaggcttttcgtcttacagataacaaaaagtttatacggataaccactcaggtatttccgcccgtcagcgtgactcaaaagttagtatgacagatcttgtgagcgcggaagatgacgtaaatctccgcatgtcaacgggcttgtcggccgcgattgacgaagggcgcagaagacgacgttagtctctgcgtgctattatgcttttcgacttacaga

SEQ ID NO: 18606 - DNA, 386 bp, Glycine max
agcttgttcttgattttttctaagttctttaacaagcttggaacaatatatttgtccttcatttaactgtctttgggcttggcggccacgatcaacaaagtactttgggcacctatgttaaacaaatggcctcagttatcttaagaagggggggttgaattaagatattccaaactatttcccctaattaaaaatctatttcactttttactcaagttatgaattcccttaatgacaatcttcttaaatattaattcaaatgaaacaatttgaatatgaatataaagaaataataaataaaggagattaagggaagagaaaatgcaaactcagttttatactggttcggccacacccttgtgcctacgtccagtccccaagcaacc

SEQ ID NO: 18607 - DNA, 410 bp, Glycine max
tctagccaaatggacttaccttgaattaattcctttgatagcccttttgagccttgtttccctttccttgttttgaagctcactacaagccttaagtgaaaaaccatgatattaccatatccttaaggaattttggagctttggaattgttttgggaataagtgtggggggtttttgtttcattggacaacttgttttgttggctatgcttcatgatgtattttgggccatacttgatgtacattgtatattggtttaatgttggacatgctgaatgaaatgttgtttctcaaaggctaaaaaaaaaaaaaaatcgaaaaaaaaaaaattcggaaagaaagaaaaaaaaaaaataaagctatatagttgagtgaataagatcttaaatggcacaagaatgatgaaactct

SEQ ID NO: 18608 - DNA, 387 bp, Glycine max
agctttagcatggcttctgtgatagaagccatttgatcttttaaggccgataggtcggccttcatctgttcttgcactccctcttcgttatccatcttacttctggatcgggtgttataggggtgcctttgcgcttttttagttatggtgagttccctaaagaaacaaatagtagtgagtatgccaccaaaacatgaatatgctaatgaatgatcagagcacttggatccacctcaaggcctttttagacaacgtgatgagtttcagaacttctctttttataaaaaggaacaaaagcttctatctagccaagatcatacaaaagtgttacaacagaacctaacggtttctaattatgtgggccattaaatctatcatgtgttgaca

SEQ ID NO: 18609 - DNA, 422 bp, Glycine max
  unsure at all n locations
ntctagctnttcattggtgtattttgatctccttttgatgctctaaaatgtgggaatgtgctcaaatatgtggggcaattttggtttgttttcttgcttgattgggttgaattgggggtttgtatgggatggccctaggcctataatgcattttgaagcaatggggcatgccacattgtccccgttctcttgctattgatgcctaaacgcgcgcccaccaagtgttcggtgaaatgcctcaatggcattagcgtgtgacttttgtaaggaaacaacccatggggcattttggtttgtacatattttctattttttgggacatgtattcattcccgaaaaaggctagaataattgcctcacatatatactaggcctaggaaccaaagttcttatgcaaaagaacacaagaggaggtgcatgtt

SEQ ID NO: 18610 - DNA, 392 bp, Glycine max
  unsure at all n locations
agctttgagccaaaatcctgactcactataaaccttgacccagggtgagaatgtcaatccttaccctcgggagcaaaaaagaaaagaaggaaaatttccaatcaaagaggaagcaaaaaaaaagggagagaaggaaaatttccaatcaaaggaacgaaaattccctatcaaagagtgggagaaagcaaaaagaaaagaaagaaaattcccaatcaaagaatgggagaaagaaaaaaaagagaagtaaaaaagaagaaggctcaagggtcaaagaaaccagaagaaatgtgcagagaggtctttagaccggacaatatctgaacaatacagaattgtcaccaaatgaacaaaaaaaaggaaaggaaaccatgacctanaatggtcttctccct

SEQ ID NO: 18611 - DNA, 424 bp, Glycine max
ttcgacctcttgaaaaagacgctaataattgcaccagttatagtggctcccaattaggggcaagaatttgaattaatgtgtgatgctagtgactatgcggtagagtagtattaggacaaaagagaaatggaagatttcatgctatctactatgccaacaaagtgctaaatggagcccaaaccaactacacaacaacggagaagaagatgctagcagtgtttatgcccttgaaaatttttgatcatatcttgtaggatcaaagatcattgtgcaaactaaccatttagctataaaatatctactcgctaaagcggattcgaagccaagattaattagatgggtcctgctactacaagagtttagtttagagatttaagataaaaatgggtgtgacaacctagtagttgatcttttatcgagacta

SEQ ID NO: 18612 - DNA, 365 bp, Glycine max
agcttttatccaaaatcctgactcaccataaaccttgatcccaggtgagaatgtcaatccttaccctcggaagcgcaaaatgagagaaggaaaatttccaatcaaagtaaaaaagagaggaaaggaaattcccaatcaaagagtgggagaaagcaaaaagaaaagaaagaaaattcccaatccaagagtgggagaaagaacaaagagaatgagaagaaggaaagaaagctcctgatcaaggatcgaaagacaaaaaagaagaaatgtgctgaaaggtctttggaccggacaatatctgaacaatacagaattgtcaccaaatgaacaaaatgaaggacaggacaccacgacctataatggtcttc

SEQ ID NO: 18613 - DNA, 413 bp, Glycine max
agctggtttggaagcttgagatgagtttgttggaccaagtggcctcggaataattaagaaggggggttgaattaattatgaacgtgtcttagctaattaaagaattatccttcttaatattactagattcaatgaagctttacaactaagttatgagaaagtaaagaacagaaacaataacttagacaaaagtaaagcagaaataaaaagtgcacagcggaaaataaagagtgtagggaagaagaagacaaacacaagatttatactggttcggccacaacccgtgcctacatccagtccccaagcaaccaccgattcttgagatttccaataaccttgttaaatcctttacaagcaaagatccacaacggatgtatcctcccttgttctctttgaacaaccaagtggatgta

SEQ ID NO: 18614 - DNA, 383 bp, Glycine max
tgcttatccttatggcctgcctccggacttcaccccccgtgccaccccgaaagagttaagccaagcccctacttttgaggggcaacacccaccttatgaagactatcccaggcaagacgatggggaaggagatacccatcttggccccctgctccacctcaaagatccgtccccgcatgaactaccctaaccgaacatagtccgtcataccccggcctcacccacacctgtaaaagaatctgttccctttgcggaagataagggaaagattgaggcgcttgaagagaggttgagagcagtcgagggcctcggcaattacccattctcagatttggcggatttatgtctcgtgcccaacatcgtcatccctcccaagttcaaag

SEQ ID NO: 18615 - DNA, 423 bp, Glycine max
tcttgctgatgtcatagtcttgaagtatgtctatgataccaaaaaacaaaaccacctcatagaactctccaattggttctcctacaagttgtaattcacaaccacttctcctcaccgtcctttcagcccttgctggcatgttcacccccaatttgatactcgcccaactgctaacacaaattagatagatgtaatatccaacaagacatgacttaagtaataatggtcagccggagctcgggaggaggttttaagataaattcgtagaagcaaggtacaaaatatacaaccatattaagaaattaaatatgccttacatcatgttgaaatattaatttttccaaattcaattgaacttaattatgccaatgtcaagatgaaaacaaaatgtgcattatattggcaacctatataaagagaaag

SEQ ID NO: 18616 - DNA, 384 bp, Glycine max
agcttttgtcactccacccaaatttggccttgacattaaccagacttaagacagccgacaacagcgtcaaggaattcttgcaccccgaatacaaaggcttctttgagtcactctgcaatccttcatacacagaggcatgtgcttgctgaaaagactcttgtccaaggtcacaaatcatgtcctccaagcgatctcccatttctacatcaaacggttcagattggggcttgccctgcatgtctgtcatttcaccatgccatatccatgtcgtataattcctcttaattccatcacacaatagatgttcccgtatgtcatccagtatttgtcttctatcgttcaaacaattgatgcaagggcaataatattttccatcttcatccg

SEQ ID NO: 18617 - DNA, 415 bp, Glycine max
tccatcaagtggtatcaaagcacaagagcttcaagtatgtgctctttaaacctccattaattttttgctttaccttctcttccattgctttttcttcatttttctccatgtatctcctcacatgtcttgttctaaatgttgttaacatgattctttacagtttccaccgattaaacttgctatagaagctagatttgatcttctatggctcaaatttcttgctcttgttcttgaaccatgaattgtgttgagtttaagttcctttgacttctgtcttgttattttttgtggctgaaacctaaaccataaaatccttacaaaactattaatgtagaagaccacctcataaatctagagtgacttgatcacctattgtagttttctcatagaagtcatgtctagtcatgaaacttgt

SEQ ID NO: 18618 - DNA, 383 bp, Glycine max
agcttgccacccagctcgcccaggcgagctaggttgcttcctccagaagcaaccgccttttggaggaacatcctggaaggcccaagtgggcctggttgctatttgcactccccatttttactaaatacacccccttgcctttttttgctgattctttttccataacgttacggaaacttatgaattacgtaacgatacttgttttccttccataatgttacgaaaccttatggattacgtaatcatcccttttttgccttccggaatgttacggaactttacggattgtgcattaacacttccttttaattttcgacatgtcatagaacttcacggattgtgctacaatgctttcttttgacttccagcatgtctcagaactt

SEQ ID NO: 18619 - DNA, 414 bp, Glycine max
tcataacacagtgtcgcaacctacccttcggcgggagggcgacgcgtgactcgcgggatgggtgttccacgaaaggaatacgcgcggagtcgccaccaacgtttatttgaggaaaacgtcggaaaaaccggaaaagacgagatctacgaactttttagtgaaaggttcgggagttgtatttacgcacggggaaggtattagcaccccacacgcccgtcccaagggacggcagcctttaatcgaatgtgcaaacatgactttgatttttatgttcccttttatgttcttatatcctttataccctttttagattttttcctttttttgtggtcgacaagggtgtttccctttgctcctacatattcctcaatttgggatgagaaaatcagacctacgtagttctttcggaacaaa

SEQ ID NO: 18620 - DNA, 384 bp, Glycine max
ctgcttctttcaatcgggtccatttaagtggctttcagtcatccatagagttctctctatcacttcttgggtctattctgaacccattgacaccatccatcttattgtgctggtctttaaagtggtgtatgatcccaaacgttcccgaaatcataatgtggatgataggaatatgctagggcatcatctactaacctctaatcattgtccacatactgctgcctactggaaaaatctcattgaaccattgttgggatgccacagatgccttcgccattctctctaaccaacaggagctccactatttgccctactgctaatggcatactattcatcacccctcaacatcgacaaccgagtatcatcttctagtatcttgtcact

SEQ ID NO: 18621 - DNA, 334 bp, Glycine max
gacctataatctcagctttgacgtggacaaagaaaaagttcttcagattattttgagcggtggaggcagtttatatccgatttgaccatgaaatacgcacttgtagccgacgagtacggggtggacgatactgtctgtgaaaaataccgtatcaacaaggataaatgggcccattcttgtcagacccacatggatccctaatgggaggtatgttctttgcaatttgaatttatctacactaaacattcagacattataatagatgggaccattcttttgctcattatatgttagattgtggtgcgatgtacggtacaaaacacacgccatcctg

SEQ ID NO: 18622 - DNA, 372 bp, Glycine max
agcttgtgtgaagagatagacaaaaaaagacttagaaaattttttgcaattgtctatccgctaagcgcatagacccctgattggttggctgaatagttcagctaagcacatatcattgcgctaagccccacatcttcacagtaattgaattttaactagtgggcttagtgtggatgatgtgctaagcaccacttcttcctgggaaaaaatttatggtagcagcgctaagccccacatctattttgtaacttgagtttttaagctgggcttagcaggccaggaggcgctaagcgccaatctcttacaaattttgaattcttggaagtgcactaagcgcgcctattgcgctaagcctgaactactctttgtaag

SEQ ID NO: 18623 - DNA, 418 bp, Glycine max
  unsure at all n locations
tcaatggagganaagaatgagagagagggggggcactaaattgaaggagaaaaagagggagagaagttgaactttgaagtgtgtctcacaagtttcacattcatcaaagttaggacaagtgttacacatgtttctatttatagcctatatcactaactaaatgaaagcttccttgaaaagcttccttgagaaactttcttgagaagctagagcttagctacacacacccctctaatagccaagctcacctccttgagaagtttccttgagaagctatagcttagctacacacacccctctaatagctaagctcacctccttaagatgagaagctaaagcttagctacacacacccctctaatagctaagctcaccccatgccaaaatacatgaaaatacaaaaaaaaaatctctacta

SEQ ID NO: 18624 - DNA, 374 bp, Glycine max
agcttgccctgaccgaaggtggtcatgaagtccacgtagcctctggtctcgactctcacctgcaaagccgaggagtggacttgtgtgggggtggacagtatttggtgagacctcaagtttctggaaagttttctagtacaagatatcaacggaactgccttggtcgatgaggaccctgaacaccataaagtttgctataatgatgaagacaaccacagggtcatcttggttgacgaggttaatgcccttgaagtccttgtctgtaaaggtgatagaagggagactttgttgtaagggtgcgttgacaaaattaatgttaatgtctcaaatggcacgtaagtgccatattcgagattggttggactatcctccat

SEQ ID NO: 18625 - DNA, 409 bp, Glycine max
tgtacaccacagatgatgcaatcttctgtagagtattcccgtcgtcgctgaagggacatgctctccattcgttcactcgcttaccccccaacttgtggactcgtttataccttggcagcctgcttcggcatgtagtttgccaccagccgaccccaccacttaacatctatagccctcgtcaacatccaactagagacaaaagaaccattaggaaccttcatagaatgtttcaaaaggatttcattgaatatctgaaacttggatcccacagtagccatgcaccacttgataatagcgttaaagctgggagcttttgtgaacaacatatgcaaaaaacctacatctaatcaggatgagcttcgaaggagagcggccaagtacatgcaaatggagaaattggtcaagtata

SEQ ID NO: 18626 - DNA, 380 bp, Glycine max
agcttgaacgaatataagaaacatcttcttcaaccttggtgattcttgactccatctcattgaagcgcatgtccacttgtaatttcaaagtgtcaaacctttcaccaacaaaggtttgaagaccatcaaacctgtccaaaatctttgaaagaagagatgaatcttctccatcatgtccttcttcaccaacatgtcgagcaccctttttcacccaagagccatcatgctctttttgataaccaaaggatgcaatgactgaagcgcctattaggaaggatctcttgattggaacataaggttcagaatcaagagggatgttaaagtgttgaaggaagagagtgactagatgtggatatgacaatggagcattcaatcgcaat

SEQ ID NO: 18627 - DNA, 420 bp, Glycine max
tatgctgcaaatatttacaatagacctcctcaacctcagcagcaaaatcaaccacagccgaacaattatgacctctccagcaacagatacaaccctggatggaggaatcaccctaacctcagatggtccagccctcagcaacaacaacagcagcctgctccttccttccaaaatgctgttggcctaagcagaccatacattcctccaccaatccaagaacaacaacaaccccagaaacagccaacagttgaggcccctccacaaccttccctcgaagaacttgtgaggcaaatgactatgcagaacatgcagtttcagcaagagaccagagcctccattcagagcttaaccaatcagatgggacaattggctacccaattgaatcaacaacagtcccagaattctgacaagcttccttct

SEQ ID NO: 18628 - DNA, 387 bp, Glycine max
agcttgtggcaacttagattattgtttctataatcaaaacatcaaaatggaaatcaacgaaatgcaaactaggtgcaggaagagaaaatagagtgagattcctagtgttaaaaagggaagatagaaggacacataggtaggcatggcaatgaaacctgtacccctcaatatccgcttaaactcgtcccgattttgagggaaaatacccaagttgaaagggtacgggttcagattcagggattatccaactttttaaatcggggttggagacagggatgtcactacctatctcatactcattctcgacccgccccgatgatgaaattatgaaatttttattaattacttgttaattttttataatttttacataatttaaaattcttt

SEQ ID NO: 18629 - DNA, 426 bp, Glycine max
tgaaggcatgtaacccacaatcttttcatagtagaactgatgcaatcctaccctcccaagggaattggatagcagactccaagaagattgggccaaagatgcaagagaaggccttaggattctcatgagccttagggtagattttgggcccatgggctaagtatgagcccacttatctttctacatattagattaaggtttcattaatttggggccttgtatttaaggctccataatataggtagggtaccctagaaatgtaggatttttcagcccttgtattttagggcacctagactagtttttgtattacgggtagttttgtaatttcacatgcattaagtgaatatttgatgtgtgcgttgagaaataaatctaattgaattgggagaagcccaatccaattataatttagagggggaggtg

SEQ ID NO: 18630 - DNA, 333 bp, Glycine max
agcttctcaatatattatgcgcctgaatcggacttccgtttgaaaagttatgaccatttgaatttctcgagagcattcgttgttcaatttcgagggtgtcgatgtattatgcgcctgaaccggacttccgtgtgacaagttatgaccatatgaatttctcgagagctttcgttgttcaatttcgagcgtctagatatagtatgcgcctgaatcggacttacgtgtgacaagttttgaccatttgaatttctcgcgagcagtcgtggttcaatttacaccttctcgatatattatgcgcctaaattggacttccgtttgaaaagttatgaccat

SEQ ID NO: 18631 - DNA, 416 bp, Glycine max
tctcgatatattatgcgcctgaatcggatgtccatttgaaaagttatgaccatttgaatttctcgagagcatccgttgttcaattttgaccggctcgatatattatgcgcctgaatcggacttccgtgtgataagttatgaccatttgaatttctcgagagcttccgttgttcaatttcaagcttttcgatatattatgcacctgaatcggacttccgtgtgacaagttatgaccatttgaatttctcgagagcttccgttgttcaatttcaagcttctcgatatattatgcgcctgaatcggacttccatttgaaaagttatgaccatatgaatttatcgagagcattcgtagttcaatttcgaccgtctcgatatattatgcgccataatcggacttccgtgtgacaagtcatg

SEQ ID NO: 18632 - DNA, 390 bp, Glycine max
agcttccttaagaaaattcctaaagaagctagagcttagcaacacacacatctctaatagctaagctcacctccttgagatgagaagctagagcttagctacacaccccctataatagctaagctcacccccatgacaaaaaaaagatgaaaatacaaaaaaaaaagtccttactacaaagactactcaaaatgccccgaaatacaaggctaaaaccctatactactagaatggccaaaatacaaggcccaaacgaaggaaaaacctattctaatatttacaaagataagcgggctcatacttagcccatgggctcaaaatataccctaaggctcatgagaaccctagggccttcccttggatctctagcccaatctacttggagtcttc

SEQ ID NO: 18633 - DNA, 420 bp, Glycine max
tccattgttcaatttcgggcttctcgatacattagacgcctgaatcggacctctgagttaaaagttatgaccatttgaatatctcgagagcttccgttgttcaatttcaagcgtctctatatgtgatgcgccttaatcggacttccgagtgaaaagtaatgaccatttgaatttctcaagagcttccgctgttcaatttctggcgtctcgatatattatgtgcctgaatccgacctccgagtgaaaagttatgaccatttgaatatctcgagaacttccgttgttcaattgcgagcgtctctatatgtgatgcgctcgaatcggacgtccgagtgaaaagtaatgaccatttgaatttctcaggagcttacgctgttcaatttcgagcgtctcgatatattatacgcctgaatcggacct

SEQ ID NO: 18634 - DNA, 350 bp, Glycine max
agcttaaacattcaacttcgagcgtctcgatatattacgagtctcaaacagacatccgagtaaaaagttattcgtttgaatttgctcagagcttcaacgttcaattttgagcgtctcgttatattacgggactcaatcagacatccgagtaaaaagttattgtcttttggattggctcagagattcaacattcaatttcgagcgtctcgttatatcacgggactcaatcagacatccgagtaaaatgatattgtcccctgaattggctcaaagcttcaacattcaatttcgagcatctcgatatatgacgggactcaatcagacatccgggtaaaaagatattgtcgttt

SEQ ID NO: 18635 - DNA, 423 bp, Glycine max
tcagcttctatataagctgaaccattttatcaatatacacaagttgagttttattcacaaaattagagtttatctcttttatcttagtgagagtgattctcctaaattcttgagtgattcaagaacaccttggctgtatcaaaggactttcacaacctttgtgtgttgccctcgctggaaagagtgattcttccctttctttcatcatcacccttgttctttcaaaccacaattccagaaaatccacctctgcccaaaattatctcgtggccataactcccattttacgcactcaaattaagtgattcttgagcctaaattgaatttcaaaacgagacctttcacctcgttttggaatcacctcatttggagccatgtagcttcagttattgccatttctatatttctgtccagccaccactt

SEQ ID NO: 18636 - DNA, 379 bp, Glycine max
tgctttacatctaaagcgaacacacaattggcatgctcctgagattcactagtcgatctcgcaagcaactcgattagactagcgattgtttaccacatttcagcgtaaacacaaccttaattagaaacaaatattactagtttgctactactatctaaatcactaaaatatatcctttctttatgttaaacctcatattcctcattttcattaaattacaaaattaaacaagtatcataatccatacaaagcatatcacgagaacaaagttaacataaaaacaatttcaccaagttttcaaataattcacccgaataaaaaactagataaactttattgaaagccgacatcatcttatttcaactagaagtttcacttt

SEQ ID NO: 18637 - DNA, 418 bp, Glycine max
  unsure at all n locations
tgcgttcccgagagcattnttcacttgagcgtttcagcctttgctttcgtgtagcttaggaaaaacatcatttcttctcctttctttcttccaaagccatttctaacgtctcaagcactttctccatcatccacaaccaccattagccaccacaaactgccgttgttctccgttgaaaccccacatcgagaggaacccttcaaccgaagcggaatattccaacttgccttgcgatttcggtagagaacgaaaccctaatctgacctttcatttttccttcgaggtaaccatgattccatgtttgttccttgttagtttcatgcttgtcttcgcatcttttctgactttggaaccaccattgcatgttttacgcttcctttaaaaaccttagagcatagagactntgtaaacgttatct

SEQ ID NO: 18638 - DNA, 384 bp, Glycine max
agcttatcaagaggatgtaatttagttattttgcatgaattgttgcaaaactcacatacttgagttcaatttttatgaataaaaaaaatgtttaaagctaattacacacttcaacaacaattatatttattgtaatgagaatgggacaaattcaatgaattattgtaaattcattttagaatattttcttaataatcttctaacttattaaattaagaaatattcattgtttttatatttatcaatttaataatatggaataaatttaacgaattattgtacgagacaaaagcttgcaacttttaccttagtgattcataattataattattaatgtgttgataagaaaggtaggaatataggtaaaaatgcactacaagataa

SEQ ID NO: 18639 - DNA, 420 bp, Glycine max
ctacgaaagatgaaggggaagattccagagattgtgggctctcacatctcatctcgggttcttcaggtatgcttgttggtatcccttttttttttcgttcaatttcagttttacatacttttagaggaacttgcattttaaatcttttgctttcattttgttttaactgatagacttgtgtcaagcattgttcacaagctgaaagagatgcagtatttgaagagcttcggccacattttctaactctagcattcagcgcttatgctgttcacttagtgaagaagatgctcgacaacggtaatggtctacttgaaatatactttgttatttgtcagtgtcaccttttcttctaattggtcattctccattttcagcttccaagaaacaactagcaggctttatctccactctccgtggtca

SEQ ID NO: 18640 - DNA, 386 bp, Glycine max
ttgcttattggaatttggaggaacttcttatggtgggtcaagaaacacttcgaaaattgtctggattagttgggaaagagtatgctccctcacagaaaaatgcggccttgggattaaaaatctctacctctttaatattagcctcttatctaagtggaggtggagatttcttcaagaaagtttgcaatttggtccccttttattagattcagatatggttgttctttctctgatctatcacatctgacccacaaaactagtttgcttctaacattattcacaatgacaaaaatggctcccaaatgaaatttcggtatgttctttggtttggcaacacaaattttcattgtgtgcataattggttttaatttagactctacaaattt

SEQ ID NO: 18641 - DNA, 399 bp, Glycine max
tttccttccatggcttattgcttagcggatggtgcctcctctcacctcttctcctttatcttctgctacaactccatggctaaaaatcaccattgaagaaccttattgaaactcaaagatccagccaccatataagcttctcaagcaagcttccatcaagcggtatcatagtacaagagctttaagtaagtactccttaaacctccattatccttcattggtatttcttaatttttctacatgtatttcctcacatgtcttgtgttgaatgttgttaacatgatcctttagaatttccaccgattaaacttgctacaaaagctagattttattttctatggttcacatttcttgttcttgatcttgaaccatgaattgtgttgagtttacgttcctttg

SEQ ID NO: 18642 - DNA, 386 bp, Glycine max
agcttgtcaactcctcatcccattttcttttttctaattcctccttaaattcgtcaaattcagtgtagtatactaccacatttctctctgttagtagtttccttggcaccattatatcagtgtacctctcctaagcttcttgagaatgaaacctacatctatcaaatcttgcttgggtagaggaagaagcaaaagactttctcttcttggaagccatctaaaaatataagatcaaacaacaaggttaaaacaagattattcaacaaaaaatagaaaaataaaactaaaaactgaattgggcgcttagcgtagcaggctgggcatagcgcgccttatgaaattttactcatgggctaagcgcagtagactcgcgcttagcctaaaga

SEQ ID NO: 18643 - DNA, 418 bp, Glycine max
tgccaaggagaagttcaagttggccgctacacacatccggaaggagtgtgccggattacgggaagagaatgcaactaccgcgagagcccttgaacaagagaccaagagggctcgcaaggaagagtatggccggaataaattttgcggagctctatggggtagcaataatgaactcaagctgcgaagggaagagagggaccagtcgcgagcacatagcatggttttgaaagaggagttagttgcctgttcaaggtccaaaagaagcttgtctcagcgtttatgcgagacggagaccaacatgctagctatcatcgccaagtaccaagaagagttaggtctagccacgacccacgagcataggatcgcagatgagtatgcccaagtatacgcagaaaaagaggctagaggaagggtgatc

SEQ ID NO: 18644 - DNA, 375 bp, Glycine max
  unsure at all n locations
agctttcacattaagaattattaataattgtttgtataattaaactccaacagaaaaactcatgatcttaattctgaatttcggccttaactttcacttgttggttaccacttttctctttgaacaatggtgaagatgatttacaagtaaaacaagctgccagaaatatagagttagacatttctatgtaatgctttcagttcaataacctacaacataacaatagacaaagaaaactatatcaattttttttttgagttagctatacttttatgtcaacattgaattcttagtaaggtattccaagttaaagcaccaacaaacttntttgtctgtctttgatttgtactgtgaatgatatgattattgaaattc

SEQ ID NO: 18645 - DNA, 416 bp, Glycine max
  unsure at all n locations
tgtaatcgattacacaaatactgtaatcgattaccataacagattttcagaaaatattctcaacagtcacatctttttatgtggttcttgaatggctatcaaaggcttatatatatgtgacttgagacacgaatttgctaagagttttttagaacaaaaaggtcttatcctcttaaaaagcaaaatcgttttatcctcttacaaattccttggccaaaacacttgtgattcaataaggaattatttgggtgctcaaattgttcaatctatctctttcaagagagattacttcttctcttcttctttattctgaaaaaggattaagagaccgagggtctcttgttgtaaagaaatttgaacacaaaggaaggattgtccttgtgtggttcagatcttgtaatanggttttacaagat

SEQ ID NO: 18646 - DNA, 351 bp, Glycine max
agctttgagccaattcaaacgacaataactttttactcggatgtctgattgagtcccgccatatatcgagacgctcgaaattgaatgttgaagctctgagccaattcacgcgacaatatctttttactcggatgtctgattgagttctttaatataacgagacgctcgaaattgattgttgaacctctgagcaaattcaaacgacaataacttttttctcggatgtctgattgagtcctgtcatatatcgagacgctcgaaattgaatgttgaagctctgagccaattcaaacgacaataactttttactcggatgtctgattgagtcctgtcatatatcgagacgctcga

SEQ ID NO: 18647 - DNA, 404 bp, Glycine max
  unsure at all n locations
ntaacttaatcaattcaaaagccttttgtgcttgttcattccacccaaacgcacccttcttcaaacattcggtcataggacttgctatagtgctaaaattctggataaagcgtcgataaaatgatgcaagaccaaggaaagatctcacctccgaaactgttgtagggctcggccaagtcttgatagcatccacttttgtttgatcaacggatactccatctttagacaccacatatccaagaaacaccacactttcaaccaagaaatcacacttttccctcttcccatagagtttttgtgctcttagggtctcaaatatttgtttcacatgagtgaaatgctcctctatagatttgctatacaccaatatgtcatcaagataaacaacaacaaacttacccaca

SEQ ID NO: 18648 - DNA, 373 bp, Glycine max
agctttacagcagattttagtaatgaccctctaacctagaattaaaataacttaatgccattaacctagggaattaaaaaaaaacttaatggctgagtgtaactgaaattgtggcaaccaaaagtcacccccaacagcctacaagtcagccaccatttggtctcccaaaaggctgatgcctaggttgccaattgggcccttattacaacttgaactaaacctaactaaagcccttttagttgattaacccaaaacatatttttggtcagccaactttacaaggattgggccattatttagacaaactaaacactctaaaattgagacaaagtggtgtcatttagtcctcctccatttgggccattatttggac

SEQ ID NO: 18649 - DNA, 416 bp, Glycine max
tcgagaaaattcaaacgacattaactttttactccgatgtccaattgagtcccataatatatcgagacgctcaaaatttaaaaaagaaactctgagcaaattcaaacgacaataacattttactcggatgtccaattgaatcccataatatattgagacgctcgaaatttaaaacagaagctctaagcaaattcaaacgacaataacattttactcggatgtgctattgagtcccgtaatatatcgagacactcaaaatttaaaacagaagctcatagaaaattctaacgacaataacattttactcggttgtccgattgagtcctgtaaaatatcgagacactccaaattgaaaacagaagctccgagaaaattcaaaggacattaactttatactcggatgtcttatggagtcc

SEQ ID NO: 18650 - DNA, 398 bp, Glycine max
  unsure at all n locations
agcttctcaaacgcttctagagtcacattcatcgattattacaaattaaaatgtttccatccacttcagtgttctccctcattacttagagaaattaatgatttggtcttgatctaatataatggtataaggtagccaacatataatgcataggatccaaatagtaaaattgtgtaataagatactttatgtatgttttagtttggtttcttatgtttaaaaagtttcactttagtctcttgttctcttttcactctcattttttatttgatcctcacaaacttcacttggagacataggtgtgagggtaacctttntccttttatgaacaaatganaatntgtatgtgacaccattatggacaacatccttatcatactgccaaggccttccacgta

SEQ ID NO: 18651 - DNA, 112 bp, Glycine max
ttgtacttttcgtacaacactgtggcggatgattgaggctggttttccccatcctaaagccttattttaaatgttaataaatgcaactgctttgaaacgctaaggctgacta

SEQ ID NO: 18652 - DNA, 414 bp, Glycine max
  unsure at all n locations
agcttgtacgattatggtgtacccatcacatgtggtactaggtggcggtcgggcgatggtgcacaacaagtttttccacatccacaatgcgcgcataaacccaccatcccctgttgcccacctccaactgagctcacgtactcccacgtagcccatatcctcgtttctctcaacaccgggtccccatcaatcctcccaagcttccacaatatccaagcaaaacaacattcacacagcacaagctatcacagccaagcaaaacagagcaaaggcagaaaactctgccaaaacaccaaccaaaaatcacagcttttcccactcaaagaccccagtaacaattccttcgatccaatgcgtaaaccgttggatcgactccaatattntactggaagtctatagtgcataagcctacat

SEQ ID NO: 18653 - DNA, 455 bp, Glycine max
tgcttgtggggcttctatggaggttggatctttgagcttttatgaggtcctttaatggtaattttccaccattgagaatggccaaaatacaaggcctaaaagaaggaaaaacctattctaatatttacaaagaagagtggatccaaccttgacccatgggctcaaaaatctaccctaaggttcatgagaaccctagggctttctttagtagctctaacccaagcctcttggactcttctatccaatacccttggggggtaggattgcatcatcccctccaccttggaaaggatttgacctcacttattgtagggatttggtgcctaataatacctattttgggcaccaacaaagcacaaggatttaagctcttatgaaccaaaccctcatccaacaactcctttacttgaggaataacctcaagtccaagaggtgtgacagttctaacaagtgtc

SEQ ID NO: 18654 - DNA, 414 bp, Glycine max
  unsure at all n locations
agctttgacttgagtcatcaagagattataaatatgttaccatggcataagtttcaaaaaaagatcaatcatcaatcatctttgaatcatctatctttcaatctttttcaacatcatctctcaaacatctttcaatcaatctttcaatatctttctacagaattttctgattcatttctcttcatctttctaaaaagtttttgatcaacactttctcttccaagaaaagttctttgttcaaaaacttgtgctattcatctttttcattctcttctcctttttccaaaagaacaaaggactaaccgcctaaattcttttgtgtctctcttctccctttgccaaaagaacgaaggactaaccacctgaattcttttgtctctcttctcccttacaaaagattcanaggactaacca

SEQ ID NO: 18655 - DNA, 427 bp, Glycine max
actcatgcatgagaacaattctcaagttgcgggacctatctttatatttggctccgactagttttccagattcaagaataccatgaagcgatagagaagacatactgtagattacacacacaacacaacactagcatgtcaaagcataattcttcaaaccttgtaaagaatatctaaagattaataacactcccactaattacaataataatatattaatgtaagaaatacttatttcttttaagtggataacatacagcctcttacaaaattgcgagcaagccacttggttatctagtcgtttctcatacacgttctaagacaatgtatcatattcatgttcaaatcataataagatataccatatcatataagctcctagttagcacgtcgatcctattgatatcaataagctaatgataacact

SEQ ID NO: 18656 - DNA, 410 bp, Glycine max
agctttcataccaacaagctgaacattaattttttttttatcaagttaatggttcattatatgccaaaaactctttcaggattgaataatacttcctccctacctatcaaagaatttttcttgctccagtggaatggaaaatttgaggaagaatgatgagattgtaacttctgatcaatctaagaaccaaatatcactttcactcaatacaaacagtatattttgtatatttaagaacaacaagacatcattcctatgaccaaacacttacatgaaaagaacagaataagaaaatgagaaaacaatacacttgccaagatatgtgggaaaaactacataaaaagagaagtgtaggtattaaaagattcacttggactccaaatgttgaaattggttgatcatgcacatat

SEQ ID NO: 18657 - DNA, 447 bp, Glycine max
tgatccttgaatcttgattcttgaattcatccttcttcttttatcttgaagtgatcttcaacttttcctcttgagtcttgaattgttcttgattccttcttgaacatcttgaactcatcctttgattgaacttttcagttttttgcatcacctttgtcatcatcttttgttatcatctttgttatcatcaaaacatctttgaatcattcttgattcaccatgaagctttgcttctacacaattggcggctaatatcttcttatgatttttgggggcttaaaaacccccccacaaattgcaaaacgccatcacaaatttggagggctggggtaatgcattgttggagcagaagaaatcacccatggaacatttgcatctgcagaccttgatcttctttgtcttcatcatccaagggacctgtacattcattcacatgctccaatacct

SEQ ID NO: 18658 - DNA, 445 bp, Glycine max
  unsure at all n locations
agaggattgagcttgtgaacactgaacacnaaaccnaacacacaatacccagcgttccgcgaagcgaagtgtggttgcaagtatcgacaggacgcagggagagcaagggcgagtatagtacacaccatagcttcgtaggaggaaagagaaagacatctgacgcatagcatcattggaacagaccgatacaaagcgacaagatatggacctgccgaagaccaagcaacaataactctcgagatctgaaccacggacatgaaggtgccggaaataccaacagagaagacgttcgccttaccgaacggaaagccgggacggaaggtacaatgtaatgacggccccaacgagttaccaaagtgactaagacgtggagaccacgaaagtgaatagccacggtgagaaaaatgaagcgacacacggaacaatggggggccctaacaacgag

SEQ ID NO: 18659 - DNA, 464 bp, Glycine max
  unsure at all n locations
tataagaacaaaattgccttaatcattttcaaatatgtatgtgatttttgacgcatcaacaagaatcaagccaaggctattgtgcaagcaatcaatggggcaaaacataccaaatgattataatgatggatggctcaaattctcacaaaggtaaaatcatcactttcaaatcgagctttcaaaactatcatgacatgtagagaagaatcaaggatttcaagtcacaaaatgtcaagaacttttattttcaaaacaatntcccattttttgaacatatcctataattcaaagaaaaacatgcaaagtcgtacgtgcacacgaaattgacccanaatattaaactgaaaatccgacgaaactaacaacattaacaaattaacacaactaacaaattaacaaaaccaacaaaactagcaaaaccaaagaacactcccacccccatacttaaacaacacattgtcctc

SEQ ID NO: 18660 - DNA, 357 bp, Glycine max
  unsure at all n locations
agctttatcctagtacaagtaaaatcaacatattgagcctttagtcaacattagattttatggttttgataaacctatcaaccattagattgtcgagagtttatcaatcattagtctcctgagaaacaaaatcttgatttatagtacaagaggccctaggatgagtcagacgaagctcaccattaatccacatgtagagaaagcttacctctttctgactaaactcttctttaagtcgggtgatatcttcttgaaattgaacattttcttcttgttctcattgtgcataagcctttgattctttagcatggactntcaactcgttaaactcttccaacaatgcatcaactcgctctt

SEQ ID NO: 18661 - DNA, 452 bp, Glycine max
tcaggctgttcaattgctttagattgttgcacatatttcaaaggtctgtgtggtggtcgacagaggagcataaaccatagagtctggcgacaggtgcagattttttattcatggccagttgggttaccaggttaactaaggcatctagtttaccttcaagcttcttagtctcagctaattaagatgaattcgtggctacttcatgcactcctctaatgacaatagcatcatttctggcactaaattgctgggagtttgaagccatcttctcaattaaatttttggcttcagcagggatcatgtctccaagggctccaccactggcatcatctatcatacttctctccatgttactgagtccttcataaaaatattggagaagaagctactcagacatttggtggtgagggcaactagcacatagttttttaaatctctcccagtattcatat

SEQ ID NO: 18662 - DNA, 402 bp, Glycine max
  unsure at all n locations
agtttgctcgtcttgtggagggagtgcgtccttctttagccattgaccattacgatccttacgataaccaaatgaagtgactgcaccagcacctatagcaaaggaacgcttgacttgaacaaaaggttcatcatcaagaggaatttgaaaatgacagagaaacaaagtgaccaattgaggataagggagaggtgcattggcccgtaatgccttatgcattcggtacctaaccaagtgagcccagtcgatctgacaactagtaagaaaagcccacatcanaatcaagtcctcctcagaggcttgagctaaatttgaagaacggngaagcanaattctaacaataatatagtgcaagatgcgacaatcaaaggttaatgagctggccagcaatctaccggtcat

SEQ ID NO: 18663 - DNA, 454 bp, Glycine max
  unsure at all n locations
tcaagaataatgacctcagcaaacttcttattcttatattgattctcaataaattggcctcccatttttaatggagagggttaccactactggaaaatccgaatgcaaattttcattgaggcaatagatttaaacatttgggaagccatagaagttggaccttatgtacccaccatggtggctggaaatacaacaatagagaagcctagagaagagtggtctgaagaagaaagaagattagtgcagtataatttaaaggctaaaaacatcattacctctgccctaggaatggatgaatattttaaggtgtcaaattgtaagagtgctaaggatatgtgggacactctactaggtacacatgacggaacaaatgatgtcaaaagatctacgataaatactntaactcatgagtatngaattattangatgaagacaaatgagagtatacaagata

SEQ ID NO: 18664 - DNA, 413 bp, Glycine max
  unsure at all n locations
agtctttaaagtaggccactaaaccattcaaattaataataataataataatactaatactaataataataatcacaaaatatagatacagttccttattaagttcatgaccttacctatcgttgttctccaaataaaattaaaatttcattacaagacaatctatctttctaagttttaaatggatcattatgatggaaactctaattttaatgatggggcntnngttaaaacatctaaatttgtattgtagttagaatgaattattattattatcctacacctaataacttttcttttatctcacttccaatttttatttatttttttggatcaactagagtatccatagttgagagttagaatgaaggaataaggattaatttcttaacaactaaaatttatttacaaca

SEQ ID NO: 18665 - DNA, 433 bp, Glycine max
tgtctttggagattaatagctatcgtgccattgttattgtcaacttataattgtcttttagataacaccatatttcggtagtccagttgttcccatattgagtatgatgggggggcatgcgttgttctagattttagcgtatgtaatatattgaacattactgtcaacattatgacggaaatataacgttctatattgtcgtatctgatgcaaagtaaaagcccatatagaatatgggttggtttgatccaatccgattttcaagcctggtttgacggatcagatggatcaatctgtgtattttgtcgagctctatgtgagattccaaccataatcaattatcatataggtataaggttaatttgttttaatttatatattcatataaatatttattctaataaaatacagagctccatattcttttgtgtat

SEQ ID NO: 18666 - DNA, 410 bp, Glycine max
tgtttatttgacttatgaaagtggcttatgaattattaccttcccataagttattttcaacttacctaggcttaagggtcaagcttttatacacaccttattaagttgtccactcaaaaacattctacgtcttgttgtaataatttattcaataaacatttttatgtgaagaaaataagaaagtaaaataaattgagtttctctcgtatataaaaatcaacttatgcactcaactttaatagaaattctcttaactggataattgaaatgtataagttaattttaacttatggaagaaactaatctcagtttatcataacttctttttttataaatactcgtggaaacaatattctaactggataataaaaagatgaaatagcatttgtttaatagcagcatgtggtggg

SEQ ID NO: 18667 - DNA, 436 bp, Glycine max
  unsure at all n locations
ttgtgtaatcgattacacttatttggtaatcgattattagtgtttgtttctgaaaaatctaaagatgtaactcttcaaaaaggttttgactttttaaaatgggttttaagtttttctgaaagttataactcttctgaatggccttcttgaccagacatgaagagtctataaaagcaaggtttttttttttgcatttttgaaacaatctttctaacaacaatcttgaatacttttgcttttccatacaatcctttacaagccttgaatctctttgaatctctttgaacttcttcttcttctttgtaccaaaagctttctgaagttgtctggttgtccaaaccttgaaaacttgngctatttatattttcattctcttctacctttgccaaaaagaattcgccaaggactaaccgcctgaattctttttgtgtctctc

SEQ ID NO: 18668 - DNA, 407 bp, Glycine max
  unsure at all n locations
tagttattgaactgtctctaacttttttttttagtccaatttaagttntagttataccatttctttcttgtatttatgaaaggagtgaaatttccatgtgttttccacatgtcaaaacatagctaacaggactttgatttaaaagtttgacccttttctcacaacaaacaggttcgattgtaggagtttcttgttagtagacgatgtgtattctttattttaagtttttcatagaggttgatggtttatcctaaatttaaaatagagattcatctatgcctaaacttttgtatatcaataataatattttgttcacagtcttgttattataatctggattttcatatcatctcaattataattgcaattgggaagagagtatgagtattcatggatcggttctgatt

SEQ ID NO: 18669 - DNA, 463 bp, Glycine max
  unsure at all n locations
acactataaaactaagcttagatgaagctcaaagaaatataatcgttagttacacaaacacttgaaatgaaaacctgataatctagatgctttgaagaaatgagtaacgaacctacacgctatcattcaaattctttatgtagaaaactctttgtatattcttaataagtttgaaaagctctcaaaacatcttgaatactctaagacaaaaaactaaatgcttagatttcacatttgtttgtaagatgattaagaattaatcagttagcaaatcanacaacatatcttctgatttgtatagaaccaacagtggctgggaaggacaaagaatattcggttgttaaagcttggcgataaactatgttgtgatagctaanagtaacagtgacaaatacttgtaactnttgtgaaattagtgaaacttgatggctaaccaaaaactgaacttagtctgaatggtaga

SEQ ID NO: 18670 - DNA, 411 bp, Glycine max
ttttgttgcaagtttatcattagatcagggaatctatgtaaagtagtaaaatatatggaaagttgtaagactcacaagattacgataaacaatctatttaaacaataatgtattgtatatgttcaaaggtgtttatgatatcatgtgtgctacctatctatggactttggcagcaaatcttcacacaaaataccgtaagattgattctcaggtcaagcaagggtggttaaataaagctctctttagagtaatgctccaaagatgataaccttccaacattataggtaaatctttcccggagtcagtttataatcactgtgaccaaccattaacaggtgtatgtgctagctttacacataataattaatgcattttgatatattatgcccgaaattatcatgaaagcataac

SEQ ID NO: 18671 - DNA, 436 bp, Glycine max
tgtattacaagcaggaatgacaatctttcaaggacgtatgagtaattctcaagggagatatttgtggtctaataaatataaagcccaagagagaagaaaatcgaatcacattgaaggaagtatttgctgttcctattttatataaaagaagtaacagaattttgtcacattttgtccatctaacaaaaaaaagtagaaggtttatggtcacttcataaaaaggaaattctagacaagattgtaataagaaaattgcacttgtattctgatacgggatatggagatgtaacatatatataataacagaacgatatgttctttggtgttgctatcgtatctgattatggttctgcatacgtattctacaaactggaattaacatagaatattacggatggaatgcttagaacaatattctttttatattgattgagta

SEQ ID NO: 18672 - DNA, 401 bp, Glycine max
  unsure at all n locations
agtttatgaaacatacaatgaaaacctggttgctttgtttcgggtacaaggtgcaagtccagataatatgcaggccatccaagttgatcaagtaagtttcaatgattctgactttatccatagtggagccctttttaatatatcttatctctaattaccagaaaaatggatagcaattatcaaggctttcaagcatagctattgaatatggactaaaacactatttcaatattttgttcttattgaatatggactaaaacactaggcacttaagtccaacctattgtgctctattgatgatggtctattggctgatatatatgttggctggaaccaaaataaaattataatcagaataattattnttccatctgtggtgctcanaatggtaactttgaaac

SEQ ID NO: 18673 - DNA, 449 bp, Glycine max
  unsure at all n locations
tgctcttccatattgtgagtctttgctgaaacttgattataactggttcccaagttgatcagagagttggactaaccccgactggcagtcccaaaaagtgaaaaggtggagaagcaaccctgcatgaaaggaaatttgcagctggctcattaaatctttggtttgtgccaatcccataaaagacactcttaaggaagttaactaacaatccagagaccaattcgaagcctcggaatattgcttttattgcccaaagactatcatgagtcacctgtcccaccataactgaatcatcagtgtattggagaattgagtattggaactcttctccaactttcatacctttgaatagtcttttctccaccgtgctatgaaccgccccgttagaccttgagcagctatcaagaacanaaatggagacaacggatcaccctgcttcaagcctctta

SEQ ID NO: 18674 - DNA, 351 bp, Glycine max
agtcttgttcttaatggatggctatctgacgatcctctagaggcacatcctatagactatagatacatgcagacagagtctcctcctgctcaccacctatgttgagagacatgaagactgataactgcagagagtgaatgatagccgcctacttatcgagacctatagatgtatggaacgccgaggaaagtgaatagattatgccacgtgacagtaagatgactgagattgttataggcttctggacgcagctactatatcctatatcatagttatactactcagcacagaatgtgacgatgtatgctctatcaaaggaataatacgccgaggtatcctttagtagatgtg

SEQ ID NO: 18675 - DNA, 356 bp, Glycine max
taacataggctccgcatacgcgggagcactaagggccatcctcgagtttagggcgtgtaagctagagcgggcgtaacgcctggcttacgctgagcctggctgaagaggcctgctgcgcacaacgcacggatcttgcgctaatcacgcggcctagaagctgatgctcatgtcaaatctacgtcgcgctatgcgcgatgaaaccgtactaatcctgaggatagctagcacaaccatctgttactttatgcacttcataacgctatcaattatccacctgacatggcacataaactatcggtaaaaacaatggacatatgatagagccatccttctacataggactataattatctaca

SEQ ID NO: 18676 - DNA, 405 bp, Glycine max
  unsure at all n locations
agcttaatctgttttctctgctctttgatcccgtgaaaaaaaaaatggctggagatgaagaaaagcttcgaatagtgtgatgtttccatggctagcctttggtcacatgatcccaaaccttgagctggccaaactcattgctcaaaagggtcaccacgtgagtttcgtatccacccaagaaacatagagcgtcttccaaaaccgtcactaaacacacttgatatcaatttcgtgaaccttccactgcctaaagtccaaaaccttccagaaaacgcagaagccaacactgacatcccctacgacgtctttgaacacctcanagaagcctacgacgttctccaagaaccgctgaaacgttntctcgaatcttccanacccgattgagtcttctacgacttcgctccc

SEQ ID NO: 18677 - DNA, 455 bp, Glycine max
  unsure at all n locations
tagcttatccatctttgtcccattttcattgtgaggttatttcagcagttatgcaacacttcatatgccccactgtgtgctagtcctaagcttactacaccaagacccaaatttgtgatgtgtaattcatcaagccaaatcccgtgttaccccattttttgttgcatcaatttggttaacagctctaacaaagatgtacactcaatagcaatgccctatgctctaacattaaaaattgtttaactatttttcttttcacaaacaagatatttgagtagtatgtttttgcccttgtaactttttgatacaaaaaaatcaactccagcatggaaaagagggggattttctaacatggcatttgcctaanaatctatacacaatgttggctacgaaaaatcacacagtttccaaactctgaanaagaaccagcaaacaaaacanaagtatgtattgac

SEQ ID NO: 18678 - DNA, 413 bp, Glycine max
agcttgtcaaacacattctcaccattttcatttgctgttaaacccactccaacccaccagagaattatattacttttcttcataacagcattttcagggaaatgtaagagagacaacaagcaacgttttccaacatgatcaagtttgttacaatttacctcaatcatttccaactcctcacgttgtatgctcgaagggagttttcttgatgactgagaatcctctatattagtactttggatttcaccagcaggcagcaacttttgagttgattctcttattctcttgcgaatgtgtccctcctcttctgtcaacttatttatgtttttggtgcgaagatagccatccaggactgttaatgtgtcaaggagttcttcttcatttttcttcactaaaggaaacaggtcctttat

SEQ ID NO: 18679 - DNA, 371 bp, Glycine max
  unsure at all n locations
cgcgacatcgaggactactagcatagatacttccacctactccttgccacccttcatacctaatatcaaacctctgattacagcttatcatgacacccactgccagacctgacacacacttatagaatgtaaaggagtgatttgagctccatatctttagtcgacaactaatgctaatacctccgtacgaattctattaacagagcattggtattgacgagacgcattgcagaaagtaaacgcccgatccacttcctgtanaattcaaatgttagggtacgattagtcccaacagattgagttctatatcctttcagagacaacgataagaatcagacatgattcctcctcactttatgccttaagaacca

SEQ ID NO: 18680 - DNA, 335 bp, Glycine max
agcttgtaagtatttgttggtataatttgcctgttccattatgctcttaatgtctttagaggttatttcctcgttgacatcttttgtcttgaatggaattgccatgacaggtttattgttactgtctttgatgtttggtagttgatattgtgttgcgggaggtaattccgattggattaactcaccatccttcacttgccaatttgttatgacatttgttgttggatcacctatgatgtcttgtttccaagggtaatctatatcctttctgatggcataagcatgacaccaatcaaagaaaaggacattaatcttgactctctcgacaaattcgt

SEQ ID NO: 18681 - DNA, 428 bp, Glycine max
  unsure at all n locations
tcagtcgcagatgcaatctcagggacttgcagttccttctgttcctctggttggtccctccggtcctcgagtgagcacaaaggggacttgtgttgatccctcaggaaacgatcctgagacgggtgactctaataggtgcggcttgtacatagaagcaaatcctacccgcctggttgccatggggagagtttatgagggatccactgttgttcataacattcctttgttgcctggccaagtaaaggtgagtgtggaggagcttacagatgcagatgctccagttcctgtacccactgatgaggtttccttagtgggataggcatttcacaccttcctttcttggccgacacatctggtcaagtctttatcacagcaggtacttattggccttactatatgtttcttctttntaaattaattcattaagt

SEQ ID NO: 18682 - DNA, 409 bp, Glycine max
agcttgccttgccccttgatatattcgagggactcatggtcactatgaatgacaaattccttgggataaaggtagtgttgccatgttttcaaagcccgtactaaggcatacaactccttatcataagttgaatagttaagggtaggaccacttaacttttcactaaaataagcaattggatggccttcttgcatcaacacagccccaatcccaacatttgaagcatcacactcaatttcaaaagatttttgaaagtttggcaacgcaagtatgggggcattagttagctgttgcttaagaacattgacagcttcttcttgtttctctccacatttgaaaccaacatatttcttgagcacttcattgagaggtgctgccaatgtgctaaaatccttcacaaatcgtctat

SEQ ID NO: 18683 - DNA, 460 bp, Glycine max
actaagctcgaattgaaaatggaagctctcagaaaacaaattgtcttacttttcactcggattgccgattcaggtgcataacatatcgagacgctcaaaattgaacaacagaagctctcgagaaattcaaatggtcataagttttcacatggatatccgattctgtgttataatatatcgagacggtcgaaattgaacaacgactctagaaattcaaatggtcataacttttcactcggatgttcgattcaggcgcataacatatcgagacactcggaattgaacaatggaagctctcgagaaatacaaatggtcataacttctcactcggatggccgattaaggcgcatcacatatcgagacgctcaaaattgaacaacggaagctctcgagaaattcaaatggtcataacttttaactcagatgtccgattcggggataaaatatatcgagacgctcg

SEQ ID NO: 18684 - DNA, 409 bp, Glycine max
tgtttctcaaggaagctacctagtctatacagagaaacatgaataacacttgttgtaactttgatgaatgagagtcttgtgagacatacttcaaaaagttccacttctctccctcttttattccttcaatttcgtgctcccccctctctctttctctccctctttcttttcctccattgaagcatccttccaagcttcttatccaaggctcatcttggtggtgaagctccttcttctatggcttattccctagtggatggcgcctcctctcacctcttctcctttgtcttccgctgcatctccatggtggaaaatcaccattaaaggacctcattgaagttcaaagatctagcctccatagaatccctacaaaaaaggttccatcaaattggtttaggggttggacttg

SEQ ID NO: 18685 - DNA, 412 bp, Glycine max
  unsure at all n locations
ntcaaatttaaggtaccaaagtacacaacatattcttttacctactgaatataaattagtcatatccaactacacatcctaataacaaaataaaacaagaaatgggtcttcacttttcttcatttttatactggatctttatcagcagccttccttctagtgaaccttggtgttggcatgaatagtatgggtgctgttggtgggccatccacaacaggtgcatctactattgaagtgtcggaaatgttcttttgtttgggtcttctttgctactggtggaacatcaacaataggtgcagggacctacatgcaaatgccaaacatgaataacacttgtaatatataaaaacaaattggttagtcttaagagaacaaaatatttaccatgaactccatgtcactatcttgtgac

SEQ ID NO: 18686 - DNA, 407 bp, Glycine max
  unsure at all n locations
agttttaatggagtgaaatgtgattgaataagtagtgaaaatatatgggaatgagttatagataaactcctatgctaagtttgacggttggttaagcttcaattatgtgaaatgcggccattaagttttgtgcatgtaattgctttgagttatgcaatttgttcctttattatttaaattgatctaattgttttttattaagagaattttgatcaaccaagtgctaattatattggttgtgagagaattcaattgcacggttaaattggatatggtgtttaagagatgcttaanaagtggtttattgcttttgtaagtgaattgaacttgttctaaaggaggatgtttatggaaatatgaatggtgtgtaagtactagatngacatgtttttagtttatatattaag

SEQ ID NO: 18687 - DNA, 453 bp, Glycine max
  unsure at all n locations
tgttggaggacaatcctactcctctctcctcgatctctangttatttcactcaaattagggttccgattctccgttaacattgattttgcacttaaatcaaaatctgtccacgtttcagatttggtgtttgttcgtttagctgaaatatgtttttactcctaaaatttggataactccttttatcggaatgaccagaaagtaacagaatcggtgtttttgagtagtttaaagtggattttaaagcaaccgcgcattcgatttttctttatcttaatatattcggttgaaattgatcaagcaggatgttatctgtatgttcaattcttttgtagctaatatgattcggtggaatggttgaagcttttgtaggtttcagttgttgtcaggtaatattctgttgcatganagtattggctatgggctatattgtatatgttagatggttagcatat

SEQ ID NO: 18688 - DNA, 405 bp, Glycine max
agttttaacaaagcacacaaagacaacctcttcttcatcatcaagaattacttctttgcccttgtagcatttgaccttttgatagagtacatgcttgtcaacaacaatttaaaagctagtttctgatgtgaccaagcacgagaactgggttcccaacataaagggttggcgagtgttgagtcattgaattttgcctaaagaggcttgtgtggatcaaatctcctttttataggtagatagcttcattatgagttttggcccatgatatgataaatcctagttagagaaatttgaactagcttcaggattagccaacaaaatatcttcagtctggaaggtcacgtctgattgagagtgatcctagggaagaccaacattaagtgtgcacagaagacccatcaacta

SEQ ID NO: 18689 - DNA, 439 bp, Glycine max
  unsure at all n locations
tttgatataggtaaattggtcttcatattaaaatccatctttgaatctgatcgcgataaggaagacgagttatattcatcaaatcaagaccagaatgagacataattaaaaaaaaattaagaaaatgaaatcatcaacttatgaaacctagccaagttaatgacattaacttcttgattgttttgtaattgggtttgttcctactcttcgtttgacaacatagctcatcagtcttgtcctgattttattcagagtgaaattgtaattcgaagacctattcagcgaaatcaaaggtttgatatctttttcctttgtttttttatgtcatggttggcttattcaatatggttttccttctccttcctttctgctaaaaagtaatgattctgcaattcatcctcctctntntatgctcttattcattntcatatacaattat

SEQ ID NO: 18690 - DNA, 394 bp, Glycine max
tgtcttagtggctttgtgaagatgaagaggtaaaagtgactcaacaggttgaggtgtgtctcaccattgggagatataatgacaaggtgctgtgtgatgtggtcccaatggaagcgacccatgtgctgttaagaagatcgaggcagtatgataccaaggcagtgcatgatggcttcaccaactacatctctttctagcgagctgacaagaagattgttctcaaaccgttatctcctcaagaggtttgtgaggatcagataaaaatgagagatatgatgaagagtgagacactcgagaggaaaaagagtgagacacttgagaaggataagtgaggaaagagaaagagtgaaacacttgagagggaaaagagagaatacatagagagtgaaacact

SEQ ID NO: 18691 - DNA, 452 bp, Glycine max
  unsure at all n locations
nttaaccttgacttggtagaacctcttgccggtttgttttgtttccatgcttgctaaagtgagacaaaagctggtgcaaatcaaaactccgatatctcatgggtggaatggatgaatgcatgaaggaatgcatataacacagatgtaatctacgaatgcgggggtccggggaattcgtccccttcttagacacaatgtctaggggtagcaaagtgccccaacgtacgtttttaagaaggcgacacggaccctccgttggtttgtatacagaagggatcaagacagaacccatatgcgatgcctatgcaaaagacacaatgcgggaatgtacacagtatgataatattcactgaacataagcaaaagggtatatgatacttatgcatggcagtgtaaaaatggcacgcagcgtgtttgctccgtgcccctatttaaggggacctatacggaga

SEQ ID NO: 18692 - DNA, 411 bp, Glycine max
ttcttgtcgccacggagttttccgactatgctcttgtgtggtggaacaagctacaaaaggagagagcaagaaatgaagagccaatggttgatacatggacggagatgaaaaagatcatgaggaagcggtatgtgtcggctagttactcaagggaattgaaattcaagctccaaaaactaacccaaggcaacaagggggttaagaagtatttcaaggaaatggatgtgctcatgattcaagcaaagattgaagaagatgataaggtaactatggctcgatttcttaatggtttgactaatgatatccgtgatattgttgagctgcaggagtttgttgaaatggatgatttgtttcacaaagcaatccaagtagagcaacaattaaaaaggaagggagtggctaagaggagtt

SEQ ID NO: 18693 - DNA, 443 bp, Glycine max
ttatatacacaaaccaaggtaccatgagagtgtttcatatcagatacaagaacaatgctgataagaattacacttactccagtgaacacagttatagcatcttcggccttagaaccatcagttggatatgactcacgccatatctgccaaacacctatcacactaaattttggcaaaaactcaaccttcgacatgacatataaattcttagccacaataaaatatttaaaatggatactgtctatttagaggccactataacaaaagttaagagttcttatctcttgttttagtaatgtatcttcttcgcaagcagaagtgaagataatatattaccgtggagcctgcatagagaggggccattaaaccattgaaaaacccatgaacatgtatattatatatgttaaggactgacgtaataaagatatcccaaatgttttaaa

SEQ ID NO: 18694 - DNA, 411 bp, Glycine max
  unsure at all n locations
ttttcatgcaagtttaccagaaatacttttatcaacttttacagattaattttgaaaaaatttaatattcaaattgttggtattttaggatcctggtgaacccataaaataaaaaatgttcaattttgatgaaaatgcttgttgaaagctgttctgagtacgtacttcatactacatgtatgttatttaccatatatgatcaaatgaaataaaatagtaaaaaaaaatgcacatataaagtaatgtatgtgtaaattttgatgtaactcattttattaatttcaaaaattaaattcttattagtaatttccagttgataaataatcttattttatactaatgacttaaataacactttaatttacaaagagctntaatttaattggtttaacaggtgcgttaattattaca

SEQ ID NO: 18695 - DNA, 448 bp, Glycine max
  unsure at all n locations
tcattagagaatcgcaataacaacaacactttcatatacatcattatcaatttcagagagtacattttcagacataaagcaaacgcattgcgatgctatcaccacatcacccgtgtttcatcttctcgaaaccaaataggacttatttgtcacaaggtatggagaagacgaaacacaactaaggtggtgacgacagaacattggaatgtgaggaagaagaggtgcgaggaataggatgtgttgacggcttacctgctaagggagcaaatgcagcggagatgcaaagaggcgcgaggaggcacgaggaggagaacaggtgaggaggcgaacaaacaagaatgcaaggaagagtgcgcacgagagaaaatatggctcgtagagacatttcanatatttttaaatgtatgttntaacatcggtttctactaaaaaccgatgcatttgattt

SEQ ID NO: 18696 - DNA, 402 bp, Glycine max
  unsure at all n locations
agctgctagcaccagcgatttcaacctagaaatcaagagtagtgtttatgttgcttaaggcttggatagtttcaatttgtgtttgcttatgctcaattatcttgaataacacaattcaagagagcttaagacttatttgattctcaaatccagccacaactcagcaccacaactaaacttcatcataggcatcatgtaggaatcttagaaaacaaaaaaagagttcaacaacaagactacttctaggaattgatttagaacatgttatgaactaaataacatgcatgaattagactcaaaattcaaaagataggctaagaatgacaagtgtatatctaagaatgacatgtattcagaanaagaatattatgaatganaaatgatagaacctanaatcaacac

SEQ ID NO: 18697 - DNA, 444 bp, Glycine max
  unsure at all n locations
tgtagaatggctagacatgatacatgttatggtttgttttggttcaaggataaaagggatgccccacattatttccatgacacaaatgcaaaaatgatgatttggaaactttatgcaaaactggtcatgcatgcgcttatgcggacgctcaagtgtcaaatttttatggtcaggtgatgctagggttcaggattcatttcctctattttaaatcaacccaatgtttccaaaatatgttcttttatcaatttgtgcattcctccaagtccatttcgggcgtccggngaaatttttacagcattcacccttcaggtgtagacacgttntttcttcaaaaatcggttatgatcaatgaattttttttcaaagaaaagttggaaatcatctcttttcaaaagcatgtcggttnttagctagacaacttattttctctttttccacctt

SEQ ID NO: 18698 - DNA, 414 bp, Glycine max
agcttgcctgcccggtgcagcagtaatgatggcccgagttatgttggggaacggttacgaacccggaatgggtttaggcaaagacaacggcggcataactagcctgataaatgccaaaggaaatcgtgggaagtatgggttaggctataagcccactcaggcagatatcaagagaagcatcgcgggaaggaagagcggtagtcaaagctcgcggttgagacaagaaggtgaaggaagcccaccctgccacataagtaggagctttataagcgcaggtctgggggacgaaggtcaagtggtcgctatatacgaagatgatgttccgcattggatttggtacgaccatgccctcctgatttccaactgtgaaattggcaagtggaagaacgccctggcatttacgcaacgaacata

SEQ ID NO: 18699 - DNA, 428 bp, Glycine max
tgtgtcggcttgtggggccacactgaaatcctcttattgttgcccttcctggactgcttcgtggggagcttcttcgtagccaattctaggttgcctcctagtagcgcttctttaacgtcttgagccagatgcatgatgacgatttgtcgatcacggacacaatacctgctggtacctgcccgggtggttggtcgcctactggtcggccatgtgtcgtacgtaatgctccagcctttgtagatgagctgaggtggactctgcaagtggtggtggtgcatctgttgcccgctactgtgatgccttgccctgtgcctgcctaggggcgtagtacttctcgatgaaagccctgttaataggggcctgatgaccctgctgggggcgatgggcactctatagaactgacagaggcacgtaatcagagctggaaa

SEQ ID NO: 18700 - DNA, 399 bp, Glycine max
  unsure at all n locations
agctttttctcaaagagatctaggaaggataaagcagctgaaggagcgctgagcaccagcagcgcttcgaggccatcaagggatggtcatttctctgggagtgacgcgtccagctcagggacgaagagtataccgacttccaggagaagatagttcgccggcgttgggcatcactggttacccccatggccaagttcgacccagacatagtcctcgaattttatgctaatgcttggcctacagaggagggcgtgcgagatatgcgatcctgngtgaggggtcagtgaatcccgttcgatgcggatgctctcagtcagtgcctgggataccctntagtgctggaggagggccaggaatgcgagtatggccagaggagggaatcgtccgacgggttcgatg

SEQ ID NO: 18701 - DNA, 452 bp, Glycine max
  unsure at all n locations
tgtagagctgcattgaggcttaccaaggataggccttgggttttatgaacctatgagactcacaaagggtggatcttgggtatgacgagccttgtgtatgcagcgcatgtgtcgtgttcttgcatacgtgtcacttcatggagtggcacgtgttggagacaaggtgcataaacctgtaggactcaccaagggcagaccttgggttttgtgagccctttggaggatcgacaagggaattgtttgacctgngttttgggcatcgtgctcttgcatacgtgtcacgtactggagatgtaatgttgtgctcttgcatatgtgttactcgtgaactgacatgtactggaggcatggtgctcttgcatacatgttacttgtcaaatntcacgtactggagacttagtgtcatgctcttgcatacatgtcactcgccgtggatggcacataccagagac

SEQ ID NO: 18702 - DNA, 409 bp, Glycine max
  unsure at all n locations
agtttatacgccaatttttttcaatagtgcttatttcttcctattccaatgatgtatatctgtctgtatctcgtcggcttaacgaattcctaccctccaaatttaatggaaaaaaggacaggtggtgaagaaaatagagtgacagcatagccattcacatgatcattgaatgttataaaacttttacctgttatgtagcacacccaccatgcctactttttttctttatctgtccttttcaacataccttttatatttcaatagctgggaacattcccatattataataaaagtaatatggtaaggatatgacaaaatccgttcacattggtttagaaaattttccactgccggcttgatataatgtattgactntcatttgatgatgccacanaagtccaagtgtttt

SEQ ID NO: 18703 - DNA, 459 bp, Glycine max
  unsure at all n locations
actcaagctacaagacaaagatggcctcaacaaataccaatcaccttattgaattctatcaatagacctccaatctttaatggagagggttaccactactggaaaacccgaatgcaaatttttattgaggcaatagatctaaatatttgggaagccatagaaatagggccttatatacccactacagtagaaagagttacaatagatggtagttcatcaagtgaaaacataactatagaaaaacctagagatagatggtctgaagaggatagaaaacgagtacaatacaacttanaagccaaaaacataataacatctgccctgcgaatggatgaatatttcagggtttcaaattgtaagagtgctaaggaaatgtgggacactcttcgattaacacatgaaggaactacagatgataaaagatctaggatatatgcactaactcatgagtatgaatta

SEQ ID NO: 18704 - DNA, 416 bp, Glycine max
  unsure at all n locations
agcttcttatgacttgcaataaaatccanattctgaatacagcccctaaccaaggctatgggaattgaggaatttttacaagaattccattaaaatcgaatatataggcttgaaaaaagaagaaccctaacaacttgtaaatcatgaaattttgtaagttattgggtacttatagctggtcaaagatatatcgcaaagcatgtgcttaacaatgcttgaggactagaattttcgaaaaaattgtcagactacacattctctttcttatctttctctaaattacataagtttgttaaaaaatttccaaaatgttcactaccccgacttccctacagggccttttttaaaattaatttatatgtttaaattnttattntaattntaaatattaaaataatataaatattatagtatat

SEQ ID NO: 18705 - DNA, 458 bp, Glycine max
  unsure at all n locations
tttgtcactctacccatatctgccttgacattaactatacttaacatcgccgacaacaatgtcaaggaattcttgcacctcggatacaaaggcttctttgaatcagtttgcaatgtaccatacataggggcatgtgcttgctgaaaagactcttgtccaaggtcacaaatcatatcctccaagcgatctctcatttctacatcaaatgattcagattgggatccactctgcatgtctgtcaattcaccatgtcatatccacgttgtataattcttcttaatcccatcacacaacagatgctcccgtatgtcatccaatatttgttgtctcccattcaaacaatttatacaaggacaaaaaaaaatttcgtcctcattcggttgacttctttaggaggcaaattgcaagaactctntgacgccttcctcatatgcagggctcatgtgactntcgttcat

SEQ ID NO: 18706 - DNA, 414 bp, Glycine max
  unsure at all n locations
agtttcttcatcagaccacttccagggtgctggaactacttcacatggatttgatggggcctatgcaggttgaaagccttggaggaaagaggtatgcctatgttgttgtggatgatttctccagatttacctgngtcaactttatcagagagaaatcagaaacctttgaagtattcaaagagttgagtctaagacttcaaagagaaaaagactgtgtcatcaagagaatcaggagtgaccatggcagagaatttgaaaacagcaggttcactgaattctgcacatctgaaggcatcactcatgagttctctgcagccattacaccacaacagaatgggatagttgagaggaaaaacaggactttgcaagaggctgctagggtcatgcttcatgccaaagaacttccctataatc

SEQ ID NO: 18707 - DNA, 465 bp, Glycine max
tatccttatggctggcctccggacttcaccccccgttctaccccggtttatttaagccaagcccctactttcgaggggcaactcccaccttatgaagactatcccgggcaagacaatgaggaaggagatacccatcttagccccctgctccacctcaaagatccgtccccccatgaactaccccaaccaaacatagtccgccatatcccgacttcacccacacccgtaaaagaatctgttcccttcgtggaagataagggaaagattgaggtgcttgaagagaggttgagagcagtcgagggcctcggcaattacccattctcggatttagcggatttatgtctcgttcccaacatcgtcatccctcccaagttcaaagtaccggactttgataagtacaaagggacgacatgtccgaaggggcatcttcggatgtatttatcgaaagatggaggcgtattctgc

SEQ ID NO: 18708 - DNA, 412 bp, Glycine max
  unsure at all n locations
tgtttgcagaggtcggtggcagactcaagaataatggaatgtgtagtggctttgtctcatacctccattacacttcatttgtacctgagcttgcttccctatttttattaattttgttcatgtttatgtgtgagttgaatcttccccgcgaggatcaaaagataaaaaaaattgtaaatataagaatcaaaatgaatgtcttaaactatagggactaaaaaaaattatcacaactataaggactaaaagggtaattaaatcaaaattaaataaactagagcaaaataatggtggtgtggttagacacttttaatcctaattgtctccttgtagacatatatacctctacatatgtgntgcatttgcaaccaccaccattagtggaaaaaaantttaaatgcaaacccttcta

SEQ ID NO: 18709 - DNA, 450 bp, Glycine max
  unsure at all n locations
tgtaagatttgcaagatcatcttccttgacaacttccttgaaaaagattgccgtcaatatgaagagagaacaatttagagagtgatcgaagactttcaaatggatttccactgaatttattcatagagagatcgagatatcttaatgatgaaagttttccaaatgatctaggaagagcaccaccaattgagttgttggaaaaaagtaacgtgtcaatatttttaaatgccccaatatgatctgtcagattgcctgaaagtcgtgaactctgaactgcaagtcttgtgagtccatgggaaatacaaggagcaagaatttctaaaagttcattaacctgttggttgagtttgagatatgataaatctatcacccttaagttgcagagattacccanagaagttggaatgtttccttcaagttgattatgtgataaatcaagttcaacaagag

SEQ ID NO: 18710 - DNA, 406 bp, Glycine max
  unsure at all n locations
agctttagacaacttgttgtaatcgattacgacaactctgtaatcaattaaaatagagagtttttgctccggaagaaactttttctaacttaaaaagttttcttctcactaaccatgatgatgaataatactatgatgcaacacacaaaataacaaccaatacaaatgccactcaagggagttaggcatgtaaaagttaaaacatcttcaataacttcttcaagctttccttgagagattgttcacaatgttgctcatgtcatgttgctccccctatctctaataactagtgctccccattaagacacattgngtctcanaaacggcttatccaaaaattcttctaaccattntntaagctcggctaactctataagagacatcctataaggggctatgaatatgg

SEQ ID NO: 18711 - DNA, 449 bp, Glycine max
  unsure at all n locations
tcaccactaagagaatgagaatgagagagggagtaagtggcatggaaaattgaaggaagaaagggagagaagtggaactttgaagtgtatctcacaagtttctcattcataaaagttacaaaaagtggtacacatgcttctatttatagcctaggtagcttccttgacaagcttccttgggaagctagtgttacacctgttcaatagctaagctcacccccatgccaaaatacatgaaggaagaaagcttccttgagaagcttccttgggaagaaagtgttacacccctccaatagctaagctcacccccatgggaacacgcatccctccaatagctaagctcaccccccaaaatacatgaaaatacaaaaaaaagtccatactattgagactactcanaatgccctanaatacaaggctaaaatcctatactaccaaggtacccttaa

SEQ ID NO: 18712 - DNA, 368 bp, Glycine max
  unsure at all n locations
tgtttttacggtggcaagggcggnggaacgagagactacgcgtgatgggtcaagttcgtccagatctaacaaattgggctatgggtcaaaccgatttgggtcgtctgggcccaataagggagggatttctgattgggtgttagtgaaggggagtaaggaagcaacacccagaacaaatggacctgggccccgtggtgaaaggccgggtcaacccgaaagaagaaatgggccaagagataggggatttacccagctttcttacagcgagatcatggagaggcgaaggataaatcagtgtttcaaatgcgccggtccgttcagttcaacacaccaatgtcctgacaaaaacttgcgattgctaatcaccg

SEQ ID NO: 18713 - DNA, 441 bp, Glycine max
  unsure at all n locations
tgtgtctttgtttttatattttagaaggggattttattttatttttgaatacgaataacataaaatttgcacgaatttaaacttaaaatcattccaaacataaaaataacattacattaacttcaaacttcaaacattaaacattacattaacttaaatagagttgaaagaaataaaattagcatcaaatacgacaactaagtgatgctaattttgcgacaaggacatattatgttccatttcgattacatgcttactaaaaacaactaaaatttctattggcccaatttttttccagtagttagaatgcactaacaccttcaactgtcatcgttgttttcagttcaataatttcgaatttgataattntatctgaatactcatagtgacttggttgtcgaaaaaacaatcgccttaccgtttgtgtatcatgaatatcat

SEQ ID NO: 18714 - DNA, 409 bp, Glycine max
  unsure at all n locations
ttatcccatgcttctttggccgtcgttgcgttggatatcttctcaaatgtatcttcatccaccgattgataaatgagaaagagagctttcttgtctctctttcttgactccttcaacgtctcctttacaccttggcttagcaaggcttcatcttgctcctcaaagtcattctctacgatatcccacacatcttgagctcctagtagcgccttcatcttgatactccaattatcatagttgttctttgtgagcatcggcatttggaaaggaaaacctccattcgccatcttttgaggatcttgaagctctgataccactntgttggaaataaggctntntatgtttaggaaaagtgtttaggaatattggagactntgaatagaaacttgataggaaggagaattcttta

SEQ ID NO: 18715 - DNA, 464 bp, Glycine max
actcagctttaagaggctttttgaaagtagatccttttttccacatccctcttttaactaaattaacctccttaaaaataattacggatgaaaataacgcaacaagtaatcaaacatcaaacataattactaataatatatagatatatatatcagggtgttacacatacattttacatccaagacaaagtgtagatttctatgtgtaactgatgctcttggcatttcaatctaacaccctaagttgttcacaccttccaaatcatggttatacatgcacaaactcatttgacaataacacatgtaatggtcattgatgcatttcaccgaacagttggtgggcgcatgtttaaacatgtaaaacatgagggatggagaataatatgacatgcacatgcatagtacgagcaaaggtaggcatatggtcatcccttacagcaccaatcaaacaatcaaagcatgga

SEQ ID NO: 18716 - DNA, 154 bp, Glycine max
agcttggacataagagaactagtctgtcactcattagagaatttttggatgctcatcatatgcattagccgattaatggactaagcatgatgataaacctatctcatgtgtatccattgactatgctactcattctcatgcatacatactgtat

SEQ ID NO: 18717 - DNA, 431 bp, Glycine max
tgtgtattcctgcattctactaatatatggtattgtttattgcttggcctgagaataacaatcggttgaccacaacagcgctgggggcggcaacggacaatggtctttcaaataaacctgctgtacatgaacaaacattatatcatgcgctgaccgtgccaaacgaacaatcgaagtcattgcataattggtacactaactatattgaatgtacctgaacaaaatgatatacaaacacgtgaccgactcatatgatgcggtggccacaagagtcacgaggtggttgacttgtaatagggaaaaatgatatgatttgtagttgggacaacgatacaaggattacgtgataacgtgaagcattcacatatacgatgtctgatatatccatacactatgacacactaacctgaatgaaccacacatacgcatgt

SEQ ID NO: 18718 - DNA, 399 bp, Glycine max
agcttgggaggattgatggggacccggtgttgagagaaacaaggatatgggctacgtgggagtacgtgagctcaattggaggtgggcaacaggggatggtgggtttatgcgcgctttgtggatgtggaaaacttgttgtgcaccatcgcccgaccgccacctagtaccacatgtgatgggtaccccataatcctacaagtttgagatgagcaagtgtagaagggtgaacttcctgcttttaatcgttgaccacagagtggtacctggagatatgtcgcggtggtcaggagaccttgtggacgtcacgtggggtgctattgcccaaaaccaagcttgaccaatcccgacccaacccgggcatagtcagtcagtgagaacctgtgatgtacctaaacaggc

SEQ ID NO: 18719 - DNA, 462 bp, Glycine max
  unsure at all n locations
aaaactcccgctnttatctagccaagatcatacaaaagtgttactacatatcctaacggtttctaattatatgggccatcaaatctatcatgtgttgacggtaattgattagcccgtgaatttcctcgggggttgtacacacttcagcgatggcctttgctttgactagtagtcgcgggaggtcttgacttccattcaaggtcaaggcgaacctatccatccacatggtcgcttcttgatgtaatgcatcaatcaccctccctcttgcttccttctcggcgtacgcttgcacaaaatcttctactagcttttgttcatgggtcaaagactggtttaactcttccttgtactgccctatgatagctagcatgctttgctccatggtttccaagtgttgagcctaactcctgttggatctagagcaagcagctaactctttctttaagatcatgccatgcaccc

SEQ ID NO: 18720 - DNA, 405 bp, Glycine max
agcttatgactcttggcaatttctttaaaactaatcacttaaaaaagttgtgacttttgaaaaaatcttcagaaacaagtcacttgaagaattgtgacttttggaaatgtatttttcgaaatcagtcattggtaatcgaataccatttaggtgtaatcgattacacatcaacaaatgtgacttttcattttgaattttgaaaatcaaaatgtttagaaacactggtaatcaattacaagtattgtgtaatcgtttacacaagtttgaaatgatttgaaactgttgaaatttgaaatctaacgttttaaaacacgtgtaatcgattactattatctggtaatcgattaccagagagtaaaactctgtggtaatgattgtgtgaaaacttcttgcgctactcaatgt

SEQ ID NO: 18721 - DNA, 448 bp, Glycine max
  unsure at all n locations
tctagccaaatggacttaccttgaattaattcctttgatttcccttttgagccttgtttccctttccttgttttgaagctcactacaagccttaagtgaaaaaccatgatattaccatatccttaaggaattttggagctttggaattgttttgggaataagtgtggggggtttttgtttcattggacaacttgttttgttggctatgcttcatgatgtattttgggccatacttgatgtacattgtatattggttaaatgttggacatgctgaatgaaatgttgtttctcaaaggctaaaaaaaaaaaaaaaaaaaaaaattcgaaaaaaaattcggaaagaaaaaaaaaaagaaaagcaataaagttgagtgaataagatcttaaatggcacaagaatgatgaaactcttggttctactcttcatgtnntaattttatcccttctt

SEQ ID NO: 18722 - DNA, 414 bp, Glycine max
  unsure at all n locations
agcttattgtttgtttccatgttcaaatcaaattagtgttttgaaggttgttcttttatcaagtccatgcaaaaacatctaaattcatttggttatttgggaaatccattcattgcttccattctcaatgttttaaaaaaaaaatcactttgttgtgttctgatcatcaaaagtaagtttcaaaaacattggttgttgattctttccaaagaatgttatgtccaagaaaaatttcatgattaagtcccaaaaagagttatatataatctacaactacactaacgtaacaaaatatatcaaagcacgtgtaaatcagacaaaaagacaatctcgcataagttttcaagcaaaaaatccaaaacaataaataagatactaaagtactaaaaattntagtacaaagcgataaataaa

SEQ ID NO: 18723 - DNA, 452 bp, Glycine max
  unsure at all n locations
ntagccgctntaaactctgcatttagttcatcatcttggtttaagacttttactcctaggccatctggaagaggtcaaggatcacaaagagctgcagcagtggctgctctttcacaagttcttacggccgaaaagaaaaaatcacctgatggttctcctgttgctagcaggagtcctatcactcaaggtagcgctactggtaagaaaaacagttcttgtctaaatatgatgttgcattccctgaatacaatgggttggctgggttgaatattttactacaccctattactttggtttatacttttgaaatttgaataattaatataatcctttttgtttagttctaattatttgatattttttaatcataataatagatactgctagtaaactactaagagtggagctctaagcgctacattgatgtactactaaggggtttattgagattc

SEQ ID NO: 18724 - DNA, 411 bp, Glycine max
  unsure at all n locations
agcttagctgaattcaaatcaaattgaagttagcttagcttaaccttggccaacttagcggactaaatcagccttagatgcaagggttgggcgctaagtgctcaagactcgtggcttagcacatgaacagagatgcgcttagcgcgaggcttgcgcttagcagaaggactgctttttttcagaaaatattttctgagttatttttcagtcctttttccatgaaattgaaacccttatgttaagcattcaaagataggctgatatactcctatgtacagcttacatagcaagttcctaatgatcaaatgcatganaaacaaacacaacanagattaaaactaggttgcctcccaggaagcgcttctntaacgttattagcttgatgcttttacctctctgggaaatctcatg

SEQ ID NO: 18725 - DNA, 463 bp, Glycine max
  unsure at all n locations
tactttagctagatgggtcgattgccaaacataaagctaggctggtggctattggattcatgcaacaagaaggtttagactatactgaagtatttgctctagtagcaagattggagactgtaagattgattgtttccctggctagctggagaaattggaaactgtggctactaaatgtcaagtcagcctttctaaatgggccacttgatgaagaagtttttgtggtacaacctcctggcttcatatgtaaaggtaaagaacaaaaggttttgagactgaagaaggccttgtatggcttgaaacaagcacctagggcatggaacaaaaggattgattcctttctcactggttttggctttcagaaatgctcagttgagcatggtgtgtatatcanaacagtaagtgaaactaagattgtggtgctatacttagatgatgatgatttactcatcactgatagtag

SEQ ID NO: 18726 - DNA, 395 bp, Glycine max
agcttctgagggtgcctattgtgtgctgctttttttttatgcaaattcccttacgaatcatccaaattaaggacttatcataacttgacaagtgtaccaaatttgtcacaagtagtaagggactctgcttgtacttggattaatgcaaatcaaatttaaaagcaatggataaagaatttaaaataaagataaagaaatatattagataagataaagatttaaagatgaaaataaaagatttaaattaaaagatgacaaagatagaagataaagaaaataagaaagataaaagattaagataaagataagataaaaatagaaaatatgataaaataagaatgtgataaggttgggacctgacctgccttgtttgcctaggatgtatgagtttatga

SEQ ID NO: 18727 - DNA, 458 bp, Glycine max
  unsure at all n locations
ttcggctgctgccaaacctttcaatccaggaatgttgtccttgtctcaccatctaaattcagcttccttcacaagcatgtatgatacagatgttagtcaaggcatgcacgtggagcctgtgcttccccctgctgttgctagggtcccttgtgggcctagatcacctctgtattatagaaccaactatacttttcgcatgaaacatggttctactaaaggtcaaacctctatcaaagaaagaagtggatttgggtctccaagaataatgaatccgcatgcgccagagtttattcccagaagtgcttctcaaatagaagccaaggatgccaattcaaatgtttccaatgagcataaccctttgtctgacgaaggcatgccagaaaanaacaagctagatgaaaattttgttgaaatcaaggggagctccacaaaatacagtatttctgaatctgagaagt

SEQ ID NO: 18728 - DNA, 406 bp, Glycine max
  unsure at all n locations
agcttttcactctatctatttttattaaaactcacataagacgataatgtgtatctattttaagaaaaaatgaaatttttaaaaatactattcaaccttccttgtgttatttgtctatgcacaaataatgtaaggacataaatagctcactagaaatgaagcttccatttgaacttcatttgaaatatataatttgtctttaaatacaaagaaatcacgttttctcaaaaattaataaataagtaaaaatgaaaatgacaaaacaatcttgttcccttttaattnttctttctccttttcaccttttcactaaatcatgtatttaattaatataattaattatgtaataaaaataaaggcatcctanaataaaggtctagtaataatcactttagatgcacttctg

SEQ ID NO: 18729 - DNA, 467 bp, Glycine max
  unsure at all n locations
tcaattgcagggatggttcacaatctttaccttcatctgcctcgaaggtatttatgccttgtaatacagcccgaatctattcttctggaaacatcccatatagctaacgagggtagaccctatcagcaaccatcttgatgtcagttgccctagatatatgtagactaggagggtatgtcatggcttaatcacacaattacatttgttcatgtaactggcatcagtcttataattggcgtcgacaggtgcaccttctttttgaattgaaccttaggatgttccacttcttgcaaaggttccttgctttgtttgccaaatagttcttgagagatactacattgggagttcttctggtcctttntttcttcatattgcaccaagcttatgaaggagtcaccttagtggagggtcaaacccactattgagtgccaagtgccagtcactgaggaggcatcttgaaaacaaat

SEQ ID NO: 18730 - DNA, 395 bp, Glycine max
agtttgtggccttgttagttctggttgctcagtgagggtggtcattttcttttattttgctgtataatatggccaacaacagaagccaaaatgctaggaaaggaaatcctaatgaaattgctatgactgaactgattgtgtggaatggggtatatatagttttgtaatcaagaactaagcacttgcatataataataataataattttttttttgctaaggcaactagtcccctggcttccattttgttggggttacaaccttgaagtttgaggacttttgccatgacttcatcaccttcaacacttcatccatgttcctcctagtagttgcaggtagagaaatctagcttgatctacaacactcaccaattaatatgttagcctcactactgaa

SEQ ID NO: 18731 - DNA, 455 bp, Glycine max
  unsure at all n locations
tatgagacacaatctttggaactgaatatttatttttataaatcaaaataacaagggtataaattcttctcatgactcaacaaccctccccatcaaaactttcccctctttccctcattttctattcaaaaaaccttcatcgttaccaccactagcggatgcaccttctatgttgtgggagcaattaccccaccagatttttttttatttgttaatgtatataaaaaaaattccctcataaaaaattatatattgccccattgaattttttttaactcacaaacaaacataagacattcaatacaaaaattacatgctcaagcccaaatcatttaatccaatttcattattgttatagtaacacaaaaaaaaaacaccacacactacacggagcacactgtttcatgtaacatctaanaaataatccaataattatttagataaagaatatctaa

SEQ ID NO: 18732 - DNA, 402 bp, Glycine max
ttcttggatttccttttagtagggaatctatccttcctaagatggagccaaacccagtcaccctcattaagaactagctcttttcttcctctattgcctttagttgaatacacctttgtttggttctctatttggttcttaaccctctcatgcatcttctttacaaattctgacctagattccccttctttatgtataaaagaagtgtccagtgggaggggaatgaggtctaacggtgttaggggattaaacccatagacaacctcaaaaggggactgcttggtggttctatgaacccccctgttgtaggcaaattctacatgaggaagatactcatcccaagacttatggttgcctttcagaagagcccttataagggcggataaagacctattcactacc

SEQ ID NO: 18733 - DNA, 441 bp, Glycine max
  unsure at all n locations
tgtagggatagtagtaggcattgttgcattcatttgttacttggatcggtcacattcacatatatgaagagaaagaagctcgcaaagagaggtgagtttatgaaaaagtagaatttgacacttaatgatatactcaaaaattagaatgtaaattaactatgagaatgaagagaagttttcaattcttaagtctcattcatattcttccttatattaaattgtgaatgataccaaattggtatctcctacctttatttcagagatgctaaaaatatttcactggaaatacaaaagggagaaggaagatgtggagttatcaacaatatttgatttttcaaccatctctaatgctacagatcaatcttcacccagtaaaaagttaggagaaggtggctntggaccagtatacaaggtagttaaattntacatcaaataagcttc

SEQ ID NO: 18734 - DNA, 397 bp, Glycine max
tagtttacaaaaacaggttctgaggatcttgttgatcctaccttgtatcgttatgtggttggtgctctacattatgctactatcacacatccaaaaattagtttctctgacaataaagttttccaatttatgagtcagccaacagaacaggattgggttgctgtcaagagaatccccgggtatctaaagggcacacttcattttgggctgaaactggaacccaatttttctacaaagcactactctgttcatgccttttgcgatgctgactgggcttcagaccttgatgatcgaagctctacctctggggctgttgtgatcttacgcccaaatcttgtctcttggtgatccaaacagcaatctgttgtggccaggtccagtactgatgcagagtaca

SEQ ID NO: 18735 - DNA, 453 bp, Glycine max
gtcatcctatccaaaatatccaatgcttccttctacttgactctctcttacagaaactttgaatgacagatgtataagtgacaacatttggagtacaaactccacctttctccatttcatccaacaattgcaatgctctttccatagacccagacctacaaaagccatctaaaatggccgataaaatcaccaaattgggcgaacatccatgtagtctcataaccttaagcacagagtaggcctcctcagatcgacccgcgttagagaatccctcaactattgccatatacgtaataagatcaggacaaaggccattggaactcatctcactggtcaacttcagagccgtttcaatgtcacccttcttgcaacacaaccttataaccagattatacatgacagtgtcagcgtggaggttgaaagtgtcctccatcttcctcaacacccacagag

SEQ ID NO: 18736 - DNA, 399 bp, Glycine max
tttttgtattgtatatagcatgtgcctaccaaagaagataatgggcgagttttcttatgcgtattgtactatccagcttgacctttccaagaaagggactttggcatttggtaattttttggtttcattattcaaatttaacttattcctcattgctttgaaagaaaagcaggtgaatccaattggctaaggttcttatccacttccacatgtggaaacgcggcaaatacacattgaatgcacaaaaagttgattgaatgtgatgtgtggaaaaaaagacaaaacgaatacttaaaatataaatactcataaaatttaatgtcagaatatatgaaattaaagataacgttgatatcacacaataatgatgtttggtacatataagtaataaaatgtgct

SEQ ID NO: 18737 - DNA, 453 bp, Glycine max
actcagcttttatgtaattatcggattcaagaagaactctatagttttatacatttaaattgaaattctggtaacatttaaataacatacaagttcagtagaatttctccaagcaaatgaatattctaaagtatattcagagaaatcttgagtaaaaaactgctacttaaattgtagtgtaaagttttttaacccactatctttgttcattggcaactagtataaaaatcattcacatacttaaaccaatatcttaaagaagttccaagtaaacagtctataaggaggtttgagtaatgatgacacgatgcagcagacgcaaggcctataaaaaaatgcagtaagcgtaagaataatttactacaaaacatatgaagcttactagaatgttaaaaacagaaccgcagaacatctaggaggaggttgtaagaaagagcatgatgaagagagtca

SEQ ID NO: 18738 - DNA, 255 bp, Glycine max
tgtttacactgacacgtactgaggattatattgatgcttccttgcgtggatatgtggttcctgctatacattatgctactatcacacactgaaactttattctctcagaacgtatagcatttcaaattatgagtcggccatcagaacacgattgacatgttgtacagagaaagcccctgtacgttaagggcacactagattttgggctgaaactggatcacagattttacacgagcactactctgtgctatgcct

SEQ ID NO: 18739 - DNA, 500 bp, Glycine max
  unsure at all n locations
agcggctggttattatgatacatcgaattccggacctatantactcagctgtattcttccgagactacgggcagactggacatgcctctcttacagacacatggtgtgacagatgtatgagtgacagcttttggtgtccgcactccacatttgtccatttgatcttccgaactccgatgctctgtccataaaccgcgacctactatagccatctaatatggtcgataagatcaccagagagcgcgaacatccacgtagtctcataaccttatgcgcagagtacgcctgctgagatcgacccgcgttatatgatcccgcgactatggccatatacgtcgtaagaccacgacgacggccgtgctaactcatctcactggtcgcctgatgagccgcatcagtgacgcccttcttgcgaccaaccttgtaccagacatacatgatactgcagaggagagttgaagtgtgctcatttgctcatcacgccagagccatattagcag

SEQ ID NO: 18740 - DNA, 401 bp, Glycine max
  unsure at all n locations
agcttcatgtcattcaaaagagactacgttgacctaaatgaagactgaacatgcattgtttatctaattgtattcattatgcgatataatttgttataagccattaaaggataattattaagtactcgttgcattaagaaaaaaattagttggtgcaaccaaaatcaattacgcatgtatgatacatcgttgtcataattgacaacacataatgatatgcatgcgtattaaagtttgagcgtgacacgacattgactgacttgacaacacattctgatgcacgacattggtttagtaggaaacataaacacgaaacatattcacgcatgttcttttgtaaaaaaatgtgaagcaatctgtcagtgagaaccatgtatatatatgagacacggaanatgcta

SEQ ID NO: 18741 - DNA, 439 bp, Glycine max
  unsure at all n locations
nttaattaattaagaatgcatatatgattattgtttgtgtagcctaatgtctctgtttggtttggtttttttctttcaatttttttatggaaaacactaaaaataaattttattgttttagttgtctctgcttcctataaaaacttttaaaaatagaaaataaaataaaataaaaattgaagtaatattttataattaaatataaaccagcacctggaaaattttgttatgtagaaataaggactattgaatatatagcacttgcctctcacttgctttggactctttgttggaccagtgatgtccatgccatgacttcccacatagtaaagttctgccaattntacaaagttatatacctganaaaaataaatcagaaagaactccaattaaatctctcaagaaaagaataaagaatcatntaatcacttccatgtca

SEQ ID NO: 18742 - DNA, 401 bp, Glycine max
agcttgcagacaaatcttcgttctggtttaatcgattaccctatttccataattaattacacaattctattgagaccatgtctatttcttgggtctctgctttaatcaattatgagggtatagtaatttattacattgttcttgaaagtattttcaaaagtgattaagaatagtttaaccgattaaatcaagaatccaatcaatttacattgttcttgaatgcttttcatgtttggggaagaacactttaatcgctttaaatgagaatctaatcaattacttcttcgagataatcgattacattggcaattcaattgattactagcgaatataactgtgtcctttctatatagccaccttgtgttcacactttcaacaatgattaaagaacgagctttcac

SEQ ID NO: 18743 - DNA, 425 bp, Glycine max
  unsure at all n locations
tcttatccaaggcaattcttggtggtgaagctccttttttcttggcttattccctagtggatggtgcctcccctatcctcttctcctttgccttccgctgcatctccatggtgaaaaatcaccattgaaggacctcattgaagctcaaagatccagcctccatagaagctccacaagcaagcttccatcaagtggtaataagagcacaagagcttcaagtaggtgctccttaaacctccattaattttttttctttaccttctcttccattgttgtttcttcatttttctccatgtatctcctcacatgtcttgttctaaatgatgttaacatgattctttagagtttccaccgattaaacttgctatagaagctagatttgattntctatggttcaaatntcttgttcttgttcttgaaccatg

SEQ ID NO: 18744 - DNA, 415 bp, Glycine max
agctttgatggtgtcgagaagaaatcacatgtttgtcatcatcaaaaagggggagaatgtgaatgtatgtatacatgattttgatgatgtctaaagaagaatcaaacaaggctcattttgcttcaagattaatacaagattgtttcaacaaacaaagccttgattcaagatttcttcaagatcaagccttgcctcaaaatgtagagatttcaagtcatccaaggcacatgtaatcgattaccaatacatgtaatcgattaccaaggcacatgaaagtgtgtaatcgattacacatcatatgtaatcgattaccatagactctgaacgttgggaattcaaattttaaatgaagagtcacaactgttcaagataaacaattgtgtaatcgattacactaattctgtaatcgattacc

SEQ ID NO: 18745 - DNA, 327 bp, Glycine max
  unsure at all n locations
tggacacggaaatatcgatatatgggacngnnnaagaggggatagctcaaccaccaaaanccaggaagaccccagagagcattttttgttagcaaggaaaggggtggctggtgaggccggagaaccacccatatgcccccgcgagggagggaaataaatactaggggaaaagaataagcggaaaatagatcaacataaaatttggaacaaaagggaaaaggggacagataaatggagggcaaggcacagccaaaggctttacgaaaacggatgaaggaacttaaaagtgaaacaacatcataaaagagaaatatgaggcgagagggc

SEQ ID NO: 18746 - DNA, 411 bp, Glycine max
  unsure at all n locations
agctttaagttttgattttagttttgatgtgcctcagttgataagtgccttcgaaaatatctagatcaatattgagaatatttataaatttcttgaatcaaattcaattagttaaatatttagttttgattcaagaaataatgaaagttttattataggcccttgaaaatagtttgaggattttgaaaattttaattgatctaactaaccaccattttggatccaggcatttttgtttaacaataatatatatataatttattatttagcagtagtaactagtaaatctatgtttaacgttggtcctactattcaagttaagtttgtttatttagtaatcataaatatattttctttgatccatgaatgataattataatgtatataaattanatacgtaaataattagat

SEQ ID NO: 18747 - DNA, 456 bp, Glycine max
actaagcttcatgttctgacacatcttcttgctctaattttctaatacttgctcctaaaaccaaaacaagaacccaaactgacaaattccaaaaggaaagaaaaaaacattgaagttaactataattcaacctatacgaagagaaaacatgtaatttgtcctaaccaaaaatgctatacaacatgaatgcatcaccaagttacaagcaaacatttttataatgctctaatcctataaaatacgaataagctgattaggtgaaatttagcagccgattggactcgtgcctttagtttgagacaaatgacaatagtatcgaatcttttcagtaaaattgttagtgactatggtacaattcaagcataaaaacgtcgtttccgttgtttataagtcatgtcatacttttataattccatggccatctatgtcgcctaccttcatttcatccagccatat

SEQ ID NO: 18748 - DNA, 333 bp, Glycine max
agtttgcccccttctttcataatttacggaaaagttacggaagtatataagactagctttccttcttttttctcttccttaccacccatattaagagaaatatgcttattgatggatatgggaattgtaccgaagcactacgggtgttccggaagccccgaaagcccattgtgtaacaaaacgggggaggcggttgccaccttaagcaagacaatgcccatagacctggcccgattttgaagattactatttgcaccccccattctacataatacacaccctttgcccctattttccataacattacggaacctcacgaattacgtatcgata

SEQ ID NO: 18749 - DNA, 440 bp, Glycine max
  unsure at all n locations
cataaccaaacaagaccgcccaccacaacacggaacnaataaccntnccaaggggagnatgagacaacgagacaccgaaaccgcgannaaaaaacccggagacaaaagcaaacaggggaaaacacataacagcagagccccaaggaggggcgaccaaacaaacacaagcccacgaagaacacaagggaaaaacacacagaagacccgcagagcaaaagaacacacccaacagacacacaacaaaaccagaaggggacaaaagacaaacagaagaagnggccaaaaccacaaaaaacagaaaaacagaaggagaagaaaagaaagaaaccagaaaaccacagaagggaaaagaggaaagaacgacaagagcaagagaacagacaaaacagaaaacaccaagacaaaaccgacaacacgaaaaaacgggaacaaagccccca

SEQ ID NO: 18750 - DNA, 307 bp, Glycine max
agcttgtgatatatttactatatacgtgtgagacctcgcttatccctacctgttcaaaaatgtgataaatcactcctcatgtgttgcccatgtctggaacatgtgatgatcttaaaccttgcgcacgtgagagcaaatgactaggtgaatcactttaagaaaccttgtgatggaagactctgagacacaataatctgataggatgtaacattggaacaagagcacctatcgtaactcgcatgacgtatcaaacatgccattcgactttatttgatagacccgaacagactagctctaaggcacaaac

SEQ ID NO: 18751 - DNA, 443 bp, Glycine max
  unsure at all n locations
aagaagatctccaggatgtggatcaataattaacaactatttcgaaagtgcaaattaggttatgagagccttctttagggttctcaaagcgtattagaggcttcttttcaatggctactagatgtagttaagtctttacagaactgagtgaatgaactaacaatattagaaaattacaggacacaagaaatacctccattattatcagttaatggtacaagagtcttcaagtgcacatgcagtgcatacaataatcaaaatcaagacaagcacaaaacatgcaaaaagtgcacaaacatatacaataaaaaaaaacattaaaaaacccaaaaacagcctgtacagtgaaaaggtgttctcgctctccaaacctccaaacagcgaatcaagcaagcaatngattggtagtggcggatgaacctgatttcaaaattgattggtat

SEQ ID NO: 18752 - DNA, 405 bp, Glycine max
  unsure at all n locations
agncttgcgaaaagcttgccgctggagctgacccattaaccgccctaggctcttgaccttgaccttgacttgatagaacttatttttaagtgaaggcatttgaattgatcccatgttttactaaagtgaacaaaaatcggtgcgaatcaaaactccgacatcaatcatgagtggaatggatgaatgcatgaagaaatgcatatgacacaaatgcaatttatgaatgcgggagcctgggaaattatctctttcttagatacaacgtcttgtggtagcacagtgcccgacgtatgtatttaagaaggtgacacagaccctccattggtttgccaaagagaggggatcaagacanaacccgtgcatgatgcatatgcgataggcgcaacacgggaatgtacagatgac

SEQ ID NO: 18753 - DNA, 436 bp, Glycine max
  unsure at all n locations
tactaagcttgttgggcatgccgggttctacaggcgattcataattgatannctaaangtcgccaaaccacttagcagtttgttgaataaagatgttgctattttgtttaatgaagagtgtatggatgcatttaatgatttgaacaccagattagtgtctgctccagtaattatagcaccaaattgggggcaagaatttgagctgatgtgtgatgcaagtgattatgccatatgtgcagtgcttggacaaaggaagggaaaaaattttaatgctatatactacgccaacatggttctaaatgatgcacaagtgaactattctaccacagaaaaagaaatgctggtaattgtttatgcacttgtaaagttcatatcttatctggtaggctcaagagttatcatctacactgatcacgcagctattacatatttgctc

SEQ ID NO: 18754 - DNA, 405 bp, Glycine max
  unsure at all n locations
attattatgtatatgtgatttattgcctatgcaaacattttagaggttacatttttcactttttgagtccataaaaaaatattttaaatattatacttttttggataatatataaaataacattagagaaacttaatatcatggcttaataacactaaagtttaaaataacacatttttataggtctttaacactcggagtatacataaaaaaattataatacttagatctaagttacaacaatacacaataatattcattaaaaataacaatttaaatatacgataataacgaaaatgacaaatatttgagatgatttttttaaggaaaaaaccaaaatgacattgtaattgatacaagagactaaatcgaactntgtgcattatgaaacgcgcatggacaaag

SEQ ID NO: 18755 - DNA, 448 bp, Glycine max
  unsure at all n locations
tttattntgatgttagattaaattgatcgttttttctgttttttttttaacactaacattaatgtgtggcaaatgttcattttgataatggcattctctcactataggtgatcaagttagtgtaataaattgacggagatattaatttgatcttaatattaataccttgaaggattaaagcaaaatttttaaacttggataatcaaattaaaccaaaaaaatgaaggtaaaaattatatcttagccatgttatgtcatgcatgtaaaatgtaatagaaaaacgatggggaggggtgttttggagggatgagaagaaatggttgatggggaccaaagttgggttctggggtaacattntgcgtttctactgtgccaagacgtgggtggaggaattttggggaattaatgaacagcagggttggggccacctatctgtcatctttatgta

SEQ ID NO: 18756 - DNA, 338 bp, Glycine max
atttttggagatatcaagtgccaacacgacatcttcttttgaccagacatcatctggctccaattcattagcgggcctaacttcagtgaccaacatcatgggatgtacccagcctttgatgaccgctttccaagttctgctatccagagatctgaggaaggccaccatccttgctatccagtattcataacaggatccatccagaatagagggtctgtaaactgatccaccttctatcaccatgttcaacagacaagatctccctagatctcactcacagataccgagtgccacgactgataccaatcgaaattatgataccaaagccacatgacgta

SEQ ID NO: 18757 - DNA, 380 bp, Glycine max
actcggccttcttctatgatcagattgggaatgcctctaacagcacctttgtcaatgattatcttcatgcctcttaagtgcatatgtccaaatctttgatgccatatattgacttcatcttctttggagactagacatgtggaggagtaactggtttcttgaggtgtccatatgtaacagttgtcctttgatctgctgcccttcattatgacttcactcttctaatttgtcaccaagcattctgactttgtgacagttacattgagtacttcatgacacaactgactgatgctgatcaagctctcagtcagtccctttaccagcagtactttgttcagactaggaagtccttcatggactacctgtaccattccagtgat

SEQ ID NO: 18758 - DNA, 473 bp, Glycine max
  unsure at all n locations
cgacattctagcaaacagcaaaganaccgcaaggacctgatgaccgccgacacgcaaacaaanccaacaccgtggctacggtatgagcatcacaatgctaggcgcaaggactaccggaagccagaaacacgacaaggctaaaaganggacggacgaccacctgcgacgagacgaacaggcgcaacatacgagcaacatacgcggaactggacacgaacgcaacaagacaagaagacgcacgccgacgacacgcgcgatcataggaaggcgagcagaccaggaaacagccataccgacacaccgaaacaagcgacaagcgcgacacgaatggacccgatatccagaaactgcacagcgagaccagagacacaccgaggagtgaggcagatgacaggcgcatgaccagcaaacccgcgacctgatgacaccgcgaagacaccgccactggactggagcacacggacaacattgcc

SEQ ID NO: 18759 - DNA, 656 bp, Glycine max
  unsure at all n locations
gaggtcaactgtacaggacacntgacgcaaactcacacacgaccnagacgacgttnacnnnannnannnannaagaggggagngcgnatgatgacgatcggtagcacctncggngacactannagaanacnncanagcgaggccgcgaggaggggcgcgcncncagacagagcgacacagtaataagcaagctcggaacggcgcgcacgaagacgacgcggcacgcggcagagcggacacgaagacgcccgacaacaccgacgccaacaagacagaggaggacaggccagccgagaacccgaagccgagacagacagcagcagtagacgagcacccaacgcgcgacgacaggacggacacaagcgaggcaggcacctgagcaccaagaagccctgaccacgaaagaaggaggccaagaggggcagaagggagcacagaagcgaggggacccacccgacagggtataaccgggggggaccaggggaatagagaaccccaaacgcaccacggaagcgacaacacaagagaagagggcgacccgagacgcaccaaccagacgagagcacgaaccacgggagcgcacaagtgaccggcgcaagcgaagccacaagaaacaagagcggcacacaatgaccgaaccgacccgcgactcgccg

SEQ ID NO: 18760 - DNA, 388 bp, Glycine max
tgtctttacctcatcgtctctcacagcctttagatttgggagccaatccagtccttgtgttcggactctcagccacttacgatagccgccgatgatcccattactgcttcccctaagctctctgtcctttcttcacgccgcatcccatgccttgcgaactccttggagtaccctcgcgttgtggtcactaaaaccccgtgcgatgaaaggcgtgatgctttcgtctaatggcgctcctctcatggggtagccaagctgtcttatggcgagaacgggattataattaatacaaccgcttgttcccatcaaggtaacatttggacatccttcgcatgaagatagtatcttgattcttgcctctttctagcgagggaaccaataaacagac

SEQ ID NO: 18761 - DNA, 425 bp, Glycine max
  unsure at all n locations
tctatagaaggttcattcctaatttctctacatttgttctcctctcaatgagctggngaagaagaatgtggcatttacctgtggtgaaaaacaagagcaagcctttgctttgctcaaagaaaagcttactaaggcacctattctagctcttcctgacttttctaaaacttttgagctagaatgtgatgcctctggagtgggagtcggagctgtattgttacaaggtggacaccctattgcttatcttactgaaaaactttatagtgccaccctcaactaccccacctatgataaagagctctatgccttaataagagctctccaaacttgggaacattaccttgtttccaaggaatttgtcattcatagtgatcatcaatcacttagtacattagagggcacagcaagttaaacataaggcatgc

SEQ ID NO: 18762 - DNA, 397 bp, Glycine max
agtttaatttcaatcaattcaaaattaaatggggttaagtggggaatgatttaaatattcttaatcgaactcttattaaacaataatgatggtattatattctattaccaggacaggtgtatcattggctttccttgcctttgcaagagcgcagattttctccacctaacgtcctaaagttgcgcctattaatgttcttatctttgcatatatataagtattgttaatgttatttttaatttaaattagcttttttttaataattactgtcaattttcaattataaaaaaatgtcaattttgacaaataaaaaaaaaagaatgacaataacggtgaaatgtttatgcgggttcacaataattaaggatctagaactaacttttatcttctctttagt

SEQ ID NO: 18763 - DNA, 461 bp, Glycine max
  unsure at all n locations
tgtcaattctcttgtgcagctcgggatcagaatgtgtatcaacttgtggcggagcaggagcagaatcataaaacggagatggaacaagaggaggaggataatgcgaagggtatgcaggtggtccttggtgctgctgctgctgctgctgaagtacaagatgaggcgggggaggggcatgagggtgtaatcgtggaagtggctgttgctgctgctgcacggcaggatgataatggaattgttgcataggggggtgtgcatgaccaggacctgtggggataaaaggagaaccgngcattgacgaaggaaactgctgatgctggcgatgaaatccaaactgctgctgtcgttgcatattagcagcttgtcgttgttgctgagcatatgccatagcagatgcagatgcataatcatgaccctggcgctccataacctcaacagcacttaagaagtagtattatctt

SEQ ID NO: 18764 - DNA, 410 bp, Glycine max
tttcatgcaagcttaaccaccaagcataagctatacctcaaagtttaaccacttggcagaagcaacgaggcttaaccatcaagagcagaagcaaaacaacaattcaatgcttgaccatacatgacaaaagcttaaacaatgcttaatcaccacatacagaagcttacatcatcacaatagaagaatcacaaaatctggcttctatgagaactttttgtgacaccctctacccctcacatatatactgataaaggaataaaaatctaaatattaattaatagtatctttaaatacaagcctttcaaatgggtaaaaggctcatattcactttcttctacatcatattcacacttgtccaaataaataataaagatatctcggtttaagcaagaccgactaagacttcatac

SEQ ID NO: 18765 - DNA, 433 bp, Glycine max
  unsure at all n locations
ccgcttcataggtggaatatgaaccaaaagattatttcatgttctncnagnatgactgccacattgtgtggaatttggcttctccaatttgcatattatggcaatcacttcgaatctgtaaaatccatgcatattgatagcttgcaaaatctaattagtggaagtaaagggaatgactactgtcaattctgcccccacccccttttttccttttctttttctaagatctattttggttcatttgtgtatcacttatattgggtttttcgttcttacagcttcagaaatgaaacttctggtagcaaatgaataatgaaagaatntctgatggtggcactaagagccacaagagaatatcctagggtctaaaagtctactacagagaagataaaatgctgcatttaagatatccgtcattcatatgtgctccaca

SEQ ID NO: 18766 - DNA, 400 bp, Glycine max
agcttattccaagccacgattgatcagatggatactgctgcttcaagaatttgatttagtcatcaaggacaaaaaatgttctaaaaatgtggtagcagaccacctatccagattggtgaatgaagatgtcacttcaaaagaggttgaaataagagataaatttcttgatgaatctttgtttctgattgcagggagaccctggttagctgatatggctaattacaaggcagcaggtgtcataccaaaagacctcaattggcagcagagaaagagattcttctatgatgcacacttattcaaagtaagtgtagataatctccttcgaagatgtgtgacaagtgaggaggccgacggcatattgtggcattgtcacaattcaccatgtggcgggcattatggc

SEQ ID NO: 18767 - DNA, 445 bp, Glycine max
tctcgtcatgactgttggattaaggcgatgcttactgtgttacatgctcttcaacagaaccaaacttggactcttacctctctaccaccacataaaacaaccattggttgtcgctaggtttacaagataaagtatcatgttgacggctccgttgaaaggtacaaagcacgcctagtcgcgaaagggtatacccaaatggaaggtttggactttctagacaccttctctccggtagcaaaactcaccactgtgcgtttactcctcgccctaactgcacttaataattggcacttacgacaactagatgtgaataacgctctccttcatggcgagcttaatgaagaagtctacatgcacattccttagggtctttctgtggataatcctcatcttgtttgtcgccttcaacattccttatatgggctcaaacaagccagtcgacaat

SEQ ID NO: 18768 - DNA, 658 bp, Glycine max
  unsure at all n locations
gatcgagacacgngtcgtccggttaagcgagatacacgaacagacaaaggaccaccaacnannaaagaagcagganttgagacgcngntacggcannggncaacaacnnaaancgcaggcgccganacaanacaggcncaccggcaaacacaacaatgtttgcaagcaggacgaancncccacacgcggaggaggacgacacagcagcaaagacacgccaccgcacngacancgcaacaacgaaccgaagacagaaaacacagcgaagaagggccggcgagaacgaagcgagacgaacaccacanaggcaacgacaccgacgcgcgacgcgacnacagacaagagcaaccagcgcagcagacggaacaaacaacaacaccaaagcgcgcaacacaacganacgcgggcgacaggagcagacggacngacaaacaacgnaacggaaggggcaccacgaaagaagaagcaggaggcacgccaacaccccacgaaaacaaaggcgacgcaacacaacaacacggaacgacagaagcaacccngaggacaacgcacaggcaacagacggcacngaagcgcgagngccgcagacacggcaagagaacggacgacggaccgaagagcagacgccaaacaacagcgacaaacgaggaagaggccc

SEQ ID NO: 18769 - DNA, 492 bp, Glycine max
  unsure at all n locations
ggacgttttatgtgcttgtttccgcgcctcgaatctaagtgggaccgggtcccagactatatcgaccgacgatttattgggaccatggtcccagactaataatcagaccgacgatacgagtgggaccgtggtcccagtctgattatcagaccgacgatacgagtgggaccgtggtcccagactaataatcagaccgacgatacgagtgggaccgtggtcccagactaataatcagaccgacgatacgagtgggaccgtggtcccagtctgattatcagaccgacgatacaagtggaacagtgggcccagagagaatattcaggccagttatgctttctggcctgtaacaaaggacattaagtaaagacagataaacgtagactaaaacgtggtcgcatcagggtgctggctnttcaagttccttaagaatgggcctcaatttctctatacactcagttggaacacgagacctgtccaggttaagcaccattt

SEQ ID NO: 18770 - DNA, 412 bp, Glycine max
  unsure at all n locations
agcttggttcaaccccataacccagagaatggcaattttgatcgccaatacttcaacaacatttcatagggatgaaagactcgagaatacgcatgctatgcatggaaaatgtaattatgagattgagatgcccgaagagacatcctttcttaattaaccacgcattaggtaccatgctcaatcattttgttttgttgtttgtgtgtttttttttttaattttagaaatgggtttatgatcccaacatggttggctcatggtacctaacacatgcaactaagaatgcatcatgaattttcatgcttcctttnttttttgtttttgttttgtagaggaaaataaaaacatgtagaacaaaaagtatgttgaacgcatatgcatgatgatgcaatgactcatgcacaatgggaat

SEQ ID NO: 18771 - DNA, 539 bp, Glycine max
  unsure at all n locations
ggagccacgaacacacaagcaattctagacacccacccgcacacaagcaatcaananatnnananannaagagnnggggnnnatgatgactcgaagcacgccgacaaccaanacnacaccgcaggcnaagacagaccacacgaggcggaagacccaacttacaagggcgacccccgacaggaagggggagagacagacctggaacaaaccggacaccagcgggacggcacgaggcacaagaacacagacgaggaccgaaacaggcgcggaaagaacaccgcaccgaaagaacaccacaaacaggcgccaagcgggcacaaaaagaaacaggaggtgacgccaagagagggcccagaccagaaaccaggcacaccgaaaccagaaacgtgcggaaaaagggggagagaaggatcgcgagaaagaagaaccaccgggacggacagagacacgcggaagccgagaaaccagccaaggaacaagcaggaagcacgggcaggcgcacggcaaactaaaaaccagcacaaacaaggaaaaaccgc

SEQ ID NO: 18772 - DNA, 406 bp, Glycine max
  unsure at all n locations
agttttgctaatgttgactgctgnggataagatcatgagtgtttggagggagcagtttgtgtcctatatggatgttagttcaaggaggtgatttgttgggctgtgacctaaatccataaagaagtttattctgttattttttgttttgttttgtcatctacctatataaggcaaggatgtcctgtatttcaaagatagaataagcttccacttgtatactgcaactataataaaagctttctgtttttccctcccatggatgtagcctttctcaaggtgaaccacgtaatcctatgtgtgttctttctcattcttctctctttcacctttgctgcacaattcggtgtgtatgacatttctggtctactgcattntctgctgntgntctttgcttgtcttcatcact

SEQ ID NO: 18773 - DNA, 458 bp, Glycine max
tagcgcgttcttctgttggattttaggcttagcgcgtgtgttgcggcttagcgcgttcttctgttggatcgcaggcttagcgcgcgcttctgttggatcacgggctcagcgcgtgtgggcctgcttcagattttcttcttttcttcaattttctggcctttttgcttgttacacctccagtttttatatctgcagccaaaattcaacaaaatatcaattatttaatatttaagcgcaaataactgctaaataattatttttaaagacaattttgccttattttctattatcaaaatacatttatttagcagttatcaacatgcttgaattattaattgtattttcctttgcatgatcaaatgagacttaataaaaatgcttgtatgtgccttgcatccttaatgtgtgttataccatacatccactattgagtcatgagttatgagactggccatctc

SEQ ID NO: 18774 - DNA, 399 bp, Glycine max
  unsure at all n locations
agctttattcccctaggcaattgttgtagtggtttatcaccaccagaatgttgttgtagcagttttatgcaaccagaaaattttctctgctgtcattgttagagactaaagcttaactttcaagcatgtgtaagaactaaaatttacaattttctcgaaactaaactataaaatggaaacaaccaagggggaagatgaataatttaacatcaattataacataccttttgaaaattagtctccgcatcattttcttcttccgccttgatgatatctgtgaggtggtcaatcaggttcaactcccacgtatttttctgattaattntctgcaagcacacaaaataaaaaaaataaaaaaattatttcttctttttgtttttttttgtggggggggggggg

SEQ ID NO: 18775 - DNA, 460 bp, Glycine max
  unsure at all n locations
tagcatcaatgtatataggtgctggatgattccattgttatatttcttacaataatatagtaggaatattggattgtctccttcagcaagaagtttatagaagagacaaggcacagtgtccgtaaaccgacacaagtggctccaaaagacatgaaaaagatagaaaactagcatggacttgtgtggatcacacaatgatatagataaatgtggtaatcaattaaacttaaactcacgtttttggctgctgagctgaaagcctccctgtggctgatatctggattactagccttaatcctttgaatttcctccctgcaaaaccagacagttgaaaagacttactatntgtttttgctgaatggaatcatctttagtctattctcatgtttgattgtttattntttatcttttgaaatggaatcacctatatacctgtatattctaatatattnttttaata

SEQ ID NO: 18776 - DNA, 337 bp, Glycine max
  unsure at all n locations
tgtttccattatgatgaaatcctcccaaggagaggacccatcaccaaagccatggctaggagactccaagaagattcggccagaaatacaggagaaggtcctanagttctcatgagccttacggtagattctgngtcaatggactaagtatgagaccacttatttttgtacatattagtttagggtttcattatttttgggtcttgtatttacggctccatagtgtagggagggtaccctaataatgtaggatttttcaacccttgtattttagggcacttgactagttttgtataagggtagttttgtaatttacatgcattaagtgcactatttg

SEQ ID NO: 18777 - DNA, 471 bp, Glycine max
tgtagattcatcctaactagaccctaacagactcttatctctaacacactggtatgctacccatctcacctcatgagcatgctcgcggctactctcgaactgccacaagcatgccattctgcatggcatttgtcgtagcactacaagatacctttggggcaggacgcttgtacactatcgagagaggagccactaccttagctgtcctgcaccatacacttgctacatgacagacacgtgccattgagtctcctgcatgcaacaactatgttctcatacgcggtatgtgcagtatggaagaccacatcaggggcacatctttaacaacttgcagtgatgccatatacgagatacacactggacatccgtcagcgactgcagacgcgaattttttgttgtcttttctgaattcctttctttcattggcgttggcaaatccaatgcaacactatgatcaatatcaccagctat

SEQ ID NO: 18778 - DNA, 406 bp, Glycine max
  unsure at all n locations
agtttggttcgaggtacttacccgtcgaagatcgaagaacgatgaagaacgaatgaagaacgtcgaagaacggttgaaacctttgcgaaattcttcacggaaaacgttacaaaaacgtttcggaagcgcgtcggcttagattttcttcacggaaacaatttttccaagcaaattcgaaagagagagaagtgcctaaggggctgaacccttttcttcttcacttcctcccctatttatagcaaaataggggagatgcttgccgcccagctcgcccaggcgagctcagctcgcccaggcgagccaggttgcttcctccagaagcaacagccttctggaggaatattctggagggcccaagtgggcctgggtgctatttgcacccncatttttactaagtacacccccc

SEQ ID NO: 18779 - DNA, 454 bp, Glycine max
  unsure at all n locations
tgcatgatttacattctccccctttctcaagcaatattcttaattcttcttgacatcatcaaaatctttatgatttacaggaagagcctccggcacgggctgaaaagcttgagtgatgtgcatattggtgggtaccgtgggaggtttactgcgacttangccacgcaggcattgaagtgacggcgtgggcatctccctccttcctctttgccccagctattccagtcctcctatggctggtaccggcaggggagacgtaatcaaatttccccctcttcaaacccactccgatcctttcttcggaggataccaagtccgcaaagctggagggcatgtagcccactaacttctaatagtagaatacagacagggtatccactatcattgtaatcatttccctctcgaccatgggaggggccacttgtgctgctagatctctccaacgttgagcata

SEQ ID NO: 18780 - DNA, 389 bp, Glycine max
ttcttctatgaactacaattatgaatagagaattggcggtaaggatgcaacttcaaataaacccattggccttctgtgaatgttttgtctgtgcgcttaagattgctctgttgggtcatacgattccttgctcgaatgagatttgttttcagtagctacaatatctctttcttttgagaaagtaattcctctaacaaagaaattttggacacactaagtacatgggaggcaatacaaggaggcaatatgccatacaacggttcacatagggacatacctatggctgaatgataggaggaattgtaccaaaattcagccaatgggaggaaacggatccaccattgtggttcatcactcacaaagcaacacaagtacgtctttaaacatct

SEQ ID NO: 18781 - DNA, 459 bp, Glycine max
  unsure at all n locations
tcttatccaaggctcatcttggtggtgaagcttctatttcatggcttattccctagtggatggcgcctcctctcacctcttctcctttgtcttccgctgcatctccatggtggaaaatcaccattaaaggacctcattgaagctcaaagatccagcctccatagaagccccacaagcaagcttccatcaactttagacaaattcttccggttatcccaagaggatgtcgttcagacataatcaatgcaaaaatcaattcatcatacctttggggcaatattgtcatgtgttaaggctcacaagaaatatgtgtctacaaaatggtccaaacaatgatagtgaaacaaagctcanagaattttctcaatggcttttagatctgggtgatggaatagcttagccaaatgatggttatgcatcaatacaaattcctaaatcacttttgacaacagagtttga

SEQ ID NO: 18782 - DNA, 368 bp, Glycine max
  unsure at all n locations
attttcgagacttatcctgacgacacccgaggatccagataaatttcacactttataaaacgtccattcggaattcgttggcctccattgtgagggcaaaggttttgtctatctccggatttgctcaccttgagtctgtgtttgttgggagagattttggcatcgaggtaggtttccacggcattgtagatttggttgtttacgaggccatcgaactcatcgatgattanggttatgtccaacgagaagcgcgagaacatgttgcggatgtcgttggtgatgtaggactggagcaccattgtgctggcggtcactgatgccaccgagtgatgcaatcctaccccccatgggcattggatagaagactc

SEQ ID NO: 18783 - DNA, 423 bp, Glycine max
  unsure at all n locations
cgacttanatccactattctttgtcctaccaagttaatgttgtttctaaatagattaataagatttgttggaattttgcacactgatcaaatttcttatcatcttacaaatggatatcactcggtactattagtttttttctcttaaggtatacaaagtgttctgagaaattagtatctttacaagaatttacataaagctttatatgaaagaatgaaagagtttgttcacgtagatgattcgtatcttgattttcaaagcttcttctatatatagccttcatcttcaagtattatttgtctcacaatggttggattcttcactatgatctatgatcgatgtcttgagtatgatggagtatttaatgcttgcattagatgcatgtcgattcttcatacaaagtccatgctaataggctaacat

SEQ ID NO: 18784 - DNA, 308 bp, Glycine max
  unsure at all n locations
tgtttgagatgaagaagngctgacaggcgaaacttcctgctgttattgctgaccacagagtgggacctggagatatgtcgcgggggtcacgagaccttggtgactgcatgcggtgtgctattgcccataacctaacttgaccaatcccgacccaacccgggcatagacggtcagcgagaacctgtgatgtacctaagcaggcgagctcctggcagtcatctgatataaggaacctagaccactaagcaaggatgctcgtggtggctggccagctgtgaatttagtgagacatgtggtttgtgcgctct

SEQ ID NO: 18785 - DNA, 366 bp, Glycine max
tgaaacaagtgactaacaacaattccttctctattgctaatgtttacactgcattatggagacagacatggtttcttcaatactgtgtattcacgtgaatcccaatatatataccaattgaggcggttgccttctgaacgggaacggaggtttcagagcatcaccgaactgttcaagtgagacatcagcatcggcctcgatgaacatgacccgcttgagagtctatctcagataggatcgtaatttcgccattataggtgatattagctacacataggtagcgtgactcatggagtacgcccagcgttattgtataagcatggaatcgatcaatatccacatgtgtggacaaagaatcttgaaagc

SEQ ID NO: 18786 - DNA, 407 bp, Glycine max
ttgcttgcaaacttgatcatcctgagataataggtggtcattctcattcgaagtggatggtgcaacatatttctttggcctaatactaacttcaacatttttacagcttctaatgttatgattggtttggccacaccttccacatgtaaactcaaccaatttcctctttaacttatgtactgagacattggcctcatgtacagatctccttctatatttcattggccttcctgtatggacccttttatgtggaggaacagggcgagtatattgagtctgggtccaatattgcggtccttggactgggtcaataaaatgctggtatgtcttatgatagacttctattgacagccactcatgacacgtgtcctcatgcttccctcctttgagagttattgccgcaatgg

SEQ ID NO: 18787 - DNA, 364 bp, Glycine max
ctcagctaagagaatcccagaaggcgcctcagtgttctcacgtaaccgccaacgatatttggtgcatcaagaggcatagaagttgatacgaacaaagaaaaggcagtccaagaggcaagtgttggatcacgtggcttcgaaataattaataaggaggggctgaattaattatgaacgtatcttgactaattaaaaatttatccttcttaatgttactagattcaattatgctttactactaagttatgagaaagtacagatcagaaacactaacttagacacacgtaactgcgtaaataaaatgcacacagcggaaaagtaaagagggtagggaagacgaaacaatacacaagttattatactg

SEQ ID NO: 18788 - DNA, 388 bp, Glycine max
agcttgagatgaggaaatgttgaagggtgaaacttcctacttttattgttgaccacagagtggtacctagagatatgtcgcgggggtcaggagaccttggggacgtcatgtggggtgctattgcccaaaaccaagcttgaccaatcccgacccaacccgggcatagtcggtcagtgagaacctgtgatgtacctaagcaggcgagctcctggcagtcaacagataaaaggaacaaagaccacaaagcaaggaggcttgtggtggctggccagctgtgaactttgattgatatgtgggttatggcctctggtaatcgattaccaagggtgggtaatcgattacaggctttaaatgaaacaggaggctaagaggtctctgtaatcgatac

SEQ ID NO: 18789 - DNA, 453 bp, Glycine max
  unsure at all n locations
tccacaatatccaagcaattcaattccaaataccatgtaactatcctaaaccaagaaaacagggcagaggcaaaaaactctgcccaaaacatattcacatatcacagctttccttactcatatatccaagtaacattcttttctttctgatttgttaaccattggatcgacttgaaaattttactggagtttcctagtacataaatctacattttgaccgttgggatctgctataaaatgtctagaacccaaaatatactacctttcccataaccagcaatgcacaagcatttttctgcacacatcaaaaatttgttgcacaattcaacagcatttttctgcataatagggcagatttcgaaatccatcttgcccacatccaattnttctcanatnggatcctacaagtcctaaatcatgtataaatcatatttaaaccaaaaacaagcatca

SEQ ID NO: 18790 - DNA, 411 bp, Glycine max
  unsure at all n locations
agcttagctagcaacgatatgaaacaccggatgccatattttctgtttccggagtccaataatgaagagaacagagaatcaaagtaatcaatttatgtctatttcaacgttagagatcattgcacatttgtagcatttcttttacatttttgtcatagttaatgttacaagaaaaagagagactccataacaacaaaaaagaagagaaaaaaaggaaacagtcgtgtaagcatgatataataaacttagtatagaaataaaaatattattgctaaataaattaatttaaaatgtccagtaaaactaattattttataaatttcctattntaatgattaaactntatttattcattattctggaatggcctaaacggccaaacaagacanagtancctttatataatcacta

SEQ ID NO: 18791 - DNA, 438 bp, Glycine max
  unsure at all n locations
tctgcattgaaacttgcaattcttggaggtccatacatgtgtatttttcctggtttgcaatttttccaatgttttttttttcagtggaggtggtgactactgattgtgaataatacttctgggaatttggattttaaccaaaaacaatggtatcatgtaattcatgtatttgacatcacctgggataaaatcatcatgtttgttgttggggagtgactattggttgattatggtaatgttttgttttgttttgttcactgttctgtctttgatggattctgttgtaacttgtaatcacctcttccttttacttaagctgtgatttatattggtaaaatggtgttgatttcttatcaagttattctgatatgtaacagaattgcaatggaatggattttcaatgatatttntaagttnttgcgtgttctagtttcttca

SEQ ID NO: 18792 - DNA, 398 bp, Glycine max
agcttatgttgggcaacaatgatgtaaaaaaaaaaatagaaagcaaattcgccaaaggagaacaaagtaaaaatagacaaaagatctccaaattttacaaggaaggcacaaaagtgcaataaggattaatgtataagacaaatggagtagagcccaacccgaaaaaattggaatgaataaaagtgcaagaaaaactctcaaggttcttactcaatataacccttaaactctctttgagcctctttgatcctttctttcatagccttcttacccctgaccacgttacaacgccaataaagtccatgtggatcaaggaatgactaattttgcttttgtgtttggattctggaatggaatccgcacgcttatgaatgtaaaaaaataaaaaaaataaaaga

SEQ ID NO: 18793 - DNA, 457 bp, Glycine max
gtgtcggaagttgtgttctactgcctcgatggattgttctttccacagagttgggtcctataatctgttgtcctaacctaaagttgaccacatgaagtgataaccgttaggtttgagcagtgataatttgatggtgaaaaaatgagttacgcatgatagccaatgtcttaaatcattatacattttatgacatacatgtgtaatagaaggcttttgaaatatacgaaagcaactactttagtggttcaccatacgtggggctaaaggctaattgcttcgaaactgaaagtagttataagttccttagaaaaaaaacctgtaaagcgtgttttcttgctcccttttctttcttttagcatttttaacatgctatattgggcactagcatttggtacctttaaatggaggtttattattatctagctacattcttatgtttgactgatgaaagtgcatg

SEQ ID NO: 18794 - DNA, 406 bp, Glycine max
  unsure at all n locations
agcttatttatgttaaacttcaatctagatgggatgaacctttttttattactaatgtttttccccacagtgtagttgagattataaatgaagttattgacaaagtcttcaaagtgaatggtcaccaactcaagttttttcatgagagcccccaagtggaggaagaatttgtggcgaacctctctttggtcttgccaattttatgtgattatgtgccttgaatgacacttgaggagtttcctttccttttcttttatatgttatctctttgtttgcatttcattacatgctcacattgngggacaatgtgcatttcaagtgtggtgggaaggtttagataaaaaattggttggttcttttttacgtttctttgtatttggtttattagctatatctattcttctat

SEQ ID NO: 18795 - DNA, 287 bp, Glycine max
atcctaaaccaagaaaacagggcggaggctaaaaactctgcccaaaacatattcacatatcacagctttccttactcatatattccagttacattcttttatttctgatcagttaaccattggaacgacttgaaaatgtaactggagatgactaccacataaaactacatcattgccgatgggatctgctataaaaagtctagaacccacaacatactaccttatccataaccagcagtgcacatgcatttttctgcacacaacaaagatgtgttggacaattcaac

SEQ ID NO: 18796 - DNA, 374 bp, Glycine max
  unsure at all n locations
gcatgatcaagacaatgcctattgaacctgatttatttgtgtggggtgcattgctggctgcttgtagaaatcataggcatgtggagctcgcggaagtggctgctatgcatctaatggaattagagcctgagagtgctgcgaaccctcttctgctgtccagcgtatatgctgatgctggcaaatggggaaagtttgagagggtcaagaaaaggataaagaagggaaaactgagaaaacttcaaggtttgagttggatagaaaatttataacattatangtacgttggttggtagaggccatangttttgcttcttcatgaagagaagggcacacctactggtataatttttgatgtatcgnttgtgctcctcatg

SEQ ID NO: 18797 - DNA, 446 bp, Glycine max
  unsure at all n locations
tctagtttgttatttcatctctatccttctaacttattattcttatactgattgacgcttcaagagttttacaccggactttactattctttgttggtttgttttacttttccattaataaaaaaacacatcaagtcacaaataacttttaagataattattctaaaagtcaacaaatttactatatgacgaattgcgattgaatgataatgtaaaaatattttataaggatgtttatgagtctgaattaatccatgatccaaccctgctcaatatagatccaattatattcggattggataatgggttgtaaattgtcaacttgtaatccaatccgacccggtcatataataaaaaatattaatattattaataagaatataataaagactaaattatgattttgattntttttaatttttaaatntatgaatttggtctcccta

SEQ ID NO: 18798 - DNA, 409 bp, Glycine max
agcttgtacaatcaccatagccatgggtcaatgattgattggtaaaattctatttttcttttttccccagtttttcaaaaagcaaaaagagttgaacagaccaatgaataagaattcatatattcagaaaattccctctcctttaagataaaagacgaggatgcacttttggtttccgtttgggggcctcacttgttctttttctctacccttcacccaccattttctcttccatgcccaaaatgcatgtcctctttctttttttgtttttccattttcatttcgctgaaaccctttctaccctaatcttagagtacaatgccctgctctctccgttcagccattaccgactcctcaccacccattctttcttcgtggaacaccttcatcccttactactcctagctcg

SEQ ID NO: 18799 - DNA, 458 bp, Glycine max
  unsure at all n locations
ntggagtaaaaggcttactaaagaaggcaatagggtgttctttctgcgataagactgcacccatgtcgacaccaaacacgtttgtttccaaggaaaaagggataatgaagtccggcaagagtaaagtaggggctatagaaagcacatccttcaatccagtgaaaacttgttgcgccttagatgaccactcaaaggggtacttcataagtaacctggttaaataagctgcaatggaggcatagccacgaataaatcggtgatagaaacccgagaggcccaaaaaactgtgcaaggccttggaggaatgaggtgtgggtcactgctaaatggcttggaccttagccgacactggttcaactccttgtgcaaaaaccaggtgacccaagaactcaacttgttgctgggcaaaggtgcacttggatagtttgaggaagaactgaccatctagaaggacctga

SEQ ID NO: 18800 - DNA, 405 bp, Glycine max
  unsure at all n locations
tgttttaaagcacaacaacacagaatctaggtgtccaacacccctccattcaatggcttttctaggtttgaaaggtgaaatttagaatgaggtgaatttgaggcaaactctcacctcacaccagtccataacgtcaatctaaacttgcccaaactggaattacacctaaaattccaccaaatcaaaatttgactcttcaacacccaattttgccctagaaatggctcttggttcactttggtcatttatttttctctctagctcagcctaacctttctcacatgttctaaatgacatttcaagctagtattgactcactctaacctccatttaccacagaattccgacttagccttccaactctcanagtctcactctttntccactcataacatcacattctca

SEQ ID NO: 18801 - DNA, 447 bp, Glycine max
ctatagaaactcagcttgaaatgggaatgcactagcatcctactctttctccaaactcgaaggtggaggacacatgaacgaaaacacaattcatggggctccgaaaaaggggttgagaatggagaattacactaagcaatcactacgcatagctccaaactcgaaggtggaggacacatgaaagataacgcaattcatggggctccgaaaagattgagaatggagaattgcactacgcaatcactacgcatagctccaaacgcgaaggtggaggacacatgaatgaaaacgcaattcatggggctccgaaaagattgagaatggagaattgcactaagcaatcactacgcatagctccaaactcaaaggtggaggacacatgaacataacgcaattcatggcgcttcggaaagagtgagaatggagagaggaactaatcaatcacta

SEQ ID NO: 18802 - DNA, 387 bp, Glycine max
tgcttctagccatatggacttaccttgaattaattcctttgatagcccttttgagccttgtttccctttccttgttttgaagctcactacaagccttaagtgaaaaaccatgatattaccatatccttaaggaattttggagctttggaattgttttgggaataagtgtggggggtttttgtttcattggacaacttgttttgttggctatgcttcatgatgtattttgggccatacttgatgtacattgtatattggttaaatgttggacatgctgaatgaaatgttgtttctcaaaggccaaagagtaaaaaaaaaaaaaaaaaaaaattcaaaaaaaaataaaaaaaaaaagaaaggcattaaagttgagtgaataagatctta

SEQ ID NO: 18803 - DNA, 455 bp, Glycine max
  unsure at all n locations
ntgagggtgcgcagcccaccatcttttcatagtatagtaccgataatgtgtctaccattacgattatcgtctccctttccatcattgggggtaccaccggggccgccagatccctccaccttttgggcgtgttctttgaatgatccgtccccctttttgcacatgttctgtagttgcatcctatccggaaccatatcaaaattgtactgatactgcctaacaaaggcaaccattatgtccttccaagaatggactcgggaaggttccaagttagtgtaccaggtaacagctaccccagtaagactttcttggaaggaatgtatcagcaattcctcatcttttgcgtattcccccatcttctgacaatacatctttagatggttcttgggacaagtagtccccttgtacttgtcaaagtcccgcaccttgaacttgngaggggtgatgatattggg

SEQ ID NO: 18804 - DNA, 409 bp, Glycine max
tttcttaatgtctcctaagataagaaaacaaccaagaattcattgcaggaaaaaagcacaaattattcaagaaaaaacaatcttagaactttaaattctgaatttgataatgttatcaaactttacctgaattttttttaaccaagcaaagcataagaatatgttaatatctgtcaacaaagtcggtacaagatgtaccttgatcaaccaacataatggtgataaagaagcagccaaagaattgttataaaccccttacccaagccaatatattaatatctcatcttaattaccattattaatcattttaattaaattgcaagaataattaaagttattttatgttggtgaaaatataaattaagtgcgtgatattctacgttttatgacaaatgagtattgttgtatg

SEQ ID NO: 18805 - DNA, 459 bp, Glycine max
  unsure at all n locations
ntatttgattaaatcgattgcttatttcaattattattaagttactaagttcactttttaataatttcaagagaaattttcttgcacttgtcgcactctctaattaagaaaaataaagtaaaggtgttatgcacatatcatttgcaatggcagatcaactccaagtgtgaacaaaccaaaagagaaatggttcaagaacaccatggacaatttgtacaatggacgaagcacacaaggaaaatgagtgacaacaatttcactccttttgtgattgagaaagaattgtgaaactaacgggtaaagagacaaaataggatgtttcggctaattctttcatttagagtaccagagcaatgactatgatcatatatacaaaattacatgttaatacataattatntgctacctcatcctttcatagatnnttaaatcgacatattataagttntgaanatatac

SEQ ID NO: 18806 - DNA, 409 bp, Glycine max
  unsure at all n locations
tgtttggacttcctgtgttttgggaacctctccttcctcaggtgtacccaaacccaatcacttggttcaagcacgactttctttctgcttttgttggcttgccttgcatagctcgcatttttcttttcaatttgaaccttcacttgctcatgcaacttcttcatatactcagctttagcctgtgcatccttatgcttaaacatagcaatgttaggcataggcaacaaatcaagaggagtcaaaggattaaatccatacactatctcanatggtgaacaattagttgtgctatggacagcccgattataagcaaactcaacatgaggcanacaggcttcccaagatttaagattnttctttaaaacagtcctaagcagtgtgcctaaagtcctatggactacctcagttt

SEQ ID NO: 18807 - DNA, 425 bp, Glycine max
tcattgcctaacaagccaacttacaacagcaagttcttatagactcagcataaggatgcacaggtcaaagttgagtatgtgaaaacattgtatgaccaagtgaaggtgcaaattgcaaagaagaatgaaagttatactaagcaagccaacaagaaaaggaaggaagtggtacttgaacctggtgatgatcctggacatttgagggcaaatgttttccaagaaggagggaatgatgagaatcctgaaattggccaaatacaagctaaaagcccaagtggagaaggacgaaggctcaagtggagaaggacaaagcccccgagtggagaaggatgaatgcctagaggcaaagacattatcaagactattaattgttgctgatggcccaaactaatttgaaggctcaagttaaataagtttttagttat

SEQ ID NO: 18808 - DNA, 401 bp, Glycine max
  unsure at all n locations
agcttcctcggtgccattcctgcgaaggcaaacatttggaaagttagttttagtgggccattactcttaaagcaaaaatggcatgtaacctcctcccatcaatacaaacatcaatgtaaatttagagcaagcttatgcgcatatttccctacgaacgttcacttgcactagacatcctattaactaagaaaaatgcacccatatacaatcaaggcagctttgttacctagattatttacacgtacttccaaggtgtatttgttacttacatcacacacatctccttggctaaattcacatacatgcataccccaagcattntggggtaccaaaaattgcacatgtgcacatcttggtatctctaatacctatacatacacaaacttcatgatgaatcttga

SEQ ID NO: 18809 - DNA, 454 bp, Glycine max
  unsure at all n locations
tctagattaatgtaccagatgaccactgctttagcctagctatcttggaagaaatgcatcaacaacttctcgtccctgcaatacgcacccattttgcgacaatacattttgagatgattcttaggacaagtcgtccctttgtacctatcgaaatcaggtaccttgaattttggggggatgacgacgtccggcactaagcaaaggtcagtcatgtccacgaacggataatcgccaaagccttcaacagccctcaatctctcttcgatgaaatcgagtttcccattntcctctgctgccaggggtggccctcctgcggacaaaaatattggctgtgttgggtggtttcggggttctcccgtgaggttgggctgaggtagcgcgttgggtgccggcccctcggcggngaacagggagtaggaatcgatgtctccctgggcatgctctcgacgatcct

SEQ ID NO: 18810 - DNA, 397 bp, Glycine max
  unsure at all n locations
tcttcatgcaagcttgacaaattctttntattttttctttcaaggcactgcattcctgtgtcgagtgaccgtaattgcaatgataccggtaatgttttgagtagtcggctttcaatggggtgttagccctttttggcatggccaaaatgtctacagctaaggcctcatccatgatatgagatctattggctgtaaggggagtgtagcaagcataacacggttctcggggtggtcgatccctcttctcgttgtcgcgagctttgttggagttgggcttatcatgtctttcttggccgaaatggcatccgcccacacctggtgaggtcgactagtgacaaattatgtgcttaaacgggctgccaaggtgtcgaatgaatccatggagttgggggggagg

SEQ ID NO: 18811 - DNA, 446 bp, Glycine max
tgtggaaacaaaaaagtgcaacacatttgattagtttataggcttctgaagttggctttagtcttgccggtagcaactgcaagcgtggtacatgttttttcagctatgaagtttgtgaagagtcagctatgtaacaaaatgggtgatcaatggttaaatgatctgaaattctgatactggggacagatgtcgtacaggatgtcacgacatcgcgcttcagaacatgcagattatatgtgtgtccgtatgaacagattaaacaagtaaataacacatgagaattgttaacccagttcggtgcaacctcacctacatctgggggctaccaagccagggaggaaatccactaaaatagtgttagttcaaggtctaacagccactgtttacaaccttctcacctaaccactacccatgcgacctctacctatgagccactcttagatatg

SEQ ID NO: 18812 - DNA, 395 bp, Glycine max
ttgcatgcaagcttgaagatgcgtaccccaccttttttcatagtaaaacaccggtaatgtgtctactattattgtgatcatctctttctccgtcattggaggtgccacttgagcttccaggtctccctacctttgggcgtattctttgaaagattcatgcccctttttgcacatgttctgtagttgcatcctatccagagccatatcaaaattgtactgacactgcctaacgaaagcaaccattatgtccttccaagaatggactcgggaaggttccaagttagtgtaccaggtaacagctaccctagtaagactttcatggaagaaatgtatcagtagtttctcatcttttgcgtatgcccccatcttccgacaatacatctttagatggttct

SEQ ID NO: 18813 - DNA, 442 bp, Glycine max
  unsure at all n locations
tcaatatagaaaagtaaaacttaatttggttttggcattgattagaaaaatgcaaatctttgaactagtgtaatttggaaatcaaatgttgccttgtagaacttttaggaaattttgtagatttttgctagaaaattgggataccaagttagaaaacagagtcaatgaactttgattttatgtaaaaagtttgtgaaaggatgtgactcttcacatttaaatttaaattccaacgttcaaacacactggtaatcgattaccaaatcattgtaatcaattacaacattttgaaatcaattggaacgttgtaaattcagttgaaggctttttgaaaaacattttgctactggtaatcgattacaacaatctggtaatcgattactagagagtaaaaactctttggtaaaagggttttgagaanaattcatgtgctactcagttt

SEQ ID NO: 18814 - DNA, 411 bp, Glycine max
agcttgttcaatcactatagccatgggtcaatgattgattggtaaaattctatttttcttttttccccagtttttcaaaaagcaaaaagagttgaacagaccaatgaataagaattcatatattcagaaaattccctctcctttaagataaaagacgaggatgcacttttggtttccgtttgggggcctcacttgttctttttctctacccttcacccaccattttctcttccatgcccaaaatgcatgtcctctttctttttttgtttttccattttcatttcgctgaaaccctttctaccctaatcttagagtacaatgccctgctctctccgttcagccattaccgactcctcaccacccattctttcttcgtggaacaccttcatcccttactactcctagctcggt

SEQ ID NO: 18815 - DNA, 447 bp, Glycine max
  unsure at all n locations
ntggagtaaaaggcttactaaagaaggcaatagggtgtcctttctgcgataagactgcacccatgtcgacaccaaacacgtttgtttccaaggaaaaagggataatgaagtccggcaagagtaaagtaggggctatagaaagcacatccttcaatccagtgaaaacttgttgcgccttagatgaccactcaaaggggtacttcataagtaacctggttaaataagctgcaatggaggcatagccacgaataaatcggtgatagaaacccgagaggcccaaaaaactgtgcaaggccttggaggaatgaggtgtgggtcactgctaaatggcttggaccttagccgacactggttcaactccttgtgcaaaaaccaggtgacccaagaactcaacttgttgctgggcaaaggtgcacttggatagtttgaggaagaactgaccatcta

SEQ ID NO: 18816 - DNA, 388 bp, Glycine max
  unsure at all n locations
agctttagcttaagcccaaaaacactggtgcttaagcctgaggtttgcaactttcaatgaatttcaaaaatcaatccatggctctccaaaatggcactataatttcaaaaacacatcttataacatctaaagccagagatcaacatttaaaacatcaaacacatcataaaacatgaatttaagcttccattacctctatagaaccaaaaaaagagctttgtgatgaagtagtagaaaatgatgaactttggatccaagggaggatatttcctcaactccaacagcatgtccatcttagcaacatcaccccanacccaaaaataaccacaaacaaaatccaatccccaaaaaccaagctntnttatgagttcccctagatgctntatga

SEQ ID NO: 18817 - DNA, 458 bp, Glycine max
  unsure at all n locations
ntgttgctacacttggagagcgagctcttgcagtgttgttgtcacattccccatctgtgtctccaaagcgtcaactcggtcacccatcttaggcttccttgacatctacaatcttcttcattgtgtgagattgatcccgcaggtcggaccaattgatgggtcttaatgcacaaaaataatgataaaatggatataatagtgtaatatgagtaatgaaattgcaatggtattgctgtgagatccacaattacaggaagaaaagagcagaaaaaaagaaaaataacaaactggtaatagcaaccaattcccaagcacgcagtgctcccaaatcacccagaggcgaccccaccaaatcctaattgaattccttcctaattattcctttccagcaatagctatctatagccactctcatgcgttcacaggcacgtcatcatctttcattccttttgtctttt

SEQ ID NO: 18818 - DNA, 414 bp, Glycine max
  unsure at all n locations
ttcattaagaggcttcctctagaagcttcctcgtggcttctttgagaagctttctcaagaggcttctttgagaatctagatccttatctatccacccctctattaactaaattaacttccttaaaaataattacggatgaaaataacgcaacaaataatcaaacatcaaacataattactaataatatatagatatatatatcagggtgttacaggtcctgctgatacaagaatttgacatcatcatcaaggacaagaaaggatccgagaatgtggtagccgatcatttatcccaattaaagaataaagaagtcaccaaggaagaaccagaggtaaaaggagaatttcatgatgagtttcttttgtaggttaccaccagaccttggttngtagacatggctaactacaaagccn

SEQ ID NO: 18819 - DNA, 544 bp, Glycine max
  unsure at all n locations
cacacgcacacacancacctcagccatcacagcaaaccgcaacaatcancgaaatgctaannannnaagggggggagntnnataatgacctcgtagacacncgcacacacananaanacgcnagcnggccgcaacaagaaagagcccncagacacaaagccctagggctcacccncaaaaaccacagcggggcgagagccangcaaagcaacacgccccgcagaggaccaacaccacacccacaacagcacaaacggacgacgaaagagcncccacgagaaaaaagaaaacggcgaagcacaaagacaagaacaaacgacgacaagagagggagaccncgagacaaaaaagagggacaaacacaacaagaaanagaacaccaccggcaagcagcgaaaagaagaaaagaaacaccaggcacaccataagacagacaccagacgcaaaagagaagcgcaaaagaaaacacacaacaaagaactaccgaaccaagacagactgaccgaaacgcggaacaagagaagagacggccgcgacacacacg

SEQ ID NO: 18820 - DNA, 404 bp, Glycine max
  unsure at all n locations
agctttattaggattcttccctcttagtcatgtttctttccatctacaaagacttgaatttgagaatttacttaggaaatctaatatcattctcatcaatgacttataagtgatctcgtgtatatatatatatagtggtgtgtgtataaaatatagtcatctgtcactattttcatgccaacaatatagtaccaaatagataattaaattacaaaaattaatgaggttaataattatgtagatgatgtaaaaatttcttaaggggtttcctagactatcaatgataggaaacaacaggatcttgaaacctatggttctcacaaacaatcaataaacaacaatagataatgatgtgtacctttctccataggaagacttgtnacttctccatangaacttctctc

SEQ ID NO: 18821 - DNA, 462 bp, Glycine max
  unsure at all n locations
actacgctaagctcttaactgcacaagctctaatattgtgttatccttgtggaaccttcacttgatgaagacactgacaaaaacttatcttctcctttgtggacaaagtgtgacaagcctgnggcaagtaaattttcttcccatcagaccttggatgcaactgtgctcgtatccccatgtcagctagatcttgacggatattcaagccatccttcgtcttgccttgaatgtttaggagcgtcccaatcacattatcacatacatttttctccacatgcataacatcaatacaatgtctaacgtccagatcagaccagtatgggagatcaaagaaaatggacctcttcttccatatgcaagtcttactcttatccttcttttgggtctttccaaatacaatattcaggtgttgaacccgctggtatacctgttcaccagtcaacagtatcggtgcaatatcgt

SEQ ID NO: 18822 - DNA, 391 bp, Glycine max
agcttcctacctgtttgtgttgcagtggctgcccccaaaatccgctataatggctagtgggagtttgactattctaaggttttgacatagacatcaaataatttatagtaaacatacctgtataaaattataaatgatattcatgattaatattgatattttaatgattgaaagtcattgaagaacaacacggcagaaagatgaaacatgaaagacctgttccatattgtggaatgagtataatagagaacagaatatagagctttggaggtcagcaagattgccagatactgacatggtctggctggaaatactgctggaaaaagggttggtgtaattagtccgtacccagaagagtgttgcatgatgatgggaaaacaaggaataaact

SEQ ID NO: 18823 - DNA, 447 bp, Glycine max
gtaatgtttcaagaatgtccttatgtatattatatacattgttatgctcatcaattacaacttgctcttgttgcttcaactagatgggtagttgatgtacgcgcttttttttaaacttgaatatgattgtaaatgttgtgtgttcttcttgtaaacacaatcatgagttacaagttgcttatgtaactaaaatttctcatttgattgccaatgatgagattgatattggaaggggaactaatcaaattgacacattacagagactgggagataccagatggagttctcatttcaattcgattggtattcttttatgcatgtataatgcatctacagcagttcttgaagaattagctgctaaatgatctactgctactcaatgaggtatgctactgattggccaaaagcatattgtcatttgatgtattttactctatatgtatgaaa

SEQ ID NO: 18824 - DNA, 412 bp, Glycine max
  unsure at all n locations
agtgagctgatcatttgtagccagtgatgagaagaggaaaggttgcgtantgaacttaccttaagttttgtcaaggaagaaagattagtcaaccactctgcatccttagatttgacatcaaaattgccaccaagtccaagagtgtgcaacaaaggaagattcccaacctggaaagggagtgctcccgaaaatgaattctcaccaagatcaagatacctcaactgtgagagattttcaagttgatatgggagttccccatctagatcattatcacttagatcaagatattgtaaatgcgtaaggtttccaagttgataagggagttccccatctagatcattatcacttagatcaagatattgtaaatgtgtaaggtttccaagttgataagggaattgtccatggagataaa

SEQ ID NO: 18825 - DNA, 378 bp, Glycine max
  unsure at all n locations
gtgttgctacacttggagagcgagcactagcagtgtatatttcacattccccaactgngcctacggagcgtttactaggtcacccatcttaagcttccttgacatctacaatctgggtcattgcgtgagagtgatcccgcaggtcagaccaattggtgggtcttaatgcacaaaaataatgataaaatggatatacctttgtaatatgacgcatgagattgcaaggggattgcggggagatacacaattacaggaagaatagagcagactaaatgatgaataactgctggaaatatctacgattgccaagcacgcagagctgccatatgacccagaggcgaccccaccagatgcaaagtgaacttccttctaaatatt

SEQ ID NO: 18826 - DNA, 410 bp, Glycine max
  unsure at all n locations
agtcttcccaatgtcttcaagcattaaatcaatacaatgagctgcacaaggagtccaataaatgtttccttttgtcctctaacaacttacctgctaaaacatagttgctcccattatcagttacaacttgaacaacgttctcttccccaacttcctccacaatagcatcaagcaactcaaaaagcttttcacctgtctttacaaaatcagagtcatcaacagacttcaaaaacattgtaccaacttgagagttaataaaaaactaatgatgcatctttgtttccaatcagtccatgcatcggacataatagtacaaccatacttgacccattgctccttgtggcctttcatcaaattntcagtgtattcaacttccttcttcaggagtggaactctgatgtcatgatagc

SEQ ID NO: 18827 - DNA, 451 bp, Glycine max
  unsure at all n locations
tctaactntctaagttgtaattgcagttcagttatgtttatcacttgattattgcctattggtaatgactaatgaatggtaggcgccatgttttctttgggggcggtggggagtgttcaaacggcgccacttataaagaaggggctaatgggctatatatgcatcagtgcctgcatctgctggatccaaattttagcatatcatttttgctggcactttctttctcgtaccttttatttttcttacaatgccaatttccgaatccaaaataactagccctcttctgctctttgcacataataataatgatatagtattattaatagtaaaccaaaataagaagacctaccttgggttcaaaacggacgttttcaccaacagcttacttttacctaccttcatatgaataaagaaatgaggatggttntaactaaatctatgagaagtgggt

SEQ ID NO: 18828 - DNA, 406 bp, Glycine max
  unsure at all n locations
ttcttccaaagttttactcaaattgaaccttttacatcaattgtcaagcactcaatttaaaaaaaaatagaacgttttgcattagttgtgttaataattgataaaaaaaatatcaatttcgtcaaataattaatgaatatgagaatatgactaaatgagtataattttttcatttcaaacaattcaaggaccaaattaaaccttcaatatgattaagccaccacttatatagttaaatagtataattattgtaatttattttttgcatttaatacagttaaatctatattaaagaatagttcatcgaaaagtcttaaatagatatcctatattgttgacacgttacttanacatgggtaatttggacttttcaccaatgcattccatcttctcctttctttntctt

SEQ ID NO: 18829 - DNA, 459 bp, Glycine max
  unsure at all n locations
tcccacaattggatcatcctccagactctggtgttttggctaccctccaaacctctccatcatgccagacaacagcatctatgacaggccctttatcatcatagctctaaaacataaaacagcatttccttttcaatgtaaggaattcaagttgaaaaaattctcagtgggagcacaaacacaagtataaatgtctcttttagtttgagtcattgagacgagtcagagggagaaaaaacaagaaattcattgtttatgtgtggccaggtggaaaaaaaaattcaacattatttcatacagagacaatcattctatcaatatcctcattccaccacttatgagtgtcctataatgatataaattcaaatcaattgttcattacctatttcaaggacagganaagacacaaatacccgaagagcaacanaggaagatgacatgctcagcactcacctcaga

SEQ ID NO: 18830 - DNA, 410 bp, Glycine max
  unsure at all n locations
tgtttgtcatcttactttcatgtttaaataaccctaacacttacaacatatcgcttgctagctactacaacaaaaaacaaatttacaaaacttttaagacaaaattagtccaatggctaacaatttctctctattttttcctttcattcaaacttgttttctccatcttcatggttgcttccatctcattcatctttatcattagctcattttttaagcaatccaagaataactctcttctcatgaatattcatttcaagatcttaccaataaaaaaaaagttacatcctcttctatccgatacatgtaaaacaacaaaaaatgaaccagttacatccttatccttagcanacccattacaacaaaatccanagaacaaccaaaaaaacacaatgtagtggtgcatacct

SEQ ID NO: 18831 - DNA, 448 bp, Glycine max
  unsure at all n locations
cttaggtggatttgacttttaaagctgacataattatatttgttatnnnnatnnnannnngtcaaatacaagaataaagagcaaattttacaaagggtggcttttaaaattgtgacatgatgattaattgtcatcttttaattattttaccaattttaagaataaagagaaaaatgtttacaaatgggatttactctcgtgcatcccgtgctcatgcatattgtattctcttgattcattgttcctattttatgttttaattgaattagtctttctttatgaataattaaatcagtatttagttagcaattccaatatataatagactaaattatactctattagtcgttttttcaaattgcatcccatacttttcatgttttcacccacaaaaaccccttatttgttagctctcattacattcatgtatcatttcagtgtttaatca

SEQ ID NO: 18832 - DNA, 399 bp, Glycine max
agcttttgaaacagttttgagatactgcttgcctcataagccctgttaggccttcagccactaaatcaaagagaaaaggggccaaaggatctccttgtcgcagccctctttgaggtttaaactctgaagtagggcttccattaacaagaatagagatggaagctgaagagaagcaggcctttatccatctaatccatctctcatgaaaccccattctcttcatcatataaatgagaaattgccacgaaacagaatcataagccttctcaaagtctaccttatagaccatacaagacttcttggatcttcgagcctcctcaatcacctcattagccaccaaaactccatgaagcaaatgtctgccttttatatatgttgtctgcctttcatctataagac

SEQ ID NO: 18833 - DNA, 456 bp, Glycine max
  unsure at all n locations
tagacgaagaacaagagaggttagatgtaaaagaatagatacgcgagcaaaatagggttcgcatctgatataatttaaaatgtaagtccaacatcagttttcaataaataaataaaaatcgatgttaacaaaatgatgttaacattaacatcggttttctgcaagaaaccgatgttaacttatcacacattaacatcaattttctaaaaacccgatgttaacgaacttacgttaacatcggttcttccaaaatcgatgttaactaataaatgttgacatcggtttttcaagaaccgatgttaatgaaaagtcacttcattaacatcgaattttcaaaaaaccgatgttaatgaatacacattatttgcaattatgtcaccgcatttatcttaacatcggttntgtcaaaaatcgatattaatttgccgatgttaaatctgctntgtgtagtagtgt

SEQ ID NO: 18834 - DNA, 392 bp, Glycine max
  unsure at all n locations
agcttctcccctaattttctataaatagggggagaagtgaagtagaaaagggttcagcccttttggtaattcagaatcacttaaaattagtgagaaaaattggttccgtgaagaaaatccaagccgaggcgcttncgtaacgtttccgtgggtgatttcgtgaaggttttcgaccgttcctcgacgttcttcattcgttcttcgccgttcttcggtcttcaaccggtaagttccctagattgaacttttcaattcattctatgcacccttagtggtcctcatttgtttttacgtgctttcatttacatttcatttacttttcgtacccccttttgacatgcttaagtcattttatttaagtcatttctctgctaatctaaaaataaaataaa

SEQ ID NO: 18835 - DNA, 450 bp, Glycine max
tctttgagaaaaatttcttgagaagctagagtttagttacacacacacctctcataactaagctcacctccttgagaagcttccttaagaggattcctaaagaagctagagcttagctacacatacctctctaatagcaaagctcacctccttgagatgagaagctagagcttagctacacaccccctataatagctaagctcacccccatgacaaaatacatgaaaatacaaaaaaaatccctactacaaagactactcaaaatgcctcgaaatacaaggctaaaaccctatattactagaatggccaaaatacaagacccaaacgaaaggaaaaacctattctaatatttacaaagataagcgggctcatacttagcccatgggctcaaaatctaccctaaggctcatgagaaccctagggccttcccttggatctctggtccaatct

SEQ ID NO: 18836 - DNA, 346 bp, Glycine max
  unsure at all n locations
agcttctcttggaccctaggcaaatcctcaattcatccttcaagatcaaactatctactcatgattggtccctttcctctctccggagcttaagctcattgttactgccccacagagcccctcggaatttgttctggccatgttcttccctacgggcccttttggtctcttgttccaaggccttggtggtggctatatttacgtctctcagtttggcattctcctttcggatccttatagctgttgatttgaacttttctttggctgtttgggctttcttgagttcttccctaatggcctgaacctcttcgccctcctccgaagctntaacttccacccccttagt

SEQ ID NO: 18837 - DNA, 449 bp, Glycine max
  unsure at all n locations
tgaccttggtttagacatgattgatacatgatttgtttcttgtaggatttgatttgggcaagattggatgaggggaagtgtggttttcgaaatctgcgttttgtgcagatttttgctgtgaaattgtgcagcaggattttgcacaagtgcagaaaaatactaggcatttgctggttgtggaaagagcagtgcagaatgagttctggatgtttgctagtagatcccaacggtcaaaatgtaggcttatgcactatagacttccagtaaaattttggagtcgatccaacggttaacgaattggatcgaaggaattgttactggggtctttaagtgagaaaagctgtgattntggttgatgtgttgagcagagttttctgcctttgctctgttntgcttggctgtgatagcttgtgctgtttgaatgttgttttgctttgatgttggggaag

SEQ ID NO: 18838 - DNA, 396 bp, Glycine max
  unsure at all n locations
agcttgttgagtgttttgtgaatccttggttgggaaaagttaacaaaaccaagtacagtgatgcttacaaaaccacaaatggtacattgttgttgttaacaaaactgttagagattggtagtatactaagagagttgccaccttactacagaaagcaaggcatccataaactcaccatatttgcaaaaaaacaaggcagatataacattgcaattaaaaaggctgatataacattgtttgatattgtgcagactttaattacaacaactggtaaaaacttaatgagtgcattacaaggcctctgaattaaacattcagatagaaccangttcctaaattaaattagcctacacaaaatggaaaatagagcagctataacatagttgtgcccaatct

SEQ ID NO: 18839 - DNA, 395 bp, Glycine max
tcaagtgtatccttattatgccattgagaaactgaattacttttatgaatgttccaagctaaggttttattggagatattccttattgcttagggttgcatatcatatcccaaaaaataataaatttatgattaaataatataaacctattaaagtaccaagaaatagacataatatttatatatcatctctatatattataatatctttccatttttttacaactatctttcaatatttttaatactcattgatatatcgagaaatgttttaaaaagtgaaatattattatatttgggttaaaatattcttattttaagcatattacaatggttgtgtggaaatggatcacaggacaaatcaatattacaaaagaaatggtcatgggaatatgc

SEQ ID NO: 18840 - DNA, 401 bp, Glycine max
  unsure at all n locations
agctttgaaggcatctacctcttgaagaggcagaggtaagggcatagggataagtggtagaggtagaggacggggagatcaaacactattagaaaatacactttcaacatcggttatttggggccttctacatcggttgtaaaaccgatgttgaaagcatcgatgttgaatgtattgttgttaacatcggttttaaaaactgatgttaacataaaaatattaacatcagttttataaataaccgatgttataaagaaagaagtacaacaaaataagtgtatgcgtgagggacgttggcatcagttttctgtaaaaaccgatgtgaatatgttatattaacatcagttnttagaggaaaccgatgtgaacgttcatcattcatgcacctattntgctatagt

SEQ ID NO: 18841 - DNA, 428 bp, Glycine max
taatactcaagctttgcagaagatactgagaaatttaacaagcattatgtggttatgtttttcattattatttgtaatgtgagttttagggggaatgtatcttaggtaaaatgtgtaatagcatattttgatattgtaattgttgttttgctaaagaatttgtagtaagaagtaattcgttgctactgtcaattacccatttcaattaaatataatttgttggtgaaatttgctactgaaatttgtagtttattaaatataatttgttgttgtataactttttgaagttattgaagtagcactaaactaggtggtcctactccaactccaaatccaacacagtgtataatttataaaagaaagagaagaaacatgacattatatcaatttcacataatgtttgacatcccaaagtgtggtagttaata

SEQ ID NO: 18842 - DNA, 390 bp, Glycine max
agcttttatggagttccatgcttctcattagaaggaaggaactcccgagcagatgactttactgctgcaatatttccatcagatgaaaaacgtgagctgctattcaagataggttgcatattaccagcaactaaggtagatagtagtaccccactctgaactagcctactggcataatcgatggctggagatacctcattcacatcctgtacaagaatgggttatgcacccatgctccctacaacatttgtagcacccatggtatattttgtattttgaaaaccatcaccatctgtatagcttgaagctgaaattgcacaaacatcatacttttatgggaatgaaaatgattcacccggcatagaagctctttgtgagtaccttgaacta

SEQ ID NO: 18843 - DNA, 418 bp, Glycine max
tgtccctcattacagcacctgcacctatgttgggtgaagtctccctgatagcaaagtctagtgcctctgtcggtttatgcattttcctcttagacattatactcatcgattaacctgcaccaatgtaaggaaaacacttcaaataaagaaagctaagataaatatttacaaagactaaaccatacaaggaaatgcacaattatttacctgttgtgtttaaagaagcattcgattcagaacaagagtgtgactattgcatatatattctaaatttgctcaagagaaacattccatccaagttaaaggaaaaagttgagcgtgttgtgcatcatgtatgtcagtagaaatcaaatgagactgttatgtgtttaaatgatctggtttataaataaaagtttctataagagtgaatcatgtt

SEQ ID NO: 18844 - DNA, 404 bp, Glycine max
agcttgtgtactattttttttaatccctttacatgaactgaactatatgcacttcacgaaatatacctgttgaaattttacgaacaatgtcttataataactggattttatcaaactatagtaaaagtattgaaacaataataaacaaatgattagttctgatctgctgtcaatgaaactttatcagaaacataacaaataaagtctattgtattgatatttaaaccaataaaaatatattaaatgttagaaaataaataaatcatataaatttaaaaataaataactaatataaacaaaaaaaattttttattaaaatatattcattaaaaaatatacaaaggataattgaccaatatgtccttagtccaagtggaatagcataagatttttgtaagtttaat

SEQ ID NO: 18845 - DNA, 417 bp, Glycine max
tattttgttctccccattgatagcttcacatgcaaaaccctttctactacttcactcttgtccttgggatcagaccctagcaagtccaccatcaaatttggggaatgcccttttgagtacttgaaaggttccaatggaagggtgttgataaaggtcatgcccgagttcatcacaaggctaatcaatagaagtaaaagaccttgttgccccagcagcaacgacaacaacaacttgctatgcagcactcctgacttgagaaaacactaccaaatgctagtgaaatccaaggaccaattttggtcacctaagcttgaaaccatttcggaaaacaatgttaggttttcaccgtgtagatttatatacgtttagaaaggaattaagataaagagatggcagaggttgtatctactagatagt

SEQ ID NO: 18846 - DNA, 392 bp, Glycine max
agcttgtgaaatatctcgtgattccaatgaggagccaaatgttctaatttcagtggttgcaaaaaaacataactacaaatgtctaatttactcatgtaaaaaaaacataacataactacgaatgtctgaattcaacactcttgatgaagtttgatataacttttggcataacattgccaaaattgtatcgtttttttagtagatgaaaacagtgtattgttgcacacaatggagaaggtgtgttatgagtacaaattggtgacaagtcttgacggagtttttgaaggataacttaaatttatctaatgaagatgaggttcaaaataggatttaaaggacaataaagatataacaaatataagattcttgataggatttacagagcaataatg

SEQ ID NO: 18847 - DNA, 391 bp, Glycine max
agcttgtgactcttggcaatttttttaaaactagtcacttaaaaagttgtgacttttgaaaaaatctttagaaataagtcacttgaagaattgtgacttttggaaatgtattttttgaaatcagtcactggtaatcgattacacatcaacaaatatgactcttcattttgaattttgaaaattaaaacgtttagaagctctggtaatcgattacaaatgttgtgtaatcgattacactagtttaaaatgatttaaaattgttaaacacaagttgtaactcttgaaatttgaaatcttaacgttttaaaacactggtaatcgattactatcttctgataatcgattaccagagagtaaaactctttggtaatgatcttgtgaaaacttcttg

SEQ ID NO: 18848 - DNA, 396 bp, Glycine max
  unsure at all n locations
tcgcaatgctntcactgattgcggtagaggcctctcatgaatagcctgtaacttttctgggactggttcaactccattgccggagacgagatgtcccaggtactccagttgggactgggcaaaagcgcatttgggtcgtttcaaggagaacttccctgaaagcaagagcttgaacgctgtttcgaggtgacccacatggtccgccatggttttactatagaccaacacatcatcgaagaagacgatgatgaatctgcgtaagcagggctgaaagagctgattcatagtagcttgaaaggttgatagagcattacacaaaccaaagggcattactcagaactcgtaatgcccttgatgggttctgaattccgttttgtgaatatcatcatctttcat

SEQ ID NO: 18849 - DNA, 392 bp, Glycine max
agcttgtgactcttggcaatttttttaaaactagtcacttaaaaagttgtgacttttgaaaaaatctttagaaataagtcacttgaagaattgtgacttttggaaatgtattttttgaaatcagtcactggtaatcgattacacatcaacaaatatgactcttcattttgaattttgaaaattaaaacgtttagaagctctggtaatcgattacaaatgttgtgtaatcgattacactagtttaaaatgatttaaaattgttaaacacaagttgtaactcttgaaatttgaaatcttaacgttttaaaacactggtaatcgattactatcttctgataatcgattaccagagagtaaaactctttggtaatgattttgtgaaaacttcttgt

SEQ ID NO: 18850 - DNA, 390 bp, Glycine max
tcgcaatgctttcactgattgcggtagaggccactcatgtatagcctgtaacttttctgggactggttcaactccattgccggagacgagatgtcccaggtactccagttgggactgggcaaaagcgcatttgggtcgtttcaaggagaacttccctgaaagcaagagcttgaacgctgtttcgaggtgacccacatggtccgccatggttttactatagaccaacacatcatcgaagaagacgatgatgaatctgcgtaagcagggctgaaagagctgattcatagtagcttgaaaggttgatagagcattacacaaaccatagggcattactcagaactcgtaatgcccttgatgggttctgaattccgtttgtgaatatcatcatct

SEQ ID NO: 18851 - DNA, 379 bp, Glycine max
agcttgtctctgggccctctctttaaattccttgtttcgtccatttgggctcccttctactttatttgttaatgattaatggtgatgggtatttatatatccatttggaaaatgactaatagagtctttgggttagagttcaactgaacataacctactttttttaaaaaaaataaaatctactagtgttattacttctctattttgtgcattgaggtgtgcaaacagacattttgtgcttgcgagtgtgtttgttttacacaaatcatgcgttccaaagcacattgaacaagcgatttttgtgagagatctttggggttgaacatgatttaatgacagcctgaagctatgtttgttttggcgtttaccacattcaacg

SEQ ID NO: 18852 - DNA, 412 bp, Glycine max
tgcactgcccaaagtggacaaccttccagaaaacgttgattccaccattgatgtcccttatgatgtcgttcagtatctcaaaaaagcctacgatgatttgaaagaacccttgacctgttttctcaaatcttccaaagttgattggcatttctatgacctaattctcttctgggcagacactttggattctaaaattggtataaagagttccttttataacatctgtacttcaccatgtatgggcttcatcggacccccttcagtttgttagaccttgatacctcaataatcttaagagggataggcttagaatgcagaaaaagcaacaacaatcaatttaacaatgttctttaaacatgcaagacacaattgattgcaacaaaataaataagataagggaagagagaatgca

SEQ ID NO: 18853 - DNA, 146 bp, Glycine max
  unsure at all n locations
atttcacaccgcatatggtgcactctcagtacaatctgctctgatgccgcatagttaagccagccccgacacccgccaacacccgctgacgcgaaccccttgcggncgnatngaatataacttcntataaatgatgctatacgacg

SEQ ID NO: 18854 - DNA, 342 bp, Glycine max
tagcttgttaacccatggaagctcctaatatctcccacactttttggggtgggccattcttatatggccttgattctctcagggtccacttggaccccatttctaccaactacaaacattaataaaactatattatctacacaaaaagtacacttctctatattggcatagagagtgtttatcctaatgactgaaagaacttgccttacatgtcctaagtgatatatgctcttactatacactaaaatatcatcaaaataaacaactacaaatctacctataaaatgccttaatacatgatgcataagcctcataaatgcgcttgttgcattattgaaccca

SEQ ID NO: 18855 - DNA, 421 bp, Glycine max
atttgtaaactaacaaggggggcctatgcgattttagctagtgctaacaagagcacacgtcctactagctcaaatacaacacatatacacacagtgtaaaatggaacaaagaccccacgtcctatagcaggatattggtctagacaatctatcccaaacacgacttagcccccagttaggagttgcaataataagacattaacataagctgatagacgaagaagcttaattttaaacgaaaaaacacaatggtagaagtgcgaatagacaccctaaaagcaggcggcacaaggatgaacatgaacacaaaccagtggcctacaagacccacgacatactagcttatgcacaaataaggatgattgagtgactcaatacatccctacagatgagcctgaacatgaaccaaatgtccattgtt

SEQ ID NO: 18856 - DNA, 478 bp, Glycine max
  unsure at all n locations
cgaaactgaacctgatgcttgagaattcgaaactacaggncgaatncacctcggacctcggggatcctctaaggccaacctgctggcaggtaccctttttgcggaagaaggaaggaggcgccggaactcatgactttccttggccaccaggggtggaggatcaatggtctggatggtgctcttataaaaaaaccccatggaatcacctgctgccgtggattttaagcctgatcggtattccgtccccctcggggtggcatatgctgttattgcttgaacctttgcctagtaatggttgtgggacccacatttgatcggccttgcagatgttttaacgataccttttggggtcttacccaaactacacactttgcatttggctgagttatggcgcgatatataacatactggatggcatccggttgtgaatcgcatactcggactctttctgggggaactacaggacctgaatacactg

SEQ ID NO: 18857 - DNA, 402 bp, Glycine max
  unsure at all n locations
ggacacttagaatctcagcttctaaatagganaaaacaacatttaagatatttatagcttgatataacatttattctctgcaagcgaaaaaagtccttcttaataattaaaataaacccttttcggaataatgatacgtactcttctaaatgtttttttgagaagacactgaataattaagcattaagtacttattttatagatattcggctcaattgttattgaaagcaaataaagtgaaatttattggagtagtacataaaggggaaggtggggctgtacgtgaagcggattgcccatgggccatggtgactatcactatcaaagctgggttgcgccacctccgcatgattcatatatgaaaacgaaatgcatatatcttctcttgtgttcaatgaaata

SEQ ID NO: 18858 - DNA, 400 bp, Glycine max
agctttttaaaaggacaagcaccattgctaattccgcgtgacatggcatgcagtggggtttcttataattgagttgtggtctcaaatcaaaacattacctatgatcatttaaactcaagacagaacaagaagactacatgcatggaagataactttactcgcttgatggaaaactttacctatgatcctatggaaatttcttgatgtctagggattggttgaggcatgcatgagccactgcaattgaacgaaacactgaaattatttgtcgttccagcctatacaataatcttataggtgaatccttaagtttctatatatcattgacacctttcctggtactgttggattgtctttctattttaccacttttaatcaagacaacaaaaataaactagac

SEQ ID NO: 18859 - DNA, 435 bp, Glycine max
  unsure at all n locations
tactcaagcttcttcttcaacctgtccacctgaaaagtaagttggagacctcatctcagttgccaattagaagcaagaaagtgaaacccagataagaaattggagaagaaactatgccattacatcttgttgcaaagccagttttctgtctttgcttgaagtttttccacccttaacagcattatttgctccccctcgcgagcttccccgcatctctgccttttcattcaaggctttagaggttagaatcaaactatgcaattaaaagcacagtntgaaagtacgcgtatgtcttgtgccagattcgcaagtaaaaatggagaaaaaatattgaaagcttgagattacagaacccaacccaatcatgaattatgaaaataaagggtatcttttcttttcctcaattcattcccttattatgatacggtacttaat

SEQ ID NO: 18860 - DNA, 400 bp, Glycine max
  unsure at all n locations
agcttattgccacatcactgcactcattttgaatatgtgctgaaattaaagcagtccacatcacagtgcttttaaggttagaaaactccgacataaaagaattcgctaccacataaaagacccctcttcactatagcacaatggatcagcattcctaaaattaccttggcagaacccttgcaaacatctatgaggcttgcaaatgtaatctcagatggcttcagtcccaatatctgcatctcataaagaagattaatagattcttttgtgttttttagagcatatcctgcaatcagagcattcacagagaccacactctgctccggcatgctagaataaattntatgtgtatcttcgatgtccccgcactttgaatacatgtcaataagagaacttccag

SEQ ID NO: 18861 - DNA, 406 bp, Glycine max
agcttatcctgtgttttctacccgttattctgtgggtaaacattataatgatttctttctaaggcttcgttaacaatggtgttcgactaagttttcctttcacttgatgattttaattttatcagtgcagtgaagtatatggggaatgtttttaacagaattaccccccaactcacagtgatatatttatggttatcaaccaagtgctgtaaatgactgttgccattgggaagggatgtctaagctgcttctaacttttccagattagcctttgttgttctataaatgtaatgtcatattactcatgtctgaatgctatgtactgtgttcatccaacgggccattccgtatactgcagccgttcctatctctattacttaacgaagattagatttccaggatcact

SEQ ID NO: 18862 - DNA, 393 bp, Glycine max
agcttatcttcgatctcaaaaaaacaacacatttctattttgtgaggatgaaaaacatactgaaaattttgcaaggataaattccgaacattttgatatttataagaacaaaaaatatattttagccttgtttttattgttaaaaaaaaaaaagagaaatgctactaacattttctttaacacactccttcatacacactttctcttatgtgttaaaatgtatttagttgaagaacaagttccacaaaatcttgaacctaccaagtgtgatggttgggattggtatgagtgggatcatttgccacaccctttggttgggcctcttgagaaaatggtcaaaggagctttcgacccatttccaatttgattctggtaattggtatgaattttttt

SEQ ID NO: 18863 - DNA, 413 bp, Glycine max
  unsure at all n locations
ntaacaaccgaatattctttgtcctaccaagccactgttgtttctattctaatcagaagatatgttgtttgatttgctaactgattaaatcttaatcatcttacaaacaaatgtgaaatctaagcatttagttttttgtcttagagtattcaagatgttttgagagcttttcaaactttataagaatatacaaagagttttctacataaagaatttgaatgatagcgtgtaggttcgttactcatttcttcaaagcatctagtatttataggttttcattttcaagtgtttgttgtttctaaacgattataattttcctttgagcttgcatctgaagcttgtggttattagatcatttaatgcttgcattaaacgcatatcctgcttcatgcaggaaaaccactatgattggc

SEQ ID NO: 18864 - DNA, 362 bp, Glycine max
agctcttctccatctttaatgtttctaaggctgaaatagagaaacaatgtgaataacaaattaagatcgtgaaatcacataaaggtaaagagtatgttgattcacgaaagcggtcaggcatttggtccatgcgcaagatgtccttacatacatgggactgattgccgcacactatgcttggtccttaggatcacattgatgtgacggacagaatatatccaactttaatgtacatggtgaaatgtgcagggagtaatgccactgttcctctatacttgtggattaatgctcctatgacagctatgtatgcattaagaagatttctcagcaatgttatctcacatacaccttgtgagttattc

SEQ ID NO: 18865 - DNA, 321 bp, Glycine max
actcaagctacttgaggagatgtatccacaaggggaaaaggtggacactgttttgtctttgcatatatcaatatcagtatgcaatggttctcccacttattgatcctgtatgaatgcaggctgagacaacatgggcactaacagtgctagggtatatggcaaaattcgatatgggaatattagggtaagcaacgacatgagaatcagagttgcttggaatgctggatgctgtatgaccctctatgcatagttgtacggatcttatttcttactaccatgggtcatatattgctgatgggcgcatttgttgaactgagctgt

SEQ ID NO: 18866 - DNA, 379 bp, Glycine max
tcaagctttcatcaagtggtatcagagcacaagagctttaagtaggtgctccttaaacctccattaattttttgctttaccttctcttccattgttgtttcttcatttttctccatgtatctcctcacatgtcttgtgataaatgttgttaacatgattctttagagtttccaccgattaaatttgctatagaagctagatttgattttctatggttcaaatttcttgttcttgttcttgaaccatgaattgagttgagtttaggttcctttgagttctgtcttgttattatttgtggctaaaacctataccataaaattcttacaaaaacattaaagtagaataaaacctcataaatctacagtgacttgttcaccta

SEQ ID NO: 18867 - DNA, 342 bp, Glycine max
tcttcttaaggaatcttctcaaggaggtgagcttagttatgaaaagggtgtgtgtagctaaactctagcttctcaaggaagttttctcaaagaagcttctcaaagaagttttctcaagaaagcttctcaaggaagctacctattctataaatagaagcatgtgtaacactacgtgtaactttgatgaatgaaagtcttatgagatacacttcaaagttccacttctttccctcttttattcccttcaatttgtgctccccccttctctttttcttttcctccattaaaagcatcctcttcaagcttcttatccaaggcaattcttggtggtgaagctcattc

SEQ ID NO: 18868 - DNA, 388 bp, Glycine max
agctttttcctatggctgaggccaaatgcagtgttaacttggtttgaatttgaggaccttatgagggccaccgacaatttttcacctcagaacttcattggaagaggtgggtttgggttggtttacaagggcattctacctgatggctcaatggttgctgtgaaaaggcttgaagaatcagattctcaaggtgatgctttgttctgcagtgaggtggagattgttagcaacttgaagcaccgaaatctggtaccgctaaaagggtgttgtgtggttgatgaggggaatgataatcacaattctgagtacggaagaaggtatctagttcatgaatatatgccaaatggtagccttgaagaccatctctttccaaccaaactagacaatc

SEQ ID NO: 18869 - DNA, 414 bp, Glycine max
tgttaagctctcaaattgttacaaataaaatataagcattctattatttttcactcgtcagcttgacggttcagtgattttacctgtatttcattaaattttttaaattattttataagcaatttccaaaataaataaaatagaagcaaacttatttcatgctggaactgtttgataattcagatgaaactgaacactttaacttcagttaagaaaccactgcccatgctatatctgtattggaacatattctacaaatttaactaaatacatatatttttaatatgctgcatgtaaacttacatgtctgacttccgacccaactgtttctgtggtaaaataatttgcaccgaatgggaatcatcagtgctggggattgggtgactcattatggctattgctcttgcaacccta

SEQ ID NO: 18870 - DNA, 366 bp, Glycine max
tgctatatatatgatgtactttctaacatgaaaatttctggactgattcatactgaaatggatcagcttcctttctttctgacggatcttgtacaaataaagacttgaagggtgaaaatatacctttcttttacttcgctcagactattatattgaatattttttcctaccctcgtttttacttggggtgttcctcatgtcttgaaaggtgggtgagataactagacacaacaacaaagcttcatcccatcagacgaggtcgattacatgaatcacacgacaccattttgacacggctaaaacccatagtctcagtatatcgaaataaaagtagacatctgtttttctcttctggtactgcactat

SEQ ID NO: 18871 - DNA, 413 bp, Glycine max
tgtgttctgtcatgtccttttccggggttcctttcgtctgttgctcatttcatcctctattctaacttcaaagttttaactttgaatgaaatgtatagttaaaaatgacctagcctagattttaaattttgaatcaccaaggctttagtaatggacaatgaaatggccatttatgcatttactttttaggatcaacatatttgacatgaatactctacactaagtgtgtgttggtatagtggtcttagcagggaaattgtatttcaaaaggatggctgtgtcatcaaaactcctaaatttgggcagttttcctcttaaataacaagttaacaaagacacttcagggactctaccctgtaagccacctacgtcatgtcctgttttatttataaaatgcactaaacatggattat

SEQ ID NO: 18872 - DNA, 396 bp, Glycine max
tcaagcttttatggatttgcacgcttcacatttgagtatctctgcggtcgtccggtacattatttcttttagtttggttattgtctaaattatttttccagccaatataattattaaaccttattgtttggtttacttttattttttacttaaatggcaagttgatattgtgtgtttcattaaactcttcacggctcaaatgggtatgaacaactttcaagagttagttcatacttcatagatatgatggtacatttgatgattaaactctttgcattctgtggtttattctttttttggcgaccttgtagcatctattattgccttgaggtagagggaatgaaagtcttggagtacagatctagaataatgtaagacttattatgctaataatgt

SEQ ID NO: 18873 - DNA, 413 bp, Glycine max
tatccttatggcttgcctccgaacttcacccttcgtgccttcccggattatttaagccaagcccctactttcgaggggcaactcctaccttatgacgactatcccgggcaagacgatgaggaaggagatacccatgttggccccctgctccacctcaaagattcgtccccccatgaactaccccaaccgaacatagtccgccatatcccggcttcccccacacccgtgaaggaatctgttcccttcgcagaagataagggaaagattgaggcgcttgaagaaaggttaagagcagtcgacggccttggcaattacccattctcggatttggcggatttatgtctcgtacccaacatcgtcatccctcccaagttcaaagtaccagactctgataagtacaaagggacgacatg

SEQ ID NO: 18874 - DNA, 396 bp, Glycine max
ctctagcttttgaaagccctcctgattctgcaatacatttctgactctatggcatgacatgcagtgcatagattggacctcctgatagtcgttatcaaagaatagcttacacacttgtgctcgagtgaaacagctgctgtgagactgtggtttgagctactttccttgatacctgtcttatgattaacttcatctaactgtatagatcacattaagctctactctttgtctagctgcatattctgggaaaacaagtgatacgtacacattgcttcatctttcacatcatgcaatcaatcaattataatgcatacacctttcagcagtaaacactgcatgatttaccacttgatgacaagggagttgttctctgatgcttgaggacaagcataacta

SEQ ID NO: 18875 - DNA, 309 bp, Glycine max
taactgtgcatgcggtggatcaagcacgatctccggcaatgtcgactgatgatcgtgtggctccagtacttcatcactatcttccataatgagcacgaacaaggaggaagagcacttgtggccgcgtgaatacttttaatcacattggatgcataagccgttctctgtgcacatagctagttcctccagcgtgaggcgtttaaaaggaactgtggaagagttggtacgcgccggtgtctgtaataatggaggagtagttaaagatgtatatgttggaggttgtcgagagcttgaggatgctcctgtggt

SEQ ID NO: 18876 - DNA, 373 bp, Glycine max
ttgctttaatatagctgctgttacaaacacgctaaaaatcatttcatacaattctctcattggaacagcaaaagctatatagacaagagatgggaagtgctttggatagctctatccatgactatttggaagcatagaaattcagtggttttcaataaccagattttcaaccccgaaaaagtcatggatgaagctttattccacacttggtcatggttaaaatgtatggacaaagatttccatattcatttcaaccaatggtctactagcttgaaggaggagctgtcttaaggggttctttcctttctggtttcagctattgcgtttatgtatcttatagttgggatcggcaattatctgccttgcatctttt

SEQ ID NO: 18877 - DNA, 399 bp, Glycine max
tctttgtttttttactggatattttcttcttgtacagtcatgtaattcgagtatttatgtcatgtaatttcaggaatcttcctcacttgcatagttttgcaaaacaaaaaccttatttttaacaatgtttcttaattttagagaatatgtttagatacgtacgtagaaaaaggtttaaaaaaatatgaaattatttacatataaaacactaaacagggaggagttattataaatttaaaatagatggaacaaagtatattatcatattatatatatttgaaatgatgagaaaaaagatgaaaggcagatgagtaagaagaagatagccagaagcataggctaagattgtccaacacatgtggatagcaggaaaaacgagtgtattgatcaacaacttcc

SEQ ID NO: 18878 - DNA, 381 bp, Glycine max
aactatataagtattaaaaaagcacttacaagtacaacacaatggtttacctgtgatcgaagaacttccttgtatgtaccaatttctcgtaaggctatggtgaatttggtcataacaggacctgtaatagaaactcagtcataaatcatttcatcaccattagacttttagagttaaaggtaacatacagacttaaaatcaaattatgaagtcagtttagtcccaagcacagtcagtagtcactaaattatagagaaaaactgcaagcaaattatctcagtaagaattgaaattaatagaatgaaatgttaactgagtcaagtattagagtcatcgtttttatgattgacagctcatctggggtgctaaaaatggaaacat

SEQ ID NO: 18879 - DNA, 398 bp, Glycine max
  unsure at all n locations
taggcccatggtcattttgatatgaccaacatgatgtagtatgccctaaacctagtgcctatgcttgttaaagggcatccaatgtcaatgacaggatagccaaacaaaaatgtggaagctacttcagtgtcctttccatgtctttaaaatatcatgaattcagtgcttaacaaagcaagctaaaaactcatttgtgacagcttgccaccttgtcatatgtgtttgtttcccattgtttttgttgctgctgcattttctaactgcatgtaaagttaattggttacccattttctgccataaatttatgttattacattttggaatttcaataatggcaggacatttttttttccattcctttattatccatacttcttgtaccatgttgctnttgctgg

SEQ ID NO: 18880 - DNA, 402 bp, Glycine max
agcttgaggggctcttctctgagaagattctgcagacaaaggaaaacagaaaattttgaacaaattttcaaaactctggctaaaatcatctaaaaacttcaacatagcaaaagtaagtaactgacattgctaaagcatgcaagaacccgaggaacaccctcacttggaccatcaatgccaggaatgaaatccattcgaggtccaatccagttaaaaggcctcacaattgtgaactccaagccattttcagcaccctcagctgccaataatcacacatcagtgagaattaacaaaattgaaaaagaaaaaaaaaaacaacacctaaacaaaaacaaatcaaaactcaccataaatcagcctctcaatcaactgtttcgcacaggcataagaccacctctgttt

SEQ ID NO: 18881 - DNA, 431 bp, Glycine max
  unsure at all n locations
atactcaagcttgcagaccagtgatntgtttgaggtaacaaatccgggatgctgttgcatgtagacctcttcctctaagatgccattaaggaaggcattgttcacatccaactgctgtattggccagttattagtgacagcaagagtaagaagaagtttcagtgataggcttgataactggtgagaatgtttctgtataatcagtaccaaactgctgatgaaagccttttgccactagtctagctttgtacttatttacagtaccatcataattttctttgacccgaaacacccacttgcaaccaatatgattactatcaaggctccatgtattgtttttaatcaaggcatcatactcagtttgcatagcagccaaccatgtagtatcgctaaggcttgtttagtagatatgggttccaaatgagtcaaaa

SEQ ID NO: 18882 - DNA, 395 bp, Glycine max
  unsure at all n locations
agcttgagatgatgttttgttgaagggtgaaacttcctgcttttattgttgaccacagagtggtacctggagatatgtcgtgggggtcaggagaccttggggacgtcaggtggggtgctattgcccaaaaccaagcttgaccaatcccgacccaacccgggcatagtcggtcagtgagaacctgtgatgtacctaaacaggcgagctcctggcagtcaacagataaaaggaacaaagaccacaaagcaaggaggcttgtggtggctggccagctgtgaattttgtgtaatatgtggattatggcctctggtaatcgattaccaagggtgggtaatcgattacaaggcttanaattgaagacaggaggctaagatggtctctggtaatcgattacc

SEQ ID NO: 18883 - DNA, 421 bp, Glycine max
  unsure at all n locations
ntataagcgcgggtctgggagacaaaggtcaagtggtcgctatatgcgaatatgatgttccgagtacattggatttggtacgaccatgccctcctgatttccagctgggaaattggcgagtggaggaacgccccggcatttacgcaatgagcataatgtaaacctttacggtttttaaaagctctatagttgggcctaggctttagagtttttccttttgttaaggctctgtgtcttttgttgttgaatttctaatacgaggacctttcttcatctgttcctgcgtctctacccattctcattcatttgcatgttcacttctttntttgaaacggcagatccgatgacgagtcccccgaaggtactaatacctgggacccgcttatcgacttcgagcaagaaatgaatcanacggaagatg

SEQ ID NO: 18884 - DNA, 397 bp, Glycine max
  unsure at all n locations
agctttatatgcatgttcaaaggaaaattataatcgtttagaaacaacaaacacttgaaaatgaaaacctataaatactagatgctttgaagaaatgagtaacgaacctacacgctatcattcaaattctttatgtagaaaactctttgtatattcttataaagtttgaaaagctctcaaaacatcttgaatactctaagacaaaaaactaaatgcttagatttcacatttgtttgtaagatgattaagatttaatcagttagcaaatcaaacaacatatcttttgatttgtatagaaccaacagtggcttggtaggacaaagaatattcggttgttaaagcttgatgataaactntgttgtgagagctaaaagtaacttttgtgaaattagtgaaa

SEQ ID NO: 18885 - DNA, 413 bp, Glycine max
  unsure at all n locations
gaggtctttntatatgtttcctcggaatgtttttgcataagattttatgattatgcaacaaaatctgctttttcaaatggaaagttttcttccggcatgaaaatagattgtagatactacaaagtattttaaaccttggtgtgagttagactaatatagatacactatagtatttgatgatacactgcaagtgaaatggtcatccatttattgttctattaatgcactcacaatgtctttacatgattagctgaagatgtttctatatgatttgttcttctagactacgccttgtcactgttatatcctcaaagatatctttgatactctctcaatccacttttaagacttgatgatcacttctttctcttcagaaagtaatgatgangacgatcaccatgagcactggaatg

SEQ ID NO: 18886 - DNA, 402 bp, Glycine max
agcttgatcgtcttaaactgagttataattaaccttctctgaagcgatcaatctagatagggataaacaccatatgatgcccagattttacttccataacaataaatttgttgattactaactgaatctatttcagttgattaaaaaatgtatgttttgttgtacatttttagtattgaagttcgatcatccctttaaataaaaaatagcttatttatttttataataattaacttaaaaatcatactaataaacatctagttaattgataatataaatatatattaactgtgctcttatatcaatattattattattttatcatgattacataatatttttggcaattaattccgtagatatatatatatatatatatatatatatatatatatatatata

SEQ ID NO: 18887 - DNA, 417 bp, Glycine max
ttagttaggcatacacaatattaacttttgtaatattagacacaagttattattagctttaggtatatatacctaaaattttgacacacgtaaattttgagctttgttaatactagggtaaataatttttaggttttgtaataatattaggctaaacaattttgagttttaaataaatgagttgattagttatattatttgatttagttatttttagtttgaatttttttaatatatatatatatatatatatatatatatatatatatatatatatatatatatatatatatatatatatatatatatatatatatatgagagggtagtgtgcgtgagtacctgaggtgttatatatttagtgtgtacgagaatatactatgtgttaggagatatacgttattaaatatatgatac

SEQ ID NO: 18888 - DNA, 391 bp, Glycine max
agcttgtctgttgttattttatccaaccacgtcagggccttctttgtctgagaatttatcaaggagtagtgctccttaagcacgctagtgaaaaaagaaacattttgtttctcacctccacaagttcctttcaaatgaaaccctggcaagtgtgttatcttacagatattatgaaaatgttgttcagggacactacaactttgatacagagggtcagtgttcatactacaaaaccatgctgcactagaattagccatactattgtctacaagctttcgccacttgtgacaagcatcacactgaatccatgtatcattgtactcaaaacagtcacctttaggcttcccaagcgacttgttttgagatacatgagatgtaacatctaatgcat

SEQ ID NO: 18889 - DNA, 436 bp, Glycine max
  unsure at all n locations
tactccagcttctgaacagggttctcaaccaacttctgaagcacaaccatttagtatggctatttctcaagcactaccaacttctcaagcaacttctaaaatagtaagagggttgtcttttgagagtgcaaagtccaccaagttggtgagattaagtgatgttgaacttaaatatgttgttggtcaccatagaggtcttaaattaatatattgtacatcatatttgcagggaactagagcacctaccaaaaaggtcaagaagtctaaaagatcaatagttgttgcaaatgtattccctactataattgacagcttgaaaaagttgtcagagctgacaaaatgccaatctataaatgatgtgataaaaaggaaaatttgcaatcaacaagattgactaaattgtgtgacaggctgggttntccaaaacaaccaacat

SEQ ID NO: 18890 - DNA, 239 bp, Glycine max
agcttgtttgtgaagcttctaaggaggctagatctttgagcttcaatgaagtcctttaatggtgattttccaccatggagatgcagtggaagataacggagaagaggtgagaggaggcaccatccactagggaataagccatggaagaaagagcttcaccatcaagagagtgccttggataagaagcttagaaaggaagcttcaatggaggaaaagaaagagagagagggggggggggg

SEQ ID NO: 18891 - DNA, 425 bp, Glycine max
  unsure at all n locations
ctttaggatatacaacagaagaaccatgacaattgaggaatcaatacatgtttcttttgatgaaactaatattacctctccgagaaaggagtttcttgatgatattgtagattctttggaagatatgcacaatcaagaaaggaatctaaaaaggaagagaaatgaagagaacaaggatgttcaagctgacaatgactcatccgatggttcggagaaggagatcaaccttctatccaaggactatgaaagcaatgagaacatctctcaagaagtttaagcaaaaagcaaaagtctgacttccatctttaaagatctaggcacttaaatcatgaaagaggtaacatcaaaaccattctcttttaaattaagttggttgaaactntcctttcaattaacttgtgtatatgatgactaacaaaatttta

SEQ ID NO: 18892 - DNA, 375 bp, Glycine max
ttgtgcttgctatgagaaatgttagccagtctatggatcgatcgatacagataagcttgaaccatatcccggggagagagtgatcttagattgcgagtaaatgactaacatcgagcagtatcctttgtatcagactctgaatgaaatgcataagttgacatgtgatgaaggccattgtcctactttcaaactactttagtagaaagcttaccttgaattataattgtactcctttgcaccctttgtgagctgaattaaattttcaaattgaaccctgtgctagactgactatctccatctaccttgcttaagtgctacgagagcatatggttcaaggcgattttaacctactatgggggagttagttgggatgtg

SEQ ID NO: 18893 - DNA, 412 bp, Glycine max
tgtaatcgattacacacatactataatcgattaccagattatattttcataaaatattctcaattgtcacatcttttcatttggttcttgaatggctatcaaaggcctatatatatgtgacttgagacacgaatatgctaagagtttttaagaacaaaaaggtcttatcctcttaaaaagcaaaatcgtattatcctcttacaaattccttggcgcaaaacacttgtgattcaataaggaattatttgagtgctcaaattgttcaatctatctctttcaagagagatttcttcttcttttcttctttattctgaaaagggattaagagaccgagggtctcttgttgtgaaagaattctaaacacaaaggaaggattgtccttgtgtgtataaaacttgtaaaaggaatatac

SEQ ID NO: 18894 - DNA, 350 bp, Glycine max
agcttgaaatgtaaaatagtaattaggagatcgaaaaaagtgggagttattgtttggacaagtggaagaggcgtattccaaatggcaaagccaccattatttacttttaattaattggttgagtttagcatcttgtttttggtgctacctattgcttgccgtgtttgcagcaatctcgcgttgcccagtagaggacacgcttgtcacagtctctccatgcatcttggatgaaaatttggacttcctcgatcaaacttatgtaagtttcaaacaagaggattcattgaaaaaattatgtcaaacaatttcgtaatagggaaactaaccgattaaacaagtttccccttcac

SEQ ID NO: 18895 - DNA, 403 bp, Glycine max
tgaagctggggtaatcgacggtttgctgattgggcaaagctctgcgacgcaaaacaaaggaaccaaatgagagaatggaatgaatgtggagagaaaatggaagagcagagagagagagagagatcaatagcataccatgttttgtgtaggggagaaagaaagagcgaacggtgaagaaagtgatatgtattaagagagattggaaagaaatgaagccaagggtttataaaagatcgtgtttgtttctagagagagccactcttagcgttaacctcacgcacctcttccacctggactttgctttatcacttttaaatgggcctgcaaacataattacacggacagcccaaactagcaattaccacatataaatatctttttgataaaatcattctgttttgtt

SEQ ID NO: 18896 - DNA, 393 bp, Glycine max
agcttatgacgaggaagtaatttttctagtgtacaatacaatacaaaaacattgacttttagattaatataatttcatagtattatatgcatccttcatatcttatctccatttctttttcagttgcattgtaatacccgtcatcctcggtcatgagcaccacctacctcctccgagtgccgccacctccaccacgtcatagatctgagtgagtgcattaacatctaccccaccatatctgcgcttgcggcatcaccaccgacctcatcaatgccgcgctacccaaccaggtccctgtgcgtgggaccatctccgaccatgtacccccatctgttgtgcacgcgctccagctccacagcatgctacaccgtcacacgcgactgcaccagcaac

SEQ ID NO: 18897 - DNA, 418 bp, Glycine max
gtttacatagatacatagatacaactatcatattaatgtatcggaaatgatgaataaaaatcagaagaattggaatgaaatgactaagacaatgatgaagattaacagagcaccagaggaaatgttcaacatagttcatattaaggatcatgttatgaatttcaagactattcttaaataaacatggcataatatgacacatcagtatcgcttatattagtatactttaaatgtaacctcatggtgaagtgagtacgtcctttgatgcatgatggaaggatcaactagagcatatttagcatctgctcgacagtaatgacaatatgcactttgttaaatacaacctagatttggtgaacccaactacattggctggatggatagaactcatatatttgtatggactcataggaaaaca

SEQ ID NO: 18898 - DNA, 356 bp, Glycine max
tcttgcttctattagttatgaagaacatttttagtacttatcttgattgagtcttctcttgattcttgaatctggatctcgattattcttgaatcttgatgcttgaaactacattgtatcttgtaacctgattattcttgaatatgattctttgaaacttgattcttgaagctttttgactcctgattctgtgggacttgcttagctctagattctctggcatcatcaaaatgatcttggaaagcattgcttccacattaatcaatccaacgatccatgttaagcaataaggaattcgagttttggttaagtgtttcgaaatctgtagcgaatggtcatcctgttctcggattcta

SEQ ID NO: 18899 - DNA, 413 bp, Glycine max
  unsure at all n locations
tcatcaattcctcatgaaaacatagagcagcttanaagacattgacgataatgttttttttttttttttgtctttcctacatttaatttatagctttgtggatctgatattttttttttttgtttgtctgacatgccaattgctcgattttacaagaattgtgcattatttatcgaggggtctagctcacttggttgagctggaggtgtaagtgctataaactttctaatattgtgtttaatgcttacgaataaaaataatattagcaaagaaataaaggtgaagtgaatatgaacaacgtcatgttctctaagcataataatacgatggagtaaaacacgtgtgatttccattgggctttgaaacctgatcttgcttgtgtgcatatgactttgtgttatacaatatcttct

SEQ ID NO: 18900 - DNA, 295 bp, Glycine max
agcttcctaggggccattgctgcaaatgcgaacgtttgtaacgcttgctctaccatagggacgatactcttattgctgacatggcatttgacctactcccatagacacagacttcattgtatatctagagcaagcttatgcgcagatttccttacatacgttctcttgcacatgactttttattatccgaataaaactatgcacctatatacaatctaggcaactacgctgcctagattatttacgcgtacttccactgtgtattagttacttacatcacacacaatctcttggc

SEQ ID NO: 18901 - DNA, 322 bp, Glycine max
tgccgtgtgcgcacttgtaagggtctgatcactgcccttctatggcagtctcaaatcgtgactgatatggctgccgaccgcactcaactagcaaaaatggtcgagaaagagggcgccacccataaggaatatgcgcatcggaggaagaacttggccgcccagatgactcctgccatggtatgcgagagagatgaccaccatgatggaagacactctggcagagttctactatgagaagctcgcgagttacatgcgcgacagctgtgcagatctagtacttggcggggaacgaaccagagtctgattgatcagaggaacgtca

SEQ ID NO: 18902 - DNA, 400 bp, Glycine max
agctttgagccaaaatcctgactcaccataaaccttgacccagggtgagaatgtcaatccttaccctcggaagcaaaaaagaaaagaaggaaaatttccaatcaaagagaaagcaaaaagaaaagaaggaaaatttccaatcaaagagaaagcaaaaagaaaagaaagaaaattcccaatcaaagaatgggagaaagtaaaaaaggaagaagaagaaggaaagaaagctcctgatcaaggatcgaaagaaatcagaagaaatgtgcagaaaagtctttggaccagacaatatctgaacagtacaaaattgtcaccaaataaacaaaaaaggaaaggaaaccacgacctgaaagtggtcttctccctttgattaccaaccaaaatcctgtgcgtcggtgac

SEQ ID NO: 18903 - DNA, 434 bp, Glycine max
  unsure at all n locations
tacttgcttcgtggactntgttcttttattggttgactgccaggagctcgcctgtttagttacatcacaggttctcattgactgactacgcccgggttgggtcgggattagtcaagcttggttttgggcaatagcaccccacctgacgtccccaaggtctcttgacccccgcggcatatctccaagtaccactctgtggtcaacaaacaaaagtaggaagactgactcttccacgctttctcacatcaagcttagtggattatggggcacccatcatatgtggtactaggtggcgattgggcgatggcacaaatcaactctcccatttccacaaatcatacataaacataccatccccagttgcccaccttcatattgagctcacgcactcccacctagcccttatactcgttcctctcagcaccgggtcccca

SEQ ID NO: 18904 - DNA, 393 bp, Glycine max
agcttttcgattcattctatgtacccgtagtggtccacattgtgtttcgtgcatttttattctcgttttgtttactttttataccccctgttgacgtgcttaagccattttacttaagtcatttctcgcttaacttaaaaataaaataaatttccaccgaacgtttgaattgtattatccattaacttcggttaaaataaattccgaccgttcggtcgtgccgtaaccacgttggaaatcaaaaagaggtaagaaataatataataatcaaaaagacatcttttagtaaaataaagcggaaaatcaatcggacgttttctctttgggatttctcattcttaatcgaattgattaataactaaagtgagactaaaggctaaaatcaattcgcct

SEQ ID NO: 18905 - DNA, 431 bp, Glycine max
  unsure at all n locations
tgaagcccttagttntgctttgataattatgcaatgccaaacatgtttaatggatgtggcatttgtattgaatgttttagactaggcatgtgtgtgatataagtttttttcatgcttagtagtgatcaaatgtgaagtgaatgaagtatcctttgtctctaagtttcctaagtaaaagcaataggacttacctctacttgaaatttggctgcaaccatcgaattaatcgatttcctagcttggtaatcgagtaccaaagtcagtttcagaagaagaaaggatctaccgcttaggataatcaattgccttcctagataatcaattaccctgcttctaaaaacaatgggaagctctttgtgtgattcatcgattactacaagtgataattgattatcccagaaagcacagaaacattagaagtattcagactg

SEQ ID NO: 18906 - DNA, 319 bp, Glycine max
agccttgcccgcatgcctgtccaacatctggtccatgaacggcaaaggagaatgatctttccttgaggcttcattgagcttgcggtaattgacgcatattctcacaaccaacgataaacttcgttgggattaggacattcttgtcattgcaaatgactaccgtaccccctgtattcggcaccacctggactacgattacataaccactgtgggaaatggggtacatacgcccaacactaaaaagctgaagcacctgtttcctcacctcttacttcattgatggaggaagcacttgtatgaggctggctgactggtctat

SEQ ID NO: 18907 - DNA, 417 bp, Glycine max
  unsure at all n locations
gtacacagattttagtaatgacccactaacctagaattattataacttatggccattaacctagggaattaaaataacttaatggttgagtgtaactgaaattgtggcaaccaaaagtcacccccaacagccatcaatcagccaccatatggtctcccaaaaggttgatgcctaggttgccaattgggcccttattacaacttgaactaaacctaactaaagcctttttagttgattaacccaaaacatatttttggtcagccaactttacaaggattgggccattatttagacaaactaaacactctaaaattgagacaaagtggtgccatttagtcctcctccatttgggccatgatacaactcacaaccttggactnttctccttgaaacttgngcttgtattcaaatagtatg

SEQ ID NO: 18908 - DNA, 387 bp, Glycine max
agctttgcgaaaagcttgccgctggagctgacccattaaccgccctaggctcttgaccttgaccttgacttgatagaacttatttttaagtgaaggcatttgaattgatcccatgttttactaaagtgaacaaaaatcggtgcgaatcaaaactccgacatcaatcatgagtggaatggatgaatgcatgaagaaatgcatatgacacaaatgcaatttatgaatgcgggagcctgggaaattatctctttcttagatacaacgtcttggggtagcacagtgcccgacgtatgtatttaagaaggtgacacagaccctccattggtttgccaaagagaggggatcaagacaaaacccgtgcatgatgcatatgcgaaaggcgcaaca

SEQ ID NO: 18909 - DNA, 422 bp, Glycine max
tcttagggcatgccgggttctacaggcgattcataaaagatttctcataggttgccaaaccacttagcaatttgttgaataaagatgttgctattttgtttaatgaagagtgtatggatgcatttaatgatttgaaaaccagattagtgtctgctccagtaattatagcaccaaattgggggcaagaatttgagctgatgtgtgatgcaagtgattatgccataggtgcagtgcttggacaaaggaagggaaaaaattttaatgctatatactacgccaacaaggttctaaatgatgcacaagtgaactattctaccacagaaaaagaaatgctggtaattgtttatgcacttgaaaagttcagatcttatctggtaggctcaagagttatcatctacactgatcacgcagctattaaatat

SEQ ID NO: 18910 - DNA, 392 bp, Glycine max
agcttgctgaggtcggtggcagactcaagaataatggaatgtgtagtggctttgtctcatacctccattacacttcatttgtacctgagcttgcttccctatttttattaattttgttcatgtttatgtgtgagttgaatcttccccgcgaggatcaaaagatataaaaaattgtaaatataagaatcaaaatgaatgtcttaaactatagggactaaaaaaaattatcacaactataaggactaaaagggtaattaaatcaaaattaaataaactagagcaaaataatggtggtgtggttagacacttttaatcctaattgtctccttgtagacatatatacctctacatatgtgtgcattttgcaaccaccaccattagtggaaaaaaat

SEQ ID NO: 18911 - DNA, 441 bp, Glycine max
aatactcaagcttgttagatatgcacgatcatcttccttgacaactccgtgattaagattgccgtcaatatgaagagagaacaatttagagagtgatcgaagactttcaaatggatttccactgaatttattcatagagagatcgagatatcttaatgatgaaagttttccaaatgatctaggaagagcaccaccaattgagttgttggaaaaaagtaacgtgtcaatatttttaaatgccccaatatgatctgtcagattgcctgaaagtcgtgaactctgaactgcaagtcttgtgagtccatgggaaatacaaggagcacgaatctctaaaagttcattaacctgttggttgagtttgagatatgataaatctatcacccttaagttgcagagattacccaaagaagttggaatgtttccttcaagttgattatgtga

SEQ ID NO: 18912 - DNA, 393 bp, Glycine max
agcttcttgcagttggacaacagtggttagcctctcgaaatctccacctaagtagtgtttgattctaatgccattcacagtccatgtccttttggtggttgggtcctccaatatcattgctccatgtggcataacttttttgatgaagaatggtcaaaccacttgcacttcagcttacttggaaacaatgttaatctagaattaaataacaatacttgttggccaagctgaaaattcctttttgacaactttttgtcatgatagattgttactctttgcttataaagattggaattctcataagcttgaaccctcagttcctccaattcatggagttgaagctctctgtgttcaccatttgcattcgagtcgaagttcacaaattataatgcc

SEQ ID NO: 18913 - DNA, 419 bp, Glycine max
tcatctgatgtattagtagataatttttaatttgcttatttatcattatagaataaaatatggtatatgtttttgcgggacaattttagatttattatcttttttttctaagcagatgtgatcgactacactagacattagcattggtgacaaatatattgttcaacctttgtaccatattattattattattattattactattattattattattattattattattattattattattactctctcttttcgttaatcttttctttctccaactttcatgcatcttttgttttagttattatgaaattttaattttgtttttgaaataaataatcacggctattgttcccaacaagtgtgttgcatctttggcgggcacaatcaaacaagagaatcacaatatcaaatgagtgagt

SEQ ID NO: 18914 - DNA, 379 bp, Glycine max
agcttttggcaaatgaagaagaagaagaaattcaagaggatgttcaaagagattcaaaggatgtaacagattgtaatcaatgtatttaaaatgcaagttaagttcttgcctttatagactcttcaagtctggtcaagaaaaccattacaagagttataacctttagaaaacctttggaagagttacatcttttgatttttattcaaaacttatcattggtaatcgattaccaaatcattgtaatcgattatacaaagcatttttgtaaaacgatgtgactcttcacatttgaatttgaatttcaacgttcaaacacactggtaatcgattaccaatatattgcaatcgattacaccattatgaaattgaatggaacatt

SEQ ID NO: 18915 - DNA, 417 bp, Glycine max
tgcaccactcgagatcttgagcagattcattctgggcaatgtatagtgagttgctagagaactctatctctcactttggtccttcaaacagaaagtgaatcgcatgtgataatgatatttgaggtggagtattatattttgtggttgcggcatctccaaatgcaccaaagtgtgatgcttaatctacacttaagctccatggggagggtttcaagaaggtgaatagttaagtccatagctggttctgcatggttcatatataaactaacctggttctagattcctgcttcttcccacacgtttctaacttgttggcagccaaagaagactcgtgcaatggactcctttcctttagattgcagcctggtacttgtagggagacagcattttaatgtacgccatagaaagtgcttgact

SEQ ID NO: 18916 - DNA, 308 bp, Glycine max
agcttgatggaaaactagacgccttggtgcaaccgagtaactcatcgagccttgaatcagacatctgcgcccgtggcaagagtctgaggtctatgtacttctacagatcaccatacagatcttaggccttctttggcgcatttagaagtcgacgagcaacctaaagctgatgctgcaaacatttataatagacccacctcgcagctaaatggactacagcagaataattgtgatcttttaggccacatatacactccacgttggagaaatagatcgaattagacatgggcgagtcctccagaacgaca

SEQ ID NO: 18917 - DNA, 413 bp, Glycine max
tggcttagcgcgaggataagaccacttagcgtggtttgcttatcagaaaagctacaactctcgctaagccaggctctggccggcttagctaaaatgatgcatcttaagtacaaaggagcatgcgcttagctgataaggactcgcttagtgcttacattgccacatggaatttagcttaactgccatgagtggcgcttagcttcatgaacctctgttctgaccgtaaggaatttagcttggcgacaataggtcgcgcttagccaaggataagttgttgcttagcattttagctgtcgcttagccaaattggattaggctcagcttcgccttggctagcttagcggaatgaatcagcctaagatgaaggggttagacgctaagtgcttgagactcatggcttagcgcatgaataa

SEQ ID NO: 18918 - DNA, 373 bp, Glycine max
tcaagcttatgcaatttacaattgtaggcattggtgcaattttcagatgcataaactgctacctccgcaaaggatgctttggatggaagaagcatacctaggtgacagttgtattatttgtctgacatggtatttagttcaactgtgatggacatattggctgtggatgtggtgcatatcctcagattggtcaactatagactgttgtaacttggatattcacactctcactttgggatatttattatgtagtgtatatgctgtttttgaaattgtaattatgaatcattgaatgtgtaacatacggttagctatatcattgcaactggaccaatcataagaataaatgtgctgagttcaaagtttttctact

SEQ ID NO: 18919 - DNA, 401 bp, Glycine max
  unsure at all n locations
ntaggctgctcaattgatccaggttgctgcataaaagggataaaggtttatatggtggtcagcagaggagcataaaccacagactcttgtaacaggtacaaattttttattcaaggctagctgggttaccaggttaaccaaggcatctagtttaccttcaagcttcttatttttagctgatgcagatgagtttgtggctacctcatgcactcctctaatgactatagcatcatttctggcactaaactgttgggagttgcaagccatcttcttaattaaattcctggcttcagcaggggtcatgtctcctagggctccaccactggcagcatctatcatgcttctctccatgttactgagtccttcataaaaatattggagaagaagctgctccgaaatct

SEQ ID NO: 18920 - DNA, 386 bp, Glycine max
tctgcatgctagcttctcccctattttgctataaatagggggagaagtgaagaagaaaagggttcagccccctaggcacttctctctctctcgaaatagctgaggaaaattagttccgtgaagaaaatccaagctgaggcgcttccgtaacgtttccgtaacgttttcgtgagtaattacgcgaagattctcgaccgttcttcaagattcatcgatcgttcttcgttttcttcagtcttcaacgggtaagtacatcaaaccaagcttttcaattcattctatgtactcgcggtggtccccatttgttttgcgtattcttattctcgttttcattcgctgtctatacccccttttgacgtgcttaagcatttatttaagtcttttct

SEQ ID NO: 18921 - DNA, 419 bp, Glycine max
  unsure at all n locations
tcttcatagccattgcctacaaatacacatccataaaaagttattttgcatgaaatacgtaaccattactttagctatcctaagtatagcaaccaagaagtcaatcaattttgtgtggtttttgctaattgcatgtgttaccgtacaactaataaaacaaatcaaaactcagtgcgcattattttgaaagaaagaattcgacattctacagcaatttaagagcaatatacccaccatagtgcaacaattttaaccaacaattagaccaattcaaaccaaacaattttaagcattcatgtaacccatgtattttcatctaaagcaaatgtctaaaattccaagcttactccatgctcttgacatttaatctatcaacctaagtttatcatacatctaanatgatggctagacatgcgtaa

SEQ ID NO: 18922 - DNA, 251 bp, Glycine max
tagcttcatagaagtgtatgtggctcgaaacatagcatcgatgcactggtacttgacgttatatgacttaatgatcaactcaggattcaacagatgtgacatggaccatctctgccgcgctaagatatatactaatagctatgccatccttgtcgagtatgtggatgacatgaatattacaggatctcgtatggcacaaatgcacaggttgaagcaccaattggcagaaaactttgatatgatagatcttg

SEQ ID NO: 18923 - DNA, 402 bp, Glycine max
  unsure at all n locations
tgtgaaagtccttctgattctatttatgcatttctgacttgatgacatgagatgaagttcaaagattggacctcttgctagttgttattaatgaatagcttaaacacttatgcttgagtgaaacaatagctgtgagactgtggtttaagctactttccttgatatttgtcttatgcctaacttcatctaattgtacaagttacattctactcttctctttgaataactgcgtgctttgtgaaagacaagtgatgagggcattttgcttcattcttttatcatgcaatcaataaatnctgtgcatacaccttcatacatagtcattgcatgtttttgtcacttgtgggaccagtgagatgttccttatttgcttgaggacaagcaaaactataaatttgaggg

SEQ ID NO: 18924 - DNA, 401 bp, Glycine max
agcttgtagccatcgtctccacaccccatcttaagatgaaattccccaccttaatgggagagatcgtcactgtcaaggcaaatcaaaagcaggcacgatgctatgccgaaagtttgaaggtgacaccttatcctcctactagggagtttgccaggcctcaccccgtagcgaatggtgacactcaagtcataagcatggatgaaaggtcttcattctgagccctgactgtttaccaagcaagcctggacgatgtatttgatgtaaatctgcgtaacgagactgttgacaaaggcccaaagcctagtgaaatttagctgaagtcacattatatttttttttatcgaagtcaccttactaaattttgattgtgaaattatatttttattattataatagaaatc

SEQ ID NO: 18925 - DNA, 428 bp, Glycine max
  unsure at all n locations
tcacacgcttctgcgtcttcaaaggtgccttctcgcggacacgaagctcttcaacggtggcaaatcagcatggtgatgaccattaagagaacaatatgtgtaagggcaaaccttcatggctgaagttccctctgactgagttcccccagagctaagcatgaggtatgcagggaactttgagtccttcaaagttgaagaacatgtagctctctgtggtgcagcacacataacagccctggtggattttctagaacaagctctagaagccttgaaactagtggttttggtcaatgttctcaccaaactcaaactattagatgttcttgtcaaggcttttgcaggtttcttaacacatgcagctntggaatcactggaaatttttctaggaagattcttaaaatcagaaccaggttgagtgttcctttggc

SEQ ID NO: 18926 - DNA, 405 bp, Glycine max
  unsure at all n locations
agcttgtgactcttgtcaatttctttaaaactagtcacttaaaaagttgtgatttttgaaaaaatcttcaaaaacaagtcacttgaagaattgtgacttttggaaatgtatttttcgaaatcagtcactggtaatcgattaccattaaggtgtaatcgattacacatcaacaaatgtaacttttcattttgaattttgaaaattaaaacgtttagaagctttggtaatcgattacaagtattgtgtaatcgattacacaagtttaaaatactttaaaactgtttaaacataagttataactcttgaaatttgaaatcttaacgttttaaaacactggtaatcgattaccagagagtaaaactctntggtaatgattttgtgaaaacttgtgctactcaatatttt

SEQ ID NO: 18927 - DNA, 410 bp, Glycine max
tgcccatattcttactctctatactattgatacttcttaccctcgatgatgaaccaagcaaagtgttacatgtatagtgataaatattgaaggaaatacattatactcgctatagagatacatacttacgaaagtgtacattacaagtcatgccattttatgggattttatttttcctccatgctaattatgttagctggtccacacgaatgtattttttgcgtaataaatttatctatcacctctcaagattttgtgtagcccttacaacaaattttgtggttaatgaaaatgaatatttggcttcttccccaaaatttttgtttccagcatgattgtgacacatttctagtaatacataagaatgcgcgtatcaagattccagatcattgtgacattggtccagcatc

SEQ ID NO: 18928 - DNA, 404 bp, Glycine max
agctttatacaaatttgggtcactctcaatagagagggttgaagaaaaaattacaaatttctcacacagagattaggctttagtttctctcactagaatccttcaacttgtattcaagatgctcttcaaacatgtcttaaagctctatggaagaccattgaaatgggctctacccaactgaaaaactcctggaacaagtggacaaacatgacaactatcatgaaatgacagctcgcacatcattctaagaaagacattctgaggaacattctttataatatttttgaagcatctttagaatagtcattctgatgtttgctgagaaagaatttatacttgcagtagattcttttgatgaattttcactaatatgcctttctaaagtaatgcagcttcatcaatca

SEQ ID NO: 18929 - DNA, 328 bp, Glycine max
ctcaagcttagtgcgcttaatcttcacatggataatttcttcgactactctggttctatagtggaataccctaaatgccttagatgtctcaaaatacccaagccatattccatcgtcacttctagaatcaaactttagcaagccatccttagtgtctagaatgaaacatcgacatccaaaatgatggaagtataagatgtgggattttttttcctacccaagccatgaattacccaaagtcgcgaagtcaattcgaggccaaaaattgagtccacaacttgccatgacttatccacaaacggatgatggagcctatactgagcatgag

SEQ ID NO: 18930 - DNA, 401 bp, Glycine max
agcttatgaacccttacttgtagcttcaatgcaaggaaacatgcttaaatttggttttagagttagaaaaacatgaaaattaggattttcttgtgagagtttttgctcgaatttgggttgccccatgtttgatactttacatagaggtagcatggaaaacaccttgcaatagtgtgtatacataggtaaatataagaagtatgaaatccctagcaaagtgtgaatgattgtcttcctagatgaatgtatgatagtgtggaatgccttttttgaatgcaaatatgtgcaggatgtaattagttttccaatatgcatataaataaataggagtgaaacagtaaaaatttgtatggtgtacttcaaatgtatgtaagtagtttgtgataacagatgtttaggat

SEQ ID NO: 18931 - DNA, 429 bp, Glycine max
gacacttagactctcagcctattgattattgaccactcaccagaatttataagctattgccattaacctagggaataaaagaaaacttaatggctgatctgtaactgaaatcgtggcaaccaaaagtcacccccaacatccaacatgtcagccaccatttggtctcccaaaaggctgatgcataggttgccaattgagaccttattacaacttgaactagacctaactaaagccctttaagttgattaacccaaaacatatttttggacagccaactatacaaggattgtgccattatggatacagactaaacactgtacaattgggactaagtggtgtcatttaatcctactccatttgggccatgatacaactcacaaccttggacttttatccttgaaacttgggcttgtattcaaatagtatgga

SEQ ID NO: 18932 - DNA, 394 bp, Glycine max
tcaagcttttagccaactcaaacgataataactttttactcggatgtctgattgagtcccgtaacatatcgagacgctcgaaattgaatgttgaacctctgagccaattcaaacgacaataacttttttcacggatgtctgattgagtcccgtaacatattgagacgctcgaaattgaatgttgaacctctgagcaaattcaaacgacaataactttttactcggatgtctgattgagtcccgtaacatatcgagacgctcgaaattgaatgttgaagctctgagccaatacaaacgaccataactttttactcggatgtctgattgagtcccgtaacatatcgagacgctcgaaattgaatgttgaagctctgagccaatacaaacgaccata

SEQ ID NO: 18933 - DNA, 351 bp, Glycine max
  unsure at all n locations
tcaacattcaatttcgaccgtcttgatatgtctatggactttatcaaacatcccgaaaaaangttattgtcacctgaattggctcaaatcttcaacattcaatttcgacacggctcgatatgttaacggactcaatcacacatacgagtaaaaagttgtggtcctttgaattggctcacagcttcaacatataatatcgagcgttctgatatgctacgggactcaatccatgtccgataaaatagttctcgccctttgagctgggtcacaggttcaacatgtcaatgtgagcgcctcgatatgttacctggactcaatcagacatgcgagataaaggtattgtcccttgca

SEQ ID NO: 18934 - DNA, 395 bp, Glycine max
agcttgaaggtatactagatgccttggttaacttggtaacccagctggccttgaataaaaaatttgtacctgtcgcaagagtctgtggtttatgctcctctgctgaccaccatacagacctttgcccttctatgcagcaacctggagcaattgagcagcctgaagcttatgctgcaaacatttacaatagaccttctcatcctcaatagcaaaatcaaccacaacaaaacaattatggcctctccagcaacagatacaatcccggatggaggaatcaccctaatctcatatggtctagccctcaacaacaacaacaacaacctgctccttccttccaaaatgttgttagcccaagcagaccatacattcctccaccaatccaacaacagcaacat

SEQ ID NO: 18935 - DNA, 399 bp, Glycine max
tcagctttaaagttcatgcagtacagtttttaccattcgtaaaggtttgtcatcagcaccagccctatacaaataaaacaatagaaaataagtgattcgagtttttttttttttttaaaaaggagagtagtaactctatccaacaaagttatatataccttctcctaatttcctccattcccaagtcttgcaggtacaaatggatgctttgaagtatgcgatcaaggtcaacatcatagatagtgctctgaagaacctgcaagcacaaaaaaataaatgttaatactgaacaaaattttaatgaacaaaacatatcaagatagaatttggcaatttcaactctgcttcttgacaatgaataataaagctaacaatggattaattaattgaatatctaat

SEQ ID NO: 18936 - DNA, 382 bp, Glycine max
tcgatcatttagatgactataagattaattttttattcatatcttaattacacttaaatcacttattttcaagaatgtattttaggatattgaatcaggttctttcttataaacttagtgtatatgattaattgagatacaccaggttttgtaaaaactagtatttaaaaagccacataaatttgttttcatacttaaaagttaaaaatgatatatagattatttttttttttttatcattgtaggctttaatcttacgaagtggaaatcctcgttctcacggaaagcatgatataggagcaacatttgtgctaagtgcaaaccacgccagaatttcattatttccattaacacccgattctgcttaaattggcacaccacc

SEQ ID NO: 18937 - DNA, 146 bp, Glycine max
cggtatttcacaccgcatatggtgcactctcagtacaatctgctctgatgccgcatagttaagccagccccgacacccgccaacacccgctgacgcgaaccccttgcggtcgcatcgaatataacttatattaatgcatgacttcc

SEQ ID NO: 18938 - DNA, 249 bp, Glycine max
tctagctttttgactttcggcgaattacgtcatctgccgcgctcacatgaacaagcatactgacaatcgagccacgcagaccggcggaaacacccgactggttatccccataaaatttttgctgactgtaagacgaaaagcctgattacacgcagagactaaccgacgtttgtgcgcccttcgtcaatcggggccgacaacctcgttgacatgcggagatttacgtcatctttcgtgctcacaagatct

SEQ ID NO: 18939 - DNA, 388 bp, Glycine max
agcttttcagatttggtcttcgccagtgaaaggatcaatgtgggtccgaaaagaggcaaatttgatcatcctactaggacgactgagaaaactggggcaaataaagagggtgaggatgagggagaaacccatgctgtgactgccattcctgtacggccaaatttcccaccaacccaacaatatctttactcagccaataacaaactttctccttacccaccacccagttatccacaaaggccatccctaaatctaccacaaagtctgtctaccgcacttccaatgacgaacaccacctttagcacaaaccaaaaacaccaaccaagaagtgaattttgcagcgagaaagcctgtagaattcaccccaattccagtgtcctatgctgac

SEQ ID NO: 18940 - DNA, 410 bp, Glycine max
tccatcaagtggtaatcagagcacaagagcttcaagtatgtgctccttaaacctccattaattatttttctttaccttctcttccattgttgtttcttcatttttctccatgtatctcctcacatgtcttggtctaaatgttgttaacatgattctttagagtttccaccgattaaacttgctatagaaactagatttgattttctatggttcaaatttcttgttcttgttcttgaaccatgaattgtgttgagtttaagtccctttgagttttgtcttgttattatttgtggctgaaacctaaaccataaaattcttacaaaaatattatagtagaacagaacctcaaaaatatatagtgacttgttcacctattgtagtttcttcatagaagtcatgtctagtcatga

SEQ ID NO: 18941 - DNA, 385 bp, Glycine max
tttgcttcttttggaccttgaacaggcaactaactcctctttcaaaaccatgctatgtgctcgcgactggtccctttcttcccttcgcaacttgagttcattattgctaccccatagagctccgcgaaatttgttccggccatactcttccttgcgagccctcttggtctcttgttcaagggctcttgcagtaattgcattctcttcccgtaacccggcacactccttccgaacgtgtgtagcagccaacttgaacttctccttggcgagttttgcctttcctaactcgctcttgagagcttggacttcttcgtcctcttccggtgcttcaaaattctctgtgctgacgacttttaacttggcgagccaatctaaacctcgtatg

SEQ ID NO: 18942 - DNA, 397 bp, Glycine max
tgccacgccgtcgtcgttctgacccaaacccattttgggctcgtacccatgtcccaacattacagggctaccattaatacaacatcggatgagcggggttgcaccgggggagacccgacataagcattgcttaccacttccaaagcttgaaaggatttctccaagcactcctccgcgacttctacatatagcgtataagaaggacaacttacaaggatgtcttcctcccccgagagtatgattaactgcccttccaccacaaatttcaacctttcgtggagcattgaagggactaccccgactgagtgaatccaagaccggcctagaaggcagttataggctgggttgatatccatcacttggaaaatgatctggtagacgtggggtccaatatgaa

SEQ ID NO: 18943 - DNA, 403 bp, Glycine max
agcttttgtcccatttaacctatcacgtggagtggtttaaaattattattattatatacaaaactgtatggttgatttatgggaaaaaagtgtaagaaaagaaaaataaggaaggaaaaggaatagaaaatatataaatgatatttttttttcaaattgtatgataaaaaagaaataaaagataacaaaattaataaaaactgtgtttaaaattataaaaaaatttaaaacaaaaaagataaaaaaaaattagaaaaaatttgtgccttgaaccctagcttcagtgccatgtgcatgagaataatttgtaattaaatcacatgcatgactcggaaatcggaaattatatgcgttgcttaaacacacaaatgagataaggttttaaaaatctagcaaattaaaa

SEQ ID NO: 18944 - DNA, 426 bp, Glycine max
taactcgacacacaagtatcctccaattagatggcagtcttgagtccttgagagcagtgttatgctatggttacaaacaaaagttaatacaactcaagtgttgccgatttgtaaccttgacaaatggtgatactgttgataacgtaatggagcaggctcataagaaagcagggaattttgggataccatgagccactctagtatgtattatttaagagaaaagagaagaatgaaacctcaatacagttagataaatacagaaaaacaataaagctgcatgttgcttccaaataaaaaatagacattaatctgttgtctcaaaacaaagcaaggcagcatttccatttggttccaaggcagtataaaaccacttcgcaacaagtagagaattatgagggaaacttcatcacaagaacagcatacctc

SEQ ID NO: 18945 - DNA, 402 bp, Glycine max
cttcttatccaatgctcatcttggtggtgaagctccttcttccatggcttattacctagtggatggcgcctcctctcacctcttctcctttgtcttccgctgcatctccatggtggaaaatcaccattacaggatctcattgaagctcaaagatccagcctccataaaagctccacaagcaagcttccatcaagtggtaatcagagcacaagagcttcaagtaggtgctccttaaacctccattattttttttttgctttaccttctcttccattgttgtttcttcattttttctccatgtatcttcttgtaacaccctgatatatatatatatatatatatatatatatatatatatatatatatatatatatatatatatatattattagtaattatatg

SEQ ID NO: 18946 - DNA, 418 bp, Glycine max
  unsure at all n locations
tgtaatcgattaccagagcagattntcagaaaatattctcttcagtcacatctttttatgtggttcttgaatggctatcaaaggcctacatatatgtgacttgagacacgaatttgctaagagtttttcagaacaaaaaggtcttatcctcttataaagcaaaatcgttttatcctcttacaaattccttggctaaataacttgtgattcaataaggaattatttgagtgctcaaattgttcaatctatctctttcaagagagatttcttcttttcttcttcttcattctgaaaagggattaagagaccgagggtctcttgttgtgaaagaattctaaacacaaaggaagggttgtccttgtgtgtttagaacttgtaaaaggaatttacaagatagtggaactctcaagcgggttgc

SEQ ID NO: 18947 - DNA, 402 bp, Glycine max
agcttgtgaatttattgtgcttggtgactaattggtgcagaaaaacaaagtaaagctcaaagaaacaaaattgaagaactgaagtagctcgctcagcacgtcttaggcgcttagcgcaacacagtggcttagcgggcaacagaagcttagcgtcaagaagtatggagaagtctggaacatgaaggcttgcttaacctgcagctcgtttctatgtttgggatgatccccacttattcaagattggagcggataatctattgagaagatgtgttaccatggaagaagctagaagtatattatggcattgtcacaattctccttatggcagatactacagtggggataggacaactgctaaggtgctacaagctgaattttttttgccttctatcttcaaggatg

SEQ ID NO: 18948 - DNA, 420 bp, Glycine max
aagctccttcaactgcacaaggctatcaatataagaagagtatgcttgtggaaccttcacccgacgaagacactgacaaaaacttatcttttcctttcctgacaaaatatggaacgctatgtgcaagtaaataatcttcccatcaaaccttggatgcaactgcgatcgtatgcccatatcagctatatcttgatgggtattgaagccatacttcgtctagcattgaatgttaaggaacgttccaatcacactgtcacaaacattactgtgcacatgcataacatcaatacaatgttgaacgtaaatatcacaccataacggaagatcaaagataatggacctcttcttacatatgcagctattactttcatccctcttttgagtctagccaaatacaataatcacgtgtggaacccgctc

SEQ ID NO: 18949 - DNA, 405 bp, Glycine max
agcttttcacaaacttactctcttgcttgaccattaaccaccctccttagcttctgccaagactctgcaattggctcattaaccatatcaccaccaccagcatactctccttctcccaacctatcttctcttctcctctgcactatccctaatttacaccaccacttaccccacttgcgaaacctgttcaatcccttttggccatccccatatgcagcatcacaagcatcatccttagaagcagactccattacactatcagatagaacactattggacgtttgcaaattcgcatccctcaaatcattctcagttatcaatacctttgccccatagaacaactcactggaggcaggggaaaccttagcattagatatcactctcaattcatcaacatcccccatt

SEQ ID NO: 18950 - DNA, 420 bp, Glycine max
  unsure at all n locations
cttttcgcanagcttacagtaaaatctgggacctagccatggttgaagttttcacagaggccattgcctccctcgcctagtattatgaccagccgttaaggggcttcacctttggggacttccagctatcacccatggtggaagaatttgaagagatcctaggatgccctctagggggaaggaattagaccacaaaaagcaagtcaaaaatggggtggttggaataccgagaaaatgtttggaggcaaaagcaagaatcttggcaggtagaggcgaatgggccccattcatagacatcctcgcacttttgatcttcaaaggagtcctctttccaaatgtggatgggttggtggacctagtagcgatcgacacttttctcgcctatcatgaccgcaaggaaagctcggttatcgctatact

SEQ ID NO: 18951 - DNA, 400 bp, Glycine max
agcttgtttatttcatcgttgtttaccaagctgctcaatggtctggctatcttggagaagtccttgatgaatcttcgatagaaacctgtatgtccaagaaaacttcttatacccttggcatttactggtggtggtaacttctcaatgacatcaatttttgctttttccaccttaatgcctcaggttgaaattttgtggcccaacactatcccttctcaaaccatgaagtgacacttctcccaattcagcaccagatttatctcaacagatcttcatagcaccggctctagattcatcaagcaacaatcataggaaggcccacaaactgagaagtcatccatgaagacttctatgcacttctctaccatgtcagcaaagatggctagcttgcacctttgga

SEQ ID NO: 18952 - DNA, 436 bp, Glycine max
tactcaagcttgaccaatcccgacccaacccgggcatagtcagtcagtgttaacctgttatgtacctaagcaggcgagctcctggcagtcaacagataaaaggaactaagaccacaaaacaaggaggcttgtgtggtggctggccagttgtgaaacttgattgatatatgggatgtggcctctggtaatcgattaccaagggtgggtaatcgattacaaggcttaaaagtgaagacaggaagctaagatggtctctggtaatcgattaccaagggagtgtaatcgattaccaggcttgaaaacgaggtcaggaagctaggagggcttctggtaatcgattaccaaggggtgtaatcgattaccacgcttacaaatgagactggaagattatggaggtctctggtaatcgattaccagtctgtgtaatcgattacac

SEQ ID NO: 18953 - DNA, 396 bp, Glycine max
agctttattttggctcattacctgtcataggcttcttttaaaggctcggctcggcttacataagagtatgccttgacctacgagcctatttaaaagtctacttaaagacgtatttaaccaattaattgttttaaaacctagtaaaatactaactaagaaaaaaaacttataaaatttcctgtacaaatccaaaaataattgataaacaaaattatattgaattcaagttatttaaacacaaagtatatcaaaagaaaatgaaaaaaaaatgcataatattaaaaaatatatggattagagatgatttatactaatatagccaaataaaaatatttaaattatttgaaaatgtctttacaaaacattattgtctttgaaagtattaatctcgttgca

SEQ ID NO: 18954 - DNA, 415 bp, Glycine max
tacattgattgaatgctttgtttgactggtttttgcttgttatgttgtctttgggtgtggaataacttgtatgtatgatatatgatgtataattgataacggttaattatgagtatattttggggttaaactatatagaattttgcaatctttttctcttaatttttcctttttgaacaaataattgtccaattaatatcatttaagtttttgtgcagagaatattaaaagtgatggatttatgatgctcggtgagtaaaataaagcccaaaatatatgataattcaggaagacaagaataattatagaaaacgagtaaattaaggataatgtggctaatcaaggaaatgaggctaattaacataaagaaactaattacggaaaacagacatattaatgaaagcatgactaatga

SEQ ID NO: 18955 - DNA, 392 bp, Glycine max
agcttgtatgattatggggtacccatcacatgtggtactatgtggcggtcgggcgatggtgcacaacaagttttccacatccacaatgcgcgcataaacccaccatcccctgttgcccacctccaactgagctcacgtactcccacgtagcccatatcctcgtttctctcaacaccgggtccccatcaatcctcccaagcttccacaacatccaagcaaaacaacattcacacagcacaagctatcacagccaagcaaaacaaagcataggcagaaaactctgctcaaacaccaaccaaaaatcacagcttttcccactcaaagaccccagtaacaattccttcgatccaatttgctaaccgttggatcgactccaaaattttactggaagt

SEQ ID NO: 18956 - DNA, 416 bp, Glycine max
tcgccgacttagtattttacggcataacgatctaagtgggttggaacagaagctaatctggatatcctgctttgacgaacatgagacctaaggaaaacggagagagtaagatggaagatggatcccatgttgtgactgctgtcccttcatgaccaaatttaccaccagctgaccaatgtatacactcatccaatatcagctgttctcattacccatcatcctatgacccagaaacacctaatgctccacatggaaacccctaaatcagaatcaaaacccatctgccgcacatgcgataccaaacaccacctttgacacgaaccatagcaccaactatggaatgaattatccacataagaagcttgtgaaatacaccctaattccaatgccatatgctgacttactttcatatctac

SEQ ID NO: 18957 - DNA, 391 bp, Glycine max
ttagctttgtaaagcggcagaaaagaaaatcaaaagtgaacgagatgaagatgaaagcaaacaaaacatgaaatgaattgaaagtctcggattcgaacacttaccggttgaagaccgaagaacggacaaagaacgttgaagaacggtggaaaatcttcacggatttgctcacgaaaacgtctcgaaagcgttacggaagcacctcgacttgaattttcttcacagaaacactttttttttccacccaaaacaactgaaatgcatagcataagggtcagggatccttgaaactcagcctcctcctcctatatataggagaaatggggaagtgcttgccacccagaggcttcttgaggaagatttctaagcacaccccatatactaagttcac

SEQ ID NO: 18958 - DNA, 411 bp, Glycine max
tgaaaaccattgactggtcctttagatggtcctaaatctgtgctgttattacaatgccaatgccacacctaaaatattttatgagaacttcaagattccaggccatctaaaatctaattgcattaatcaattaataaagaacaaacagacaatccagtgcttgacttgcaacacaacaaaggaaacatgtccagaacaccttgctaagcaccaataacaaagtgagcaacaggggggactctgggcaacaaggaaatagatgaaagaattaccttgttctccagatacctgactgagcaaaatattggagacagggaacatggcttggatatggtccgaaatttgggagatagaggggaggcaaaaaatgaggtagtatcaggggaaagcactgatggctcttctgattac

SEQ ID NO: 18959 - DNA, 369 bp, Glycine max
  unsure at all n locations
ttcnnagcttctactacttttctgaggagaggcgaaacgacgcgttattgaaatcggagagctgcatgggcgacacggtgacgctgctggcgagaatcgtgcgagtcggactacaaattgagattgatgacacaagagattgaggaggcggagatgaagcgggtcgaccctagacgcttccatgctttctttagcgatggcggcgttacgtctccgctttacccattcattcattaatggtttttgtaagtcccctttactccttctatcatcattggtaagtctcttttgctcttgattgtgattggttgtgcacgtgagagttattatttttccccatttggatatattgtcgagcacctgctgcat

SEQ ID NO: 18960 - DNA, 389 bp, Glycine max
ttgggcctctatcagaagtgtcattgcatgaatctagatttatttcattgtcaatgcttgcttggtagaaggtcagggctcggactaaagacctttcgtctatgcttatgacatgagtggtactatccactatgggacaaaggctccctgtgtgaggatagggtgccactttcaggctttcctcttaacactgttgtgcctgcttttgatctgccttgatagtcacaatttctcctgccaaggtagggaacttcatctttagatgtggtgtagagacgatggcttcaagctcgttgagtgatttcttgccaatcaaggcatagtaaaaagtatttgcatcgacaattaaatacctgattgtaaagcttctggttagttggccttgaccg

SEQ ID NO: 18961 - DNA, 394 bp, Glycine max
agctttatctcacctactattcgggttatgtacgcaaaacgatctggctgcaatcctctattcagcatctcatcaaacaattccttagccattggcaagttccccaacttgcaaaatcctctaacaagaattgtaaaagtaaatacatcaggatcaggcccatgtttgatcatttcatcttttagccgcatggcaacatccaagtcccccattctgcaaagaccatcgataagcgtattataggtcacaacactgggaacaagacccctgaatcttaactcagcaaataagagaaaagcctcccctatgtttcccaatctggtgtaaccataaatcagagtgttatacgaaaccaaatccggcatcagattctggttcaccataacatccagca

SEQ ID NO: 18962 - DNA, 408 bp, Glycine max
  unsure at all n locations
agtaggattatggcgtatccatcacatgtggttctacgtgttggccagtcgacggngcaaaacaagttctccacattcacaaatcacgtacaaacccaccatcccctgttgcccaccttcaactgagctcacgtactcccacgtatcccttatgctcgtatcacgcaacgccaagcccccatcgattctcccaagcttccacaacatccaattaattcaacatacaatcatcatgaactaactcaaccgagaaaataaggcacaggcagaaaactctgctcataacacaaaccaacatcacagctttttcacactaaaataccccagttatattctcttcgttccaattcgctaaccgctggatcgattagaaaatcttattggaagtctctagtacataagactaca

SEQ ID NO: 18963 - DNA, 379 bp, Glycine max
  unsure at all n locations
tctgcatgctagcntttatccaatacaaacgaccataactttttactcggatgtttgattgaggctcgtaatatatcgagacgctcgaaattgaatgttgaagctctgagccaatataaacgacaatgaccttttactcggatgtttgattgagtcccgtaacatatcgagacactcgaaattgaatgttgaacctctgtgcatattcaaacgacaataaatttttactcagatgtctgattgagtcccgtaacttatcgagacgctcgaaattgaacgttgaagctctgagccaatacaaacgaccataactttttactcggatgtctgattgaggctcgtaatatatcgagacgctcgaaattgaatgttgaacctc

SEQ ID NO: 18964 - DNA, 410 bp, Glycine max
  unsure at all n locations
tcaacattcaattgtgagcgtctcgatatattacgggactcaatcagacatcagagaaaaaagttattgtcgtttgaattggctcagagcttcaacattcaatttcgagcatctcgatatgttacgggactcaatcagacatccgagaaaaaagttattgtcgtttgaattagctcagaagttcaacattcaatttcgagcgtctcgatatgttacgggactcaatcatacatccgagtaaaaagttattgtcgtttgaatttgctaagaggttcaacattcaatttcgagcgtctcgatatgttacggggctcaatcagacatccgagtaaaaatttattgtcgtttgaatttgctcanagattcaacattcaatttcgagcgtctcgatatgttacgggactcaatca

SEQ ID NO: 18965 - DNA, 389 bp, Glycine max
agcttgtgctcttgcctcactcatcgcctttttggtttcatttctagctatcttatacttatcccaagtttcagaatttctacacctagaccactccttgaaacactccttttttactctaactttgctctgaacattttcattccaccaccacgattctttacccctaggtccaaaacctctagattcacccaacgtctctttaaccactttaataatctcttgggacatcttgttccacatatcatttgcacttccttgtgattgtccacaccaaccctcccatatcttttgttggaagattccttgtttctcacccttcaagtgccaccatttgatccttggtgctaccataggacttcttctctttgccctatctctaattctta

SEQ ID NO: 18966 - DNA, 406 bp, Glycine max
  unsure at all n locations
tgcttgcggagcttctatggatgatggatctttgagctttattgtggtccttcaatggtgatttttcaccatggagatgcagcggaaggcaaaggagaataggagaggggaggcaccatccactagggaataagccaaggaagaaggagcttcaccaccaagaattgccttggataagaagcttgaagaggatgctntaatggaggaaaagaaagagagaaggggggagcacgagattgaaggaataaaagagggagagaagtggaactttgaagtgtgtctcataagactctcattcatcacagttacaacaagtgttacacatgcttctatctatagactaggtagcttccttgagaagctgtcttgagaaaacttccttgagaagcttctttgagaaaacttc

SEQ ID NO: 18967 - DNA, 400 bp, Glycine max
agcttattacaaatcgaacatgtgcaaggacactgaacaattttcccacttctgagatgttttgatcaaagaaagcaccaataactagttccacgcataaaacatcaattttgtcctgaaaattagtcctgaatttggcaccacccatcagtttggaccttgatgttttcgaaaagcaaaatccatttgatccccaaaatttactgtcaatttggtcttaccattatcaaatcagtcaattagtccttgaatttgacaatcattagtcaatatgctccctaatgttaggaaccaaattgattaataattgcaatactaaaaaactaaattttttgtaatgtcaagagtaagattgattgatattgttaaagtaaaggactaaatttccttttccgtaatg

SEQ ID NO: 18968 - DNA, 425 bp, Glycine max
  unsure at all n locations
tagggctgaaaggtttgttgaaatacgcaatagggtggccatattgagaaagaactgcacccattccgacgctggaggcgtccgtctccaccgtgaatgggagctgaaaanttggtaaggtgagtaccggaactgaagacagagctgccttaaggtgttcaaaagctgattgtgcttggggtgttcactaaacaggttcttttgtggtgagctttaccaagggagcagcaatggtggcatatccctttatgaaacgccgatagaatccggcaagtcccaggatgccacgcacaacccttgaagattgaggtatgggccattgaaggatggcctctaccttcgaggctaccggttctactcccttcttcgagaccatatggcctaaatattcaacctgcaactgcgcgaataagcattttgataat

SEQ ID NO: 18969 - DNA, 400 bp, Glycine max
agcttgtgttgcattctcaaacaccttcacaggtggccaaagatcaacaaactatgaaagataagagggataaggaaaataatagaaagagaaaagaagaactaactttaatagttaaggaggagtgtaaggaggtaagtgtctcctccaaaaggttagctaagaaggaaagtcattttgcaataaagacaaatattaaagaaacttcccttcttagacaacctccacattttctcctctataaaagaacacttgttagcactaccatacctcttgagcttgaggttattccttaagtaaatgagtttttggatgagggtttgggtcgtaagagcttaaatccttgtgcttttggtggtatgatgaatgtgttgagtggtgtgcaaccctcttttgtaaa

SEQ ID NO: 18970 - DNA, 423 bp, Glycine max
  unsure at all n locations
tctacaattcaggtcagttntgtagctgtgaagctaactttatactttgacaaatcttaaagctctccttgaaaagaaacaaaaaagaatgtgtgttgggactaaaaagtaaaaaccattcacacacgaaggagctataaattaagtgggttaagaaaagtgttgagtggaatgacttgtgggctttttagttcatatgggggcagctctaataacatctgctaaaaagcccaaacaagaaccacaagaaaacctaactactgaaatatcatatcagctatcaactagaggttcactcttctgcttttcttattaattagtcatatgcttgtgttagtttatttctaattttatcatattgtagttggggtagggggtattttaaatcgtcatattctaaggcaacacaacattccaataagt

SEQ ID NO: 18971 - DNA, 394 bp, Glycine max
  unsure at all n locations
agctttcagcaaattcaaacgacaataacttttttcctcagatgtctgattgagacccgtaatatatcgagacgatcgaaattgaattctgaagctctgagctaattcaaacgacaataatgatttgctcggatgtctgattgagtcccgtaatacatcgagacgctcgaaattgaatgctgaagctctcagctaattcaaacgacaataactttttactcggatgtctgattgagtcccgtaaaatatcgagacgctcaaaattgaatgttgaagctctcagcaaattcaaacgacaataactttnttcctcagatgtctgattgagactcgtaatatatcgagacgatcgaaattgaattctgaagctctgagctaattcaaacgacaataa

SEQ ID NO: 18972 - DNA, 425 bp, Glycine max
tcagaattcaatttcgagcgtctcaatagattacgggactctttcagtcttccgagcaaaacgttattgtcgtttggattagttcaaagcttcagaattcaatttcgatcgtctcgatatattacgggtctcaatcagacatctgaggaaaaaagttattgtcgtttgaatttgctgagagttcaacattcaattttgagcgtctcgatgtattacgggacttaatcagacatccgagttaaaagctattggtgtttgaatttgccgagagcttcaacattcaatttcgagcgtctcgatattataccggactcaatcagacatccgagtaaaaagatattgtcgtttgaatatgctgagagcttcaacattcaatttcgagcgtctcgatgtattacaggactcaatcagacatccgagcaaat

SEQ ID NO: 18973 - DNA, 400 bp, Glycine max
agcttgatgtcattttaaagagactatgtcgacctaaatgaagactgaacatgtattgtttatctaattgtattcattatgcgatataatttgttgcaagtcattaaaggataattattaagtactcgttgcgttaagaaaaaaattagttggtgcaaccaaaatcaattatgcatgtacgatacatcgttgtcataattgacaacacataacgatatgcatgcatattaaagtttgagcatgacacgacattgacttagtaggaaacataaacacgaaacatgttcacgcctgttcttttgtaaaaaaaaagtgaagcaatctatcggtgagaaccatgtatatatatgagacgtggcatacgctaataaatcacacattatcttgctttcacatactc

SEQ ID NO: 18974 - DNA, 423 bp, Glycine max
tgaagacaagactatacgaggtatcttccttgggtatagctttatctctattggctaccgtgtctacaacttgcaaactaagaaactcgtcattagtcgagatgttgaagttgatgagtacgcttcttggaattgggatgaagaaaaagtggagaagaacgttcttatacccgctcaactacctcaagaagaagctgaggaagaaaacccaggtgaaccaccttcgcctccaccacaacaacaagatcaagaactatcatcaccagagtctactccaagacgagtaagatctttggtggacatatatgaaacctgcaacttggccatactcaaacctggaagctttgaagaagcgtcaaagcaggaagtatgggttaaggcaatggaagaagagatatagatgatcgagaaaaacaacacatg

SEQ ID NO: 18975 - DNA, 401 bp, Glycine max
agcttctacttatgttgcagggcgggtttccttcactttcttgtttccaacgcgagctctgaccaccgttcttccttcccgcgatgcttcttttcatgtccgcctgagtgggcttatatcctaaaccatacttcccacgattcccttgggtttttatcagactagtcatgccgccattgtctttgcctaaacccatcccgggttcataaccgttccccaacataactcgggccatcattaccgccgcctcggatagacaaggttgcccaaagagtgagtccacggaggaaatgctgaccacctcaaaagactggaaagcggtttctaacgattcttctgcggcttccacataaggcatggaggatgggcagctcaccaagatatcttcctcgcctgacacg

SEQ ID NO: 18976 - DNA, 436 bp, Glycine max
tactcaagctgtaaaatttgaattaaaacgttcaataactgctggtaattatttaccatatatgtgtaatcgattacacagtgcaaattttgaattcaaattttaatagctgttgtaaatcatttttggccattggtaatcgattaccagagagtaaatctcttgaaaaagactttttaatttaaatttcttggccaaaccttttgctacttcaattggaattcccttcctatttaatatacccttcctaagactctagagactgtcttgatcatccatcttgaatatctttaatttctttgtcttgcataaatctttgagaagcatgtgatccatgtgatcctttggcatcatcaaaacattcagcttgatcctttgtctacaatctcccgctttgtgatgatgacaatctctgaaatcaagacaagctatatac

SEQ ID NO: 18977 - DNA, 390 bp, Glycine max
agctttattagtcttatccttgggccgaccagcatacatgatgaagggaagggcaaacaagcaaaagtcatacctcatgcatatatttatctccatccatattcaacaaatcatggcacatagcatcataggtccattcatgaatgacaggtgcaatctgtggtgcagattcaatacagtcatcaaaattgagagctataaaaggagacattcatattcatagtgaagagacatttttaacctgatctatggatctgtcaacaatgagcatatcacaagtttcattatgtggaaaaccgggaatggtagatttatatttagaaaccatgtcccaaacagcattagcaagcttggtaggaactaattcacgaaccgctgctgctgtagact

SEQ ID NO: 18978 - DNA, 415 bp, Glycine max
tgagcatgatttgttgaacgagaaagcaagatttgacactttatatagcgcatgatacgacattcaaaagtgaatgaaccagcaaacaattgaccaatcatatcagcattttcattgcaaaccatattgcaggcatcatgatttgaataaatatgcttccggtcatcaaccaaagtgctctcaaaaagtacaccttgattgcttaattttgtaaatgaataaaataaagactgatcaaccacaatgggaattttatgcacctcagaagagataacatcatcccgaattttcagattattataaaagatacggactaactcatgatagtatggcagtttgagagtcataaaatcgattaattcagaattttgaaagacttgataacaataaaaaaaatctctctttcaagaattat

SEQ ID NO: 18979 - DNA, 384 bp, Glycine max
agctttatcatggttggacatgatatatgtcagggtttggtttagttaaaggataaaaggggatgtcccacattatttccatgacacaaatgcaacaatgatgatttggaaattttatgcaaaactagtcatgcatgcacctatgtggacactcaagtgtcaaacttttatggtcatgtgatgctagggctcaagattcatttcctctattttagtcaacccagtgtttccaaaatacgttcctttatcaatttgtgcattcatccgagtctattttcgggtgttcgaataactttcacagcatttacccttcaggtgtatacacattatttcaaaaactgggtatgatcagtgaattggaaattatctcttttacaagcatgt

SEQ ID NO: 18980 - DNA, 415 bp, Glycine max
  unsure at all n locations
ntattcccttaaaaatcaaatgcggaaaacgtttcnatgtgtgagtaattacacatgttgggcaacgcgggcagtgcgggcacctagacattgatactataccctatggccgccgtcaagggcccagcctcggactctgaccctgaccttgaccctcaccaccatcctattccattccattctctctctctctgttccattatgccacttgtttttatttttcatcaacttagtttcacttggcgcctgataatgttcaacttttccttcaatttgttctaaacattcacaatgtaccactttggtacaatataacttaacgatgcatagtgatanttttacctacatgattgacacttaattntgcttcttagatatgtagttaaactctaatctagattttagagaaacattt

SEQ ID NO: 18981 - DNA, 395 bp, Glycine max
agcttttacacgagctagacgcatggcaatgaaggttcaactacaaactctaacaaaagggtatctttctatgcttgaatatattgagcacaaacactccattgctgactctcttgctgaaaatcttcatccaatttccgatgaggatcttattggttatattttaagcggccttgattcctcttatagtgctttctcaactgctttcatgatgaagtctgatgatgtctttgttgatgatcttgctggccttcttcttcaagaggaggctcgcttagagcaggaacatgttcatcaagctgttgttgtttcacagcccactaacccatccccacttttgtctactcctgctatttacactacaaatcggttctcagaccggtcctcttccacca

SEQ ID NO: 18982 - DNA, 417 bp, Glycine max
tgaacgaatgtgagacacatcttattcaaccttgtgtgattttgactccatctcattgaagcgcatatccacttgtaatttcaaagtgtcaaacctttcaccaacaaaggtttgaagaccattaaacctatccaaaatctttgaaagaagagatgaatcttctccatcatgtccttcttcaccaacatgtcgagcacccttcttcacccaagagccatcatgctttttttgataaccaaaggatgctatgactgaagcgcctgtaaggaaggatctcttgattggaacatagggttcataatcaagagggatgttgaagtgttgaaggaaaagggtaacaagatgaggataaggcaatggagcattcaatcgcaatgccttgtgcatgcgatatctaacaagatgtgcccaatcaat

SEQ ID NO: 18983 - DNA, 384 bp, Glycine max
  unsure at all n locations
agcttgtagacttcgcttattttcttcttcaatctctttcatgacttgttccctaatggttactactatttcagccaactgttctttggtgaatgctatggatgaggtacttgaggcacgtgatgtcctcccatagtattgactaattgtgaccccagacccagctgcacgaacacaacctccatgatctggtcttcctatggccatgttaagtatatcttgacgaccctgggggacaaactcaccctgtgtcacttgttcttccaacgagtcctacatgaagaacaaatttcacatcgttagatttcactgtcattgtaaacaacataacaagtagtaattatatgtgaaacaacatgtcacatttaatccanaattgaaatt

SEQ ID NO: 18984 - DNA, 391 bp, Glycine max
taagctccttcaactgcacaaggcttttatgttagcttcttatgtcagggttagcattattttgaaaattttgactaaatttcgacagcatttcgcattggtctccaagtacacaacatgacatcggtgaaattaatttctcgataatcaagtatgcactcaaagaacaacttgaaatgcattgtaccgaaatttcatcaaattaatcaaaataataataaccttaacgaatgaatctaacataaaaataccagtctccccaaactgtccaaacggacaattaaagactaaatacaatgactaatgcaaattgtccgctagaattattgcattcagtctcaaacgggaatctaaggtgcactcatcatgaagacaatttgtatagcatata

SEQ ID NO: 18985 - DNA, 392 bp, Glycine max
ttagctttgaataataaaatcgaagttcttaaagttccatccgttggtccagaattatggcaattgagagaatgacattattcactccaatacttgccattttttttccatcatgtttgttgtcaagttccctagctcttaatgttggatcgagtggcctcagaataattaaaaagggagggttgaattaattatttctaaacctttactaattaaaaattactcttctaaggcttttactaaattgttaaaagaatgaggagtagaagagaaacttaacagaaagtaaaagcggaaattaaatgcacagcggaaagtaaaagagtatggaagaaggaaacaaacacacaagagtttctatactggttcggtaacaacctgtgcctacatcc

SEQ ID NO: 18986 - DNA, 403 bp, Glycine max
tgtacacatactaaggtttctccttatcttcaaatctatgtgtatgcttcacatacacttcttcatttatgaatccattcagaaaggaactattgacatccatctaatagagcttgatgtctttatgtgttgcataggctaaaagtattatgatggcttcaagtcttgctattggtgcaaaggtttctttatagtcaattccttcctgttgactatacccttgagtaactagtctagccttgttttttactacttctccttcttcattaagcttgttttggaacacccatttggttccaatcgctaaccgattcttaggagggaaacaagattccaaaccttgttcttagtgagttgacgtattttctcttccatagaagtcacccaagaatattcatgcaat

SEQ ID NO: 18987 - DNA, 380 bp, Glycine max
tagctttgttatgtcaaattttggttcattacttttactttcttgtctttttatacttctcattataaccattgattacttttccttaaaattgatccaatggctgataaaaaaaaaatcttaagttattatttttttaaaacttcatagagaagcatttttactttctctctctttgtcaactcttgacaaaacccatttccatctctccttcgcatcccatttcttcttcttctcttcccatttcgtttattttcccgacaattcccaacagtgtgccgaggtgagttctgaatctcatccttcctttttctgttttccatttccacttttgggatactaatgtcaaagcttcttgatagttttgatttgacaatcat

SEQ ID NO: 18988 - DNA, 360 bp, Glycine max
  unsure at all n locations
ntgagccaaaatcctgactcaccataaacctttcccatttgagaatgccaatccttaccctcggaagccaaaataaaaaagagagagagagagaagagaaggaaaatttccaatcaaaggaaaaaggagaaggaaaatttcaaatcaaaggaaaaaggaaaggaaattcccaatcaaagagtgggagaaagcaaaaagaaaagaaagaacattcccaatcaaagaatgggagaaagaaaaaaagagagaagttaaaaaagaagaaagctcctggtcagagaaaccagaagaaatgtgccgagaggtccttggaccagacaatatctaaacaatacagaattgttcccaaatgaataaaaa

SEQ ID NO: 18989 - DNA, 404 bp, Glycine max
  unsure at all n locations
agctttactaagcatgagatatattgggtaagcaacaagtggaagtctcattattacaatttgttgatgataccatcttttttgcggagaatacactgcaaaatatcatatgcatcaaatctatcatgagaagttttgagttggtatttgtactaaaagtcaactttcataagagtagcttgggagggattgcggtgaatgctcactttattcataggtatgctcacttattgaactgctcgtccatgtctttgccttttacctacctcgggatccctattagagtcaatctaagaagggagtgtgtgggaaacatttttagataagtgtaggaaaagattaagcaaatgtaagcaaaaatttatttctatggggggagagtctcttanataaattcagttttt

SEQ ID NO: 18990 - DNA, 434 bp, Glycine max
aatactcaagctttgacttgagttatcaagagattataaatatgtggatatggcatgaatttcaataatctataatctatctttaaatcttctctcaacatcattcaatatctttcaactctttctacacaattttctgattcatttctcttcatctttctaaaagtttttgttcaacactttcttttccgagaaaagttctttgttcaaaaacttgtgctattcatctttttcattctcttctccctttgcccaaagaacgaaggactaaccgcctgaattcttttgtgtctctcttctcccttacaaaagattcaaaggactaaccacctgaaaattcttttgattcttcccttccccttaagcaaaagatttcaaaggactaacctcctgaaatattttttgtttccccttacaaagattcaaaggactaa

SEQ ID NO: 18991 - DNA, 404 bp, Glycine max
agcttctacattcaatttcgagcgtctcgatatatgacgggactcaatcagacatccgagtaaaaagttattgtcgtttgaatttgctcagagcatcaacattcaatttcgagcgtctcgatatattacgggactcaatcaaacatccgagtaaaaagttattgtcgtttgaatttgcatagagggtcaacattcaatttcgagcgtctcgatatattacgggactcaatcagacatccgagtaaaaagttattgtcgtttgaattggctgagagcttcaacattcaatttcgagcgtctcgatatatgacgggactcaatcagacatccgagtaaaaagttattgtcgtttgaattggctgagagcttcaacattcaatttcgagcgtctcgatatatgacgg

SEQ ID NO: 18992 - DNA, 421 bp, Glycine max
  unsure at all n locations
ttgagccaattcagacgacaatatctttntactcggatgtcttattgagtcccgtcatatatcgagacgctcgaaattgaatgttgatgctctgagcaaattcaaacgacaataactttttacttggatgtctgattgagtcctgtcatatatctagatgctcgaaattgaatgttgatcatctaagtaaattcaaacgacaatatctttttactcggatgtctgattgagtcccgtcatatatcgacacgctcgaaattgaatgttgaatctctgagccaattcaaacgacaataactttttactcggatgtctgattgagtcccgtcacatatctagacgctcgaaattgaatgttgatgctctgagcaaatttaaacgacaatatctttttactcagatgtctgattgagtcccgtaa

SEQ ID NO: 18993 - DNA, 403 bp, Glycine max
agcttttgatgaggtagtgttgaagggtgaaacttcctgcttttattgttgaccacagagtggtacctggagatatgtcgcgggggtcaggagaccttggggacgtcaggtggggtgctattgcccaaaaccaagcttgaccaatcccgacccaacccgggcatagtcggtcagtgagaacctgtgatgtacctaagcaggcgagctcctggcagtcaacagataaaaggaacaaagaccacaaagcaaggaggctcgtggtggctggccagctgtgaattttgtgtgacatgtggtttgtggcctctggtaatcgattaccaatggtgggtaatcgattacaaggcttaataatgaagacaggaggctaagacggtctctggtaatcgattaccaaggggtg

SEQ ID NO: 18994 - DNA, 408 bp, Glycine max
  unsure at all n locations
tgaaacacgtcactaacaacatttccttctcttttgccaatgtagacatcttattatggagacagccatggtttcttcaatactttttattcacgtgaatcccaatatatataccaattgaggcggtttccttctgaacgggaacggaggtttcagagcatcaccgaactgtgcaagtgtgacatcagcatcggcctcgatgaacatgacccgcttgagagtctatctcagataggatcttaatttcgccattattggtgatattagctacaaataagttgtgtgactcatggagttcgtccagcgttattgtataggcatggaattgatcattatccacatgtgtggataaatttcttgaaagccgacaagaaaataacgaanacatattcaaattaagttttgaat

SEQ ID NO: 18995 - DNA, 385 bp, Glycine max
  unsure at all n locations
agcttctgaaacaggtttgcttacaattggtcctcgatttgggggtgccattgatgatgctgctcgctacttcaaggatgctcatgacagggtatgattagttctttcctgtgaagctggttggaactagaataaaaacatcggggagtggtagaatgaacctaatgggttaaagaattattttataaaataaacttagaaccaggggaaaaattcaaaaacctcagatcccctccagccccaaaaaaataaaaataaaaacaccacgaaccttgtctttcatctaatgtgtggtactttttactgtgtcttgtcacaggcgcttagtccttatgagtttgttgaaagtatgaagaagaagggaattngtgtgnnaggaataggg

SEQ ID NO: 18996 - DNA, 415 bp, Glycine max
attataatggctggaaagttcgagaatactagactagtcacattcgagaatccaaatgactttatattgatatcattcaaaaaataaaaaatctttgtgattttgagctgagaatattcacttgcaggctgcaccatggcggaaaattcacgtgaaagcgcttcatggagttggtattcacgtaattttgtaatcctcttttctatttatttataatatatctattgtatctcttctagatgatatatttatgatggaacttgcatgccaattaagaagcaataatagaactatatagcaattcacaattgtaatttgcattccaccaaacttccctatgtagagggtactgtacgtgtaatgctataattaagcaattgctatatatcaactgacgtgtcaatccacctttcta

SEQ ID NO: 18997 - DNA, 367 bp, Glycine max
agcttcaaactcgaaggtggaggacacatgaacgaaaattcaattcatggggctccgaaaaaggttgagaatggagaattgcacaaagcaatcactacgcatagctccaaactcgaaggtggaggacacatgaacgaaaacgcaattcatgggctccgaaaaagggttgagaatggagaattgcactaagcaatcactacgcatggctccacactcgaaggtggaggacacatgaacgaaaacgcaattcatggggctccgaaaaaggttgagaatggagaattgcactaagaaatcactacgcatagcttcaaactcgaaggtggaggacacatgaacgacaattcattcatggggctccgaaaaa

SEQ ID NO: 18998 - DNA, 410 bp, Glycine max
tctacttatgtggcagggcgggcttacttcactttcttgtctccaacgtgagctctgaccactgttcttccttcccgcgatgcttcttttcatgtccgcctgagtgggcttatagcctaaaccatacttcccacgatttccttgggtttttatcaggctagttatgccgccattgtctttgcctaaacccatcccgggttcataaccgttccccaacataactcgggccatcattaccgccgcatctgacagacaaggttgcccaaagagggagtccacggaggaaatgctgaccacctcaaaagactggaaagcggtttctaacgattcttctgcggcttccacataaggcatggaggatgggcagcttaccaagatatcttcctcgcctgacacgatgaccaagtgcc

SEQ ID NO: 18999 - DNA, 391 bp, Glycine max
  unsure at all n locations
agctttataagcgcgggtctgggagacaaaggtcaagtggtcgcgatatgcgaagatgatgttccgagtacattggatttggtacgaccatgccctcctgatttccagctgggaaattggcgagtggaggaacgccccggcatttacgcaatgagcataatgtaaacctttacggtttttaaaagctctatagttgggcctaggctttagagtttttccttttgttaaggctttgtgtcttttgtttttgaatttctaatacgaggacctttcttcatctgttcctgcgtctctacccattctcattcatttgcatgttcacttctttntttgaaacggcagatccgatgacgagtcccccgaagtactaatacctgggacccgcttatcg

SEQ ID NO: 19000 - DNA, 383 bp, Glycine max
  unsure at all n locations
tgagatgaggaagtgttgaagggtgaaactttctgcttttattgttgaccacagagtggtacctggagatatgtcgtgggggtcaggagaccttggggacgtcaggtggngtgctattgcccaaaaccaagcttgaccaatcccgacccaacccgggcatagtcggtcagtgagaacctgtgatgtacctaaacatgcgagctcctgtcagtcaacagataaaatgaacaaagaccacaaagcanggaggcttgtggtggcttgccagctgtgatttttgtgtaatatgtggattatggcctctggtaatcgataacaaggttgggtaatcgattacaaggcttanaattgaagacaggaggctaagatggtctctggtaatc

SEQ ID NO: 19001 - DNA, 391 bp, Glycine max
tcaagcttgatcgatgtatggcggttggggttgtgacagctctagcagacttgattagacaatccatcttgctcatcctttatggtttcatcctatagttcctaagaatggaactcttgtaggcttgatcaatttgtaatttagttgagtaacatatccttgtccattatataaaataaaatctaatttatttatgcatttgcgccaatgtcccattctcttttttatgtttgtgttcgcaagagtttaatatcattatgagacctagtcggtttcttgataaaattggtctttgttaaaaatcatcttatggatgatttatcgcttgcaaggcatagtaggtctccttgttctctaataacatcagtccttactaacatcaacttgtgga

SEQ ID NO: 19002 - DNA, 415 bp, Glycine max
tgaaggagttgatgagctaggccatccaaactccggagcttcaccgatatttggcacgattgttaggattcgattactctatccaatatcaaacaagaaaaatgaatgtggttgcagacgcgttgtcacggtgtttggagttgcccaatgcttcatgtttcatcctctcaatgccacattttgtgtttgtggaagatctctataaggagttgcaatcgcataatgacttcatcactctgagggagaagatccaggcgaacctagaagattacccggatcacgtgttaacaaccaatttcgttttgcatcaagggcgtatctggctaccttcagactacaccatcatcaaggctctgctcacagaatttcatcaaactccaacagggggtaatatgggttttcgaaaaaccttgaa

SEQ ID NO: 19003 - DNA, 326 bp, Glycine max
tcaagcatttccagtgacgagtcgtgaaaggagtgccagctacaaaccaaacacacgctatcccacacaaagcaacattcgacaaggtatgacaggataaagagtgtgtaacgggttagaacaataggaggaacgaaatgaaatggaacaaagagcacagaagcgaaacataataaaataaaagttctactcatagcaagagatatcataatggaacggaaaaaagctcctgatcaactagaaggaaagtgaacggacgagaccactgacaaccatctaaagtgcgatactacctacagtgtataaacaccagacactaatccata

SEQ ID NO: 19004 - DNA, 344 bp, Glycine max
tggtacttctactgaagctgagtttctaccctcctcctgttctgacatagaatctctagtgcagctgaaggatgctatagggttcttgatccttcagattcagtctttgtttcttgtttgttctttttcttggatttatctctcattaaaaaaatatcaatgaaaaatatgatggattaactggttttcctttttctggtatcggagaaaagataatgattttcattggtctcattattcagtatttggatttgtacattctttattggttattatctattcattcattatatcagtaaatcctactttttcttgataacaatatttgatgcaaaaataaaata

SEQ ID NO: 19005 - DNA, 393 bp, Glycine max
tctgcatgcttgcttattgtcattcaaagcttgtttgttggtgtgtattgcaaccacagtagatgaatgtctgcgtatagaatgtagccatgattggagatgaggttgtctaggaaaaaaaaagttaaaaatcacaggtcacatcacatgacacatgaagtaaatggaattaacaaaagtgttagttttaaaaaaaaagtcaatactaagggagttttatatatgatgtatcacgatcggacgacaatataaaattaaatattttttttaaaatagaaaaatttggagaattgtcattaatgtgtatttaagaaaaaaatatgaaaaaactaaaataaatgaggaatgatctataatttgagaaaaaaaagaagatctaggaatcatctacgt

SEQ ID NO: 19006 - DNA, 373 bp, Glycine max
tgtagaatggctagacatgatacatgtcatgttttggtttggttcaaggataaaagggatgccccacattatttccatgacacagatgcaaaagtgatgatttggaaattttatgcaaaactggtcatgcatgcacctatgtggacgctcaagtgtcaaatttttatggtcatgtgatgctagggctcatgattcatttgctctattataaatcaacccaatgtttccaaaatatgttcttttatcaatttgtgcattcatccgagtccattttgggcgtctgggaaaatcttcacagcattcacccttcatgtgtatacacattagttcaaaaactagttatgatcagtgaatttttccaaagacaagttgg

SEQ ID NO: 19007 - DNA, 446 bp, Glycine max
  unsure at all n locations
tntttcgctgcaacaaatgccgcaatcgcttccagcactcgtatgatctctttctccttctcaaatcataaccatcatacaaaaatcataattacatgcacttcatattaatactccaatatctctctttatcataacacaatcatctttaattttcacaatacctctaatctctattggtttcataattaaccatcatacacaaatcttgatcatcatggcaatacttatgctattgctctactttttatgttcatatatgtgtagcttcataaaacatgtatgctntttttttggtacttttcaatgttggtgttacttangagtngaatanngcttanagttatttaatatatatatatatatatatatatatatatatatatatatatatatatatatatatatatatatatatatatatatatatatataatatgnntttn

SEQ ID NO: 19008 - DNA, 565 bp, Glycine max
  unsure at all n locations
gcacccagcacgtcacacancgcgagaccgccataaaagaaaccataanntactcccccccncccccccccccccggagaggatgatgcatagaaagccgaanncancncnnnncccgnaganccngnagagncgaacngcacgcacgcaagcgctgtacttatacctgactcaccatagaccaggacccgaggtgagaatgacaaatcttacccccggaagccaaaagaacagaaagaacgccgcccaccaaacagaacgcagaaaagaacagaaggaacactcccaaacaaagagggggagaaaggcaaaagaagagaaagaaaattcccaaccacagaatgggcacaagcgacaacgaagaagaaaaaggacgaaacccccgacagggaacaaagagacagaaaacagggcagaaggcagtgaccggacataccgaacaaacagaatgtaccaatgaacaaaagaggaaagaaaccacacctaaacggcctcccctcgataccaccacaaaccggcgctacgactgattcggctgaacaaacaaaaacagaaaaaaaagccn

SEQ ID NO: 19009 - DNA, 341 bp, Glycine max
  unsure at all n locations
ttacgtccttggcacaattcataagaatttcttctaagattggcctaatataaattgtatcttgaaataatagacaattgttattggttcagcccataagtgtttaagggttgagtgatcactaagcatggtcctagccatttcctgaagaaatatacttttcatttacctctaaacataatctaatttggtggtcttggagttgaaaatngtggtgaataccattctctttacaaatatttacaatatcttttcaattctccccatgttactttaattgagagatacatgatatgactattgattcttcaaaaaataaacttaaatttgcatacagatta

SEQ ID NO: 19010 - DNA, 399 bp, Glycine max
  unsure at all n locations
agctnttaggtttgtggtcagcaaacgcatgacctagccacttttaattatttacacgatgaacaaagacgatcatagacaatgaccgctgttgagttcatttaatgtaattacaaaattgccactatgtgattttctaagacggttctttatgaccgtcttagaacccgcgaagtaaatagcacttataatggaaataattacaaaaatgtcaccgcgttgctttctaaggcggttttacagaaccgtcttaaaatagttgtcttagaaaactgtttttgtagtagtgactgcccagaattagctgagagagatcgctgcaccaacaattggttctcatggatgatgcaaatagttcatccctantttttccttgatgatcttcatccttccagctat

SEQ ID NO: 19011 - DNA, 403 bp, Glycine max
aattcattttgctatccgacttttaaataataataataataataacctaaagggttatattaacatttacatttatataataaaataatctggtaggctttaaaatattttttgaatgacttaaggggtaacatttttaactaattatacttttataaaatcattaaactaatttatttcctaaaaaaagtgtggtatgacttgactggacgtaatctgtgtataaactattatttacattatcaataaaaaattatcctttatatgattttggtggtaagtaattaaattacttatcatatattatttggaatgagattaaagtataaaaaatggtacatgcatatattatttatttaataattatatatcctattagaattttcattccttttctatatct

SEQ ID NO: 19012 - DNA, 445 bp, Glycine max
  unsure at all n locations
agcttcttcctttttttcctacaaatagggggagaagtgaagagaaaaaatgttcagccctcctagtaaatcgagaaccacttgaaattagtgaaaaaaattggttccgtgaagaatatccaagccgaggcgcttccgtaacgtttccatgggtgatttcgcgaagatcttcaaccgttcttcaacgttcttcgatcgttcttcatcgttcttcggtcttcaaccggtaagttcccgaaatcaaacttttcaattcattctatgtaccttagtggtcttcatttgtttcacgtgcttttattttcatttcatttacttttcataccccattntaacgtgctgtagtcatttgcttaagtcattctcttgcctaatcaaagaatacaataaaattccaccgatcatttgaatgtaatatccgtaatttctgttaaaaagaatccga

SEQ ID NO: 19013 - DNA, 374 bp, Glycine max
tctgaactttgatgaagccgcatcttaagaacaatgattttgactgcatatgaatcttcaaggctggataaaaagaagggtaaaacttaccatgataaaaagctgcttaagaagaattttcaaccaggacaacaagggttactattcaattcaagggtgaaattggtacttgggacgctcaaatctaaatgggtagtgaatggacaaaggttaaagctgtaccatggtggaactattaaaagattaaccactattctatccttccaagaataacaaagaactatgcatcaagctaatgacgttaaacgagcgcttactgggaggcaacccgacactttttaaattttgttttcttgcattctaattcagttgga

SEQ ID NO: 19014 - DNA, 220 bp, Glycine max
cgctatggatacattttggacagaccaaagtctggtttagcgtgtaggtgagaccgcttgacaattgttgacagcttgatcctctctatctgcttcttgagctgccaatagttgacgaaggcctctatccattctggcatcacgcgggctactagctccttcgataacttcaccattgggttatcacagttttgtgggtgcacatatatattaaaggagc

SEQ ID NO: 19015 - DNA, 342 bp, Glycine max
cggaaagtttagtagatcgccactactttcctttcaaagacaaacccaattcttggaatagctccgctatgatgatgcgtggtgggtgagtaggtgaagcatcttttactctatagcaagaatggcaactcttgtatacttaacgaagatataaatggagctgctaacggcagatactttgcctccataggaaaactaacattttcttatcctgaatttttattctttctattggatcttcttcagtcggaatctcaacaccagcttctgaagaggtgcaccaccactgtataatgccttcctcgacgataagagacagatggaacaaacgtaacaataatt

SEQ ID NO: 19016 - DNA, 239 bp, Glycine max
ttctttgtttagatacttacccgttgaagatcgaagaacgatgaagaacgaatgaagaacgtcgaagaaccggtgaaatctttgcgaaattcctcacggaaaacgttaccgaaacgtttcggaagcgcctcggcttagattttctttaccgaaacaatttttccaagcaaattcgaaagagagaaaagtacctcaagggctcaaccccgttcttcttgccttcctcccctatttatagc

SEQ ID NO: 19017 - DNA, 413 bp, Glycine max
  unsure at all n locations
tatctgcngctggaacagtcaatggagaccttttacaacctccatcgtcctttgtgcccaaattccttcgatctgtcagaacatcatgcaaggcaagttggtcttcgatgtcatggaaacaacttcttgctacctcggtactttctcctaaacggtgattttgctcgccaattgttcattagatgactccattgaagctcatgtcacgtattcctgcccataacagatataagatacaagctactttattcatttgactagtccactgcgcaatcatagaaaatatttcaagcaaagctttatgcatagcaaagacataaagtctatcttaatatcacatacagcagcaccaatgccagaaagttcggctgcatacgaatatatttaaaagactattctagcaagttctttaa

SEQ ID NO: 19018 - DNA, 437 bp, Glycine max
  unsure at all n locations
ctaaactcaataaccaaaggggagaatttttgtgagtgatccttttgtagatttagcttgcattccgttcctgatttcaaggnttgcatcatccaaaaaggggagattggagaaagcatcctcatgatgatgaaccaagcaattttgatgatgcccaaagccccagtgattgactcaagatcgatttaagacttccagatcaagcatcaagaatcccatcccagattcaagattccagagaagaaatcacgaagcaataagtcagacttcatatgtgataagtattaaagaatttttcaaaaaccaaatagcacagtttttgtttaccaaaagatttttttaaaattttcaaaagtaccaaaaggattactctctggtnatcgattattgagtattcagtatcgattaccagtgaccactttgattttcaaatgttn

SEQ ID NO: 19019 - DNA, 444 bp, Glycine max
  unsure at all n locations
agctntttctagttgatcattgcgggtaattagttgcaccataatagcgaaatgttccttagatgcttcaattntatatctaggcatcgaattgaagtttctacaagcatcatcaacaaatccaactttgtcatatagatagagtactacaaattagaagagtaaacaacccacgaatttcgatctacaaagttgaattgaaacaaaaattagaaatggtggtttgacgaanattggaaaagttgaattaaaacaaaggcttaattataaaatataggtttaattatgtntaaataatttaaaaatcanaattgatgtattttttatagaaatattcanaacttattttatataatanaagtataatatattaatanaataaaacttatatttaatataatattttaatttatgtgaaaatagaatttaatttatatattatat

SEQ ID NO: 19020 - DNA, 448 bp, Glycine max
  unsure at all n locations
gagtgcctgaactgattgaacctgatacggccttaatctaactgactataaagtctctcatttttgagaataattatgagagcttcatccaaggagaaaaaaaggtatctccacgccatacaccatatgggagattaaccaatggtatcatcacaagtccagggtaaaagattcaaacttttaataatattatggaaagatcgagcatagaaccaagaagatagttatatgagaagcacatataccaaattattttcagcaaaaatcaaagaattttgacattacaagtgtcacccattacctcaatgaaccggatgaaattccacagccaagaatgtcaaattagtatgtaaggaacctaacgcagattgatatacattggaatggttggatattgatattagggaccttatangaatatacaatgactccttagtacaattcactn

SEQ ID NO: 19021 - DNA, 418 bp, Glycine max
  unsure at all n locations
agcttttatgcttctccagcctggacaagtgttgtccatgctacttctgtcaactntntttggggtggatatgcttttggttttgcaagcaatgtatgatgtgtaaagtgagggaaacctttgtatttgataactcttcccattactgactgttggagagtgcgttgaagacaaacgttatgttttattcgttgtggtaagcgtgtgcggcgcatgcacagtactcttgcatatgtgtcactcatggagtgcgctcgtactgaaaacgtgatatgtgggtgaatggngatacatcgtggtgcataaaattagagcaccacttcaactcccaccagttatcaaagagcttatgtcctctgtaaatgaagtggacgtttaattcgtgatcactgtcactttcaatatctatcttctttct

SEQ ID NO: 19022 - DNA, 358 bp, Glycine max
ttcttcatgccttttctcacatgtcttctgctaaatggtgctaacatgattctttaaaatttccaccaattaaacttgctatagaagctagatttgattttctaccgctcaaaattaatggtcttggtcttgaaccatgaattatgttgagtttatgttcctttgagttttggcttgctatttcttgtggctgaaaactgaatcataaaattcttaacaaaacattaaagtagaagaaaatctcaaaaatctagagtgacttgtcacctattggagttttttcatagaagtcttgtctagtcatgaaacttggcacataaaatttcttatgttgcgcctgaatttattgttcttgttc

SEQ ID NO: 19023 - DNA, 446 bp, Glycine max
  unsure at all n locations
atcttgtcatatgtccccaagacaaactagtatcacggaagaagaaaaagatgggagaagaatgatgcaaagcagtcagagatgaagtatacaagctcctcaaagtcaacttcatcagagaattcagcttttccaccaggctcaccaatgtcgtcatggtcaaaaaggccaatggcaaatggggaatgtgcaccgactacaccgatctgaacagggtgtgtcccaaggatgcataccctctgcccaacatcaacaagctagtcaatggagtgtttccaagttctaagcttcctagacgcctactatggatacaactagatccggatgcatgctcaagacgaggagaaaatgacattcatcattgaagatgccaactnttgctacaaggccatgccttttgccttaaaatggaggcgctacatactagagatgggtggtcagatctt

SEQ ID NO: 19024 - DNA, 429 bp, Glycine max
  unsure at all n locations
tggtgtcttaccttttcggcttctatttccccctgaggttatgcgtcagtgacctggttggtctatataccaaacatccatccactgggaataatccgacttgagcaaacctcggtaacatcaatggttggggaggcgagggtctcctggataaacgtccgatgctgacctggtctcttaatgctcgccaggtaagataaaacatcaactcaatcgttctgttccctgtcaacgcggaccaattctttctgttcaaaatgctccaagagttgtttgaccaggtggtagtacttctacatttgtgtctctctagcttgaaatacctcattaacctgctcaatgatgatcttggagtcgctctancaccttaacttctntatgtcaacctcgatcgttagcttcagtcctacgatgagagcttcacactct

SEQ ID NO: 19025 - DNA, 315 bp, Glycine max
  unsure at all n locations
ttctngtctnctagcttgccaggcgagctcagctcgcccaggcgagcaaggttgcttcctccagaagcaacagccttctggaggaatcttctgaaaggcccaagtgggcctggttgctatttgcacccccatttttactaagtacaccccctacctttntttggtgattcttttttcgtaaagttacggaaacttacgaatttcgtaacgatactggttttctttccgtaatgttacggaaccttgtggattacataatcatcccctttntgacttacggaatattacggaacctcactaattgtgcaacgatgc

SEQ ID NO: 19026 - DNA, 438 bp, Glycine max
  unsure at all n locations
ttcttgtttaacagattntcacttactctcgctcaacgagacatgctcgctgagcgagccttcgtgtgctgagaagtccaagagcctttaaaatactgagattggtggaaaaccaaagggcaccacgacaaccacagcctagccaaccatctaccacgtgaaaaacagagagaagaagggcagagaggctggagaagacattctccttcatctttttccattntctttcaccaaaaacatttatttccttgtttgtatgaagctntgcttgatcacccatttgtatgtttagttaggctttntagtgttggaaaatgctttanaaccttagaacttgatagagcaagctagaaatctatgtgtctaggattagaatggcagtaatctagtatatttaaattgtatgcttagtggaactcttttagaaatgagttgtga

SEQ ID NO: 19027 - DNA, 366 bp, Glycine max
  unsure at all n locations
gagtgtaatcatgcatataagcctaaatccatctaatggaatgaacccctaattgagcttttagatcaaagattaatgaatgtgttatgagaaagaggatattggttcacctgatggttacgcttgagattcctcagacattctcttaactgttcagcttttgcttgtgtattataaacagactttgacttcttgcaattgaatcaagtaaaaatcatctaaacgtagataacttgtgctccacaataacagggtaaaacgagttacaggaaaaaaaaattagttatcatattgacaaatanaacctaggatctatgaattcagtgtataaataaatcgatcttaatcgtacctttttcttgtcta

SEQ ID NO: 19028 - DNA, 346 bp, Glycine max
aatcaaccacagcagaacaattatgacctctccagcaacagatacaaccctggatggaggaatcaccctaacctcagatggtccaaccctcaacaacaacaacagcagcctgcttcttccttccaaaatgttgttggcccaagcagaccatacattcctccaccaatccaacaacaacaacaaccccagaaacaaccaacagttgaggcccctccacaaccttccctcgaagaacttgtgaggcaaatgactatgcagaacatgcagtttcagcaagagaccagagcctccattcagagcttaaccaatcagatgggacaaatggctacccaattgaatcaacaaa

SEQ ID NO: 19029 - DNA, 116 bp, Glycine max
  unsure at all n locations
gccaagcccgacacccgccaacacccgctgacgcgaacccctttgggccgnnttgaaataacttngtatatggatgctatacgaaggtattatccatgagcttcgactttcattcn

SEQ ID NO: 19030 - DNA, 446 bp, Glycine max
  unsure at all n locations
agcttatgctgtaagaagtaagatgtgtgcttgagatgtgtttaaaccttatctcaacaggaaagcttgatgaagttgggatgatataccagttcggtgctggtagatggaagcttagtagaggaagcatggtcattgctcaaggtaagaaggaaggctccttgtacatcatgccagganagatatgcaaatggaagatgaatgttgctcaagatacaaccaaagaattatgacacaagagattgngtcacatgagtgagaaaggtttggagtttctaacanaggatcactgtccaaacataaagggccagccacttgaatcttgcgaagactgtcttgcangtaaaaagtgcaaagtgtctttccaaagatcggatgaggctagaaggagaaaaaaatcctagatcttgtccattcaaatggttgctcaatgtctgaaaagtctc

SEQ ID NO: 19031 - DNA, 407 bp, Glycine max
tgacttaatggtggaaggagataaggaatgaaaagattgtgtgtttaaatcttctgttagtaaaaaaggttgatttatctgccgacaatattatttaaatatttttggtccttcaattttatgtcacttttgtttttggtcctccaactttaaatttatttgtcttagtctctcaatatttctggtccttcaagtttatgtcacttttggttattcattatgcatgcagccttttatataatgtagctttctttacatgcataaccaacctaactaacaagattaaaaaactctaacaaccaacaactgaattaactaactccacgtaactaatctgcacgtgggttattatacttggctgcaacgttttcttcttcctaacatttcctaacccatcaaaaacacct

SEQ ID NO: 19032 - DNA, 444 bp, Glycine max
  unsure at all n locations
agcttataagatcatatttgcctaaatcatttccaaatatgcatgtgaattatgaagcatcaacaagaatcaagccaaggctattgtgcaagcaatcaatggggcaaaacacaccaaaagattatgatgatggatggctcatattctcacaaaggtaaacttatcactttcaaattgagctttcaaaattatcatgacatgtagaggaaaaacaaggatttcaaatcacaaaatgtcaagagacttttattgtcagaacaatgacccatctcttgaacatatcctataattcaaagaacaatatgagagttgtacatgcaaacataattgacctataatattatactagaaacccaacaaaactaacaaatgtaacacaaacgaaactaacanaactagcaaaaccacaaccatagaacactccctgccatactaaaacaacac

SEQ ID NO: 19033 - DNA, 442 bp, Glycine max
  unsure at all n locations
gcttcttcatntatagccttcaactntaagtatttgttgtccctcagcggatggttcttcactatattcttcattaaagtcttgaagctcttggagcatttaatgcatgtctcttcttcatgcaaagtctatgctaatagctaggttgacatgtcttatacttcaacaagaaagtcacttcttccatcagagcaagtatgcaccagcaaagtgcgtctttcgatgaagatcaacactntcaaactatggactntatttattattcataggatttaatagattctaggagaatgttttccgcaacaaagaatctcatacataanatattaaatgtaggtattaattaaatgcactacttaatgttatgacaagatcatcttatattgatgtaacatcagaaaactcanacccagaaatacaaaccataatctgataacacatc

SEQ ID NO: 19034 - DNA, 431 bp, Glycine max
  unsure at all n locations
attttgttatccagctcgcccaggcgagctaggttgcttcctccataagcaaccgccttctggaagaatattctggaagagcccagtgggcctgattgctatttgcaccctcatttgtactaaatgcagcgcctgatgagtgatggtgactctatttccgtgacattactaaactttacaaatatcgtaacgatgcttgtttcctttacgtaatgatccgtaatgtaacaatgcattgttcctttacgtaatgctacagaatcatacccttttgccttccggaatgttacagatctatacagattgtgcactaacactctcttttaatttccgacatgtcacgaagactcacggattgtgctacaatgctttcttttgactnccggcctgtcacgggacttaacgaattgcctaacgatgggtgtcagtac

SEQ ID NO: 19035 - DNA, 393 bp, Glycine max
  unsure at all n locations
ggcactcagaacgggaacattgctgttgaccaaaaaacgagaacctaaaaatgggtgcttcccttaaccataacccccaattccaaggaaattaattggagttaatttctaatcccttttaagataataatatcttacacttctcatttatactgttaatcaatcagaaatatatatgaaaacacttttaagtattttatataacagtaacaaactaatatatgtacatacataactgctactcataattactatnttttangaaatgtttaagcttgtaatatctatagtttgtgaattttccagcatatttgctatactataaatgtcaatatgtaaccaaatagtgttgtttngtaataatgangaactgcacagaaggaaaacaaaaat

SEQ ID NO: 19036 - DNA, 248 bp, Glycine max
atgaatttataggtaagaaagccgaatccacattcaggtaattcaaaactaacaatgatgatcactaaaatcccaaggtaaaggcagaaaaccagcatacgcctatgcttctatcaatgaagaaaatagtgttatttagtgaaatcggtatcgaaacgaaccggttcattgaaataaacaacgtaaaacacacgttactaacaagaggttctgatatgtgtaaaaatcgagccgaaaaagagactttg

SEQ ID NO: 19037 - DNA, 436 bp, Glycine max
  unsure at all n locations
ttcttctctaatgtgatcaatacattcattggcagattgaaggatgaagttgtggtgcgtgatctgtttttgtgtcacccagatccagtaaagttatgcaatgcatgtcatctggtgtttttttttatagacagtacctacaaaacaaacaggtacagactcccactacttgactntgttggagtgacaccaacggtgatgacattctctgttgggtttacatatctggaggctgagcgtgttaataatattgtatgggctttggaacaattttgaggcctatttttaagaaacgatcgcctccctgttgttattgtcactgacagagacttagcactgatgaatgcagtgaaaactgtgttccccgagtctactaattttgtgtgcangtttcatatcgataagaatgtgaaggcgaagtgcaaatctttaatcg

SEQ ID NO: 19038 - DNA, 483 bp, Glycine max
  unsure at all n locations
tgcaggtgccntttgacacccttggatttgataccctagctattacgtgacctatagaatactcaagcctgttaattctcctaacaaagtggccatctttccatcatcattggatatgcgccttaatggcacattcagaatatttggcattatacccttattgaacctaccttaaattggaattcattaattaagaattccttatcctaccgaatccatcaagcttggaccatttattataattaggggatggctttcattgggtaggccaagccaaaaacccagaattttagtttttaactctaaggacacttatcccattccttgagcttttatttcacaggtatatgtatctgtattatgcctaggcatctagaaaattcgatttactgtctattgattttgcgaattgtcagactctttacgataagtaaatatttttgtcacactactttaacaagtgaaaatagatctcactgagtn

SEQ ID NO: 19039 - DNA, 431 bp, Glycine max
  unsure at all n locations
atcttttataatatgaaattgtctgtaagtcatttgagaattnttggttgtacaacatatgcattagttgatttatggactaagttggatgataaatctatcaaatgtgtatttattggctatgctactcagtcaaaggcatacagactgtataacccactaactggcaagataattgtcagtacaaatgttgtatttgatgaagatgcaggctgggtttgggaggaatgtgaaatcagtcaaagtgttcagcagaaatcagtcaattttgatggtttagaggaggtctcanatgtgccacataatgatcacactccaagccctccttcaatgccatcaagccagggatcattaactccttcaagccaggtatcatctagctcatcaagtgantttgctccaaggagatacaaatctttggcagacttgta

SEQ ID NO: 19040 - DNA, 383 bp, Glycine max
tattcctgcattctactaatatatggaattgcccattgtcttgctttataataacaattgggtgaccacaacagcgctgggggcggcaacggacaatggtctttcaaataaacctgttgtacatgaacaaacattatatcatgcgctgaccgtgccaaacgaacaagcgaagtcattgcataattggtacacttactatattcaatggacctgaacaaaatgattttcaaacacgtgaccgacacatatgatgcggtggccagaagaatcaagtggggggtgacttctaagagggaaaaatgtcatgccttgttgttgggacaacgataccatgattacgttataccgtgaagcaatcacatatcccatgtcttgtatattca

SEQ ID NO: 19041 - DNA, 443 bp, Glycine max
  unsure at all n locations
agcttattcttcagagtaaacttaccacaaacatcaagttcttcaaatattttggatatagtttccattacttccttgatgctcacctcgggctcagataacccttggtctaaaaaattgagtctcctccaaaacatatggattgaatccagtgggatgcaaccaataacatatttggatagctcacaagcacaaggaagatcgtgtgtggttttcatcacacaaccactagtggaaggattcttgccagcatagtgaacacgctcaaattcagcagcaatatgatttanagcataccttgaaaccattccaagaagcctcttgtataaagtttttttgaagacatgtccaacgacatgtgtaccagtttcaaaggatgctctaatttcagtgtgctgcaacatcatcatgttgttcatggcatcccagacactgcataagtc

SEQ ID NO: 19042 - DNA, 428 bp, Glycine max
tgtgactcttggcaatttctttaaatctagtcacttaaaaagttgtgacttttgaaaaaatcttcagaaacaagtcacatgaagaattgtgacttttggaaatgtatttttcgaaacccgtcactggtaatcgattacacataaacagatgtgactcttcattttgaattttgaaaattaaaacatttagaagctctggtaatcgattacaagtgttgtgtaatcgattacagaaagtttaaaatactttaaaactggttaaacataagttataactcttgaaatttgaaatctcaacgttttaaaacactggtaattgattactaccttctggtaatcgattaccagagagtggaactctttggtaatggatttgtgaaaacatcttgtgctactcaatattttgaaaaaactttttagtacttatc

SEQ ID NO: 19043 - DNA, 293 bp, Glycine max
  unsure at all n locations
ttcttctgatgcnaggtcgccggagcattataatcgcttataaacaacagacacttgataatgatgacctatgaatactagatgctttgaacaaatgagtaacgaacctacacgctatcattcaaatcctttatgtagaaaactctttgtatagtcttatacagtttgaagagctctcggaacatcttgaatactctaagacaaataactaaatgcttagatcacacatgtgtttgtaagatgatgaagatctaatcgagtggcagatcaaacagcatatcttttgatgtgat

SEQ ID NO: 19044 - DNA, 396 bp, Glycine max
tgaaggctatactatatgtatcctcggattgttcttgctttttggaccctacgaagaggcaacaaaagctgctttttcaaacggaaagtctcctcccgcatgaaaatatattggaaaactacaaagtttttaaaccttggtgggaggtaagacctatatagatgccattatagttttgatgatacactgcaagggaaatggacatccatttattggcctattcatgccctcacaatgtccttacatgattatgctgaagattcttttatataaaatgttcttgtagagaccccccgtccttgaatacctaaaaaattgcgatctgtccaacactttaaacttgagaacccttttttttcaaattatgacgagagatacgtgcccccggatgattaa

SEQ ID NO: 19045 - DNA, 421 bp, Glycine max
  unsure at all n locations
tgcttattttgatgatgccaaagactcaagtcaagaatcaagattgaagcaaatttcaagaatcaaagggtcattcaatcaagaatcaagattcaagagaagactcaagatatgtaagaacctcaagaaaaacatcaagataagtataaaaagaatttttcaaagaaaagattgaatgacacaatttgtccaaaataatttttcaaagaaaaatcttttaccagagtttttactctctggtaatcgattaccatacagtaatcgattaccagaagtccaaaacaattntataactgttntacaaagtagtaatcgattaccatgggcatgtaaccgattaccaatgttnttgaacgttgaatttcanatctcaagagtcataacttgtgacanaatattttcaaaatagtgtaatcgacta

SEQ ID NO: 19046 - DNA, 387 bp, Glycine max
  unsure at all n locations
tgtaacgttgtctagttttctttacgttgcttattaagtttccagatctaatttgggcatcacgttggctaattttctttacattgcaaatttcactgcttgcacaatttggactatttcttgggtggtttgtcaaggtgacctcttataatattgtgtcccacaggccaatcaatctgcatttaagcatgatggtggtaatgatgtatgctttgggagatttcctaacacgttatagaaaaaaaagaaaaagtttataacatttattggtgcacctaattaaattattttgcttacttgtactgactagtgactcctctncatttcttattcttttattcttttggtcaattcaacttgtccttttctttaatagtgattattcgt

SEQ ID NO: 19047 - DNA, 359 bp, Glycine max
  unsure at all n locations
agcttgttgtattggnttcttcctcttcttctctggcagtgcaaatggattggattatggaactgttggagagcaatttggaagccaagtccaaaatttacaaggaccctgctttgagttatattttcttgatgaacaatgggaggtacattgttcagaagacaaagatagtgaattgggaaccctctttggagaagaatggatcagaanacacgctgcaaagttaggcaattccatgtgcactatcanagaagctcgtggaataagctattannggattctgaagtggatagtaatgggtcaatgccccatattaactttgcaaagtcaatgaaagagaaaactcagtcgttaacaca

SEQ ID NO: 19048 - DNA, 326 bp, Glycine max
acagtacacctcgtagcactcctgtgctaacccaacgccgattaccagctttatagttttgcgaaggtcattgatttttccccaaggtaacgcatcaatcacaaagttactgtcaattactactggtttggaattatcttcaaggtattccttcacaagcttaaaaagcatgttggtgacatttgaattgccctgccgaagtgccctgatacaagtcatgaattgtggcatgatactagcattatctgtacgtagcgaattgacatcaatcactactgaatgctcatcctggactccaagattctggtatggcgtggtatataaag

SEQ ID NO: 19049 - DNA, 333 bp, Glycine max
  unsure at all n locations
agctttttggtatgtgaatctgatataaaagcctcaaagtcctctctcactgtgtatggggaaattgagaaaagggtagcagaacttgagttcacaaagtctggaaaggatctcagagcccttaaacagattcttgaagcaatgcagagacataagtattcagtagacattgctagaggtcacgcttcaaattctccatctaacaataggaataatactaatctcaacgaaagctcanaaatacanagcccacgagtcagacaaacagacacagcatctgtaacggctgagatgtcaaattcaccccaggtagtaaattgccaatgtcatcat

SEQ ID NO: 19050 - DNA, 406 bp, Glycine max
agacagaacagtaattagatcatattataagtgttgatttatcaacttggctattgatatatagcatgattagtagaggacaaagcatttcatgaattacaatacttttgtgaataccagtatgaatggtttgagacatatacttgagcaaccatccataacctcaggtggtagaagtgatgaatcaagaatagtgaaacaatgtaattgagtccacagaatatccttgtaagaaaacaatgctgtaactcttcaaaacaatgcctactcaagtccaaactcaactaatgttctggacattttggtggcaatatatcgatagtcaactgaaaaaacaaatatgtaaacatacctttgaaacaagttgcacttttcatgattattaacatatttacacacatttttt

SEQ ID NO: 19051 - DNA, 370 bp, Glycine max
  unsure at all n locations
agcttgttaattatctgtttaaaaatcaagaacaagctngtgcgcacatcgttagcgtatatgatatccactccacaaggttcgaagtagatgagagcttcaaccctataacgcaacgtggcggacagaagtgggcaataaacttgaatggtcgtcattgtcaatgctgaaggtattctgcgcttcactatccatgttcacacattattgcagcttgtggttacgtgagcatgaactactaccaatatatagatgttgtttatacaaacgagcacatcttaaaagcttactccgcacaatggtggcctcttgggaatgaagcggctattccttcttctgatgacgcatggacactgatccctgacccaac

SEQ ID NO: 19052 - DNA, 441 bp, Glycine max
  unsure at all n locations
acttgaataggatatagtatatattttatgcatatttttataatgcgataatttgaaagtttttgtttacatgggaaaacttttagtttccaaaatcaaaaaatgcaaaagtcaaaaaagggttatttaagggaaaattaataattagaaaaaaaggtctcttaaatttattctaattattaaatatcccctaagtgtgagactagaacctaaataaatgggtatacttacatcaaatataccctatttttttataagtaaaaataatttctccattcctttgtcttttagaactttgaaaccctttcaaggtgaataaaatttaatatgccttcttaaaaattattaaggcaaattangctttctttctatatctcagactttgaaaacactattcttttagatgtctactatgagcttataaaataaacttgatgataa

SEQ ID NO: 19053 - DNA, 192 bp, Glycine max
  unsure at all n locations
agctnttgcatttacgtgccgctggagccggccgcttaagcgccctacgctgttcgacttcaccgtgacgtgatagaactgaacttgcaatgcacgcttccgagtgagaccccatgttatactaacgtgagcaaggatcgatgcgaatccaaacttcgacatcgatcatgagtgataaggatgaatgcatga

SEQ ID NO: 19054 - DNA, 289 bp, Glycine max
  unsure at all n locations
gctcggccccgggatcgataatgtgactgcatgcatgcaagcttttaatcaatttcgattgtctcaatatattacgggattcaatcacacatgcgagcagaacgttattgtcgctagaattagctcagagcatcagaatgcagtgtcgattgtctagatatattacaggactcaatgagacgtgcgatgaaaacatcatcgtctattgaatcatgtgagagcttcacaattcaccttcaagcgacgtaatagaatacgggactcggtganacatccaagctaaacgtta

SEQ ID NO: 19055 - DNA, 410 bp, Glycine max
  unsure at all n locations
ttgttcggtattgcctaaaaaatttgcaatgtagttttgctaggtttcttcgtgcgagtctaaccgaagttgtatttcggccgacgccggcattntgtcggccaggaaaacattagcccacctcggcaaaaaaaaaacatgattcaccggtattgacagaaaaaaatgctggccttagtcggccaggaaagatgaccgatcgaggtctaaaaaagaagcatgaccggattacgccgatcgaacatttcctaatagatatcctccaagcattattcagggattgaatggaaaaaacaatagccgacatcggtagttaaatagccgtgactgatattnttcagccaacactgcgcaacttctttcacaaacgctggccgataatatttctttacgggaaaggatgctttcgt

SEQ ID NO: 19056 - DNA, 266 bp, Glycine max
  unsure at all n locations
tttctacttgttccggatcaacatcaacagaaacagaaccaccactctgtcttgccttagtcttcttatttgacttgcgctttgaccttccagtcccagttccttcatctgcatcaatttcctctatctcaacattactatagccatcttcctctgtgacccatccacgacttcgggtattcttttgcgatgagcccacgtctccatttgcagcaccagtgggtgtcctaaatgaataaatnggaactgcagtagataccggagct

SEQ ID NO: 19057 - DNA, 204 bp, Glycine max
ggggagttaaaaaaaaaaatgatcacattcagaaaattaatatattggagcggtgtagaaacaccatgctggaatcatcaaacttcagtatcataaattaacattagagcgagccaattaaaaccaaaggtgaataatccaaacttacatggcactttcataattctaacaactcctaagaaaacaaaatattctctggcgatg

SEQ ID NO: 19058 - DNA, 299 bp, Glycine max
  unsure at all n locations
cccctctaatactaagctcacctcttgagaagctttcttgaaaagaatcctaaattagctagagcttagctacacacacctctctaataactaagctcaccttcttgggatgagaagcttgaacttagatacacaccccctataatagcttagctcacccccatgaaaaaatacattgaaatacaaaaaaagtccctactacnaagactactcagaatgcctcgcaatacaagggctaaaccctatactactagaatggccaaatacaggcctaaacgaagggaaaaaaacctattcta

SEQ ID NO: 19059 - DNA, 234 bp, Glycine max
acttacccgttgattatcgaaaacgatgtataacgaatgaagaacgtccaagaacggttgaaatttttgcgaaattcttcacggaaaacgttaccgaaacgtttcggaagcgccctggcttaaattttcttcacggaaaccatttttccaggcaaattccaaagaaagagaagtgcctaaggggctgaacccttttcttcttcacttccttccctatttatagcaaaatagggg

SEQ ID NO: 19060 - DNA, 299 bp, Glycine max
  unsure at all n locations
ttctttttctgttggctgannattatcatgcagacttttctgatgatgaccgatgaacaattatggatcaacttgaaacttatgtgcttcgagtgagaagaaatgcttctttttccacttgtgaagatgttcaaagtgtggctatgaagatggttcaaactgagaaacatttggtatttccattggtttataaacttattgagctagctttgatattgccggtgtcgacagcatccgttgaaagagccttttcagcaatgaagatgatcaagtctagattgcgcaataagatcaacgat

SEQ ID NO: 19061 - DNA, 249 bp, Glycine max
gaaatagctcaatagtcattcactcttattaaaaaaaataaggacttatcttcattctcctctcctgcgccctttcttctttctaagaaccgcttctttttccctttttggtcggggcttctttctcccttcttctccggagtcagtgggtgttggtccctttttctccgaccgtggctcttggtcctgttttcgcggtggttcgtggttggtactgtggggctttcgaccttcctcgtcgctggtcct

SEQ ID NO: 19062 - DNA, 448 bp, Glycine max
  unsure at all n locations
agcttttacatgaaataatttacctcactcaaaatgacaccttgcaagcaaaaacctaatccttgcaagagcacgacttccacaaaccaactccttgcaacacacacaaacaaacatccttgcagtgagcaaaagttccccaaacaaagaaacaaagaagaagaagaagaagaagaagaagaagaagaagaagagaacaaatactaaggtccttgcggttacaaagaagaagaagaagaagttgtaactaggtaagatggttaagtgtcacggtcgcgaagaagttgtacaatgaagctgaagaagttgtactcacgatcatgaagaagaagaagtgaagaaaaagcgaagaacanagtgcgaggaaagtagtagggctcgggttctgatattntaaaatatatgtccaacatcggttttcaatcaaaaaaccgatgttaatccaatg

SEQ ID NO: 19063 - DNA, 388 bp, Glycine max
  unsure at all n locations
gtgcctcttcatgtctggaatatgaatgtagcatatagattcaaagactcttagatgctttgctgatggcttcttcccgttccaagcttcaattggaatcttgtctcttacagacttaattggacatatgttgagtatgtaaacagcagtgtagacttgttcaatccaaaatgtgttaaggagtcccttctccttgaacatcgatctaactatttccataactgtgcgattctttctctcggacactccattntggtgaggagaatatgcgactataagttgtcgctctatgccttcatcctcacaaaatatttcaaactcgcgagaggtgtactctttgccgcgatcacttcttagtacttttatctaatttccactttgattttca

SEQ ID NO: 19064 - DNA, 419 bp, Glycine max
  unsure at all n locations
atctttgtaggattgatggagacccggtgttgagagaaacgaggatatgggctacgtgggagtacgtgagctcagttggaggtgggcaacaggggatggtgggtttatgcgcgatttgtggatgtggaaaacttgttgtgcgccatcgcccgaccgccacctagtaccacatgtgatgggtaccccataatcctacaagcttgagatgaggaagtgtagaagggtgaaacttcctgcttttattcgttgaccacaaagtggtacctggagatatgtcgcggnggtcaggagaccttggggacgtcaagtggggtgctattgcctaanaccaagcttgaccaatcccgacccaacccgggcatagtcagtcagtgagaacctgtgatgtacctaaacaggcgagcttcttgcagtcaaca

SEQ ID NO: 19065 - DNA, 435 bp, Glycine max
  unsure at all n locations
tatgcgcatatttccttacaaacgttctcttgcacaagacattctatttaaccgaaaaaaaatgcacccatatacaatcaaggcagcttcgttacctaaattatttacacgtacttccaaggtgtatttggtacttacatcacacacatcttcttggctaaattcacatacatgcatactcaaagcattttcgggtaccaaaaattgcacatgtgcacatcttggtatttctaatacctatacatacacaaacttcatgatgaatcttgactatctacacaataaggtgctacatttcatgctcttttcaagtttttgctacctaaagccgcatgcaaattcaagtatattttcctttgctgactaaaattgtattcaaattaaaagggatacattntttggtaatgtatcttctttacataacatgcaacatat

SEQ ID NO: 19066 - DNA, 326 bp, Glycine max
  unsure at all n locations
atcttttataaaaatggcctcagcaaacttcttatttccagaaagaaattcaatcaatagacctccaatctttaatggagaaggttaccactactggaaaacccgaatgcaattttttattgaggcaatagacttaaatatttgggaagccatagaaataggtgtcgcaacctacccttcggcgggagggcgacgcgagactcgcgggatgcgtgttccacgaaaggaatacgcgcggagtcgccaccaacgtttatttgaggaaaacgtcgaanaaaccggaaaagacgcgatctacgaaactttacgtganagggtcgggagtt

SEQ ID NO: 19067 - DNA, 240 bp, Glycine max
  unsure at all n locations
tcgattaaaagttatattttgaagggtcatgactttcgaatttgaattttaagaatttcattggtgggaatcgattatacacatctagtaatcgattacgggttcaaatttccaaattaaaacccttttaaacaactatttttcaaacttgtcttctggtaatcgattacactgcctggtaattgataccagagccttacatgtctttgaaacacttnntttttaggcaggcatgatctt

SEQ ID NO: 19068 - DNA, 292 bp, Glycine max
tttcttttagaagaagatacacacatgttttgccatgccaaaatcagcaaccttgatcataccattacgatctactagcatgcttgagccctttatatccctgtaggattggacacattagtgtcagatacttggaactagaaataataatgtatattatcatttgttacatattaacacctgtgcacgcgatctcttgcatgcatgtaggctatagcatgaagaatctgtctggtgttacatttcgcaagagatgtcttgaaagggccatatacctgatgcaaattgcgaa

SEQ ID NO: 19069 - DNA, 282 bp, Glycine max
ttatttcttcatcagaagatgggtcgtctaattctttccatgtgctcatcagaacttatgtggcctttggcttcttctttctcttctaattcctgcaatggtttattccttcttctaactacaccattttgttatggtgttctataattgacgagttatgaataattccattttcttcatagaatagatgaaagctcttcatttcaaaatcttcaccatgatcacttatgaatgaagtaatgcttctcccttttcattctgaattcttttatagaattaaag

SEQ ID NO: 19070 - DNA, 383 bp, Glycine max
agcttgatatctacatttgtgtgaaaagttatgagcatttgaatttctcaagagcttccattgttcaatttccagcatctcgatatattataagcctgaatcggacattcgtgtgaaaagttatgaccatttgaatatctgaagaggttccgttgttcaatttcgagcctctcgacatattatacgctcgaatcgaacatccgtgtgaaaagttatgaccatctgaatctgcaagagtttccgatggttaatttcgagcgtatcgatatattataagcctgaaacggacattcgtataaaaagttatgaccatttgaatttctcaagagcttccggtgatcaatttcgagcctctctacatattatgcgcccgaatctgacat

SEQ ID NO: 19071 - DNA, 446 bp, Glycine max
  unsure at all n locations
gctgacacgcggagatntacgtcaacttttgtgctcacaatatttgtcatactgacatttgagtcacgttgaccggcggagataccctagtggttatccgtataaacattcttttttgctgtctgtaaaacgaaaagcctgatagcatgcagagactaacgtcgtcttctgcgcccttcgtcaatcgcggccgacaagcccgttgacacgcagagatttacgtcattttccgcgctcacaagatctgtcatactgacatttgagtcatgctgacggacggaaatacccaagtggatatccgtataaacattcttttttcctgtctgtaagacgaaatgcctgatagcacgcagagactaacatcgtcttctgggcccttcgtgaatcgtggccgacaagcccgttgacacgcggagatttacgtcatcttncacgctcacaagatc

SEQ ID NO: 19072 - DNA, 473 bp, Glycine max
ggtgttgactgcatcgcacagcgaaggcgaactcggactccggagatcgtgttgacgtcaactgcacgcgtgcgagcgcgaacttttatgattatcacggcccaatgacatgtgtggctatagggtagtctgttgattgcgcacaacatggtttccgcatacgagatggcgcgaacaccgagtaataattattgtattccgacaactgcatcttcttactcacatatgacgaagatgctcttttggctaacgacgggggccgcacttgcctttagcttaccctcacccagcatagcacttcatgccaacaagctagtccagctctatatcgaggtaggtttaatctccggaaacctcttcccctatcttgtgtcactcctgatcctgcgacatcttgcgcatctataccgatgttcgttcggactcctgaacttctatctaaccgggtttcacgacgggcacagaacgtcccg

SEQ ID NO: 19073 - DNA, 442 bp, Glycine max
  unsure at all n locations
agttagatcattcaactgaatttgtgcagattaggttttggggattggagtttgcttttcatatgacttatcagttatcatcttgcttttgaagtgattgttaatcctttaaaggtcatttgttgagagtgatggaaattacttgatatttctcagaaagtataaatgcctttatcacaaactcactcatgacccacaacacaagtctttagtttctataatattctaaattgctcttcagtttctgccttctggtaacctggtttaaaattatctaagttgtcaatcttaataccttccatggactacacactgtttgcaaagagcttaagacatggaaagtgtcagggatttttgtgagttataatctcaatattggaacaaaatgctnttctgggtttcaatgttgctatcctattcaagaaatctgattttaatacat

SEQ ID NO: 19074 - DNA, 447 bp, Glycine max
  unsure at all n locations
tattaattatttgattattaaacccccatacttcagacactcaatcatcatcccacaataaagttgcaattntagtcttaggagtgataaaagcaaccaaaggttaatcggtctattcaaggatatgatttgcaaatgtttcttaatagaaactggttaattcatattttaacacaagcacaaaggaatctgagcaactaatgccatacaagaaatatgccaagcaaatctaccaatttcataccatgcaagaaacacaacaaaaaccatcacgcaataagtatgcagtttacatatacctgaactgacataagtatacagttttaagaggcttaatatgcaaaataaaatcaaacctgaaaaatatcattaaaaatgatgatcttaccaggaatacacccataatggatagagtctgctatccgagcactattaacctgtgatcca

SEQ ID NO: 19075 - DNA, 438 bp, Glycine max
  unsure at all n locations
agcttcctaatcatcattgaaaagagaatctgaagagttgaggtgaagctgaagaagatgggaagtgacgttgtggcagaggactccataccagtggcaacagttggtattattatgattccaagaccaaagcctattggaaggatctatgagattattcttaaacttcaaaagtgtctcacgctcacttgggatgcacacactctctctgcatggtaagctcaacaaccaaagctggacaaagacaagaatataaataatggaggaggaattcatgatcacacaagaatatatagaaaacaagtgtagttgttggttccgcatataaatcatcaaacttctattatttatactgctgccctgcctgtntttttcttcactttcattattntnntacctttttattattgtgccanatactanaatattcttccattc

SEQ ID NO: 19076 - DNA, 429 bp, Glycine max
  unsure at all n locations
tatgagagatcccagtttggtggagagataagtccttgntttgctgatttaaagcatttgaattacttggacttgagcgccaatgaataccttggagaaggtatgtcaattccttctttccttgggacaatgacttccttgactcaccttaacctttttcatactggattctgggggaagaatcctcctcaaaatgggaatctctcaaatttggtgtatcttgacctgagttcaaatgttgccaacggaacaataccctctcagatcgggaatctctctaagcttcgatatcttgacttgagcgccaatatatttcttggagaaggcatgtcaattccttcttttctcgggacaatgacttccttgactcacctcgacctctctggtactggattcatggggaagattccatctcagatttggaatctc

SEQ ID NO: 19077 - DNA, 325 bp, Glycine max
  unsure at all n locations
agctttaacctcatcgtctctcacagtctttagatttgggagccaatccagtccttgtgttcggactctcagccacttatgatagccgccgatgatcccattactgcttcccctaagctctctgtcctttcttcacgccgcatcccatgccttgcgaactccttggagtaccctcgcgttgtggtcactgaaacctcatgcgatgaaaggcgtgatgctttcgtctgatggcactcctctcatgggacatccttcgcatgaagatagaatcctgattcttccttccttctagcgagggaaccatntaacagaacgcccctcatgc

SEQ ID NO: 19078 - DNA, 336 bp, Glycine max
tgcctcgaagaggtccaggaaggacaaggcagccgaaggatctagttccgctccggagtatgatagtcaccgctttatgagtgctgtacaccaacagcgcttcgaggccatcaagggatggtcgtttctccgggaacgacgcgtccagctcagggacgacgagtatactgatttccaagaggaaataaggcgccggcggtgggcatcactggttactcccatggccaaatttgatccagaaataatccttgagttttatgccaatgcttggccaacagaggagggcgtgcgtgacatgagatcctgggtaaggggtcagtggatcccgtttgatgc

SEQ ID NO: 19079 - DNA, 312 bp, Glycine max
  unsure at all n locations
tcttcttctgtcacttttttaaatgaaggaccagaaaacatgccaccccattgtggaaaagagattaaacatattggcagggtgcatattatgatcatggctcccattagagtgattcctctttcttttgaaaacttggatcctttgaagaaaattaactgggtcacaactgcacccacattgcctcctcctcctgtcattccagatatgacccctaatgacctgaanatatatgtgtatgctaatgcatnatngtagaattaatcacaaaagaattattggcatagaagctatgcactntgttatatatct

SEQ ID NO: 19080 - DNA, 250 bp, Glycine max
  unsure at all n locations
tttttctcaccaagtagaaatggatcattttaagggccaaccccttaaaaggaccaccttccaagttagaagaatcgcttgattcgccctttaaaaagaactacctaagtttgatttcctcttcgatgagggtacgtangagcaagaaccccgcttttgtcgacctcaaaaattaaaaagaaataaaagtttaggtacacaatttcacataattctaaaattaaggcttgtgtcctttgggacaaacgtg

SEQ ID NO: 19081 - DNA, 335 bp, Glycine max
  unsure at all n locations
cagcttgtatgattatggggtacccatcacatgtggtactaggtggcggtcgggcgatggtgcacaacaaagtttccacatccacaaattgtgcataaacccaccatcccctattggccacctccaactgagcttacgtactcccacgtagcccatatcctcgtttctctcaacaccgggtccccatcaatcctctcaagcttccccaacatccaagtaaaacaacattcaaacaacacaaactatcacagccaagaaaacagagcaaaggcagaaaactctgccaaaacaccaaccaaaatcacagcttntctcacttaaagaccccagtaaca

SEQ ID NO: 19082 - DNA, 310 bp, Glycine max
ccaaagtcctattaacaacttccgtttgcccatcggtttgtgggtgacaagtggttgaaaataacaatttaatgcccaacttgctccacaaagtcctccaaaaatggcttaggaacttaaagtccctatcactaacaatgctccttggcaaaccatggagtctcacaatctccttgaaaaacaaatcagccacatgggaagcatcatcaacttttttacatggaataaaatgagccattttagaaaacctatcaacaaccacaaaaatggaatctctaccattgcttgtttttggcagcccaaaacaaaa

SEQ ID NO: 19083 - DNA, 358 bp, Glycine max
  unsure at all n locations
ttcttgtctcanagaggtccaggaaggacaaggcagccgaaggaactagttccgccccggagtacgacagtcaccgctttaggagcgttgtacaccagcagcgcttcgaagccatcaagggatggtcgtttctccgggagcgacgcgtccagctcagggacgacgagtatactgatttccaggaggaaatagggcgccggcggtgggcaccactggttactcccatggccaagtttgatccaganatagtccttgagttttacgccaatgcttggccaacagaggagggcgtgcgtgacatgagatcctgngttaggggtcagtggatcccgttcgatgccgatgctatcagccagct

SEQ ID NO: 19084 - DNA, 387 bp, Glycine max
tactttgagacaaggaaactcttgtgttgattggttgactatatgaaagagctcaatcactggtaccttttagcttttctggttcatgcccagctgtgatgcccctatgtagttggcgatgcagtgggaacttttgtccctaaaccctagctttctgtctgttacacttcatactaataaaaaagagctatattttgtggatctggttgtggaaacattttctcttgtttcattacttggtggtaaaataggatttgaacccaaattcacgcgtccactatgatctattaattaatagaacctaggctgctaaactatcaattacgagaatatcataatttaaaaaccaaaaacaaacatatttaacacacatttacctaacattat

SEQ ID NO: 19085 - DNA, 477 bp, Glycine max
  unsure at all n locations
tattattctttaaganaaaanagtgaggagtagctagagaattatatttctaaaattgtacgatgtcgaccatcatgtctcttgtatagggatatcacagagagctggctagttaaggtgatcataagtgaagtttcgttaagtcgatcctctatagagtgagagattacaatatctgcgttatgtcatactcatcatttagatgtaatgaaacatcactatatgaagcgcatgaaaagatctcatgaggaattagacacagtatagcgattgattatactgagatataattacgaggccacaattcttggtgctatatcagtgtgatcaactacgatacactattaaggtgtgtgtaataatctacccactacaattatgataatgaacgcctgtgggaactatatcataatgtattgttatgatctaaatgattagactctgactccaagcaagtgttagtctctaaatcataag

SEQ ID NO: 19086 - DNA, 423 bp, Glycine max
  unsure at all n locations
ntatatacctaagacaatagactccttattatccaaaatataatcggtcttttattatttggctccttcatcaaaagtcaataatacaaaataaaaaactttgtaacaactacttcaattctgtgtatggaccacataacagttatatgctaacattcttccacttgactcatatattactaatataatctttattttgacaaacaaatatgactataacttgtcaatttaaacttgatattgtcactaaaaattaattacacatgaatcacgacggttatattttagattaaacattttctttcatgaattacaatatgtaaccttttcttagtgaaatatagggtcttaacattatngattcaattngaatgcttttatgactaaactaatgtgcacaagtcatagaatgaaaaaaaacat

SEQ ID NO: 19087 - DNA, 444 bp, Glycine max
  unsure at all n locations
agcttttatcatgtggtatcaaagcacaagagcttcaagtaggtgctccttaaacctccattaattttttgctttaccttctcttccattgttgtttcttcattttttctccatgtatctcctcacatgtcttgtgctaaatgtttttaacatgattctttagagtttccaccgattaaacttgctatagaagctagatttgattntctatggttcaaatttcttgttcttgttcttgaaccgtgaattgtgttgagtttaagttcctttgaattttgtcttgttattctttgtggctgaaacctaaatcataaaattcttacaaaaatattaaagtagaagaaaacctcaaaaatctagagtgacttgttcagctattgtagttntgtcatacaagtcatgtctagtcatgaaacttgtcacataagatntcttatgttgtga

SEQ ID NO: 19088 - DNA, 426 bp, Glycine max
tatgctgcaaatatttacaatagacctcctcaacctcatcttttaaatttatcacagcagagcaattatgacctctccagcaacagatacaatcctggatggaggaatcaccctaacctcagatggtccagccctcagcaacaacaacagcagcctgctccttccttccaaaatgctgctggcccaagcagaccatacattcctccaccaatccagcaacagcaacaaccccagaaacagccaacagttgaggcccctccacaaccttccctcgaagaacttgtgaggcaaatgactatgcagaacatgcagtttcagcaagagaccagagcctccattcagagcttaaccaatcagatgggacaattggctacccaattgaatcaacaacagtcccagaattctgacaagctgccttctcaagct

SEQ ID NO: 19089 - DNA, 330 bp, Glycine max
  unsure at all n locations
tgctattcgtcttacagaatgcanaaattgtatacggataaccactcgggtatttccgcccgtcagcgtgactcaaaagtcagtatgacagatcttttgagcacggaagatgacgtaaatcaccacgtgtcaacgggcttgtcagccgcgattaacgaatggcgcagaagacgacgttagtctctacgtgctatcaggcttttcgtcttacagacagcacaaagtttatacggataaccacttcggtattttcgcccgtcagcgtgactcaaaagtcagtatgacagatcttgtgagcgcggaagatgacgtaaatctccacgtgtcaac

SEQ ID NO: 19090 - DNA, 312 bp, Glycine max
tgataacacgcagagactaacgtcgtcttctgcgctattcatcaatcgcggccgacaagcccgttgacacgtggagatttacgttatcttccgcgctcacaagatctgtcatactgacttttgagtcacgctgacgggcggaaatacccgagtggttatccgtattaactttttgcattctgcaagacgaaaagcttgattacacgcagagactaacgtcatcttctgcgccattcatcaatcgcgggcgacaagcccgttgacacgtggagaattacgttatcttccgcgctcacaagatctgtcatactg

SEQ ID NO: 19091 - DNA, 379 bp, Glycine max
tagctttttatattgtttgtgaaggacaaaagtgacttagtgataaagaatacttgggtcttaatcttaggggaagattaagtgtagtgccaggagtgacctatagagtactcattgtagctagaagtggcatagagaatacttgattgtaatcaaagaattaattagtgaaatccttcaaagtttgaaggaaaactggacgtagcccaagagttgggatgaaccaatataaaacttgtgttttctttactgcttctatataactagttcttttccatatgttactcctacactactctatccaagttttgtgaactgattttctaagcacataatgatttcaaaccccttggacgaaacccaacgtctattaatatct

SEQ ID NO: 19092 - DNA, 363 bp, Glycine max
  unsure at all n locations
tntatgtgaaaggatgtgactcttcacatttgaatttgattttcaacgttcaaaggcactggtaatcgattaccaaaacattgtaatcgattacagctttttgaaattaattggaaccgtgtaaattcaatttgaaaaatttttcaaaacaattttgctaccggtaatcgattacaacaatctggtaatcgattaccagagagtgaaaactctttggtaaacatgttttgagaaaaatcatgtggctactcaattttgagaaaaacttttcatacttatcttgattaagccttctcttgattcttgaatcttgtgtcttggatcttgatcttgattcttgagatcttgaaccctgaatcttga

SEQ ID NO: 19093 - DNA, 393 bp, Glycine max
  unsure at all n locations
agcttcttatcttaagcttttcttggaggtgaagctccttcttccttggcttattccctagtggatggtgtctcccctctcctcttctcctttgccttccgctgcatctccatggtgtaaaatcaccattaaaggacctcattgaagctcanagatccagccttcgtagaagctccacaagcaagcttccatcagttgtaatcgattacaacatttggtaatcgattacactcttcctgactgtntgtaatcgattacagtattgtagtaatcgattaccagagaacattntagcaaaacttaaatgctggaagaaaatctatggtgaaaggatttgagagggggtcanaatactttatatgtaanaactcttatatgaaaataaatatatat

SEQ ID NO: 19094 - DNA, 437 bp, Glycine max
tccttaagaagattcctaaagaagctagagcttagctacacatacctctctaatagctaagctcacctccttgagatgagaagctagaacttaactacacaccctttataatagctaagctcacccccatgacaaaagaaaacatgaaaatacaaaaaaaagtccttactacaaagactactcaaaatgccccgaaatacaaggctaaaaccctatactactagaatggccaaaatacaaggcccaaacgaaggaaaaacctattctaatatttacaaagataagcgggctcatacttagcccatgggctcgaaatctaccctaaggctcatgagaaccctagggcctacccttggatctttagcccaatctacttggagtcttctacccaatgcccttgcgggataggatggcatcacaaagcatcaaaattcaat

SEQ ID NO: 19095 - DNA, 390 bp, Glycine max
  unsure at all n locations
agcttgtatgttgttttgtatcattccagaccatattcacaataataatcattctttcttcgcagtatcagagaattcttctgatactgtctgactctgatcccttgtccatgatgttaagtgtcaaaatgggacacctctactttctttaataacataattgcagagaattattgtagcatanaatgcatagcttatgtccttgtgaaacgcaatgcagagaggcctggaactatntattgcttctcactcagctttcatagtttgggttgcattgtttcagccaattggagatnttaatcatatatctctcgaagctaactgcaagaaagttgactaatgtattatgctnttgctgtcaggatatcttgcatgtgctcgctgttcaag

SEQ ID NO: 19096 - DNA, 439 bp, Glycine max
  unsure at all n locations
tcatggaattntatgcgatgacatgggacttggaaagacacttcaagcatcagctattgtggcctctgatatagctgagcatcgaacttcaattgggaatgaggatcttctgccatctttaattatttgcccatcaactctagttgggcactgggcctttgagatagaaaagtatattgatgtttctgttatctctagtcttcaatatgttggttctgctcaagagcgaatgcttcttcgggatcatttttgcaagcataatgtcatcataacgtcatatgacgttgtccgtaaagatattgattttctatgacagctgttgtggaatcactgcatcttagatgaagggcatataatcaagaatgccaagtctaaagttacacttgcttgtaaacagttgaaagcccaacaccgcttgatattgagtggtacacctata

SEQ ID NO: 19097 - DNA, 291 bp, Glycine max
cgcttttttttttatttttatagagcgaggagagagacagaaggagactcgcgataaaactgtcttgggacaccctccaatggatagagatcctcatatgcctataacgaggttaacagactagtgcataagaagacttcccctcaagctggatccttcgtatatagagaccatgtacattagaactttgttttagcagccttagagatactaagcggtagtgggtggaacaaccactacgtatcgtgtatttattagattctgaccttatgatctacgattcaactcctc

SEQ ID NO: 19098 - DNA, 213 bp, Glycine max
gtggatgaatcatcccaaccttacatgggcgatatcttcacaactagtagcaacaacaaccttattttcaaaatgttgctggcccaagtataccatacgtttcctcaccaatgtagctgcaacaacagcaacagccctaaaaacagtaaacagtcgaggcttctccgcaaccttcccttgagaactttgaggcaaatgatatgcaaaacatgc

SEQ ID NO: 19099 - DNA, 415 bp, Glycine max
  unsure at all n locations
agctttcgtatataatataagacaatacatagcaacaatatgtcggtattggacaagtttaaaagcaacatctaaacagaataacttctaatttcaaaaatagctatttctaacttttcaggtgttaagtgaatcgaataaactcattcaaaaacctgaagttatctccactttcataaatacatatgtcatcaagtagcaggtaatccctacaaaagccaaatatttggtagtaggcttcaaaaaaagtgttgaatcccggcccatgttaagcttcatacaagagaactgaaagtctttgttgataattatttggtagcagtgatggttttcaattctattctctgactntgacaagctgctctcatttgaccagattctacagaagatagatgaatatatttaccagacatat

SEQ ID NO: 19100 - DNA, 398 bp, Glycine max
tcttgaacgagatcagtatattcattggcacaaattaaatgatctaagacgtggtttttgatatcttttggtgtcaccctgatgcaatgaagttagtcaatgcatgtaatttggtgtttttgataaacagtacctacaaaacaaacaggtacagactctcactgcttgattttgttggggtgacaccaactgggatgacattctttgccggttttgcatatctggaaggtgaacgtcttaataatgtggtttgggatttaaaacgcttttgaggtatatttttaagatgtgatgtccttcctcgagttattgtcactgacaaagacctaacattgatgaatgtagtgaaaattgtatttcctgagtgtacaaatttgttgtgcaactttcacacaaac

SEQ ID NO: 19101 - DNA, 528 bp, Glycine max
  unsure at all n locations
agcnacaatgtgttgcatcattganagcgaanncagctcggacccgggatgcttagagtcgacctgatgcgtgcaagcttgtatattcacacattcacacacacacacacacgcgcacacacacacacacacacacacacacacataaacccttactctattttctttcgtaaaataattaattccaacgacattcataatacttcataggaataaaagaagtgaagtaaatttttgtgaaaataaaaactttgtatataaacttctgaaactcgttctcctttatgaagcatacataattttctaggttgtatacacatggtgtactaaaaaacaaataagttctagaataaataaaccatacattctcaggtgataaatatggataaacaagtctatctccatggtcaccacatatagataaataagtttcataagtaataatagatagcaagatgtaagtgtctcaatggaaagattaagtagcatatacgatcccataatatcgagtatagagatgtagagtag

SEQ ID NO: 19102 - DNA, 436 bp, Glycine max
  unsure at all n locations
gcttgatgcaacattnggagagattaatgaaacaacgatatgattcgctccatgatttgttggatcaaatggagaatagagatcataatgaagaagaaaggaggaggagagggaatgatggtgttcctagacaaaaccgaattgatggtattaaactcaacattcctccctttaaaggaaagaatgatccagaggcctacttggagtgggagatgaaaataaaccatgttttctcatgcaacaactatgaggaggaccaaaaggtgaagctcgccgccacggagttttccgactatgctcttgtgtggtggaacaagttacataatgagagagcaagaaatgaagagccaatggttgatacatgtgcagagatgataaggatcatgatgaagcggtatgtgccggctagttacttaagggatttgaaattcaagct

SEQ ID NO: 19103 - DNA, 421 bp, Glycine max
  unsure at all n locations
nngtatatgctcgattaaagacaagtgttgtatatactagatatgactcttataagtgaaactgagtgactcgtaagagaattcttaccaagattgatgcacaaatattggattaatcagtagagttgatcttggaatgccattgagagctctttgggaagaaacattttatgctctacaaacatacgtctgggtatgagatatggacataaagtggatggcatagccgactaccgcatatatcgttgtactctgctgcgcactcgattcgagacggagtgctgtaatcgctcctctgctgtgcattaaatgacaatgcacatgctgcagccattcgacaccctggcagcgatacttgcctatgtgttggaacactatcaaggtgtatgtccatggggaagccccccttcctgaggatggg

SEQ ID NO: 19104 - DNA, 359 bp, Glycine max
atcttgggtgatgttgcgcgtactgatgggtaccatgaggtgttgcttgagtttgacccacgcgggtgttgaagagacggcatgggcatcttctttctttctttttgcccctgttggcccgattcttttggcattcgcgtttgtggaggaaacgtaatcaaacttttctcttttcaatccaacctcgattctttccccggcaaacaccagatccgcaaagctggacggcatgtaacccactagcttctcatagtagaacactggcagagtgtctaccatcatggtgatcatctctctctcaccatgggaggagctacttgttgccgcaaatcccttcatcgctgcgcatattctttaaa

SEQ ID NO: 19105 - DNA, 312 bp, Glycine max
ggacacttttagcacttccttacatgaatacaataatcattcttcatcacgagcaaaaaatatccagcccttaaaatctttcaggccatggcatgcccattggcataggggccaaaggaaccttcatgcaccttccttagtatttgctcaacttcacttacatccacgcaccggagtaacaccatatcatggtttcttttgtatagcacgtccccattcaaaaaaaagttaactgccaacctccgtagtgtcctcttgtcattctcaaaggcctcatataggtactccctatctttgatatatctcttgata

SEQ ID NO: 19106 - DNA, 439 bp, Glycine max
  unsure at all n locations
agcttctttaggaatcttcttaaggaagcttctcaaggaggtgagcttagttatgagaggggtgtgtgtagctaagctctagcttctcaaggaagttttctcaaagaagcttctcaaggaagttttctcaagaaagcttctcaaggaagctacctagtctataaatagaagcatgtgtaacacttgttgtaactttgatgaatgagagtcttgtgagacatacttcaaagttccacttctctacctcttttattccttcaattntgtgctcccccctctctctttctctccctctntcttttcctccattgaagcatcctctccaagcttcttatccaaggctcatcttggtggtgaagctccttcttccatggcttattccctagtggatggcgcctcctctcacctcttctcctttgtcttccgctgcatctccatg

SEQ ID NO: 19107 - DNA, 431 bp, Glycine max
  unsure at all n locations
tcatgtcttnttgaacttccttatcttctaacctgcaaatatatgcaagtcagtaacaattgatcccaccaaatcaaatggtcaaaaatcaacaacttgagcaagtcttactttcttccgataagtctcttgacatcaaagatggtcctttctgggttgacagctgcctgattcttggcagccttcccaatgagtctctcactgtcggtgaaagcaacccacgatggggtgatacggttaccttggtcgttggctatgatttcaacatggccattcttgtaaacaccgacacatgaataggttgttccaagatcaatgccgatgaccgtccctaacttggtggcttccttcttagcaatggaaatcgcaaatagacatcctatggagaaatttctcaatgttagttacatagttaaatttttacaacactt

SEQ ID NO: 19108 - DNA, 302 bp, Glycine max
agcttgtatgtatatcaaataaggcctttaacgaatatcagaattggacctaccaacatctattatcttatttacactcttactgaaaagaatatccatatcgcactttctgctatacttgcttatatgtctattaatgaaatctatacagcatttattaacatatgcaagtttcaagttctctttagagagtccaatatgttgcttttgcgagtgctttactgagtctgatataatactcaattgataacaaatcatgtattagttgttaaaacaaacactaacattatattatacaaatt

SEQ ID NO: 19109 - DNA, 311 bp, Glycine max
agtaggattatggggtacccatcacattgtggactatgtggcggtcgtgctatggtgcacaacaaggggtccacattcacaaagcgcgcataaacccaccatccccttgtgcccacctacaactgagctcacgtactcccacgtagcccatatgctcgtttctctcaacaccgggtccccatcaatccttccaagctttcacaatatccaaacaaaacaacattctaacagcacaaactaccacagccaagaaaacagagctaaggccgaatacagctttctcacttatagacccaagaacaattgcttcg

SEQ ID NO: 19110 - DNA, 244 bp, Glycine max
atctgttaccatatcgtctctcacagactttagatttgtgagccaatccagacctggtgttcggactctcagccacttacgatagccgcctatgagcccatgactgcggcccctgagctctctgacctttctgcacgccgcataccatgccttgcgaactccttgcagtaccctagcgttgtggtcactaaaacctcgtgcgatgaaaggcgtgatgctttctgctaatggcgctcctctcatg

SEQ ID NO: 19111 - DNA, 410 bp, Glycine max
gacacttcgaaactcaagcttctatagaagtccattcctaattgtctacaatagcattttctctcaatgatctggagacaaagaacgtggcattgacctgtggtgaaaaacaataagcagcctttgctttgctcaaagaaaagcttactaaggcacctattctagcttttgctgacttttctaaaacctttgagctagaatgtgatgcctctggagtgggagttggagctgtattggtacaaggtggacaccctattgcttatgttagagaaaaactttatagtgccaccctacactaccccacctatgataaagagctttatgccttaataagagctctacaaacttgggaacatttaccttgttccaaggaatttgtcattcataatgatcatcaatcacttagtaca

SEQ ID NO: 19112 - DNA, 250 bp, Glycine max
  unsure at all n locations
ttgcatctttttctggaggcactnttgaaacaatatttctttagatccaatccccacctacaggtaaaaaaaaagtcacatgttaactgaaaatacacattttgccggctattaaatggactacaagaatagatctacaaaaaaaaaggtaaatatgctaacggctatactgagtaacccaccaaaaacaacatgaaataggttgcagccatgaccaaaaatcaataaaactggataaactcatatcaca

SEQ ID NO: 19113 - DNA, 357 bp, Glycine max
  unsure at all n locations
ggatcttttaggtttttatctttaatcttttatccctgaacgaactattcaaagttgtaattcgaactttaattatcttttaattcgctcctaaagatagatcgccaaatctgttgctaactgcacattaatctgttaaagatataacagatttatgtgtccagtattttcgggcaagatgttctggacatcgtatccgacatcgtggatcctgcagcttcaattcttcattngacattttatcttgccttgtgcattgtgcagcccaatctgattccttgacataaccgtggacatcatgtgcagcaactccagcttttcttcattggctaagtgcctatgttttaacaaaattta

SEQ ID NO: 19114 - DNA, 436 bp, Glycine max
  unsure at all n locations
agctttttccanaactttgtttatcctgcacaaagcaatcttgtttggatcatgtctacagctttgaacttattcccttttcatgatccccatgttaggttattaactgtgcttctagacaggcatgttgaaagaatttctcggagaatggtatgtctgactatgctacagtttcttaattagagggacattctttagcatcaatggatgaaaaactaattgttgatactttgtgcagtgcaaccttccatatgttactatggtagtgactgacaatctacaggttattctcacttcagttctattcaatcgctcagtgtctaacatagttcgataggacatgttgactntgtagccatattgcagtttctgcgttataaaattgttnttgggctctaacttagttgttagtgtttaaaatttatttttgcaatta

SEQ ID NO: 19115 - DNA, 311 bp, Glycine max
tcttatccaaagcaattcttggtgttgaagctccttctttcttggcttattccctaatggatggtgcctcccctctcctcttctcctttgccttccgccgcatctccatggtgtaaaatcaccattgaaagacctcattgaagctcaaaaatccagccttcatggaagctccacaagcaagcttccatcaagtggtaatcaaagcacaagagcttcaagtaggtgctccttaaacctcccattaatggtttgctttaccctttcttgcattggtggttcttcatttttctccatgtatctcctcacatgtc

SEQ ID NO: 19116 - DNA, 405 bp, Glycine max
  unsure at all n locations
agcttgttagttgtaaattntgtaagacttaattcacccccccccccctcttaagttattgaagccacttgtccaacaaagggggatggatcccaaggtgtgttcaaagtatgtaaaggaattacaaagataatggaaaatctcaagtggattgtttgaggactggacgtatgcatgggaagtggccgaaccagtataaatcgagtgtgaaattctctcttcccttatttatntattttattgcaatcaattgtgtcttgcacgtttaaagaacattattaaatcgattgatgcttcttcttcttcattctaagtctatcatttaaaagaaggttaacagcttgttagtgagaaattatgtgagacttaattcaccctccctcttaagttattgagaccacttgt

SEQ ID NO: 19117 - DNA, 126 bp, Glycine max
gagagacatttgggagacgctgcttaccctgccttcagccttagactttctgggcctgaacgatgttattggacaaagggatgaactccgatacttttcttatatgggacatgatatatgctaaaa

SEQ ID NO: 19118 - DNA, 222 bp, Glycine max
  unsure at all n locations
agctnttcgtcttacagacagcaaaaagtttatacggataaccactcgggtatttccgcccgtcagcgtgactcaaaagtcaatatgacagatcttgtgagcgcggaagatgacgtaaatctccgcgtgtcaacgggcttgtcggccgcgattgatgaatggcgcagaagacgacgttagtctctgcgtgctatcaggcttttcgtcttacagccacaaaaa

SEQ ID NO: 19119 - DNA, 442 bp, Glycine max
acacgtggagatttacgtcatcttccgcgctcacattatctggcatattgtcttttgagtcacgctgacgggcggaaatacccgagtggttatccgtataaactttttgctgtctgtaagacgtaaagccttataacacgcagagactaacgtcgtcttctacgaccttcgtcaatcgcggccgacaagcccatttaaaagcggagatttacgtcatctttcgtgctcacaagatctgtcatactgacttttgagtcacgctgacgggcggaaatacccgagtggttatccgtataaactttttgcattctgtaagatgaaaagcgtgatagcacgcagagactaacgtcgtcttctgcgcccttcgtcaatcgcgatcgacaagcccggtggcacgcggagaattacgtcatcttccgcgctcacaagatctgtcatactg

SEQ ID NO: 19120 - DNA, 324 bp, Glycine max
agcttttactttaatataagtcctttattctaaggttcataacacaaattaaagtgcaaagttgggattacttacttggattgcaataagacatgatcaagaggaagtcatacaagcagagagcataatgtgagcatagtgcaaataaatgcaagatgcaaaggatgatagtgagaccatgtttgtaaatgcacgacagactactgcctaaagcaattaagccttatttttggtagttttgactgcctcgcttagcgcaagtcactcgcttagcgagcactcaaggacttttaagttttcagaatacacactcacgagctcagc

SEQ ID NO: 19121 - DNA, 434 bp, Glycine max
  unsure at all n locations
ttatcactggcattgcacttcctgttggttccgacaaactttattctggcatcactgatgggacagttaggatatgggactgccatactggtcaatgtgctaaagtcatcaatcttggtgctgaaggtacctctttgatcagtgaggggtcatggatttttgttggtctgcaaaatgctgtcaaggtaagctcttatctggcattggtttggtttgatgtatgataatgtctaatcataagagtagtacatgcaaactgattatgtggctgtggttggtgtgaaagcttggaatatccagaccatgtcagaagttactctcgatggacccaaaggccgaatccctgccatgacttgtggcaacaatacactctnttctggcgcagaggtaactaaccatgttattaatattgcgcaatgatattcccctaaccg

SEQ ID NO: 19122 - DNA, 421 bp, Glycine max
agcttgttggttacagtgacaacaattgggctggagatgaagatgattggaaaagtaccagtggatttgtgtttttcataggaaacacaaccttcacttggatgtcaaaaaagtagccgatattcactcttttgactcgtgaggcagaatacgtagcagctacttcatgtgtttgtcatgcaatctagcataagaatttattaaaagagttgggcatgtcacaagaagagttgaccaagatctttgtggataataagttagtcattgctctagcaaggaatccagtgttctatgatcgaagcaagcatattgataccccttaccactacataagggagtgcatagcaagaaaggatgtacatgcagaatatgtgaagtctcaagaccaagaagctgacatcttcaccaagctgctcaagca

SEQ ID NO: 19123 - DNA, 446 bp, Glycine max
  unsure at all n locations
ttgacagaaatccgacatcgtaacattgtaaagttacatggtttttgttcacattttcaatactcatttttggtgtgtgagtttctggagatgggcgacgtcaagaagattttgaaggatgatgaacaagcaattgcgtttgattggaataaaagggtggatgttgttaaaggtgtaacaaatgctttatgctatatgcatcatgattgctcacctccaatcgttcatcgtgatatatcaagcaagaatgttcttttggattccgattatgtagctcatgtctcagacttcggaacagccaagtttcttaatccagattcatccaattggacctcctttgcaggaacctttggatatgctgctccaggttaatttcctttctctatactatttgagtaaatcatgatattntagtttgtcttcgttagccatttacaaatatatat

SEQ ID NO: 19124 - DNA, 360 bp, Glycine max
  unsure at all n locations
agctcttccttantattcaagtgtatggaccatatcgtagccaaagtgctcatcgataatggttccagtttaaacgtgatgcctaagagcactttggagaaattaccattcaatgcttcccacctaaagccgagttcaatggtggttcgtgccttcgacggcacccgccgagaggttatgggagagatcgatctcccagtacagataggccctcacacctgtcaagttaccttccagataatggatattaaccccccctacagctgtctgttggggcgtccgtggatccactcagtgagagttgttccctctacactccaccataatgtgaaattcttagtggaagggcatctggtcatt

SEQ ID NO: 19125 - DNA, 443 bp, Glycine max
  unsure at all n locations
tctaagaatagccttgataactntaacataatccattgattcttccccaaaaaatatagtgtcatcagcaaattgaaggatattcactgcaaccttgttcttccccaccataaagttgtggaagcagtgtttggatattgcttccttcatcattcctgtcaaacgttcaacaaccaagtcaaacaataaaggggccaaaggatccccttgtctcaaacctctttgaggcttaaattcagtagttgggctttcattaactacgatagatatagaggctgatgtgaggcaccccttgacccaactaatccacctgtcatgaaaccccattcttctcatcatataaaaaaggaatttccaagacacatagtcatangctntttcgaaatccactttaaacaccaagcaagacctctttgacctcctaagcccctcaacaacctcat

SEQ ID NO: 19126 - DNA, 443 bp, Glycine max
  unsure at all n locations
ctttttttcctcatatnagaacatacctagctaccatatgtcggaattggaccagtttaacagccacatctaaaccggatgacttctaatttcgaaaataactatttctaacttttccaggggntaatgaactccaataacctcattcaaaaccctgaactatctccactttcatcaatacatatgtcatcaagcagcaagtaatccctacaaaagccatatattgggtagtacgctacataaatagtgtcgaatccaggcccatgttcagcttcatacaagagaactgagagtctctgtcgataattacttggtagcaccgatggtctcaattcttttctctgactatgacacgctgctctcatttgaccacactctacagaagatagatgaatatattgaccacacatataanggaatngntggaatagaannagcaacat

SEQ ID NO: 19127 - DNA, 176 bp, Glycine max
taatccatgcatggaatttggtgtttttgataaaccgttcctacaaaacatacaggttccgactctcactggttgattttgttggggtgatccctactgggatgaacttcttttgcggatatgcatatctggtaggtgaacatcttaataatgtggtgtgggatttagaacgcttt

SEQ ID NO: 19128 - DNA, 331 bp, Glycine max
  unsure at all n locations
agcttgtatactcttgaacagaggactnttcaagtccttgttagattgagggatgaacgagatgaggccaaagaggtatcttttataaagaaactagttattcatttcagtttacacaaaaaaattaactattttttcctgttcaaagcataattntgtattttttttcttaagttatactgagttcctaaattatgtttatatgtaaggcccttgaagaagtactttctcaaaattcttcaaagcagtatgactcatactttgctaatacacgtgaatctgttntccaggtaataatgtaatatacttaaaagaaccatgtcatcctttc

SEQ ID NO: 19129 - DNA, 355 bp, Glycine max
  unsure at all n locations
tgcatcaataaagaggtcttattggttcaaatntatgttgatgatataatctttggatctactaatgaatctttgtgcaaggagttttctattgacatgccaaatgagtttgagatgtccatgatgggtgagttaaactactttcttatattacaaatcaaaccaacaaatgatgggatctttgtcaacccagcaaaatattacaaggaactcatcatgaaattcggaatgaagaactcaaaacacttggctactcctatgagcactggttgctacctttgacaagatgaatccggtcaattcgttgatgaaaagcaatatagaggtatgattggatctctactttacttatatg

SEQ ID NO: 19130 - DNA, 382 bp, Glycine max
  unsure at all n locations
atcttattaaactttaaacagagttaattattctcaaaccaaaatgaattctagcagattgttctggaggacctanggataattctaacagattgttcttctggttttaactgtgaggtcaatgttctcccatacataatatttagaggctataagatgttaaattttattggaccaattgaaaaattcttggcatgcttggttagggataattttagcatattgttctggttttaagtgtgaggtcaaagttccctatagcatattctaacatatctttgatatcattggctttgtctatcaataccttaagttgttgcgtgaagatactccaccagaatgggatattaaggaaattcaaaatattggaaacatggatttc

SEQ ID NO: 19131 - DNA, 432 bp, Glycine max
  unsure at all n locations
tgaagcttaaggataagcttgaagatgttttgacttttacantgcctaactcccttgagtggcatttggattggtttttatcttggatgtcgcatcttaatacatatgatatttgtattgcatcattcattatcatggttagggtgaagaaaagtttcttcaagaaacaaaagctcttagttttaattgattacaagtccattgtaatcaattacaacatgttgtttgaagcttgaagagttaagtcttgtatcggtttaatcgattacagttgtctcataattgattactctgttctttgagacaatgaccaatttattcaggagtctctgctttaatcaattgccaagtggattaatcaattacttctctctcatttaggttgttagaagtgaanaataacactttaatcgattacttagagcatctaat

SEQ ID NO: 19132 - DNA, 388 bp, Glycine max
  unsure at all n locations
atcttgtgaagtatggtggccacattgatttggtgatgatgatctatctttgtttgaggtgtcaaagggcataaaaaagtttgtggttagtctaaaagaatatacatgttcttgtagaaagtgagagttaactggaattccttgccctcattcaatagcatgcatatggttgaatggtgtccaacatgaagctaatgtcaattcttattataggtgttgttatgtgtttattgttatattgtagtttttggattctatgtggtaactattntttaatttaaattgtttggattgcatttacaagaaatctacttcttgcaacatattcattattggtttcatgtattgaccaacttatggctctaacaacactatcttacttccctgg

SEQ ID NO: 19133 - DNA, 424 bp, Glycine max
  unsure at all n locations
tccatcaagtggtatcagagcacatgatcttcaagtaggtgtctccttaatcctccattaattntcagctttaccttctccattgatgtttcttcattttttttctccatgtattttctcatatgtcttttggtgaatgttgttaacatgattctttaaaatttccatcaattaaacttgctatagaagctagatttgattttctatggttcaaaattcttgttcttgttcttgttcttgaaccatgaattgtgttgagtttaggttcctttgagttttgtcttgatatttttgtggccgaaacctaaaccataaaattcttactaaaacatcaaagtagatgaaaacctcaaaaatctagagtgatatgttcacttcattgagttttgcataaaagtcatgctagtcatgaaacttgcacata

SEQ ID NO: 19134 - DNA, 337 bp, Glycine max
tttctttgttcgtggtacttacccgttgaagatcgaagaacgatgaagaacatcgaagaacggttgaaacctttgcgaaattcttcacggaaaacgttacggaaacgtttcggaagcgcctcggcttagattttcttcacggaaacgatttttccaagcaaattcgaaagagagaggagtgcaaaaggggctgaacccttttcttcttcccttcctcccctatttatagcaaaatatgggaggtggttgccgcccagctcgcccaggcgagctcagctcgcccaggcgagccaggttgcttcctccagaagcaacagccttctggaggaatattctg

SEQ ID NO: 19135 - DNA, 378 bp, Glycine max
  unsure at all n locations
tgcctcanagagatccaagaaggattttttctctgaaagaaccagttccgctcctgaatatgacaaccatcgttttaggagtgctgagcaccagcagcgcttcgaggccattaaaggatggtcatttctcccggagcgacgcgtccatatcagggacgacgaatataccgacttccaggaggagatagttcgcccgcggtgggcatcgctggttacccccatggccaaattcgacccagacataatccttgagttttatgccaatgcttggcctacagtggagggtgtatgagatatgccatcctgtgtgagggggttagtggattccattcgatgcggatgctctcagccagttcttgggatatcccttagtgctgg

SEQ ID NO: 19136 - DNA, 92 bp, Glycine max
  unsure at all n locations
gatatacaactccactangctttccattctatacctcatattcactgggattaaatgagcagatttggtgagtcgatctactatgacccaca

SEQ ID NO: 19137 - DNA, 344 bp, Glycine max
  unsure at all n locations
tgagaatggagaattgtactaagcaatcacttcgcatagctccaaactcgaaggtggaggacacatgaacgaaaacacaattcatggggcttcgaaaaaggggttgagaatggagaattacactaagcaatcactacgcatagctccaaactcgaaggtggaggacacatgaacgataacgcaattcatggggctccgaaaagattgagaatggaaaattgcactacgcaatcactacgcatagcttcaaacgcgaatgtggaagacacatgaatgaaaacccaattcatggggctcccaanagattgagaatggagaattgcactaagcaatcactacgcata

SEQ ID NO: 19138 - DNA, 362 bp, Glycine max
  unsure at all n locations
ttgcatctttcntgtgtagcttctatggaggttggatctttgagcttcaatgaggtcctttaatggtcgttttccaccatggagatgcagctaatgacaaaggagaagaggtgagaggaggcgccatccactatggaataagcctgcaagaaagagcttcaccaccaagatgagccttggataagaagctcggagaggatgcttcaatggagaaaaagaaagagggagagaaagagagaggtgggagcacgaaattgaaggaagaaaaataagggagagaagttgaactttgagttgtgtctcacaagactctcattcatcaaagttacaacaagtgttacacatgcttctatttatagact

SEQ ID NO: 19139 - DNA, 313 bp, Glycine max
tgggaggattgatgtgtatctcggtgtgatagaaaccagtatatgggcttcgtgggagtacgtgaacctcacttgaggtgggcaacaggggatggggggcttatgcgcgctttgtggatgtggaaaacttggtgtgcaccaatcgccgaccgccacctagtaccacatgtgatggataccccataatcctacaagcctgagatgaggaagtgtagaagggtgaacttcctgcttttattcgttgaccacagagtggtacctggagatatgtcgcgggggtcaagagaccttggggacgtcaggcggggtgcta

SEQ ID NO: 19140 - DNA, 430 bp, Glycine max
  unsure at all n locations
agcttgttacctatctcttcaaggcgagcaaggtggcttcctccagaagcaaccgccttctggaggaatcttctggagggcccaagtgggcctggttgctatttgcacccccatttttactaaatacaccccttgcctttttttggtgattctttntttcgtaaagttacgaaaatttacgaatttcgtaatgatacttgttttctttccataatgttacggaaccttgcggattacataatcatcccttttttgacttacggaatgttacggaacctcactaattgtgcaacgatgcttccttttgacttccggtgtgtcacagaaccttacnggatgtgcatcaatactttcttttgatttccgcacgtcacggaacttcacanatngcctaatgatgggtgccaagcacctcanaatgaccaaacac

SEQ ID NO: 19141 - DNA, 454 bp, Glycine max
  unsure at all n locations
tctattatcttaagttagaggtgttcgtcaaaatgaanattgtttagccaaagaataaaacaaagaacaaaaaccacatggaaagaaagcaaaagaaaaaaaacaagaaaaagagagagagagagagagaaagaatcaatccatccaagatggaagaagagagaaggaaaatagaaaagaaaaacaagttctttggaccagacaatgtctaaaaaatgtgcagaattgtcggaaagaaaaaaataaaagagaagagcaatagttatcacatgctttagttacaaaccaaatctttgtgtctgccctcctgttccacaccaaacaaaagagaaagggaaacagaaagagaaaaggccgaaacaaccaaagccaaatttcctaccaaaatccaaccttataaagacctattgatccatgatgattatgcatattatctttgatttgatgggaaatg

SEQ ID NO: 19142 - DNA, 367 bp, Glycine max
  unsure at all n locations
agcttcttccttctttcgtgctctgntccttccttatttctggaggtgctagacctcgaattctagccttgatacattgctctaacattttgttttttaaatttttatgttgatttgctaacagattcgatatttagatttttatgttgatttgccatggatntgggttctcttgttctccttgattntggatttgtaactcctaaatctgagtaaatgttaagttgtttttgttgtctaaatatgagatttgagttntttttttttttttttttgtgtttctagtgtgctttntatgttgtatntatgcttttgttggtgatgaacaaagaggggacggcgggttggtggtgtaaaagatggagag

SEQ ID NO: 19143 - DNA, 434 bp, Glycine max
  unsure at all n locations
tgtctacattcattagtaagtgcctagataagcaggtcggtgaacagatgttactagaagtgaacaaactttctttctctccttgtgctatgaacctatcattctttggacaaaacttatcaaacttaaatagttgatcctttcttatttataagaacatattggtttttttttctttcaaaattaacatggaagaatccttggttggaatcataattggttaggggaaccattcgtgttgaagggagaatgggcgtaatttaaattaacttaacccatgtataacttgtggtcttttttgcttatgtttcccctcccattnttaacttagttatcttggtaaaaacatagttttgcaaaagggtttctcaaaatcatatacagattattcaacccttcttctaatgtgtttctttgtttttcaagagaaaaca

SEQ ID NO: 19144 - DNA, 428 bp, Glycine max
  unsure at all n locations
agcttttgtatgccctagtcattcatccctatgagaagttgtcgaagtattggcaatcagaattgccattcctttgattatagggttgaaccaagctcatgcttttacaaaaaggttcatcaagtcaagttgaaatatggaagtaaccgtcctgcaaaattggggcaaaagatgaattgagtcacatcactgcttcgtctactgccaaacatatttaggattgtagatgtccttgttacttccagtttcaccttgacaaagatgtcatggaccatgttgaaaatctaaattgattcaaccccatatcctgcgtaaaaattcccaatacttcgactgtacatcattcgcatgcatccatgcttttcattggttgcattgctcattgcattctttccttganaaataaaataaaatanaatgaacttatc

SEQ ID NO: 19145 - DNA, 428 bp, Glycine max
  unsure at all n locations
tatgcgcatacttcttcacgaacgttcacttgcacaagactttcttataactaagaaaaatgcacccatatacaatcaaggcaccttcgttacctaaattctttacatgtacttccaaggggtatttggtacctacatcacacacatttcctttgctaaattcacatacatgcatactctaaacactttggctatcaaaaattgcatacgtgcacatcttggtatttctaatacctatacatacacaaacttcatgatgaatcttgactatcgacacaataaggtgctacatttcatgctctcctttttttcaagtatttttactacctaaagccgcatgcaaattcaagtatattntcttttgctcactaaaattgtattcaaattaaaaggtatttttgtaatgtattttctgcaacatatttata

SEQ ID NO: 19146 - DNA, 437 bp, Glycine max
agcttttactatcctattcaaatgttaacatgactgttaccctaaaataaaatcaccaaacaaaagattgccaaaagtatctcccaccaaccccgaagatcaaatctcatactccctccgtttcaaaatacatgtccatttttgaaaaattgcggtaaccaaggacaggctaatttgacacaaaagttcctattttacccttgtcctttattttctccattttatatttatttatcccacctcataattactcccaataccaaaattaattaaagttaatcaaattacaataccaatacatactggcaataccaatactactaaatggcattatgtttgcttcggtattgaaaagctcaatgggcatagttcggttatcaaaagtttttaaaactcaattgaaaaaacttccctccattattacatatactctaatc

SEQ ID NO: 19147 - DNA, 388 bp, Glycine max
tctttggcctaacaggaactccaatatttttacagcttctaatggtatgaatggtttggccacaccttccacatgtaaactcaaccaatttcctctttaacttatgtcctgtgacattgtcctcatctacagatcttcttctatttttctttggccttcctctttggacctttttatgtggtggaacaaggtgtgtatactgtgtctgggcccaatattgaggtccttggactggttcaataaaatgctggtatgtcttattataagcttctattgacagccactcatgacacatgtcctcaagcttccctcctttgtgagttattgttgcaatggcatgtcggcatggcatccctacatcaaagttgtaaaatcagcacacatgtag

SEQ ID NO: 19148 - DNA, 428 bp, Glycine max
  unsure at all n locations
agctttttattatgaaactgccatgccattcgcattcccaaaactggacttgtttgcagcacaagctcaagtgcaacggcagattcctttgccttttctccaacaacagaaaggaggtatctactgtttggttttccttctccttgcatttgggaatgggctctatgctaaactttccacaacacttgctcttgctcaattctctttactgcactttttagcatttcgtggcactatttgtccaatcatggtttttacattccttctctaactttttttataatggcttatcaattggagaggaaagcaaacatggataaccatgcatttcctcttgtttggttgaagagaaattgaaagaaaagggagacaaaatttgtcttctagaaacaaatttattntttcctttcattctcttatcaattcaa

SEQ ID NO: 19149 - DNA, 449 bp, Glycine max
  unsure at all n locations
tatgaccaaaacaaaataaagaanaataaaatgctacaatgttttacagcacaaggatttgaaagggtaaccaccaagaatccccaatggactgtgatttcaatattattttttgagaaaaatatgtataattaatttttaaaatttaaatattataataagtttatatttaagcgaaagtaataagtataattataaaattaatttgaggaaattgagatttgaaaaaaaaaattaatttaaaaatctgatacaaaattataaatcattaattatttgatagttntaataaatatataattaataaacatttataaataattaatgattttgaaagtttaataaatatatataaacataagtgctaaacaatcataaagccatgtatcacaactcaaaaagaaaatgagtataataaaatatgtctttatattaaaaaacaaataata

SEQ ID NO: 19150 - DNA, 509 bp, Glycine max
  unsure at all n locations
acgcacccatatgatgaatctatcganagccacggcgaattcgagctcgnggccctgtgatactntagagccgacctcgaggcatcgcatttcnatatgtatatctatagaagcctgaggaactagcttcagtttctaccacacaattaatttaacaaccctatgggccaagggtttcacttttcaacctcataaagactcggtcttttatcttttctcccactagaaagaagtaaacctataaatggaaataagcgcttggtttctaatttcttccaaaacctttaaaattttggaatgatgtctgagacaaaaccatntcagtatttaaagggcagcgtaaattgtgcatgccaatatcagtctccttacatccaaggtcttacgaacaacatacatgctgtataaagctatgggcccctgctgctcacgggctgttgcatacataacagcgaggaagaggcccacaaacgatggacgccaatagcaccacaagatgtgaccgcgcn

SEQ ID NO: 19151 - DNA, 482 bp, Glycine max
  unsure at all n locations
cgcagctgcctttgatgcgttgattgccacnttgaaaaccggaccacagaatctcagctgaccagcttgatcggaaatcatttttggctagttttataagcntcggggatgttgcccgtaatggtattttccctggagccagcacttgccctatagcatggaatctcttccagaagccgcttggtgttcctaaaaaagcttcctatatcactctgtgagttaatttggtaccggccagacaaatattttcttcatataatgtgccattttaatagttctctacttagtttctgcaggtttacacgtgaacaaggtgatgacaactatagctgtggctttaccactccatatgaaccctgccttctggagagatgtgtacataaaatcaaccaccgccatgcctcctgtgcctacacaatggaaggattatgaagaattgtgcctcccattttgatggacactgtcatcattcacgatattcn

SEQ ID NO: 19152 - DNA, 410 bp, Glycine max
atcttgtggttgtatatgaaatcctttgcgtcgagatcgatggtatatagcacaggtattcagcttcttctcctacccagaaagggtaagttatattgtctactttcacaccctccctgctctaactctttgactccatctttgtctatatggatgttacttagagcagtatgttttcatttgcgtgtgtctatatatatgtgtaatgttcagtgctgagtatgatattgtagatgttactgtacctcaatgtgattcttagatatcatataatctttgtagtttgtagcatcttctgttaatattatctctgcatttcttacctatatttggattgtcttcttctttctaaacttacatctggtcttatgtgctaatcaggtgaagttacatgacacagacattaacac

SEQ ID NO: 19153 - DNA, 384 bp, Glycine max
  unsure at all n locations
ntaaacctctcacaaaagggaagacttttatagaagatgtatctccaatttcttagaggtgagttcaaatccttacatataaaagagtcagaatccattttccattattttttaagatttcttgttggttcacatcaaataaaaagaaatggtgagaagttagaagatgttagaattatggagaaagatactacgcccgttagatcccaaatttgagcatattattgtgacaatcaaggaaaccctagatttaaaaaccatgatgatagaacaacttcaaggatcattgcaagcttatgaagagaagcataagaagaagcaacagatcactaagccactcttcaagatgcaactgatggagaaggaagaaagtcaacgaaatga

SEQ ID NO: 19154 - DNA, 340 bp, Glycine max
  unsure at all n locations
ttcttttatgagtaagtngcgaacggtgaaacttcctgcttttattgttgaccacagagtggtacctgtagatatgtcgtgggggtcacgagaccttggggacgtcaggtggggtgctattgcccaaaaccaagcttgaccaatcccgacccaacccgggcatagtcggtcagtgagaacctgtgatgtacctaaacaggcgagctcctggcagtcaacagataataggaacaaagaccacaaagcaatgaggcttgtggtggctggccatctgtgaattttgtgtaatatgtggattatggcctctggtaatctgatacctagggtgggtaatcgatta

SEQ ID NO: 19155 - DNA, 389 bp, Glycine max
  unsure at all n locations
ggctctaaatttacattgatgcatttttttattggaagatgttgcacgccattggggcnttaagaatagcattccttggtaaaactaattctccaaatgtttgccttcgcaagaaatggccccgaggaagcctgcctcaaagatggccaggaaggacatagcggccgaaggaactagttccgctcctgagtattacagtcaccactttaggagcgctgtacaccaagagcgcttcgaggccatcaanggatggtcgtttcttcgggagcgacgcgttcaactcaaggacgacgagtatacttgatttccaagaggaaatatggccccggccgtggacatcactggttactcccattggccatttcgatccacaaattagccttgatttt

SEQ ID NO: 19156 - DNA, 404 bp, Glycine max
  unsure at all n locations
agctattgnntttaattnctagagncnnganatatnacgggacttattcgaacattcgagttaaaagttattggcgnctgcatttgctcagagctttcgttttcaatgacgagtgtctcgatatgttacgggagtgatccgagttaaaagttattgtcgtttgaattttctacgagcttttgttttcaattttaagtgtcttgatatattacgggactcaatcggacatccgagttaaaatttattgtcgtttgcatttgctcagagcttatatactcaatttcaagcgtctcgatatattaagggattcaatcgaaaatccaagttcatagttattgtcgtttgaatatgctacgagctttcgttttanattatgagcgtctcgatatattacgggactcaat

SEQ ID NO: 19157 - DNA, 311 bp, Glycine max
ctcagcttgagcaagcaacacatacttttactcgatgtctatcatccgtatattcagacactagaaatgaaacgaactcgtacaattcaaatgacatacttttaactcgagtggattgagtctcgaatatatcagacctcgtattgaaaatggagctcgtacaatgcaacgatataacttttactcgatgtacgattagtccgtatatattgagacctcaaattgatacaaagcttgagcaatgcaaccacatactttactcgatatcgatgatccgaataatcagagctcgaatgatacgaactttacaa

SEQ ID NO: 19158 - DNA, 398 bp, Glycine max
  unsure at all n locations
ttcttattactcttccaatggttttcttgaccagacatgaagagtctataaaagcaagaccttgacttgcattcaaagaacttcttgaacaactcttaagaaaccttgaaacctttacaacctttacaattctttaagaattcattcccaatcatctttcttcttcttcctttgccaaaaagctttctaagttttttgttttccaaaccttattcttctgcaagtgaaaattctgcagaaaacaaaagtgtgctatatcttttcattctcttcttcctttgccaaaaagaattcaacaaggactaatcgcctgaattctntntgtgtctctcttctccctttttccaaaagtatagagggaccaaccgcctgaattcttttgtgtctcctttctcccc

SEQ ID NO: 19159 - DNA, 420 bp, Glycine max
  unsure at all n locations
tcttatccaaggcacattnttggtggtgaagctccttctttcatggcttattccctagtggatggtgcctcccctctcctattctcctttgccgtctactgcatctccatggtggaaaatcaccattgaaggacctcattgatgctcaaagatccagcctccatagaagctccacaagaaagcttccatcatacagttttttttaataccatatatacagagacattatgtgtatgtactgaaatagtgtgtgtatggtgtttactttgaccacttccattcttacccagtgcctcccccaaatttgggacaaatntgctttgaaccacgcttcctgtggatgatgctctcttacaacctaagtcaaggtagcaggagataatatngtataggctcatggttcaatcaatctattcattc

SEQ ID NO: 19160 - DNA, 375 bp, Glycine max
tctatccttgcttcatcttcataactcattcttctcatttgatcaccaagtttaatcatctctaccatgagcctagcggtttttggagatggtggagtagcatctcaacttgcagaagccatacctgcaagtaaagctagcacacaagtaataaacaaaataggacctcaccactcaacttagtgattcactcaagttcactcgtgtatcactctttcaaggctttctattttataatatgcgctcttgcattgtaccactcttgctcttcttcagttcttaagcaaaaccttcaaactcagaataaagaagtattcaatgtgaaatatgtcacaaatcagaactcaactcaagaagccaagaatagaaatactc

SEQ ID NO: 19161 - DNA, 354 bp, Glycine max
tgaaatacaataaaattattaaaaaaaatcttttattagatccatctttaagagtattataatatgtaaaatatttaatgaattacgttaactttttttggataactttattatatagtataaaatatttaataaattacgttaacttctctttcacactgcaaaacttcggaaaaagtattccacgaacaaaaaaatattaactgacaagcgttggttgttcaacccaattcaagtgtatatttcacgtgaattgtcatgcaatggctcgttgagttgttatgaatagatcaaaacaattataattggaagttaaaatggtcaattccacatcttggtgatgtgatccttaat

SEQ ID NO: 19162 - DNA, 308 bp, Glycine max
  unsure at all n locations
agcttatacttctatttttagcgtctcgagcagttacgggactcaatcagacatccgagttaaaagctattgtcgtttgaatttgcacagaggttcaacattcaatgtcgagcgtctcgatatgttacggggctcactctgactttcaagtaaaaagctaatgtcgtttgaatgttctcagagattctacattcaattacgagcgtctcgatatgtgacgggactcaatcagacatccgagaaaaacgtcactgccgntcgaattagctcataagttcaacattcaatgtctagcgtctcgatatatt

SEQ ID NO: 19163 - DNA, 416 bp, Glycine max
ccccattgtgatctgactacagcaatcgaccgacccggatcttaagtcactgccgcagcttctttatacacctcgcagcactgagtgactatcacgtagccatgacctcatagggacataagagcacagacagctgtagcattcttctggacaagacctaaggatttctcctgatatcgccgacacgttcataactagcactaaaacctatgggggaaggaaaaatagatctaatcttgacacaattaacagacattaattgacccgtagattgcactatcatagcaaatatgcctactaccgagactggcttgtgaggacccccaatgcgatcatggctttcaattatacagtactgaaactggcccctgggggaaatgctgacatatactgataaccatttttcgaaagtcatc

SEQ ID NO: 19164 - DNA, 441 bp, Glycine max
  unsure at all n locations
agcnnttnttaagaagtaatcnnnnnnncatacatgtggnttagtgtatttaacatcttanaaatgctgcaaaaaagcatcttanaaatatgaaaattataaaatactttttaagaagaaaaaaaatctaaaatacattttaactctcactctcacaatactgttaatgtttatacaagctttattttttcatccaggcggttcagtgtatttaacatcttaaaaatattaaatattttcttcattttaaaggaaaaaaaatgttggaattgaatttaactctcaaaatgctactattttaacttanaggattaactagtgagataagattctgtttgcatttacatatatntagtaagagaatntgtgtttaattcttaccttgtgcanannatatttatgacagagacaactgagagntaaanataggtaagttgaact

SEQ ID NO: 19165 - DNA, 470 bp, Glycine max
  unsure at all n locations
ctattcggacctatgatactcagcttgtaggtagttctcttgattgacctatttgatatttcatttacttgntatttcacattttggtaggtttaaatattaataatgggacagtgtgtccgtcaaatttaagaatgaaattggttattcaatatagaaaaaaaaagcatgggataatgaaggtaatgggacatgaaatttttcataactcatttcattttatccattttcatacaagattaaatttgaactattaaattaagttagcaatataaacttatcttattaagtcataaaatatatatatcaaaataagaaaaaagataagactttacttacttttcagttaaattaaaatttgaattaataagaatttttttcttctaatgaattgaaggattaaaataaataaaaataataattatctatattggtatcttgaacacgcgtacccttatataatgtgtcta

SEQ ID NO: 19166 - DNA, 394 bp, Glycine max
  unsure at all n locations
agcttttgattattcattattgattcaaagaattttttatgataacaaaggtgatgacaaaaagctcaaaggtcaagaacacttcatgataacaaagatgatgctctcaagaatcaaagaatgagttcaagattgaatcaagaacacttcaaggttcaagaggaaatttgatttcaagaatcaagaatcaagtttcaagattcaagttccgagaatcaagatcaagattcaagactcaagattcaagaatcaagagaagacttaatcaagataagtatgaaaaagtgttttcaaaaactgagtagcacatggattgttctcanaacttgtttaccacagaagttntaatctctggtaatcgattaccagattgttgtagtcgattaccagtagc

SEQ ID NO: 19167 - DNA, 107 bp, Glycine max
gcttgctctaaattacattggtgttggatttatgggaggatttatatgccattttttctttaagaataatggcccactggtaaaactaactttccaaatgtttgcct

SEQ ID NO: 19168 - DNA, 427 bp, Glycine max
  unsure at all n locations
agcttgttcaatcaccatagccatgggtcaatgattgattggtaaaattctatttttcttttttccccagtttttcaaaaagcaaaaagagttgaacagaccaatgaataagaattcatatattcagaaaattccctctcctttaagataaaagacgaggatgcacttttggtttccgtttgggggcctcacttgttctttntctctacccttcacccaccattttctcttccatgcccaaaatgcatgtcctctttctttntttgttnttccattntcatttcgctgaaaccctttctaccctaatcttagagtacaatgccctgctctctccgttcagccattaccgactgctcaccacccattctttcttcgtggaacaccttcatcccttactactcctagctcggtgtcatctatgacaatc

SEQ ID NO: 19169 - DNA, 425 bp, Glycine max
  unsure at all n locations
ntggagtaaaaggcttactaaagaaggcaatagggtggcctttctgcgataagactgcacccatgtcgacaccaaacacgtttgtttccaaggaaaaagggataatgaagtccggcaagagtaaagtaggggctatagaaagcacatccttcaatccagtgaaaacttgttgcgccttagatgaccactcaaaggggtacttcataagtaacctggttaaataagctgcaatggaggcatagccacgaataaatcggtgatagaaacccgagaggcccaaaaaactgtgcaaggccttggaggaatgaggtgtgggtcactgctaaatggctnggaccttagccgacactggttcaactccttgtgcaaaaaccaggtgacccaagaactcaacttgttgctgggcaaaggtgcacttggatagt

SEQ ID NO: 19170 - DNA, 275 bp, Glycine max
atctttttattggcatttggaatgcttttctatcacttcatgccacatcaaccatttaacacaattggccacataaattggattccaaaggtttttgctgtgtgaatagtacctagacgcttaaacacaaaccttcttttattcaagaaaacataaaccgtttcatgactcatttcaaccattaatgggttaaatgaataattaatttctagcaacaatcaacagttttcagagatgaatagctgacaacccgtactcttcaactattagtatgc

SEQ ID NO: 19171 - DNA, 276 bp, Glycine max
aatttgatcatcctgctttgatgaataaaaagcttggggaaaatggagagaattagaaggagggaggaacccatgttgtgattgccattcctacatggccaaatttctcaacagctcaacaatgtcaatacttaaccaatatcaacccttcttattacccaccaccctatcagccaaaaacacctaatcatccacaaaggccacccctaaatcagccacaaagcccggctaccacacatctgatagtagacaccacccttaacatgaaccaaaaca

SEQ ID NO: 19172 - DNA, 432 bp, Glycine max
  unsure at all n locations
agcttgtttcaagatctacaacaggaacttgaaatgaaagattcaatgagagtgaaggagttacataatgaaaattatgattcacagggtacttgtgatcattccttctgtgataaggagctaaatggattntcacctgaaaagcacacagataactctccaataactgactacaaaaaatcatatgatcaaaaggaagaagaaagatcagaatctatgagcaaaattgaagctgagcttgaagctgaacttgagagattgggattaaacatgaacgaatctagcccagaaagaccgctgtctgagcttgttgaggtaagcataaaatgtntatcttttgcatttcctagtaatgacatgatcctgtaagcanatttcattgtcttggaatatggctgctgaaatatactntctttanataatntcttatat

SEQ ID NO: 19173 - DNA, 435 bp, Glycine max
  unsure at all n locations
ctggactctagctagagaagctntaanaacctttattttcatagttatatatatatatatatatatatatatatatatatatatatatatatatatatatatatatatatatattttatatgagaggggggaaaatatattatattaaatcctaattctttatatatgaatctatgggctagatataattttctcatcttatataagatattttctcgtataagatatgtacttatatatgcacatattctttattttattgagaggttatttttaaattaatgagtttttttttttaaaaaaaatctctataaaaactattgggaaacaaattaacataatttcgtttgcttttgtgtcgcgttgatgtcaattctccttttataattatctattctactatgacggttcgcacgacataatttcaatcttaag

SEQ ID NO: 19174 - DNA, 437 bp, Glycine max
  unsure at all n locations
ttctttgcgcgtttttggaggctcagcgcggatctggagcttaacgcacatttggcggcttagcacacgatcacttatggcagcaaaactttgcatgtcgcttagcgcgcagtgtaagcttagcgtacaatcaatatcgaaaaacataactgtgctgtggagaaaaaagggagaaaccaaaagaaagcttttttggaaccaaataaggagatagggcacgagagaagatggagaacccactcaattggggaccatttcctccattttcttccacacctcttgtttcctttttgtattattaattntctcatgacaatgagaggttaaaccattcactgttggaagctcaacaaccaaacactctngatataatgatnctaactatctatntaatgatattttgatattatggggtctnttctatgctaaatatcatg

SEQ ID NO: 19175 - DNA, 398 bp, Glycine max
  unsure at all n locations
aaaacacaattttgcgagatgtgttacaattnttagtggtcttgatttcgagattaagtatatcaaggacacttcaaactctctacttgactatcttacccgtgaattcttacagaaaaattgccatgccacctaaggcatctagcacctctttatgaggaggaagaagttcaagtaaagatttcaaattgactctaccagagccattctccaaaaagaattcaccctcaaaatctgggtcaccaacccaagttgggttattaactcagaaaccaaaacaagaagggtcatctatccaactagtttcaattaaacctaagtcatccacttaggaatttcctaaaaatcaaacattaaaacataccaaggtcgactatgcctttctaatagaaacacta

SEQ ID NO: 19176 - DNA, 372 bp, Glycine max
  unsure at all n locations
tgcttttctcttagagatccaggaaggataaagcggctgaaggaaccagttccgctctcgaatatgacagccaccgttttaggagcgctgagcaccaacagtgcttcgaggccatcaagggatggttatttctccgggagcaacgcgtccagctcaaggacgacgagtgtatcgacttccaggaggagatagttcgccgatagtgggcatcactagttacccccatggccaagtntgacccagacatagtcctcgaattttatgccaatgcttggcctactaaggagggcgtgcgagatatgcgatcctgngtgangagtcagtggatcccgtttgtgcagatgctctcagtcagctcctgggatatcctct

SEQ ID NO: 19177 - DNA, 382 bp, Glycine max
  unsure at all n locations
tgctgcctcatgaagaatgccttgctcttagatagcatgattttagcccttttataatatggatgtatggaaatatgtagcatgaaatgccttgcaaaatgttgaatgaaatgccttgccaaatgttgaataaaatgccttgcaaaatggtgaataaaatgccttgccaaatatgaatatatatagcatgaaaatgccttgcataatatgaatatatatagcatgaagtgccttacaaagtggttgaatgggtagcgtanaagtgtttttaaaatatgtcatttatgataggtggaaaagaaccttccaaaaaatgtgtgtatatatataggatgtagcatgaaaaggtttgtcaacaaaatatatgtgtacatggatgtct

SEQ ID NO: 19178 - DNA, 381 bp, Glycine max
  unsure at all n locations
agctttgattnttatgtcaacaaaaatagcgattnttatcacaataggtgtgttttgtttgtagttctttcaaagcttaatttttttggttaattgtttgggtgttcttgatccttctcctactttgtttcgcatagaagcccgaagaacacactaaagctttgatttttatctcaagaaaagcagcgatttttatcacaacaagtgcgttttctttgtagttctttcaaagcttaattnttttggttaattgtttgggtgttcctgatccttctcctacattgtttcgcatagaagcccanagaacactanagctttgattnttatctcaagaaaaagcagcgattttatcacaacaggtgcgttntcttttgagttctt

SEQ ID NO: 19179 - DNA, 368 bp, Glycine max
tgtaatcgattacacacatactgtaatcgattaccagatgtatttttcagaaaacattctcaacagtcacatctttttatctgattcttaagtggccatcaaaggcttatatatatgtgactagagacacgaattgaacaagagttttgaagaacaaaaaggtcttatcctcttaacaagcaaaattggtttatcctcttacaaattccttggccaaaacactcgtgattcaataaggaattatttgagtgctcaaattgttcaatctatctctttctagagagatttcttcttctcttcttctttattctgaaaagggattaagagaccgagggtctcttgttgtgaaaggattctaaacacaaatg

SEQ ID NO: 19180 - DNA, 306 bp, Glycine max
tttttgtaaaactttttgaataaaatgtagcagaagttaacaataattcttaaaaaaaatgtgtggctagcacttgttattttagtatccaagctaaccttcatatcgtacttaaatccattaacggcgttattgtcttacatgcctttattgtgacaaactattagactaataataatattttaaaacatacttaaatgaattaataatataaaaatattctaatatttgtgacaaaataaatagattgagagaattagagatactatggaaatattttacattgctaccactattttacatata

SEQ ID NO: 19181 - DNA, 299 bp, Glycine max
gcacgagaaaacttcaatccacccaagaaggtgttaaaaaaccagagttcattccattatcctagtttaagagaatcttaccatgagaaccaaatctaaactctgaagaagccaaacaagataaaatctatgtctacatacactgatggctaaaccattccaaactaaatggcaactttagcttaagatggctcataatagttaaagcttggagaaaaagataacaatgatgggagggacagtatggtgcttatgattttacttttcactgctctatgatacataacccactgttgagc

SEQ ID NO: 19182 - DNA, 377 bp, Glycine max
  unsure at all n locations
tagcttcttcaaagacttgnggtccaacataggcatcatttcaagcctaatcaacgaggtaacacccccttgggtggtcctaacaattggtggggttctcaatttttttgggtatttcataatttggcttgcagtggccagaaaaattgctaagccccaagtttggaacatgtgcttgtacatcttcattggagccaattctcactgttccaccaacactggagtcattgtcaccagtgtaaagaacttccctggcacaaggagcattgtaattggcctcttgagtgggtatcttggcttgagtgcagctatcatcactcagatatactatgccttctatggaaatgattccaagnttctaattntgctcatggcat

SEQ ID NO: 19183 - DNA, 375 bp, Glycine max
tctcgaggaagcctcttaatgaagcttctctatgaagaattatgaagctgccttggtaaaaatgcttccccacctttggtaaccggtggctcttctcaaaatttggtctggcgcttcacagaacacttggccatgatctgaccggtgggatctttaagaaaatgtctggaatgtgtgccatgttttcgcttccgaaagcattgctcacttgtgcggtttgagccttgtagtctaagtacctttggaaaaatgccatttctttccctttctttcttccaaaaccattttcaacattccaagatctttctccatcacccacagccaccattagccaccacaaactgtccgtgttcttcattgaaaccccacaccgag

SEQ ID NO: 19184 - DNA, 383 bp, Glycine max
  unsure at all n locations
agcttgtacgctcatcgttcgcgtgtatgatatccactccacacgatntgaagtagaggagagcttcaaccctataacgcaacgtggcggacaaaagtgggcagtaaacttgaatggccgtcattgtcaatgcggaaagtattctgcgcttcactatccatgttcacacattattgcagcttgtggttacgtgagcatgaaccaatatatagatgttgtttatacaaacgagcacatcttaaaagcttactccgcacaatggtggcctcttgggaatgaagcggctattcctccttctgatgacgcatggacacttatccctgacccaactacagttcgtgcgaaaggtcggccaaaatcaacaaggataagaaatgagatgg

SEQ ID NO: 19185 - DNA, 380 bp, Glycine max
  unsure at all n locations
gagcgttagatgatattgtcttcaccgacgaaaggatcaaagtgagtctaaaaagagacaaatctgagcatcatactttgataaatgccaaagaaactatggcaagtgaagaggatgagaaggagggagaaacctatgttgtgactgccattcttatacgaccaagtttcccaccaacccaacaatgtcattactcaaccaataacaacccttctcattacccaccacccactcatccacaaaggccatccctaaaatcaaccacaaagcctacctaccgcacttccaatgacgaacaccacctttagcataaaccaaaacacccaccaagacatgaatnttgcagtgaaaaagcctggagaattcacccccaaatccag

SEQ ID NO: 19186 - DNA, 349 bp, Glycine max
acctacgatctttaatggagagggttaccactactggaatacccgaatgcaaatctttatcgaggcaatagatctaaatatctgggaagccattgaaatacggccttatatacccaccacagtataaagagtttcaatagatggtagttcatcaagtgaaagcataaccatagataaacctagagatagatggtctgaacaggatagaatacgagtacaatacaacctaaaagcctaaaacataataacatctgccctaagaatggatgaatatttcagagtttcagattgtaagagtgctaaagaaatgtgggacactcttcgattaacacatcataggaactacaga

SEQ ID NO: 19187 - DNA, 403 bp, Glycine max
  unsure at all n locations
agcttgtctctgtggaagaactatggtgatggtgttcaaaggcaaggtaggacaggacgcaattttcctgctgcaaggtcaccaacgccagtgacatctgagaagcttggaaatatagggactgtaaagcagcttaaaagttcaagactgggacttgagaagagtgaaaggttaaaatacttgtattgcttaagtttgacnatttgtttaggctcacatatgnnagctaatgttggtgattccatgtagcagggcaggtcgtccaccaaccaggaaactttctgatcgtaaagcatatgcacgccagaaacattcagcaattagtgcatcagcagattttcttggtactaatttctgcttctagaaaagagtaatgatctcaagttctcatgtgtataataca

SEQ ID NO: 19188 - DNA, 479 bp, Glycine max
  unsure at all n locations
tanagataaattaagaataataatagaatattccatcttatattctgattatatattctatcaaatacaaattgattagttagactaagaataccgatagactatcttatcattgataatatattctatcaaatacaaactgattagttaggctaacaacactgatagaatatcttatcatatattctatcagttattacttattagattgtacatattaattcttttatttaaaaatatcattgtcaaagtaggataaatatttaattatatacaattngttttattaattattaataaccttctactttatcctaataatttatacttaacagatgagtatttntctcattataactatgtactatccaatgtcttattagatttttaataacatattatccatttaatttacagatgactgtaatttgatcaatcattagtatatatatttatactatcgaccgattaagttaaag

SEQ ID NO: 19189 - DNA, 399 bp, Glycine max
agcttctcttgtaccttatgcaaatcctcaactcatccttcaagatcaaactgtctactagtgattggtccctttcctctctccggagcttaagctcgctgttactgctccacagagcccctcggaatttgttccggccatgtttttccctacgggcccttttggtctcttgttacaaagccttggtggtggcaatatttacgtctcagagttcggcattctcctttcggatcttaagagctgctgatttgaacttgtttttgactgtttggactttctcgagttctgccttgagggcttgcacctcttcgtcctcgtccggagcttcaacttccacccccttagtggttctcaaactcgggagccaatccagaccttgcatgtgggctttcaaccatc

SEQ ID NO: 19190 - DNA, 443 bp, Glycine max
  unsure at all n locations
ntaaggaagcaatgcattaccccacatggatcaatgcaatgcgattatctgctgaattctattgagaagaattcaacatgggaacttgttaatctgcctcttgacaagaaacccatagcactgaagtgggtttataaagtgaaggtgaaatccaaatgaggccagacttgtggcaaaagggttcttatgaaaacctggagttgactatggtgaggtctatgcacctgtggcaagaatagaaacagtgagattggtggtagcaattgcaaatatataaggttggtctatgcataaactacatgtgaagtctgctttcttaaatggacagctagatgaggaagtttatgtggaccagccacttcttgagacattgggacaagatgaaaaggtatacagattgaaaaaggaatatatggtcttaataagctccatggcttggaaca

SEQ ID NO: 19191 - DNA, 383 bp, Glycine max
agcttgtagggttcattccatattccgttgtcatatgctaaacttgatcccatatccactcaataattcaatggtagccataaccccaaccaaggttcctcaacctccatttttctgaggatacgactcgagcgcaacgtgtgcttatcatggaggagccccggggcattccattgagcattgtatgaccccgaagcataaagtgtgatgtctaattgatacgggctcgctgaaattcgaggagaatcgcttgttgaatcctaacattgacaagcaacaccatacatggggcaattctggaagctggtgttatgactcatcatgattatcaagtttatgccataaaccacagttactatgctaaatgatatggataagatgga

SEQ ID NO: 19192 - DNA, 465 bp, Glycine max
  unsure at all n locations
tctgtgagagcacttccttgagaagctagagcttagctacacacacccttttcatatctaagctcacctccttgagaagcttccttaagaagattcctaaagaagctagagcttagttacacaaacctctctaatagctaagctcacctccttgagatgagaagctagagcttagctacacacccgctataatagctaagctcacccccatgacaaaatacatgaaaatacaaaaaatatccctactacaatgctactcataatgcctcgaaatacaaggctaaaaccctatactactagaatggcctaaatacaaggccccaatgaagganaaacctattctaatatttacaaagataagcaggctcatacttagcccatgggctcgaaatctaccctaaggctcatgagaaccctacgggccttccttggatctctggcccaatctacttggactcttctatc

SEQ ID NO: 19193 - DNA, 377 bp, Glycine max
  unsure at all n locations
agcttttcatgtctatggtttctagagagagaaaggtccaagttctagagagagagaaaggtccaagttctagagagagagaaaggtccaagttctagagagagaaaggtccaagttctagagagttttgaaagattttgttgtgtgaagatcagaagagaccaaagcttgaaacaagagccggtttaagagcttgagataagtttgtgagtgattgtgagatcctagaggtgaaggagacatcctcaccacttgtatatttgcaatctttcatcttgttcttctctttgttcttaagaaggcttcctggtatggaactgtggctcttccctataggtacttgatgtaaatatatntctatctatntaatgatgttt

SEQ ID NO: 19194 - DNA, 368 bp, Glycine max
  unsure at all n locations
atgtactgccttangcgatgggatgcccatactaaagcacaacacgttctttcgagcaaggagtaattcatctcacaggtcgtgaacttcttacttaggtagtaaacagcgcgctctttcttcccggattcgtcatgttgccccagcatacaccccattgactcgtccaagattgtcatgtacaaaatgagaggccttccaggtactgggggcataagcacgggaggattcattangcactctttgatccttccaaaaagcctcttgcaatcctcattccaccagtcagtttggtttttacgcaagaagttatacaacggctcacaaatggcggtgagctgcgatatgaatctggccatataattcaa

SEQ ID NO: 19195 - DNA, 423 bp, Glycine max
  unsure at all n locations
agatactcagctctaaattgaattaaacattcagaaactgctggtaatcganatcatatatgtgtaatcgattacacaaggcagattntgaattcaaattataatagttgttgtaaatcagttttggccactggtaatcgattaccagagagtaaatttcttgtaaaagactttctaacttaattttcttggccaaaccttttgctacttcaattggaattcccttcctatttaatataccctttctaagactctatagactgtcttgatcatccatcttgaatatctttaattgctttgtcttgaataaagctgtgagacgcatgtgatctttnggcatcatcanaacatcggcttgatcctttgtctacaatctccccctttttgatgatgacaatccctgaaatcaagacaaactatata

SEQ ID NO: 19196 - DNA, 373 bp, Glycine max
agcttttgcctcttcatgtctggaatatgaatgttgcatatagatccaaagaaccttaggtgctttgctgatggcttattcccgttccaagcttcaataggtgtcttgtcttttacagacttagttggacatctgttgagtatgtaaacagcacagtagactgcttcagcccacaatgtgttatgtactctcttctccttgagcatcgatctaaccatatccataattgcgcaattctttctctctgacacttcattctcgtgaagagaatatttgactataaggttggcgctcaatgccttcatcctcacaaaatctttcatactcgcgagaggtgtactctttgccgggatcacttcattaaacttttatc

SEQ ID NO: 19197 - DNA, 477 bp, Glycine max
  unsure at all n locations
tcaagaaaaagatggcctcagcaaattccttatttccagatagtttctctatcaatagacctccaatctttaatggagagggttaccactactggaaaacccgaatgcaaatttttatcgaggcaatagatctaaatatctgggaagccatagaaatagggccttatatacccaccacagtagaaagagtttcaatagatggtagttcatcaagtgaaagcataaccatagaaaaacctatagatagatggtctgaagaggatagaaaacgagtacaatacaacctaaaagccaaaaacataataacatctgccctaggaatggatgaatatttcagggtttcaaattgtaagagtgctaaggaaatgtgggacactcttcgattaacacatgaaggaactacagatgttaaaagatctangataaatgcactaactcatgagtatgatatatntagaatgaatgcaaatgaaaata

SEQ ID NO: 19198 - DNA, 414 bp, Glycine max
cggtgcctatagtagatgacgaagcatatcttaagacagtactttatgtattaacggtggtaaatgaagtgaatgttatcataccaagtgacaaaattgtattcgttaccattggattcaatgttcaaaagtgtcattcaaataaaccaaagcaaaactgccaattcatgaacaatgggatgatggcagccgaaatgaagaacgtatgctctgaatggtactagaacacatgtccttaagtatggcagtatggtgcacgtctttctgcaagacatttatttgagagatgcttttgggtaatagggaaatgatggcagctgcacggaaatataaaatatgtcaacatcattctcattcattgtattgagtttaggtggtccctaatataatagggtgcacgacatttgctatcac

SEQ ID NO: 19199 - DNA, 331 bp, Glycine max
agcttttgattattatatcgacttacatgtaattcatgagtcataatttagtatgttacagtacattttaggcaatactaactactataaaataacattaatgtgtgccaccaagcacttatagtgaacttcaatgaaaacttttcatttattaacttgaaaccggcattgttaaaacatttattgacaagagtgctggtaaattttctatatgatacagaatcgagaggattaaactcaagttgcactttttctttcttacttatactattagcatcaattctgttgatgcaactggctttgatgttttgatgatgaacaagatgatgtg

SEQ ID NO: 19200 - DNA, 485 bp, Glycine max
  unsure at all n locations
tgatattntattgtttcaatcaaagtcataaagttcatgatgaattgtatcaaatagagaaagaagtaaaagctggcaaagaaagcaacaattgatcaaatggattgaatgaatctcattgaaagaaatgaatgatgaatacatgtgtttcatattatatacaatcaactttgggcaccaatctaactactagaaaatacaactaactataactgcttctaactgtcaaaacagaaaacagttagtgcataactaattctatatgttgagagccctcccaatatgaggaatgtatgttagacatttccaacttgagctgcaaaagacaaaaagcaataggagagaaagctttggtgaatatgtcggcaagttgataggctaaagatatagatagaagattgatcaagcctgaaagcaatctcttgcacacaatgttggaagttaattttgatgtgctttgtgcgctcatgaaacacagggttgac

SEQ ID NO: 19201 - DNA, 108 bp, Glycine max
gcaggtaagaactcgcgctacccggcttgcaaccaacacactggagcaaaggcgatagcgccaccgacaatgcatgacccacggcgtcacgcacacggttaaagagcg

SEQ ID NO: 19202 - DNA, 213 bp, Glycine max
  unsure at all n locations
ttttctatagaattattaaacaagcacttacaagtacaacacagaggtttacctgtgatcgaagaacttccttgtatgtaccaatttctcgtaaggctatggtgaatctggtcataacaggacctaggctataaacgtccgtcntanatcatttcatcaccattagacttttagagtcaaaggcaacatacagactctaaatcaaattatgaa

SEQ ID NO: 19203 - DNA, 220 bp, Glycine max
tatgcccatggacatgttgatatgaccaacaagtatgattatgtcctaaacctagcgcctatgcgtgcgaaagggcatccaatgtcaatgacaagatatccaaacaaaaatgtggaagctactacagtgtcctttccatgtactaaaaatatcaagaatccagcgcttaacatagcaagcgaaaaactcatttgcgacagctagccaccttgtcatatga

SEQ ID NO: 19204 - DNA, 376 bp, Glycine max
agcttgagcttattgttgctgttccacaaagctccacggaatttggctcggccatgctcttccttgcgagccctcttggtttctttttcaagggctcttgcggtagcttcattttcttctcgtaactcgacacactctttccagacgtctatagcgactaacttgaatttttctttggcaagtcttgcctttcctagatctgtttttagagcttggacttcttcatcctcttccggagcttcgaagttctcctcgttgataattttcaacttggagagccaatctaaccctcgtgtacgaactttcagtcattcatgataaccaccaatgatgccataacggatgcccctaaattctttatcttttcttaacaggc

SEQ ID NO: 19205 - DNA, 484 bp, Glycine max
  unsure at all n locations
cgtagaatggctagacatgatacatgtcagggtttggtttggttctatgttaatattgatgccccacattatttccatgacacaaatgcaaaaatgatgatttggaaattntatgcaaaactggtcatgcatgcacctatgtggacgctcaagtgtcaatttttatggtcatgtgatgctagggctcangattcatttcctctattntaaatcaacccaatgtttccaaaatatgttcttttatcaacttgtgcattcatccaagtccatttcgggcgtccggagaaattatcacagcattcaccctttaggtgtagacacgtttctttctttttcataaatcggttatgatcaatgaattcttttttcaaagaacagttggaaatcatctcttttcataagcatgtcggtatctagctagacaacttattttctctttgtcaccttgttcttacttgcttctttttacttattgctctctttt

SEQ ID NO: 19206 - DNA, 380 bp, Glycine max
agctagagtttttctttatatatgacatgcatgatgccctttcccactgtatccacttaaatttccatatgctagaaaatcattaatagtacaaaacaccattgtgcgtaacctgaatgtctactgcacatttgcatcccacacatctaccccttcttcccacaattgtttcaagtcttcgattaatggcgtaagatacacatcaatatcattccctggctgccttggacccgcgatcatcatacacaggataatgtatttacgcaaaatgcacaaccatgggggaaggttgtaaatcatcagtaaaacaggccaggaactgtggttgctgcttaagctaccataaggattcattccatcagaagcaagagcaagcctta

SEQ ID NO: 19207 - DNA, 225 bp, Glycine max
  unsure at all n locations
tgtgactcttggcaatntctttaaaactagtcacttacaaagttgtgatttttgtattaatcttcagaaacaagtcacttgaagaattgtgacttttggaaatttatttttcaaaatcagtcactggtaatcgattaccattaaggtgtaattgattacacatgaacagatgtgactcttcattttaaatgttgaaaattaaaacgttaatatgctctggtaatc

SEQ ID NO: 19208 - DNA, 400 bp, Glycine max
  unsure at all n locations
agcnagnnatttatcttatgattaatcaagaacaagcttgagcgcacatcgttcgcgtgtactatatccactcgacaaggtttgaagtacaggagaccttcaatcctataacgcaattctagtagatataaatgggcagnnaacttgaatggccattattgtcaatgctgaaggtattctgcgcttcactatccatgtccacacattattgcaacttgaggttatgtgagcctgaactactaccaatatatagatggtgtttacaccaatgaacacatcttaaaagcatacttcacaaagtggtgacctcttgggaatgaagcggcaattcctccttctgatgaggcatggacacttatccctgatcctctacaattcgagcgaaaggtcggccaaaatc

SEQ ID NO: 19209 - DNA, 398 bp, Glycine max
  unsure at all n locations
agcttaggttttatgatagcattcatccatagaataaccttcatnngnnnattcattcctaacccatactcaccctttagnnnggcacttagcttaattcattgaattacagcatacaaacttattaactttatttgtacttacagttttttttaacacaacatatacagagatattatgggtatgtacagacatagngtgtatggctgttactttgaccatttccatccttacctaaggcctcccccaaatttgggacaaatttaccttgataataactcccccaaaattggtacaaaatttctttgaacccagcttctgtggatgatgctcttctacaacctaagtcaaggtagtagaagatacaattgaataggctcaaggttcaatcaatcaat

SEQ ID NO: 19210 - DNA, 463 bp, Glycine max
  unsure at all n locations
tgtccttggtttagacatgattggtacatgatttgngacttgtttgattcattttgggcaaaattggatgagggaaagagtggttttcgaaatctgcactttatgcagaatttcgctgttgaaatgtgcagcagaattntgcataagtgcagacaaatgctatgtatctgctggttgtggaaagggtagtacatatggggttctggacatttgctagcagatcccaacggtcaaaatgtagacttatgtactagagacttctagtaaaattttcgagtcgatccaacggttaacgaattggaacgaagaaaatgttattggggtatttgtatgtgaaaagctgtgattttgagttgtgttttgggcagagtatctgactttgccctgtttcgcttggttctgtagtccatgatgattggatgtggaattacctggatgttgtggatagcttgggaggattgat

SEQ ID NO: 19211 - DNA, 381 bp, Glycine max
  unsure at all n locations
agctngccgttatggtgtgtttcgactatgctctcgggtggcggaacaagctacaaaaggagagagcaagaaatgaatagccaatggttgatacatgggcggagatgaaaaggatcatgaggaagcggcatgtgccggctagctactcaagggatttgaaattcaagctctaataactaacccaaggcaacatgggggttgaggagtatttcaaggaaatggatgtgctcatgattcaagcgaagattgaagaagatgaggaggtaactatggctcgatttcttaatgggtcgactaatgatattcgtgatatcgttgagctgcatgagtgcgttgagatggatgatctgcttcacaaaccactccatgtagagcaacaat

SEQ ID NO: 19212 - DNA, 393 bp, Glycine max
  unsure at all n locations
ggtgcatccaataccctgatgaggatgtcccatatgttcttaaatctgtactgattcatttgcttccaaagtttcatggccttgcaggtgaagacccgcacaaacatttgaaagaatttcacattgtctgctccaccatgaaacccccagatgtccaagaggatcacatatttttgaaggcttttcctcattcattatagggagtggcaaaggactggctgtattaccttgctccaaggtccatcacgagctgngatgaccttaagatagtattcttagaaaaaaatttccctgcttccaggaccacaaccatcaagaaggatatctcatgtattagacaactcagtggagagagcctgtatgagtactgggagagatataagaaactatgtg

SEQ ID NO: 19213 - DNA, 365 bp, Glycine max
agctttatctttcaatttcgagcgtctcgttatattacgggactcaatcagacatccaagtaaaaagttatcatcgtttgaattggctcagagcttcaacattcaatttcgaacgactcgatatatgatgggactcaatcagacatccgagtaaaaagttattgtcctttgaaatggctcagagattccacattcaatttcgagcgtctcaatatattaccggactcaatcagacatccgaaaaaaaaattattttcgtttgcatttgctcaaaggttcaacattcaatttcgagcgtcttgatatattacgggactctatcagacttccgagtcaaaagttattgtcgtttggatatgcttcaa

SEQ ID NO: 19214 - DNA, 454 bp, Glycine max
  unsure at all n locations
ctgagacaattcatacgacaataactgtntactcggatctctaatttagttccgtaacatatcgagatgctcgaaattgaatgtggaatctctgagccaattcaaacgacaataagttnttactcggatgtctgattgagtcccgtaacatatcgagacgctcgaaagtgaatgttgaagctctcagccaattcaaacgacaataactttttactcggatatctgattgattaccgttatataacgagacgctcgaaattgaatgttcaacctctgagcaaattcaaacgacaataacttctttctcggatgtttgattgagtcctgtaatatatcgagacgctcgaaattaatgtttaagctctatccaattcaacgacataacttttactctatgtctgttgagtccataatatacgagacctcgacatgaatctgaactctattcattcaa

SEQ ID NO: 19215 - DNA, 373 bp, Glycine max
agcttgtattttcttttattatggaattgatccttcctaagatggagccaaacccactcaccctcattaagaactagctcttttcttcctctatcgcccttaggtgaatacacctttgtttggttctctatttggctcttaaccctttcatgctacttttatacaaactctgacataaattccccttctttatggataaaagaagtgtccactgggaggggaatgaggtcaaactgtgttaggggattgaacccatagacaacctccaaaggggactggttgggggttctttgaacccccctgctgtatgcaaattctacatgaggaatatactcatcccaagacttatggtttcctttcacaaaaaccctta

SEQ ID NO: 19216 - DNA, 486 bp, Glycine max
  unsure at all n locations
tacggatatntgttagaaatggaactcattgtgcaattcatcgcataatgtagtcgtgtggttttcactagttttcattatatttcatctacgttggatcaattcacaccatggaatgtaatagcattatattccatttccctccattcgatccttctccaccaatcgaaacattagtgtgtcaagattgtatgcaataaagtggcttaagtttgagtccataaattgctttattcagattatatacaagggatttatcagaggactccacacaaacatggggcagccaataacctccttattccagacctctgaaaactacagcctctgacagttaggatgggaagtccatatctttagaaacttataaagagaaccaaaaaccttctcagtgttatgaaactggcacatgtgacatcctgagaattctactcggaatttctgtaagtattacatttaaataattatatagatatatattattcc

SEQ ID NO: 19217 - DNA, 363 bp, Glycine max
tgcgtcgtctgataacactgtctgtggcattagctggcattatatttcttgcatgtaggtcttgaaccactacccatgtagttcgaatgacatcaacggaatactgggagagtctgaaagcacaccgcatcattgtgttatagacgaataggcactccgtattattctatctaaacgcggatactaacgtttgacagaagtaaggtcagatgtgctacaatgtcatgagaacatttctgacggatgatttctcatatgatccatctaactatatgcttagcactaccttatctaagtaagtaaaatcaccacttaagatctatgatgcagtgctcccaccaacggccttggacatatgactcc

SEQ ID NO: 19218 - DNA, 358 bp, Glycine max
  unsure at all n locations
agcttattattattnnnnaaancnatatgaagcaaacaaataaatatttcactgtaatataaactttgcttccaattatatatactcgctgaacttcttacattataaattagaatagattcacagtgtttaacaacaacaatatgttgttattgtcgttgaccaccataataagatgatttaccttatactctgatctggaatgaaattaaacatttcatactaaacttgctcaaccttatgncgaagaatgagataatcataatcatactggacttggtagacactttatcatcattagtgccgatgatggaattgatttcaaagctgtaataagtggagatcttttaccaccata

SEQ ID NO: 19219 - DNA, 95 bp, Glycine max
tactaagctcttgcgtaccgtgctgggctcacagaatgccaagtcatttcttttttactagctatgtgaactgaatgatcctgacgtacgacctt

SEQ ID NO: 19220 - DNA, 297 bp, Glycine max
  unsure at all n locations
agcttttgcttatggatcattcattggngcacgtgacagttatatcatacagctatactcatatattgtgtgatcatgtacttgtttacatcagctgaattcttgtgattctattgatatctacttgatcatttgccagcattgtaggggctctatttctaaggcctatgcaactggtgaagaaacatgacgagtatgagaacatgatataactctggtccaccaaattcaacttcttgcagcttcaagcatatgcatgaaatatatatatatatatatatatataatctagaactc

SEQ ID NO: 19221 - DNA, 467 bp, Glycine max
  unsure at all n locations
cgtatttctatcgggtgcagcataatgaaccaccaggcctttatgattacccaacactcttctgaagtccttcaatccatccgctaaatagaatttgctaccgtctcttctaacctttataaaatgtttttcttcattgtaatcaaacgttacatacagtgggtaagtaagaccccagtgtctgtgatatgctaatggtatttgaatgaagttttggaattatacatcaattacatggttaaccccacaatagtagatataattcttgtgttcatttcatacaataaaatgaataagatagtcaatatgaaaacacatattctatcaacgtggaaaacacatngaaatttgtatataactgggttgccgaagaaactgtgtgttgcctaaatgacgaaatgtgtcatagtaaaactttttgcagacatgaagcanataagttgtctgatatatatggagataacaat

SEQ ID NO: 19222 - DNA, 376 bp, Glycine max
tatgctttggttatatgctaaccgtcaatcaccgaaaaatgagcagaataacaaaaaaaagatgaagagagaaaaaaaagggctatggtaaattaaaatgggttaagcccaataagctaagatgctccagccaaacaaataacataggtctcttctccatgacccgtcgtgtagaatttttgtgtgagagaagaatttagatataacgtaacaaatagagaaaaaattattatccaccgtaaaaaaaaattacattgtcataaaactattttatactgtaaggacatgactattaaactaacatatatttagtagtattgtttttaattaaaattaatcaagtgttgtattttaaaattgaaatctcactaaatag

SEQ ID NO: 19223 - DNA, 469 bp, Glycine max
  unsure at all n locations
cgaaggaggggagccaatgcctctacttgctcctagttgagaattgtntattttgtatagattgctagttagcatgcaattaatctcagttgtgttttcacaggataaaattcaaagacattgggagcatcttgagcttttgttttcaatagtcatgtcaataatatttgaaagggggtctttggaaaccgagaaaaatgtcaatatgctttcttcaagaattcacaatcctttatgtaaattaagtggctttcctaaaggtattgtggagaagaatcaaatcaacaatgttgacttatcaccaacaaanagcattangattccacacacggataaattaccacaatatacatcttgggtatacgtggctaggtgcgtctgactntcaagtttcattttttttttgtccaatagatgacctacgaattgcaatgcaattttgtcataagataaaatacatgcttcttga

SEQ ID NO: 19224 - DNA, 458 bp, Glycine max
tcttcttttgctgttgctatctgattgtccatgtcagccagtttttcagttggttcaatgtttcctgaatcaatcaaggccataatcttctcccgggcagcatctggatctacttctatatgagcacagacaaatatctcttcgagctctgcttgcttcttgaaagcaatttccttcatcctgctggctttcagctgatcaagtctctcaacttccacttcagcctttattattaaaggaaaaaaacagttaatatcatacttggaactcgaatctgtaaacttcataagttctttagtacctacctgctcaatcagatccagagcaagggcaccaggaacagtgacttcatcaacagaagctgacatattacaggtaacatggtcaaatagtctcctttcctcgggatgagtatccattagattccaaagatcaattaactgagaagctaattcttg

SEQ ID NO: 19225 - DNA, 381 bp, Glycine max
agcttagtctattatcatagaattcgtgggtagttttctggaccacaaaatttatgtagccttttgtctttttttttttttttccggatgtttaacttatttgtctagttcatagcaatttgtttgtgtaccatgaatattcgatgaatgtgttgtatggactcttcagcaattgacatttatttgttttatttcagttctaaggttgaaaacaaaaacttcgaaaatgacgctacaattgaaagcaatgttgtaaggatttgacaaaggaaaaaatgtttgatctttaatgggtgtcacccttttctgttgatgaaggtttgccatatgctctcaaagggtggcctaatgttggtgatatatggggatagaaagtgggga

SEQ ID NO: 19226 - DNA, 464 bp, Glycine max
  unsure at all n locations
tctttaaagcanaagataaatagcaataaataaaagaagtctaagggaagagaggtatgcaaacttgatttatactggttcggccacttctcgtgcctacatccagtcctcaagcaacccacttgagattttccattctctttgtaaaactctttttacaaagtctgaaccacacagggacaaccctttccttgtgttcaggaatcctctataacaagagacccacggtctcttaatcccttttcagaaaaaagaagaagagaagaagaaatctctcttaaaagagatagattgtacaatgaagatcaatcaaaattccttattgcatatgcaagtggttgaccaaggaatctttntgagaagataagacagttcagttcagaaaaactcttaatctttgaaaggataaaactttttgggcaatgaaaactccctttgaatttgtgtttccaagtcacctttga

SEQ ID NO: 19227 - DNA, 321 bp, Glycine max
gttgcctaaaagttactatcaagcgaagaagatactatgtccaatgggtatggagtatcaaaaaattcatgcttgcccgaatgattgcatattgaacagacatgaattagaagatatgtcaaaatgccttacgtgtgggatatcacgcgtcaaagtcaaggatgatgaggagtgtattagtgatgaatactcaacgaagggcccccctagcaaaggtgatgtggtatctgtcgaacgttccaaggtttaagcgtctttatgctaaaggatacgacgctaaagatcttacatggcatgcatatgacagaaactgcgatggaa

SEQ ID NO: 19228 - DNA, 237 bp, Glycine max
  unsure at all n locations
cgctgatactgtcatccagggattactaaaatatgggcctatnataaattgntccaaggaggttatgtttctacgagagctggaggaaatcttanaagtaactcaacctgcagagttgcaacgttgtatggtaccattgttccaccaaataagtcgttgtttgagcagttcacatttacaggtttgataactattactagtcttcagtagttactactgtctctcgtgatcatatat

SEQ ID NO: 19229 - DNA, 406 bp, Glycine max
agcttgatattttgtgtttcaagaataagagttaaaagattattttattgagttagacagtggaggaagtcggcaagacaggttgggtgcgtagttggtgtgtggaatattcaaagaataatagaaaatggaaaaaacaagaaatgagtcacctcgtccgttgactatctgcgtataataatttttcgttttttatttctgttgatgctctgtcttttataacccataaattgtgggcttttgccagctgccgtgaggttttaccttctaatgagtcatgacagtaatgaaaaaaaaatcttttactttaacatatttacagaatagtaagttcttctatatattaaaccaaatagctgtgtaagttattacctctatcttttttcttctgtaagacatgaatatg

SEQ ID NO: 19230 - DNA, 488 bp, Glycine max
  unsure at all n locations
ctttanattatatatataatatactttgtgttaaaagtatttagttattctaacttgacattatagtttaatatataaagtattttatatagcgtgtactgtaacgatactttaacacctaaatatatgcatgatagtattcaccatttaacacaacaaataattgatataagattaatttgatgaaaaaaaaaagaaaaagagattatacattcacatttttgtgctaacaaaaagaagctaacaaagacaataaattaataactgatattttttaattaaaaaaacactcaacaaacaaattaatagctaatatttttaattaaaaaaacactcaacaaatagtaactgatatttttcaattaaaaaaacactcaacatatagtaactgatatttttcaattaaaaaaacacttcacaaatagtgctagtagtgcatgctagatgatagaaggaaaaagtggaaaaaatgaaaaataattagcaca

SEQ ID NO: 19231 - DNA, 396 bp, Glycine max
  unsure at all n locations
agcttgtgcattcaataccctgatgaggatgtcccatatgttcttaagactggactgattcatttgcttccaaagtttcatggccttgcaggtgaagacccgcacaaacatttgaaagaatttcacattgtctgctccaccatgaaacccctagatgtccaagaggatcacatatttctgaaggcttttcctcattcattagagggagtggcaaaagactggctgtattaccttgctccaaagtccatcacgagctgggatgaccttaagagagtattcttggaaaanaatttccctgcttccaagaacacagccattaggaaggatatctcaggtattagacaactcaatggagagagcctgtatgagtactgggagagatttaagaaactatgt

SEQ ID NO: 19232 - DNA, 482 bp, Glycine max
  unsure at all n locations
tataagctgaacatcaggaaacactgtagtattnttctattntatacatttatatggngaacatagacaaaatcagaagcaggctcatatttaggaacagaaaagagaaatatcgctgtcagtgttcatcagaaattctaatttgcctcctaccaaaaggattacctcataaatggcttgataattgatggagtggtagtttttttaagcaaagctatatatgacaagcttaaaggcacataattgtaacaatctatactctaccacacgggaatccacaatgaagaacaggctaactaaagaatttagattataaaattcaccatcaacagtcgtgtagaaatgtgtctcttccaatatcccaaattaccgaaacaatcttttagtaacttaaagagcaactcatttccatcatcacagtctaaatctgaagaacagatgtgactgatgaaaaatgaaacacacacagaagcagaaagtaa

SEQ ID NO: 19233 - DNA, 380 bp, Glycine max
agcttttaatttatatgggaaatgaacagaagttgagatcacaaattgctgaactacaggaacaactcaatgttttgaagtgtgtgaacttggaggaagctgatcatgagaataaaagaaagatagaaatagaagagatagaagaaaaattggaggacatgatttttgatatgtccgtaaaagatgatgaaaatcaagctttgaagaagaaggtacaagaagctaaaatcgagctaaaagatgctaggccacaaattattaaagtaaatgttctgttctgagaaaatccttattctaatccttatactaaagagacactttacttcataattttattaaaccttttactttaattattcaacttcacaaaaagtaattca

SEQ ID NO: 19234 - DNA, 412 bp, Glycine max
  unsure at all n locations
tcttgcgtagccgctcttggtgctcagaaaatccgcaaatctaattcctcttattactagctantttgaattctttagttcctgaatgtacaaccttcaaattgttgctcgttcccctctttcttttctgcaaaaaagaaaatcaatatcaaagaaaacatggatgaaatcctaagaaaatcaatatcaaagaaaacatggatgaaatcacaattaaaaaccacaactaccaatctttcagagtcctttggataatatgtcttgtctccttatgtggtggagttttgtttaataatattatacttttgccttccaaaaaaaacttatgactgatcctctcttcattaatcctattttagatgttattgtataaaagatcataggttctccacctgcctacactattcctcct

SEQ ID NO: 19235 - DNA, 374 bp, Glycine max
tttattttatattcctcactagcttatttctcaatgtattgcaccgaacttaaatttatattttattatttataggaatatttttaatatattattaatgatttagtgtaaattttgaaggatatgccaataaatcatttatcaaattcttaggtattataatcgatttaggattctattaaaaataaaataaaatttaataaatataaattttatattaattaaattatttagaaaaaataaatataaagtatcatgtcacatcactctcataaaataaaatcttatatatatatatatatatatatatatatatatatatatatatatatatatatatatatgcacaagtttagtgtctcataccttgcata

SEQ ID NO: 19236 - DNA, 350 bp, Glycine max
tagcaacatacacaaacatacatacacataccaagagacactatcctatactctatccggtcaattgtaaaacatcattaatattcttatcaatattaccatcatcgtcataagagaagcatatgaatcttattcgtcaatctgattcacactacatgattcaacacacaaatgcaatctatccaaaaatccttcaagtcttatggttcttacaacaaaattctgaaaagttttctagcattgaaaaccccccattttttttatcacaagcatctcccaatcctccttgaccaaaaaacccacctccacaaatgtgatggttgacaactatgttgttgggaccccccccc

SEQ ID NO: 19237 - DNA, 579 bp, Glycine max
  unsure at all n locations
acgcggcaccacactcgaactgcgacactggacgggcacggatatcggaatcaacatacaaannnnnaaagagagtgcntttgatgcaatcgataggacanacgcgaacatananacccaagccacaggagtaacaagaacgcttcaggagaggcgatgatttcatctacacgactcataagctcaaacgcgtagctaagaagatgacgaccagagcgacgccaagatagaggcgagatcaccgcaagatgaaattcgccctccagaaccacgtgtcaagaggccagaaccacgacaagacccacgcgagagaggacagatagcaccccggccaaaactgggagcacaggagctgcccaaaccttgaccaaagagcgctactctctggaaccgacaccacaaacgagaaggacaccactagcaaaagggaacagaaagcattaacagagggacgacgggccaaccgaacgcaacacggggaagaccagacaaagaagccggaaacaacaccaaccggttggaccgcggcaaccccagcgacaggaaagagcagcgccccgaacagaaagctgcgtgccn

SEQ ID NO: 19238 - DNA, 306 bp, Glycine max
gcgcgagcaagctttattgttagctctaaatgacagttcaagctagggtcatctcagtttaccgtgcatttaccacagactttagacttaaccttccaaccatcaacgcctaactctttgtgcactcataacatgacattctcgacttgatcaccctacgttagttgtacccttgctctctgaccgctttccatccgggatacctgcctagccacatgacatacataatcagacaaaccgtaccacagaatgggtatgtgtaactcatccaaacatggctatttcaacaggctctcaacaagagtc

SEQ ID NO: 19239 - DNA, 473 bp, Glycine max
  unsure at all n locations
cgaggctcaagganaagcttgaagatgttatagaagaagttttgtcttttacatgcgcaaatctnttgcgtggcatttgtattggttatcaacttgactgatgcatcttattacatttcatatctattttgcatgtggaagcaaagctaccatgatggtaatcgattacaccattatggtaatcgattaccaatgaatggttttgaagaaaatgttaagagttatagctcttaacatggttttctcaaaaggtatcaaggttctataaatataagaccttggcacgcattttatatatacaataacacagaaaaacacatctgattacacagaactgtccactgctattctcttgcataaactttgccaaattcattctaagatttttttcaatctttcctagacgaaaggaaaattctgccaaaacacaaactgtgctatccttctgtattctcatcttttcttcattctcc

SEQ ID NO: 19240 - DNA, 412 bp, Glycine max
  unsure at all n locations
agctcgnacccgggatctctaagtcacctgcagcatgctagctttcttatctcgcctatgctagntaccacatgattcgagcagttatcaatatatatttgcttatttaaaaaaatactccatttttttataagatattgcctctcataaaaaattgggcgaattaatctcttaacatagccaaccagcatgagatcatgctctcagacaaaaagatctcacttgctcaatcccagattgatatcttaagatgcattcttctcagggtacttaccagcctcagcctcacatagctcaagagctgttaaatttccctgaagaaaatctcacagttcaacacatccaacaatttttggggattgtaaattatatcagagattttatccccagatcagcccaatataccagttta

SEQ ID NO: 19241 - DNA, 304 bp, Glycine max
ttgctttagtgtttcatggtctagttcttcaaattttgattcactcgagagctctacattgacagatgaggttacttgtttaagggacaaattgacaacttctgaagagaatgtccagacattaaacatgtcatgcttgcatacatccaaatgaatgaagggcatattcattctgagttgggtgctatgcttggacataacactactactgcagtttgtaagtacttaccttattctttcggtaagcttactatattattaacacttgacatgatatgatatctattttataggatgaatgacg

SEQ ID NO: 19242 - DNA, 385 bp, Glycine max
agcttccatatcattgacaatttcccgttcttattcaagctttcggtatcaacaaacttttgcataataaagtgataaacgtttttaacattgtaatccctacttccaataaatctccatagccgaacatcttcttaagtaataaccagtgatggcattttcatgatcggataagcatctctatgacaaagaatttgattaataatatcaatattccaacatctatttgtagcatcaataaaattttccacctttttattctccacatcattaatgagaggagtttcaatgaaaagattactctctaacctcaaccacgactcactccataacgcaatatttgcaccaccaaccaatttccacctatagccttccttaacaacca

SEQ ID NO: 19243 - DNA, 473 bp, Glycine max
  unsure at all n locations
ntagaaggatcactatttctccgtgagagtgtcctacatgccacatagcctcctatgcctacaccaattattgttggataggtatcatcatatttatgctaagaaaatcatgcacatcagaaagaataagttaaaatagtataccaattggtacaatagcaccatctgagccaccacaaagcatcaagtcctgcaattacttacattnttaatgttttcaataaaataactatataattacactaaacttgttntaagaaataaaagattggtaaaatatgagaaatctaccatctaataagcaaatgctgaagtgagatacttacagcttcacctctaatgatatggtttgcagcattcaatatacaaaaattactagtagcacacgctgtagagattgaataaatanggcccatccacccctaaagttttcatatgataaataaataattggttagaagctatatatagac

SEQ ID NO: 19244 - DNA, 382 bp, Glycine max
agcttagtctattatcatagaagtcgtgggtagttttctggaccacaaaatttatgtagccttttgtctttttttttttttttccggatgtttaacttatttgtctagttcatagcaatttgtttgtgtaccatgaatattcgatgaatgtgttgtatggactcttcagcaattgacatttatttgttttatttcagttctaaggttgaaaacaaaaacttcgaaaatgacgctacaattgaaagcaatgttgtaaggatttgacaaaggaaaaaatgtttgatctttaatgggtgtcacccttttctgttgatgaaggtttgccatatgctctcaaagggtggcctaatgttggtgatatatggggatagaaagtggggag

SEQ ID NO: 19245 - DNA, 477 bp, Glycine max
  unsure at all n locations
tctntanagcaaaagataaatagcaataaataaaagaagtntaatggaagagaggaatgcaaacttgatttatactggttcggccacttctcgtgcctacatccagtcctcaagcaacccacttgagattttccattctctttgtaaaactctttttacaaagtctgaaccacacagggacaaccctttccttgtgttcaggaatcctctataacaagagacccacggtctcttaatcccttttcagaaaaaagaagaagagaagaagaaatctctcttacaagagatagattgtacaatgaagatcaatcaaaattccttattgcatatgcaagtggttgaccaaggaatctntttgagaagataagacagttcagttcagaaaaactcttaatcttttagaaggatanaactgtttgggcaatgaaaactccctttgaatntgtgtttccaagtcacctttgatggccattcata

SEQ ID NO: 19246 - DNA, 396 bp, Glycine max
  unsure at all n locations
agcttgagattatgaagtgttgaagggtgaaacttcctgcttttattgttgaccacagagtggtacctggagatatgtcgcgggggtcaggagaccttggggacgtcaggtggggtgctattgcccaaaaccaagcttgaccaatcccgacccaacccgggcatagtcggtcagtgagaacctgtgatgtacctaagcatgcgagctcctggcagtcaacagataaaaggaacaaagaccacaaagcaaggaggcttgtggtggctggccagctgtgaattttgtgggatatgtggattatggcctctggtaatcgattaccaagggtgggtaatcgattacaaggcttanaaatgaagataggaggctaagatggtctcttgtaatcgattacca

SEQ ID NO: 19247 - DNA, 477 bp, Glycine max
  unsure at all n locations
ctatgatactcagcttctatagaggctggatctttgagcttcaatgaggtccttcaatgttgatttctcgccatggagatcagcggaagataaaggagaagaggtgaggggaggcgccatctactagggaataagccatggaagaaggagcttcgccaccaagagagtgccttggataaaaagcttggagtgggtgcttcaatggaggaaaagaatgagagagagagaaagagagaggggggagcacgaaattgaaggaagaaaagagggagagaagttgaactttgaagtttgtctcacaatacgctcattcatgaaagttacaacaagtgttacacatgcttctatttatagactangtagcttccttgagaagctttcttgagaaaatctccttgagaaacttctttgagaaaaattccttgagaagatagagcttagctacacacacctctctaataactaagctcacctcct

SEQ ID NO: 19248 - DNA, 418 bp, Glycine max
  unsure at all n locations
agcttgccatttaatgttgtagtaattggctctcatactctgcttgacaatcggaaggagaaggtactgtctcattattagatcgtagtgatctcatgattggaggaatgtttttactgctgtatttactgactgcatgattatgtttccagacccaacctggtggccttctgtttaccaagtttgggagcaatcagacagcactacttgatcttgcttttccggtataagaaccactgccattgctcttcttaccttgatttaaagcttgtgtatttctagcatggaagttacagttcttgtctttttctgtaccttcacactattcatagcttttagatctaaatcattgttaatattgttatatatnaaatgtagcttggctgcttctggttccttaanggagtaattatcaatc

SEQ ID NO: 19249 - DNA, 457 bp, Glycine max
  unsure at all n locations
tgtgatatctgcanaaaggttgtgtttgtcaattttgggcatgtttattatctcaaccctaaaaatntaagcaatgtcgataattntattaacactacttttcatttcactggtgcagcattaattatgggcttaacattctacagggcattcaaaatgagaacaaaaacttaaaaaaatcactgaaggtaatttaatattagatgttacaattataaacctttctccatcatattttgtggagatattttgcattactactggtatccatctagtttctttaccttgtcatgatttgaattgtggaattgtcacctgtattctttgaattgttnttccaggatgtggttactgagaatgaatttgagaaaaaacttcttgctgatgttattccgccaaccgatattgggtcacatttgatgatattggagctntagaaaatgtgaaggacaccttg

SEQ ID NO: 19250 - DNA, 332 bp, Glycine max
  unsure at all n locations
agctttgaagagaattaaaactctagaaaaaaatgcttaaaaatctttggttagaatcgcagtcagcatatattctacaccataaagtatttgcacaatcattctcatccaaggctgccttatttatcaataaatatctaattagcaatgattaaatattccagattctatcaaagcatttatgagttattacgacacagaagcatcagatgggacttcaacattntaaccacaagcaggtcaataaaacccatttaatctgcaagtcagtgttggatgcctattcataatgtgctatactagtaaggtggtaaccatatctttatctttga

SEQ ID NO: 19251 - DNA, 468 bp, Glycine max
  unsure at all n locations
nggaacannatatttgaattcttggtctccttagagaatttgtaaagatgtctgctagttgatcattagaactaacgaattcagcaataacttccttagaaaggactttctcctggacaaaatgacaatcaatctcaatatgtttagttctctcatggaatactggattagaagctatatgtagggcagcctgattatctcaacatagcttcatttgttgagtatttccaaacttcaattcttaaagaagttgtttaatccaaatgagctcacatgtggctacagccatagctctatattcagcctctgcactagaccttgcaacaacattttgcttcttactcttccatgagacaagatttcctccaatagacacacaatatcctaaagtggaacgcctatcaatgcgtgatcctgcccaatctgcatcgcaaaattcaactatttgagtgtttcctttgtcttcat

SEQ ID NO: 19252 - DNA, 278 bp, Glycine max
  unsure at all n locations
agcttctttttcttgagactcgccaaggctntcttcttcttctccgcgaacaggttagttccccttaccctttgcttgtaatgtgcagcactagtcaccttagggtagaagacgagaggggagaagacgagagtatgccggaaaaagtgggggaaaaggctgacggcggagtcttccgatagacccgttccagatgaacctcttccagaaagtttccggaagaagtgttcttccggaagtacccaacctttttcggaagacacccggaacacctcttc

SEQ ID NO: 19253 - DNA, 485 bp, Glycine max
gctgccacatacctctgtctgtctctctctctctgatgtgctttgcatcactcatgaaaccttgatattgcaatgttgcaaataccataatccaatcgaaactagtcaaaccttatatatatatatatatatatatatatatatatatatatatatatatatatataaagcttagggaacactaaacaagagcgaccatgattacccagtggagcctgaaaggcccccacttacacatcacaactctcacacaaacaacgagcccctctctcgactaaaccaatacgtagccacaaccgaaagacagatcatagatctcatggtataccgtttcgtacactccatggatatcttccctcttcccttatgtataatactcgagtaacgctcaaacggataggaggtcactactctctatcactctgatctgcaggaatgattagtcgcatttgataaactataccacaatagaacagatgtgacag

SEQ ID NO: 19254 - DNA, 378 bp, Glycine max
agcttttcgtttttctcgcccaggcgagcaaagttgcttcctccagaagcaacagccttctggagggcccaagtgggcctggatgctatttgcacccccctttttactaaatgtaccgccccttctatttttttgtaattcttttttcgtaacgttacgaaactttgcgaatttcataacgatagttattttccttccgcaaggttacgaatccttacggattatgtatctactcttttttagctttcgaataagttacgaaaactcacggattgcgcaaaaacacctctgttcgactttcgccacattacagaatttcacggatcgcgcaagcctgctttcttttgatttctgagacgtctcgggacttcatttatt

SEQ ID NO: 19255 - DNA, 372 bp, Glycine max
tctggaagaagcctcttagtgaagcttctggaggaagtctcttattgaatgttctagagaaaactacatgaagctacctcggtaaaaacgctgcccagccttagttaaccgttggatcttctcaaaatttggtttgcaacttcacaggacaaatcgacataatctgaccgtcgggatcgttgagaatatgtttagagtgtgctagaagcttccgttctcgagagcatcttttatttaagcatttcagcctttgctttcgtgtagcatacgaaacacgccatttcttcttctttctttcttacaaagccatttataaagttccaagaactttatccatcacccacaaccaccattatccaccacaaatcatca

SEQ ID NO: 19256 - DNA, 578 bp, Glycine max
  unsure at all n locations
tacgacccgacacgaagcacatcgcacgcgatgcgatgcgattgtcantcancaaaaaaanaagagagggttgatgcatcgtagncngaccgacacaacacagccggcgaatctgcgaagacgaagngacngngacgcgcaaacaggttgatatctgaagcgccacaaatnacnccgaggacgagaacccgtatgagcaccaacgcaacacaccaactggngcagaactgacaaaaggaccaaagcagccaaacgagcagcgcccatgacaacaaaaacgaagaaaacaaacagaaggaggaacaaatgaaacattgcgctcgaaaaccgaaccgcgccagaacttgaagagagcagaccattacaactgcaaaacaacaacctacctcacctagacatgatcgaaaactggagaacagcacatggaaactcagaaacagcctaccacgacgcgagcactgagaatgaagatgggaaatacctacgcgccgggaaaaaacgccacccgaagcggggggcagagaacaataagaccaccaaagagggaagaccctcgaggaagcgcgacgcacccatcn

SEQ ID NO: 19257 - DNA, 353 bp, Glycine max
agctttttgatattattgagtgtgtaaaatgagatcaatgcttggtcatggacaaatgtgtgcttatgaatctaacttcttcataacatgtacagatttgatgcactaaggttgctaggaagaatgagaagaaagagaataatgctggtgggcgattcagtaatgagaaatccgtgggaatctcttgatcgcttagtgccaggaggtatttgtatttggcggaaaagagtgacttataacggacctggaatggccttccatgccatggtaagagtgccagacatgtatcacaacatgggttcttttccttctctgaaaaatagagaccacttatgtctacctgaaggattttg

SEQ ID NO: 19258 - DNA, 224 bp, Glycine max
agcttctaacattggattgcacccttcctcacttataccctcacatgtggctccctctttaacatttacttacttctgagtaatagaatcttcttcacgcaaagagatcgtaaccttactctcaccaatttccagcaccctaacagcggtcatttgtactatgcatcacatatggcgtttttggtatcttgcgcttactcatggatgcaacggttactcatgga

SEQ ID NO: 19259 - DNA, 407 bp, Glycine max
cttaatttcaatacaaggaagcatgacttatgcctaggaatctaaattttggttctgaatgtaaaaaggcatgaatattaggacatgtttgagaggtttttttacaatttaaatttggctgccccatgaggaataccttacacctacgtagcatggaaaatacctttcaacggtatgtatagatgtgaatataggtagcgcggaaatgccatgcaaagcgtgtgaatatatggcatataaataccttgcaaagtgtgaatgaatagcagaaaatgcctttcacaatatgtatatttgtggataggtagcatacagagcctttcaaaaaaatgtacccatgtcataaatggcatgagaatgctgtccaaatgaatatatgatgtggaattgcccctcaagtgtagata

SEQ ID NO: 19260 - DNA, 356 bp, Glycine max
ttaacaagccactcttctaggcctctacttatgttgcgaacacaataaggagtccaacagatacttaaccaaaagtaataacagaaatcaaaatgcacaccggaaagtaaaagagcacggaagaaagagacaaacactcacagagtttttatactgggtcggcaacaacctcgtgcctacatccagtccctaaacgacctgcggtccttgagatttctttcaaccttgtaaaaatccatttacaaacaaagatccataagggatgtaccctgccttgttctctttgaacctactggatgtaccctccactagaactgatccacaagagatgtaccctcttatgctctcacccaacc

SEQ ID NO: 19261 - DNA, 365 bp, Glycine max
tcaccaccaagagagtgtcttgcataaaagcttatattgaagcttcactgaaggaagagaatgagacgacagcagagagagtacagagcacacatgacagagctggctgcgtagaatgatatgagaagcatcgggagagattgttgaacctttgaagcgtgtctcagaagactctcatttatcacagttatcacaagtgttacacatgcttctatctatagcctaggaagctttcgtgagaagcttccttgatggaagcgcgcttacgatgctagagttatacgcctccaatacgtaagctcaccctcacgacacaatacatgaacgaagagagcgtcctcgagaagcttcctgtgggagcaagt

SEQ ID NO: 19262 - DNA, 401 bp, Glycine max
gcgatcagctcgtcccgggatctctaagtcactgcggcatgtttcttgctctttatttacatagatgtacgcatttatgggaggaggctatatgacattcttgctttaagagtaacgtcccactggtaaaactaactttccaaatgtttgccttcgcaggaatggccccgaggaagcttgcctcacagaggtccatgaacgacaaggcggccgagagaactatttccgccccggagtacgacagtcaccgctttaggagcgttgtgcaccagcagcgcttcaaagccatcaagggatggtcgtttctccgagagcgacacgtccagctcatggacgacgagtatactgatttccaggaggaaatagggcgccggcggtgggcaccactggttactctcatg

SEQ ID NO: 19263 - DNA, 338 bp, Glycine max
ctcgagagcttcctatgtggaatttcgagcgtctcgatatattatacgcctgaatcgaacctcagtgttaaaagttatgaccatttgaatttctgtagagcatccgttgttcattttcgagcgtctctatatgtgatgaaccttaatcggacctccgtgtgaaaagttatgaccatttgaatttctcgagagcttccgttgttcaatttcgagcgtctcgacatattatgcgcccgaatcggacatccatgggaaaagctatgaccatttgaatttctcgagagcttccgttgttcaatttcgagcgtctcgatatattatgcgcccgaatcggacat

SEQ ID NO: 19264 - DNA, 383 bp, Glycine max
  unsure at all n locations
agctntgatatttntaattatgtgccctatcgcaagattatgtgattatgggtttttaggatttttttgaagttactctttgtgtatgtcttatgacttgtttgtttgacacttacaatcaatttctcatactgtgcacatgtttcaatgtaaaatgtatggttgaaattaattagggcacacatctcaattacattaatcagttctatcaaaatcaattccactcaactttaaaccaatctgactcttagtggaacttctaccttatcccattgattattagactgggtttcatgattcgtggattgtattgtgatggtctgaaaaatggcacatccatgtgggtagttggaatgaatccaatcccctgcctgagcctgaac

SEQ ID NO: 19265 - DNA, 318 bp, Glycine max
  unsure at all n locations
tcttccggaagtcttccggaagaagcttcttccggaagttagttttcttatntaatgcgtatgtaatgacgattctgcccttgtgtaaatttctttaaattaacgtcttcaggctgtgttttactgcgctttctttctttcttcttccgtttgctttgattcttcttccgttcgctttgatgcttcttccgtttgctttgtttcttcttccgtatgctgatgattcggtggtggtcccttcagcaatctgttggtggtcccgtgaagcgaagaatttgaagatatggaggacccgtgttccctatttgaagttctatt

SEQ ID NO: 19266 - DNA, 424 bp, Glycine max
atcactcgacccgggatccttaagtcacctgcggctgcaagcttgcttttaattctgatcagaatcaattttctgatcttcaaaacctagctccggcttcctcttccccatatcaactatgcagcttgcggtcaacatgaatggccttcccaatattacagggatgtcagtatcttcagagatatccattaccacaaagtctgtcgggaagataaaatgttttactctgaccaacacatcttcaattactccatatggcctggtaatggagtgatcaactaattgtaaagtcatttgaatgagcattatttcccactcttccaatcttttgcacatggagagtgacatcaaattgatacttggacccaggtcaataaaagcttttcccactttgacttcttcaattgaacaaggaatagttaca

SEQ ID NO: 19267 - DNA, 327 bp, Glycine max
tgtaatcgattacacatatactgtaatcgattaccagaggagatttttatataatattctaaacagtcacgtctttgtctttggttcttgaatggctatgaaaggcctatatatatgtgacttgagacacgaatttgctaagagtttttgtgaacaaaaagatcttattctcttaaaaagcaaaattgttctatcctcttacaaataccttggccataacacttgtgattcaataatgaattattagagtgctcaaattgttcaatctatctctttcagaagaaatacgtcttctcttcttcttattctaaaaaggattaaaaactg

SEQ ID NO: 19268 - DNA, 411 bp, Glycine max
  unsure at all n locations
agaggtcttgtatatttgcatgtaattntaagttcaaaccctcatcgtaagaaaaacactaaacacttatgatataaatttaatactattattttatagtcattgtattcactatattttttattgtcatgttataaatatattattagcagcatataagctatccctatcaagaggaaggggcacacatttgagttcttatacacttagtaactatagattccttactatttggcaatgcagataacgaacgaaccccgactcttcaaataatttttaatatatgacttctactagtgcttaagttaccttcttttatttttgaatttatgttctagctctttagaagacattaaaccacaaatattttctatttttaaaaaaacaacaagtgaatttaatttatattaa

SEQ ID NO: 19269 - DNA, 486 bp, Glycine max
  unsure at all n locations
actaagctanatagacgcaggaagcagaaatagagtgctggaagtaannttctcaacttctgtttgctgcttaaaagtacaattcttaagcctaagcgagcaaattattttcaatgggcttcaaatccattagtgattcattgattcagcacaagatacttattcgagagtgttaacacactctctaatatacttttcctaattagataaatatttttttaagacaatcataagtattcttaacatatttctctgtccacttaattacattattagaaaaatataaaattacaagcaagattcattaaataaaataaataaaacacaaaattttataatttttaataaattttgattaatatcaacaatacgttcaatagactgtgataaaacatgttaattagtaacatttttcataattaaccttgtttatttgtagaaataataaatctttgcgagctagaacttgaaaaacaccatttactt

SEQ ID NO: 19270 - DNA, 422 bp, Glycine max
  unsure at all n locations
agcttcttatttaagttcatcttggtggtgaagctctttcttccatggcttattccctagtagatggcgcctcctctcacctcttctcctttgtcttctgctgtatctccatggtggaaaatcaacattaaaggacctcattgaagctcaaatattcagcctccatagaagccccacaagcaagcttccatcaagtggtatcagagcacaagagcttcaagaaggtgctccttaaacctccattaattntttgctttaccttctcttctattggtgcttcttcatttttctccatgtatctcctcacatgtcttgtgataaaatttgttaacatgaatctttagatttttcaccgaataaacttgctattaaagctagatttgattctctatggctcaaatttcttggtcttggtcttgaac

SEQ ID NO: 19271 - DNA, 481 bp, Glycine max
  unsure at all n locations
cgcttgtggggcttctatggaggctggatctttgagcttcaatgttgttctttaatggtggttntccaccatggagatgcagcgaaagacaagggagaagaggtgagaggaggcgccatccactatggaataagccatggaagaaggagcttcaccaccaagatgatccttggataagaagcttggagaggatgcttcaatggaggaaaagagagagggagagaaagagagaggggggagcacgaaatttaaggaagaaaaagggagagaagttgaactttgagttgtgtctcacaagactctcattcatcaaacttacaacaagtgttacacatgcttctatntatagactaggtagcttccttgagaagctctcttgagataacttccttgagaaaattctttgagaaaacttccttgggaagctagaacttagctagacacacccttctcataactaagctcacctgcttgagaagct

SEQ ID NO: 19272 - DNA, 394 bp, Glycine max
  unsure at all n locations
agcttgttttgtcttgtttataattaagttttgaataatttagaataactttaaaatagtttaaatgtttgatttttaatctaattttagtttattttgttgtagaaataaaggaaaaaagaagagagttgttgttggaacccaattgaaggctcttttaaaggacattttttaggctgatcaaattttttcctctttatggtatttggactcaatgtgtatggcttagcctacaacctcttaaattggtgcaacttttctatgcccacttagcgagcaggtgtgcattaagcgcacaactcaattacatagaaatgacaatactacatgtttgaccctatntaagcaccaatggtgcggatagaaggaatatttgattgcgagaactatctat

SEQ ID NO: 19273 - DNA, 471 bp, Glycine max
cgtacggttaaagtctcacgatggtcacgtgctcatgcaacaattgttattcgtggctatacgagacatcttgcgaaacaaagtcaggttagcgataactcgcttgtgctttttcttccatgctatatgtagcaaagtccttgatctagtcaagtttgatgagttggaaaatgaggccgcaattatactgtgccagttggagatgtatttccccccccgctttctttgacatcatgattcacttgattatgcatctggtcagagaaatcaaatgttgtggtcctgtttatctacggtggatgtacccagttgagcgatacatgaagatcttactagggtatacaaagaatctatatcgtccagaagcatctattgttgagaggtacattgcagaagaagccattgaattttgttcataatacttacagaatgctatacctgttgggcttcctgagtgtctgcatgatgata

SEQ ID NO: 19274 - DNA, 378 bp, Glycine max
agcttttaatgtcctatagggacaagtcacaggtggaatgcatggctttaaaggataaaatgaacgcttgtcaaacgtcaaaaagaagtttgaccgaacagctgagtagaacaaaagaaaatatgttcacaatcattgaccagtataaggaaaatgaaacctagctgctattcatgggcaaagactaaaggatgagcatgcgaaagtatcggctctacaaatggaaagggaagcaagagagagagtgatagaattattgcacggggaggcgatgaaatggatggatagattcgctctcactctgaatgggagtcaagagcttccaaggctgttagccaaagcctatgcaatggccgatgtatacccagctcccgatga

SEQ ID NO: 19275 - DNA, 97 bp, Glycine max
tcatcctgagatccctcttgttggactaagcccaatagttattttcctcttaggttcagacaaacttagactgagtttcgttcgcagatccttcttg

SEQ ID NO: 19276 - DNA, 414 bp, Glycine max
  unsure at all n locations
agctttatcgttattcccaaagcttcatgtagacttgtccagaatcgcgaagtgaacctcggatccctgtctgatacaatactggaaggaattccatgcaaccttaccacttctttgatatacaactccactagcttttccattntatacttcatattcaccggaatacactgagcagatctggtaagtcgatctacatattcagccacatctttcttcctgccatgccaccaaacacttctcttcaaatcttggcacatcttagacattccacgatggaaactaagacgacttttatgcgcttcttccatgatctttactgtcaaatcatctaaagatgacacgcatatgctccccttgaatttaattataccagttgagccctctcgaactctacctccttatcccccatta

SEQ ID NO: 19277 - DNA, 601 bp, Glycine max
  unsure at all n locations
tacgaacgcgtacactgcagnaggaagtatagtcacacctgatagcangagantaaacnnacaaaaccccnnaaagagtggggtttgatgccatcntaggacacacgngacaccananaacacncaagctcggagcgnaagcaaaccagaagaacncgaagctcggatattcgatcgagtcccgtagtatatcacgacgcgcgagcaggaagacagaagcgcttagcggattaaaacgacaatgacgattaactcggatgtccgattaagtcccgcaatatattgagacacacgacagagaatacagaagctgggagcaaatacaaacaacaataacacataacgcgaatgaacgagtgagggccgcaataaaccgagaggcgcagaagtgaaaaaggaagcttgcagcaaaggcaatacacaagaacgattaacgcgaagatccgatggaggaccgcaagataccacgacgctcgaaattgacacagagacactcagcacaagagacgacactaagaactacacgagggacgaacgggcaggcgaaagaagaatccgccgaacggactacagaacagaaagcaacaccaacaggccgacg

SEQ ID NO: 19278 - DNA, 248 bp, Glycine max
agctgttacctttatcttatctcacagacgctatatctgggagccgatacagtccttgtgttcggactctcagccacttacgatagccgccgatgatcccattactgcttcccgtaagctctctgtcctttcttcacgccgcatcccatgccttgcgatctccttggagtactctcgcgtagtggtcactagaaccccatgcgatcaaaggcctgatgcttggtgctaatggcgctcctctcatgggg

SEQ ID NO: 19279 - DNA, 393 bp, Glycine max
tctatagaaggttcattcctaatttctctacaatagcatttctctcaattagctggcgaagaaaaatgtggcatttacctgtggtgaaaaacaagagcaagcctttgctttgctcaaagaaaagcttactaaggcacctattctagctcttcctgacttttctaagacttttgagctagaatgtgatgcctctggagtgggagttggagctgtattgttacaaggtggacaccctattgcttattttagtgaaaaactatatagtgccaccctcaactaccccacctatgataaagagctttatgccttaatatgagctctccaaacttgtgaacattaccttgttgacaaggaatgtgtcattcatagtgatcatcagtcacttagcacatt

SEQ ID NO: 19280 - DNA, 223 bp, Glycine max
gacattatcattattacttcttccacggtgctggaacgtacttacatggacttgatggggcctatgcaactagaaagccttggaggaaaaaagtatgcctatgtggttgtggatgatatctctagatttacctgcgtcaactttatcagatagaactcacacacctttgaagtattcaggatgtgagtcttacacttcaaagagaataggaccgtgtcatcaa

SEQ ID NO: 19281 - DNA, 438 bp, Glycine max
  unsure at all n locations
cgtccttggtttagacatgattgatacatgatttgcgacttgtatgattgaatttgggcaaaattggatgagggaaagagtgattttcgaaatctgcactttatgcagaattttgctgttgaaatgtgcagcagaattttgtataagtgcagaaaaatgcttgtgtatggatggttgtgaaaagggtagtacatatggagttctggacatttgctatcagatcccaacggtcaaaatgtagacttatgtactagagacttccagtaaaagtttcgagtcgatccaacgattaatgaactataacgaaggatatgttactggcgtatttgtatgtgaatagctgtgattntgagttgtgttttgggcagagatttctgcctttgcttctgttagcttgagtttgttagtccatgatgattggatgtggaatacctgaat

SEQ ID NO: 19282 - DNA, 276 bp, Glycine max
tgcaagtttgcttttatttttacaagatgcacatcggtgggcagctacctcatgcactcttctaacgaccatggcatacttgctggcactaaattgctgggagtctgaggccatcttctcaattaaatgaatggcttcagtatgagatatgtgttcaaaggctacaccactggcagcatctatcatacttatctacatattaccgagtccttcataaaaatataggagaaacaacctgatctgaaatctgattgtgggggcaaccgacacctaaat

SEQ ID NO: 19283 - DNA, 307 bp, Glycine max
tttcttcactttaggagacggccattccggtgttggagaagatcaacgacaatgcctacaagattgacttgcctagtgagtataatgtaagtgccactttcaatgtgtctgatctatctctttttgatgcagatggcggagccttggatttgaggacaaatccttttcaagaatgagggagggatgaggacataaccaatgaccatgaagcactggaatgtcccatgaccatatgcagacttatacaagcccaacgcgtcatagagacacggctggtcatttgtatcgctgccattgatgatgattg

SEQ ID NO: 19284 - DNA, 384 bp, Glycine max
  unsure at all n locations
gttgcgtntaaatccaagccgtattggagtcatattgaagctgtttctagccttaggaagccgtatctaagccgtatcttgtattttaaaaaataaaaataaaataaatcttttttggatactcctaggatactatccggccgtatccgtggagtatcggtgtcggatacgggtgcgacaccgacacttttccttttttcacgtatccggacttcacagtagtttatcaatggattctctnttttcttttaaggaaggttatttctaatctaaaaataattaggtcttataaaaaaataaacatcattttaaatttgggtcttttaaataagaacaaaaggagtattgtgtgattctacatatccaaaattggtgggccgtgac

SEQ ID NO: 19285 - DNA, 389 bp, Glycine max
  unsure at all n locations
agctntgagcttattctagttggctcctgaaaatgtgtctacagctgtatgcttaataattagattctcatttgaaaacatgctgtctgtttgacttanataacaggatgtgattggatcatttgtgcaagtaacttgcactttttatgattgtcttttgcaccataaggtgttatggacaaactcttaaagaagagatctatctcatttgttatgttcttttgcaatcaagaaatacaattctttcttttctctattttctaatccagcttcttaacaaaatgtgttgtaaaatttgttcattgagaaagtagtgtcaaatctaagataacatgtttctattggcccatgattacactgataatatgcanggatagtatacctaattc

SEQ ID NO: 19286 - DNA, 489 bp, Glycine max
  unsure at all n locations
acctatgatactcagctgttctatagactaaatatgaaactcacctatgttagactttattaatcattaagtgagtcttgcaagttaccaaaaaataaatgatattacattnttcaaatttctgataactcgttggatttaattttcacgtgattttttcatgtttatggttcttttttatttgaacgtcccttagcttctacggtttcatataactaaatcaaacaaaacaaatttcacatctcgaattgataaaaaaggattcaaaattgaaaatgatcattgtttcagaagaattattttggctcacttaacaaatatgaatgattaaattcaaatgtaaaaaaataagatatcatactaaatataatcaaatatataaaggactaaaagtatatcttaacctatcttttataataaataattatttttattatatanattatatttttgaatttaaaaacataatgaatcttattatctaaatat

SEQ ID NO: 19287 - DNA, 377 bp, Glycine max
aaccggagagaacaacgcatggaaggaagaattgatgttagatgacacataaccaaagcattagaccaaaagatgacgatacagagaatggattttgaattgccgaccacgcctacagttgcagcgcattcgatgttgtagaatagcggccaacggacacactttaccatgattgcctgtgatccgtagatattaagaaaatatgcctacaaacggcgtgaggagatgaatcgcggacacatagaccccaaaaacctggacatggagggcggatgcggctgcacaacatgctttaaaaccttgaacacagtatggcagtttgtgaggtatctgcactgcgttcacagatgccttgggagagatcttaaattgtggtc

SEQ ID NO: 19288 - DNA, 587 bp, Glycine max
  unsure at all n locations
gatctcacgatcgtacacactcggatcacacggcacaggatagcataaccgaagtgatacgatgtaaaaaanaacannnnnannnaaggagaggggnttggatggcctccgnanagacangacacnananannacncaagcccgcaccggggggggaagcgangggacggccaancgaggagcntattactgcacaacaaaaaaagaccacggaaagcaagaaggacgagcaagacgagatacacaagccatagatgcgcaccgcaagacggaaccacaagagagaacaccggccacacgaggcgcaggccgcaagacaccacgcgaacacgaacaccgcaaatcaagaagagcaaacaaagaaaaaaacgcgcgagccaaaccacacaacgccccagcggccacagggcccacaaccagaggacccccgggaaaaaaaaggcccacaagaaccccgacactgacggcgggaccacacacgagaaaaagagcagcccaaaaaggaaagagcacaagcaacaaaaaacgaagccacaccccacgcgagcgcaagcctggacagcacgggcaaaacacagaacccaacn

SEQ ID NO: 19289 - DNA, 397 bp, Glycine max
  unsure at all n locations
agcttcaatgtatatctatactcttcctcctattcctcaataaaaagtcaggatcagatttcaacacattcaaaggaatattangaaattttcttttctttattcttccttttagtcaataatttattgaacaaagttatattatttcctaataaataagcaacctcaagaagtttgctcaaacacataccaaggagtcaaggactctaattnttagaggaatcgaaggatatatatgaaagatatatatgggtattcctgagagactgtttaaagttatttgcaagaataacaaaaaggcataccaaatcatgccttttcagttccctggtaatcttcttagtattgacccattcataccanagatttcttttcagtacaaagttgcaacaaactg

SEQ ID NO: 19290 - DNA, 459 bp, Glycine max
  unsure at all n locations
tgcttctacaggatgggcaatggttgaagaaggacgcacaacctctataagatgatcgtactccccctcctcctcctcaatgagatgactcctcagccctcatgaatgaagttctttcaaagttacgaggcctccaaacctatgttggtgaacgctntgattccttgaatggtcgtatcgatgccattgatgctcgctttgaaggaatggatacccgcatcactcagcttgaggaggatgtgagttatcttcgtcggtgcttcgactttcctccaccatcttcatagatatagagtattattatctttgattntacgccatgtaacgccatgtatttggctatgtgttttaagtcattattctttgaacttagttatatttcagtatttggcacttatgtatttatgactngaatatatttaattttgacttatgaatgcgtatgtgaactttattata

SEQ ID NO: 19291 - DNA, 419 bp, Glycine max
  unsure at all n locations
agcttgttatttattatacaaaatttggtagctcttctttgtagtttccgcctttccttttgatcttctggactaatgtcattttgtatgtattctaagattgacgtcatctagttttcttgcctttctatcatcatgaagaatcttggggtatgtatcatttgacatataacactttntatttctttgtgctcttcaatattagatacctttgacaaaagtcatctcttgcattttcttctcttggaatgtaggtgaactccatattttttaaatttttctttgattaccccaattttttgatgtatttttgcaagattggttctttgacttggtattctccattcaattggttgagccaacaagttaagttcgttggacactnttagcactttgacctctatgtaagtactatttct

SEQ ID NO: 19292 - DNA, 434 bp, Glycine max
  unsure at all n locations
ntntctaagcgtttctacaccccaattttctccgcctttggcaacatctataagccaaagtacttgggaatcaatcacaaataaaataatgaagtataggaattacaaagtataaggcataaccaataaaaatcataaatacgacataaccaaaccagaatccaaacagttcaaaattcaaaaaccacatagtatcaaagcataaaagtctgaaatccaaatactgcaagataaataaagtactgaacataataatctaagtagcatagccaaataagagacatagaattagaaactaaattctaagaaggtagaggtggtggtggaagatcgaaactctgacgaatgtaacccacatcctcttcaagctgtgtgaggcgaatatccatgccggcaaaacatgtatccaatgagtcgaaacgttcaccaacata

SEQ ID NO: 19293 - DNA, 436 bp, Glycine max
  unsure at all n locations
agcttgtgactcttgtcaatttcataaaactagttacttaaaaagttgtgacttttgaaaaaatcttcataaataagtcacttgaagaattgtgacttttggaaatatatttttcgaaattagtcactggtaatcgattaccattaaggtgtaatcgattacacatcaacagatgcaactcttcattttgaattttgaaaattaaaatgtttagaagctctggtaatcgattacaagtattttgtaatcgattacacaagtttaaaatactttaaaactgtttaaacataagttataactcttgaaatttgaaatattaccgttttaagacactggtaatcgattactgccttctggtaatcgattaccagagagtataactctntggtaatgattctgtganaacttcttatgctactcaatattctggaaaaac

SEQ ID NO: 19294 - DNA, 423 bp, Glycine max
  unsure at all n locations
tgtacgagtgtgagaaacatcttcttcgaccttggagatccttgtctctatctcattgaatcgcatgtacacttgtaactccaaggtatcaaacctttcaccaacaaaggtttgaagaccatcaaacctgtccaaaatcttntgaagaagagaggaatcttctccaccatgtaagtgtccttcttcatcgatgggttgagcaccctttttcacccaagagccatcatgctctttacggtaaccaaaggatgcaatcactgcagcacctattagagaggatctcttgattggaacataaggttcaaaatcaagagggatgttgaagtgttgaatatagagggtgactaggtgtggatatggcaatggagcatttaatcgcaatgccttatgcatgagatatcagactaagtgttcccaatcaat

SEQ ID NO: 19295 - DNA, 379 bp, Glycine max
agcttttagttgtttgaaatgtctggcatagcgtcgaagaagtaattattaacggtttactgaaacttgaatgttgtcgtaactaagttgttgtgcaaatgttgtcttgccctaacaaagtaatgtttgaatgtatgactatatataattttactttgcgtccacacaccatatatgatttttcatgtttactgagaagttaatagatacatactgctttttagtgtcaataacttagataataatgtgtaatttcacaaaacttcaagagtgtgaagggaatttgctctaataagtataactttggcattacaaaggtgattatttgtttttgaacgagttctcaaacagcattggagaatgtagctatgattgggat

SEQ ID NO: 19296 - DNA, 443 bp, Glycine max
  unsure at all n locations
tgtgtttgagtgaggtgataccttcttagcatctntgatttcctatacctctcttctcaacccgccatagtaatgagaaacaggagcatgtctcagagtaacaacatacacatcaccaaaataatatcctatagtagataaataatcatattcggatgtgcctaggtaaataacaaatgtataatgattacacctcacagaacaacatgcataaatataccagatctaaacattatgcaagttattctgacctaggttgttgtcaagagtcttggtgaactggtccaaagctggagaaaccttcaacctttgcttcagaatcctcttcgtcctctgaatttgaacattctttggccacttcatgaaccgagtcaagtctctcttcgaggcaacgcccctncgattctgaacctctttgacgcttctcaacagcagatttgaac

SEQ ID NO: 19297 - DNA, 389 bp, Glycine max
  unsure at all n locations
agcttcttatatataagctacatgaagctgcctcggtaaaaaggctgcccagccttcattaaccgttggatcttcacgaaatttggtctgcaacttcacaaaaaacttttccatgatctgacagttgggatctttgagaagatgtctggactgtgctagaagcctcttaatgaagcttctggaggaagcctcttaatgaagcttctagagaaaactacatgaagctgcctcggtagaaacgcttcccagccttcgttaacagttggatcttctcgaactttggtttgcaacttcacaagacactttaccatggtttaaccgttgggatctttgagaanatatctggagtgtgctagaagcttccgttcccgagagcatctcttatttaa

SEQ ID NO: 19298 - DNA, 473 bp, Glycine max
  unsure at all n locations
ngagatgaggaagtgtagaagggtgaaacttcctgctnttattctttgaccacagagtggtacctggagatatgtcgcgagggtcaggagaccttggggacgtcaggtggggtgctattgcccaaaaccaagcttgaccaatcccgacccaacccgggcatagttagtcagtgagaacctgtgatgtacctaaacaggcgagctcctggcagtcaacagataataggaacaaagacgacaaagcatggaggcttgtgtggtggctggccagctgtgaactttgattgatatatgggatatggcctctggtaatcgattaccaagggtgggtaatcgattacaaggctcaaaaatgaagataggaggctaagatggtctctggtaatcgattaccaaggggtgtaatcgattaccaggcttgataatgaggtcaggaagctaggggagcttctggtaatcgaataccacgggat

SEQ ID NO: 19299 - DNA, 282 bp, Glycine max
agcttttattattatggactgacctcgaatcaattgctttgatagccctttcagagccatcgttccctttcctgtgattgaagctcactactagccttaactgaataaccatgatatgaccatatacttaaggaatttaggagctggggaatagtattgggaataagtatgggggtaatatgttgcattggacaacttgctatgcttgctatgactaatgatgcatgcatagccatacttgatatacgttgtatattgcatatatgttggacatgctgaatg

SEQ ID NO: 19300 - DNA, 407 bp, Glycine max
tgcatatggaattgcgatagctcctctccatcattaggatttgtttttgccatctcaaacaaacaaatcaaacgtatcaagacaattatagttgttgtttgaatacctgacccactcaagtgtatcacacaattatggattttctctaatgaaacactcttgccttttaccactctaattccccttcagttcttatgcaattcaagagattatggccacagcaaagaacaattcaccaatatgtgtaaggtaaggctggatagacaaggataaggtttaccaagaaaaacgctatcaatgtttttatgcacacgtgagggagataaaattcataattcaagaattcaagtaacaatccttcatgcaaccaatatattatcttagagagattattatttaatagtctt

SEQ ID NO: 19301 - DNA, 302 bp, Glycine max
gctttatatttaagttgagagaaacaccatgtaaatacagataaaatgaaaacactttaattccacatctacactttctgaattcatgtataacattactaacaaaatatatatatatatatatattgatagtgaatatttattgtataatttaaatttataaaaatattttatgcattagatcatggttttataaaataaattatttgttttacaatctgggatgtgaaagtagatttcctatcatgtctaatagaatcatgtttttagagggtcaatgtagataagcacatatatggacg

SEQ ID NO: 19302 - DNA, 480 bp, Glycine max
  unsure at all n locations
tgtaggattatggngtacccatcacatgtggtactaggtggcgttctggcgatggtgcacaacaagttttccacatgcacaatgcgcgcataaacccaccatccgctgttgcccacctgcaactgagctcacgtactcccacgtagcccatatcctcgttgctctcaacaccgggtccccatcaatcctcccaagcttccacaacatccaagcaaaacaacattcaaacagcacaagctatcacagccaagcgaaacagagcaaaggcagaaaactctgccaaaacaccaaccaaatcacaactgttctcacttagagaccccagtaacaattccttcgatccaattcgttaaccgttggatcgactccaaaattgtactggaagtctatagtacatgaacctacattgtgaccgttgggatctactagcatacatacagaactcattctggactactctttgcacagccaaccacacac

SEQ ID NO: 19303 - DNA, 191 bp, Glycine max
gtatcgtactatgacgtgaaatatcctgtataatctattgacatgatagattgatgtgttctctgtgctatcatgatgtcagtcaagtgtgttctggccttgatcacgtagccgcatgctttacttcgaacgatcaattgagaatataggtctgattcgtacatattgatatgagcaggcgagtatttccc

SEQ ID NO: 19304 - DNA, 412 bp, Glycine max
tgtagaatggctagacatgatacatgtcagggtttggtttggttttggataaaagggatgccccacattatttccatgacacaaatgcaaaaatgatgatttggaaactttacgcaaaactggtcatgcatgcacctatgcggacactcaagtgtcaaatttttatggccatgtgatgctagggctcaggattcgtttcctctattctaatcaacccaatgtttccaaaatatgttcttttatcaattcgtgcattcatccgagttcatttcgggcgtccggtgaaatttcacagcattcacccttcatgtgtagacacatattccacaaattggttatgatcaatgaactttttcaaagacaatgtggaaatcgtctcttttcaaaagcatgttggttttcagcttaacaa

SEQ ID NO: 19305 - DNA, 387 bp, Glycine max
tgtttgcttatgtctttgagaagcgggagaccggaagacgccatggagcgatgatatacgaagaccctctcccgtcgactagtgctccggaaggaaacatcaagatcgacgggacattcctcatggatgtaaggggggttatgaacaacgcctgtgatcccgttgctgatagatatattcccacatctagcgatacatgagtctgcatcatctcttcccacgccttgagaggaaaccgaggacgatcatctgaccccataggagaattcgacatctcgggcagcacaacctgctacatgtgacctccatgccctgataccaaatttagtcggattaagagcccattgtgcatctgccgcctgaatgccatggccgaagactacaagg

SEQ ID NO: 19306 - DNA, 473 bp, Glycine max
  unsure at all n locations
tgcgcatactgcgtcaccaacacacagctggcttcgagacttcttagacgatagaacacagcaccgctattctatgtncagcaccttgcgcaccatacatgcgttacctgtacctcaactgtgaatcgagttcatacatccccctactatcccattgcttatgttgtatacatgctccttctacaaactttgaattgcgcttattccatgcccacgcttaataggattactaatgcacataccttctcacccctcatgacaaagcattggcttaaatctatgcctatacacgaatctaaataacaccttaatgtgcttactgagatgtgatactatgtcattgcccacatgccaaagcctaggcaaaactcataatataattgcaagataattatactgaccataggttgtgacggtgggtatataggggaaaacgcgcttaatcactctcaccgttctttcccaaccatgcg

SEQ ID NO: 19307 - DNA, 372 bp, Glycine max
  unsure at all n locations
tagctttgagtgtgccgactgaagccaaacaagcaacgtttggtcatgcactcaggattaacacgatccatgattcgatcatcttctgtgagaaattgacgcggaatgactggattaaccacaaacctctgcaacttatgcgatttaatgactggttcaacgtgttgtcgccagtgtagatagttggaatcatccaatttctcagctatcgttgtcggaaatgaatgcgaactgaaaccttgagatgacgaagccatgtatgtgaaggtgcagctcgataaactgaagagaggagcttttatgaagtaacaagctntgataccatatcanaattagagaactaagtgaacaaagagaataagagaaaacatt

SEQ ID NO: 19308 - DNA, 460 bp, Glycine max
  unsure at all n locations
tagaacagtatacttggccttcatttaactgtctttggtgtcttgttggccacgctcaacaaagtactttcgacacctactgtacattgatttcaccaatgctgttatgggaatgttgcgacaatcctttaaaaccttattgatacattctgagaggttcgttgtcatgtgaccatatcgacgtccttctctatcgtaagccatcgtccatttttcctttgagatgcgatcaatccatgttgctatggctggactcagttcacgaaatttttctaaattttgataaaaaatgtgcttgcaaggagtgtatgctgcataaaattagttatgaataacaattctaagtataaatgaaagtaaaataaacgtgaccatcatatatgaaatcgtacccaatttcttcaacatttctgtntgtttggcattattgaatatttgattgaagttgcttgctatgtgt

SEQ ID NO: 19309 - DNA, 393 bp, Glycine max
agcttaccactataggaagccatggataagagcatgaaggtaggagaagatgagtggagggagaaggagaaaaggagcacgaaattttatgcctcaattgaagtctaaaatttgaagtgtaattctctaataatcaaagttgaaaaaaagcacacacatggcatctatttatagcctaagtgtcacaaaattggaggaaaatttgaatttctattcaaatttcacttgaatttgaaattgaatttgtggagccaaaattttactaattatgattagtgaattttagctatgtttcaacccactaatccaagatcaagtccaagattcctcactaagtgtgcttaagtgtcatgtggcatctaaagcatgaaggacatgcacaaagtgtgacta

SEQ ID NO: 19310 - DNA, 362 bp, Glycine max
tagacgcactaatttaccatacgcacagataccaaagatatttccgtccatacctaccatagctaacactgaaccatatatgatgcgtacaacttctgaagaacactcagtgctcatggaaactcaagagtaaaacatagctaaaataccactgcaatcaaagtacataatgaggacattcactcactatattaaaagctcaactgctactataccatgcccatgctaaaattaaagataaaagataagatcttttttctacaattttcacagaatctggctaaacaaaaccatatgcaagataatagaagttaccctaatggcactatggtgtgtaacaacgcgtacaatgcgagcacctc

SEQ ID NO: 19311 - DNA, 396 bp, Glycine max
agcttgacccttacgagtcagtttagtcaaaggtaaagctaacttggagaaaccttctatgaatctctgcgagtatcctgccaaacccagaaaactcctaatctctaaaacagatttgggactctcccactcaagaacgacttctatcttagatggatctacagctatgcccccttgagatatcacatgccctaggaaactaactttctctaaccgaaactcacacttggacaacttagcatagagttgtcgatccctaagtgtatgcagcacaatcctcagatgttcttcatgttcctctctagtcttggagtataccaaaatatcatctatgaataccaccacaaaactatcaaggtaagggtgaaagactctattcatgtagtccataaacac

SEQ ID NO: 19312 - DNA, 426 bp, Glycine max
ttgtgtaatcgattacacttatttggtaatcgattaccagtgactgtttctgataaatcaaaagatgtaactcttcaaaaaggtttttgactttttcaaattgttttttgacttcttcagaaagtctaaccacttcaagattcgtggcctcttcaaatcccttgtttcctgaaggaaattccattcacagaccacccattttcaatggtgagggttaccattattggaaaacccgtatgcagatattcattgaagccatagatctacatatttgggaagcaatagaaataggaccacacatacccactgtagtagatgtaagcacaagcactacaacccataaacctagagataagtggacagaagaagataggagaagaatccagtagtcaattacatgggatatcatcccaggaacaatttcag

SEQ ID NO: 19313 - DNA, 408 bp, Glycine max
  unsure at all n locations
agcttattattggacatttgaatgaaatgaattttgtcaaaattttgttaaagagctaccagttaaattacgaaaaaattataatatattatttttttgtaaaattagccatgagagttgaaagatctaaacgagaactttatatatccatctttatgagtgaaatttcttcaaatcttgaataaatgaacaaaagaagtaggcaatataataagctataaagaaaggaacaaacctctattcttggaattggatgaccgtgagttgtgatttgtctttacttgtcactattccaaatcgtaagcaataaactgaatgtgagaaataaagagcagattttggaagaaagcaganatatgttggcaagctaaacatgatttaaggatatggatggcgtactactagtcc

SEQ ID NO: 19314 - DNA, 383 bp, Glycine max
  unsure at all n locations
ntacaaagcagcagcttcaaaacgagcgaagtattcataaaggagtatgctgagttgcaaatataaagaagaaaagagatgggaaaaaagagtacttgctgacaaacaggagctttcctcattcttagttcgtctcacaacaaaggtaagatccttaatatccttatcggttacttgcgcccagtgttttaatttatccattgctgaaatgaatgcctgtaaataaatatatttgcatgataccaatatgtctgttcctaactctttttttttttttaattatcaatttgatacccaatatatattaaaagatcttggcttgtgcgtgctgtttggatgggttaaagtggtgatgatggagtttgagcagtgacgttgggggc

SEQ ID NO: 19315 - DNA, 414 bp, Glycine max
agcttaaacattcactttcgagcctctcgatatgttacgggactcaatcaaacatccgagaaaaaagttattgtcgtttgaatttgctcagaggttcaacattcaatttcgagcgtctcgatatattacgggactcaatcagatatccgagtaaaacgttattgtcgtttgaattggctcagaggttcaacattcattttcgagcgtctcgatatgttatgggactcaatcagacatcccagtaaaaagctattgtcgtttgaatttggtcagagattcaacattcaatctcgaacgtctcgatatattacgggactcaatcagacatccgagtaagaagttattggtcgttgaattggctcagagcttcaacattcaatttcgagcgtctcgatatatgacgggactcaatca

SEQ ID NO: 19316 - DNA, 422 bp, Glycine max
  unsure at all n locations
ctgagccaattcagacgacaacaactttntgctcagatatctgattgtgtccagtaatataacgagacgctcgaaattgaatgttgaagctcttagcaaattcaaacatcattaagtatttactcggatgtttgattttgtcccgtcatatatcgagacgctcgaaattgaatgttgaacctttgagccaattaaaacgacaataactttttactcggatgtctgattgagtcccgtcatatatcgagacgctcgaaattgaatgttgaagctcagagccaattcaaacgacaataactttctactcggatgtctgattgagtcccgtaatatatcgagacgctcgagattgaatggtgaacctctgagccaattcaaacgacaataactgtttactcagatgtcggatgggtccgcgtata

SEQ ID NO: 19317 - DNA, 333 bp, Glycine max
  unsure at all n locations
agcttgaactatatctagtgagagtgtgaacttaaactgtgagtgaacgactaactgtgagtaatgatctttgcatgaatctctaaattttagaatgaaatgtataaatgatgacatgatgaaggccatgattgtacatacacaagctcttttgaccaaatagcttaccttaaatgataattgcatcctttgctccctttttgagctgaatgatattgtcaaaaaaaaatttgaaccctgaacttaaataaatatctcctgataccttgcttcgattctaggagagcatatggtntaagacaatttactctaaatttgggggaggaaagtcaa

SEQ ID NO: 19318 - DNA, 448 bp, Glycine max
  unsure at all n locations
tcagcttcaagctnttatcttagattaggaatattgtgtaatggtcctttgttgggcttttgtgatttcttctattattgtgtaactagaaccttgtcggacgaggaatggtgaattttctgtagagtaagcttatgagtctctcagtctctcaagccttttaatgcacagcctactcacccagtttttagtgatagtcactggtggaaaggagccaagagaattcaaggatttctttggcgggtaagtcacaaaggccgcttacaaatgctagaagattgagattgggattatctaaaagtgatttgtgcattgtgtgtgaatcccatagtgaaagtctcatatgacaccaattcggaaccatactttggttggtcaaaacttggagctgttcttttgattacatgattggcttgaatggattcactataacttccagaatgttgcc

SEQ ID NO: 19319 - DNA, 368 bp, Glycine max
agcttattgataaaatacttacttgatggtgatgaacaaaagcacgaaacggaatcaaaaaatacgaaaaatgatgaccctagggctgccaactcgtaaatcccgtgggtatggcttttgaaaggggggaaaagaggtttttgaatgcaaaaacgtcccccctttcgtcattcttataattcgatgcacggatggctcgcccaggcgagctaacctgcattttttttttgagaggaacattaaccatgtcccctccttccttatgatttaacgtcttgcttaacttgaacttacttaagttagagttaggcgttgattacttatttttaaaacaaacaaatagtaagacaactgcgaatacaaaggat

SEQ ID NO: 19320 - DNA, 425 bp, Glycine max
  unsure at all n locations
tctccncttatttgctataaatagggggagaagtgaagattattatggttcaaccccttaggcacttctctctctttcgaatttgctgaggaaaattatttccgtgaagaaaatccaagccgaggcgcttccgtaacgtttccgtgagtaattatgcgaagattctcgaccgttcttcaaagattcatcgttcgttcttcgttttcttcagtcttcaacgggtaagtacctcaaaccaagcttttcaattcactctatctacccgtggtggtccacattntgtttcatgtatttttattctcgttttcatttactttntatacccccttttgacgtgcttaagccgtttatttaagtcatttctcgcttaatctaaaaaataaaataaatttccaccgatcgtttgaatcgcatcatcccgtaat

SEQ ID NO: 19321 - DNA, 584 bp, Glycine max
  unsure at all n locations
acacgactacaaccaganagagccggtancaaccgatctcaatataatttacanaanacaagagtggtttgatgcntcctggacnacggacctataaaactcagcgtgagacagagctctcttcttgatcctctcacaagctcattggatataccccacattcacttacgaacgccgtgttgcaaaagcaacgcaggtatcactatcaacggtgatgttactttcacgtagcacataatactgatctaccatcattcacataatatcaatcaacagcactcctttcctacctcctattacctcccgctatatcatcggaatcaacggatcacacatctacangcgagacgatgagaacgaatcattatgtgaagaataacaaaacagattcctaagtactatgaaatcaatgccagaaagacacacaccttgtcatcgcttataccaatctgccaagtaccaaggccaagcgtgattgaccaaatagatatagcgaccatctagatgcttatcctctcttacccagaacaaataccgacacaatactaatgacagtaacgacactccgaaacagagatcgatcg

SEQ ID NO: 19322 - DNA, 421 bp, Glycine max
agcttaacgcttatttccttacgaacgctctcttgcacaagacatttatctaagaaaaatgcacccatatacaatcaaggcagcttcgttacctatattatttacacgtacttccaaggtgtatctgttacttacatcacacacatctacttggctaaatttacatacatgcatactcaaagcatattggggtacccaaaattgcacatgtgcacatcatcgcatttcaaatacctatacatacacaaacttcatgatgaatcttgactatctacacaataaggtgctacattccatgcttctttcaagtcttcgctacctaaacccgcatgcaaattcaagcatattaacctttgctgactaaaatagttttcacattagagggtctacatttttttggatgtatttctttactaacatg

SEQ ID NO: 19323 - DNA, 399 bp, Glycine max
  unsure at all n locations
agctttccttttgctcccttcctcacttataccctcacatgtttctccctctttaacattttcttacttctggttaatagatcttcttcacgcaaagagatcgtaaccttactctcaccaatttccagcaccctaacaccgctcatttttactatgcatcacatttgttttttttgttatcttgtacttactcatggatgtaagggttactcatggatgtaaggagtcaggtaaattcgctatttaaatgattataaccctccatcaatgtaattttgggcctctactggcttattccttaacctttgtatgcattaaggctcaaggaatccatgcatatcaccaagccctaactgttgacttatttaatccatatancctaaatgtggaaatattaat

SEQ ID NO: 19324 - DNA, 437 bp, Glycine max
  unsure at all n locations
ntcaatagcaacagtccattntcccttgactgagatgaaatcaccatcttccaattttactttggaaacaatggttttgtcaagttctttaaagaggttcaggtcattggttatatggtttgtgcagccgctgtctattaaccatgaatcactggaactattgcttgtggcaaagcatgttgtgacaaagagttgctcatcttcttgttcctccacaaccacctttgcttcctttgatttgaacttgcatattcgctctacatgtcccatattgccacaatttccgcacttgacatctggcctccaccaacattttctttcaggatgatttgtctttntgcaatgcggacaaggaggaaaggtctcaccttgctgcttgttggagccttctagcttattgttcctccattagttgttcttcttgtctttgccacctc

SEQ ID NO: 19325 - DNA, 175 bp, Glycine max
tagctttgagcttattcacacgacactaatgtgttgctcggatgtctgattgagacccgtaatacatggagacgctcgacattgaatgatgaagctctgagcctagttccacgacgataactctttactcggatgtctggttcagtcccatacttcattcggacgctcgcaattg

SEQ ID NO: 19326 - DNA, 411 bp, Glycine max
  unsure at all n locations
tcagaattcaatttcgagcgtctcgatgtattacgagactcaattattacactccgagtnaaaaagttatttgtcgatgtgaatttggttgagagcttcaacattgcaatttcaagcgtcttgatatattacggaactcaatcagacatccaagtaaaaagttattgtcgattgaattatgtctcagcgtcataattctatttcgagcgtctcaatagattacgggactgaatcagacatccgagcaaaacattattgtcgtttgaattatctcagaccttcagaattcaatttcgatcgtctcgatatattactggtctcaatcaaacatctgaggaaaaaagttattgtcatttgaattcgctgagagcttcaacattcaatttggagcgtttggatgtattacgggac

SEQ ID NO: 19327 - DNA, 380 bp, Glycine max
  unsure at all n locations
ttcttatccttaacacatatccaacttattacatcacaacagattaattattaatatctaaatttagtttctgttataattttaattaaaatatttaattacataattagtgaaaaacacggagctataatcttttcatcatgattttctttaatctttgatatttttttttcaatttttatgcttttcattattattcagtctatcctatttttctttatttaatatcttccttgataatcttacatcctttataatttatactctatcatttttatatctaaatagaatcataataatttgtttaacaaaaaaattcttatattataactcacaagctantatgtgaaagatgaatacaaaatataatgtatgtattc

SEQ ID NO: 19328 - DNA, 205 bp, Glycine max
  unsure at all n locations
ntaattaagtgtatcacttttgttattatcatcatgcctttgttttgttaacttgaagttattttttttttttaaatacctgaggtcaatatccaagatatactaaattactaatatagatatacccaaacacacatgaagctatctgatttgttcactcagtttgtcccccctgttatggatgcataatagagggggggagggg

SEQ ID NO: 19329 - DNA, 392 bp, Glycine max
agcttcctctttaagcttcttatccaagccactctcttggtggtgaagcttctccttccatgacttattctctagcggatgacgtctcctctaacctcttctcctttatctttcgctgcaattccatggctaataatcaccattgaaggaccttattgaagctcaaagatccagcctccatagaagcttcataagcaagcttccaacaagtggtatcagagcacaagagcttcaagtaggtgctccttaaacctccactaattttcagctttactttctcctccattgttgttgcttcgtttctctccatgtatctcctcacgtgtcttgtgctgaatgttgtaacataatttttagaagttccaccgattagcttgctataaagctagatt

SEQ ID NO: 19330 - DNA, 394 bp, Glycine max
tgtcaaagctgacaatatcttcagatatgtggacaccgggaatctaatactgacttcccagtaggttcaaacgtgactcaggtgtttgttgatcaactaccgtgactaaacacccttggcatagctttggctcgcatagattttgcaccatagggtttgaacgctccccacactcaccctcgcggcactgagatccttatagtccttgagggtactctttatgttggatttgtgacttccaatcaagatggaaatcgcctcttcaccaaagtgctgaacaagggtgatgtgtttgtgttcccaattggtctgattcatttccaaatgaatatgggaaatgggaatgctgttgccattgctggccttagcagtcaaaatccaggagctatcacta

SEQ ID NO: 19331 - DNA, 398 bp, Glycine max
  unsure at all n locations
agcttgtagtttattcgaacgacaataacatttcactcggaagtccgattgagtcccgtaatatatcgagacgctcgaactttaaaaccgaagctcgtagcagatttgaacgacaatgacatttcactcggaagtcctattgagtcccgtaatatatcgagacgctcgaaatttagaatcgaagctcgtagaaaatacgaacaacagtaacttttcactcggaagtccgattgagtcccgtaatatatcgagacactcaaaatttaaaacccaagctctcaganacttctaacgacaataacttttcactcggaaggccgattgagtcccgtaatatatcgagacgctcgaaatttaaaaccgaagctcgtagcaaattcgaacgacaataacatttc

SEQ ID NO: 19332 - DNA, 468 bp, Glycine max
  unsure at all n locations
ntggttntaaatttcgagcgtctcgatatattacgggactcaatcggtcttccgagtgaaaagttattgtcgttagaattagctgcgagcttcggttttaaatttcgagcgtctcgatatattacgggactcaatcggacttccgagtgaaatgttattgtcgttcgaatttgctacgagcttcggttttaaatttcgagcgtctcgatatgttacgggactcagtcggacttccgagtgaaatgttattgtcgttagcatttgctgtgagcttcggttttaaaattcgagcgtcacgatatattacgggactcaatcagacttccgagtgaaatgttattgtcgttagcatatgctgcgagcttcggtattaatatttgagcgtcttgatatattacgaggactcatcggacttccgagtgaaatgtattgtcggtcaaattgctcgagcttcggtttaattcgagc

SEQ ID NO: 19333 - DNA, 432 bp, Glycine max
agctttcaatgtttataaaaaccaaaaaactttggaaagcttttggcaaaaggaagaagaagaagaagttcaaagagactcagaaatcaatgtggaaaacttgcttgtgaaaagaatgaattggaaaagattgattgatagaatgaatgaatgaaaatgcaaaacaaagtcttgcttttatagactcttcatgtcttgtcaagaagaccatttagaagagttataaattttagaaaaacttaaaactaatttgaaaaagtcaaaaaccttttgaatagttacatcttttgatttattcagaaacaatcactggtaatcgattaccaaatcactgtaatcgattacacaaggcttttatgtgaaaggatgtgactcttcacattcgaatttgaatttcaatgttcaaaggcactggtaatcgattacaaaaac

SEQ ID NO: 19334 - DNA, 421 bp, Glycine max
  unsure at all n locations
ntaatggcttagtgaggatggagaggtgcaagtaaggaagcaagtagagttggatatttccattggaaagtacaatgataaggtgctntgtgatgttgttcctatggaggccagccacttactcttgtggagaccatggcaatttgataagagggctaatcatgatggtttcaccaacaagatctctttcacgcatcaaggcaaaaagatagtgctcaaaccgttgagtccacaagaagtgtgtgaagatcaaagaanaatgagagagaaaattcttcaagaaaagagagaataagannaagagagccaaacacttgagagttcataaagtgaggacaaaaagagggaaacacaagagaggaaaaagatgagtgaaacatttgaagtgagggagaattntctagctacaaaaggagagatc

SEQ ID NO: 19335 - DNA, 405 bp, Glycine max
  unsure at all n locations
agcttctttgagataacttcattgagaagctagagcttagctacacatccctctaataactaagctcacctccttgagaagcttccttgagaagattcataaagaagctagagtttagctacacacacctctctaatagctaagctcacctccttgagatgagaagctagagcttagctacacaccccctataatagctaagctcacccccattccaaaaatacatgaaaatacaaaaaaaagtccctactacaaagactactcaaaatgccctgaaatacaaggctaaaaccctatactactagaatggccaaaatacaaggcccaaaagaaggaanaacctattctaatatttacaaagaagagtggatccaaccttgacccatgggctcaaaaatctaccct

SEQ ID NO: 19336 - DNA, 459 bp, Glycine max
  unsure at all n locations
gtangattatggngtacccatcacatgtggtactaggtggcggtcgggcgatggtgcacaacaagttttccacatccacaatgcgcgcataaacccaccatcccttgttgcccacctccaactgagctcacgtactcccacgtagcccatatcctcgtttctctcaacaccgggtccccatcaatcctccgaagcttcccccaacatcaaagcaaaactgcattcaaaccgcacaagctatcacatccaagcaaaacagagcaaaggcagaaaactctgccaaaacaccaaccaaatcacagcttttctcacttaaagaccccagtaacaattccttcgatccaattcgttaaccgttggatcgactcgaaaattttactgganatctttcgtacttaaacctgcattttgaccgttgggatctactagcanacatccagaactcattctacattactc

SEQ ID NO: 19337 - DNA, 292 bp, Glycine max
  unsure at all n locations
agcttcaacattcttagtctttacctgcttaactaacactttactcttcacgccaaagttaatctagaattgtgaccttttgttagttctttcaccttttcattttaatagttaatatgctttattctgtttctcagatagatcaactagtcgccagatccaaagaaagtataagaagatcgttcataacaagccatatgtatatgtgttaaggttttctttccagttttgcagtctgtctttttctttctcaagcttgtgaatcaagtntgttctgtgcgactatgtacta

SEQ ID NO: 19338 - DNA, 446 bp, Glycine max
  unsure at all n locations
ttcttttcttcactggttcttgttatacaatttgcactattntataattatagaaaacagtacgtgagagatcaaagtcagattccaaggtggccatgctaataattgaaacatttaagtacttaacaccttagcaaacatgaccagaaaagggctttgatttaaattcttttcatgccatattttaagtgattttccctaacttgcaatatgccccgagaacccccttatatgaattctacttcttaatcctatcatattntgagttgttttaaacttctatttttcttattaaataatgtaatggtgcagcctanaaaggtaatgtcgtttgaggacgcanagcaaagagcatgccagtggaaaaaggcaattgaaggactccaaaaccggtgaatttattctggttttgtgaacatattcttttagatatcctcttattgttc

SEQ ID NO: 19339 - DNA, 397 bp, Glycine max
agcttgtccgttggatgcctacccattacccattagaaatagactagtagatagggcagcaagaccctgcctacttagcttcttagatgcatactcagggtacaaccaaatacggatgcatccacaagatgaggagaaaacaaacttcataacctagtcgtctaactattgctatcagattatgccattcggcctaaaaaaggctagctccacttaccagcacctaatggacatgatattcaaagaacaaattggaaagaaaatggaggtatatgttgacaacatggtggtaaagtctaatgatgcagaatcacacacctatgactcggaagatatatttgcaaagatctgaaagcataacatgtaactcaattcgaagaagtgtatgtttggggta

SEQ ID NO: 19340 - DNA, 158 bp, Glycine max
  unsure at all n locations
gttgaacaatgaactattcttggaagagaaagtattgaacattttctctctataaagatgaacaacaatgaatgatcaagttctgtatgtctcgntttgtaaacaagttgttattgaaattcatgccatggtcacatatttatactcaattgatgact

SEQ ID NO: 19341 - DNA, 400 bp, Glycine max
  unsure at all n locations
agcttttcgattcattctatgtacccgtagtggtccacattgtgtttcgtgcattattattctcgttttgtttactttttataccccctcttgacgtgcttaagccattttacttaagtcatttctcgcttaacttaaaaataaaataaattttcaccgaacgtttgaattgtattatccgttaacttcggttaaaataaattccgaccgttcggtcatgccgtaaccacgttggaaatcaaaangaggtcttctaatacatatatatctatctcncnnngacatcttttagtaaaataaagcggaaaatcaatcggacattttctctttgggatttctcattcttaatcgaattgattaataactaaagtgaaactaatgctaaaatcaactcgcctag

SEQ ID NO: 19342 - DNA, 382 bp, Glycine max
agcttgttatatgcacaattaaggtacacacttttgatattcttttgctcagacttggcacactattccagagcgcctatttcgggaaaaaagccctagaagcagtaagaggagcagcttgagcattgaagcctatgttttggaatttgtgagagattactgagctggatagtgagtgtgagatgttgagaagaggaggacgaatcccccatcttgtgtaaggaactatcattctctgcttttagtctcatttattgatacggttgctttgtaatggctggctaaacaccctagttggggatctatgatgaacaactgatgtcaatacttactatctaactgagtatatattgtgagtgcagtgcttcctctcatgcttaat

SEQ ID NO: 19343 - DNA, 463 bp, Glycine max
tgagctatcagaagacttgcttattcatttagttctaatttatctaccttcatagcttagtcagcttaagatctcttataacggtcggaaggagaaatggtctcttaatgagttcatttcatactgcgtgcaagaagaggaaagactaaagtaagaaacgactgaaagtgctcatgttgtgagtacctctaaagacaagggcaaaagataaaggactgatgagcccaacaatgaagctgcttagggtctaggacaaaatataaaaaatcaaggtgacaactatttcttttgcagtaagcctggacatgtctagaagcaatgtaaatgtaccatatatcatgcttggcgtgcaaagagaggtatgtttcttactatggtatgatctgaggtcaatttaccttcagtacctacaaacacttggcggtagactctggtgccctactaacatcagcgtttcaatgca

SEQ ID NO: 19344 - DNA, 203 bp, Glycine max
gcctcgctcgtttcattattcctagctataatagagtgctgcactgaaacatattctatctatctatgcagagtaatgcccatgaccatagccctataacgacttgtgggaatgcttggactctacctagtacctacagcacactgcctactgacctgctaaccatataaagcagaccttccattggtcgaacataccatgca

SEQ ID NO: 19345 - DNA, 410 bp, Glycine max
  unsure at all n locations
tataaaactaagcctgctccctaggcaggaccatcaaccatctagcaattcttcattccatgttagcttcctttctccctttctttcttatacatagtcttatggtgtacccctggccatctttgattttccttttatctgcacccctggcttctgtatttggacctctggtttgtgttctctgttaactgccccttgttcctcagcttttgtaccagtattacgtatggtggtataaaaattacaacaaagggagcataatgtagaatgttcttattatgtcgtagttttgaactgcataaagagctttcntaagagtgtatattatgctaatgaaaaacgatacgttcactgcacattcaaaaatcatttatgttaatctctaagtatgcattataatattcataatt

SEQ ID NO: 19346 - DNA, 380 bp, Glycine max
  unsure at all n locations
ttatcttagatcttccatgcccagctgataatgtcaatcctgatactgctagaggatctggtccccacaaagacaaatttcacagttacctaggggtggtggctagagatgaaataccaattgtccactccaattggaatcttgtctcggacaatctaaagaacctaatttacgaagacattttggtaagtccttttaatacggtgtatctttatcattgcctttataacacatttttacatcactaattaagttggtgttatttaacacatttgttgtatagcagaaatntgacatccctgaacgtgacaatgcgaaacaaaaaggtcatgtctatagtggcaactacatggaggcaatttaagtcttcgttgacatct

SEQ ID NO: 19347 - DNA, 475 bp, Glycine max
  unsure at all n locations
ntgtctttcttagtactcataattctacattaattatttttcttgatgcatgattaacaaaactttaacatgcagaattgataagaggtaaatgtcattgcaacaatactatgtggtacattcttagtatgatcacccctgcagaaccataaagattgtgaataacaagtcaacatcacttagtgccatggcaatggtaaagccaattacgccatttccttaggcctcccacaaagctcttaattctatatatatttataaaaaaataaatcaaatttaaattatcaggtaatatattctattgcattatctattattatttgcgtagccagattataaaattttaattacacatagatatattataaatcatttgagaagtttataattcatttgacaattatagaaaaattagtttccatctactttaaatcttgtaaaatcacacttaatgaatataatgattcaatttata

SEQ ID NO: 19348 - DNA, 383 bp, Glycine max
  unsure at all n locations
tagcttggtgatctttgctgctggttaacactgagcttgcccaccctaccattactaagcatttcactgctaatagaagatgcaatggatagctttttcttgcatggtgaatagctatcaaagttcatgtccacattccccccagtccttatttttggggagcttgttgatcttgcttttgcttttgctgattctgttgcaaccatgtatgctgganttgcatgatagcttaattatgagtggtcctctcccactgaacactgcctcctatgaggaaaagatcttcttgaaccaagtattggagaatccaatccttcaactggattttgcctctgaatattacttctcagcttaagttgccttcctccatattcctccccaac

SEQ ID NO: 19349 - DNA, 458 bp, Glycine max
  unsure at all n locations
tagcattagcatgtgttgacactggatcactaatcattgtgtacgtgtttgttactttagtggatcctatcaaagaacctccgcttataactacaaacatagttctgtctgtttttgttgtgtattgtcatgtggacaaagttccatgccatgtttgagacatctaagattggcgtcttgcctttgcccagtattattttttgcaacatcttcctttcttaaccttgtcattacctcgaaattntaatatggcaacttactcttgtggaaaataatttttaagaattaatataacactttaaaattaaatttagaatattaaaaaaatataaaacatagatataattctttaggtgctattgatacttttctcctgttagaattaaaatcgtacttcagtaatccacataataaagatatacatcataaaattacatcaattatcatagtgaaactct

SEQ ID NO: 19350 - DNA, 425 bp, Glycine max
  unsure at all n locations
agcttttcaattaatctttggctagctacattagtgcaattacccctatcaataatcaaagagcatattttccccatgaccatgcacctagaatgaaaaatgttctccctttaagtttcatctctatccttacacacattacccattaacctcctaaccataaaaagatcaccttccaggggttgtacatcacattcattttcactctcactagaagaactagaccagctagaagaagataaactaatgatatccccattacccaacacaaccatagtccttttgctaggacattgngaggcattatgaccctttcccaaacacttanaacatttaatagaacttacttttgaagaagtaggagtagggttagaaccacaccatactacgagagaggttccctcttttaccatttttaatatccc

SEQ ID NO: 19351 - DNA, 480 bp, Glycine max
  unsure at all n locations
tcaatgatntaacaatngactnggtagaattgcccacgtcatggttgtcatgcactgccgcattgccacgtggaatgttgaaacttgaaatttattatgaaaatattgtaccctataataacagcgtatgctaattgaattgtttaaaattaaattttgattgtttatataaaaaattatcattacaaatttttaaatttaaatccattcaaaataaaaataaaaaattactcaaaaaactaaaatttaaaataaattatttcttttttatttttaaaatcaaaccaaatcgtaacacttatattaatatttattattttaattntatgtgtgtattattntaattttataatattnttatgatattatgtatatgaaatttatataatatatatttttttcaaataactttctaaagatatanntttatttanatagatgaaaatttacatatctntatcatanaagggttaatatatt

SEQ ID NO: 19352 - DNA, 309 bp, Glycine max
agtttcatgtttattcaagattgattcaaagaagttctaatgattacaaatgtgatgacaaaaagctcacaggttaataacacttcatgataacaaagatgatgatctcaagaatcaaagaatgagttcaagatgttcaagattgaatcaagaacatttcaaggttcaagaggaaatttgatttctagattcaagaatcaagagaagacttagtcaagataagtatgaaaacatgttttcaaaaactgagtaacacatggattattctcaaaacctggttaccaaagagtttttactctctggtaatcg

SEQ ID NO: 19353 - DNA, 438 bp, Glycine max
  unsure at all n locations
tctcttagaccttaggcaaaccttcaactcatccttttttatttttctgtctacttgagataggtccatttcctctctccggagcttaaactcgctgctactgccccacaaagcccctcggaatttgtttcggccatgttcttccctacgagcccttttggtctcttgttccaaggccttggtggtagctatatttacatctctcagttcggcattctcttttcggatcttaagagttgctgatttgaacctttctttgactatttgggcttgctcgagttctaccctaaggacctgcacctcttcgtcttccttcggtgcctcaacttcctcccctttagtggttctcaaactcgggagccaatccaaaccttgtatgtgggctntctaccacttacggtagccgtcgatgggcctgatgatactgcctctgagttc

SEQ ID NO: 19354 - DNA, 404 bp, Glycine max
agcttgaatttgaacaacagaagctctcgagaaattcaaatggtcataacttatcacacgaaagactgattcaggcgcataatatatcgagacgctcgaaattgaacaacggaagctctcgagaaattcaaatggtcataacttttcaaacggaagtccgattctggcgcataatatatcgagaagcttgaaattgaacaacagaagctctcgagaaattcaaatggtcataacttatcacacggaagtccgattcaggcgcataatatatcgagacgctcgaaattgcacaacggaagctctcgagaaattcaaatggtcataacttttcacacgaaagtccgattcaggtgcataatatatcgagaagctcgaaattgaacaacgaaagctctcgagaaatt

SEQ ID NO: 19355 - DNA, 439 bp, Glycine max
  unsure at all n locations
tctggatatattatgcacctgaatcttacttccgtttgaaaatctatgaccatttgaatttctcgagagattccgttgttcaattccaaccttctcgatatactatccgccggaatcggacttccgtgtgacaagttatgaccatttgaatttctcgagagcttccgttgttcaatttcgagcgtctcgatatattatgcgcttgaatcggacttccgtgtgataagttatgaccatttgaatttctcaactgcttccgttgttcaatttcaatcttctcgatatattatgcaccttaatcggactaccgtgtgaaaagttatgaccatttgaatttctcgagagcttccgttgttcaattccgaccttctcgatatactatgcgccggaatcggacctncatgtgacaagttatgaccatttgaagttctcgagagct

SEQ ID NO: 19356 - DNA, 382 bp, Glycine max
  unsure at all n locations
agcttcatactatgctttattaatggngggcggaaaggcaaatgtcagtgcctgctcaacaattaatccatttgatttctcatggaaagatctatctacatatattgtaaataatatctcccgttatagattttctaaggttaattcaacaatggaatcagctagcgcatgtgcattaaaaaggatttgatgctctgaaacctctattgcccaagaaaccatccttctcgccaaatcaagtcggtgaagaatttgtcgaatggactaatcaattcacaccattatccggtgtgattggaaatatagtcgtaagcgtcttgttgccattactaaagcanaaactaccttctctaatgatctttgaagttcgaccccctgaagt

SEQ ID NO: 19357 - DNA, 442 bp, Glycine max
tttctttcacaatcaatttgtctactgactaacaattttaaatgcatgttcacattcttgttctttcttagtctaacatacacacttgctcaaactcatgataagaaacacaaactccatcacaatcatgcacttaatttaaaataaaagcatataactattttcacaaaaagataaaaagtgttttactaccatgtcatcaaaaacaagtcaaactattcaaaatgcttcaggataagcaaactaactacccataaataaaactagcagtgtatgtagacctaaaggaaatattgtatgaaaaccaaaattgtaataataataataaatcaaaaagcaaaaagtattatcaggaatcaaaattcatgtgactggtcttggatatcctgtgcctgaacatcctccttatctgtcaaatgcaatactggagtagtcggaggag

SEQ ID NO: 19358 - DNA, 391 bp, Glycine max
  unsure at all n locations
agcttgagaatacagaatgttatggttgaaataagcaagataaatattggaagtttatctagataattacctgacttacatgtgtgattctaaatctaatcattatatgtagaagcttatctcagataaaccttcaatctctttttatgttctttagtgaggaactggtaaagattcaatgctttgatacaatctggtgagtgagtgtccgagggtagataattactgccatgtatttatgttactcttgcatatacaccactacactcagtctaatacacccttagcttanggtacaatanaagagtgattcctagttccttagtttttcgaanatatcttanattagcactaggaaaaanatactgtatggagatcttcatatcttatg

SEQ ID NO: 19359 - DNA, 433 bp, Glycine max
  unsure at all n locations
gtcggcagaactaacaatttccattaatcaatttattattatttacttgtccttagattggaatttttaaaataagatcaatgctttgaggaattattttatatttcataatgtggaagcatttaaacaaaattaaaattttattttgatgtgaattatagcaatgggatcaacacaaatgaattactgtaggacaagagaattagtcatttacattgcatgataaagaaaactagataaaataacaaacaaaatgctgttgataatacgaaagttcacgagaccagtgctactaatagttagtgggggtgtgtatgtttttccctaaaccctaaagacacataagatgtgtaacaaaccaactaagaccagtatagaacaagcagggctggtttaacagcatcaaataatctatcantaaaatgctattgct

SEQ ID NO: 19360 - DNA, 404 bp, Glycine max
agcttatctttcaactcctgaggattaggcctcaagagtgcaaatatggataatgtacactagttctccccctcctacaaaattattggggtctttaaaaacgtgtttaaagtatccttatcaaacttcactaagtgacctctcaccctcacctgcttagatgatttatcctcggggtcatagaggttggcataaaactccttcacaatagcaatgtctatggtattgttagaaaaatcagtcagcttctcatcccaatggcgtctctcgagttcctccttgaactcgtcaaactatgtgttatagactaccacattcctctctggtaatagctttcgaggcaccacaatgtcagtgtacctctcccaagcctcttatgatgtgaacctggatctatcaaatat

SEQ ID NO: 19361 - DNA, 435 bp, Glycine max
  unsure at all n locations
caaacaacttattgtaatcgattacaacaacttgttatcgattaataagaagttttttcctttaaagaaatttttctaacttagaaacttttcttcacacaaaccatggtgatgcacaatgcaatatagatatcaaatgtactaagattcaacaaccaagataacaaccaatacaaatgccactcaagggagctgagcatgtaaaagccaaaacttcttcaaacttttccttgagcttcaagctttagccttaggttgtttacaatgttgcttatgttgttccccctatctctaacatgggtggccatgggggaagttttgttgtggccctatggtggagctaaatgtacttactaaaatctggagcaggctaacgttaggtttgaccgtcgtctanatgggctccatgatttcctatgtcanactagcaagtat

SEQ ID NO: 19362 - DNA, 428 bp, Glycine max
  unsure at all n locations
ctcgagctcgcgcccgcgtgatactctacactgcacctgccgcattcagcttatataaatcttaanattcagatagtctaatgaaaaataaactttccacttgatatcgggtatcaagaattaaaatttaaatcacattaaaatgaaacttgagaaacaaaatatgaaagcaagaagtataaataagaaataaattgaatatttacctatatatgtgtaaatatttctgtaaaagatcaaaaatataatactttaatatatgggttaaaatatacaagaatgtatagcattggaacaattgtttaagttatttgatatgataaacatattgtttttactttctgtaaatcatgatccataacgttcatgttatgaatacccataacccagtgaaaacaatattttcatcgtattgcaagcagcgccaa

SEQ ID NO: 19363 - DNA, 441 bp, Glycine max
ctacgctttaaccgtcgtgttcaccgtacgtgcatatttctcattcgtctctgaaatatatcaggccattggagccatatacccttttcttaaaaaattaaaggaacagaagtccatgatagacacatgcatgtgtcaaaaatcattaattcgagcaaggatgtacactaataaaccctggaattctcaaatacaatattgacgcttgtattaaaagaaatatagtaccatatgtaactcttacgtgacaagtactaatttaggagaacgtatacgaaatcatcatttccaaagcctattgtacatatattatgtaccataacaaatgttagcattgcaactttctttcatctcaatccaaaatcgtgaaaggaaagtggggcatataatataatacatgagaaaaaaagtgtatagaggatgagaatgaaatctctgaaa

SEQ ID NO: 19364 - DNA, 404 bp, Glycine max
  unsure at all n locations
tctatcttgttttgtttacttcaaattattatcttctgcttcaaagcttcttcacgacattcttctctttcctttgcaatttttctcctgagatctgatatttcttctacatttgcttatgtttccttaactaacgaagcaattctcagctttagtttttcattctcctcaatgtaccaaaccatatcactcccctctgtagaaaatgttgttcacatcatcagacaatatcttctcctcaatagaacttggaatccacttaataaatctacaatacctagtatgctacaacacagaacataaataaactgagacgacattngcttatgttccaataggggcaactacaacaacccttcctcgagttcttggtagtgtgtgatgacgacccacacattgcactc

SEQ ID NO: 19365 - DNA, 437 bp, Glycine max
  unsure at all n locations
ttccctcactcctacaatatttctacatcatccacacttcctatatcccaaaagccaaaaaaaaaaacatcaaaaccttgaaagagaacacttttatgaaactttggaaagtgcacatagaagaaaacaaaattggaagataagaggggaaagaggagggcctcttacctctaaaatcaatccaaattaaaaaaaaaaagaaaaaaagaaaaaaagctcaacaacaaggtcctttgtgtgagggtttccatgtcttgcactctctaatgatggattgtctcagagaggaagaagagagtgaaatgagagtattttgtgttgtggttcagtccanacactcatctcaatccaaacactctaaaacttattatccacaccttanacaaggttttcgcatacataattgtaatcatatataanaacatcacaagtcatca

SEQ ID NO: 19366 - DNA, 400 bp, Glycine max
agctttaaaattgtaactttttaaattagaaaatatgattaaagataactttaaaagtttgaaccctaaaatctttttagttacttttaacacttttttttataaaacctatgcttaagaaaaaataataagaaaattttaaaccctaaaccccaaaagattttttttttataaaaagtgtgaaagtaacaaaaaatattttagggtttaaacttctaaatgtatctttaatcatattttgtaatttaaaaagttacaattttaaaatttttaaaaaaatagtcaaggactaatttgaaaaaataaaaaataattaatgagaagatgacatataatttgatagattaaaaaattaccaatatcataacccctaatattattggaaacaccatagaaactc

SEQ ID NO: 19367 - DNA, 436 bp, Glycine max
  unsure at all n locations
tgatcaaaacaattctctaaccattccaatcctttcttatcatacaattgcttattcaaatcattctcaaacactcatttcataccaaataatccactgcatatcattttcaatcaattcattgttcaaacacgcttttggtacaagtaaacaactcaaagtgttgaaattttaaataaatgaaatataaaataactgaaacataaaaactgaaattaaaataactgaacataaatcataaaataattgaaaataaactaaaatgttcaagatgcacaaatttaaatgtcatgttcatcatgtggctagtcttcattaagatccagtgctggagctactaatgaatcctggataggttgctttggctccgtgactggtgtagatggctgggtctcctcacgaggaggtgcagaggatggctcangtatctgatctg

SEQ ID NO: 19368 - DNA, 326 bp, Glycine max
  unsure at all n locations
agcttgatttataaaactgcagttttatttttaaaaaaattatgaggcgaagttagaaaaaaaaaaagggttgagagtaacatatctttataattgtcccgtcccaccgtaatagagaaaattttcgtagtgaaattaaatatgatctcaacaaccgtgcataattaatatatcatttttctcattagaattgaacagaaaataatgatgttatttgttactttctaaattgagggtataatagcatcaatgcctaagataaacggtgacaatatcaaatctatcaatcaatcaaaangttaaagggtatgtattttctactccat

SEQ ID NO: 19369 - DNA, 444 bp, Glycine max
  unsure at all n locations
gacactatgaaactccgctgctcaaggtgccatgctttttttaattccttttactaatatgcttttaatagttggggttgtgactattagcccacgcaatttttttcaattccctcatacttttgcatcttgctaacagagagagaatggtgttttgatgtatcatcctcaattatttggttaatgacaatctcatttacctaggccttatattttattgcttgctatcatctctctattatatccacgaggacgatgttactaatatcagtttcattatttaaacacaaatagattgacagtgcataggacattatatataactattttttgtcttaatttttatgtttttatggtatgcactcatctaaaaaacacactccaaaaattaaagggataacatcaacattaattngttgtactattttgatgttcacagtggca

SEQ ID NO: 19370 - DNA, 383 bp, Glycine max
agcttcaatggcttagtgaggatggagaggtgcaagtaaggaagcaagtggagttggatatttccattggaaagtacaatgataaggtgctttgtgatgttgttcatatggaggccagccacttactcttggggagaccatggcaatttgataagagggctaatcatgatggtttcaccaacaagatctctttcacgcatcaaggcaaaaagatagtgctcaaaccattgagtccacaagaaatgtgtgaggatcaaagaaaaatgagagagaaaattcttcaagacaagagagaaaaagaaaaagagagccaaacacttgagagttcaaaaagtaaggacaaaaagagggaaacacaagacaggaaaaagatgagtgaaaca

SEQ ID NO: 19371 - DNA, 427 bp, Glycine max
  unsure at all n locations
ntgcggatttggtcttcgctagtgaaaggatctatgttggtccgaaaagaggcaaatttgatcatcctactaggacgactgagaaaattggggcaaatgaagagggtgagaaagagggagaaacccatgctgtgactgccattcctatacggccaagtttcccaccaaacccaacaatgtcattactcagtcaataacaaacctcctccttacccaccacccagttatccacaaaggccatccctaaatcaaccacaaagcctgtctaccgcacttccaatgacgaagaccacctttagcacaaaccaaaaaaacaccaacaaaaaggaattttgcagcaaaaagcctgtagggttcaccccaaattccgttgtcatatgctaaacttgatcccatatccactcaataattcaatggtagccataac

SEQ ID NO: 19372 - DNA, 398 bp, Glycine max
gttgcatgtaagctgggtgctattacgatagccgactacttggcggacactatggcctgttatcatcatatgcagtagaaatattagtcttgtatattatcaatcgctctcattcagtagtgcgtggtcctctagaggtgagtcacatattccatcagtaatatttttgcaaccttttttttaatatacttacagaataaaaccattgaactgctactactagcaggtgctatacatatttgtggactactacagctcatttgattgcgaccataattatgttagtatatggggtccaaaatccttatcctctcttccagaaattgttggtaagttatgcaatgtgtaagcaactgcagattttcaatcttcagtccttgatatcccaactcccttgc

SEQ ID NO: 19373 - DNA, 432 bp, Glycine max
  unsure at all n locations
tctgtttcaacgaaatgggtaacaggactgattatatttaagtgaataaactgttgttttgtaatttgaagccacacaatacttcaaaagggtaaatgaataaagatttatcaccccttttgaatcactttcatcgtccctttttgaccttacatatttgctttgacttttacgtacgctgcagcctgttaacagttgctacttttaagcatgcatggctatggccaactaaatcaattcatttcagatatcattggaatgaatggcacgattatgtcaccatttactgtatttacaaggatatggcaaatgcaaaacaatggcactgtgtggccaaagggaactcgtttggatgggaaaaaacaggtttagtgactcttagttgaaaggctcaacatttatgactntttatgtagattttgttttgcatgg

SEQ ID NO: 19374 - DNA, 398 bp, Glycine max
  unsure at all n locations
tttcatgcaagctttatcaaggtcaggggggattttccatttcttgaaccttgatcttgttatctttagaagctaggcttctttgcattagggatgtgcaaaaaaatcgggtcggatcgaaccagattgcaactgactcgactcgaaccagttgcgaaaaaaaacttgccccattttatagtcagtttggttcgacccgacccgttttggcaaaaaaaattagtgacctgaacttgaactgcattgctcactctcatcatcctacgatctttntttctgtgcaacttcatttgtttaagaagggaattgtggtttcgaagttgtacgacgaagcgattatggtggatctgaaggaaacgctgagatacaatntctttctcggaaccttccccggaatg

SEQ ID NO: 19375 - DNA, 429 bp, Glycine max
  unsure at all n locations
tgttcttgattntttctaagttctttatttagtctttttacaanatactngnccttcatttaactgtctttgggcttggcggccacgctcaacaaagtattttcgacacctactgtacgttgatttgaccaacgctgttatgggaatgttgcgacaatccttcaaaaccttattgatacattctaagaggttggttgtcatgcggccataccgaagtccttctctatcataagtcatcgtccatttttcttttgaaatgtgatcaatccatgttgctatggctggactcagttcacgaaatttttctagattttgataaaaaatgtgcttgcaaggagtgtaggctgcatcaaattagttatgaataagaattttaagtatatattaaacttaaataaacttgaccatgatatatgaaatcttacccaa

SEQ ID NO: 19376 - DNA, 396 bp, Glycine max
  unsure at all n locations
agcttttaacttttctgttgngaaaatttcccataattgttattaatcacttttcaaatatacttataactaaaaaaaacattaattttttttttatatcttagaaccaccctcaattcaatccatgaggcaggtacaaactaattaagatttggtatggcagcttctccttactagtgaaagacacatggccttttaaaaccaacgagcatggatgcatggattccacagaaagacatatgtacaaaaactcaaattatcgaatggccttacatacagaccatagataagggggatacataacttctctgctctgaaatgggccaaaatctatttggagatcggttgcagaactgctctatttcctcattcaccatccttgcggccattcacaat

SEQ ID NO: 19377 - DNA, 384 bp, Glycine max
agtttgaactttgaatcttgattcttgattcttgaaatcaaatttcctcttgaaccttgaagtgttcttgattcaatcttgaacatcttaaacatcttgaacatcttgaactcattctttgattatcatgaattgacctttgatctttttgtcatcacctttgttatcatcaaaacatctttgaatcaatcttgattcatcatgaagctttgcttctacacatcccaaatataatgcttagcatcacttttaattttatcattctgagctttagatgctaagggaggaataacagaagctaccaattaattcacaatattacgaaaccaaggagtggtgaaggaatcagaaatcttataaagaatgtacaaatggtcatccgga

SEQ ID NO: 19378 - DNA, 435 bp, Glycine max
  unsure at all n locations
tattatgtgttgaattgtaagatatgtgtatattgagtttntgtacacattgagttgtgagctatgaactgtacaatcaaatgacagtaagaccctttaagggtgacgggttaatgtgcgataagtattgtgatgagattcattgtgggaaccaatgagttgaatcactttgaggcgcaacgggttaaagttattttgagaacaattgatagaggattgtgttttgtatagttcatagataaagtttgtgtgttaaaatgttttttctgggttgaacctgaatcaggaggaaaaggccctgacggaaacttcagagtctaggccttgggggtaaatacacccaattntagtgctcctttaagcctctgccgatcccacatggttggagcattntcacaaaatagcgtgaccctaactggtctccctatgatttta

SEQ ID NO: 19379 - DNA, 398 bp, Glycine max
  unsure at all n locations
agcttgtaatcaagtgaggtggagtggagttgataattcagttagtgtagactggtttttttctatttaggagggatgctacatgcttcaattcagacttgatgtcgaagcagagtaattttggctcctttaaattaaaaggggttcactttggaaggaaaagtttaggttctcaaccatttgagtcaacagttgatattatggtaaaatatatgcacaattggccaattgcacattcataacaaagtatggatttgttataacttataacttatccctcactttagatgggtcgaatccaagaggaacatgcaatttaatcaattgtatgttttgtttaagtcaatatgcttaaagttttttcaacttttatccatgtgcattangctcccctggac

SEQ ID NO: 19380 - DNA, 439 bp, Glycine max
  unsure at all n locations
tataacactgcaaaggtgatgagaatagtcctcaaaattgttattataataacaaattttccttttcttttattacatgaccaatcaaactttagacagaaaatgttactaacactactagttaattaatactatttacataatttcaaatcaggttaatactcagacaactataaaggtcaagaaggacaatgaaggcttagaatatgcgttgaaatggcaatgaagggaagagctgtttgtccaaattaaagatggactaatcaccggcatcattgacttgactgctcgaaaactcttggatcaaaaggttgtcacaaatgattctagtgattacttatggtacatcaccaggtaataatattctatgcatgtcctttntaattaattcaaagttgagtaatgttaacttctcctattaattatatcttcctacaaa

SEQ ID NO: 19381 - DNA, 389 bp, Glycine max
  unsure at all n locations
agcttcttattttcagaagatgaagatgaatccgtggccacatcatggacttctctaaggacaatagcatcatttcttgcactgaattgttgggagttggaagcaatcttctcaatcagattcctagcctcaacaggagtcatatcaccaagagctccaccattggcagcatcaatcatactcctttccaagttgctaagtccctcatagaaatattgcagaaggagttgctcagaaatctggtggtgaggacagcttgcacacaatttcttgaatctttcccagtactcatacaagctctctccactaagttgcctgatgcctgaaatgtcttttctgatggcagtggtcctagatgcanggaagaatttctccaagaacaccctctt

SEQ ID NO: 19382 - DNA, 451 bp, Glycine max
tataaatctaagcttgcttctcaatctccccctttttgatgatgacaattcttttatcaagaaagcatatacaatttctattgttcgttcattcattccaagcttcccctttgtcttggagattatgcctaatttttttgaaatctaaaactttatctttcttgatttctctaaacctcgtttctctccccctttggaaacatcaaaaagccaaagtgcccaaaaaaacaaatataatttatccaggaagagaacacaaaaccaatcataataccagagcaatcaacattcatacataattcaattatagtgtatttaatcaaagaaaaatatccaaacaaagaaaatcaatccaaaaccataaatataccaagtcagaggtcttatacatagccaaaatacacagcgtagaaattataactaagaaaataaaactaagggtctccaggcg

SEQ ID NO: 19383 - DNA, 369 bp, Glycine max
  unsure at all n locations
agcttaatgtatccacaagaaaagaccattacccgcttcccttcatggatcaaatgcttgagagacttgcaaggcaatccttctactgtttcttggacagatactcaggttacaatcagattacagtagatcctcaggatcaagaaaaaacagcgtttacatgtccttttggtgtttttgcttatcaccgcatgttgtttggtttatgtaacgcccctgctactttctaaagatgtatgatggcaattnttgatggcatggtagagaaatgtatcgaagtctttatggatgatttttcggtcttcggtgcatcttttggaaattgcttagcaaatttagagaaagtgttacagcgttgtgaagaatcta

SEQ ID NO: 19384 - DNA, 440 bp, Glycine max
  unsure at all n locations
ntatcgtgaggttgaggaatccaaggaattccgacgctttgttgtttctcctcatccaaagctacaattgcaccctccttctttcccttttttgttaattgtgtgaatgaattagttaaattgtcacagctttttgtgttaattgttcttttattgttcaaagtgaagtaatttttggtaacttttaattgtccgaaatctcttaatctgaatatcttccaagcaatttctagttctttatagccaccagaaagtgaaacgtcaacaaatgtaatataataacaataaaattattccaccattagttaccattaccatttaacaataatgatagaaacataaaaaattaagactgattaatttttaatttaaaggttaaaagtgaaaattcataaaagtttaaagacccaaaacataattaatcctatctttttcatatg

SEQ ID NO: 19385 - DNA, 320 bp, Glycine max
  unsure at all n locations
cgagctcggtgcccgctgatactctatagtgcaccagcgcgccttcanacttgtatagtgngcataaagatatagatatggggatagcataccttcaatgctaaatagtacgatgaaatggtaccacgtacatttcctgtaacagctgttaaagtattcttgatactatgtgatgagtatagagataataacgacgagctattatcagcccattgcatgagataatatataattatgcagtatatttaatatcacccgggatatatagctgattaatacttttactgctaccagagatttctttactagaacgctattaa

SEQ ID NO: 19386 - DNA, 408 bp, Glycine max
taatcaattgaaaattgacggtgtgagattctctctgtttctctactaggggcaattttccttggcaccctttatcatgttcaatttgttggtaagtttaggtcttttaatccaaaaaaggaaacttggttaccatgtgagagtaatttggataaatgaaaattgttttggttgttatatgcatgagtatttcgatgcttgtttgcaataatgtaatatacaaaagtacctaccacatagagagtgcctacgcaatttggaatcaagaagtttcagattgtgtgattgcattctctagcaccaaagctattgcattgaaaaattactgcatacccaaaattactttaataagttgcaaccaatattacttggcaaaaaagtagtctaaagctactctgtcatcatgga

SEQ ID NO: 19387 - DNA, 407 bp, Glycine max
tcaagcttctcccccaattttctataaatagggggagaagtgaagtgaaaaagggttcagccccttaggcacttctctctctttcgaatttgcttggaaaaattggttctgtgaagaaaattcaagccgaggcgctctcgaaacgtttccgtaacgtttccgtgagaaatttcatgaaggtttcgaccgctcttcaagattcatcgctcggtctttgctttcttcagacttcaacgggtaagtacctcaaaccaagcttttcaattcattctatgtacccatggtggtccacatttcgtttcatgtatatttattccccttttcatttactttttatacccccttttgacgtgcttaagccatttatttaaggcatttctcgcttaatgtacaaatagaataaattc

SEQ ID NO: 19388 - DNA, 401 bp, Glycine max
ttagcttggagggattgatggggacccggtgttgagaggaatcaggataagggctacgtgggactacgtgagctcagttgaaggtgggcaacttgggatggtggatttatgtgtgatttgtggatgtggagagtcgacttgcaccatcgcccgatagccacctagtaccacatatgacgggtaccccataatcctacaagcttgaagtgagaaagtgtggaagagtcagtcttcctacttttattcgttgaccacagagtggtacttggagatatgtcgcgggggtcaggagaccttggggacgtcaggtggggtgctattgcccaaaaccaagcttgaccaatcccgacccaacccgggcatagtcagtcagtgagaacctgtgacgtacctaaacaggc

SEQ ID NO: 19389 - DNA, 431 bp, Glycine max
tgcttctacagacttatcccaatggtctttttttactattagcttgctcactagcttttcactttcatttgcttttgaccttgttacatcagcacactttattcttttttttaacataaaacttatttgttgtgtgtgttgatgctttacctttttctttgcatcccaattagttctactcccccaaatttggggtaaatttgccttgaaccatatgctctcctagaatctaagcaaggtatcaggagatacttatttaagttcagggttcaaatttttgacaatatcattcagctcaaaaagggtgcaaaggatataattaacattcaaggaaagttttttggtcaaaagtcctgtgtatgtacaatcatggccttcatcatgttctcatttatacatttcattctaaaattcagagattcatgcaaaga

SEQ ID NO: 19390 - DNA, 405 bp, Glycine max
agcttgtgaatgcattctgatgtggtgaatttgatggatgtattgaaaaggcggagtccacccagggtatgctattaaagaaaaaaagagaaatatacacgtagagaagatgtcattcttcatgctcttcaactcgagaggcaaatgttaaagaagcaagaaaaaataggtgatgcttctgactagatcaattctagatcatataatatactgttaagaaaggcgtattcatgtatctagacattaagaaatggcaatgaaaaaacaaaatcatatgcaacatcggggtaaagaggtttgggcctaatatttccttttgagatgtttgttctcattttctattgatccagatgtttattagaaactaatagttgatgatagtgctctaactctaacaagtgatgg

SEQ ID NO: 19391 - DNA, 433 bp, Glycine max
  unsure at all n locations
ttcatttaattcttttgacacctcgattgtagtcacttttattatctctgaacatgccagcattaaaaagcttgcaacttgaggctgtctcttttactgcaagggacaatgactatgctgagccgttttctacctgtaatgtgctgaatactttgatacttgatggttgttcgttgcataaagatgcaaaattcctctctatatcaaattctagcctctctagtttgaccataagtggtagttttgaaggaggagcttacaaaattgtgctttctactccaaaccttagttctctcacagtcacgggtcataataatcacacaatctcctccgcatgcaatctttctttccttgaagaagtaaccattgacacccttggttatacactntttccgaatacagacttactcatcataagctggctgcaagttct

SEQ ID NO: 19392 - DNA, 335 bp, Glycine max
gctaactatttacaccggagtgtgcaaaacgcatgagacctcataaacgcattacacactcccatctctatattcccttcctccactttcatgtgaaaattcaagtactatgacaacaaataaaattgtaaacccaaagggttcctaggttgctacaccaagactcacattatgtatttgagtctcagctgttctagaagatgttagagaacagctattcatgaagatacatattgcgagtgtgccaacaatttgcggaatctttcctctctgtccctacgagactgggaggttgtggtccctgatggcgtccgtcgtttctttcttggtcggaa

SEQ ID NO: 19393 - DNA, 321 bp, Glycine max
taagcttgaaggaaaccttgatgccttggtcaaccaagtaactcagcttgccatgaatcagaaatctacacctgttgcaagagtctgtggtctatgttcttctacagatcaccatacagatctttgtccttctttgcagcaatctggagttaatgaacaacctgaaacttatgctgcaaacatttataatagaccccctcagcagcaaaaccaacctcagcagaacaattatgatctttcaagcaacatatacgatccaggttggaggaatcatccaaatctgagatggacaagtcctccacaacaacaacagcctgtccc

SEQ ID NO: 19394 - DNA, 366 bp, Glycine max
  unsure at all n locations
tcaacatcagaccacttccgggtgctgtaactacttttcatggacttgatggggcctatgcaagttgaaagccttggaggaaaaaggtatgcctatgttgttgtggatgatttctccagatttacctgngtcaactttatcagagagaaatcagacacctttgaagtattcaaggagttgagtctaaggcttcaaagagaaaaagactgtgtcatcaagagaatcangagtgaccatggcagagagtttgaaaacagcaagtttactgaatactgcacatctgaaggcatcactcatgagttctctgcagccattacaccacaaacagaatggcatagntgagaaggaaaaacaggactttgcaag

SEQ ID NO: 19395 - DNA, 350 bp, Glycine max
tttcatgcaagcttgagggggagggttgagatatgattctgattagatatcattctgatatgattgtttccttatttacattaggattgtttccttatttacgttattgatttagtttcctatttactatttttatgtaattgatttagcttgattattatccctataatgaagggattagattattattttaattaaacattgattactataaataaacagccaagggtacattctctttaagcatctagaatatacaattcagattcaagtgttatgtgtgtgtgtgtgtggaataaactgtggtaaaataaaaaagagataggataaagaaagaggaaggactaaag

SEQ ID NO: 19396 - DNA, 429 bp, Glycine max
  unsure at all n locations
tattttcgataaacttagatctagatgggatgtgtctctcttgttattactaatgttttttcccatggtgcaattgagattaaaaatgaagttatcgacaaagttttcaaagtgaacggtcaccaactcaagctttttcatgagagcccccaagtggaggaggaatttatggcgggccttagtttagaggtttcatgcttaatgtgaaccattgttgcaattgtcgaagtgataagtaggcttgaaaaatttgaggaggatcatgtgtgataaaatgatgccttgtgagttttgggattttgtggatggattgtattattccattcatgctctttcatgtatgatttcacccttgtgctagattactctaggttntgccttgcttatcttctctaggtttcttttagtcactagcaaaataagcctacc

SEQ ID NO: 19397 - DNA, 357 bp, Glycine max
  unsure at all n locations
agtcttattctatgctttattattggntgtcggaaaggcaaatgtcagtgcctgctcaacaattaatccatttgatttctcatggaaagatctatctacatatattgtaaataatatctcccgttatagattttctaaggttaattcaacaatggaatcagctagcgcatgtgcattaaaaaggatttgatgctctgaaacctctattgcccaagaaaccatccttctcgccaaatcaagtcggtgaagaatttgtcgaatggactaatcaattcacaccattatccggtgtgaatggaaatatagtcgtatgcgtcttgttgccattactatagcaaaaactaccttctctaatga

SEQ ID NO: 19398 - DNA, 427 bp, Glycine max
  unsure at all n locations
ttctttacataatttgtcactgactacatttaaatgcaatctcacatncttgatctttcttagtctaacatacacacttgctcaaactcatgataagaaacacaaactccatcacaatcatgcacttaatttaaaataaaagcatataactattttcacaaaaagataaaaagtgttttactaccatgtcatcaaaaacaagtcaaactattcaaaatgcttcaggataagcaaactaactacccataaataaaactagcagtgtatgtagacctaaaggaaatattgtatgaaaaccaaaattgtaataataataataaatcaaaaagcaaaaagtattatcaggaatcaaaattcatgtgactggtcttggatatcctgtgcctgaacatcctacttatctgtcaaatgcaatactggagtagtc

SEQ ID NO: 19399 - DNA, 288 bp, Glycine max
agcttattattattgtttctttaatgatggtatcttagtttctaattaatactttgtttaacgcttctaaattttctttagacttttatatctttgatgaagaagccaccagagactatactaacggatcaagatccatggatgaaagaagcaatttcaaaagacttgccatcaacataacatagtttttgcatatggcacattacttttaagtttagtagttggtttaatgctatacttcgggacaaatattcaaaatggagttctgatttttacgagttgtataaa

SEQ ID NO: 19400 - DNA, 437 bp, Glycine max
  unsure at all n locations
nggaaggaaaggtggtaaccctagcaacaatctcaactgcacttccaacaataacaacaacaatcataacaataatagtgacagtgaatgaatgtgtgagagtcaggaagggataactaggttgaggtaaagtttagattggaattgcatcagcctaatagccttgtggtgtatgtgtttagttattattattattattattattatcccttaattgttacagttaacttaagagggattgctatgctgaaccctaaaacagagaggaaaaaatgcaggagtattatgtgctgaataagtgaataatctaatctctttgaagaagatgcatcagttcagttgtcatgtgtaacaccattctaaattatatcagtatggggatcatgtcatcattcatagctctagttggatatgcaacctcataagtcacatgatag

SEQ ID NO: 19401 - DNA, 340 bp, Glycine max
  unsure at all n locations
agcttgtggtctacctctttcaattaagttcatgatttttcactctactccaagcagtattgatgtgccatcattttcttctattttctaaaccctttttgctccattntaattattgattggtcttaattgtcaattaattaggcagttttattatttgggctcatttagctaatttgatgtttctaatctaatttcaagaattaatgaaacattgggcttaatccggattttggttgtggacttgaagagggcaaataaagcagcgcttaccttagttaatttctaattaagaaatttcgcaattttattttatgttgttcagtgtttatttcgtttt

SEQ ID NO: 19402 - DNA, 432 bp, Glycine max
tataacattgcttagattgtgtaggtatcagattagatctatttgttttcaatatcaaaagaattcccattgtaattgacagggtgcaggctattagattagatgagacaaacttcttttcaatatcaaaacaaatctagaaacggagtaacacaggaactttggagtcttgtctcatatggtttcttaattacaagtctaacagtagtctagtagatgcatattagtatcctaacttaccttttgtttttcttaaccatctgattcatcagggaaaaagaatgctaactaatgcacataatgtatgcagtgtgtacaggcatttatacatcctacccaaatgacagataataacaattcagtttagacatcctaaccgcatgaaagcgaaatacaatatgcgatgtatcaaaattagggagtttgtgtaag

SEQ ID NO: 19403 - DNA, 408 bp, Glycine max
  unsure at all n locations
agctttatgttttgtgattaaaccggattttacttggacacataaaatcttaaaaagaatataaatgtatatgccaagtatgtagatntggaggtcaatgcttgtttatatttattatagacatgattcacaatagaacattatagcattgtgtgatccatcatgtagtcaaccctcctagtgcatgtgctatgtatatagttaaagtgcatgttgggtttgttcatcttattctggagaaataactgcatacttttgttggcttcctactagagttcttaaaaaataagctattatttttccatatgtaagacaaaccaaacttgctaaatcatttanattaatgttgaatttataacaatttactaactgtctatttctctaatatatgacagtcccacatctaat

SEQ ID NO: 19404 - DNA, 425 bp, Glycine max
  unsure at all n locations
tctcgaaggaggtcgttcttgatgttgttgatgcggctggtgttagaaccgtggtcgaccctgagggcgtggatgtcttcttggaggccatggattttgtacttctgactcaaagatcgcatgctcaatagaaggatacccgtcatggcgaagaattggatgaagctgtccttccgttgcttcgcgtgcgccataaaccctaatatcttcctcgaatgttccgcggcggcgctcggtcgaggagaagctgaagaagaagccatgccgatctatccacaacacgaccgatactattactcacccacctacaacagaacctccctgctttctttcctcgctgatcacaaattgcaatgaatgtcgacggattcacctgtgtaatcctccgcgttactttcttgttgctctttttttctttntatctc

SEQ ID NO: 19405 - DNA, 402 bp, Glycine max
  unsure at all n locations
agcttccattntcaattacgagcgtctcgatatattacgggacccaattggacatgcgagcacaaagttattgtcgtttgacttttctcagagcttttattctgaatttcgagcgtctcgatatactacgggacacaatcggacatccgagtaaaaagttattgtcgtttgattntgctcagagcttctgttctgaatttccagggtgtcgatataccacttgccaccatcggacatccgagtaaaaagttattgtcgtttgaatttgctcagagcttttgttttcacatttgagcgtctcgatatataacgagactcaatcggacatccgagtaaaaagttattatcgttagaattggctcagagcttccattntcaattacgagtgtctcgatatattac

SEQ ID NO: 19406 - DNA, 445 bp, Glycine max
  unsure at all n locations
tcaccttctggtcctcctcatagttgtggcatgagatttcatgctctattttcatctcccactccaagtaggcctccggatcattctttcctttaaatggaggaatgttgagtttaataccatcaattcggttttgtctaggaacaccatcattccctcttctcctcctttcttcttcattatgatctctattctccatttgatccaacctctcgtggagcgcatcatctcgttgtttcattaacctctccatatgttgcatcaaagcttgcatttggaattgcgaaagccccactccatcattaggattagtacctgacatctcanacaaacaaatcaaacgtaacaagacaattatagttgctgtttgaatacctcacccactcaagtgtatcacacaattatggctnttctctaatgaaacactcttgccttttaccactct

SEQ ID NO: 19407 - DNA, 367 bp, Glycine max
  unsure at all n locations
tcaagcttttgtgtgggatacctaatgtgagcatagtttccaaacccttaaggaaaagttgacggccgctcccatgctagttntgcctaacccaagagaaccccttgaggtgtattgtgatgcatcaaagatgcgtttaggaggagtgttgatgcaaaatggccaaggagtggcctattcttctagacaactcaagactcatgagaggaattatcccacccttgatctggagttggctactgtagtttttgcccttaagatgtggaggcattacctgtttggctccaagtttacagtgttcaaggattataagagggaccatgacacanagatcctncacaaagaatttagtcccagacaacaagta

SEQ ID NO: 19408 - DNA, 432 bp, Glycine max
  unsure at all n locations
ntgtgtaatcgattacaccttatttggaatcgtctactcattgactgnttctgataaatcaaaagatgtaactcttcaaaagggttttgactttttcaaattggttttaagtttttctaaaagttataactcttctaaatggtcttcttggccagacatgcagagtctataaaagcaaggctttgatttgcttttcaatacacttttcacattcattcaatcaatcctttgcaagccttgaatctctttgaacttcttcttcttctttgtactaaaagctttctaaagttttctggtttttccaaaccttgaaaacttgtgctattcatcttttcattctcttctccctttgccaaaaagaattcgccaaggactaaccgcctgaattctttntgtgtctctcttctcccttttccaaaagaacaaagaact

SEQ ID NO: 19409 - DNA, 399 bp, Glycine max
tcaagctaggcatcaaacttgctgataataggctgccaaacactccagcttttaggatcataccccattggaattccaaggtaagaaaaaggagaaaccagctgactatagttaaggaagtgagctgcatccctgcaccaaccctctgattttcccaaacaaccaaactgacttttagcataattgatcttgaggccggataccatttcaaagcatctcagaatagattgtatgactttaacattatccatagttgcagtcccaaaaaatagagtgtcatctgcatattgcagaatattaacctcctccttatgcctgcccacttgataactgctgaacatattcttagaaatggctgcctcatcagacctgtatggacttaactactaaattgaaagg

SEQ ID NO: 19410 - DNA, 433 bp, Glycine max
  unsure at all n locations
ttttaaaccatatatagatttattaagcttgtaattctttgctcaccactatcagaggagaaaccttcaggttgtttcatataaacctcctcctctaaatcaccattaagaaaagttgttttcacatccatttgttgcaactcaaagtcaaaatgagcaactaatgccaagattatacgaagagaatctttcttagatactggagaaaaagtctctttgtaatctattccttcattttgagtaaatcccttagcaacaagtcttgccttgtatctctcaatgttgcctaatgaatcccttttggtcttaaagacccatttacatccaatggtctttgccccattaggcaactctacaaggttccaaactttgtctgcatagaattcatctcatccttcatgtcatcataccatanatttgactctttacaacn

SEQ ID NO: 19411 - DNA, 383 bp, Glycine max
tttagcttatgaatatcagatcgcaccttcgcttctaaatgttcaagaatctcttgatccgtgggatcaaacttcactccagcaggcagtccaggtaagtcatgaattccaccaccctaaaattattcaacaccacaatatttatttaaataattttttcataaagaacgccaaaaaaaaaaatgaaaaatgaatcaaactaagacaattacatcaaaagaaaaaaaaagtactcaaaagggtaatattatctatatgatatatatcattaacaaaaaggttaataattaagaacctgatcttggcatttgatatgatgaccacacgtaggacaagttctaattaagctatcttttcgtccctccactatgatgttatgatga

SEQ ID NO: 19412 - DNA, 435 bp, Glycine max
tgcaattgccccagtaatgatcgcacttgacctgagtttagaatttgaattgatgtgtgatgccaatgattatgcagtgggcgcagttctaacacaaaggcaagacaagatattccatgccatttactatgctagcaaggtcctcaatgatgcataaatgaattatgccacaaaggagaaggagatgctagctattgcctttggcttggagaaattcaagtcatatttggtaaggtcgaaggtaataattttcaccgatcatactgctatcaaacaccttctcaccaaagtagattccaaaccatgactgattagatgggtcctgcttatacaagagtttgatatagttatcaaagacaagaagggatctgggagcgtggtggctaatcacctctcccagttgaagaacgaaagagtaactaaagaagaaccgaa

SEQ ID NO: 19413 - DNA, 376 bp, Glycine max
agcttgtgcgaatcaaatcactcccgcatcttatctctagcatgcattctttctttctttacccactcctcacgtttggctttttagggaaaaacaccataactaaacgcgccacaaggcatccctatcgcaccagatccaaatctagaacgatgggtgatcaagaggagacacaggaacagatgaaagccgacatgtcggctttgaaagaacagatggcttccatgatggaggccatgttaggaatgaggcagcttatggagaaaaatgtggccaccgctgccgctgtcagttcgactgccgaagcagacccaactctcttggaaaccgtgcaccatcctcccttatacatagtaggacggggaagggacacact

SEQ ID NO: 19414 - DNA, 435 bp, Glycine max
  unsure at all n locations
tagcgagagttgtaggttttatgatctgcagttttctctaagtgccccttctgtgcgctaaacccagctttaaaaaaaatcagattttgaatttcaaacttgggctaagcgcgcagctccgctaagtgaacctctttgagaaaccaaacgtctctctggctcacttagcgcggtggttcgctaagaaagagggtcgaaaattgcttaagcaagtgtaacatcagttacacttacctttaccaaaaaaatttctgaacattgcctgcatcttctctctcacacccaaactcgcgcatgcttactttctttgtgcatcttcgcgcattttcagcaatcaacaatccaagtaagtttctcattccctttgctcttttatttttgtgaactttagggtagaaaaccatagaatttagcttttaattnttagggttttaa

SEQ ID NO: 19415 - DNA, 400 bp, Glycine max
  unsure at all n locations
cgtaagctttagaaaccctaatttgaggaagaagaagcaagtgaagaagaaaatatttgataactttttaaattttgcattaaagtccagtctacatgtcacattttgggacaatttgtcacgttggatagtctatgtgacactaaaattgccaataatgcacctcactaacgcgttacttttaaatttaacgacaaggactattttgcaaaacttatgcaaagatagggactattttttacatttcaaaaagatagggactaatttgtaaaaagggtcataagtcagggaccaaaatgcttatntactcgtacaataacacttgttcaatgtttgacntaaaaaattgtcatgagacaacacaaaataaaaacgaagcataggacanagtctaaaattc

SEQ ID NO: 19416 - DNA, 439 bp, Glycine max
ctttaatttcaatacaaggaagcatgacttacgctcatttatctaagttttggttttgaatgtaaaaaggcatgaatattaggacatgtttgagaggtttttaatagaatttaaatttggctgccccatgaggaataccttgtacctaggtagcatggaaaatacctttcaacggtatgtatatatgtgaatatatatatagcatggaaatgccttgcatagtgtgtgaatatatggcataaaaataccttgcaaagtgtgaatgtatagcaaataatgcatttcaaaaatctgtatatgtacgataggtagcgtaaaaatgcctttcaaaatatggatatttgtggataggtagcctaaggagcctttcaaaaaaaaaatgtacccatgtcaaaaatggcacgagaatgcttcccaaatgaatatatgatgtggaact

SEQ ID NO: 19417 - DNA, 392 bp, Glycine max
  unsure at all n locations
agcttaatataggtttgtgaagaaacatcttacagagaaaagaaataacaaaaaagattaaagatgaaatgagagaaatggaagagaacctgaagttttttccaaaccgattgagaaagaggtactttcagaaagtgcttttgtttatgcgtcaaaagcattaatcttgtcgaagttgtattgcctattcagttctctaatgttttaagataaacatttgaaagttgaaaataataattatagaattaatattccagaaattgttgcaccaaaaatcaccaatgcattaattattaaaataaagaatctttttcattgaattactaattagcaaatatgacaaaatgaaatttccaaaaatacccncaccaatttccacacacacatatata

SEQ ID NO: 19418 - DNA, 428 bp, Glycine max
  unsure at all n locations
tcatgcattgngtgtgtcggtggaggacaatgttttgtgccagaaagaaaatgctctttgttcttggattcaagcgccacaactatatcacgttcccattgacgaaaattgctttctatcagtggtgacaaaacaagaacaacagaaggattttctctaggatgaagaagttgaatgttgattgttaacaaccataatcgatcaaaaaagcaagaagaataaaaaatgaaactagatttcaaatgaacaaatgcggaaggatgatgaacgaagaaggcttcgtgtgtagggatgataccatgaaagaacaggaactgaatttggaggaaaaaatagtttctggaaaattctccttatccattaatcaactcaacaaaaaaaaatacaagacttgctatttatacaagcaaagctatggttaggaagat

SEQ ID NO: 19419 - DNA, 394 bp, Glycine max
  unsure at all n locations
ttgcttcatgatcatgaatcaagttgattcaagtagttttgatgatgacaaaaagcccaagagaatgatttcaagaatgagtcaacaagttcaagatcaagattaaagaaaagacatcaagaagaatcaagattcaagaataatcaagatcaagatccaagactcaagattcaagaatcaagagaagaatcaatcaagataagtatttaaaaagtttttcaaaacattgagtagcacaagaagttttcacaaaatcattaccaaagagttttactctctggtaatcgattaccagaatgtagtaatcgattaccagtgtttntaaaacgttaagaattttcaaattcanaatgaagagtcacatctggtgatgtgtaatcgattacaccttaat

SEQ ID NO: 19420 - DNA, 430 bp, Glycine max
  unsure at all n locations
tctagacattgttcttctggaattggtcttgttcttcttgcatggccttgacctaatgttcattctccatagcatcatcagtgtgttttggttctgtctcttagacgagtattgtctaaccttgttgtctgggggatgcccttgtttggaccttggttaaggagtcaccaatggttgaggatccaatcccatcatctactctgagatccgtaataaaatcattcaactctgatatttttgtattaggcttgatgtcatcaaacttcacattgatagcttccttaataattaaggttctagagtagtatattataggcataatgtcactttttgtgcattatgttntgtagttgtttcactctagtacattaagtttaaaagttccactttggtcctttaattntttaaaatgccacattttgttcctttt

SEQ ID NO: 19421 - DNA, 385 bp, Glycine max
  unsure at all n locations
agcttcttttggaccttgaacaagcaactaactcctctttcagaaccatgctatgtgctcgcgactggtccctctcttcccttcgcagcttgagttcactattgctaccccatagagctccgcgaaatttattccggccatactcttccttgcgagccctcttggtctcttgttcaagggctctggtggtaattgcattctcttcccgtaatccggcatactccttccggatgtgtgtagcggccaacttgaacttctctttggcaagtttcgcctttcctaactcgcttttgagagcttggacttcttcgtcctcttccggtgcttcaaaactctcttcgctgacgactnttaacttggcgagccaatctaaacctcgtatatg

SEQ ID NO: 19422 - DNA, 421 bp, Glycine max
tgtcaaaccctaactaaggaggttgagcctctcattgtcatgagaatctttacaatttaggagttgatgtggatagaagaagagagatggatagaggaggagaaggggataatagacatagatagagggtttcccttattagagatgctcagacttaggatgtattcattagagagctatgaatctccgaggcggtattatcccggtgtgcgggttgtgtctattacttatgcttgctactccttttattggactaaggtgtaacttacttatcacgctgacttcgcgcttagcgtgaacttatacgctaagcacgcctttgggcttctttatgggccttgttcaacctaagtgtgagtcggaccgcttacagagggtgcgtgctaagcctgcatagcatgctaagcgacgtgctcaattc

SEQ ID NO: 19423 - DNA, 410 bp, Glycine max
  unsure at all n locations
agttttggttcccagtataaaaaaggcattgctatttaagtgagtttttaacgtgttaatctacgcttctgggttatattgaaaataatgttttcacgggacacaaaaccatatcatcctgtacagtgtacatgctaatacctactatgcaaaaaggttttcgtaatatatacttaaatataacttttggtttattgtatttcgtagttgatttgttttaatatattaagttttaaaagtttgattttaattnttttttaaatgtattattttaatttttttattaaaaatattaatgttttattaacttttaaattttaaaaaatattaaaacaatatatttcaaaaatataaatgatcataataaaacttattatactaaaacaaaataatcaggaaacataatatat

SEQ ID NO: 19424 - DNA, 433 bp, Glycine max
tagttgttgaaggccctaactagatcatgattccaattgttttctctttggaatcatgacttacaaggtttgcagcagtgttgtgaaaatctatctcatcgaggcattggattagatgtcaaatatgtgggtcatttatgggtatcgctaatctatatttcaatattacataagtatttattattataatttattttgttggatattatcattgaatcattaagaaaattcttgttatcttttatgattaagtacaaaaattatcaaatggtcatcagtaagtatgatgaagatgtataaaatacataaatattaaatcatatcaaaataataactattagttattatatatttttatcaagatcaaaataatattatatgagcatattatacgctagtattcaataattggatattaatacgttaacatatt

SEQ ID NO: 19425 - DNA, 508 bp, Glycine max
  unsure at all n locations
aacccgcggggaccacacacaaagaaagaaaataaataanaaganggggtccgatcagcatgccaccgnaaaannaannnggccgggcccaagaaaggacagggcagctcaacgcatacngcgcganacccagcgggcanggacgcggaaaaacacaaaancccgacccaacggaaacagngccaccaagaaggcaccaacaaccaaggggaggaaaggaagaagcccaaaaccacaacacgccgaaccgaggcaaggagcgccaaggaaacgaagaatgaataacccacaccgaaggccacgacgatggagacaacacaacagcgattacaccgccccgcacaaagagacgagacacacccacccaacaagacctacaagaacgaactgcaaaacctagaaggaaaccgtattcaccaaggactacaaagacaaagcacaacacgacaccaaacacaagcactatcccccaaacacacgatgacagacgaagaggacgacaaacccg

SEQ ID NO: 19426 - DNA, 379 bp, Glycine max
  unsure at all n locations
agctttatttttgacaactaatattgntaattgatgaccgcgatgcatgtttgtgccatatcattgacaatgtttcataatgcaaaataatttattcttttgcagcattgtgatttttcaatcacacttggatttggataggttccaattaaggcaaaaattattatatttgcttgatcaactaaaatgttctttgtacatatttttctgtgtatataatattaatttatgtatatctaatttgtaatatttctgctatttatagttattgtattttattaattatcatgtgatgtctcgggtattatttgataggattttttatcattctaatcacattggtgatgatgctaatttaactgtgattctatatttctga

SEQ ID NO: 19427 - DNA, 437 bp, Glycine max
tgcaactgataatttttagttgaaattgagaattgtatgcctttcttcttaattctcaacacactttttggatgagtcttccaaggattgtgatgccttctctaactttccttccttttccagtgataaggtaaagctacaaaattgagtctcccaatttttgatataagttttgtaagaccatctttaattcgaacaagtggcttaaaggtgtaaatgcacaatccttccaagcgagcaactcaaaggtgtaacgccatcttagaatttcgtatgagcatcttcaatgaaaatggaagacttgaacgaaaatggttggctcgctcctcattgctctgggaatagataacgatctatataatgagcacaatgtatgaaggatggaaaaactccaatttatgtcatcccaggttaagacttgtagatcacactattca

SEQ ID NO: 19428 - DNA, 323 bp, Glycine max
agctggatgtaacttatcctacgcgatattgtttaaaacttaaatcatatcctcaaatatattttttattcatataaatatcaaaatatttggaatttattcctgtaaaatttgattttattacgttaggcatgtttgctctctcctaaatataacaatcttgataaggcctataaatataacatatccttcaatttcattctattagaaaaaggcccatgtgacaaaagaagtataatgcgatcgaaatgtttgaataaaatattacaattttttttccatagatcacatattcttcattaacactaagaaaaaaaatcata

SEQ ID NO: 19429 - DNA, 559 bp, Glycine max
  unsure at all n locations
tcatgcacacctataaccggagtgagtaagagtaagatggttaatattactcaanaaaagaagggtnattttgatcccttgagaccgtgtanaccncaanntaannctaaacggncnntgagccgtaagaaatagactataatctttatgtttcttatgccttactgacaaaaggaatgcacgaaagagcttgatcccacccatgctcaacggcatattatattagggagcacttttataatgaccgctgactctggacagtgcgataaactaccgataaccatgacatagtgacgtatggcacgtgcatatgacccaccataactgtgaagtcgaagatgaaaagaattacggctgcatgtgcctgtgatgcttgtggcacaacctttgaattacaaggagacgacttatattacaaagaaaacgtgtatctaaatgacggagctgagaatgacaacggatcctgatgcttatatgatggagcgtatggatccaagtttagatgcattagtgcgcaagagccgttgaataactagatatctttgactttccgcttagg

SEQ ID NO: 19430 - DNA, 331 bp, Glycine max
ctcaagttttagctggacaattccgcgagcctcgatatattattcccctgaatcgcacctccgagtgaaaatgtatgacctattgattttgctaagagcttgcgagctcatattcgagcgtctcgatatattatgcccccgaatctgaccttagcgcgaaaggttatgaccatatgaactcctcgagagcttgcgttgtctaatttcgagcggctcgatatattatgcacctgaatagggtctccgagggaaacgtcttgaccatttgaatctctcagagctcgcattcatcagttttaccgcctcgaatattatgcgcctgaatccgacc

SEQ ID NO: 19431 - DNA, 420 bp, Glycine max
gatgcaacatatggagaggttaatgaaacatctttatattctctccatgagaggttggatcaaatggagaatagagatcataatgaaaaaaaaaggaggagaatagggaatgatggtgttcctatacaaaaccgaattgatggtattaaactcaacattcccccctttaaaggaaataatgatctggaggcctacttggagtgggagatgaaaatatagcatgtattctcatgcaacaactatgaggaggacaaaaaggtgaagcttgccgccactgagttttccgactatgctcttgtgtggtggaacacgctacagattgagatagcaacatatgaagagccaatggttgatacatggacggagatgaataagatcatgatgaagcgatatgtgccggctagttactgcagggacttg

SEQ ID NO: 19432 - DNA, 397 bp, Glycine max
tttagtttgacctgtccacataagtgaggcttctatttgccaaaagatgaggagtattaattgttatcattgtctgaaaataatgctcatcaacataacatttgtgtggtttgcagaattctttgagcttagaagcatattcccccaatgaatccgaaaagtgttcaaaacctattaaaacatgcacacctcactgaaaaatgatacaataactgccacaaattttgtgtaggaaatcagttttgaacactagagaaaaaacacatttaatagcataaacaaacaatttataaagactaaggataagatcatgaacaaatcatgagccagaaacccacggatcaagagggaataaaggatcatcaagaaacaatatgcgagtactttcatttcaaga

SEQ ID NO: 19433 - DNA, 429 bp, Glycine max
  unsure at all n locations
tttgatggtgtcgagaagaaatcacatgtntgtcattttcattttaggggagaatgtgaatgtatgtatacatgaatttgatgatgtcaaagaagaatctaacaaggctgcttcaaatgataagcatttgcttcaagaataattcaagattgcttcaacaaacaaagccttgtttcaagattcactaaagaccaagccttgccttaaaacaaagtgctttcaagacatgcaaggctctggtaatcgattaccaggaagtgtaatcgattaccagaagacagggttgagaaatagctgttgaaaaaggttttgaatctgaattttcaacatgtaatcgattaccatatgtctgtaatcgattaccagcaacgaaactttggaaattcatattcaaagtcataaccctgcanattataactgtgtaatcga

SEQ ID NO: 19434 - DNA, 353 bp, Glycine max
  unsure at all n locations
tagcttggcgacaatgagaggttttgagtcggagtgcaaaatcaaggtgaaagtctcgaggatgagcctggcttgctcaatggagatttgaagtgactcaaagattgtcgctaagtcgactcattggttggaggaagacttgagaagcttctacttcagtggaattagggtttgtgccaggtcaaagaagatgagacgcaggattggcaaaaggccatgcttgaaggattcgcgccttgggtgaatcatggtggttgggtcccttgccaatgaagatggcatgcacgacaaaggaggtcgaggagctaggagggggaaaagtctatggggaagaggtggtangtggcggaaat

SEQ ID NO: 19435 - DNA, 434 bp, Glycine max
  unsure at all n locations
tggtgtccctttcatttgtgacattggcatttattatgttaattactctataccctgcattcattgggtctgaaataccaaaaatcccaactcaatgttcagcagtgccttctttatgtcatcaaataccaatggaaggaatggaagaggcttaaaactacatcacttttaattgattcaatgttttccaaggttatgaaaattaactaacctacacttatttccacgacgttggatacaactttacagtctttagactgccttccaaaaagagacgagacacattcattcagcaagatttatataattcagtctgataaacatagaagagaatttttattctctaaaatttacaaaacataaaacagaacatgacataatagccaattnttattctcttaaattttgatgacatatctagaggactacaaacc

SEQ ID NO: 19436 - DNA, 398 bp, Glycine max
  unsure at all n locations
tctgcttgaaggtaaactanatgccttggttaacctggtaacccaactggccgtgaataaaaaatctgcacctgtcgccagaatctgtggtctatgctcctctgtcgaccaccacacagacctttgcccttctgtgcaacaatctgaagcaattgaacaacctgaagcttatgctgcaaacatctacaacaaacctcctcaacctcaatagcaaaatcaaccacaacagaacaattatgacctctccagcaacaggtacaatcccggatggaggaatcatcccaaccttagatggtcgaatccttcacaacaacagcaacaacaaccttattttcaaaatgatgctggcctaagcagaccatacgttctttcaccaatccagcagcaacaacaacaac

SEQ ID NO: 19437 - DNA, 530 bp, Glycine max
  unsure at all n locations
acaagacccgcacgaacgcaaaagagaacagaagaagcaantnaaaaaaaaagagaggnatnttgactgatacatngcanaccngnaanaanaaacncaagcccccnancnngggcaaaacgggacgaggacgttagttctatccnnggcaanncgacgcgcggaagcagcagaagccaacactccaacagcaggtctgcccagatacacgcaaatcacagcaggggagaagcaccacacctgcccccgacaaacaccattcgagactcaacaccacaccgggaaaaatgccagagggaatggagacaaagaagcccctgacgaagaccccagaacaagcagccaacaagctgacagcacacagcaggacagcagcctagatgaggaccaggaacaccacgcaaaccaaggcgagcggtcccagaacgctaccgagggcaggccgcgaagtacacgaagcacgcctgaagcaaagccaacggagcggaaagaaatgccgtccaaaggcgcagcagggacattacaagccn

SEQ ID NO: 19438 - DNA, 334 bp, Glycine max
agcttggcataagaccggtattctttatcctaccaagccattgctagctctaaacaaatcaacaagatttgttggaagtttgcacacaaactaaaatggtgattgtcttatagacggatatatcactcaacacttttagtcttttctctcaaggtatacaaggtgttttaagatcttagtatcttttcaagaatttacagagatatttttacaagaaagaacgaaagaatgactcacgtgaactgttcgtgtattgtttcttcaaagcttcttctatatatagtcttcgtctccaagtatccattgtctctcaatgggtggatccttcactcta

SEQ ID NO: 19439 - DNA, 439 bp, Glycine max
tagagaggaagcttcaatggaggaacagaatgagagttagagagagggagagagagatagatagagagagagagagagaaagagaaagtggcatggaaaattgaaggaagaaagggagagaagttgaactttgaagcgtgtctcacaagactctcatttatcaaagttgtgacaagtgttacacatgtttctatttataacttaggtcactaactaaatgaaattcactttttttgtgattttcattttcatttcatgtgaatctaagaggaatattccaaggatataccaaagaaatcttagcatattccaagaatatgccaaaggcttcttagcatattccttttagatgccacaagaatggaaggtgtgactctagcacatgggaaaggaatatgcctcaagaatatgccaaaggcatcttagcataatccttgag

SEQ ID NO: 19440 - DNA, 390 bp, Glycine max
  unsure at all n locations
agcttgacggagtttggcgcatcggggaacaatttcactttaaaagtgggtcccaattggattcccaattttcaacttacctatttggaagtgacatcatggccgctatgtcccagctatccattgtggattcagtcacaaaacaaacttgaatatgttggactatctaacacggngattttcgattctatttccacacagatgtgggaagcactttctcaggttttgtatttaaacctctctcgtaatcatatccatggtgagattgcgactacattaaagaatccactatctatcccaactattgatctaagctcaaatcacttgtgtggtaaattaccctatctatcaagtaatgtgcttcagttggatctttcaagcaattcattc

SEQ ID NO: 19441 - DNA, 414 bp, Glycine max
  unsure at all n locations
tagagagattcccgatctgagagggttctgttctgttttcaacaacataactcaggtcaagatacaccaaatttgagagattcccaatctgaggaggaatcttcccgtggattccagtatcagagaggtctaggtgagtcaaggagctcattgcacaaaggaaagaagaaattgccataccttctccaagtaaatcattgtagctcaagtcaagatatcgaagcttagagagattcccgatctgaggaggaatcttccccatgaatccagtaagagcgaggtcgaggtgagtcaaggaagtcattgtcccatggaaagaaggaattgacataccagctccaaataatatattgccgctcaagtccaagtaattcaaatgttntaaatcagccaaacaaggacttatctctccac

SEQ ID NO: 19442 - DNA, 397 bp, Glycine max
  unsure at all n locations
agcttcagaccaaggcaactcaaaatctatgtatctaaaacccctcaatttagtggattttcaaggtttgagaagtgaaaatgagaatggggtaaatttagagcaaactctcacctcacacaagtctataaccttaatctaaacttgctcaaactggtttttcacctaaaattccaccaaatcaaaatttgactcctcaacacctaattttaccctagaaatggcttttgccttcactttggtcttttgtttttctctcttgcacagcccaagctttctcataagtcctaaatgacatttcaaactangactaactcactttaacctncaatttctactgaatccagaattagcctttcaaaccctcaaagcatcacactttttcactcataacact

SEQ ID NO: 19443 - DNA, 430 bp, Glycine max
  unsure at all n locations
tcctcggggccatttcttgcgagaacaaacattcagatgttagttttaccagataatgcttaccttaatgcaaaaaatgtcatgccaatccctctaatttagactaaactcataagatccattcatgcacacacgcatgtgtagaaaataccctattatttatatcaacatacaaggatattcaaaacattctagttaccatacatataaattttttttgaaagaatacttacacgcatgctcaaggtattgtgcccatatgttcatatcctaaacatttgctatttacaaactacctatacatgtttgaaatgtatatcatacaaatttttattgtttctctcatattcatttatatgcatgtcggaaagctaattacattatgcacacacttttgcatttaaaagggactntcatgccatctaatcta

SEQ ID NO: 19444 - DNA, 395 bp, Glycine max
agcttcaccacataatcgtgacaaccaaacagaaccctatccccgacatgcagaaccttcagcagaggcaaagagacggagaaagaagcgagcgcgttgaggaacacgccgttgagcttcatgaccgagacagtgtcgcagtggaagaggcagcgcgggagcgccacgtagcgcgagagcgagagggagagctccacgcgctcggcgcggcggcgcgccacgtgacacagccaagtggcgatgtcgcgcgcggagtagttagggttggcgcagcgaaggcggaagcgctcgatggcgggcgcgtcgtggaggaggagcacggagtagacgaattcggcgaagccagtgagacctccgggatgggtggaactccgggaggactcgtcgtcgaagtc

SEQ ID NO: 19445 - DNA, 427 bp, Glycine max
gtacgcacattgtttgcgtgtatgatatccactccttaggtttgttttagaggagagcttcaaccttataacgcaacgtggcggacaaaagtgggcagataacttgaatggtcatcattgtcaatgcggaaggtattctgcgcttcactatccatgttcacacattattgcagcttgtggttacgtgagcatgaactactaccaatatataaatgttgcttacacaaatgagcacgtcttaaaagcttactccgcacaatggtggcctcttgagaatgaagcggttattcctccttttgatgacgcatggacacttatcactgacctaactataattcgtgcgacaggtcggccaatatcaacaacgatacggaatgagatggattgtgtcgaaccatctgagcaccgacacaaatgtagcatatgt

SEQ ID NO: 19446 - DNA, 377 bp, Glycine max
  unsure at all n locations
agcttgtgcttatcaaatcactcctacatctcatctctagcatgcattttctttctttacccactcctcacgtttggttttttagggaaaaacaccataactaaacgcgccgcaagggatccctatcgcaccagatccaaatctagaacgatgggtgatcaagaggagacgcatgaacagatgaaagccgacatgtccgctctgaaagaacaaatggcctccatgatggaggccatgttaagtatgaagcagctcatggagaagaacgcggtcactgccgccgctgtcagttcggctgccgaaacaaaaccgactctcttggcaactacgcaccatcctcccttcaacatagtacgacnggtaagggacacactgat

SEQ ID NO: 19447 - DNA, 434 bp, Glycine max
cgctttgtaggtgaaatcaggtgcagccatttcccttagtgtcctctcacggggtggaggttgtgccatgttctcagaatgtgcaaaatcagaatgctcagaatcagaattctcaaaattataatgctcaagatcaggatgttcaaaatcaccaataacagaatgcacagattcaccagtaatggaatgctcagaatgatcaaaaggtataaaatgatgcctaactaatctatgaaatgtcctatctatctcaggatcaaagggttgtaagtcagatggattgcctctagtcatacactacattcagcgtgcacacaactagttgccttgtcatgtaaataaaggtgtaggtttgaactacagctaccctcaaatgatatccaaatgacttgaaatcttatgagcaaccctataaaattatgagaagatagcac

SEQ ID NO: 19448 - DNA, 381 bp, Glycine max
agcttctcctccaattttctataaatagggggagaagtgaagtgaaaaagggttcagccccttaggcacttatctctctttcgaatttgcttggaaaaattgtttctgtgaagaaaatccaagccgaggcgcttctgaaacgttttcgtaacgtttccgtgaggaatttcgcgaaggtttcgaccgttcttcgacgttcttcattcgttcttcatcgttcttcgatcttcaacgggtaaatacctcgaaccaagcttttcgattcattctatgtacccgtggtggtccacattgtgtttcgtgtatttttattctcgtttcatttactttgtatacccccctttgacgtgccttaagccatttatttaagtcatttctcgc

SEQ ID NO: 19449 - DNA, 272 bp, Glycine max
ctattagcacacaccaaactcactagaacaccccagcgcccacgcatgtgtgaaacataccctataatgtatctgaacataaagagatattcaaaccatacctagtaccatacataaaagttacggatgaaagaagactaactcgcatgctccctgtatgagtgaccgtatgttactagaccatacatatgctatccacaaactgactatacgtgtgtgaaaggtacatacggcaaatgcataaagattctctcatgatcaccgacatgcac

SEQ ID NO: 19450 - DNA, 405 bp, Glycine max
  unsure at all n locations
agctctctatatgttggngcataatttagggggtctctagttgcgaccacccaccctccttggccaaaagagacttagcttcttcatcttgcaattcaagacttcttacctttttatcattttcatgtccatcatggcatcatgtgagttctaccatttaaaccatccacacagctcaaatccttcgtacaaactggaatctttgtttgtgttcaccattatagatacgtcacttttgaaagttaaagtcgggcgtgcaggtaaatagtacagtcatggtctataaaaatgaagaaaagaatgaagtaataaacctttgtgggaattttgattttgttgactatcagtaaacataaatccccatatatacttgctaaaacaatggattagagctattttagtcac

SEQ ID NO: 19451 - DNA, 436 bp, Glycine max
tcgtaattgttgcagagaaattacagcctgttctcactaactttttcttaaatcactattcccttatattgtttattttgccaactttgatctgcacatttaaatatatattaatgtcgtgtttgtttcagacatgaaatgccattcataatttgtacacattaataaagaattgaagttggaggtgatcctgatcgagcaaaacaacaaataaatatgtcagatgaatatgagaggagtgaacatgctgatgatgactcttcaatgggatcatcccagaaatgctcatcctttgatttgaatgaagaagctagtagcaaagataacaatgacaacgatgataagggattcgaggaagcaagggaagaaggtacttcaactaataaaagtagcagcatgacaaaggaaggaagtaatgaacggagaggtggcgtga

SEQ ID NO: 19452 - DNA, 430 bp, Glycine max
  unsure at all n locations
gcatgagcggcgcttggcacttgaacaagatgtatatatttatatatctccctccaatatgaattgtgactgtttaaatttcatttgctggtttgccctgtgctttgttgcttgttttcaatgtggcatgtgatttaattttctgggcattcttgggtttgaaattcctgacatcattattgctgtttttttgcattaaattgattgaacccttgaatttaaattgtgtaaaatattcttgcaaaaaccaaaagttgtttctaatgaattttccttgtgtattactaccatttatgagagatgctggttgttaataatgtaacatctttacattgatttatgatatggataaaatgcattctacactactgatggaggtttataaagaattataattngaagtgttacttgctggaagggttttccatat

SEQ ID NO: 19453 - DNA, 389 bp, Glycine max
ttaagtttattaagtgttgatgattataacacatatatatctatatgaattgttaaaataaattacgaattaatagttcaaataataaaattaaattaaaggaaattaatatattaagattcaacgataaatacttttaatgcatttttagtttaattatttattaactatttttaattgaaaaaaatatagtttgatttaatatatacatgttttgtgccatgtaaatattaatattctgtgatgtgtatatttttcataaggtgtcataacatgttgcataggaattataacattgtgattgagattggatgtatgtgataaatcgagtatgtgttgaattgaagatacatgtgtataagatcttgacgcattgagttgtgagctat

SEQ ID NO: 19454 - DNA, 221 bp, Glycine max
acactctatcccctccacttctatgcaacacataacaaggctagttgttatagatactactaataatgttgcatacagaaactgaacctacggcttaataacttatacgtgccaagtcctttccatctggatagattattgataggggagacaacaacaaccaatgccgcacttgaacatgtagaagctaagactacggacatgtcataaacaatattctc

SEQ ID NO: 19455 - DNA, 432 bp, Glycine max
  unsure at all n locations
gggataaggacctactattccatggactaattatcttttacttatttncatggttctgttaattttttttctacgaaaatattctagcactcacgtatatatggaccgagaagaacatacgaaaaatattatagcactcatacatttaaagaagagtgaagaattgaagaattcatgactaaaataccatgggtgatgaatctgagaaggaagcattcatctctgagcggccttaagaactaattatctttgtaaactaatttagtagcatatgtacatattatttgcactccaaataagatattattttttttattgaaattaaagaagagattactttaaatcttaaaactaaatattggtccttacattaaaaaaaataaaaattctcacatcattctatgaatatatatatatatatatatatatata

SEQ ID NO: 19456 - DNA, 378 bp, Glycine max
  unsure at all n locations
ggcactcnatcttacacaaaggntcatccttcctctcgcggaaactcagtatatcagtattggcttcgcttctttttaatctaggaagaaacggggtaagtacttactttcaacgtctcccttagtagtaaggctttgagatggacgagtattgagccacttcaaggcatctccaattaaagaataatggaaaactctaagataatggttctcctttttattctgagccatccttattgtactgcgtagatcatatataatgaccaggtggttgtatggatcttcatggccaagtcagcaaatgcatgttgaccaaaaagagggatggatgtccgcttaacctctgttgctgggtattgtctcttggattgccatgct

SEQ ID NO: 19457 - DNA, 424 bp, Glycine max
tactaagctcgaaattgcacaagcttatcaactcggtttcacattaatatggcttatcaatttgtacaaattgtacaagcttttctaaatgcaggaaacacattgcaaggatactagaacacaagcttaaaacaaatataaggaaacttaaataagatttaaataatccaacgaacctatgttttttttttttttgcaaaaatatggtaggtagatagaattcataggaaaaaaagagatatagaaagtggccacatgttaaaaagttaacattacttttaatataaacgaacataattacattaatttgtggactattttctcaaatggattgataaaaagaaatagactattgaaattgctttctaggtttgcaataaagcctttattttgcaaagtactagtgttgaaaccttgctgatat

SEQ ID NO: 19458 - DNA, 371 bp, Glycine max
tttgcttatcgttcaactgagaagatatccttttgttaagggtggattctttttgaggttagagtttttgtttaagcatttccttgcacccttcttccaaaatttcaagtgtcatggttaaggattttaccctcttttcaaggtcaagacattctaacttgaattgccctgatttcttgcactcacaacaaatgattggactgttttctttcttatgataggatcttttggacgatccgctgaacttggaggattccttgtttctccacatacttctgatctttcttgtgataagacttatatcattatcttcttcattagagtcatcatgcttatattcttcttctaaagcatcattcaccacaaagact

SEQ ID NO: 19459 - DNA, 417 bp, Glycine max
  unsure at all n locations
ttgagaatcgtcaaagacggacatgaaaaaattttagttactttacaataggatangcacatagattgggatttggaagttatgtcaaccgcccactgctggacattgtataacgcagcatatctcagggcgctacttatggttacatattgagttgaacagaggctccagaaatgaagtttaagcagtgaaacgtaaccatcccgactagacagaacctgagatacatatttgttacgtctagacaagatacaagtccgaacagcatatattgtttccataaaattcaatatatggagcagaacacaatcagataactcactcaacctgtgcctatcttttatatttgtcatctgtgtcttcatcgcttttctttctcttccttcatcatccattgatactgaatgtgctcggaca

SEQ ID NO: 19460 - DNA, 386 bp, Glycine max
ttatcttttctgcttgagaacattaggtctttgtacatgtgcaactctaagcgacattatgtaggaggtagaaagattgtgtctaaaggtacaaacttcttcaatgcttaaaactctttgttataatcgattacaaggctgatcatattcgattacacaagtgtctgtagcttgtagagagattctagtatcggattattcatttaccagttaactgtaatcaattacgtaattcatttgagaccatgtctgagacttcatgagtctctgctttcatcgattatcagataatcgtaatcgattactgaattcttaagattgttcccagatgcgatctagaacactttaatcaacttcatcaataatctaatcgattacatagttct

SEQ ID NO: 19461 - DNA, 437 bp, Glycine max
  unsure at all n locations
nttaacccctttctaaatgataggctcaaaattttgataaatattccttttcaaaatggtttgaagagatatgtcttttcaaaaagctttttctgaacttcttcactggtaatcaattacaggtttctggtaatcgattgcattattatattttgaagggtcatgacttttgaatttgaatttcaagagtttcattgctggtaataaattacagacatatagtaatcaattacatgttcaaaattcaaattcaaaacccttttcaacagctatttctcaaacttcccatctagtaatcgattacactgcctggtaatcgattaccagagtcttggatgactttgaaaccctatgttttaaggcaaggcttgatcttgaagaaatcttgaagcacgactctgtttgttgaagcaatcttgtattaatcttgaagcagt

SEQ ID NO: 19462 - DNA, 379 bp, Glycine max
  unsure at all n locations
agcttttcgtacgatgtagcactactgatcttaaaaatacgtaaacggaattaccgataacagacttcacaaatttgtgtcagtggtgactatcgagctcctcctcctgcaattgccatattgatgcttattttgtctaacttcacctatcgagaattgttgtgtcaagtatccatttatgttcaacctctcaaacattaataaatagaaatctcattcttacatgaatacatgcataagtaaccatgggcttgattgaatatgaaggatgtctcaaactacacataggtntgtaaattgttttgtgcttttgcaatacgcagtcactaaactcctatagttaactagcggtatcaaaacatgttaatccaacctaatt

SEQ ID NO: 19463 - DNA, 426 bp, Glycine max
  unsure at all n locations
tcccactgatgagagtctgctcactcatgttgtcacttttctaatgattntttccccttttggattgacaaatataggttgttttttgtgtatatttcgtctgattggtttgtatcattgatttctctttgcagataaaggatggatttgctgagggcaaggatcttgttgtgtctgtcatgtctgctatgggtgaggaacagatttgcgccctgaaggatattgggccaaagaactagcttttggtgctggcagcctgttgtttctatttaagcaaagatccttttgtaagcctttatattggtttgttcaagacctggcttatggcttatagattctagtcagactagtcttaacaatggtgtttatggatgtggtcacagaaactatatcacattttttctggttttctatgctgtcctatga

SEQ ID NO: 19464 - DNA, 327 bp, Glycine max
  unsure at all n locations
tagcttctagaaggagatcaacttgatgttctatgcttcttgaaggtggcagtccatgaggaatctccttggaaaagacatctttaaattcctgcaataagggttgaacactaggagaaacataaatagttaactgattagaattatcactctctctcttttgtgtatcactcttttcctcgggtgtatcactcttctttttcatattcctttgtggagcctcactattttctttctcttgttctctcttttctctcattctgatttaggcatcacatgcttatctangggatagagggctaagaattaaccacgaagatttgacta

SEQ ID NO: 19465 - DNA, 436 bp, Glycine max
ctataaaactcagcttacaaggctgcgagtggggttttttttatcttttcccttatgttatcaaacataaaaagggaaaaggtaatattgtagccgatgctctttctcggcgtcatgcattactttctatgcttgaaacaaaattgattggtcttgaatgtttgaaaagcatgtatgaaaatgatgaaacttttggagaaatttttaaaaattgtgaaaaattttcagaaaatggtttctttagacatgaaggctttcttttcaaagaaaacaaattgtgtgtgcctaaatgttctactagaaatttgcttgtttgtgaagcacatgaaggaggtttaatggggcattttggggtccaaaagactctagaaacattacaagaacatttttattggcctcatatgacataggatgtgcagaaattttgtgaacattg

SEQ ID NO: 19466 - DNA, 405 bp, Glycine max
  unsure at all n locations
agcttataatctntcttaagtggggtgtattcaatcctgaattttaaaagattttttattaaaaaaattacaattttcaatcaaacttttaaataataaaaataagtcttattggtacaaatatttcaaaataaatatcatgtgaagatttaagacttatctgtttaagctttagagaataatggttctagtttctctttttttttttagaagaaaccattttcacctcataaaatatattgaaatagttctttagtttattttttctgaagacttgcccaactattatatttttgaaatatatcttttaacttcaaaatattttcctttcanaatcaaataaacataaccttanacaaaaatattaaattntatttagcagtttagaaagacatggttgagttc

SEQ ID NO: 19467 - DNA, 435 bp, Glycine max
  unsure at all n locations
ntacaaagatggattataacctactagaaaataaatttatattgtattaattgaaaattagaacaaaattcttttctaagatgaaggaactaaatttatctattttgaaaagacggcatctacactggtccaagaggtaccatttttttaagccattagatcaatctcgtgcctacattattacaatacaccatcaacaccttacaatttctcaatcatcctctttcactttcctgtccacactttcgctaacgccgacagacacgtcgctgctgaacctgcaacaggtaaacccttgccggcgacactttatcacacaagcaatttagaatcatgattccaacaatatcacacacatgaaacctaacacctcanaattcaccaccaatctaaaccttgcaattgcaacaaagacacataaatcagttgcatcaa

SEQ ID NO: 19468 - DNA, 216 bp, Glycine max
agcttctatttatcagaatttattagatcctcattatttattagtttctaaaacactacaatctcctgacttatcaaccaaagaactttcagctatctcagaactttgcccatcattacttgaggtaatcatactcagcttatcagaacttccctcttcttttatgttggtaactatttcacctgattgtagacactctaagacacaatgtatact

SEQ ID NO: 19469 - DNA, 427 bp, Glycine max
tgtaggattatggagtacccatcacatgtggtacttttgggtttcgggcgaaggtgcacaacaagttggaccatccacaagacgcgcataaacccaccatcccctgatgcccacctccaactaagctcacgtactaccacgtagcccatatggctgaactctctcaacaccaggtccccatcaatcctggaggacgggacgacatcaaagtaattcagcatgtaaacagcacaagctatctcagccaaacgaaacagggcgaaggcagaaaactctgcccaaaacgccaaccagaatcaaagctcttcacatacagatacccgagacacattgccttcgttgcgattcgttaaccgttggatccactcgaaattatgactgcaagtctctagtacataagcctacattcagaccgtagggatctact

SEQ ID NO: 19470 - DNA, 406 bp, Glycine max
  unsure at all n locations
agcttgagnttattatagntgaccaataaaaaagctaattaagtttttagtcatggggttttaaattttttatccctaaactattntaaaaaaaaaattaattcctaaaaaatttgttgttattaaaagtagttcatgtcattgatatcctctattaaataatgaaatgttatgaaacaagttagatgtcaggtgtatgtcatatatatgtcacgtaagttttattacatttaagtaaataattagaatattatgttattaaaatgtaaaaaaaaaaagaaaaaagtcattattgaaccctaacgcttcaagcaccatgaactacattaaccatccatgagcagttcatcctcctcatctattatctatgatgatattcgtgaccatttaagtaggaattatttat

SEQ ID NO: 19471 - DNA, 437 bp, Glycine max
tgaaccatgaatggaggcctttatctatgttttcatatatcttaaaggggtacaaaacaaacctttcccctagtccctaacccctctaagcttagaaaaaaattaggaacacgaaactatgctaagacccgctaatttctcgcttataattcgctctatattgagatcagaactggtgctaatctagaacgaattcgaatttatacttttgtgggtctctaaaatcaagtcctatctttcaaatgcctttggtctcattcaatttagagttccctacaatgttgtatgactattataccaaaacagattcagagagaccaatctgtagatgactttgcatgtagagggttatttgagtaagtacatggtttgtgatgcacaagatatattctcaagtatttctctgtttgtcttggtaaggttcacgagtgtccatt

SEQ ID NO: 19472 - DNA, 385 bp, Glycine max
  unsure at all n locations
agcttctagctttttcttgtctgccttaaaataaattgtttggctgctacaggttcgcaaatggagagagtggcaagctttgcaagaccttaaatcacttttttcagaagaggcaagcaaatgcttataaagtttggtcttttcttccatgtttatcacttctatttcagtgtcacttattggttttctgataaatattatactctaggttcttgatgttattgtatccagcacaaatgatttggggcctttcagtcttgacaatttcagaanaaatttgtctgcttcatggagagttggattangaaattcaaacgctgaacatgaggtttggaagaattatgtgcttctgcaattctgcatggaacttttaatttggtaattt

SEQ ID NO: 19473 - DNA, 437 bp, Glycine max
aacttgtagttgtatagcatttggttactcatggctcaatcttaaagtaatataataagaatttaatgatcgcatattaataaatgcaaaaaaaaatttacatgatgaatcaattaatttttaattattagttataacttttagaatatttattataaaaggcaataaatttatgatgcatgatccatgtatgacttattttctcaaattataatacatactaggtttagtcttctttttcttttttttttttggtaactaggtttagtcatattttgctcatttaaattcagtgttgttttagtttcttcaattttttattttaattaatttttttctcttttatattaaaaaattaattatttaatttttatttaaaattcttaaactaccacttttattcagaatcttaaaaaacttaagtaaattaaattgtt

SEQ ID NO: 19474 - DNA, 408 bp, Glycine max
  unsure at all n locations
agcttgaatctntatgtttatgatcaatagaattatgaatatagacaattaattcactaaatatatggtttcaattaattctgaaaagtggatcagttcgattttttccttttaagatataaatattataaattttaaatatatctttttacgtcatttaacatttatcaattaacttatcaattaatattatcaaatattaaattaacttataaaattttaatttacttttaatctttcaacttctaacttataaactttcagctaacttatgagctaatcttaccaataatcaatttgataaaaagaaaagctaatgtatatctaatcatccgaattagaaaanatcacttaccttattcaaaatcaattcctaaataatgataaaacaaaattcaattcctatat

SEQ ID NO: 19475 - DNA, 437 bp, Glycine max
  unsure at all n locations
ntggaacggaggaagcaactgtgttgcaactaataatctttttggtaaacaatatttctacaaatatattgaagcaaactatttacaaaggagtgtgcaaaacgcatgagacctcataaacgcattacacactcccatctctatattcccttcctccactttcatgtgaaaattcaagtactatgacaacaaataaaattgtaaacccaaagggttcctaggttgctacaccaagactcacattatgtatttgagtctcagctgttttagaagatgttagagaacagctattcatgaagatacaaattgcgagtgtgccaacaatttgcggaatctttcctctctgtccctacgagactgggaggttgtggtccctgatggcgtccgtcgtttctttcttggtcggaagaaaaaatcttgtgtgtcaagaacatatg

SEQ ID NO: 19476 - DNA, 399 bp, Glycine max
  unsure at all n locations
agcttctacttatgtggcagggcgggcttccttcactttcttgtctccaacgcgagctttgaccactgttcttccttccagcgatgcttcttttcatgttcgcctgagtgggcttatagcctaaaccatacttcccacggtttccttgagtatttatcaggccagttatgccaccgttgtctttgcctaaacccatcccgggttcataaccgttccccaacataactcgggccatcattaccgctgcattggacagacaaggctgcccaaagagggagtccacggaggaaatgctgaccacctcanaagactggaaagcagtttctaacgattcttctacggcttccacataaggcatggaggatgggcagcttaccaagatgtcttcctcgcctgaca

SEQ ID NO: 19477 - DNA, 432 bp, Glycine max
  unsure at all n locations
tgtagaattatggggtacccatcacatgtggttctatgtggcggtcgggcgatggtgcacaacaagttttccacatccccaaagcgcgcataaacccaccatcccctgttgcccacctccaattgagcttacgtactcccacgtagcccatatcctcgtttctctcaacaccgggtccccatcaatcctcccaagcttccccaacatccaggtaaaacaacattcaaacataacaaactatcacagcgaagaaaacagggcaaaggcagaagctctgcccaaaacacaactcaaaatcacagctttttctcacttaaagaccccagtaacatttccttcgttccaattcgttaaccattggatcgactcgaaaattttactggaagtctctagtacataagcctacattntgaccgttgggatctactagaa

SEQ ID NO: 19478 - DNA, 402 bp, Glycine max
  unsure at all n locations
agctttgttccatataaaagttaattcaaacaaaataaaattgatatagttgtgacaacttctagggtgaaaaagtttatcaaatgatctatgagtgaagcaccattattaatccttagatttattattaaaatatttcgatggttcaaattaaaattaaataattttaaacaaacaaataaataaataactgtatttctatctttttcattctcaccccacccccaacatctcaaagatgttccacaggaatctgggaaatcttaaaaaataaaaattgttcatacatgaaaaattgataaaacattaaatacattntgtccataaagaaatgctctcatgtgtgtgcctgtaaatcattttcatcacgagaataacaaaataatctaagtaactgaacat

SEQ ID NO: 19479 - DNA, 432 bp, Glycine max
taggcctagaggggatggaccttttcaggttttggatatgatcaataacaatgcctacaggttggacctcccagaagagtatggagtcagcaccacttttaacatttctaatttaattccttttgcaggtggaactaatattgaggaggaggaactaacagatttgaggtcaaatcctcttcaagggggaggggatgatgcaatcctccctaggaagggaccagtcactagagccatgagcaagaggctccaagaggattgggctagagctgttgaagaaggccctagggttctcatgaacctcagggtagatttctgagcccataggccaaggttgtgtccaattatctttgtacatattagattaagatgtcattatattttgtctttgtatttagggctccatgatgtaggtagggtaccctagaaata

SEQ ID NO: 19480 - DNA, 398 bp, Glycine max
tcttgctttaaaatttgaattaaaacgtttagaaattgttggtaatcgattaccatatatgtgtaatcgattacacagtgcaaattttgaattcaaattttaatagctgttgtaaatcagttttggccactggtaatcgattacatcctctggtaatcgattactagagagtaaatctcttgaaaaagacttttttaacttaaatttcttggccaaaccttttgctacttcaattggaattcccttcctatttaatgtaatcttcttaagactttagagactgtcttggtcatccatcttgaatatctttgatttctttgtcttgaataaaactttgagaaacatgtaatcctttggcaacatcaaaacatcagcttgatcctttgtctacaacctac

SEQ ID NO: 19481 - DNA, 402 bp, Glycine max
tctgcttctattgctcttcttcatctttacttgggctatctcagaccttttatgtttgttgtctaagattttgcatacacctccttcaaagtgaagtgtgtagcttctctccatcatttgaccaatgcttagaatattttcttttaggctgggaactagtaagacatcatggatgagtcgcatacctttatctgtctccaccatgacagtgcctttgccttttgattcaaccacacttccatttcccagtcgaactttgactttgacagactcgtcaatgcttttgaaaatagtctcatccttggccatgtgattgctacatccactatccaagtaccagcttcctcccttttcttttattgagtcttgagtggcatagaacgtacattgttcttgatcatg

SEQ ID NO: 19482 - DNA, 435 bp, Glycine max
taagctttaactatagaagatctccaggatgggtatcttttattaacaactatttcgaaagtgcaaattaggttatgagagccttcttttagggttctcaaagcgtattagaggcttcttttcaatggctactagatgtagttaagtctttacagaactgagtgaatgaactgacaatattagaaaattacaggacacaagaaatacctccattattatcagttaatggtgcaagagtcttcaagtgcacatgcagtgcatacgatgatcacaatcaagacacgcacaaggcatgcgacaagtgcacaaacgtatgcaatgagaagaaaaacattatagaacccacaaacagcctgtacagtgaacagctgttctcgctctccagacctccaaacagcgattcaagcatgcaattgattggtagtggcggatgaa

SEQ ID NO: 19483 - DNA, 342 bp, Glycine max
  unsure at all n locations
agcttcataatgattagatcattatgatgcaatcctatcccccaagggcattggatagaagactccaagaagattgggccagagatgtaggagaaggccctagggttctcaagagccttaggatagattttgggcccatgggtttagtatgagaccacttatctttgtacatattagattaaggtttcattatttttgggccttgtatttagggttccatagtgtagggaggctaccctggtaatataggattttttagcccttgtaatttatggcacctagactagtttttgtattaagggtagttntgtaattttacatgcattaagtgcactatttgat

SEQ ID NO: 19484 - DNA, 442 bp, Glycine max
  unsure at all n locations
tcatcaatgtttcttggttcaacctgtgaaacttaagctcatgttgttacacaaaattctaagtctagagttcgtagaaacaccctttgagatttctccaactatgttgtctaaggggagatccttttgagttctccactctctaggaaattctttaggcattgttgtatagatctctttgctttgttcaaaatcttcagccttgatgtcatattcaagaaaaaaatccttttcctaaaaacctgtatcttcttaaaaagaattttcttgaacaataaagttagtttcatcacaaaccacacatataaattcttcaacagttaaagttcttttattgaatactccatatgctttactatgcaatgaataaccaagtaagatagcctcatcagcctttgcatcaaattntccaagagagtctttatcattgtttaaaatgaaa

SEQ ID NO: 19485 - DNA, 383 bp, Glycine max
  unsure at all n locations
tagcttangctaaattagtctaaactttcgtaagctatttaagctaagtctagtccaacaagagggatctgaggacgaagcttagtttaagttagtctaaacctatgagggctgtctaaattgagcctagtccaacaagagggatctgaagacgaagcttccattcattcaatctcactagggatcgaggtttagtaatttatgcttcagcatacaacacaaaagcatgattgattagagaaacatctttatatacatcagctggtttgttagaaagacccaacatctttacctattgcttgtcaatttacttacttgcattngtactgtttttagcctaaacttagttaattctgtctaaatcatcaatcatcaatgttttt

SEQ ID NO: 19486 - DNA, 201 bp, Glycine max
  unsure at all n locations
actatagaaactaagcttgcacttgagggngacatacaagttttggttggttttaaacacacccacggggggagcttctaatgaaattgagccaacaccattttcatattgttaatttaattacctttgcatgaggaactaatattgcggtggaggaactatcatcattgtggtccaagactcttttagggggaggggaag

SEQ ID NO: 19487 - DNA, 397 bp, Glycine max
  unsure at all n locations
agcttttgataaagaaagaagaagaagaagttcaaagagactcagaaatcaatgtggaaaaattgcttgtgtaaagaatgaattagaaaagatagatcttaaaatgcaaaacaaagccttgcttttatagactcttcatgtctggtcaagagaaccattagaagagttatgacctttagaaaaacttaaaaccaatttgaaaaagtcaaaaactatttgaagagttacatcttttgatttgttcagaaactatcactggtaatcgattaccaaatcagtgtaatcgattacacaaagcttttttgtgaaaggatgtgactcttcacaatttaatttgaattccaacattcaaacacactggtaatcgattaccanatcattgtaatcgattacaaca

SEQ ID NO: 19488 - DNA, 430 bp, Glycine max
tatccttttcttttacagattgcaactttaaatacctttctatcttcattaactagcccatcagatttcctcccttgaatattggcatttcaagagttctccgccaatttcttctttgtgaagcattccccttattctctcctattgaattgtctcgcaacctgccctttggcgggggtgtgaaaaggcctatcgaatgggccaagggtgcatcttccgttgaaggaaaatgtgtggagtcgccatcaacgtttatttgaggaaaacgtcagaaaaaccaaaatggaaaaggccgagggtttgcgtgttttgaaaatgaggattcgaaagttgtttacgcaagaggaaggtattaacacccccacacacccgtcacaagggaaggcagcctctaatagagtgtgaaaattatgacttcaaaactatttat

SEQ ID NO: 19489 - DNA, 405 bp, Glycine max
  unsure at all n locations
agctttattagagagacaagcctgttggattagagctagattangtgctacgcactcttgatttggatgggattgttaagctcttcaatttggaggaaggggttgtctttactgtcaatagaactcccaatatcttgctctattggatagtatttactctacaatgaccctgataatgattatgatttggcttatgtgatctctagatggttggatatgtagaaatcctattagtactagtatcctctcaaaataagaaactagacgatgtcattattggtaccataccaaagcatattgacaatgtataacccctagatacctatacttcataaggtcgagtattgcatatttgtcttagatttttagaatgtgagtttaagcctaactcaaccccaaagctag

SEQ ID NO: 19490 - DNA, 442 bp, Glycine max
ctaagcttccgtaaagaagcagaaacaatagtggctcgttgttttctgtatgatcagttacttcactttcttatcttctagattcttcttcctatgcatgtctttgatctgcataatcttcaactgtttataattttttaatcttaaatattttaatggacaacattatacaaaaacttaataaaacaaccaccaaattttttgataaaaaatgccttttttccctctctcatttacttacatatttttctctctctttttattttgattaatgtatacgtggatcaatacatgatttttctctctcaactaggttgggggtcacaccttacaacatctccttcctgatttgattttctctctcagctgggttgggggtcacactttacaccatcttcttcctgatttgattgatgtatacgtggattaatacaatgcatat

SEQ ID NO: 19491 - DNA, 395 bp, Glycine max
agcttgagttgttaggtgaagatacataaatgatttcattcattctatcttcttattttcttttcttgtaagtacttattgagaggtttattcaaaaatatcatagcaggcaacattcctagactcatcgtaacagatgcagcaaaacatccatgccatgattaatcaagaatttaaaataaaaaaaaataggtaagtataatcaacacttcatagtataaaccttaccaccaaattaggaaacaagtttaatgagtcaatagaggccagatcattaatgttgttattagctgtatgatgaattgaaagacattagctggtatccacaatccagatagcattgcatatgttgaaaatgatacttatcaagaaggaaagtataatattacccaata

SEQ ID NO: 19492 - DNA, 437 bp, Glycine max
  unsure at all n locations
ntaattcattatctttgaagacactgacttgcttccattnttttaatctagaactggaacaagtggagcaagacccagatttcataatgttgtctcgccaatttaaagctactgcaatggagcttatttctgttttggagctggtaaagctttgacctttaacacttctactaacattgactgaaaaacatgacatgctatttgagcattgagctttaaaaactctagtattcttttaagattggttggataatatcattatactccatgtttgaataaaatattttgtgttatagatatgaactttttgttttatagtgataaactatagtttttaagattttgggaatgccatcctttctgtgttgcatttgtattagttgcttacatttccttgctttattatagaaacaaaaaactggtggtaggacaaaagt

SEQ ID NO: 19493 - DNA, 408 bp, Glycine max
  unsure at all n locations
agctttgctttttttttcttcgccagngaaaggatcaatgtgggtccgaaaagacgcaaatttgatcatcctactatgacgactgagaaaactggggcaaataaagatggtgaggatgagggagaaacccatgctgtgactgccattcctatacggccaagtttcccaccaacccaacaatgtcattactcagccaataacaaacctcctccttaccccaccacccagttatccacaaaggccatccctatatcaaccacaaagtctgtctaccgcacttccaatgacgaagaccacctttagcacaaaccatataataacaccaacaaaaaggaattttgcagcataaagcctgtanggttcaccccaaattccggtgtcatatgctaaacttgatcccatatctac

SEQ ID NO: 19494 - DNA, 438 bp, Glycine max
  unsure at all n locations
ntagactcaactatcttcactttcagggatttagacgtgatcttcttctcttcctatttggagctcgtctctccaaattaagaccaacagagtccctccgtgggagctgatcacaagtttgaagatgaaccttgaaataaatggaacacactagaaaaaggaaagactagtttgtatgagtaatttcaaagctttttcaacaacagtttgcaaatataagtttaaaagcaagtttgaaattgttttgtccaaagatgaaaattcgaggaaagggatatacatgttagaacaagaatacttgttttttaactaattcattcaacttgaattatgtctaattcttcttcaacctaaaaagagttccattaatcaataattgactacaaacaagttttttttcccaccaatgcttgcttacaataagaattctctttgtcg

SEQ ID NO: 19495 - DNA, 400 bp, Glycine max
agcttgtacattcaatttcgagcgttccgatatattacgggactcaatcggacatccgagtaaaaagttattgttgtatgaatccggacatagctgcaacattcaatttcgagattttcgatatattacgggactcaatcacacatccgagtaaaaagttattgtcgtttgaatttgctcagcgcttcggtattcaatttcgagcgtctcgatatattacgggactcaatctgacatccaagtaaaaagttattgacgtttgaatttgctcaaagcttcggtattcaatttcgagcatttcggtatattacgggactcagtcgaacatacgagtaaaaacttattgtcgtttgaatttgctcagagcttcaacattcaatttcgagcgttttgatatatt

SEQ ID NO: 19496 - DNA, 449 bp, Glycine max
  unsure at all n locations
ctcagcttctatataagctgaaccattntatcaataaagacaagttgagttttattcagaaaattagagtttatctcttttatcttagtgagagtgattctcctaaattcttgagtgattcaagaacaccttggctgtatcaaaggactttcacaacctttgtgtgttgccctcgctggaaagagtgattctttccttcctttcatcttcacccttgttctttcaaaccacaattccagaaaatccacctctgcccagaattatctcgtggccataactcccattttacgcactcaaattaagtgattcttgagcctaaattgaattccaaaacgagagcttccacctcgttttggaatcacctcatttggagccctgtagcttccgttattgccatttctatatttctgtccagccaccacttaacctacgttntaccatcccattca

SEQ ID NO: 19497 - DNA, 316 bp, Glycine max
tcaatcttgctctaaattcacatggatgtgagtatttatgggaggaggttgtatgtcatttctgttttaagagtagtgtcccgctggtaaaactaactttccaaatgtttgccttcgcaggaaatggccccgaggaagcttgcctcaaagaggtccaggaaggacaatgcagcagaaggaactagttccgctccggagtatgatagtcaccgctttatgagcgcggtacaccagcagcgcttctaagccatcaaggtgtggtcgtttctccaggagcgacgcgtccagctcaaggacgacgagtatactgatttcc

SEQ ID NO: 19498 - DNA, 431 bp, Glycine max
  unsure at all n locations
tctcccctattntgctataaatagggggagatttgattatgaaaggggttcagccccttaggcacttctctctctctctctcgaaattgctgaggaaaattatttccgtgaacaaaatctaagccgaggcgctgccgcaacgtttccgtaatgtttctgtgagtaattacgtgaagattctcgaccgttcttcaagattcatcgttcgttcttcgttttcttcagtcttcaacgggtaagtacctcaaaccaagcttttcaattcattctatgtacccgtggtggtccacattttgtttcgtgtatttttattctcgttttcatttgctttttatacccccttttgatgtgcttaagccatttatttaagtcatttctcgcttaatctaaaaataaaataaatttccaccgatcatttaaattgtatcatc

SEQ ID NO: 19499 - DNA, 398 bp, Glycine max
ttatatttgtgggcggacgaaccctgatgaccacagtggcatgatcgctggctgacctacaccgatgttgtcagcagcctcttcacgggtcctcacactgacccttcctcctactgaagcatgtcgcctgtgctaggctagtgggcgcataccatctataaacatacaccaatgacttggctgacaccacccacgagcgggggtctttctcgcctatcctttagggctcgacgacactccactgagggactggtctcggtactgatgatatgactatagtgctactttaccttacgcaggatatgactgtaagacatgttgctgctaacactgttgatcaacttggtacccagagtacgcactcgtacgcttaaatgagtggagacacctttgggctt

SEQ ID NO: 19500 - DNA, 410 bp, Glycine max
tgtcctcggtgacgaagacaattgaataagcctctttttgcttttcacaggcgtcaacgattctcaaaatgaagggtctgtgtttggaagtggcgatgaggtggagaacaacctcggtgtcggaggtagtgttgaagatggacccgctgtcctcgaggttggttcggagggtgcggtagttgacgaggttgccgttgtgggccacgccgacggagccgaagcggtagccggcaacgaagggttgcacgtttttgagcatggattggccggcggtggagtatcggacgtggccgatggcgaggctgccggggagctggtccagcttcgactggttgaacacgtcggaaacgagaccaacgccggtgatggattggaggacgttgttgtgaaccgtaacgattccggcgcct

SEQ ID NO: 19501 - DNA, 364 bp, Glycine max
agcttctcaaggaagcttcttaaggaagttttctcaagaaagcttctcaaggaagctacctagtctataaataaaagcatgtgtaacacttgttgtaactttgatgaatgagagtcttgtgagacacaaatcaaagttcaacttctctctcttttttcttccttcaattttgtgctcccccctctttcttttcctccattgaaacatccttccaagcttcttatccaaggctcatcttggtggtgaagctccttcttccatggcttattccctagtggatggcgcctcctctcacctcttctcctttgttttccgctgcatctccatggtgaaaaattaccattaaaggacctcattgaagctc

SEQ ID NO: 19502 - DNA, 432 bp, Glycine max
tctcaaagatgtacttaaccaggtccatcttgttatatttaccaggtggtatggctcagcatgtattgtcttagacggtgggacgcccagactaaagcacaacacgttctttcgagcagggagtagttcatttcataggccgtgaactttttactcaagtagtagacagcgcgttctctcttcccggactcgtcatgttgccccaacatacatccaatcgactcatccaaaatcatcatatacaagatgagaggccttcctggtaccaacgacataagcacgagagggttcatgagacactgtttgatccttccaaacgcctcttgacaatcctcattccaacggacggattggtttttgcgtaagagttggaataacggctcacaattagcggtgagttgtgatatgaatctggcaatataattcaaacgt

SEQ ID NO: 19503 - DNA, 399 bp, Glycine max
agcttgctcttctgggcgagctaagtggcaagctcctcccctattttgccataaatagggggaggagtgaagaagaaaagggttcagcctttttggcacttctctctctctcgaaattgctgaggaaaattatttctgtgaagaaaatccaagccgaggcgcttccgtaacgtttccgtgagtaattacgtgaagattctcgaccgttcttcaacattcatcgttcgttcttcgttttcttcagtcttcaacgggtaagtacctcaaaccgagcttttcaattcattctatgtactcgtggtggtccacatcttgtttcatgtattcttattctctttatcatttgcttgttatacccccttttgacgtgcttaaacccattatttaagtcacttctcg

SEQ ID NO: 19504 - DNA, 431 bp, Glycine max
tgccacccagctcgcccaggcgagcaaggttgttttcttctattcaacagccttctggaggaatcttctggagggcccaagtgggtctggttgctatttgcacccccatttttactaagtacacccccttgcctttttttgggtgattcttttttcgtaaagttacggaaacttacgaatttcgtaacgatacttgttttctttccgtaacgttacggaaccttgtggattacataatcatcccctttttgacttacggaatgttacggaacctcactaattgtgcaacgatgcttccatttgatttccggtatgtcatggaaccttacggattgtgcatcaatattttcttttgttttccggcatgtcccggaatttcacaaattgcctaatgatgggtgccaagcacctcacaaggaccaaacaaaagt

SEQ ID NO: 19505 - DNA, 217 bp, Glycine max
tctagcttctccctcttttccctataaatagggggaggagggaagaacaaaaacgttcaaccctcctggtatctgaggatcacttgaaattagtgaaaaaaatcgtttccgagaagaaaatcgaagccgaggcgcttccgtaacgcgtacgagacgtttccgtggttgatattgtgaagaacttacgccatccttcgtttgctatacgccgatcttt

SEQ ID NO: 19506 - DNA, 379 bp, Glycine max
tgtcaagccccccaacttggacaagtgttgacttagttttttctgcctaggtgtctggggtggacatacttttggctttgcaagtgagatctgatgagtcatgtgagaaaagccattgcatttgaagactttcccttttactgaccgctggagagtgccttaatgatagacatctcattttgtccattgatgcaggcgtgtgcatcacactcgcaatacttttgcgtacatgtcactcgtggatgacgcacacactggagacgtgatgcatgggtaagaggggctgtggtcgggtgcagaaaattatggtaccactctatcgccttacagctaccgaagagcatggctcctctttatatggagcatacgcttgatctgt

SEQ ID NO: 19507 - DNA, 396 bp, Glycine max
  unsure at all n locations
agcttttatgggatcaaggagtctactatgtgttcaacaagatggatgaggattccaagcacatcctaatagttaatggtttagtggttgctaaacaacaaaagtttagcaagaataacctaaaggctatgaaggtgtccttggaacaaagcttgaaggaaactccaaaagtgggcgtgaaagccataaacaagagaaaacaaaaagaggttggccaagtccattgttgatgaagaccttggtctgaacaactttggcatttcaaggaaaattanaaagatcatggttgaaaaacaaaagaagaacaaaaccagaaaacaatctcatagggatgaagaagaaaaggaaatataggcaaagaagcataggaccaaaagaaggcatgagtctattacg

SEQ ID NO: 19508 - DNA, 425 bp, Glycine max
  unsure at all n locations
ntntctttntccattgctcctcaatgacaatctcttcttcttcttcttattgggcttgcttcctagtttggacctttccctgttgctctctaaggaccctttgaacctttttatcaagttcaaaggtcttcaaaggcttatcttcactagcaacagtcttggccagtttcttctgcctcctttgtaggatttcatcttgatttacttaaggaatagggttgttccttctagtgtcaactttcattgcctttaggttaaaagcactgaagtgttgctatctggcaatgaaagttcccttgctgttgatggaatgcttggagtcctcatctagtctttcaaaggcatggaatacctagtgttcctagaggaagttgttgatgagggtggcagagtagatatcttccactcctcccaaggccttcatg

SEQ ID NO: 19509 - DNA, 382 bp, Glycine max
ttgcacttgaggagggaaggaaatttgcagctaatgaacaactctgataactacttgtactttatgactctcgtgctaattctatcacagtgtaaatattcttatatcagtttgtccaagaacataatcatgtgcttaatatcattcattaacggtcacggatctatcgcactattaacgaactatggatatcagacctattgttaattacattttgaccgtataaatatcttactgattcaagcagatagacgcttaatacgaagtttaattaactctaatggctcctggaggacccgaatttgaacatgaattacattgatcttgcaccatgttttaaacacctctgacacactatccagctattatgcatcatgctcag

SEQ ID NO: 19510 - DNA, 430 bp, Glycine max
tccacttgtatactgcatcagtaatatttaatagctctatgttttccctctcgtggatgtagccttgatcaaaggtgaaccacgtaaatctgtgtgttctttctcatctctctccccctttcaatttgctgcaaaatctgtgtgtatggcatttctgttctgttgcatctactgttgttgttcttgattgttcttcatcacttccataacaagaatgatattataacacaccaggtaagaggaaagaagaagaaacaaaataggattataaaatagacgcaaatgattataatgaaaaaaaaaagtgttttacctatgatgaggatgaaggcaacttagattgagtttatgaaaaaggagaggatgtggtggtttccatatttacctagcaaaaaaaaaaaaaaaaaaagaatagttcataacgaagttg

SEQ ID NO: 19511 - DNA, 201 bp, Glycine max
accatgacgcgacagactctatggccagaccgacatcatgagcggatgagggggagccaccttcataatggggccatgtctgagttgtacaccgtgcagatactgcagggggtataatcctatgcccgtctacagtgggcttattgataattgagccggactcttcctagatatagccgaccaactgtgacatatgatata

SEQ ID NO: 19512 - DNA, 387 bp, Glycine max
  unsure at all n locations
agcttctccttccaattcattccaaatacgttcctagtttttatatctaataactaataatctgatcatatactacaacgtccctagcttaatttgcagaataatgttacatatatatggcatcctcaaaccacatatggcatatactatttattttcatcttttacatgatgtatatctggaccgaaagagacacgggtgacgggtccaccccatcatgaaccatttattttttataatgttgaaagaattggcatatatagtagattaattctaattggtttgaccatgatcaaggtatctgaattttttgtacagaatgaatattttagtactgtcattgcaagagattattncgtatgagaactattcataaacatccatcat

SEQ ID NO: 19513 - DNA, 437 bp, Glycine max
  unsure at all n locations
tcacatgtttgagcggactcatctagtgaaacatctttttgatcttgaaggattttctcaagttttaaatgatctttggatagattcttgaaataacttcatagatttttagaagcatttgagagaataaataagttacataaaatttcatgataagattttttaagagacttagggtcattgaaatttaccacatcttcctagtctgatttggatccttcaaaagttgtgtctgtcatcaagcatatgttggcttcttcatcagacgaggtgtcgtctaggtcttcacatgtgctcataagccccttattttctttggtcttaaagaatttcttcttatcttgacttttctcanaatctggacattcatatttgaagtgtctaggctttttgcattcatagcaaactatgaagcttttgtttttattccttttttt

SEQ ID NO: 19514 - DNA, 368 bp, Glycine max
  unsure at all n locations
gcttgtcgtatcctctgcaagtccaagggggtcgaacccaaaatctccagcaagactgaaaagcatactgtttatgtcaaaaacttgaaaagagacagtagcaatagcagaacaagatgcccaagagaagtgtacagcctcacgttccatcaagatgaggtgggggatcaagtcctgggagccatgtatgtcgctgttgcgccccaacacaagtttgcctataacgtggagtggcagcagcaccatccccaagccacgataatcttccagctggtgaacctctatccaagctcttggtgttgaataaagagccgggctgaatggagaagcttcttcctattgctacgggcattggtntctgattatct

SEQ ID NO: 19515 - DNA, 424 bp, Glycine max
  unsure at all n locations
atgctggtgtaagaaccgtgttttcattttgtttcttatgttgngatccttgatcatcaatcatttctttctggaatagctgatgttcgtgatcggcacagggatatgcgacttgatgttgataacatgtcttatgaggtaaaatctcatttctacatctggatggaaatattaatatatctatacaaccatagtgtcagtttatcccttatatttcaagtcagtgcttcgctttagagagtttctcatgtgacattcgtgactataacaggagttgttggctctggaagagcgcattggaaatgtgagtactggattgagtgaggaaactgtattgaaacacttgaaacagagaaagcactcggctganaaagggcctcagattgatgcagaaccctgttgtgcttgtcaggtaaacctgact

SEQ ID NO: 19516 - DNA, 363 bp, Glycine max
agcttctatggaggctgaatctttgagcttcaatgaggtccttcaatgatgattttcaaccatggagatgcagcggaagataaaggagaagaggtgagaggaggcgtcatccactatggaataagccatggaaggagaagcttcaccaccaagagagtgccttggataagaagcttagagaggaagcttcaatggaggaaaagaatgagaaggagagagagggggagggaggcacgaaattgaaggagaaaaagagagagaagttgaactttgaagtgtgtctcactagtttcacattcgtcaaaattatgacaagtgttacacatgtttcaattatagcctaggtcattaactaaatgaaag

SEQ ID NO: 19517 - DNA, 433 bp, Glycine max
  unsure at all n locations
tgagcatgtcaacatgaagcatatntcttaactgtcgttaactgatttactaaaaggactacccaagatttgttggaaaactcatcttctttgtgaagcatgttataaagggaaacaaatcaaaactacctttaaatccggagatattgtttccactaccagacctttgcaattgttacatatggacctatttggacctacaagaactttgagtctaagaggaaagaaatatggctttgtcatagttgatgactattctagatacatgttggtatagagaaaacggttataactgtctgtaatttattaaatctataaggtaattgattattgtaacaaagttaccaattagattatctaagtaatcaattaaagtgttcatccaatatatggaaaacaactcaagaacaatgtaatcaattatatgacctga

SEQ ID NO: 19518 - DNA, 401 bp, Glycine max
tcaagcttggagaggatgcttcaatggaggaaaagaaagagggagagaaagagagagggggcagcacgaaattgaaggaagaaaaagggagagaagttgaactttgagttgtgtctcacaagactctcattcatcaaagttacaacaagtgttacacatgcttctatttatagactaggtagcttccttgagaagcttgtttgagaaaacttccttgagaagctagagcttagctacacacacccctctcataactaagctcacctccttgagaagcttccttaagaagattcctaaagatgtttgagcttagctacacatacctctctaatagctaagctcacctccttgagatgagaagctaaagcttagctacacaccccctataatagctaagctca

SEQ ID NO: 19519 - DNA, 432 bp, Glycine max
  unsure at all n locations
tacatattggaaaggtacactttcgaaagtctttactgttaaaaaagctgaattttttaacatgagatgtgaaattggaaagatgctaatctacatagttcatacttttttataaatgtttttttttttgccaaaatatttttccacgagagaaagtgaagtgttaatgggatctgaataaggtatcaaccaagaaaagaaaatacagccaaaaccaaagcagagagacaattagcaataaaactaactaataaaactaaggagtaaggaaccaccaaaattattcagggtctctgtcctgtgttgtacatacattaaataaatggcaaggttctaaaaccactatgcataatctaacatanaataaattatataaataaatgcaggtaccttaaatttgatatggccaagccaagctttgaacataatcat

SEQ ID NO: 19520 - DNA, 400 bp, Glycine max
agctttttatgggagtcaagaaaatgaaagtgctccgaaaccattagctggaaaagaagattatgatcgggtcaactacatcgtaactatctttgggaagacccaaaagaagccatcatctgagctaaacatatggaagaaaaggtcaatattctttgatcttcgatactggtccgatcttgatgttagacattgtatagacgtgatgcatgtggagaaaaatgtctgcgatagtttaattggcactcttcttaacattaaaggctagacaaaggatggtttgaagtgtcgtcaatacttggttgagatgggtatacgagagcagttgcatccgatctcacaaggtccacgaacgtatctgcccccagcatgttagataatgtcaacaaaagagaagtga

SEQ ID NO: 19521 - DNA, 434 bp, Glycine max
tgttgtcttcgtttagtttcttggttgtagatatctttttatacaatcccaccttgtgatatccaccagaattgttcgcatatgaagcatacatcaatggggggtataattccaaccttattgaaaaattttatttgcataatatcacttgtgctcaatttcttgtgaccaagtaacattgcacaatccatttcatccaacatgtcatggttgtggtcaaagtcaacatatgtaacataccaatgatcgttactaaagttaacgtgaacatgaaacctagcattgcaaccaccttgtatcattttttcctcacgcttcctagttttcaatgtcaaaccactatcatttcaatatccaacatgagagcaaataaaagtttgttgtaatgttttccctataatgtttctcataacaatacttttacggacaaagaa

SEQ ID NO: 19522 - DNA, 384 bp, Glycine max
tttgtttggcttggcttggctcttaactgtgttgccctcaaagttctgaacattatcttcaacatcgtgcactggttaaaggaaaaaaattattcaagatcacttggtagcgtctttggcattacgtggtatatggtttctttgactactttataatgaaattataacgctcattttgattctatttacttgattaaggttttcttctaaaataggcacagtctgtttgctattgattctcttgtttggaaaagggactcttgatttaatcttgaaatcataggaatttgacttctctaatatgtgtaacttactttaagctcatggttgcagaggaagaacaatacaaatagatcagtgttatgtgtcttatattgtttttat

SEQ ID NO: 19523 - DNA, 431 bp, Glycine max
  unsure at all n locations
tgttttaaaaataatgattntagatcaactaatacgttttcataggaaaatttgaacacgagggtgaaatcttaattcagcacacacccatcattgggatttttaatttacattagaaaatgtgatctcgaagtttaattaattattttagaggctttaaaagttatgaaaaattatgaaagcttaataggttatatatatataaaaatgtacatcatatcgatggaaaattcatatttaattttattctgcttctgcctcagctccatctattactcttgctcaacaagaaaatattagcagcttagatattgagcatttacaaagtcatcttggacacaagctttctggtcagaaatatttactagtattggatgatatatggggtgatgatcgtgcacaatggatagtgttgaaagatttaataaaag

SEQ ID NO: 19524 - DNA, 402 bp, Glycine max
  unsure at all n locations
tagcttctatactttatacaagaatgaagctctgataccacttgttagacgagtggcctcagatatcttatgaagggggggttgaattaagatattccaaactacttccccaattaaaatctatttcactttttattcgagttataaattcccttaataatgaacttcttaaatattgattcaaataaaacaatttgaatatgaatataaagcaataataaacaaaggagattaagggaagagaaaatgcaaactcagatttatactggttcggccacacccttgtgcctacgtccagtccccaagcaacccgctngagagttccactatcttgtaaattccttttacaagttctaaacacacaaggacaatccttcctttgtgtttagaattccattacaa

SEQ ID NO: 19525 - DNA, 428 bp, Glycine max
  unsure at all n locations
tctggtgggacatcttgacttgctttccaatctgactttcaccacagattctgccttcttctattttcagattgggaatgcctctaacagcacctttgtcaatgattttcttcatgcctcttaagtgcagatgtccaaatctttgatgccatatattgacttcatcttctttggagactagacatgtggaggagtaactggtttcttgaggtgtccataggtaacagttgtcctttgatctgctgcccttcattaggacttcactcttctcatttgtcaccaagcattctgactttgtgaagtttacattgagtccttcatcacacaactgactgatgctgatcaagttcgcagtcagtcccttcaccagcagtactttgttcagactangaagtccttcatggactagctntcccattccagtgatc

SEQ ID NO: 19526 - DNA, 398 bp, Glycine max
  unsure at all n locations
tttcatgctagcttgaggcgagcgacatgaagtttgccttgaattggtttaaactttgtcaagagatcttcttctttcttgaccaattctgctttagatcgctctgtttttttttttattggcccttgtattagcataagtttttccttagccttctgaaaacctttttgagcttgaattaacttatttcaatcctgctctatagaagactctatttcaacaatataaattgtatgttgactatgtaattgatgagctttaaaggcattattgaagatattaaggaaagattccattttcctttngaatctcatcaaccaccaagttttgaaatttgaacacctcattgattgattgttgaagttgaggcttgtaattcggattggaaagagagtctt

SEQ ID NO: 19527 - DNA, 412 bp, Glycine max
tccgcttattagtgcacaactccttctttaatttagcatatcttggaattttctttattgcatccagcagagatatgtttacctctacttttctaaatgtttctaatatctccttctctgcctcttccatttttttgttggaaattgctctttgagggaatggaagagggatatgttgcttttgtaaattagaattaccagtggaagattcacctgcatagaaattgttaggtaacttactctttaaatttttgtcatcatctttttctggagtagagtgaggttgggtaggttcatttgcggatgaggaagatgctactggttaaggtccttgacactgctttcctgacctcaatgtaatggcactcacatttttgggattctggacagattgagaaggtaatcagtcaga

SEQ ID NO: 19528 - DNA, 428 bp, Glycine max
  unsure at all n locations
tataagaacaaaatngcctaatcattttcttttgtatgtgaattacgacgcatcaaaaagaatcaagccaaggctattgtgcaagcaatcaatggggcaaaacacaccaaattattatgatgatggatggctcaaattctcacaaaggtaaactcatcactttcaaattgagctttcaaaactatcatgacatgtagagaagaatcaaggatttctactgtggcatttagttttggggtctagggtggggtagtgaagtgagtcataccatgatggttcaaatagattttttacttaatagattcacctccattattagagtaaaatgagacaagtgaggtattgaaatatttttcatgcaagactctaaattttggaaaaatagaagagacatctaatttattctttaatggatacaaccaacaata

SEQ ID NO: 19529 - DNA, 396 bp, Glycine max
  unsure at all n locations
agcttcttatccaaggctcatcttggtggtgaagctccttcttccatggcttattccctagtggatggcgccgcctcttacctcttctcctttgtctttcgctgcatctccatggtggaaaatcatcattaaaggacctcattgaagctcaaagatccagcctccatagaagccccacaagcaagcttccatcaagtggtaatcagagcacaagagcttcaattaggtgctccttaaacctccattaatttttttgctttaccttctcttccattattggttcttcattntttctccatgtatctcctcacatgtcttggtctanatgttgttaacatgattctttagagtttcaaccaattaaacttgttatagaagctagatttgantttctat

SEQ ID NO: 19530 - DNA, 424 bp, Glycine max
  unsure at all n locations
tccatcaagtggtaatcagagcacatgttctttttcttgtgctccgtaaacctccattaattntttttgctttaccttctcttccattgttgtttcttcatttttttctccatgtatctcctcacatgtcttgtgctaaatgtttttaacatgattctttagagtttccaccgattaaacttgctatataagctagatttgattttctatggttcaaatttcttgtttttgttcttgaaccatgaattgtgttgagtttaggttcctttgagttttgtcttgttattttttgtggctgaaacctaaaccataaaattcatacaaaaatattaaagtagaataaaagctcataaatctagagtgacttgttcacctattgtagttttgtcatagaagtcatgtctagtcatgatacttgtcacat

SEQ ID NO: 19531 - DNA, 333 bp, Glycine max
  unsure at all n locations
agctttaattgattaccattgatgtgtaatcgattaccagcaatgaaactcttgaaattcaatttgaaaagtcatgacccttcaaaatataactgtgtaatcgattaccagtgaagaatttcagaaaaagctttttgaaaagacacatttcttgaaatcattntgaaaaggcacgaagggcctatatatatgtgtgtctgacttcgaaaagcaagagagagattctaagagaacttaattgtcaaatgctctctcaacaactcttgggcaaacacttgcaaatctattgagaattcatctaggaacttcaaattgtattatcatctctaaaag

SEQ ID NO: 19532 - DNA, 439 bp, Glycine max
tgtgcatccaatagcttgatgaggatgtcccttatgttcttaaaactagactgatccatttgcttccaaagtttcatggccttgcaggtgaagacccgcacaaacatctgaaagaattccatattgtctgctccaccatgaaacccccggatgtccaggaggatcacatatttttgaaggcttttcctcattctttagagcgagtggcaaaggacttgctttattaccttgctccacgatccatcacaagctgggatgacctcaaaagagtattcttagaaaaaaaatttcctgcttccaggaccacgaccatcagaaaggatatttcaggcattagaaaactcagtggagagaacttatatgaatactgggagagatttaagaagctatatgccagttgcccgcaccaccagatttctgagcagcttcttctccaata

SEQ ID NO: 19533 - DNA, 337 bp, Glycine max
cagtttttggtagacctacactagcggtgatgcactacgaggttgatcctaatgatcctgatccactcaaggatttattacggctacgtgatcaacttttgagcaagctgaaaagtaatttactaaaggctcaacaatatataaatatgcgagctgattagaaaataagagatgtgccatttaacgctggagatatgattttagttaagctacagccttacatgaaacaatcagcggctttgaggaagcatcagaagctatgcatgcgctattttggtgcgtttatagtgattgaaaaaattggtacgattgcatataaagaacaactgcctgagtc

SEQ ID NO: 19534 - DNA, 441 bp, Glycine max
cttgcgatttatccagctggaatccataaatgatgaggtgatattgaaagcttgctgtttatgcaaaaaaatggaatccagaaatgaagtgacattggaagctactctcaatattgcacaatgtttcatagcctctctttgtcacaatagttcggcgatgtgaatcaatcatatcaaactataagatcgacatatcctgaaaactagccgaaccatagcctgcatttttgaattcgaatctcaaatttggaaatgggaaagggtggaaggaagaagcaacagataccttgcacgctcttgctgatggaagattgaggaagctaacacgtgttaggaagaaataaaaaattggaaaaaatggatagcactaacacgggaaatcggttgttgtttattactaacatacagactagtactatgatatcataatagtctttagtc

SEQ ID NO: 19535 - DNA, 389 bp, Glycine max
agctttttggagtagaaacatgggaccaactcattttatttcacaaaggaagtcgtatctagtcaaggtctgagagaccatacaagtttcctaacgatttctaattatgtgggccattaagactatcatatgctgacaatagccgagaagcccatgaatctcttcgggggcggagtaggtgtctgccatcgccttggccttggctaacaatcggggaagttcttgactcccgttcaaggtaagagcataccgatccatccacatggatgcctcttggtgtaaagagtcgatcaccctttctctagcctctttttgcgcgtatacttgggcatattcgtccgcaatcctatgctcctgggccgcggctatacctaactcttcttggtact

SEQ ID NO: 19536 - DNA, 441 bp, Glycine max
  unsure at all n locations
ctcagctgaccagaattattgatgggtaggtgtgaatttttttgttcctgttgcggagatgatcgtacagcgggtgaaccataagcggaagtttcttttggtgaggtagccatggaaaagcatagcgtttggaatgatttcgtatatctcagaaggctattgggaaatgctggttaaaacacgaatgccaagcagatataaattttaatgaagaatgtatatgggcgtgtgacgcaacggtcgaatttgctttgcggtgaacgtgctattaatgttaagtgattcgtttgggcacgttcagattgcagtagctgctataatttctctagcagacaaatgcccatcttgcccctcagtttttcaaactgattagcatccaaagcctttgtgaaaatatctgctattngctgctcagtgtcaacatgctctagtgtgatcact

SEQ ID NO: 19537 - DNA, 401 bp, Glycine max
agcttctaagaaagcttctcaaggaagctacctagtctataaatagaagcatgtgtaacacttgttgtaactttgatgaataagagtcttgtgagacatacttcaaagttccacttctctccctcttttattccttcaatttcatgctccccctctctctttctctccctctttcttttcctccattgaaacatccttccaagcttcttatccaaggctcatcttggtggtgaagctccttcttccatggcttattccctagtggatggcgcctcctctcacctcttctcctttgtcttccgctgcatctccatggtggaaaatcaccattaaaggacctcattgaagctcatagatccagcctccatagaagccccacaagccagcttccatcaagtggg

SEQ ID NO: 19538 - DNA, 436 bp, Glycine max
gcttgtcatgatccgtctctttggtgcaaaattgatatgtccttacttaacagcttataattttttaacataccaaataatcagccatgagcttacaagcgtacaagtggaaaaattactcaactcttaaagtatgttctacgtctgagtaatggaaatacatattgcttagtatttaactacaatgtttacttgactgatgagtagttcatcatagatattgaaaggtaacattgtctcttattcttaattaccccttaatttgtacatgcattattaaataaccttttaaaacaaaaatacttcatcaatattagtgctcaagtctaaattaaatgccacgtataatatttatataaaagttgttgtcatatgggattgataagcgtgcgtgtgcctcgttatgttaggaccccaaatttgaaacaactagttc

SEQ ID NO: 19539 - DNA, 496 bp, Glycine max
  unsure at all n locations
gatgatcgncnatgaaccctttggatgaacgcgatactatagaacactcaagtgggaccgtggtcccagactaataatcagaccgacgatactattgggaccgtggtcccagactaataatcagaccgacgatacgagtgggaccgtggtcccagtctgattatcagaccgacgatacaagtggaacagtgggcccagagagaatattcaggccagttatgctttctggcctgtaacaaaggacattaagtaaagacagataaacgtagactaaaacgtggtcgcatcagggtgctggcttttcaagttccttaagaatggcctcaattttctctatacactcagttggaacacgagacctgtccaggttaagcaccattttatcgcccttatacaatactgtcgctccaggagcaaactgatgtcgagagcttaaactagttcttgatgcagatgacgttttaagcacagaagttaaaagagtgataacttcttn

SEQ ID NO: 19540 - DNA, 394 bp, Glycine max
tttcttatgctgcaaacatttacaatagacctcctcaacctcagcagcaaaatcaaccacagcagaacaattatgacctctccagcaacagatacaaccctggatggaggaatcaccctaatctcaaatggtctaaccctcaacaacaacaacaacaacaacaacagcctgctccttccttccaaaatgttgttggcccaagcagaccatacattccttcaccaatccaacaacagcaacagccccagaaacagccaacagttaaggctcctccacaaccttccctcgaagaactcgtgaggcaaatgacgatgcataacatgcaggttcaacaagagaccagagcctacattcagagcttaaccaatcagatgggacaattagctacacaatt

SEQ ID NO: 19541 - DNA, 419 bp, Glycine max
tctctaggaccttaggcaaaccttcttctcatccttcatgatcaaactgcctactcgcgattggtccctctcctctctccggagcttaagctcgctgttactgccccacagagcccctcgaaatttgttctggtcgtgttcttccctacgagcccttttggtctctcgttccaaggccttggtggtagctatatttacatctctcagttcggcattctcctttcggatcttgagagctgctgatttgaacctttctttgactgtttgggcttgctcgagttctgtcctagaggcatgcacctcttcgtcttcctccggtgcctcaacttcctcccctgtaaaggttctcaaactcgggagccaacccagaccttgcatgtgggctgtcaaccacttacggtagccgctgatgggcccgc

SEQ ID NO: 19542 - DNA, 301 bp, Glycine max
agcttgagaggattgatggggacccggtgttgagagaaacgatgatatgggctacgtgggagtacgcgagctcagttggaggtgggcaacaggggatggtgggtttatgcgcgcattgtggatgtggaaaaacttgttgtgcaccatcgcccgaccgccacctagtaccacatgtgatgggtaccccataatcctacaagcttgagatgaggaagtgttgaagggtgaaacttcctgcttttattgttgaccacagagtggtaccttgagatatgtcgcggcggtcacgagaccttgggga

SEQ ID NO: 19543 - DNA, 438 bp, Glycine max
  unsure at all n locations
acaaactcaagcttaggaacccaagctcttagcttcaatgcaaggaaacatatttatgcctaataacctaactnttggttgtggaagtaggaaggcatgaaaattatgacttgcttgtgagagtttntactcgaatttgggctgccccatgaggggtaatttgcacctaagtagtgtggaaaatactttacaatggtatgtaaatatgtgtgtaaatatacgnggcatggaaaacacctctcaatggtgtgtatatatgtgaacatatggcatgaaattccttgcaaagcgtgaatgagtatcttcctaaatgaatagaggtcgcttcctaaatgaatgtatgatggcatggaattccctttttacatgcaagtatgtgcatgacgtaattagctttccaatatgcatataaataaatgtgagtgaaacaatgaaagt

SEQ ID NO: 19544 - DNA, 388 bp, Glycine max
ttgcttgtgaaataaaagtgtcaatatgtgtagtgtatacactggggcgtcgaaaatttaaagaaaagaatcaacaagattgaaaggctaatatatcctctataacaaaatcacaaccacacaatatttatgctccttataaagaatcctaacgcctaaggtacacactcaacacaagaacacatcaattttacaacaaattcgcatcgaaacaccaattggtccatcaaacacactaaatccgtgattaaaacaaaacaacacatagttgaacttcataaaacattccaaaataacccataaattgatcctcgatgtagtcgctcaagcgttattcgctagcaatgacattactggtgttctctaaagctcctcttccgattgctct

SEQ ID NO: 19545 - DNA, 396 bp, Glycine max
tcaaggttatgacttcatgttgctcatcctatctctaatatacacaccacaaattctcctcatgttagcctttgcctttgagttccacccatattttagtgcaaaccaagaacctgagaagattatactcattctttacggctgggttaggttgagtggattggaagcaagaaaaaaatactccctccgttactatttacaaaaggttgtagtcgaatttaagctaattaagtattaacaagtactaatatcaattaataagacattaagaagtaacagtaacaactataaaaaatagtatcaattattaatcatcaatcatgcgtcatcaatatatatattatcttatgtataaattataaaataagatcttatcacataacaatgactatgttc

SEQ ID NO: 19546 - DNA, 395 bp, Glycine max
ttgcttttcactttataaagggagagtttagtatgaattttgatgataccatctgatgtaattctaccccccaagggtattggataaaaaacttcaagaagattgagccagagatgtaagagaaggtcctaggattctcatgagccttatggtagatttcggacccatgggctaagtatgagctcacttatctttgtacatattagattaaggtttcattatttttgtgccttgtatttagagctccataatgtagatagggtaccctagagatataggaattttcaacccttgtattttaaggcacctagactagtctttgtattatgggtagttttgtaatttcacttgcattaagtgaatatttgatgtgtgtgttgggaaataaatttaat

SEQ ID NO: 19547 - DNA, 411 bp, Glycine max
tgcataggataaattggagtggaagccaagactgagttttctgagacataaacaacatgccctatttaacaacttaccttttcaagaggccaatctagattgcaccttctccacaacatcatcaaagtcaaatttagtcactcagtcagttagaggtttgaaacccaagtacttcccaagtgattagtgcaactaatctcaagaatgtttgaaatctcatcttgaatcctttgaggaactgcaagagagcaattgtgaatataattatctacattcactttaagaccaaaagccctacaaaattcatgcagaaccaaattcacaactctagcttgatcaattgaggccttacaaaaaaagagaacatcatctgctaaaaaagatgagataagggaggacccctcgagataa

SEQ ID NO: 19548 - DNA, 393 bp, Glycine max
ttgcttgtttagtgattttaagcttttccttcaagacatatgcactttgtccctccacttgagagttctgccatatctctttgactacctcatgaaaagatggatcttataaccaacaagtgagcattctaaatggttctggaccccaatcatagttgttatttttaaccaagatagggcaatgatccgaaacgtctctatttagaacctcctgtattaatccttgccaaacatctagccaccccttagtgcatatgactatatcaattcagcgtttagctccccatttatacaataccaagtgaatttgtggttgatcatatgaacatctaaggatttcaagttttcatataggcattgaattcctctatttcctatgtcaactatttctac

SEQ ID NO: 19549 - DNA, 423 bp, Glycine max
gacctaagatactaaccttaaaaatgaccacatcattatttagatctgttgtttctttagctttttacgcattaagtctctaacgatatattactcacttttactttttataactttaaacaatttttctcttcaactcaacaactttaaatagagggctatatcaagaataattctttgtgaagttactctcttcaataatctataattatacatacatacatatatatatatatatatatatatatatatatatcacattaaattaagtttatttaacagagtatcatataattgcaagatttataaacttaattaactcaataaaaactctcagttctatggatgaataaaatttaatacagagacgatcgagacttacactaatctctgaagatacacacgtgcatcttcctttattat

SEQ ID NO: 19550 - DNA, 51 bp, Glycine max
agcttgttgatgtggaactattgcttgcatgtgggtgtgtccgtcgcttga

SEQ ID NO: 19551 - DNA, 188 bp, Glycine max
tgtcacgcaagctttcatcaccaactagccttattgattttaactgcacagcgactttaagggcccaatgagtcctcgatgcttatatcacgaacttatgtacgctcaaccttggctgacgatatcaatggtgatcggaaccataagtagatatgaaatactttcaaccttggccgagagaggttact

SEQ ID NO: 19552 - DNA, 377 bp, Glycine max
  unsure at all n locations
agctttcttggaaaatgttattgttttgaaggcaatgcttagaggctttgagatggcctctggtctgaaaatcaactatgctaagagtcaattcggaatttttggagattatgttaactggtctcaagaagctgctcactttctgaactgtagacagatggagattcccttccactacttgggcatccccatttgggtcagatcctcaaatcaggtggtatgggagcctttgatcagcanatttgaagctaaactcactanatggaaccagaaaagcttatctatggctggcagggttaatctgataaattctattttgaacgctntaccaatctatctattatccttctttaagttaccccaaagaatagctgata

SEQ ID NO: 19553 - DNA, 420 bp, Glycine max
  unsure at all n locations
tccncttcttcccacgttcttgcccttgaaacctcaccttggtctcactactcttcacatcacgatgttcggtgtccttgaagaggtgaacctcatctcctctatcttcttctcttcaaacaatcacgccaaataaaacccctttgacaacgagtgctcgtcgcgaagataaaaaacccttaccgaaccggatgagtaaaaataagacgcacaaaggaaaatgtatcctatgcaataataacggtggacctaagttcgaatatcaaacttagaagactagttgtgttcccaaataatcaatttagcaacaattacgcaaattgagttttatcaaattaagaaagattgtttttgatcaatttactctttaacgaagagaagaattaacacacaagaactgtgtgagaaacatttataatg

SEQ ID NO: 19554 - DNA, 356 bp, Glycine max
agcttgatatgaggaagtgttgaagggtgaaacttcctgcttttattgttgaccacagagtggtacctggagatatgtcgcgggggtcaagagaccttggggacgtcaagtggggttctattgcccaaaaccaagcttgaccaatcccgacccaacccgggcatagtcgatcagtgagaacctatgatgtacctaaacaggcgagctcctggcagtcaacagataaaaggagcaaagaccacaaagcaaggaggcttgtggtggctggccagttgtgaaacttgattgatatgtgagatatggtctctggtaatcgaataccaagggtgggtaatcgattacaaggcttaaaaatg

SEQ ID NO: 19555 - DNA, 443 bp, Glycine max
tgcgtcacaattcattgtgacagtcaaagtgccattcacttagcaaatcaccaaatgtaccatgagaggacaaagctcatagatgtgaaactacacttcatcagatatgtgattgaatctgagaaggtgaaggtagagaaggtttcaacataagacaacccgactaatatgttcacaaagatcctctctagtgtcaagttcaagcactgcttggacttgataaattgtgaagatgcctaaagcacattggttgaagtgcagccttgaatcacaaggtacacacttgctgatttagagtcaaagtggagatttgaggtgtgtgactcagaatcacaaatgacacaagtgataatactatagagtaatgatgtcataactgttttcacttattataactgaattgggtttggcaccaaagcatagctagagtgttcatatatatt

SEQ ID NO: 19556 - DNA, 389 bp, Glycine max
agcttgtctcatcgtttatgcgagacggagaccaacatgctagctatcatcgccaagtaccaagaagagttaggtctagccgcggcccacgagcataggattgcggacgaatatgcccaagtatacgcggaaaaagaggctagaggaagggtgatcgactctttacaccaagaggcaaccatgtggatggatcggtttgctcttaccttgaacgggagtcaagaacttccccgattgttagccaaggccaaggcgatggcagacacctactccgcccccgaagagaatcatgggcttctcggctattgtcagcatatgatagacttaatggcccacataattagaaatcgttaggaaacttgtatggtctctaagaccttgactagata

SEQ ID NO: 19557 - DNA, 431 bp, Glycine max
tgtacgcacatcgttcgcgtgtatgatatccactccacaatgtttgaagtataggagagcttcaaccctataacgcaacgtggcagacaaaagtgggcagtaaacttgaatggtcgtcattgtcaatgcagaaggtattctgcgcttcactatccatgttcacacattattgcagcttgtggttatgtgagcatgaactactaccaatatatagatgttgtttatacaaacgagcacatcttaaaagcttactccgcacaatggtggcctcttaggaatgaagcagctattcctccttctgatgacgcatggacacttatccctgacccaactacaattcgtgcgaaaggtcggccaaaatcaacaaggataagaaatgagatggattgggtcgaaccatctgagcaccgaccaaaatgtagtagatgtgg

SEQ ID NO: 19558 - DNA, 393 bp, Glycine max
  unsure at all n locations
agcttgtgctccaacactgcataggaagtgatgatttcgttgcttgcagtgtgaaccaacaccttgcgctctgagccagggttctccaccagcctcaccacaccgttcttgaaaacccaaaccccagacatattcttagcttagaaacaagaactagaggcacaacaaattgaagaataagaagaacaaattaataccaagtgttttgagtgtttacttttgagtgcttctgagttagtgtgcaatgcaagatggggaggggagtatggggtattgatgtatatatagtggtggtgaattgaagtcatgggtaagatgggttttaattnttttttttataatgtagaaataataaaaactacatggtggtgataaggacagtatattgagatg

SEQ ID NO: 19559 - DNA, 460 bp, Glycine max
  unsure at all n locations
cgcacactatagacactcaagcttgttgaagggtaccttntggcaaatcctgattactgaatgtctttcttgttattaattaagagcttggctatggtgcaaagtaataagctagccttgatggatctgcaagctcagcaccaaggctttcttcttctatgatatcttttatttatttttgttctttattaaaacatgggcaattaatcatagattaataatttattagttttttttttaactttcttcagcttttgactaatacatatgtcctttgcattggctgcaaattgatgtgtcgccgcttgcaatttggttaaaaaataacctatccttagaacagactaagagacacagagatgttagggatatttttattcaagttatgtgctagggtttagagagaaaatattanaaaataaatgtccggatagataatccactgtcatatgggactgat

SEQ ID NO: 19560 - DNA, 393 bp, Glycine max
agcttgtatggttaaagtctcacgattgtcacgtgctcatgcaacaattgttagtcgtggctatacgagacatcttgccaaacaaagtaaggttagcgataactcgcctgtgctttttttttccatgctatatgtagcaaagtcattgatcctgtcaagtttgatgagttggaaaatgaggccgcaattatactgtgccagttggagatgtattttccccctgctttctttgacatcatgattcacttgattgtgcatcaggtcagagaaatcaaatgttgtggtcctgtttatctacagtggatgtacccgattgagtgatacatgaagatcttaaaagggtatacaaagaatctatatcgtccagaagcatctattggtgagaggtacatt

SEQ ID NO: 19561 - DNA, 441 bp, Glycine max
  unsure at all n locations
ntaagtntgagggagtttgataatggttgtgcattcctatatttgcaatctatttcacaacaattatctcacttttccttgaatcgtagctaagtttgcccttgtttaagttagggaatatatataattagttagatattttcatacagttaaaatttagaaaacttattagcttttacatgtttttacagtaattcagtcattttagtgcacctggaaggaaattgagggtttggaagtgaaaattgatcactcaatgagtttgccaagtagcttaactaggaagccatattagaagaagacacgtggtagctggtggctaagcaagaagtctatctctcttagcagatttctcttgaggaagccatgtcaacagcatcaaggctcgttgagtgatgcagcctctttggaagaagaaaaaaagtgatcccatganaaatt

SEQ ID NO: 19562 - DNA, 393 bp, Glycine max
  unsure at all n locations
agcttcccagatccgatcatggaaggacttggcaactgcctttattaggcagtaccagtacaatacggatatggctcccgatcggaaccagcttcagagtatgactaagcgagagcatgagtccattaaggaatatgcccaaagatggagagatctcgcagcccaagtcgtacttcccatgaaggaaagggagatgatcacaattatggtagatacgttacccacgttctactatgaaaagctgataggctacatgccagctaactttgcggatctcgtcttcgccggagaaaggattgaatccagactacgaaaaggcaagttcgaatatgcttccaatgtggcccccaacaacaatagaagagccncagtaatgggcgcgaggaaaaagga

SEQ ID NO: 19563 - DNA, 440 bp, Glycine max
ttccctttggcatcatcaaaacattcagcttgatcctttgtctacatagatgactctcaaaaagcactttctaaaagataagatcgaatcaaaagtcactaataagaaagaacaagaaatggtatttataattttaacaaacaaaactgatttcatcaattatcaaatgtggtaattgattaatttgctaaatttcctctttgttccgcatttccaaaaacatggtaatcaattacaaattgtggtacttgattatctcgtttcacaaagagcttctcaagcttccatggtttcgaaataatcaattattttgacacaaagagctattaaagtttccagatgtgatggaagcttgcttgtggagcttctatggaggctggttctttgagcttcaatgaggtcctttaatggtggttttccaccatggagatgcagcggaa

SEQ ID NO: 19564 - DNA, 318 bp, Glycine max
tatcttatgcgcatatttacttacaaatgttctcttgcacaagacattctattaaccgaaaaaatgcacccatatacaatcaaggcaactccgttacctagattatttacacgtatttccaaggtgtatttgttacttacatcacacacatctccttggctaaattcacatacatgcatacccatagcattatggggtaccaaaaattgcacatgtacacctcttggtatttctaatacctatacatacaccaactttatgatgaatcttgactatctacacaataaggtgctacattcatgctctttcaagttttgc

SEQ ID NO: 19565 - DNA, 424 bp, Glycine max
  unsure at all n locations
tgttgtcattaaatcttacatgaattgtctcttccatagtcaaggtttntgatttgtacactctatatgccttggatgattcaaagtatccaatattccaaaatcacattttgagtcaaactttccaaggttatccttggtgctgaagatgaaacactggcatccaaatgggtgacagtcataaatgttgggcttatgtccctcccacaatacataggaagtcttttttaagattgaccttatataaattatgttctgtaaataataagcagtgattgctgcttctgcccataagtgtttcagagttaagtagtcgttaagcattgttcttgccatttcctgaagagatccatttttcctctcaacaactccattctagtgggatgttcttggagtacacaaattattataataccattctctt

SEQ ID NO: 19566 - DNA, 243 bp, Glycine max
agcttgtatgctaactggatgcattggttaacttggtaacccaactggccttgaaccaaaaatctgtacctgttgcaagggtctgtggtttgtgctcctctgctgaccaccatacagacctttgcccttccatgcaacaacttggagcaattgagcagcccgaagcttatgctgctaatatttacaatagacctcctcaacctcagcagcaaaatcaaccacagcagaaaaattatgacctct

SEQ ID NO: 19567 - DNA, 423 bp, Glycine max
tgagatgaggaagtgtagaagggtgatacttcttgcttttattcgttgaccacagagtggtacctggagatatgtcacgggggtcaggagatcttgtggacgtcacgtggggtgctattgcccaaaaccaagcttgaccaatcccgacccaacccgggcatagtcagccagtgagaacctgtgatgtacctaaacaggcgaggtcctgacagtcaacagataaaaggaacaaagaccacaaagcaaggaggcttgtgtggtggctggccaactgtggactttgattgatatatgggatatggcctctggtaatcgattaccaagggtgggtaatcgattacaaggcttaaaaatgaagacaagagactaagatggtctctggtaatcgattaccaagggagtgtaattgattaccaggcttga

SEQ ID NO: 19568 - DNA, 386 bp, Glycine max
  unsure at all n locations
tgctttatgaatcaaaatttgtcgcaatgagtcattcattttactaatttatatacagtccatgcatgttttcttactgccattattctttgcagccagttgaactttggagtggtaagcagctatttagcattatactgcgcccacatgctaatatgagagtctatgtgaatcttactgttaaggagagaaactacactgaagacaagaaaataaaagacaagaaaatagaatggaaaacattgtgcccaaatgatgggnttgtttattttcgtaatagcgagttgatctctggacaagttggaaaggttactttaggttagttactctaaatttaccttgtttatttcatctcatatttctatgctcaagacgattgtttaact

SEQ ID NO: 19569 - DNA, 430 bp, Glycine max
  unsure at all n locations
tgtaacttacaccccacaatgaatctatattgntggatgtgtagatgtgatccaaagagacatgggggtgagaagaggtggaaggcgacgccgatgtcaacacgatcgatggaggaactcggggagttgaagaaagaggaggcggcatctcaggagcactcatggttgtcacattggcactaaacaagggtgtagtgacagtggacggaggaaccacgacatgattagccgaaacgggcagcgtaacaacttcagcaataggagcaaccttctgaacagacacacaaagaagagatggaggagaaggaacatcaatagcaacaggaacaacaaaagatgcttggacaaaaaaacagagctagaggcggatcctgcaaacttgaggggtgacccaaactgagcatcaaccttgcatgcctacctcatcacg

SEQ ID NO: 19570 - DNA, 354 bp, Glycine max
tttcttttcacataatgcaagttctatgagtatgagacactggatttatatgaaggatcaagtctacggattgatagaatatgttagattcatatttactctctgacatgaaccatgctgaaagtattgattcgtgatctatagcatcgcctattattatattgatgttaaatgaagtcacgtgaaccgtacttattcctttttatgatagatcctgtgaagctattagattgatccttcgctcctatgacctataccatacgttatacaatgtcgagtgacacatatagggatgttacatactgaattcataccattatctcgtgccttatgcactaaaccattctacactgt

SEQ ID NO: 19571 - DNA, 321 bp, Glycine max
tgtgagagaggacctggactattctttggtgggtggcattatcggaactgacgagctgactgcttgctcactatccaataagagtgcggctctacactcgtacgccacctagcacatgatgcttactatggtagggcagtacaatgtagagtcagtccaggctgttacctatgaacacgagcatgcagacgatttcgccatgtgtgcacgaaattggaggctagaaggagcgtgatggatgctctgagtcgggaggagactatgtggatggaaaggcacatcttgacctgacatggcagtcctgaccgcccaccactacta

SEQ ID NO: 19572 - DNA, 386 bp, Glycine max
  unsure at all n locations
ttgcttgtgcatccaataccctgatgaggatgtcccatatgttcttaaaactggactgattcatttgcttccaaagtttcatggccttgcaggtgaagacccgcacaaacatttgaaagaatttcacattgtctgctccaccatgaaacccccagatgtccaagaggatcacatatttctgaaggcttttcctcattcattagagggagtggcaaaggactggctgtattaccttgctccaaggtccatcacgagctgggatgaccttaagagagtattcttagaaaanagtttccctgcttccaggaccacagccatcaggaaggatatctcacgtattagacaactcagtggagagagcctgtatgagtactgcgagagattta

SEQ ID NO: 19573 - DNA, 402 bp, Glycine max
ttcaagatatgtcatgctgtgagagtttaagatgagatgtgatctcatatcggttagatatatgcccaaaatactccttatgttgactctggaaatacttccgtttcgaactaactttgttattcagcacttataccaggtgaaattccagcaacatggatgtctttgcaatatatatctaaaatactaaagttcgagaactgtgagatccatcattcagtaaatgcaagaggaaaattaatgccacaattctcgaagagaataccagactttaacttcatggatgaaaaaggaatgacgtggttttgcagaagagaacttatagaccatatggaattgtctgtgattgaaaaaaactgagatgactgacatttaggaaccgtaggggatttatactcataa

SEQ ID NO: 19574 - DNA, 260 bp, Glycine max
ttcttctttaagagtttcatgcaggacaacctgcccactctccaattatgcaaatcgggggatgcaacatctgtggtggggcccatgagttatgtaagtgcatatcccaacacgatgcatccaaagaattcaactacatggctaatccatatcatcgagggttccatcaaggaggacctctgcgatacaatcagggagaaacttttcttaaggccaaggttggagatcccatcctgtgaatacattcattaaagattgac

SEQ ID NO: 19575 - DNA, 423 bp, Glycine max
tgtgacaccaggctacaaagttataaaaacaagtaactatggctaatagagtaactaaagcttttgacaataccaataactatggctaacactaactatttacttttaaacaaaacaagccatatatcctggtcaagaaaacatatactaggagtaattttctttataaatgattatgaaaatgaattatccgcatctccatgttcccctcctatccatcaaaaggaataagacaaggaattttgttggtcaaacaaatatcaaaataacaatgtcaaaacaacaattatgtacaatgatttataatttagtccccacaccatctatagaaaaaattaaacaccttggacctagtaatcatgattaacagcaaaactaacaaaaaatattgtgatcctccccacttgttcttaggccactaag

SEQ ID NO: 19576 - DNA, 392 bp, Glycine max
  unsure at all n locations
ttttgcaagcttggagggtatccatggatcttgaagcatttttcctttgtgtgtccatggatgttgcaatgagagcaaaacggtttatccttgcgagtaggttttcccttggcattggattgggttacaacacaagccatttcagcaggaggagcataattgggttgaacaccaacaagcctatgagtttcatcttgaagaaataatgagaaggtatcatcaatattcggagtcggtttcatcaacaatatttgacctcaagcatgggcaaaactctctttgacccccatcagaaatgacatgacaaattccnctttgatggaagcaagaagtggagcaaccctgccacaattacaactatgattggccttgagttcacccagcttagccca

SEQ ID NO: 19577 - DNA, 421 bp, Glycine max
  unsure at all n locations
gttacagaattgagtcactctntattgagaggggttgtagcaacaatataagatttctcacagagatatcttggcttgagttactctcacttggaaggcttcaatttaacttcataatgctccttgttggccttttaaaactctaaagaatatcgttgaagtggatcccactcaagcgacaaattttttgaggaagcaaacacaaatgatagttgtcatgtcatgggagctagcaaggtcattctgagggaactttctgatgaacattctggacttaaatcagaatggagattctaatgttagcttatgaaggattcatactgaagtagatccttttgatgaagttcaacagatgtatatctttctgaagtagctcagcttcatcaaccttaacacaccttcataacacanagtattctaa

SEQ ID NO: 19578 - DNA, 316 bp, Glycine max
agctttatgtgatcctcacttgctgcaaatgaaaaggttggaccccatgtttttaagacgattgatctcatagaacaacttgagaagtttgggaaagagttttctcaagatttgattctacaatcactttctaattcattttcacaatttagtgtgaatttcaacatgaataagatgagttgtgacttgcatgagatgctaaatttgctaattgattatgagaatcaaattgcttctgaggataagaaagaaactatcatggtagttggcaagagctcccagaagaaaggaaaaagtaccaaaaaggaagcatcat

SEQ ID NO: 19579 - DNA, 420 bp, Glycine max
  unsure at all n locations
tacaaatctattntaagtccaagcccataaataaaataaattctggacaagataagataagattggatgaaataaaatctagataagataagataagattggatgaaataaaatctagataaaataaaatatggataagataagatttgataaaagaaaattgtttgctctcttcaagtccaagcccaattccggattcaagcccaattgcttataattctcctgaaattaaattaaaaacacaaaattagtcaagtaagcccaaatgataaaattgcataattaatttgacaattaaggctaatcagtaattaaaatggtgacaaaaagggttaagaaataggagaaaataatgacacatcagtggatatcatgttttatgggtaaacccatatagatacaacaaatgagaagaaaaat

SEQ ID NO: 19580 - DNA, 576 bp, Glycine max
  unsure at all n locations
gagtcgccggcgtgagacgtcgaaagngacangtgtatataatatttagatggttagccaacactctcatagatgtatggtgatataaaagatgtcggacgcctatgtcgataccgtacatactcacnnnnttcggtactcggtgcatcctgtatagtctacatgcaagcatgcaggctattactttatgatgagtgtgacttaaaaaaagacacgggtgagcttagccaaacattaactatgccatgataattaaataagtactctaatcacaggacattatgaattaaggatagaaaacgaggtagaacaattaatgatatcaaacagggaggacaccagactgaacgcgggggatgagtgatttgagggaccaatatggacaatgattggattggacggtttgcacagataatctcggagatcgcagtaatctttatgcatcacccatttatattgctataagacacgctgcgagaatggttgggaataaagggggaaaaattaggtgaatatgccgtgacgagcattaacctcttagaagagagatatctgaccaactaattatgagcctcg

SEQ ID NO: 19581 - DNA, 341 bp, Glycine max
cttatattatgatggatgttgtgactgggatcttatgaatttttctgatgcgttttgtatacttgtcttattgaacttaattgtgaatttgggaattgactctgaagtgttaattaatacactaattagcaaccatccatagagacgttccctcatgttccattcatgcatcatatttatagtagtctttaaccggtgaagctcatcttatttcgacgaatgtaaatttctcaagacatatattacgtggccacaatcgtagggaccgtgctttggacacaatgggctcgcatatgggatctagatggagttgctatatgcatccattcttatgtgtgcaa

SEQ ID NO: 19582 - DNA, 376 bp, Glycine max
ccagacatatatagctttctcgataatcttgcagattacataacaaatttaacgtatcatgtgtcatgtattgagttttctttaaaggaagacctaagcatgttcaatctaatgttcctttatatatatatatatatatatatatatatatatatatatatatatatatatatatatatatatatatatatatatatatatatatattagagactctattattacacattatttatttatttcttacaatatgaacaccccttatattcaaataaaacatcttaaaaatctctctaattgtgtctcattacagagcttaaatcctctcatgttaagataaaatatcactatatttctccatagtataaccagtacg

SEQ ID NO: 19583 - DNA, 492 bp, Glycine max
  unsure at all n locations
tgtggagcgctttgatacatgcatgacgcgctcttanaacactcaagcttggctttaaaaatacaacttttgtagcactactctattttttagcattatttctgaactgataaatcacttttaaatttatttgaaaccttctatattaaactagaaatcaaattgagtgtaaattcaagtttctttaaaatggaaaacttatttttatgcattatcaaacttaaatgtaaacaaatgacaagaaagaaagaatgttactcacaaacatttttatattagctcattctttaattttggtctacatccaatccttatctttatctttagtagaatttttactagatgacacacactaaccaacacacacaaatatatatatatatatatatatatatatatatatatatatatatatatatatatatatatatatatagttgaggcgcgactatatatgcatattggtgagattcactaactaattaactaatt

SEQ ID NO: 19584 - DNA, 399 bp, Glycine max
agcttgctctctttcccttacaagagtgacaaggcagtcccatggaagtatgcccctcaaaagcttgacggaaggaaggatgagtctgtcagagaagacctatcctctgccaaagttattaacatctctagcacaaatggtatgacccgtaacggacaaatctttgtagcgcccgagcttctgatgcgagataaagacccaaaggggaaggcgaaagtgggcacgaaatagagcgacaaggcaagccgtattctggatgaggaggtcccggccgggaggtttgctaagggagaggaagacttcggcagaaaaataatatccgtagaagaaacaaatgtgttccttcagatcatccagtaaagcgagttcaaggtaatcgagcaactcaataaaacccca

SEQ ID NO: 19585 - DNA, 439 bp, Glycine max
tgagctcattgttgctaccccacaaagctcctcggaatttatctcggctatgttcctccttgcgggcccttttggttttttgttcaagggctcttgtagtggccgtgttttcctctcgtaactcggtgcactctttccggatgtttgtagcggctgacttgaacttttctttggcgagtcttgccttccctagctctaattttagagcttggacttcttcatcttcctccggagcttcgaagttctcctcattgataactttcaacttggagagccaatctaaccctcgcgtatgaactcttagccatccatgataaccaccgatgacgccattacggatgcccctgagctcgttgtctttcctcaacggacttctccacgccttgtggattctttgtataaccttgagactttgcgtgccgaaatctctcacaaggaa

SEQ ID NO: 19586 - DNA, 377 bp, Glycine max
  unsure at all n locations
agcttgtaagtatttgttggtataatttgcctgttccattaggcttttaatgtctctagaggttacttcctcgttgacatcttttgtcttgaatggaattgccatgacaggtttgttgttactgtctttgatatttggtagttgatattgtgttgtgggaggtaattccgactggattaactcaccatccttcacttgccaatttgttatgacatttgttgttggattacctatgatgtcttgtttccaagggtagtctatatcctttctgatggcataagcatganaccaatcaaagaaaaggacattaattntgactctttcgacaaattcgtagaacttgtcttggatttgttttctgtttgtacccttgtaat

SEQ ID NO: 19587 - DNA, 421 bp, Glycine max
tgacggtgtgggattttccctgtactctactacggtcaatattccttggcacccttaatcatgttcaatttgttggtaagtctatgtcttttaatccaaaaaaggaaacttggttaccatgtgagagtcatttggatcaatgacaatagatttggatgttatatgcatgagtatttcaatgcttgcactactacaaaagtgtgttttttatgacacgcgttctacttttgtaattatgtgtctgaaaaatccttttatgatgcacattctaagacggatattgaagaccgccttataatgtgtgctcctcataaaaaattatgacgggttttattacaatccgacagtatctcaattgaattcaaaagcccaattaatacgagtccacgtgcatgcagcaaattaacttcagcgacctctc

SEQ ID NO: 19588 - DNA, 268 bp, Glycine max
  unsure at all n locations
tatcttctcaaggaggtgagcttangtatgagaggggcgtgtgtagctaaacactagcttctcaaggaagatttctcaaagaagcttctcaaggaagttttctcaagaaagcttctcaaggaagctacctagtctataaatagaagcatgtgtaacacttcgtgtaactttgatgaatgagagtcttgggagacacaactcaaagttcaaattctctaccttcttcttccttcaatgtcgtgctccaccctctctctttctctccctc

SEQ ID NO: 19589 - DNA, 432 bp, Glycine max
tgtgcaaatcaagtcactcccgcattttatctctagcatgcattgtatgttggtctcgtcctttggcacgggaagccggaaggtccatatcaccttcttaattgtacacatggggcactgcgcccccaaatgcacaagtaagaagagataattttccgggctctcgtgtccgtaaaatgcattcatatcatgcatcgcataagcatctcttcataacatcataatggacatatcctgcatttgtccgttatcatattccagcctcacattttgcatgagtcatggcatcatcatgcatatgcgttcaacaaactttttgatctgcaaaattgcataccatttgttttcatgtttgctcatccttgcgttttcctctacaaaacaaaaacaaagaagggggaagcgtgaaacttcacactacattcttagttt

SEQ ID NO: 19590 - DNA, 286 bp, Glycine max
tagcttctggagggagcctcttaatgaagcttctagagaaaactacatgaagctgcctcggcacaaacgcttcccagccttcgttaaccgttggatcttttcgaaatatggtttgcaacttctcaagacaattttccatgatctcaccgttgggatctttgagaagatatctggagtgtgctagaagcttccgttcccgagagcatctcttatttaagcatttcagcctttgctttcgtgtagcttaagaaaaacgtcatttcttcttctttctttcttccaaagc

SEQ ID NO: 19591 - DNA, 377 bp, Glycine max
  unsure at all n locations
tctcaaggaggtgagcttagttatgagaggggtgtgtgtatctaagctctagcttctcaaggaagttttctcaaagaagcttctcaaggaagttttctcaagaaagcttctcaaggaagctacctagtctataaatagaagcatgtgtaacacttgttgtaactttgatgaatgagagtcttgtgagacacaactcanagttcaacttctttccctttttcttccttcaatttcgtgctccccctccctctttctctccctctttcttttcctccattgaagcatcctctccaagcttcttatccaaggctcatcttggtggtgaagctccttcttccatggcttattccttaatggatggcgcctnctctcacctc

SEQ ID NO: 19592 - DNA, 383 bp, Glycine max
  unsure at all n locations
ttgcttttatcttacaccaccaccgccgccatcatcttagaattatattttaatattattattactactttgattttcagccttgtattttggttatattattatggtatttgaacaatttactatttccttatttgcatggtatgtttggaccaatattaagtatgttatttgactatgtgaagtttataattaatctattcatggttgcttgcttcatggttttcatggttcttgcttcttgcttcatgatttggttgatattttttcatgaacattgtatgaatgtttagttatattntaatacgcactttcgctttttgttgatgccaaagggggagagaaatgggattaaatcaagaactcacatgagtaattaattt

SEQ ID NO: 19593 - DNA, 430 bp, Glycine max
  unsure at all n locations
cgcctaattaacctgaaattgagagataatgattattattcacacaaaatgaaaatacttagtatttattacctatacttaacagaaaatacttatatcactacaaaataaccataaattgggagagtttgatacaatttacacaagttttatacacaaaagttagtcgttttcaccaactaccatgtctctaacaacttatgcaattcagattcctaatcttgagtcaacttgtgatcctccgccgatatctcattatagcaaactagtccttgcaatgctatgaagatggcctggtaatgagctagttttaatttaccttccaattctatgatgttctctgaaatttgttcaccttgtaagcagaccagttntccttgatgttgaaacttcattgtcagctgagcacaattccagttgatgtcaccta

SEQ ID NO: 19594 - DNA, 376 bp, Glycine max
tgctttcaactgaatttacaacgttctaattaatttcaaaatggtgtaatcgattacaatatattggtaatcgattaccagtgtgtttgaacgttgaaattcaaattcaattgtgaagagtcacatcctttcacaaaaatgttttgtgtaaacgattacaatgatttggtaatcgattaccagtgataagttttgaacaaaaatcaaaagatgtaactcttccaatggttttcaagtttttctaaaggttataactcttctaatggctttcttgaccagacatgaagagtttataaaagcaagtccttaacttgcatttttaagaagaacaatcattacaatcctttacaatctttgaatctctttgaacatcttc

SEQ ID NO: 19595 - DNA, 415 bp, Glycine max
tgcacttgaggaggaaaggatatttgtagctaatgaacatctttcttaactattcgtccttaagattttactgattctttttgctaatatgtaaatataaatggtataagggtattgtcataccctaatttcgtccggggattattatttgatgatatacaacctttgattggccgcttcgagatacttggcaccctttgttgcacaatatgtgaagtcccgagacgtgccgaatatcaaaaggaagcaggcttacgcgatccgtgaaaattccgtaatgtgacgaaaatcgaaaggaggtgtttttcgcaatccgcgagttttcataacttcttcgaaagctaaaaaagagtaaatacataatccgtacggattcgtaaccttgcggaaggaaaataactatcggtactaaatt

SEQ ID NO: 19596 - DNA, 396 bp, Glycine max
  unsure at all n locations
tagcttataagaacaaaattgcctcaatcatttccaaatatgcatgtgaattaggaagcatcaacaagaatcaagccaaggctattgtgcaagcaatcaatggggcataacacaccaaatgattatgatgatggatggctcaaattctcacaaaggtaaactcatcactttcaaattgagctttcaaaactatcatgacatgtagaggagaatcaaggatttcaagtcacaaaatgtcaagaacattttattttcaaaacaattacccatttcttgaacatatcctataattcanagaaaaacatgcaaagtcgtacatgcacacagaattgacccaaaatattaaactagaaatccgacgaaactaacaacatcaacaaattaacacaactaaca

SEQ ID NO: 19597 - DNA, 411 bp, Glycine max
tcagaaccacttcagaataaagcatttggcattcccagaccacctggtcctacaagatctgttagcatggacctctccaaggcaccactggaatcagcttcatctgttgatctttttcagttaccagcagcaccatctcaagctccaacattggatttgtttcaatcatctctttcatcggcagatccatctttcaacgagaatcaacttagtcaaacatcccatcttgcatctattgattttttttccgatttttctccgcagccttctactgtaacctcagatgggaaggcactggaattatctgtccctaaaaatgaaggatgggcaacttttgatatgcctcagagaacctcctctactgcacaagtggaaattccaaccactgtaccctcaaatgctaaatcttta

SEQ ID NO: 19598 - DNA, 247 bp, Glycine max
cctgtagacacgacactgcatgctctgcagcttggagcagcttctaacgactgtttcataatactcctatgtgctatcagatcggatactctattgagacgctagcaagagtacactgttgctaccacacagagctcagcgaaataaactatagccatactgtcccatgggagccctcttggactctagatcaagggctctggcggaaatggcattcacttatcgtaaccagagacactcctttcga

SEQ ID NO: 19599 - DNA, 153 bp, Glycine max
tccattatcaatttctagtgtctcgatatattacaggtctctagcggacatgcaagtgacatgatattgtcgcttgaatttgctcatagattctcgattcagttgtgagcgtcacgatatactactggacacacctcggacatctgattatat

SEQ ID NO: 19600 - DNA, 384 bp, Glycine max
  unsure at all n locations
agcttgcagagaaaagcagcatggttgtgatctgtggtgggatcaacaacaaattagctcagttgttgcacaacatatgtaatgtctggccttgtgttggtcaaatagatcaacctccctattaatctcctataagaggaaacatcttctgctgaaataggtgaccctgagtgttgatgcttggtggtgtaatcacaaggtgtagaaactggcttagaaccaagcatgtcaacattattgagaatgtccagtgcatactttctttgatatagatttataccaatagagcttctagctacctcaaaccccagaaagtacctaaagtctcctaagtccttaattttgaaagcattgtcaagtagatntgtaattctttgaatttta

SEQ ID NO: 19601 - DNA, 420 bp, Glycine max
  unsure at all n locations
ntgtcctttggaaggtgtgatgttntattagggacttctgaaggtttttgaaagcttgaaaacgtagtgagtttagtctgttttcgttccatcaatgaagtatcacgcctaagatgggaagttgttgcaggagcacggttttcaccacctgaagtaccagctgcgaccatagccaatgccattgaagcaggtggagatgcaaaagcagcagcccaggctggagatatcatagcatgggcggcctgaaagaaatatcagttaacagaagtagcataacggaacagaaaataaaaatgactatgctgatacaatgaactaggacaacccattcccattagaatataaatacttttagaaacactattcattcaagtcaaattacatatttgcccacattctcttgttatttatcaagctaaa

SEQ ID NO: 19602 - DNA, 357 bp, Glycine max
agcttcttctggaccttgaacaggcaactaactcctctttcaaaaccacgctatgtgctcgcgactggtccctctcttcccttcgcagcttgagttcattgttgctaccccacagagctccgcgaaatttatttcggccatactcttccttgcgagccctcttggtctcttgttcaagggctcttgcggtagtggcattctcttctcgtaacccggcacactccttccgaatgtgtgtagcggccaacttgaacttctccttggcaagtttcgcctttcctaactcgcttttgagagcttggacttcttcgtcctcttccggtgcttcaaaactttcttcgctgacgacttttaact

SEQ ID NO: 19603 - DNA, 444 bp, Glycine max
tgcatgcatctgcatcccttaaaatcatgttaactgcatagattttctacatctaatatccagtcgtgtcgatttgggatgactgaccctctcgatgagtcgatctcttgctttctcataagggtgaacccttgggtactagtaccctcacctccagaggactacatgtcctcgccttcagagggccacacgccctcgccttcaaaggacttcacgtcctcaccttcagaggactacacgtcctcgccttcaaagggtcatgtacctttaacttcagaggactacacgtcctcgccatcaaagggtcatgtaccttcacctttgtagggcaacacgccctcaccttcagaggactacacgtcctcgcctttagagggccgcacaccctcgccttcagaggactacacgtcctcaccttcagaggactacacgtcctcgccttca

SEQ ID NO: 19604 - DNA, 400 bp, Glycine max
  unsure at all n locations
agcttgtcccaagttgttgatctcatttcagatttaatctgttctttacttgcaaatattttgattgtagaatgttaagtctttttaatagaattaacttgtctgggttataggtgtggatcttgcagggagaagagagaaagcggtgtaaaacaaaagaggcagagggaagtgaagaagactttggagtttgctgagaaatggaaataaaagtggggctgggtggtcatggtcatactttagtgtcacgttagatagtctacatggcactaaaattaccaacaatgcacctcactaatggtgttactttaaaatntaacagaatgactattttacaaaacttatgcaaagatagagactattctttacatttcanagaaatagggactaatgtacaaaa

SEQ ID NO: 19605 - DNA, 445 bp, Glycine max
tccctgcacaaatttaattattaaatataaagaaccaatgcacaagtatgctagacaatccaaataattgccaccacttaaacctcccaattattcttcaatttataattataaccaacatacagtataaatatgatgattaataaatttctatgtagtattttatgacttaaaaagataattttaatgagatattagaaaaagttctattgctaatttaaggtatttttaaagaactaaggagctaggaatcattagtagtggaccctaagctaagggtgtattagactaagtgtagtggtgtataagcaagaataatataaatacatggtaaggcacattgttagcaaacctaaccgataagtggtaattatctgccctcaaccactcactcttaacattgtgacaaagcattgcatttaaaccaatttctcattaaaaaaca

SEQ ID NO: 19606 - DNA, 383 bp, Glycine max
agcttgttcttgaccttttccatgagatggtaagataataagattgaagttgatacaacaatcgtctactttaaagcaaatatgcacttaacctttcgtgacttataaataaagatgataattagacatgtgagttacactttatttaacttttcaagatttaaatatcatgtgtcaaacaaaattcaaattcaaatgattaatataaatggaaaaaaaataattgtataattgattcataaatagtatagattatgttcaagattaaaatatttattggacatctctctctatatataaacttaagaatccataaacacgttctgataacacatggtgacacacgataatttttcaaagttcggatgccacgaatacttaat

SEQ ID NO: 19607 - DNA, 435 bp, Glycine max
taactacctatctcccaaatgcctttgcgaagatttaataattaatttgcatcaatgttaaattctagatgttgctaaatgcgtgggcattgagttatcattctatgcctagcaatgctaacccgatgatcattttcttaagatgttctattaggtgttaccttttcccaagcatataacccctaaaactcatgcatgttaattcttaaatccttactaggaattaccctcacccgagcgaataaaacccaaaattaatgtaaggcataaatgcaagataagaagaaaagttttagaacatgataccctagaatgaatcctctttgcattgataactcttgaagtacaccatacatcgttggctttttaagtttttcaggccctagctaggggattagccactcatggccattgagggctctacaaatgggggtg

SEQ ID NO: 19608 - DNA, 393 bp, Glycine max
agcttatgccaataggagatgatcaatgataatgcctacaaaattgatttgtcgggtgagtatggtataagtcatacttttaatatggctgatctatctctttttgatgtaggtgatgatttacttgatttgagggcaaatgtttttcaagaaggaaggaatgatgaggatatcaaagaccaggccgaagcccagaaggaagcccaatacctaacacaaggcataggagggcttgtgacaagagcaaaagctaaaaagacccaagatactttgcaacatataatggctaatctgaggacaatctaattgcatgaggggacccaatatctagaggcctaaacctcaagcttaattatgtctcacttaaatactaatgcatttcagttatgctta

SEQ ID NO: 19609 - DNA, 439 bp, Glycine max
tctcttttcttgtttaatgattatattttgcttctaatccttgtatttgggtatgttcttatgacatttgaatacttagtatttcttttattattcgattagtatgattgaacatgatgattatatttacttgctcttggttgtttatggttatgagttttaaactcaattattttgatgatatatgattagtggtatgtacttttatttggctattatgaatgactttctggattatatgacattctatgaagtattatatttctagtgtgatgaatggttatgtttgattgttttctattctcgtgtatttggctatattattatggtatttgaacaatttactatttccttatttgcatggtatggttgaacaagtatgttatttgattatatggatttcatagttaataataaactaaaattcacgtagaattac

SEQ ID NO: 19610 - DNA, 391 bp, Glycine max
agcttgtgagcttaagttaaaaaaaagatgttgaagaagttgacttgactatcaagtacaagaaaagcttttggtctagtgataagcacttgattccaagtgtttcaccaataaatgacaagagtttcataagtccaatttcatgatcaagtaaaaggcttacagttttcccatttgtggtaatgatggtgacatttttgccattgatttgtgtcacctctccatcaatccatgcatcctcaggatcctcaacccaaacctgtgatccaacgatgatgttcacaggtgttccctgaaccaatcacaacaaggcaagaaaaagtgttactgttaacacatgatctgacagcaaataagtgggaaggatccaacaacaaccaacatacaacac

SEQ ID NO: 19611 - DNA, 438 bp, Glycine max
  unsure at all n locations
tctaatgtgtactcatgtattgtcaataagtacaatatgtaagaagcaatatgaagaataaaacatggagcatggaaactgcattgttgcctaaacaagtagcaaaaatataacacctcatctttgagaagtgcttactgttttctcttcctcagtgacgagaaacttcccctctgcaaaatcacaggctgcaattggtattgctagctgcttctgcaatttctttacaacaaacacttctgactcttcacatatggttaccactgtaccattcctacctagccgaccagttcggccagctcggtgtgcatagtgaattgaatctgtcggtaagtctagattaaccacaagatcacattctgccacatccaaaccccttgctgataattcatttgtaaccagaactctcacctcaccattcttgaatntcttcagagt

SEQ ID NO: 19612 - DNA, 195 bp, Glycine max
ctacagtgcacgctgtgcgcacgcattcttgttcctgaacgccgtacactgtacgccatgactagcacactatgtgctgtcagacgaggacactgtttgtaacttgcatatctagagtatgttgaggcctctcacacatagcttgtcaaaatttggatataggatactcgcacttgcaagcgatatgcgtctatt

SEQ ID NO: 19613 - DNA, 395 bp, Glycine max
  unsure at all n locations
agcctgcatgacttcggcgctctaggtacttctttacattgctatatcttaatataatatgacatactagaataaccctttgcatacggaatgacctactacttgattgcggtgaatgcataagaatgatttattatttactccaagagcatgcatttaaatttcttaatgtgcacattctttttgaatcaatagtgacacgatgagaacancattattgtctaacggaatatattggaggatatgatgacaacccaatcacatacttgaatttacagctaccaagcctgtggtaaataacatatatattatctctcaaacacacgatatattgtaattgacttcacaataaccttttgtagctggcaagaatccgcacttccagaagtaaatac

SEQ ID NO: 19614 - DNA, 326 bp, Glycine max
  unsure at all n locations
tgcttggcacaatgttgataacaagacaaacttcaattgcttcattctggtaacaactttattttcatcgaaatgatttttttttgcatgaaaaggtcttaaatgggaaaaaattaattgtcatgagaaataacttttcagaaaatatatgtacgactaatcttgtagaatattgtccaaaaatgttcccagattattataaagtgatatgataatatttagaaattgtcgtgtgagaatacagttgtaagacaacaaaggaacaataactatgaaaaatagattcttgtaatttgtttggcttgagaanaatatgacatattatt

SEQ ID NO: 19615 - DNA, 432 bp, Glycine max
tatcacataaatagcttcactaacattaattgtgattctattttattctttattacatattatataaattaatgtgtatttaaatggtaattaaatgtttttatcaattgtaattacatggagataaaggaagccatttcaaattaaaaaatttgaaatgatatgttttgtttttaatgagtaaacaattaatgaatttgattttcacatatcttctaattattactataaatagagaaccaattcatataacttattatcatttctttgtattcatctagtcgattttgacacattgacatatgatgacaagtgtaagatcatattctaaagaaaaaattacacaaaattgtacttatatgtcaatcctggatctataaggattttttatataatgaatttaatcttttattcttaattactataatcata

SEQ ID NO: 19616 - DNA, 395 bp, Glycine max
agcttgccgcccaactcgcccaggcgagcaaggttgcttcctccagaagcaacaaccttctggaggaatcttctggagggcccaagtgggcctggttgctatttacaccccccgtttactaaatgcaccccctttctatttttttgtaattctttttccgtaatgttacgaaactttacgaatttcgtaacgatacctattttccttccgcaaggttacgaatccttacggattatttatttactcttttttagctttcgaagaagttacgaaaactcacggattgcgcaaaaacacgtcttttcgatttccgccacattacggaatctcacgaatcacgcaagcctgcttcctttcaatttctgagacgtctcaagacttaatttattgcacgt

SEQ ID NO: 19617 - DNA, 428 bp, Glycine max
tgatcaaaacaattatctaatcattcctatccactcaattcatacaattgctcattcaaataattatcaaacactcatttcataccaaacaatccattgcatatcattttcaatcaattcattgttcaaacacgcttttggtacaagcaaacaactcaaagtgctgaaatttaaaataactaaaatataaagcaaactaaatactaataaactaaaatgttcatgctttgcagaaattaaactaaacacaatttaaacatcctgctcatcttgtggctgatcttcattatgatctagtgttggagctgctgatgaatcctggataggctgctctggctccgtgactggtgtagatggctgggtctcctcaagaactggtgcaagagatggcttaagtatttgatctatggaagtcccctcctcctgag

SEQ ID NO: 19618 - DNA, 397 bp, Glycine max
agcttggttgagaagcttctatggagactggatctttgagcttcactaaggtcctttaatggtgattttcaaccatggagttgcagtggaagataaaggagaaatggggagaggaggcgccatacactagggaataagccttggaagatgaaggttcaccaccaagagagtgtcttggataagaatcttagagaggaagcttcaatggaggaagagaatgagaaagagagagagagagagagagagagagaaagtggcatgtaaaattgaagaaagaaaggtagagaatttgaactttgaagtgtgtcttacaagattctcattcatcagagttgtgacaagtgttacacatgtttctatttatagcctagccaatgactaaatgaaattttatttt

SEQ ID NO: 19619 - DNA, 426 bp, Glycine max
  unsure at all n locations
agaagaagttntgaataagttttggcttttacatgcctaactcccttgagtgacatttgtattggttgttatcttggttgttgcatcttagtacatttgatatttgttttgcattgtgcatcatcatagtgtgtgtgaagaaaagtttctaagttataaaaattactttagaggcaaaaactctttattttaattgattacaacctcattgtaattgattacaacaagctattaaagcttgtagagttaagtatcgtatcggtttaatcgattaccgatatctcataatctattacactattgtttgagacaatgactgatttatttaggagtctttgctttaatcgattaccaagtggattaatcaattacttctatctcgttcaagtgttctggggtgaacaagaacactttaatcaattactt

SEQ ID NO: 19620 - DNA, 394 bp, Glycine max
agcttttatgttgttattgcaggcaatatcacaaatagaaacagtttatgctttcgttggagagagctctgcaaccaaatcctttatagagaacatggaaaaacaatatcttataagcaaaggggaggcacttgtgaagggagttaggatagggatatagcaaacagagagtttctattctttggctctcattgtatgggttggagttgttgtggttagagccgaaagagcaaccccataagacataatgactgtcgtgatgagtattctctttggtgccatgtaaggaagaaatcaccttcaggattgtttagaatggagaaaatggttaataattaataactaagtaacaatagtctccttgtgaattgcatatctctcacttacgcatcac

SEQ ID NO: 19621 - DNA, 320 bp, Glycine max
  unsure at all n locations
tatgaaaaacattattttttttttatcatatttctagttatgcttgcagttaatcttagttgtgcccgcanangaaaaccnctgccgacattgactaatgtcacgcctcggtttcctatgagcaactcgacgatgtcctggggggatcctctcttctctcttctccacatgtccccgcctattgcaagtaccccggcgttcctagtggtgtctgcgaacattcagctcatttactccttgagccttgctccggccctatgcctcagtatgcctggcggcgatggcgccccacggagcatcttgtgcgatacgtggcttgg

SEQ ID NO: 19622 - DNA, 270 bp, Glycine max
agcttgttcttggagtccttcttcttgagcaaggcttacacactcactttattcattttcaagtgcttcaatccataagtatcagcagttctacctttaatcttgtggatcatgcttgttggggatgttcttccgtcttgttgggtggaggaaaactcaaattctgcatcttctatatctaacactcaaaattagtgaaagttcattgtttacatgttgatggctgagggaatttcatttgttatattagtggtgcctatctctgccatg

SEQ ID NO: 19623 - DNA, 421 bp, Glycine max
tgccacccagctcgcccaggcgagcagggttgcttcctctagaagcaacagccttctggagggcccaagtgggcctggttgctatttgcacccccatttttactaagtacacccccctgccttttttttggtgattctttttcgcaaagttatggaaacttacgaatttcgtaacgatacttgttttctttccgtaatgttacggaaccttgcggattacataatcatcccctttttgacttacggaatgttacggaacctcactaattgtgcaacgatgcttccatttgatttccggtgtgtcacggaaccttacggattgtgcatcaatattttcttttgttttccggcatgtcccggaatttcacaaattgcctaatgatgggttccaagcacctcacaaggaccaaacaaaagttgc

SEQ ID NO: 19624 - DNA, 395 bp, Glycine max
tgtcttgcatgcttttataaccatgttttttttaataatttaaacagtttttttataatttaaattgtatttaaaaaatatgtttataaatttaattttttctaaaatattaaaataataaaaaatttattatattttttagatattaatttttttataattaaatttacaataagaaaaaaattagatatatttttcagatataattcttaataattaattttatgataattatttgagtaatttaataatatgaaaatttatttattttaaacaatatattataattaattaatttaaattgagtagtattgcggaaattcttttgttattagtcaatcataagtaatcctacaattaaatatttaattctaattattctcaatcatttataa

SEQ ID NO: 19625 - DNA, 403 bp, Glycine max
  unsure at all n locations
ntaatcacttgagnttgttatggaattaatttttgatttaaatttaatcacatttaaagttttttttaattcttttttaatgatatattttatgtgaattgaactcatgtttttcaattccacaaaatatatgaattaacttatttgatattattctagttcaattgaatgatttcaaatctttgcactttctgtgtataaaagaatctttgcactttacgtacattataattaaattcatgttaattatccacttggtcaagagagaggcagaaaggcgtgatgccattaacaagtggtagtggatatgggaactgtggtgtactctcttcaagtcttttgtgcgatatatgacaatgaaacaaatcaatcaatggtatagtaatagcaatgtttattttat

SEQ ID NO: 19626 - DNA, 394 bp, Glycine max
agcacggaaagtccggtggtagctgtcttggcagatttatttgacacatttaaccgaaggtgcaaaaagagtagcgcacggatcatctgttgcttgcccgccctctgtgtttggttggtttcacacctgttccagcaagacacgagtcatctatgtccgctccagagccatcgctcgtgtactgaaaagagaagaatagattgggaccggcttttggctgggataggaggtagaacaatcaattggttcccccgatggaaggaaggaaaggagggagtccttttctcatgtggagggtacccaaacattccgctgataggaacgaggggttgtattaactacaatcccgcgctcgctataagacaactaaggtaccccatgatgggagtaccga

SEQ ID NO: 19627 - DNA, 445 bp, Glycine max
  unsure at all n locations
tggagaggatgcttcaatggaggaaaagaaagagggagagaaagagagaggggggagcacgatattgaaggaagaaaaagggagagaagttgaactttgagttgtgtctcacaagactctcattcatcaaagttacaacaagtgttacacatgcttctatttatagactaggtagcttccttgagaagctttcttaagaaaacttcctttagaaacttctttgagaaaacttccttgagaagctagagattagttacacacacccctctcataactaggctcacctccttgagaagcttccttaagaagatttctaaagaagctagagcttagctacacatgcctctctaatagctaagctcacctccttgagatgagaagctagaacttagctacacaccccctataatagctaagctcacccccatgacaaanaacatgaaaa

SEQ ID NO: 19628 - DNA, 305 bp, Glycine max
agcttgtacttgatcttggattaatgagctgaatcatagctaacattaactaatcataattagagaaactttcgctccaaaatttgcctccaaaaattcaatttcaaattcaagtgaaatttgaatacaaattcagatttccctccaattttgtgtgacacttacgctataaatagacgccatgcgcgcgcatatgttcgactgcgatcatttgaaaattacacttcaaatttctgaccttattttaagcactcattgcgcgtcgttctattctctgccttattcaacttcttccacatctaccc

SEQ ID NO: 19629 - DNA, 442 bp, Glycine max
aagctttagaattataacataagaactgtgattattgaagaatctatccatgttgtttttgatgaaattgaccctatatggccaagaaaggatacacttgatgatattgctgatacattagacgacatacacattgatgagaaagggcatagaggcaaaggaaatggtaatgaataagactgtcatattgatgaaaataaaaaaaataaatatagatcttccaacagagtggagaacttcaagatatcatgctcttgataatatcattggtgacatctcataaggggtaacaacttgacactctctcaaagatgcgtgcgataatatgactttggattccttaattgaacctaaaaatttatatgaagccataattaatgaacactggattattgctatgcaagatcagttatatcaatttgaaagaaataaagtctgggaa

SEQ ID NO: 19630 - DNA, 385 bp, Glycine max
agctttttattaattacactcatactgtaatcgattactagaggagattgtcagaaaatattctcaacagtcacatattttcagttggttcttgaatggccatcaaaggcctatatatatgtgacttgagacacgaatttgaaaaaaagagttttcataacaaaaaggtattatcttcttaaaaagcaaaatcattttatcctctttcaagagagatatcttcttctcttcttctttattaggaaaagggattaatagactgatggtctcttgttgccaagaaatctgaacacataggaagggttggccttgtgtggtggagatcttgtagcaggctgtcacaatatagtggaactctcaatcaagttgtttggggactggacgt

SEQ ID NO: 19631 - DNA, 258 bp, Glycine max
gacagaatacatatggacagaccttgaactttgatttgtctctcacaacacgatcattcatggaagttacaccaagtgttgcacatgctcctatgaccagctaggttgcttgcttgtctaactgtcttgacatcacttccttgataagcttctttaacaaaacttccttgagacactcgagcttatctactcacacgcctctaataactacactcaccttcttgcgaagcttccttgttatgattcatagtgaagcta

SEQ ID NO: 19632 - DNA, 404 bp, Glycine max
agcttctattgctttattggaaaatactaaggatctgtcaaagattacattggcagaacttgtaagtgctatgcagtcccaagagcagccgaggttgatgagacaagacggtgtagttgaaggtgctttaccaaccaagcaccatcatgctgaatccagtagaaagaaatatgtcaagaagaaccagcaaacaagcagcgaaaattgtgcaaacaaccaaaacaaaggtaagggtaaaaagaaaaattatccaacttgccagcattgcggaaaattgggtcacccaccatacaaatgttggaaacgaccagatgcaaagtgctgcaagtgcaatcagcttggacacaaagctataatttgtagaagcaaatttcagcagcatgaagtcgatgcccaagttgttg

SEQ ID NO: 19633 - DNA, 446 bp, Glycine max
  unsure at all n locations
ctcaagcttgttagggtttcaagcaatggtactagggtttcaagctgtggtgatagggtttttgaggaaccgtccaagaagaggatgatcttttacgtcaaagcaataggaaggtcaaaataaaacctgacgaggatagcaccactctcgatatagaggttgagaaagaaaaaggacgttgaagaagaggtggatccctacaaaaagaagttgttgtcaaataacattgcagtgcctttctctccttttgatggaagatgttttgataagcctaacaacaaaatcccccctgccacctttgtcgaaagaagatagggaaagattttacgaggttaagattacaaatgaggagttcagtgattggtgtaaaccctggaagggctcccttatggtgatattgttgggtaagaaaanttgcttttgtatgatggagacaaagttgaata

SEQ ID NO: 19634 - DNA, 384 bp, Glycine max
agcttaagttatatcatacatattagtactccttttatattctaccatatctgatagctcactttgtaagaggaaatgagaacattttctcgaatcacaacatagatcattcatttattacaatgtcccgtgaagcgactagagacagccgcattgaacaggaatacatagagcagcagagaataatgcttgaattttagtgaagccatacatgctattgtcggaaaattctaccatatctgacacaccactgtctcaggacgtattgaagacattttcatatagatgattgatcatgcatataataaacgtcagattgaagattaaaggccactctcaacataatactaagctcaaacctccaatttctccatcattgaagca

SEQ ID NO: 19635 - DNA, 438 bp, Glycine max
cgctatgaacatcaggcatgatcttaccaattaattagttgattgagtggctagtatgtgtcggtgttgctgtcatccaaggtatcatcaataattagatcgaatttgcttttataaaaaattactgcagccaacaatatccacgataaaaagaatagaatggcctacaatagtctcatacatttatcaagctacagcatccagactaacggttgcaatttgcccttctttatacaagttattattacccaaggacaatctataacctcatcccacacatagcagtcgtatagtttgagccaaataggaatttttagacgagacatggaaagggaatatacatgttcaccaagcataaggatagtggtagagctgggataaaatttctgctgttatttattaacaatccctacaaaggggtgatacttataaacaaag

SEQ ID NO: 19636 - DNA, 250 bp, Glycine max
cgctttcttttatatgtgcaattaatagaaaggtatcctatagtagtcgtggacgtacgcacatacattgtgtgtcgatccacattaaaacatgcgactctcctctcttccctttattcatacacctgcttttattgcactatactaacatgcctcaccatgacaacattggccaaccaagtggagtatctgacttctatgatgaactggactatgaggagcttgacaatctctactcatatcgctttac

SEQ ID NO: 19637 - DNA, 422 bp, Glycine max
  unsure at all n locations
tgcctcacagaggtccaggaaagatattgcggncgaatttactagttccgcccgtgagtatgacagtcaccgctttaagagcgctgtacaccagcatcgcttcgaggccatcaagggatggtcgtttctccgggagcgacgcgtccagctcagggacgatgagtatactgatttccaggaggagataaggcgctggcggtggacatctctggttacccccatggccaagttcgatccagaaatagtccttgagttttatgccaatgcttggccaacagaggagggcgtgcgtgacatgaggtcctgggtaaggggtcagtggatcccgtttgatgccgatgctatcggccacctcctgcgatatcctgtggtgttggaaaaatgccaggattgcgagtattggtcaacgaggaaccggtctg

SEQ ID NO: 19638 - DNA, 329 bp, Glycine max
ttactttctagcactaacaagactgagtatctcaagaccatcatcttggagatactccaagctccaaccatagacgccaggaaggtcatggtgggagaaatggatgaacctgactatatgaccccctataagaatttcttaatttgaggggtgtttccaccaaacaagaatgaaacctgacgccttaaaaggaaggctagcttctatgtcatcattgactgtgaactattgaaaagaggattaacaacacccttgctcaaatgccatatagccaacaagtagactacatcatgcgagagctacacgaaggaatttacagcctccatatc

SEQ ID NO: 19639 - DNA, 433 bp, Glycine max
  unsure at all n locations
ntggtctctacaaatcttcgcacagcataatctatcaatttctctggaacttggacctttctctctctagaaaaacctcacatgcagaagctccttgagaaaaatggccaaactcgctttccaaaatctgatttcaggcttaaataggtggctttgttcatgcttgtgtgcttagcgcaattctgaatcgcttagcacggagcggatggaccgaagcggtgcgcttagcgggatggcccttcactcaacaaacaagcacaactcatccttcttccagattcttccttgcgcttagttgaggaatgttgcgctcagcggatagctcactaagccagcagattggcttatcgagagggtgaaaatcaacacttcaaaacttgcctaattatcctgaaattgagagaaaatgattattaaatacacaaaatgggag

SEQ ID NO: 19640 - DNA, 381 bp, Glycine max
tgtgaaacccaccatgcgtgcatagaaaggtcgtggtcggagcgcgaaactgatgcccctccacagtgttatgtaagggtataccaccaactacttgccactcaaaggcacatccgaggcaaagcctgaagtcgcttaaaccatggcggggaatatcatgaagataccccaaggattgagagacaagtacatgacgagcgagacggctatcaaagaggatgggagcagaaacattgacatgctcactgggagtgtacgccccactagacaggagtctaaaggggaagccaaccatatggcgggaatgcgcgcgacatctgaatggcacacagaaggcctgtcggagcaccaaatcctgcctacatcaatgccgaggatgtc

SEQ ID NO: 19641 - DNA, 312 bp, Glycine max
tcgctgcggtattctatatcgagcgtacgcttatattacgagttttattccgacatacgactataatgtgattgtcttctgcatttgctcataacttcggtgtacaattccgagtgtcgacgacatacaacgggactcaatccgacgtccagatcaaaagttgacgtcgattgaattggctatcagcttcggtattcattttcgagcgactacatagattacgttacctcttccgacatgcgagtcgtcacgaattgccgagcgactttgctcatagcgccagctttgtatttctagcatatggagatatta

SEQ ID NO: 19642 - DNA, 364 bp, Glycine max
agcttttttctctttcaaacgacaataagtttgtactgggatgtctgatagaatccagtcatatatcgagacgctcgaaattgaatgtcgaaaccctacactactttaacgacaatacatttttactcacatgtctgattgagtcccgtaacatatagagacgctcgaaattgaatgttgaagctctgagccaattctaacgaccatatccttttactctggtatctgattaagtccggtaacatatcgtgacgcatgaaattgaatgttgaaaccctcactcaattcaaacgataataactatttactctgatgtctgattgagtcccgtagtaacaccagacgctcataatgaatgatgaac

SEQ ID NO: 19643 - DNA, 381 bp, Glycine max
cactatacaatactcaacgctgcacatggaacttcgagcgcacctaatgtgacaggatttttcagacatccgagtaaaaagggattgtcatttgaatttgctcagagcatcaacattcaattacgagcgtctagatatattacgggactcaatcagacatacgaataaaaagttattgtcgtttgagttgcatacagggtcaacattcaatttcgagcgattcgttattttacgggactcaatcatacatccgatgaaaatggatatgtctttgaattggctgatagctgcaacattaaattttgagcgtctcgatatatgatgggactcattcatacatccgagcgacaatgttttgtgtttcgaattcgttgagagctc

SEQ ID NO: 19644 - DNA, 351 bp, Glycine max
tagcgcattacatctaacaagttctatgtgtattctttggtgatgaactctccttgccaattttgctactatttactaaacttaatatttgttagctgattccttcttaatctaggtatcgatcatcgaccagttgactcactaagtaacccactatttgattcattgtcccctacatatctaactaacgaacctatcaaacaacctcttaagttgcagccccaggggcagtgctgctgattcattgccggaggggcatcaattgagagatttgggtggtattgagggtgcagccacagggatagagcctactgattcttggtcaaccataatgggcgtgaatatgcttgg

SEQ ID NO: 19645 - DNA, 411 bp, Glycine max
  unsure at all n locations
tgccccncagctcgcccaggagagcaagtgtggcttcctctataagcaaccgccttctggaggaagaatctgaaggcccaagtgggcctgattgctatttgcacccccatttttactaaatacacccccttgctcttttttggcgattctttttccgtaacgctacgaaactttatgaatttcgtaacgatgcttgttttctttccgtaatgttatgaaaccttacggattacgtaatcatcccttctttgccttccggaatgttacggaactttgcggattacgcactaacacttccttttaatttccggcatgtcacagaacttcgcggattgcgctacaatgctttcttttgactcccgacatgtcatggaacttcatgaatngcctaacgatgggtgccaagtacct

SEQ ID NO: 19646 - DNA, 353 bp, Glycine max
acatgtatggacggtataaatagtgagatctaatcaatttactagatcaataagattaatactacatatattttaaatcaaagaaactaacaatgtaattaaattcaaacttagttcaaaagtaaatatgcgtaaatgttataatttcttttatgttaattcactttgaaaaatcagaattaatttttttaaaaataaataatattaataatgaattttaatttacagctctgcaatacatactttcattgttggaacatcaatatatatttgaataatccaaattacagaatatgtgaagaatatatgagatatctagtgaaacatgataattcatgaatatatcttaatat

SEQ ID NO: 19647 - DNA, 418 bp, Glycine max
tttcaaacgggtaatatgctcacattctctttcttctatatcatattcaaacttgtccaaataaagaataaagtcatatcgactcacagaaagtcatatcagtctcatacaattaatatagaacctatatcctaatgtcacatcctatcagagcgtggtgcttccgtgtcctctagcatgaagttcttcatagtcatccacctattcatctgctcccccgaacacaaggtcaagatcatcacaggatccaaacacaacaacacacagggagtgagttatcacattcctagctaatagataaacatgacaattaaatattcgtattatataaatgagataccacttgcttaaacatacctcacgtaacttcaccactgtctcattcaaaatgcacttctcattataatcacattacaca

SEQ ID NO: 19648 - DNA, 401 bp, Glycine max
  unsure at all n locations
agctttataagcgcgggtctgggagacaaaggtcaagcgttcgcgatatgcgaggatgatattccgagtactttggatttggtacgaccatgccctcctgatttccagctgggaaattggcgagtggaggaacgccccggcatttacgcaacgagcataatgtaaacctttacggttttaaaagctctatagttgggcctaggctttagagtttttccttttgttaaggctttgtgtcttttgtttttgaatttataatacaaggatctttcttcatctgttcctggtctctacccattctcattcatttgcatgtttacttctttntctgaaacggcagatccggtgacgagtcccccgaaggtacttatacctgngacccgcctatcgacttcgagcga

SEQ ID NO: 19649 - DNA, 445 bp, Glycine max
  unsure at all n locations
ttggctacaaccttttctccccctttggcaacatcaaaaagccaaagaactcggaaatcaacacagttataacaatggagtagcaagatataagtatcagagtattaaatccaataagccaaactcataatcaagaaaataatcaaaccagaattcaaataacataaaatgtcaacaatcacaaaatatccaagaccgaaacacaagaaaaataagcaaagtacttagcataataatgtaaattctaagaaactaaaagccaaaatacacggcttataaaagataaataagcagaatctaaaatctaagaagacggaggaggtggtggaagatcaaaactctgacgaatgtatccgacatcctcttcaagctgtgtaagacgaatgtccataccggcaaagcgtgaatctaacgagtcanagcggtcaccaacatacgaacgaag

SEQ ID NO: 19650 - DNA, 384 bp, Glycine max
agcttattcacatgaaacacaaggcatatttatgtctctggtgagcctaagctcttcgctctagaggacacgaagctgtgcaaggaaagcagcacatagatccaagaaaagaaactgtggaccctgcaccctttgaagatcaagcagatacttttcttcccgggttttgtaaagctgttgatgtgactgtaagaattagagaatattctggaaaagaattataactacccaataataacagaagaattagtttattgagacaatctgtcttataattggttataacactgtaaagaaacagcaatgatttacacgtgtatactgtctagtattataaacatggagggagggaagcaaaataatcagaagactatttagttatta

SEQ ID NO: 19651 - DNA, 429 bp, Glycine max
  unsure at all n locations
gacttcacccattntagcatattcttacccaagttgtccaagcaagagctctacgcctcccaaaaaaaagctccaaattttgtttagtactaatatatctcaaaaaaattattgtaaaattatatttaaaaataaattttaattaaaatattataagtaactattaatctttttattaataatgtagataacaattaataaacaataattatttaccactatcataatttttttagaaaaaaagagatttaataattaataagtaaaaaaattcacattttttttattttataaataaataaaaaatatcattcttaaatttgttttagatctttcaatttgttgagtcgcctgatccaaaacaaaatcttcaaaaatcaaacacgattgtatcaagggcgttaagataaaacatgaaattgttctttt

SEQ ID NO: 19652 - DNA, 352 bp, Glycine max
  unsure at all n locations
agcttttatctttattgcactattgacctacctaggagattttatacctagaggtactcatgattnatgtcgacaagtactacatatttgcaaaaccaactgatgagtcctcctatgactaggcatatctccccatacgaagtattttgcccgaatacgagtatttaaattaactaaaataaaccaattaaaaatacactgtgcaagtttgattcataaaaatactaatgaaatgtaaatgactctcaccattttaaattaatgaaatatataataatattaattaagggaaatatgatcaatataatatttgtcggttaaacaatcaaattgataacacaaggatagctta

SEQ ID NO: 19653 - DNA, 415 bp, Glycine max
catactctatcagctgatatgctcagtgtaggtttactatcttgaacacatttcattcaaaagaccgccataaagcataggtatgacttccaacataacaagatacattattacttgggtctaaaacatattaacatgattactttaaaatattaaatgacagacatcatatattgaactgtgactaatcgtatcctactatatgtaagacgggtttaccctagctgatagagcccaactcatagaaacagatttagtttacgaatctgttatcaatcctctctttaggacttatcttttattaatatcttttaaggagttggttgagggagaggttaataaatatatgacagaatgttagtgaggaacaccttctggtgaatttctgatgcatttatattttagtaataatact

SEQ ID NO: 19654 - DNA, 388 bp, Glycine max
  unsure at all n locations
agcttgtcggtgtttgaaatttcttctttggtgttgaagaagtaattattagaggcttagtgaagttggaatgttctaactagcttgttgtgcaatttttgccatgccctaacaaagtaatgtttgaatgtatgcgtttaggaacccattaagataatgctttcgtgtttatgctccctagtgttctttgccttttcttctttggtgttgaagaaattagtattaagggtttagtgaagttgaaatgttctaacttgttgtggaattattgactttccctaagaatcaatttgacttgcgcttagctttgtggaaacttcaatcagtagatagattcaaatctcttgtttgaagtatttcttcagcctgtngcatgtgttacttggag

SEQ ID NO: 19655 - DNA, 447 bp, Glycine max
  unsure at all n locations
ctcaagcttggaggtatcaaaaagattatcttgttataaggtctaattctcctagctagatcctaacacgcaacattggaggaggtggcaggtagagagggagagtgggacgttggaggcacaggggagaacaaaaagaagaattatcaattgaacataggtcattatattggaaaacaaggggtaaccaactttttcttcttgcattttccagtatatcatacataaaaaaacttatggaacattttcatgaagtaggagaaagtgtgggatatctatatctcaccaaggaagaacaagtccgatgaaaaatacgattttgtttggttcttggaggtgactaatcccaaaaggcttgaatatcaacttgataacattcatataagagacataaagttgtttgtttacttaactaganttgggatgacaacaacaaaggaggtgaag

SEQ ID NO: 19656 - DNA, 394 bp, Glycine max
agcttgagccgttgttgatgagtactttgaccataacgtgttccatgcatttgactgacacatgtaaagccctgttatgtcctcttccctcgacggggatttcctcttcagcaaatgtgaggtagttgttggctgtgatgttattgacgatcccccccaaagccttctacggagatgtcttggactacgtgagcttcattcaagacctttaccagcaaagctcgatgaggctcagagctcatgagcagctccagaagggagactctagctagggtcttgttgagttgttcaatgactttgaactcgctttgttggataatgcggaggaactccctcctcgagtgatacctctttcttgccacagctctctcttcccatggaaagatccttcgtc

SEQ ID NO: 19657 - DNA, 419 bp, Glycine max
  unsure at all n locations
cactcagcttgtaaaaatggaagaaaagaaaccgaaggtgaacgaattttagatgaatgtctaaacaacaagaaatgaattgaaagtctcggattcaaaaacttacccgttgaagaacgaagaacgaatgaagaacggatgaagaatggtgaagaacgacggaaaaccttcacggatttgctcacggaaaagtcttggaagtgttacggaaacacctcggcttggattttcttcacggaaacaattattttcaccaaaaacaactgaaatgtatagnnaaggaggttagagatatttggaacagcctcccttcgccaatttataggaaaaggggggaggacgttgtcgtccagtgtgccttgaaaatttgaacaccgctatccgcaccccctctcgataagttcacgnttttctttcgt

SEQ ID NO: 19658 - DNA, 383 bp, Glycine max
tatcttgttaaatcagggaaacatgctgaactctggggtgccctccaaggaaacatactcatccagatcaacatggcgaaccagtttaagaacatgctgattgacaataatggcaaaggtgggggaaacaacaacggtcaaaagggtggtggtgggaataaccagccaaagggtaataatcaacaagggcagaacccccaacagcaacttcatcagtatctgcaacagcttcagcatatgaaagggttccaagatctgaagctgtctcaattcaatgacatgaaactgcccaacccgaacccgaacccgaacccgatagtcggtaaattaaatttgcctgacgaggatgatttgtctgatgatgaaatatactagtttgatga

SEQ ID NO: 19659 - DNA, 402 bp, Glycine max
ccttctcagcccacgcattcatagtatattgatcattaatattcacacaaataacagaatctatccccttagccttaaacttatcaatattctccttgtaaggaggaacatgtttgtttgaacaaactcctgtgtatgcaccctgagagaaagccaaagcaaaaaatacattactatggaataagtctataacaaaaaaaaagtaacacatttctttcaaacaattccatttcctataccataagaagcattcattcaaccacataaaatagtaccaaattttacaaaacaagaccaacaaacaccaaagagacaccccaaaacatatcaacatatcaaaaaaaattgcaagttaaacttactgggagcccaaagatgacaactttcttgtcctgaaacatg

SEQ ID NO: 19660 - DNA, 389 bp, Glycine max
agcttttagccaaaatcctgactcaccataaaccttgacccatggtgagaatgtcaatccttaccctcggaagcaaaaaaagaatagaggggaaatttccaatcaaagaaaaagagaaggaaaatttccaatgaaagcaaaaaaagaaaagaaggaaaattccccaatcaaagagtgggagaaagcaaaaaaagaaaagaaggaaaattccccaatcaaagagtgggagaaagcaaaaagaaaagaaaggaaaattcccaatcaaagaatgggagaaagtaaaaaaggaagaagaagaaggagagaaagctcctcatcaaggatcaaaagaaaacagaagatatgtgcagagaggtctttggaccggacaatatctgaacaatacagaa

SEQ ID NO: 19661 - DNA, 396 bp, Glycine max
gcttctaccacaaaactatttccatcacaagtcatgaatattgtaaatgttttacatttaagaatgttggttatgacgtaatcaaacataaaggttgacgaaaaatgacttacatggtccacagctgcaggatagagatgttcaaacacttgtcacctgatattatttctgctagatcagcatgtgtgatgaaaaattttgccccaacattaggaagtccaaattgcgtcgcctcccacgacacttccactggattcttgtacacgcaaaacaatgtcttcatcaattcgcccaacggatcagcttcagctgcaacctcagcctcaccaagacgtctaagtggcaaatgcacattatgatttgaatcctatatggtacaagaacatcagaagttaa

SEQ ID NO: 19662 - DNA, 389 bp, Glycine max
  unsure at all n locations
tttcttgtttctactgnggaagctaccgaggagtgcttacacttatagtagctgttggagtgttccatatgcgatccacgtgttggtactcagcctggaccccctcttatttgtgcatctttatgcgagagaatttatgacgcatgctcaaatgcttacttctctatggatgtgaaaacacaggtacatggatggctgtcacttttcaaaatcgtctgtacaagattatgaaaataagttcagtgtcctgcatcagctggtaaagaaacaaaagtttgcatagttttgggagtcattttgtttactcttcttttccccaacattcatttgataagctgttgtacagtgttgacatgttacaggattggttgtaataattcatacataat

SEQ ID NO: 19663 - DNA, 428 bp, Glycine max
tgtccacacaaacctgaccttatcattagtattaaagtatataaatcaaggctcaggagagattgatcattttatggtgtggctgcaaataattaaccattcaaaagtttttaaaataaactaattatgcatgttcaatcaaaattttgttgtctttcataaaaaaaaatgttaatgggcaaacataacggtatacacatggggacaaccatttaagcttgatgtcaagcaaaacatcatggcttcaaccccacgatgggtcatgggtgcaacccgctgtctcaagtctctacaaacatttgcacagaagttgttcaattcattgcatttataattgggataattgtatctttgtttttaatggatctatttcgaattgaaagcttattatatttggagttcattaggacattacgcctgtattgtat

SEQ ID NO: 19664 - DNA, 390 bp, Glycine max
agctttggtttcagagaccccacttggtcagagccatggtttctgatggcaacacttccaggattcgatttcacctttatcaatgttggataatgagaatcaaagcgaaatcatcatttcacttgatcatattcatgattatgggcacatgcatgccaagcttggagtcatttgtgacttccagatactgtccatgagataatcttttatatttctgttttggtttatatattgctttaatccccactacccacaatttttaatccattattgcattgaagtcaactatcttattcaaagtctaactgaactaaactttgatctgcttcttttaagaataacagggaacatgtatactgcttttgtggtgtttaagaatttattggggta

SEQ ID NO: 19665 - DNA, 216 bp, Glycine max
tgacctatgaaactcagcttcggatttctaggggccctgtgttccgtgcgtttccaccattctacgcgggcgaagagcacctttggttttcccagcaccttgcactatatactcacccatccttggtgcccatccttcactgagctcacgtgctcccactgttcctatatccgtgatactctcgcgtccgagtcctcataaatcctcacatgcctt

SEQ ID NO: 19666 - DNA, 283 bp, Glycine max
tgcttcttttatgattagattccattgcaagcataaattttttcttgaagaaacaacttagtatccttagaagtatttaaatagatgtatccccatcctcaactatatacattatattcacgagaaacaacttactatcctgagaagtactttttgagggataattaaagtacttacactattactattacgtatctaacatcaattttcttcaatgtgatttttccttttttctttgggtttatacctctttcactaatttatgacatctttttgtacaaca

SEQ ID NO: 19667 - DNA, 428 bp, Glycine max
  unsure at all n locations
ctttgcaataaaatttctttacaaaattataattaaaatttagaactacactaaagatagtacaaaaggtactttgatctctaattatttaaaattctttcatctgattatttaatccggttgtaaaatagatctggtgttgtctttatatcatccattaaggaatagaaatttattcaatccataacgttttggttgataacaaatttccttaatatacattagacaacagcggaaattgttttcaatatttgatttttcattatatttacaaaagtctaaacaagaagcattcttgtgtgaatttaagaattttgagatttcaaagtaaaaaccttaatatcagaagttaattataccgcanaccttaattcatttatggattangaaggttcattagttaatcaaatatccttacatagatgata

SEQ ID NO: 19668 - DNA, 367 bp, Glycine max
  unsure at all n locations
agctttatctntgtccccaaggcttcatgtagacttgtccaaaatcgcgaagtgaacctcggatccctgtcagatacaatactagaaggcattccatgcaaccttaccacttccttgatgtacaactccacgagtttctccattctatacttcatattcaccggaataaaatgagcagatttggtgagtcgatcagctatgacccacacagcatcatgcccacgactagtcttgggcaaactagatacaaaatccatagatatgctctcccatttccattcccgaatttacaatggcttcaattctcctgatggtcgctggtgctcaaccttagccttttgacatgtcaaacatcttgctacatatt

SEQ ID NO: 19669 - DNA, 394 bp, Glycine max
tcttacatagtccgtctttgcttgaccttctttatgcttaaaaacagaaacattaggcatatgcaaaagatcaagaggagttagtgggttaaaaccataaacaacttcgaaaggagaacaattagtggtgctatgaacaactctattgtaagcaaatgcaacatggggtaaacaagcttcccaagtttttaagttcttcctcaaaactgtcctaagcaaagttcccaaagtcctattaacaacttccgtttgcccatcggtttgtgggtgacaagtggttgaaaataacaatttagtgcccaacttgctccacaaagtcctccaaaaatggcttatgaacttagagtccctatcactaacaatgctccttggcaaaccatggagtctcacaatc

SEQ ID NO: 19670 - DNA, 358 bp, Glycine max
agcttgaattctaagagagcacaaatcctagacttacccaatttgtcttttcaatccacttagcccattcactagcttttcacttgactttgttttaacaacacacacactttatttgaacttctttttttttaacttacaacattttattaattttttgtgtgttctgttgtttcttacctttaaaattatccatcaaaccaactcccccaaatttggggcaaaattgtcttctaacgatgtgctctcctaaaaccaaagcatggtaaatggagatgccaattcaaagctcaaggttcaatttgacaattacaattcagctcaaagatgggtgcaaatgatatcatcattgagaaac

SEQ ID NO: 19671 - DNA, 417 bp, Glycine max
  unsure at all n locations
tgtaggattatggagtacccatcacatgtggtactaggtggcggtcgggcgatggtgcacaacaagttttccacatccacaaatcacgtataaacccaccatcccttgttgcccacctccaactgagctcacgtactcccacgtagcccatatcctcgtttctctcatcaccgagtccccataaatcctcacaagcttccccaacatccaggtaattcaacatccaaatcatcacaaactaaaaaaccaagcaaaacagggcaaaggtagaaaactctgcccaaaactcaaaccaaaatcacagctttttctcacttaaagaccccagtaacatttccttcgttccaattcgttcaccgttggatcgactcgaaaattttactggaagtctctagtacataagcctacantttgacc

SEQ ID NO: 19672 - DNA, 399 bp, Glycine max
agcttgtttgacagccaatttgaggggaactgagcggttttgacgcttcattaaaaattgtcgaactgaaccacctttggcatactcagatacaatgcaccataccattggcttgcggcatgcaccaatgaaacgaactatgttagaatgctttagtgtggccaacattgtgacctcctgctggaactgttgttccatcaattgagcctttgctggatcattttcaggcctctccaagattttgattgcaacatcttcaccattgtaagtacctcggtaaagtttcccaaaagctccttgagcaaaaggctcacccatattcagtttcctgatatcaattgtccactcatcaaaattgtcaagcccttcagtcggagaactattgtccattatagcttg

SEQ ID NO: 19673 - DNA, 449 bp, Glycine max
tcaagcttggtatattgatgctgatggtgtagttcagttgaaagtactagcagcctgtttgattgacacaggcgatgaactccttgtcactgaattaatgtttaatggtgaatcaatatttgtttcccaattatagtttacatttcattatgttttgtaacctgtttttttcccttcatttcccctccaccattaggtacttttaatgaccttgaccatcatcaagttgctgcccttgcgagttgtttcataccaggagataagtcaactgagcatatacaactgagaacagagcttgcaaggcctctgctacagcttcaagatagtgcaagaaggatagctgaggtaggtgtttgttcacttaacctgaatgtatcttctgaattaaactataaatggtatcacccttttgtcacagatacaacatgaatgcaaattggatataaatg

SEQ ID NO: 19674 - DNA, 401 bp, Glycine max
agcttgatcttgaattaatcttgaagcaatgcttgtttgttgaagcaaccttgtattattcttgaagcaatgttttgaatgtttattgaagtaatcttgaaagcaaccttgtttgattattctttgacatcatcaaaatcatgtattcatacattcacatatactaatttgagtcttggccacatcgtctacaatagttaaaggtaacttacatttaataaaaaatgttaatgagttagataaaaaaacttaaaagaaaaattttgaaaattttaggaaccaaatgtaataaaattatttttggaagactaaaactaatatgagtcaattaatatttggagtaacaaaatcatatttaactcttatttataggtctatcagtttattatgtgaccaatgga

SEQ ID NO: 19675 - DNA, 449 bp, Glycine max
  unsure at all n locations
ctcaagcttgaaggtgtatagcccaccatctttntatactggtaatgtgtctactatcattatcatcattttttctccgtcattgaggtgccacttgaactgctaggtctctccacctttgggcgtattcttttgaaagattcgtgccccctttttgcacatgttctgtagttgcatcctatcctaagacatcatattgacactgcttaacgaaggcaaccactangnccttccaagaatggactcgggaaggttccaagttagtgtaccaggtaacagctaccccagtaagactttcttggaaggaatgtatcagcaattcctcatcttttgcgtatgcccccatctttcgacaatacatctttagatggttcttgtggcaagtagtccccttgtactcgtcaaagtctagcaccttgaacttgggaggggtgatgatattgggtact

SEQ ID NO: 19676 - DNA, 367 bp, Glycine max
agcttcttatccaagactcatcttggcggagaagctccttcttccatggcttattccctagtggatggcgcctcctctcacctcttctcttttgtcttccgccgcattgaaagctcattgaagctcattgaaggacctcattgaagctcaaagatccagcctccatagaagctccacaagcaagcttccatcaagtggtaatcagagcataagagcttcaagtaggtgctccttaaaccatgaattgtgttgggtttaggttcctttgtgtttagttttcatatagaagctagatttgattctctatggttcatatttcttgttcttgttcttgaaccatgaattgtgtctggtttaagttcctttg

SEQ ID NO: 19677 - DNA, 438 bp, Glycine max
tagccgaattcagatcgaattgaagttagcttagctcatccttggtcagcttagcggaccaaatcagccttagatgcaagggttgggcactaagcgcttgagactcgcagcttagcgcatgaacaaagatgcgcttagcgtgaggcttgcgcttagcgaaaggactactttttagaaaaaagttttctaagttatttttcagtcctttttccaaaaaattgaaacccttatgttaaacattcaaacataggctaatatactcctatgtatagatcatacaacaagttccaaatgattaaatgcattaaaaacaaagataacagaaattaaaaactgggttgcctcccaggaagcgcttctttaacgtcattagcttgacgcttttacctcaccgggtgatcttatgttttggttcttactttcagaacctcttgacct

SEQ ID NO: 19678 - DNA, 388 bp, Glycine max
  unsure at all n locations
agcttgtcttcaaacttgcttgtaataggctgccaaacactccagctcttagaagacacccctaccttgcaagtattttgttcaataatgtgattgaagcaaattttttattagatttaattaaataaatgtttagtattttgttctttcctattagtctgttgatagctaactggaataaaagaaaagctaaggtcggaccagttgatagctaattggaataaaagaaaagctaaattgcagggaataattatgatatctttttatttcatcattacccctttntatagccatttcatacaagatattttgctaagttgttataacagaattttgaaattgcataaccacacaggtatcaagtaaaacgtggataaagctttaagcg

SEQ ID NO: 19679 - DNA, 443 bp, Glycine max
tcaaaacacagcaacacagaatctaggtgtccaaaacccctcaatttaatggattttctaggtttgagaagtgaaattgagaatgaggtaaatttgaagcaaactctcacctcacacaagtccataacatcaatttaaacttgtccaaactggatttacacctgaaatttcaccaaatcaaaatttgactcctcaacacccaaatttaccctaaaaatggctctttgttcactttggtcatttgtttttctctctagctcagcctaacctttctcataaatcctaaatgacatttcaaactaggattaactcatttgaaccttcatttactacagaatccagatttaaccttccaactcacaaagcctcactcttttttccactcataacaccacattctcactttctaaccctaggttaactctacccttcatctctaacag

SEQ ID NO: 19680 - DNA, 399 bp, Glycine max
  unsure at all n locations
agcttataagatatctgcttatgcggctttctatggttggaaaatgtggaacgttgttgagtatctgggaggagatgcaagaatgtgggtatagttcggacttggaagtttatgagtacatcattagtggtctttgcaatgtaggacaactggaaaatgctgttcttgttatggaggaggctttgcgcaaggggttctgcccaagcaggctagtatatagtaaactaagtaacaggctgcttgcttcggataaatcaganagggcttacaagctgtttttgaagatcaaacatgcccgttcccttgataatgcaaaaaaatattggcgttctaatggtcggcacttttgaacaggcatgctaatcagaagctcttacagtagatcctcttggttgctct

SEQ ID NO: 19681 - DNA, 427 bp, Glycine max
  unsure at all n locations
atatagctnacatctganatccttaaagaagactgatgaaatgcatcttatagctctcatgttttaagcatacgaagcctgttggtcactatctcattgataaaacttggaggttaagagttgaaggtctagtagtgaacaatcacgctgtaataatcaataatggtccccacccctctcctattattattattccaaaagagctacttgaatcatcactgctcaaaaattcagagctggataagttgtaacaactgacaaactcttgtattctctccatcttgaaccctacacaccactgtgtgtagttgcaacttgcaagcttgatttgacttcatctatactactatatatgatttgcacaatcactttagctcgtatactagttggataggtgtttaattctagcgattagtcaacaagcacg

SEQ ID NO: 19682 - DNA, 391 bp, Glycine max
tatcttaattagagtatctttaatataaattattgagctcaagaatttctatccaccagatctattactattcctgtttaaaaaaatttcatgcggaaagttgaattctaaggaaagaactctcaagaattttacttttatcaaaaaagtattattttttaatgtcgtttgagggaaaagaaagatcttatttttcttttatgtacaagtaaaatccaaaaatccaaattgaattttatcagtaaagtaaacatgataaaagttctttatcatgagacctataaaaaataatctaaaaacaattcttccattaaaatgctcttaatgttcacatggcgagacagagaagttattaacaaacctttgatattaacaatgaagttaccaatca

SEQ ID NO: 19683 - DNA, 425 bp, Glycine max
tgcagatttcggcttggccatgagagtttccgaaggtatttggccgtgaaacctgtatggatattttttttctctctgtatgtatttaactttgattgaatcattgctgtcccacctgccttttgtaaaaaattgtccagttcagtagctatcaataaaataaatgtgtatggcttatgaagatatgctaatatttctacgttatgttcatttcagtttccgtgtatttgtattttgggatttcttgtggcatctttctaataaaaaaatgaaggaattcatcatgatgagctttcaacttaagactaagagtcatgaattttgaaagtgattgcattttgagtaggaacaggtcggtcacgttcgggccaaaaaactcagtctgaccaaaccttatgtgttgctacttgagttccataaccgac

SEQ ID NO: 19684 - DNA, 276 bp, Glycine max
ctaaacaaaagactatcatatagcactctaggttaagttactatgtcaactgtcctctgatcatggtctggaaacaccaatcacacacgcgatgaattatcgaactcagttacatggtgggacatgatcaaaggatgacaccttaaatgatcttcactatttccaacgcagggttgtggacaaaacatcacgagcttagagaatttctttacgatgcccacaaatatggctctaacgacttcctgtgcaatgcccacatgtacatttatgaccata

SEQ ID NO: 19685 - DNA, 431 bp, Glycine max
tagatggagtataagacagagagaaggacatgacatcgttaaggagacgattcatacctaggtatggtggccacggagaagattcagagacttgtgacgatgctcgattgcgatgaagacgatgctcgagtgctacaaacactatgctcagatgcgtacagatattataagatgaatagagcgcgatagcttagatggagatgaatacagatatccagcttcttagggctcaccatattttttaaaatataacttcaacatctgttctaaaaaaacccgatgttaacaaaatgatgttaaggttaacatctgttgtctggagaaaaccgatgttaacataacacccgttataattgccccccctcccaccccacgttaataaacatatgttaacatcggttatttaaaaaccgatgttactaataaatgtt

SEQ ID NO: 19686 - DNA, 390 bp, Glycine max
tatctttcacaacatccaagcaaaaaaacattcaaacagcataagctatcacagccaagcaaaacagagcaaaggcagaaaactctgccaaaacaccaaccaaatcacagcttttctcacttaaagaccccagtaacaattccttcgatccaattcgttaaccgttggatcgactccaaaattttactggaagtctatagtacataagcctacattttgaccgttgggatctactagcaaacattcagaactcattctgtactactctttccacaaccaatcacacacaagcatttttctgcacaaagccaaaatcctgctgcacctattttgacagcaaaattctgcataagtgcagatttcgaaaatcacacttgccctcatccaatc

SEQ ID NO: 19687 - DNA, 417 bp, Glycine max
aagaagaagaagaagatcttcaaagagatttcaaggcttgtaaaggattgattggaaaagcaaaagtattcaagattgctgttagaaagattgattggaaaatgaaaaacaaagccttgcttttatagactcttcatgtctggtcaagaaggtcattcagaagagttataacttttagaaaaacttaaaacccatttgaaaaagtcaaaacctttttgaagagttacatctatagatttttcagaaacaaacactggtaatcgattaccaaatatgtgtaatcgattacacaaagcttttgagtgagacaatgtgactcttcacttttaaatttgaatttcaacgttcaaggacactggtaattgattaccaaaacattgtaatcgattacagccttttgaaaatatctggaacatt

SEQ ID NO: 19688 - DNA, 384 bp, Glycine max
ttcttttgggggctatggagtttatcctcaatactatgcatcatataatgaattgaaagtgagctcatgtgcatctaaatattactatctgagattaatttatgctttgctagcattaattgactgttaaacgttatgcgtgaacagttctgtttctgtacatttgtactgtgacaaatgtgaaatgctgtttctactaaagtcatgctaatttttcctgcctgtctgcaacagattattatagttgttatatctcatggtcaaattaactcgacgtcatcattgctttttgtgcgatatatattaactgggttaatgtgctatattgttacatgagctgcatccaacagtgcttgcatgctgactcttactatccaatcttgg

SEQ ID NO: 19689 - DNA, 428 bp, Glycine max
ctcctacaatagaggaaacacaaaatgaatttgaagagaattcaaattgcacctctgatggaattcaagtttccataggtgaggaaaaaacacccaattgcacgatatgtgaaaatgaagtggatggcggaaaaataaaaatatgtggccatcggttttgctccaataaatactaccatgttaggtgtctaacaattaatcagttgaagtcatatggtcattgttggtactgcccttcttgtttatgccgggttagcttaactgatcaagatgatgatcggattgttctgtgtgatggctgtgatcatgcatatcacatatattgcatgagacctccgcggacttctattccaagatggaactggttctgcagataatgtgatgctggaatacaagcaatccaccaggctaaacacgcatatgagttc

SEQ ID NO: 19690 - DNA, 361 bp, Glycine max
tgctttctagctcttcattggtgtattttgatctccttttggtgctctaaattgtgggaatgtgctcacatatgtggggcaattttggtttgttttcttgcttgattaagtcgaattgggggtttgtatgagatggccctaggcctataatgcattttgaagtaatggggcatgccacattgtccccgttctcttgctattgatgcctaaacgcgcgcccacacaagtgttctgtgaaatgcctcaatggcattagcgcgtgatttttgtagggaaacaacccatggggcgacttggtttgcacatattattgggacatgcattcattttcgaaagagctagagtaattgccccacatgtg

SEQ ID NO: 19691 - DNA, 418 bp, Glycine max
tgaatcggacatccgtgtgaaaagttatgaccatttgaatttctcaagagcttccgttgttcaatttcgatcctctcgacatattatgcacccgaatcggacatctgtgtgaaaagtcatgatcatttgaatttctcgagagtttccgatgtttaatttcgagcgtatcgatatattataaccctgaatcggacctcagtctgaaaagttatgaccatttgaatttgacgagagcttccgttgttcaatttcgaatatcactgtatgtgatgcgcctaaattggacattcgagttaaatgttatgaccatttgaatttctcaagagcttccgttgttcaattctgagcgtctcgatatgtgattcgcctgaatcggacatccgtgtgaaaagttatgaccatttgaatttctcaagag

SEQ ID NO: 19692 - DNA, 381 bp, Glycine max
agcttggagaggatgcttcaatggaggaaaagaaagagggagagaaagagagagaggggaagttgaactttgagttgtgtctcacaagactctcattcatcaaagttacaacaagtgttacacatgcttctatttatagactatgtagcttccttgataagctttcttgagaaaacttccttgagaagcttctttgagaaaacttccttgagaagctagagcttagccacacacacccctctaataactaagctcacctccttgagaagcttccttgagaagattcctaaagaagctagagcttagctacacacaccccctataatagctaagctcacccccatgccataatacattaaaatataacacaaaagtccctat

SEQ ID NO: 19693 - DNA, 420 bp, Glycine max
  unsure at all n locations
tagtgaccaatgggtgcttgaatcccttgaacattggcttgtcctagacttgtttaatgctccaaattcacctaagttgaagctcaagctaagccatttttgtttttgaggtctactgaacttttagagaagagaggagaaagagttcttgctttgattgcttgctttcttgagtctttgatctccaagccttccttccactcttcaccatttttgtgcaccaactgaggtatggaggagttattcattcttattcttgcttgtttagaggaaacaaatctttaaagataagatccccatcctaataaaggttcatattattgtctaatgactaatcagaggaggaaggacgtgagcattgcagattcctctacttttcctatatgccatgaccaaaatgagacanatgtctataccttg

SEQ ID NO: 19694 - DNA, 351 bp, Glycine max
agctttacccgtaggataatgtttgttttcaataccgccaggtaaaagtgtatggccgtcgatgtccgatgaacggcgctcgctgtccgtggtcatgcctcccggcgtcgagcactcgctatcgaccgtaggcgctggggctgccgccgctacctgcaagttagtgatgtccgatgacaggcacgcgctgtctgtggtcttccctctcggcatcgagcccacactgttgactgtgggtgctgaaactgccgccactacctgcaaggtatgtgaggtttgcagcgacggcattgtgactgaccgcggcgaggccatgtcactctcctccataacacttcctccgatgaacta

SEQ ID NO: 19695 - DNA, 421 bp, Glycine max
tgtagatcccttatgagttgaatcgcacatagaatcgtttttttggtaggctcggagtaaactctttacaatcatagttttgttactgtgccgacgattctactccacaccatagacaacaccgtaatagtatgtcacgacagtggctgggagaggcggcatggcgaagtccgtgaacgagggtttcactagtgaggttggtcgaaaatggcggacatgcaacagaaaaggatgcatgaagaagagaaagaatatatttatatcattgtggcaaaattagttctatgatgtggcgtgccagcgacgatggatgacggtggcactgattatgtgaagcttcatgctaagcataatgtcgcaatcactattggaacgagggcgtcgtgtgagataaaaatgattatgcttgtgttcggattac

SEQ ID NO: 19696 - DNA, 397 bp, Glycine max
agcttgagctcatgtaggtaatgaactctgagagtgcaaattgattttttttcgcacaaaataagatggtttcctatatactagctttgacataataagtggtattgtggtagactaacatttttttatatattttccattgaatgctcttctcccccattaagcttgttcaaatttctatccattaaaagcagcctcctttaagtagacttttcatcttagtaataggaaatgaaaagtcccattcataatgacatttggaaactattactttttgatttggagattaagattatcttttaaatgttttcttcttcaaacatttcaaatagaacgcaattcccttataacatttatatttttggataagaaaatggacaataataaaataagatgt

SEQ ID NO: 19697 - DNA, 431 bp, Glycine max
tgagatgaggaagtgttgaagggtgaaacttcctgcttttattgttgaccacagagtggtacctggagatatgtcgcgggggtcaggagaccttggggacgtcaggtggggtgctattgcccaaaaccaagcttgaccaatcccgacccaacccgggcatagtcggtcagtgagaacctgtgatgtacctaagcaggcgagctcctggcagtcaacagataaaaggaaaacaagaccacaaagcaaggaggcttgtggtggctggccagctgtgaattttgtgtaatatgtggattgtggcctctggtaatcgattactaagggtgggtaatcgattacaaggcttaaaattgaggacaggaggctaagatggtctctggtaatcgattaccaaggggtgtaatcgattaccaggcttgataacgaagtca

SEQ ID NO: 19698 - DNA, 394 bp, Glycine max
  unsure at all n locations
agcttctgtccatggtgattaagcattgtgtaagcttttgccatgaattgttaagcattgaattattattttgcttctgtcttgaggggttaagcattgattttagcttcttctcttgatggttaagccttgttatttctaccaagtggttaaactttgaggtatagtttctgcttggtggttaagctttgatagttttctgaattgatgatttgagcttttgtcaaatggccttgtgttgatttcgcttgatggttaagctttgatacttgctttggactcttggaaaaagattgagatagtcgatgatggtcgaagatttttagaagatatgcaccatgattgcacctacattttgatttgtttctaaatttcaattntgaccgatgtattt

SEQ ID NO: 19699 - DNA, 444 bp, Glycine max
  unsure at all n locations
tattatgtctcanatgggaagcagcacattccaccagaagatttttggtattctcactacagaaaaaaacatacaaacagttccacaataaatttcagataagagaagacattaaattgaaaaggaacaataagtaattactgaatgtgataaggaaatgtgtcccaggaaatgtttatcttctcccaaggaataattcttctcataaactcttttttaaacttatcccttgttgtcaaaaatggtgattctctccttttactttctatagaaagcttctcattattaagccattcctcttgttcctgttctccaagtcgtgcatgtgcattgctgtacttgacatctttcccaaacttctcttgttgtttctgtcctttatcaaagttagctccatcattaacatttacatgtttatcctcacttgcatttcttccatcactt

SEQ ID NO: 19700 - DNA, 354 bp, Glycine max
agcttgtaagtatttgttggtataatttgcctgttccattatgcttttaatgtctctagaggttacttcctcgttgacatcttttgttttgaatggaattgccataacaggtttgttgttactgtctttgatatttggtagttgatattgtgttgtgggaggtaattccgattggattaactcaccatccttcacttgccaatttgttatgacatttgttgttggatcacctatgatgtcttgtttccgagggtaatctatatgctttctgatgagcataagcatgaaacctatcgaagaaacagacattaattttgactctttcgacaaattcgtagaacttgtcatggattt

SEQ ID NO: 19701 - DNA, 441 bp, Glycine max
  unsure at all n locations
ntgtgcgatgtctatccatcattaagcggaaaaatcaggaaaaaatggtgatttacacccgattgagactacctcattcataagcacttgtaagagaagaaaataagaaagtaaaatgagtaaaaatcctcccataagttagatgagacaacttttataagagttaagtacataagttgatccaaacagggttttaggggaacttcaaataggctcaacaaaactaaatgcaacagctcacaaaaagcaccaatgtagagataataatggaagcgcatctcaccagaacatgtagagataataatgtacaatgcacaaacaacaccaagaaacctgcaattaaaaaccatcaaaacccaattgattctaaagaaatcggataaaagttagaccatcaataaaattttaaaaaagggaagcaaaagtcaaaacttttccatt

SEQ ID NO: 19702 - DNA, 400 bp, Glycine max
agcttatgctgcaaatatttacaatagacctcctcaacctcagcagcaaaatcaaccacagcagaacaattatgacctttccagcaacagatacaaccctggatggaggaatcaccctaacctcagatggtctagccctcagcaacaacagcagcctgctccttccttccaaaatgctgctggcccaagcagaccatacattcctccaccaatccaacaacagcaacaaccccagaaacaaccaacagttgaggcccctccacaaccttccctcgaagaacttgtgaggcaaatgactatgcagaacatgcagtttcagcaagagaccagagcctccattcagagcttaaccaatcagatgggacaattggctacccaattgaatcaacaacagtcccag

SEQ ID NO: 19703 - DNA, 435 bp, Glycine max
tctggaaaattgaagttcgtttttataaccttttcatgtgaactttcaaacatattattgagctcatttacactaatttaatgtagttcaaaatttaaacacatgatttgagattttagaaatgatattaattcgtatttagtaatgaatatcatgtttcgtaactatattagctcttatatttcatatttatattttctattattcctttgaaacaatttatacttcaatgttgttctgagactcctcaaatctatttgtgctgcaatagttcaactatttcatttgaactggattggtgtagttggtatgaaattggtttacctgaattcgttacaaataaagtagaaaatttatatataaattgttggatggattttgttggacaattgtgctataagtagtacatatacatgatcaaacaaaacatgataa

SEQ ID NO: 19704 - DNA, 385 bp, Glycine max
agctttgatgtatatatgcaaactcaacttgtccctttctttgagtttctcatacttataatattataatatgtttaagtcccaataaacgaattttcatttgggtcatgtcatcacttcacttaactgacgacatgaactcatgacaaaagttttaatatattaagcacttaaaacaaaattcatatcatttattaatatcttaaaggtatttaagtctatattatattattcactctctcactctgtatatatatatatatacaggatgttgttgatatcagaaatctcagtctggtttacactcttgctggaggtaaggccttttataactataagtttttaggattaatattaatataacagaagatacatgcatgataaa

SEQ ID NO: 19705 - DNA, 415 bp, Glycine max
tgtacgtgaatatttaagacttcagactcacttctctttgtcttgggaaatagattcagtgcagtcacattttcatgcattcaatttattttatatttgttctaaatttcagtagttcaattttgaacaactgaaatttggaattcattttttaaaattaattggtcgaaataaaatatgagttattcaatcttcatttgatagttccaagttactaaatgcattgaaaagtgaacgcacaggatctgatcctctgcctcagtctttcagtcaatgataggtattctcacacaaccttccaagctagcttgctccaatttttgcaaaatgcctcaatcctaatagtattaaatcctatgtaagagtcacaacataagttacataactgaagagttattaaattttaatattattt

SEQ ID NO: 19706 - DNA, 306 bp, Glycine max
tgctcgtatgaattacattctgcccctagctcaagcaaattcttaattcttcttgacatcatcaaaatcttcatgattgacatgctaccccttgttgatgacgacaaccacctgtaggttaggagcaacaacaaagaaaagatctatttgcatataggtatactcccccttgtgtttacaatgattgcttatatgagacaattgaagatttcatatttttcatatataaaaagttgtctcatacaacagtaggaaaagcttcttactatgttatctactatcattctctgaccctttgacaacatc

SEQ ID NO: 19707 - DNA, 432 bp, Glycine max
tgtataatcaaattaaaagcgcttgatatataaggctatttactatattatataacttatgtaacttataactcatataaacttttagtgaaaccaacctattcaatctaaacttaataattatgatggaattgcaatggctgctctccccattatgaaatactgcctttatatattcccccacttcaagtagtacactcaccaccccattccaattctctctcagacactcagacatagataaatgataatggcacaggttgggacagtaattatcccccactccattttccagtgcccatttatttttgtttttgacagaaagtgcgaatttattattgaacaatgaataatgattcatcaacattcatccactctaaacatctcattaatacataagttttatcttcattattacattaaataatctat

SEQ ID NO: 19708 - DNA, 396 bp, Glycine max
agcttcctcggtgccattcctgcgaaggcaaacatttggaaagttagttttagtgggacattactcttaaagcaaaaatggcatgtaacctcctcccatcaatacaaacatcaatgtaaatttagagcaagcttatgcgcatatttccctacgaacgttcacttgcacaagacatcctattaactaagaaaaatgcacccatatacaatcaaggtagcttccttacctagattatttacatgtacttccaaagtgtatttgttatttacatcatacacgccatcttgtcaaaatttacacacatgcatactcaaagcatttcggggtaccaaaaattgcacatgcgctcatcttggtatttctaatatctatacatatacaaacttcatgatgaat

SEQ ID NO: 19709 - DNA, 432 bp, Glycine max
  unsure at all n locations
tataaatatatttacatgtatcaaatatatatataattaataataacaataataataaatgtatcattagataaatatttatttaaatatatatatatatatatatatatatatatatatatatatatatatatatatataagcacataaaataattaaatgtactaaaaacattaacatgaatatactaaaatataaatgtaagtttaataatatatatatatatagaagtaattttacatgtatatatataatttgaatgattaaatgcattaaatataaaataataagaacatgctaaatatatccttatataaaaataaaatatatatgtataatatatgtacataacaaccaaaagtttatatacatatatacatatatcctanatgcattccaacgaagccatgaaaacccaacaatgagaaacga

SEQ ID NO: 19710 - DNA, 399 bp, Glycine max
  unsure at all n locations
tgctttgagccaaaatcctgactcaccataaaccttgacccagggtgagaatgtcaatccttaccctcggaagcgaaaaggaaagaaggaagatttccaatcaaagagaaaggaaaaaaaaagaaagagcagaaggaaaattccccaatcaaagagtgggagaaagcaaaaagaaaagaaagaaaattctcaatcaaagaatgggagaaagtaaaaaaggaagaagaagaaggaaagaaagctcctgatcagggattgaaggaaaacagaagaaatgtgcagagaggtctttggaccggacaatatctgaacaatacagaattgtcaccaaatgaacaaaaaagaaggaaagganaccacgacctataatggtcttctccctttgattaccaaccaaaa

SEQ ID NO: 19711 - DNA, 429 bp, Glycine max
  unsure at all n locations
ntgaggtaccaatcattgtctttcatcatgaccgtgtagtaaggaacctattgggtgagaactttcaatctgcccctagattcgcttgaggtttatgcatggtacctttcattgccccagtgtagggctttgaggtatccatcgttgttttgttttcacaaccttgtagcaaggaagaatgaaagaggcggtttgattctcgcaaaaagaatttttcaaggacgagaaatagttgaaggattttttttgagttgacgggttaagtcaaatgactcctattcttgataactcacttctctctaaaaaagacaaacttttaggaatgataaaatgaggtcacatgaatgtctatatttttacttgaaaacacagtcaatcaaatgctnttttctttntctttgtgaactcttttttttttgctttactcgt

SEQ ID NO: 19712 - DNA, 388 bp, Glycine max
agctttttaatcatgttttatgaacatttcatattaaactacatcctggaagagaaataataatataataaataatactgacgtgaccaaacaagaaatataaaaaagtgtcaaataagtgcatctaataacagtatttagacttttcctccctgatttacttaaatccacgtgattttcattattatcttaatatcagtatctaattacactgtttcctaaaggcatataacattgtgcaccaacttctgcctcatcgattcccaactatccaggggacgttctgggcaacaattttttttatttggtcaaattaaatttcaaatgtccacacctagcatgtagattcagggtcaagaaggaagttgtttatatactggtaattggg

SEQ ID NO: 19713 - DNA, 422 bp, Glycine max
tgtactcgaagccctctttttaaggctgaggctccacaccgccagcggatactagctgctgagtctgctatcttcaatcgactttttgtggagcgggcatacaagtatcgccctgttaaggtggtggaatttgaacttccgcggcagcagtgtgtggtttacttggatctgaagcgggaggagtgcaccaatttgttcccatctggccgagtatattcacaggcattccatttaggtggacaagggtttttcttatcagcacattgcaacatggaccaacagagctctttccattgctttggcctgtttttaggaatgcaggaaaagggctcagttagctttgccgttgactatgagtttgctgctaggtcaaggccaacagaggaatttgttagcaagtacacatgcaattatgtattcac

SEQ ID NO: 19714 - DNA, 389 bp, Glycine max
tagcttatgctttgaaaaaagtctaagtgagtctaccttgtatgtcaagaagagggatgttggaatagtcattgtttccttgtatgttgatgacttacttatgacaagaagttcaaaggagctgattgaagagttaaaaggaggaaagaaagaagcctttgaaatgactgatcttggaaaaatgttctttttccttggtatgcaggtgcaacaagatagaggtgaagtctttgtaagtcaagaaaaatatgcaaaggaaattcttagaaagttcaagatggaggaatgcaagccaattgcaacgccaatgaatcataaggagaaattcagcaatgaagatggagctgataacgttgatgaaaaactgtacaaaagcttaatatgatgtc

SEQ ID NO: 19715 - DNA, 410 bp, Glycine max
cgagctctgacctttttattaaataagttgagtcacgttagtccttaaatgagttagaaaataggcctctgagacgggtgactcaccctacttgtatccctaattgtgtgtatattgaaacataataaattccatagaatactttatactattgttaaatattcctagtcaagtattattgtcaatttttgaccaaaatcatggattatggacaaagtgattataaagttagtcattggacataacaaattatgaagagggatatgaatgatctagatgaaatttattcctccttcataattagagtaatatctatcaaccatcttaataaagtaagaagctaggcatagttgtgctcaatgagtcaatatgggatattgatctcatctattttaatgtcttttcaaagt

SEQ ID NO: 19716 - DNA, 411 bp, Glycine max
tcttagtttcaatgatgcagatgagtttgtggctacttcatgcactcctctaatgactatggcatcatttctggctctaaactgttgagagttggaaaccatattctcaactaaatttctggcttcagcaggggtcatgtctccaagggctccaccactggcagcatctatcatacttctctccatgttactgagtccttcataaaaatattcgagaagaagctgcttagaaatctagtggtgagggcaactggcgcatagttttttaaatctctcccagtattcatataggctctctccactaagatgcctaatgcctaaaatatcctttctaatggtcgtggtcctggaagtatggaaaatttttttctaagaatactctcttgaggtcatcccagctcgtgatggacc

SEQ ID NO: 19717 - DNA, 376 bp, Glycine max
  unsure at all n locations
agctttaaggtcaagagggctgaaggatgatacaacttgcctcgttgtagatattattccttcagatcatcccgtgttgccaacaattccaagaaagaaacgtaacgtgctaacttcccttctctttggaaagaaatctcaaaactctacaaacaaaggcaccaataagctttcttctgttggtgttgtggaggaattatttgaagagggttctgcaatgcttacagagaggtaactgggaccataactgctaaatttatatttgcatgatgtcatttgaagtttaattggtcaccatcatggtggaaagagagaaaaaatgantcctttttcccaatacatctatctttgattctntaaatttcggacttaaaat

SEQ ID NO: 19718 - DNA, 420 bp, Glycine max
tgaaagcaggatgatggaacaacggccttctaatgctcaagaaaatagaagagtttctagataagtgttaccttgtatgtgatgttaagaacataattagttttactaatttgtaggtgaatctcgagttgtacgtactcttgctttcacgatctatcttctttttgccatatgattttagacaaaagtataagttggttataaaggagttttccgcatggtctcgtggcttttctctatagaaaaatacagcatagaacctgcgttctcgttaaactgtactattttcactactaaggacatgattaccattgtgtttggttgaaagggagaaaaagaagtgaaatagtgaaagagagtaaagatagatgaaatatttaaattaaagttggttgctagataaacaaaagaaaaaaaaat

SEQ ID NO: 19719 - DNA, 377 bp, Glycine max
  unsure at all n locations
cccaccaagccccacagaaaacaataaaaaaaaaacccaatcnnnnncagagagatcagcactcancccgaatgacaaaccggaccaaagaccccagcaccacagattaacccacccccanagggggggagaacaaacgacccaaaacaccaaaaggaaaagacaaacagaaaaacgcaaaaaaaaacacaaaccaagaacaaacaaaacaacacacacgacaaaaagaaacaacacaacaaaacaaaacaaccgaaagacgaaaaaagaccaaaaaaagaaccacaaaacaaaaacaaaccaccaacaaacccaaaacagacaaaaacacaaacaaaccaaaaacacacaccccaacaacaaaacaaaccagaacg

SEQ ID NO: 19720 - DNA, 411 bp, Glycine max
  unsure at all n locations
agcttgcttgtggtttctttattaagggtggatctctgagctgtaatgaggtccttcaatgatgattttccacgatggagatgcagcggaagacaaaggagaagaggtgagaggaggcgccatccacaagggaataagccatggaagaaggagcttcaccaccaagatgagccttggataagaagcttggagaggatgcttcaatggaggaaaagaaagagggagagaaagagagaggggggagcacgaaattgaaggaagaaaaagggagagaagttgaactttgagttgtgtctcacaagactctcattcatcanagttacaacaagtgttacacatgcttctatttatagactangtagcttccttgagaagctntcttaagaaaacatccttgagaagcttctttga

SEQ ID NO: 19721 - DNA, 455 bp, Glycine max
  unsure at all n locations
gtaggcctaggatcttcttcatcaatggattcctttgcttcttggaagatgtatggcagcgtaatggagaaggaagagagagaggagacgccacttcaaggagaagatgagtctagaagaagctcaccaccataggaggccatgaataagagcttggaggaagaagaagatgaatgaagggagaggaagagaagagcacgaaattttgtgctctaaaagagctataaaatctgaagtttaattttcaaatgatcaaagttgaaaaaatgcacacacatggtctctatttatagcctaagtgtcacacaaaattggatggaaatttgaatttctattcatatttcacttgaatttgaaattaaatntgtggagccaaaatttcactaattatgattagtgaattttagctatggttcagcccactaatccaagatcaagtccaagaatctccacta

SEQ ID NO: 19722 - DNA, 426 bp, Glycine max
agctcagctttcattatccttgttttttcttaaatctccatggcatacttccttgtcttttcttaaatttccatggcatacctaccaacaagcttagcactcattaaccttggtggagtcagccaagatcttttattaaaaatggtgacaaaaaatcctccttgacttgagtgaagccaccgatcactacatgtaatgacaatgttgtcgacactcagcatagataatgaagtaaatgcacccaatagcgaggtggcgatatataatgaggtaactatcctcactctgagtcataccaaactattgaacaatggtgctaagtctacaaatacatgctctagagattgtttaagaccacttatcataatatcctgtgaagactaccaaaaagttgtgaagaccataattaccctatgtacattatta

SEQ ID NO: 19723 - DNA, 330 bp, Glycine max
tagactaatatcatgtttattagacacggaatggtatcacctctatcatactatatcgtacgttatgtatgccactcaaaacgacatgtatttcaaatgccaagcgaactctgatacttcgatccatgaaagtcattttctaagccgccgtcaagctatcagttccatatagattacagctccatcaagctgcgtttcaataataattctacacatacttttgcaaataatatgtcttaacttacaccaaccacaaccactacatattcaattacgaaccgcatatatataatctcgttacacgcatcattatgattcactatacacacc

SEQ ID NO: 19724 - DNA, 411 bp, Glycine max
agctttcattgttgttctactaatattggtaattgatgaccgtgatgcatgtttgtgccagatcattgacaatgtttcataatgcagaataatttattcttttgcagcattgtgatttttcaatcacacttggatttggataggttccaattaaggcaaaaattattatatttgcttgatcaactaaaatgttctttgtacatatttttctgtgtatataatattaatttatgtatatctaatttttaatatttctgttatttattgttattgtatttttttaattatcatgtgatgtcttgggttttatttgttaggtttttttatcattctaatcacattggtgatgatgttaatttaactgtgattctattcttctgaccttgctatgaaatgatattaaagatgtac

SEQ ID NO: 19725 - DNA, 456 bp, Glycine max
  unsure at all n locations
tgtaactcaataattttagttgaaattggtgaatttacgcatgcaatcttaattctcaacacactntttggatgagtcttccaaggattgtgttgccttctctaactttccttccttttccagtgataaggtaaagctacaaaatcgagtctcccaattgttgatataagttttgtaagaccatctttaattcgaacaagtggcttanaggtgtaaatgcacaatccttccaagcgagcaactcaaaggtgtaacgccatcttaaaatttcgtatgagcatcttcaatgaaaatggaagacttgaacgaaaatggttggctcgctcctcattgctctgggaatagataacgatctatataatgagcacaatgtatgaatgatggaaaaactccaatttatgtcatcccaggttaagacttgtagttcacactaatcaatgactaagaaacaagaac

SEQ ID NO: 19726 - DNA, 422 bp, Glycine max
  unsure at all n locations
agcttattatgtctattgnggtgcagaatgctactgactctaccaaagtgtttctccgaaggagttttgcaattctagaagagaatagactacgacaccaagaggctatgcagaaggtggcatccgtggaggcagaggtcgccaagtagagggctactgctcgtctttatcttttttcttctttttgttggaatttgaccacataggtcttgtaactatgacaattatttttcttcgatgcatatgctttccttcgatgattaattttgaactgtttgtcttgtgtgtatataatgtatattgcctttgtctttgcaacgctntgtacttgtggttgtatgaataggttgtcgtgatgtagactatttgataacgtaggaaggaagaccttgttgatgaagaggtangaccatgatggtctt

SEQ ID NO: 19727 - DNA, 448 bp, Glycine max
  unsure at all n locations
agttcccaatgtgcatgccatgtaaatgagatcatataaaaactcatgttttggaatttctgattataaaaacacattcatgtgaattaaaagcaaaggagaaataatgctccccacagacattcatgcatgaataacccattataagcatgattaaataaactaaccttcccaggctttattgtgctcacgtcttcaagagaacatataacacactgccacgaaaagttataagttttagttacaaaaggtttgcgtaaaaacacataaatntgatctgcttggttcatcatggcctgattactcagcctgtaataaattaaatgtacaaaacttgctttaaaaatactaattgataggtntttgtttgttaacaattaagttagataaagcacatagagtaaaataatcaacatacctgaactgggaaatccatttggggtctccg

SEQ ID NO: 19728 - DNA, 422 bp, Glycine max
  unsure at all n locations
atcttgaatgntatcccattgccatcattgtggatagttgcaggagtcgaatctggctagcaaaaggacatacaaaatctcaagacatgaaaataagcaggactaagtaagaacagtgtgttctgtttcattgattattgtttagtgttttaaatatttgacgcggacatctctgaataaaattgtgttacttataaaaatgaagaaaaaataaaatcatgcacgggaatcaattgatacataattgttatattttaactaatgatctcaagtcaaatatctaattatattaaatactcacgtgagattnttgttattnttaataatcttacctgactcanacaagtaagattagatntaatgaaaaatatanatgattcttactaaagaaaaattataatggtttaaatgttattcgattt

SEQ ID NO: 19729 - DNA, 370 bp, Glycine max
gaagaatgagtggcggaactgaccgcatatatgatggacaaggagacaatgctggcttgcatatcttgagagaacgaaacgctgaaatcggagatgaacaactgcagcaaagcaagggaggaagatgctgctgaagtatagcacgtgagggcagcggaacgcgaggctctcatgaaactcgggattgtgatggaggaggcagataagaacaacaagaatgctgcaagagtggctgagcagctggaggcaacacatgccgcgaactcagaaatggaagcagaactgagaagactgaatgtgcagtctgatcagtggaggaatgctgcagaggcatctgctgttatgatatcaacagggaacaacaatggga

SEQ ID NO: 19730 - DNA, 423 bp, Glycine max
  unsure at all n locations
agctntatattcaaaatatttattttggatggtcaacataatgtggcaatcaaatcgttgttgtcattaaggttgtcctctcctccccaagatagcagccagaataagaaataaattcatgaaaaagcaagcatggaccgacaaattcttacgtactctctagtctatatagcatggattccaattttattttattttttaaaataaaagtttttagtattggacaaactatggagtgtggaccaattattagaattttatgacctactagtatatatatcatccacgcttttgactaactccacttattttaaacgcgcttcactatagctgtcactagataataacctactaaaactcataattntaccgacatctctcctactgataatattagttntttntatatattaaaaatacaag

SEQ ID NO: 19731 - DNA, 400 bp, Glycine max
  unsure at all n locations
tggagttgttgcttttccttttgggcctcatataacttgtttcctgcagacccctttgcttccagcagacccttagtgctattcgtaacatcttgcttggctaacttcgcatacgtggtccctttgtttgtcacttcgacatcgttttcttttctagtttggtgactttgctctcatttcgtgtgtttctggtacaccacttgttcatcttgatataaatcttaattatcagtttacatgtttgncatcatatatatatatatatatatatatatatatatatatatatatattttattgggctcttgtgtcttatgttctaaatattagccgcgtgtcagtgtccttgtccatgtagtggtccatgtccgtacttcatagctgaaaaccaattacctga

SEQ ID NO: 19732 - DNA, 419 bp, Glycine max
  unsure at all n locations
agcttgattggacacccacatttcatactctcagtatctcttctaacaaaatctttcttcctagacctatactaaccactcctctcacaaccaattaacacaaatgaagtccttcctctaataccagtgtttgtgtctagcctcataatcagcaccacaaatccattttcatgagcaactgatcgaacccactgcaaaacattatctcggatagcaaacacctacaattcaacccacaattttagtcttcaaagggacattcatcttatcaatttaataacaataatgaagattattacctgagaagtattgaacgcatccgaacaatcaacatgttgttcattcacaccacattcttgttcattntcatcatccatatcaacttcttcggacattatactgtcatacatccattgatc

SEQ ID NO: 19733 - DNA, 422 bp, Glycine max
  unsure at all n locations
tatgaaatattngtataaagatatggtctaaacactttattgtctaaagtggtggaattctcctttaatttatgtttcataccacatgagtatgtttgcaaataggaatgttcaatatcaattaaagagctctaaccaagaacatgggaaaatcaatcattataatcaccacacatccaccattacaagcatgtaagtcttcctttgcgccgaacacaattcatatgaagaactgcacacaacatctatgttgattcaatcaaattaattaacctacacaatagatgttactttggtaatatgctatgtcaattaatccaaccaaaaatactagacaatttagttaaatttaaatttacacatattttacatatatatacaaaatcccataatggcatatctatatcantcctagaaatcac

SEQ ID NO: 19734 - DNA, 400 bp, Glycine max
  unsure at all n locations
agcttcctttatctgttttactttngaaatnntaaccatagattgctaaagtagaattaggcataagtggcaactttgcttttaccaaaagaagtaaatctctagctagtaagcatagataatggtgctaattatacaaatcatagagtaatccaaattaatcatgcttaaagtaaatatacacaatgtaaatctacattgtctaatcttgcaacgtgtaattttacaccgtgtagaaatcaggttctaatgaaattctaatttctactaaatttatcacatgaaatagcatgcatataatcggaattttaattggttacttgaattaaatcttccttataattacttttaataccaattatatntccacagatcacccaaactcaatactttctgtaat

SEQ ID NO: 19735 - DNA, 429 bp, Glycine max
  unsure at all n locations
tgcctgtccgatgcagcagtaatgatgttcgagttatgtttgtggaacggctacgaacccgggatgggtttatgcaaagacaacggtgacataactagcctgataaatgccaaaggaaatcgtgggaagtatgggttatgctataagcccactcaggcagatataaagagaagcatcgtgggaaggaagagcggtagtcaaaactcgcggttgagacaagaaggtgaaggaagcccaccctgccacataagtaggagctttataagcgcgggtctgggggacgaatgtcaagtggtcgcgatatacgaagatggcgttctgagtacattggacttggtacgaccatgccctcctgatttccaactgggaaattggcgagtggaagaatgcntccgcatttacgcgacatgcataatgtaactcttacgg

SEQ ID NO: 19736 - DNA, 419 bp, Glycine max
  unsure at all n locations
agtcttattttcttccccagggggtagaagaaatatgtcatacgtttcctctttggtttcagtatgctctgcagcaataattgccttgatttgatcaactgtcacagctcttgctgactaaaatggtagaaacaatcaacacaatgcatcatcaaaaagacacttgaaaatataaagaatcttactatgatagcatagcatagggtcaccttcaatatgtaagtgggattctggaatccagagaatggattaaacttgttaataattcttagatgagctgttgtgagatctggctcaataaaagctctatacataggatacacctgcaaaaggaaacaaaacaatagttaaaaattatagcaggtgccttagtcttacagatgcaagtgttcataagtcctanaaaaattataacatga

SEQ ID NO: 19737 - DNA, 422 bp, Glycine max
  unsure at all n locations
ttagttattntaatcttaagttgaccttgacatcatctattgtccaatattgctaaagntggactaggtgatcaatgtataacaagagagagagaagaaagagagtggaggagagaatattcaaaaataaaaaataatttaatttttaaaatatattaattgtgtgaatggattgaatatctatacataaaaactatatatggatgaatttgaatagattttattaaatgaatcatggatgaattgaatnttttaaataaactttggtaaatctaaataaattaatagattattttaatccatttattcaatttgattattaataatgaattaatttagtctaattntcaacccaactcaattataccgtcgagttaggttaangttaccttatnttattnttgtaatcaactcaattcaac

SEQ ID NO: 19738 - DNA, 402 bp, Glycine max
  unsure at all n locations
catgttgncttggttttaaatttcgagcgtctcgatatatgacgggacttaatcggacttccgagtaaaatgttattgtcgctcgactttgctacgagcttcggttttaaaattcgagcgtcacgatatattacgggactcaatcagacttccgagtgaaatgttattgtcgttcgaatttgctacgagcttcggttttaaaattcgagcgtctcgatatattacgggactcaataggacttcccagtgaaatggtattgtcgttcgactttgctacgagcttcggttntaaaattcgagcgtcacgatatattacgggactcaatcagacttccgagtgaaatgttattggccgtcgaatttgctacgagcttcggtttaaaattcgagcgtctcgatata

SEQ ID NO: 19739 - DNA, 365 bp, Glycine max
atatatcgacgtgctcgaaattcaaaccgaagctcctaagcaattcgaacgaccataactttgactctgaagtccgattgagtccccgcatatatcgagacgctcgaaatttaataccgaagctcggcgaaaattaaaagacaataactttgtactcggatgtccgattgagtgccgtaacatatcgagacgctcgaaatttaaaactgaagctcgagaaaattcgaacgacaataacttttcactcggaagtcagaatgagtcccgtaatatatcgaacgctccaaatttaaaaccgatgctcgcggaaattcttacacaataacttttcactcgaagtgcgattgagtcccgcaatatatcga

SEQ ID NO: 19740 - DNA, 286 bp, Glycine max
ttagcttatatatatgtaatagtttttgtctatttttttttaccttttttggttagcataaacataatcttgttgaatcagaactactttcggtcggcatcttggaatcttcgttcttgctatattagctgctttttttttttttttgcctctcgtccaagtatttatattcattatttaaatcgacacttatgatcgaggcatatttcgttaacttttatacaaggtatgactgatatgacaagttactaattgtacatttctttcgtcccgaatcttgtatctg

SEQ ID NO: 19741 - DNA, 386 bp, Glycine max
cgacactatgaaactcagctttgacgatatgttagaactgcttttgttgttacactccaactggtggagaagcatgccagaaataccgaagtatttatatgcgtcctcagggtctatatatcagtttgaaggagaagtaagcttttttcatggcactgctctttatgttttttctcttggctttgagaaaatactaagtatttgaattcttcagaggcaagatccttgaagtactgaaaaactggccagaaaagagtattcaagttattgttgcgactgatggtgagcgtatattaggacttggagatcttggttgccaagtaaaatatagtgttagtctcctatatctgcattacacacagagacattagagtaacataattttt

SEQ ID NO: 19742 - DNA, 278 bp, Glycine max
ggggattatccacttcccacaaaagtattgccaccactttccacaacttcgatataattcagcgtacgatatattacgggaccatcagacttcagtgaaagcattgtcgtcaaatgctacagcttcgtttaaatcagcggcgaatataccggaccatagattccaggaaggattgccgttcacttgctcacctcggttaaattagcgacgaatttacgactcataactccaaggatgtatgccccaatacacgacctggctaaatgacgccaatatac

SEQ ID NO: 19743 - DNA, 449 bp, Glycine max
  unsure at all n locations
cttgttctatttaaattcctaggatcatgagcaactatgtgtgtcctactatgacttgagaaacaaagatgatcaaataacaagcaaagatttaaaaggtactaggttgcctcctagtagcgcttctttaacgtcttgagctggacgcgtgatgacttgtcggccacggacctagtactttgcttacctttggctttggacttggtcgcctgctggtcgaccacgggtcgtaggcaacgctccagcctttgtagatgagctgagggactctggaggtggcggcgatgcgtctattgcccgctgccggccatccccaagctactgtggtgtctcgccttgcgcctgcctgngggcgcagtacttcttgatgaaagctcggttagtagggggcctgatgaccttgatgtgggcgacgggcactccgtagaactgacagaggcccgtaatca

SEQ ID NO: 19744 - DNA, 433 bp, Glycine max
agctttcaatgaactcttgctccaaaaaattgttattcgatccaattcaaaaatcttacaaaatggtccatcaataagcatgtgaaatctaacaaaataacaagttaaggagaacaaactacaacttaataacttacatcataaaaggcataaacaaagtcctaaataagagaaaagattagataattttctaaattcacatgtctcagttaagtatttttggcaattattaactcccccaactttagaaatttttttgtcctcaagaaaaagtaaacacattgttaaatgaaaactactagtgctaagactaaaatattgacatgagttgagatcaattccatcctaacatatccaacacttgtattgtccagaaccaaggtcataaaaaaggaatgggacaaggacttaattattctcagtgatgtcattg

SEQ ID NO: 19745 - DNA, 417 bp, Glycine max
  unsure at all n locations
aaggtccaatgccttaacagttttttttactcttgggggttaaaatgaacctttcaaaagtttaaaatcaactttacgcgtaactttatcgcttttttaagaactatataggtctgagttcctcttcgcacttgaggatacgtaggagcaagggtcatgctcttgtcgaccccaaaagataaaaaacacaaaaaagggaaaaataaataaatattgaagtcatgattttgcacacttgattaaaggtcgccgtcccttgtgacggacgaatagggtgctaatacctttccggcatgtaaacaactcttgaacctttattcttaaaattcgcagacccctttntagtttttctaacgttntcctcgaataaacattggtggcgactcccgcatgtcttccttctttggatgacgcacc

SEQ ID NO: 19746 - DNA, 412 bp, Glycine max
agcttagctattggtctgagagatcccatgaccttctaaaccccacaatagaatcccatactttcaaggataaatatcacttctgttttttcgttttggtgcattatgttttaaaagtctcattgcggctatatgtttaattgatgttaaagaacacattttacattgatatccatttgaaaggtaataaaatgcattgcctatctccgggagaaccaacccagtcagcatctgagtatccaactacctgagcatgtcccctatcttcataaataaggacttagccaggagccttcttaatgtatttcacccagtgatcttggcagggagagtttatgaactgacttaccacactcactgcaaaggcaatatttgggcaactgatcatgacataattcaactttccaactaa

SEQ ID NO: 19747 - DNA, 351 bp, Glycine max
  unsure at all n locations
tcaagcttagaggcagaccattggaattgactctgccctgtccatctttatcttcgncattttcatccgttgncaggcctaagacgattcttacagtactactggatgcatgaattggccgtgcatggaaatactatccacaatgatatcttccaacttggtagtcttacttgtactaaattctaatcgcatatattttttgtacaatacaaaccttccactgaccgatatgcctgcgtgcgttcatgactgttcttaattgatcataacaatacgtgtactcgaaacaaattgattgattataacaccgattttgtccatctgattttatatttctatcaagtgttaaaa

SEQ ID NO: 19748 - DNA, 404 bp, Glycine max
  unsure at all n locations
agcttgtgagctnatgntaaaaaaaagatgttgaagaagttgacttgactatcaagtacaagaaaagcttttggtctagtgataagcacttgattccaagtgtttcaccaataaatgacaagagtttcataagtccaatttcatgatcaagtaaaaggcttacagttttcccatttgtggtaatgatggtgacatttttgccattgatttgtgtcacctctccatcaatccatgcatcctcaggatcctcaacccaaacctgtgatccaacgatgatgttcacaggtgttccctgaaccaatcacaacaaggcaagaaaaagtgttactgttaacacatgatctgacagcaaaaatgtgggaaggatccaacaacaaccaacaaacagcgcagagaagactcct

SEQ ID NO: 19749 - DNA, 455 bp, Glycine max
  unsure at all n locations
tcaagcttctaatgtgtactcatgtattgtcaataagtacaatatgttataagcaatangttagaataaaacatggagcatggaaactgcattgttgcctaaacaagtagcaaaaatataacacctcatctttgagaagtgcttactgttttctcttcctcagtgacgagaaacttcccctctgcaaaatcacaagctgcaattggtattgctagctgcttctgcaatttctttacaacaaacacttctgactcttcacatatggttaccactgtaccattcctacctagccgaccagttcggccagctcggtgtgcatagtgaattgaatctgtcggtaagtctagattaaccacaagatcacattctgccacatccaaaccccttgctgataattcattcgtaaccagaactctcacctcaccattcttgaatgtcttcagagttgttgacct

SEQ ID NO: 19750 - DNA, 427 bp, Glycine max
  unsure at all n locations
agcttcactgtttattatagtatgtacaaaagagttgcagtattcaactgcactcttagttaaagggagttagttaaaagatagtttggaagcttgttagtcttcctagttagttcaaagttagctacaaacagtttcagtaactgttttatatatatatatatatatctttgtaacacaatattcactggccaaatatatttttcctttcttgattcttgagttttcctctctctcaaactctctctaatcttcttttatgatactgtttagtttctaataatgtttattaatgataaaaaagtgctccatgcaccccatcagatttgtcctttggtcttcttccanaatgcttcaattccagcccanaatagctattgggccaatgggcccaagtatggacacttcagcacctttntctttacat

SEQ ID NO: 19751 - DNA, 475 bp, Glycine max
  unsure at all n locations
ttacgcgaccttagaatcctaagcnttctaatgtcttgttagagtcgtggccttcttcagtttgtcatctttagtgtcttcatagnttatgctcaataagttccaaacctctttagcagttctcagtctgtaaatcttgctgtaatcattctttgatagggcacatgttagagtatatcttgcttttgttttaagttccataataaccagatcatcatctgtccattcatcttcaggtttatgaatagggatatccctattggtaatcatgagctagatttcatactgggtggacttgatgtacatctccattatgtccttctagtaagggtagttntcttcagcgaagcctggtggcctagtgagagatgctcccttagtgataaacttgtgttggttatctaccatttggatcttttcctctanacactattaaatgctcaacccttggagactgagctttgataccaactgt

SEQ ID NO: 19752 - DNA, 432 bp, Glycine max
  unsure at all n locations
gcgcacgcaagtcttgagtatattncttctgtgacattctagaacagtcaccaaatctagtactagacagtcatcttcaccttatatcagaaccagcaactgctaggtaggacccactgtggtcgaactccactgcaagacacacagaatgaagatgaaggccttttgaaatatgtacaacttcttaaccagtatatataaatataggttatattgccatcaagtgaaaatgaataccggagctcgttggtgtttccgaatcatatggagcaaaattcctgaagttcttcagtttacgtagatcccatagcttaacaccatcatgagcagcagtctgtcaaatctaagagtacaataagaatactgtataaacaatcatcatactttactagttacattgtctcacataccgcaaggaagtatccattctca

SEQ ID NO: 19753 - DNA, 401 bp, Glycine max
agcttgcatcatatgctatcgacaataacatttcactcggaagtccgattgagtcccgtaatatatcgagacactcgaaatttaaaaccgaagctcgctgcagacgctaacgacaataacatttcactcggaagtccgattgagtcccgtaatatatcgagacgctcgaaatttaaaaccgaagctcgtagcaaattctaacgacaataacatttcactcggaagtccgattgagtcccgtaatatatcgagacgctcagaatttaaaaccgaagctcgcagcaaatgctaacgacaataacatttcactcggaagttcgatggagtcccgtaatatatcgagacgctcgaaattaaaaccgaagctcgcagcacatgctaacgacaataacatttcactc

SEQ ID NO: 19754 - DNA, 415 bp, Glycine max
  unsure at all n locations
gagcgtctcgatatgttacgggacttcttcggacttccgagtgaattgttattgtcattcgaatttgctacgagcttcggttttaaatttcgagcgtctcgatttattaggactcaatcggacttccgagtgaaaagttattggcgntcgaatttgctacgatcttcggtttgaaatttcgagcgtctcattatgttacgggacttaatcggacttccgagtgaaaagttattgtcgtttgaaattgctacgatcttcgattttaaatttcgagggtctcaatatgttacgggactcaatcggacttccgagtgacaagttattgtcgttcgaatttgctaccagcttctattntaaatttcgagcgtctcgatatattacgcgactcactcggaatttcgagtgaaaagttatt

SEQ ID NO: 19755 - DNA, 376 bp, Glycine max
agcttgtaggttagcttgcaggaatccttcgaattggccaatttcacttggtgctacaaagcagtgacactagtcgcagaggtaagggaggactaatatttcaaaacatcatccctcacccactcatagcaagcaatagcaggggggacgatagtgacccaacacactatggctacgccacactcggggggaagccttaacgtccctgccaccacttctccttgcttttctagaaatagaagggggaagaatcgtggttactggaacgggttccctgtttagagaagaagtcaaaggctgcgccaacacggtgtgagaccgtcaacctctccaaggaagaggactcgctatcagaaaccctttggcgagtctcctc

SEQ ID NO: 19756 - DNA, 242 bp, Glycine max
tatttaattccataagcccaactccttatcaaggaaataatccaaccagaatttcaataacctaaaatgttcacaaccacaaaatattccagactggaacacaagaaaaataagccaagttcttatcataattatggaaattctaagaaactaaaaagccaaatacacggcttataaaagataaattagccgaatctaaaatcttagaagacgaaggaggggggggaagatcaaaactctga

SEQ ID NO: 19757 - DNA, 409 bp, Glycine max
agcttgtttatcccttatgagttgaatcgcacatagaatcgtttttttggtaggctcggagtaaactctttacaatcatagttttgttactgtgccgacgattctactccacaccatagacaacaccgtaatagtatgtcacgacagtggctgggagaggcggcatggcgaagtccgtgaacgagggtttcactagtgaggttggtcgaaaatggcggacatgcaacagaaaaggatgcatgaagaagagaaagaatatatttatatcattgtggcaaaattagttctatgatgtggcgtgccagcgacgatggatgacggtggcactgattatgtgaagcttcatgctaagcatagtgtcgcaatcactattggaacgagggcgtcgtgtgagataaaaatgattatg

SEQ ID NO: 19758 - DNA, 406 bp, Glycine max
  unsure at all n locations
tcttcttccatggcttattccctagtggatggcgcctcttctcacctcttctcctttgtcttccgctgcatctccatggtggaaaaccaccattaaaggacctcattgaaactcaaagatccagcctccatagaagccccacaagcaagcttccatcaagtggtaatcagagcacaagagcttcaagtaggtgctccttanacctccattaattntttttgctttaccttctcttccattnttgtttcttcattnttctgcatgtatctcctcacatgtcttgtgataaatgttgttaacatgattctttagagtttccactgattaaacatgctatagaagctagatttgattttctatggntcaaatttcttgttctttttcttgaaccatgaattgtgttgac

SEQ ID NO: 19759 - DNA, 403 bp, Glycine max
agtcttcttttctattttgctataaataggggaagaagtgaagaagaaaagggttcagccccttatgcacttctctctctctcgaatttgctgaggaaaattatttccgtgaagaaaatccaagccgaggcgcttccgtaacgtttccgtgagtaattacgcgaagattctcgaccgttcttcaagatccatcgttcgttcttcgttttcttcagtctacaacgggtaagtacctcaaaccaagcttttcaattcgttctatgtacccgtggtggtccacattatgttgcatgtatttttattcttgtgctcgtcaactttttataccccttgtgacgtgcttaagccatttatttaagtcatttctcgcttaatctaccaataaaataaatttccatcgatc

SEQ ID NO: 19760 - DNA, 444 bp, Glycine max
  unsure at all n locations
tctcggctcatgctgggaacgcctctattctaacacccgttcagcctaaggcacccacccagagggaagctccccaagttccaactccgaacacggctcgaccggccggtaattccaacacgacaaggaacttccctccaaggccattgccggaattcaccccgctcccgatgacgtacgaagatcttctaccatccctcatcgccaatcatttggccgtggtaactcccggaagggtcctcgaaccccctttcccgaagtggtatgaccctaatgcaactngcaagtaccatgggggtgccccggggcattccgtcgaaaaatgcttggcccttaaatacaaggtccaacatctaatggatgccggatggctgactnctcaagaggatcggcccaatgtgaggaccaacccgctcgccaatcatggagggggagcagttaatg

SEQ ID NO: 19761 - DNA, 405 bp, Glycine max
  unsure at all n locations
ttagcttaagtaatgccagggatacaccacttcccttttagggtagttagtttgggatatgattcataaccctgaaaagttgtgggtccaaatcattcagagcaaatattgcagtgccattcgctttttgaacatggagaaaccgaaaggatttcccacgtagctttccatgattaaagctaaggaattgctcacagagggttttagctttcacattggttcgaaggaaagttccttttggtttgaagcttggactaatgacgagccactntgcaacaaagtcacctatgtgaatatccaggatataaacctaagattaatgaggtttatagggacaatagctggaggtttgatgagcttgcaactgttatcccagactaaaccaaacaacaaatttgttctttc

SEQ ID NO: 19762 - DNA, 504 bp, Glycine max
  unsure at all n locations
agcacggatgnngttgaaacccnttggatagangcgattgttgatcaccnctagacatnccngagacgccatacaatactcacactnatatcctaaggatttacctaggatgttgtgatctgatttccgtgaagagccttgagctcctttcatgtgcgaactcctactgccttaatggaaccatgaatcacattcctaagaatttggagcttggaattgcgctgagaataaaagcggagggttnttcgattcaattggataacatcaggatgatggctatgcctcatgaggtaatctgggccatacttgatggacagcgtatataggtttaatgatgcacatgctgactgagacgatggatcataaacgctatagcagtaagcaagctaaatgagatcatcgataattacatgcaatccaggtgagtgaatacgatctttaatggcacatgagcgatgaaaccgttggtctactcttatgggtaaacatactcttactctttct

SEQ ID NO: 19763 - DNA, 345 bp, Glycine max
  unsure at all n locations
ttagctntnttttcttatgttctctaatccacaagcatttgaggctcctgctacatcggtcatttgttcttgcaacattatgacaggttatcgaaggtacacacattcaagaagcaagacatttgagatataggtatctttttcctccttatactctagtaaaagtatctcttcatcaaagttgtaccttgctatctcatacacaagtcttattttttgatgatgcaaagccattctcagttgcctacttctctggctttcatggttntggtgtcaaaaatttatttgttgtaatagtgcatacaattttaanggtttagcacttaaaatttcttcctcatatga

SEQ ID NO: 19764 - DNA, 431 bp, Glycine max
  unsure at all n locations
gacctataaaactcagcttcagatctatccataattggagattgcatcttcctcaataaggtattaacaatttgtcttctattctagtgacactttgtttagaagaaagaggggagaaaacttttataaacttcaaacttttcttgcattaaatatctcctaaaactaaacatttattattttgaaaaactaaaaacatgtttaattaaaaaataaaatacaagataagctttaaatnttttttttttttttaactctgttcacttttattctatctcccctagtctaaaactacttttcccatgtaacgggtttctatttgcttccaggataggttttatttaatgcattcaattgagcccgtattccttcatgaaaatgtctttcaaaagaagaaaattatataaggaatanaacgaaatctatagtag

SEQ ID NO: 19765 - DNA, 476 bp, Glycine max
  unsure at all n locations
acacatgcgttgagcccttgannccntgaantnncaccaaatcccgggaccctcagagacgacctgtacgcgcgccagcaccatttatgancatttttaacccccagccacggggagatgtaggtgagttgtataaactaacttccaccgcaaccagcgtatggatcatctacgacaactaccggaccagaatagcctctgcggggcaactcaaaactatgtgaatcatgccctaacaaacaccgatacagcctggatgagccggtcgctcataaataccttatcaaatacaccggggcatctgcgcctttcacgaacgggctaggtgaagacagataagcgtggagcgtctatcacaccctgtatctaataaaacaccactttacaaatgtggaaactcttcagggacggagacatgtgcccgctagcacccaactatatcgaaactatcctgacacaagcgggccacctacgcc

SEQ ID NO: 19766 - DNA, 444 bp, Glycine max
gcgcttagcggcaccaactcttcaaaaatttcactaagtgttttgagcttatctagtgaagctcgcttagctcagcggacgctgcaaccaattgtgcttggctcaggaatgctcggcttagtgcataactatcaccaaaaaaatgggttaagttacctgggcttagcgattcagcctcgcttagccaaaagtagttcagcatgaggatgagtgttcatcctcaaaggatgaactctcttagcgcggtaagcatgcttagcgagttctttagataacacttacatacaatgagtattgatgaactcgcttagtgcagcatgctcgcttagcgagctcatcgcgttttccagacaacgcagaatatacagctcgttttctagcacttttcaagcctctaaaaggcatatcacacatgcaatgtgtgcgccatactcaattcagtat

SEQ ID NO: 19767 - DNA, 330 bp, Glycine max
agctcgcttgatatgatgtacatttttataaccaaggaagatattcttggccttccatgcttccaggcgattttttgtctaaatacttaactttatatataatagaaagaacaaacgatataataagaataataagatgaatgaatataagaattaaaatacgagatgcatatatttatacattgagatgccgacagatacgacgaagagacatactgtaatttctctctatgcctcaatgacaaatatctatcacttagtagtgtttttctgccacatacctgtgtgtggggcaagctaaccatcctttctacattcaacaaaacattc

SEQ ID NO: 19768 - DNA, 457 bp, Glycine max
tatgagaccaaaacatgacaaagaacgtttccaacaatctatttctcatgcttttctagtaaatcttgtccaaaacacaaacgaattatacataaattcttctcacaacatggggagtcaaatccctcaaacaatttcacataatcatattataatcaaaggaatcaaaatggttcaaaaacacaaaacaccaagagcactcaattttatcaaccaattcgcattaaggcatcaattggttcgtcaaacataacaatctcatgattacaatcataaaggtagaattacaatacaataaatatcccaaaataaatcccaatttgatcctctaaggatccccacacatgttctttctaatcccaattgtgataaactcatcccttacctctaagaaggctcacatgtgtagtttgacaatgatagtatcatctctagtggttccctaagattcctcaag

SEQ ID NO: 19769 - DNA, 421 bp, Glycine max
  unsure at all n locations
agcttcattgtgatctttttctattgtagaaattgatcactcccactaatcaagtcattctcaagaaattntgcgtttcttgattcgacaaccctagtgctatgtgatggacaatagaatctataccctttggactttntagcatatccaatgaaatacccactaatagtccttgggtctagtttcttctcttgtggattataaactctcacttcagatgggaatccccaagcgcatatatgtcgcanactcggtttccaacctttgaataactagaaaggtgtctttaagacagccttggttggaacccggtttaatatatatacaaccgtctttaatgcttcaatccacaagaattgaggaagttntttattacttctcatactttntatcatgtccattaaagttcggtttcttcttt

SEQ ID NO: 19770 - DNA, 443 bp, Glycine max
  unsure at all n locations
agcaactcanaatctaggtatctaaaacccctcaatttagcggattttcaaggttttagaagagaaaatgaggatggggtaaacttggagcaaactctcatctcaaacaagtctatatcatcaatctaaactcgctcaaaccggttttacgacgaaaactctaccgaatcaaaatttgactcctcaacacccaattttaccctagaaatggctcttgttttcactttggtcactcatattcctcatttgcacagtctaagctttctcataagtcctaaatgacatttcaaactaggattaactccctttaacctccaaataccactaaatccagatttggccttctaactctcagagcctgactctntttccactcataacaccacattctcactttctaaccctaggttaactctacccttcatctctagtagttttccata

SEQ ID NO: 19771 - DNA, 425 bp, Glycine max
  unsure at all n locations
agcttatattttgttaattttaattaacggaaaagtattatatataccacaatctttaaatcttcaaaattccaatatctataagtaaagcccacattttctggaaatcacacctaagatattttttttttgtcatgagttagacacttttggtgttttccaattcattgaatcatatattaatcatactcttaatgtgtgaatattgttagttcaagaaaattttacgctcgaagaanatgaaatacaaaattgtttagagtttcaagaaaattccattatcgtgataaaaaaaaagcctaaaatttaacttttatgtgacatatataaacatactaaaaaaacaactaaatacaatnttgttntgttgttgaatacatcaagatacaaacaaactagcattcatccatagactgaaatgcatc

SEQ ID NO: 19772 - DNA, 443 bp, Glycine max
gcttctaatttctattgttagaccaaaatccaattattaacatttaagccattaattagttgaccattatttgactagagaattttctctaaattatccttattctggctagactttaccttaaaaatttatgagcttaaccattcatagatattctattgtaacatctcattttctagtttaaaaacactatccaatcacacaacaaacaaaaatattgtctaccacatagacatgaaaaattgggatgttacagagtttctctcttttttttttcctttaaccaccaagttaatcctataatcccccatttctctctttaaccaccaagcaaaccttataactcctaatttgagggatcaatttttctttgtatttattttaaggattaactttctatctattacaacttgagagactaaattgaggaataatgttcaacc

SEQ ID NO: 19773 - DNA, 397 bp, Glycine max
tgagaaccataggccggtgtctatgggtcctttgatattatgaacaatccactttgcatccttgagaggagtactcattacagtctccatgtatcaactgatgactccagcagcatataaaacgtctagtcttgtgcacatcatatcgtaaactacccaccaaactcttgaactttgtatcatccacctttcctgcttgatcgaactttgataacttatttctgcactcaatcggtgatccaattggcttgcaagcatccatcttgaatctattgagcatctggtgtgtgacatagccctttcacacttacgagatggcaaagtggctctgtgagtgggcgatgacgatggtgagagctcttgctgaacatgttgaggtgtcttatcttcttcaagt

SEQ ID NO: 19774 - DNA, 421 bp, Glycine max
  unsure at all n locations
agcttcttgttgatcaagttgatccgcaagctagttacagatgaagttgatctgtataaatcaacttcatccgtaaccagcttatggatcatctacgtcaactacggatcaaatatagcttctgcgggtcaacaaaaacctatgtgaatcatgccatagcatacgcggatcaagctgaatgagccgggtgcacaaaaatattttaaaaatacacggnggtatttttgtcttttcatgtagggtgttaggtgcaccagcaataatgctgggtgctcctagcaacacccttcatcaaaatataacatccactttacaaagtttgtaagccttttcagggctacggttcccttgttacccgtttacaacaccaaattcatatcaatatgctaatcttgtaccaaaatgtttgtctctacttatt

SEQ ID NO: 19775 - DNA, 433 bp, Glycine max
  unsure at all n locations
tctagcgtacccgctatnggtgctcataanatcccaaattcaaatccctcttattactagctattttgaattctttagttcctgaatgtacaaccttcaaattgttactcgttcccgtatttgttttctgcaaaaaagaaaattaatctgaaacaattcaggctgaattgttatcgttattattactcgaaccataaggaataacagctaaacaagtaatttaaaatgtaacttttaaattatgtggtatttttttaattacaattttacttcaatatctaattttgttaatctacttaggtcgttgtttaaatataaatatgaatttaaaggtgatctactgataatataaagtacttgctaatcacaaattatgatacctatcattntcaattntaacttaattntataaatattaataaatgtataataa

SEQ ID NO: 19776 - DNA, 420 bp, Glycine max
  unsure at all n locations
agcttgcttactataccttctaccgaacacggccgtgcttctgtctaggcccggattcaaggcgggttgcagcaccggctccgcttccctaactgtactggaggcggttgcggtggctttatcctctatggttttctggagttttaacatgacctccgagatggaagccattttatctttcaaggccgatagatcggccttcatctgttcctgcacgccctcttcattatccatttttctagatcgagtgttataggggtgccttggtgttttcttagttatgatgaaattcctaaagaaataaacaacggtgagtatgccaccaaaacatgagtatgcaaatggatgatcggagcacttggatccaccccaagattnttagataacgtaatgagtccagaactttctcattntataaaa

SEQ ID NO: 19777 - DNA, 434 bp, Glycine max
  unsure at all n locations
ntgtacggccttaagcaggcccccaaacaatggtttgaattactgcaatctactatcttcaagccctttgtgatgcaaactgggcatcaaatgttgatcactgaaggtgaatttcaagttttgccatatatttgggcccttatcatatatcttggtggacctgcaagatcaagtgcaaaggcaaaatatcgtagtttggcataaactactatagaattatcctggattgagaccatgtttaatgagttgtaagtttccttcaacacactcattgtattatgtgacaaccaaagtgttgttgctcttgcccactaaagttagttattgacaactgttgacacctaactcaatagattggtaacacaaaaattagtaccctaagaataaaagaatattntaatntggtatttgttcaatgaaagagtaaaatatag

SEQ ID NO: 19778 - DNA, 401 bp, Glycine max
agttttatatttcaatttcgagcgtctcaatagattacgggactcaatcagacatccgagcaaaacattattgtcgtttgaattagctcagagcttcagaattcaatttcgatcgtctcgatatattacgggtctcaatcagacatctgagtaaaaaagttattatcgttcgaatttgctgagagcttcaacattcaatttcgagcgtctcgatgttttatgggacttaatcagacatccgagtaaaaagttattgccgtttgaatatgctgagagcttcaacattcaatttcgagcatctcgatatattacgggactcaatcagacatccgagtaaaaagttatcgtcgtttgaatttggtcagagcttcaacattcaatttggagcgtatacatatatt

SEQ ID NO: 19779 - DNA, 379 bp, Glycine max
tctggaaggagatcaacttgatgttctatgcctcttgattgtggtagtccatgaggaatctccataggaaagacatttctaaattcctgcaataagggttgaacactaggagaaatagaaatagtaaactcattagaattatgagtagaaattttactgtctttgcaatactgtagattgagtggttcatgagcaggtaacattttcctcacttcactcgcctctgcaaaataattaaattttctctcatgtgtatcactcttttcctcgggtgtatcactctttttcatattccttttgggtgcctcactattatctttctcttggtctctcttttctctcattctgatttggtcatcacacacttctctaggggata

SEQ ID NO: 19780 - DNA, 349 bp, Glycine max
  unsure at all n locations
agtttgcattatattgtgtttggnctgaatccttatgagcaagcaatatcaattattgcgaaaagcttggcagcattcgataaggataacttgatcccctactttggatttggagatggtatctctttaaacaaatttaacttatggagtgcattattttgaagttaagatatggctaaaagaacttgcagaaagaatctgatttggaaatttgacataaaaaatgtgattaagatacaagttgcagaccacatgtcttgccttgaaaacaaagcactaaagatgaacctttgcacatttaggaaatacttgctaatgagcaattacttggtataaaatgacatgcatt

SEQ ID NO: 19781 - DNA, 417 bp, Glycine max
  unsure at all n locations
agcttgtattcattacttgttgagaaccataagccaaagtcgattgttcctttgatattatgaagaattcattttgcatccttgagatgagtagtcattagagtctccatgtatcaactgatgagtccagtagcatatagaatgtctagtcttgtgcacatcanatcgtaaactacccaccaaactcttgaactttgtagcatccacctttcctgcttcgtcgaactttgataacttaattntgcactcaatcggtgttccaattggcttgcaagtatccatcttgaatttattgagcatctggtgtgtgacatagccctttcacacttaggagatggcaaagtgtctttgtgagtggttgatgttgatggngtgagctcttgctgaacatgttgaggtgtcttatcttcttcaagt

SEQ ID NO: 19782 - DNA, 443 bp, Glycine max
  unsure at all n locations
ntagtgcatgtaatccacttatgaatagaccccatcttcctcataatataaaactagaaatcccacaaacataatcgtataccttctcaaagttaactttaagcacaaggcatgatttcttccttctcttagcatcatcaaccacctcatttgcaatggctacactatctaacatattttgctctcccataaaggcaatttgcttttcaccaataattntagggagaaccactcttagtcttcttgctaaaaccttagacaaaattttatacaagcacccgattaaggatataggcctaaagttattaaggccttgtggatcatccttttttgagatgagaatgataaacgaaggattntctcttcttggaattgctccattttcccaaaactcttgcaacatatttataaaatccaccttcaatgtagcccaacatttcttg

SEQ ID NO: 19783 - DNA, 381 bp, Glycine max
  unsure at all n locations
catgttgctntatatggcctccgtgatagaagccatttgatcttttaaggtccataggtcggccttcgtctgttcttgcactccctcttcattatccatctttctggatcgagtgttataagggtgcctttgcgcttttttagttatggtgagttccctaaagaaacaaacaatggtgagtataccaccaaaacatgaatatgctaatgaatgatcagaacacttggatccacctcaaggccttttttagataacatgatgagtttcagaacttctctttttataaaaaggaacaaagcttttatctagccaagatcatacaaaagtgttacaacagaacgtaacggtttctaattatatgggccatcaaatctatcatgt

SEQ ID NO: 19784 - DNA, 420 bp, Glycine max
  unsure at all n locations
tcttatccaaggctcatcttnggggtgaagctccttccttcatggcttattccttaatggatggcgcctcctctcacctcttttcctttgtcttccgctgcatctccatggtggaaaatcaccataaaaggaccccattgaagctcaaagatccagcctccatagaagccccacaagcaagcttccatcattttcttctgagggcaaggtttatggtaaattgggattttggctcaaggcttgtaacacggctggacatgatatatgtcagggtttggatcggttcaagggtaaaaggggatgtcccacattatttccatgacacaaatgcaacaatgatgatntggaaattttatacacctatgtggacactcaagtgccanacttttatggtcatgtgatgctatggctcaggattca

SEQ ID NO: 19785 - DNA, 264 bp, Glycine max
agcttctcttactctgacatcaatggcggaaacagaggatagtggcgcttacctccatggtcgacgctccctcgacggtggacggtggttcgtggctcctcttcacggcaacaagaagaacaagaatcaaacgcaagctcctcttcacggcaacaatggttcgtggctgaggaagaagaagaagaaccaaacgaggaagaagaagaaggtagcgcgagaaagacaggtctaagaggtcaccaacacaatatgaaaatggctctg

SEQ ID NO: 19786 - DNA, 392 bp, Glycine max
tctacttatgtggcttggcgggcttccttcactttcttgtctccaatgcgagctttgaccactgttcttccttcccgcgatgcttcttttcatgtccgcctgagtgggcttatagcctaaaccatacttcccacggtttccttgagcatttatcaggctagttatgccgccgttgtctttgcctaaacccatcccgggttcataaccgttccccaacataactcgggccatcattaccgctgcatcggacagacaaggcttgccaaagagggagtccacagaggaaatgctgaccacctcaaaagactagaaagcagtctctaacgattcttctgcggcttccacataaggcatggaggatggggagcttaccaagatgtcttcctcgcctg

SEQ ID NO: 19787 - DNA, 369 bp, Glycine max
  unsure at all n locations
ccgaggttggcattgacacttgaaancccaantcacacaacccaggaccctaaagacctcaacattttccctttttgccaggaaggggccttgggctcttgacgtaagcccccccccaggctggactggttcgacccgactaaggaccaggattagtgagcttacccttacatcgttggaagacaacaattcaccgaggtagaaacgcacacagctatcacggatgactaacatgaagaaacacgccatctaaagctcaaataggaccacgcttctaaaagactagaattctaccaaaacttaaaggtgcaaagacgacggaaaaattctggcagcaaaataaaagcacataaatacccctaagccacc

SEQ ID NO: 19788 - DNA, 486 bp, Glycine max
  unsure at all n locations
gcatgcttgatacctgcttgaacgnatctcttgaaccccttanacatgcgtganaancctctatggcggatctatacattcgctcttatggcgagctttcccatgcatttgcagcggaaggcgaaggatcataggtcatggtagacaccattcacagaggaataagccctggaagatggagctttcacccccagactgtgcctccggtaagaaactcgacgaggaagccttaatggacgaaaagacagatggaatgggggagtccgaatttgatcgaatacaccacggcgagaagtggaacctcgaggtgcgcctcataagactcttatgcatctaagtgaccacaagcgtacccatgcttctatttatagactatgtacctacttgaaagcttctagaaatacttccttgacaacttcactgaaaaactccttgaaagctcagctagctaccacaccacttaaagctagccacctcttataaccn

SEQ ID NO: 19789 - DNA, 387 bp, Glycine max
agcttgttattctattttatccaaacaacttcacaaatctcacatgctttcaagaaacaacctcttcaatcttccatgtgtaccttcaaccctttaaagcatgttaatgtaatgtcaacagaagattattcttataaaaaacaaaatgtgaaacaagtaggcaattacatgaatgtacctattagttgttgtgtttccaatatgcataacccaatcagtccatgcttctacaaacttctccttatgaggcatcaacaatgtatagtaaacatactaaaaaaatactaaaaactatgaacatagtgtcataccctaatttcgtccggagaccattatttgttggcatgcggccttcatttgactacctcaaaatgtttaacacccatc

SEQ ID NO: 19790 - DNA, 439 bp, Glycine max
tcaatgatagtttatttccacttttaagcaacatattagtaccaagcaatgctatcaaacacattaggacaaaatacaagagcaaaaatattacacaattagcattttgaatgtacaaaataaagaaaccaataacaagtaacagggagcagtgcacttgagaagcaactacatttcacgagcaacatgtgtatttgttttatgcagttttaaacaaaatcccattttaaaatcattcattagatagttgttctcaaatcttattcatcgcctaacttctgaaataaatatcaaataacagggaacaagaactttgataagtcacaaagctgattgcatcatactcaatttgagagttctcaccaaattcagcggcaagcaagttattccattggctctagagtcgtctagccttgatctttggcacgtaccatataat

SEQ ID NO: 19791 - DNA, 422 bp, Glycine max
  unsure at all n locations
agctttaacaacaacctgcaaatttcaagacaaacaagagcaatgcaaaaattcacaaatcgtaaacattagaaagtttcaaatttgaagttaacttaaaaatgtatttatagtataccaaatacaccaaataaaagtacagacatcgtgcaaaacaagaacaagtattttcaaactttcaataagacacatatctttattatgatatgcttcaaaggttcccaccggtcattcatgttcaagaaatcaatgtactcgaagtaaaaccagtaagattgaaagaacatgaaaatgaattagtgaggattagctnttagcaaatactacaaagtacactaaccgtcttccctgaagtgcaaaggactntaatttcttctcctttaacctccaagacctcactatctatccaagcgacatcagga

SEQ ID NO: 19792 - DNA, 453 bp, Glycine max
  unsure at all n locations
tatcattctatctctcanaaagtatgaaaggaagttcaagtgatgcaggtaattcatacccctagtagacaaatatttctatcttaccttcatgtagacatctgtatctggatcaggtgtaatatttgcttctttttctcttctgaacacctctgctagcaaatctgcagaatgtgaaataattttagttaaaacttgatttttcatatgaattttggctcgatttccaaattgcagctctgtgggctaaccataaggaggcccaactccttggactcatgctgagaaggccagggtttctctgactgtcatttctccaatatgaagatcattttgacttacaaactcattcatcccatgaccattataagtcacctttccagtgaactgatcaagaagccaaacctaattagctacaaatccaataatggaaaatatgagcacaaacatcat

SEQ ID NO: 19793 - DNA, 398 bp, Glycine max
  unsure at all n locations
agcttcttactagtttacggctttctggatgtagatgatgatatctatacagatggatcttatatatctatatatctatagatagatatatagatatagatatatagatatagatcatacaatgaagtaccgcacgagtgggtatataggaatccaaatctgccgaatcactcatgttatgatcttctacatcctaggtcttcccgttccttcatctggcttatgttcttcatgtagcattcagactgaatgactctatgaaattacgtcgctacttccacatggtacgggtaacgtatgagacatctctatttttcccggngggaatccttagaattaccacagcttagctntcaattcgcctctgaccatcatatgaaatgtgaataacccgtcct

SEQ ID NO: 19794 - DNA, 461 bp, Glycine max
tcaagcttgtgaatttagttttgatgcagcaagtgagggaaaacaattcttaattgatgtctcaaaaaaaaaagcagcggattcagtagcacgggctgcaataagagctcggtgtcattatgttaataaaaagtggctcggcggtatgttaacgaatcggtatactacagaaacacgacttcaaaagttcagggacttgagaatgcaacaaaagacggggagactcaatagtttttcaaaaagagatgccgctatattgaagagacatttagctcatttggaaacatatcttggcggcattaaatatatgacggggttacctgatattgaataatcgtcgatcaacaagaagaatatacggctcttcgagaatgtataactttggaaattccaacaattcgttcaatcgatacaaattgtgacccggacctcgccgatatttcaattccagctaatgatga

SEQ ID NO: 19795 - DNA, 419 bp, Glycine max
agctttgcttaatgagaatctgttcttccaacaggctgtgcaatttggcatctgaagtctgggagctctgggcagatgggtctgctaaagctagaagtggggctgaagtagaagatgcaaggatgccagctattggtgcaaaggaaaagggaacatcagctgctctgagcttgctcttccttgcctctggaaaattaactgtttggtcattcgcattccaacagttctttatgatatacgctaagtcaatgaccggtcttaggttcttgtaggaggtaagagcatcagatccaactcccctcaatctacacaaggctgtgattaaagctgggaagcctaagcgagaagagttagactgagccatcatggtcatttgtccagagatcaaaccgccaatgttcatgtccatccttgtgata

SEQ ID NO: 19796 - DNA, 275 bp, Glycine max
  unsure at all n locations
atgcacggaaaatgtaattatganattgagatgcccgtttattcaccatttcctagttaaccttgcattaagtaccatgttcaattattttgtttctaagtgaaacgggtttatgatcccaacatggttggctcgtggggcctaacacatgatacttagaatgtagtgtgaagtttcacgctttcccctttttgtgtttgttttgtagaaggaaaacgcaaggatgagcaaacattgaaacaaatggtatccaattttgcagatacaaaagtttg

SEQ ID NO: 19797 - DNA, 416 bp, Glycine max
agctttgttgtggaaggaagatggaagaaagaagaggttcgaggagattggtaaagaggatatacatttgaactaaggcttgccacatggtttgctgacatggactcagattttccatgttatggactaagacttgccacatagacatttgactaagaggaaattagattttaaccgtagggacttatttgcataacaaatgtaaagatgaggattatttttttcatttcaataggatagagactaatatacaaaatgactacaaagatagggaccaaaatgcctatttactaaaaataaaagagaacaatgtcatgaactttctaaaactcttgttctctccttatcttgtaccaaagctgctctctactgactccaagccacaaacaccaagctcacaacaccatactcttaag

SEQ ID NO: 19798 - DNA, 439 bp, Glycine max
  unsure at all n locations
tgctccagatccataaggtaatatgcatcaagctaatgactgttaaacgagcgcttactgggaggcaacccatctctttntattttcattaatcattgcatatagttaggattaacttatttgtgaattgttgagtaagtcatcagcatgtttagttttgaaaatggggttgttaaagctctttgaagctgtggatgaaaaataacttagaaaatttttcagtcatccactcgctcagcgcgccctgtgcgctaagcgaattatcattcatgcgctgagcgagtctcaactcgcgctaagtggatcaacccctacctattagctgatggggtctcgctaagcgagacctgtgcgctaagcccaaaaacctctctgaaattgcatttaatggaattagggtaagcaagtcttctttctaagcgcacaacattgtctcgct

SEQ ID NO: 19799 - DNA, 87 bp, Glycine max
  unsure at all n locations
agcttcnatactttgtacaagaatgaagctctgataccacttgttagacaagtggcctcacatatcttaagaagggggggggggggg

SEQ ID NO: 19800 - DNA, 442 bp, Glycine max
  unsure at all n locations
tctanccttttccttcctttctaccacaaaggtggagttattccacatacataaaaggccaccagcagcttccacagatggaacaaaatcccaatgaccagtggagtctcccgaaatggcctggcaaatacttttattaaagttctccctcttggtttcttggaggcagacaagatgcactttgtgcttacaatgagccttctaacagcagcccacttgactcccctcccctaacctctagaattataggagagaattatcataattgctgagatttaattcccttttctgttgccatcaaatcatctttattctccatatccagcagtagccccttaaccttgctatcttcttccttataagacaagcccatttccttcaagatgtcacattgcagctgtatagggtcctcgtataaagaagcccatttccttcaccattc

SEQ ID NO: 19801 - DNA, 368 bp, Glycine max
agcttgtgtctaatcaagtcactcccacattttatctctagcatgcattgtatgttggtctcgtcctttgtcacgggaagccggaaggtccatatcaccttcttaattggacacatggcgcactgcgcccccaaatacgcaagtaagaagagataatattccgggctctcgggtctgtgaaatgcattcatatcatgcatcgcataaacatctgttcatggcatcataatgaacatatcgatgctgcatttgtctgttatcatattacagcctcacattctgcatgagtcatggcatcatcatgcatatgcgttcaacacactttttgatctgcacaattggataccatttggtttcatgttagctca

SEQ ID NO: 19802 - DNA, 393 bp, Glycine max
  unsure at all n locations
tgaagagagacaacaatggtggtgattttaatgaaaaattttcgtggaggaagaaagagagagttgtgctggaagtttctggagaaagagagagaagatttggcttttaaaatggtttttcttttcttttttcattntcttttttaaaagcaattccacatgtcatttttttaattggagcaaaaagggcccacctttacctttgacttgaccaaatactcagccataaaagaagaaaaaaatgggacctttttggatgctgaaatcttgcctcggtttgcgtgccgcctcttcggttccagttcttcgtgtttctctgcacccgtcgaggcccattttcaaggtaggcaatatatatatatatcaaaatgctcagaatgagaccctgagcat

SEQ ID NO: 19803 - DNA, 400 bp, Glycine max
  unsure at all n locations
agctttactttagatnttattaatgacccactaacctagaattaaaataacttaatgccattaacctagggaattaaaaaaaacttaatggctgagtgtaactgaaattgtggcaaccaaaagtcacccccaacagccaacaagtcagccaccatttggtctcccaaaaggctgatgcctatgttgccaattgggcccttattacaacttgaactaaacctaactaaagcccttttagttgattaacccaaaacatatttttggtcagccaactttacaaggattgggccattatttagacagactaaacactctaaaattgaaacaaagtggtgtcatttagtcctcctccatttgggccatgatacaactcacaaccttggacttttctccttgaaac

SEQ ID NO: 19804 - DNA, 399 bp, Glycine max
actcagcttgtgggtcagaaaaatcactgttgtcatctctaaaagcggatattggaatgtatgtatacatgatttgatgatgtcaagaagaatctaacaggctgcttcaatgataagcatttgcttcaaaatattcaagattgcttcaacaaacaagtcttgttcaagattactaaagaccaagccttgccttaaacaaagtgctttaagacatgcaggctctggaatcgattaccaggaagggaatcgattaccagaagacgggttggaaatagctgttgaaaaggttttgaattgaatttcaacatgtaatcgacaccatatgtctgaatcgataccacaacgaactttggaattcaattcaaagtcatacccttcaatataactgcgaatcgatac

SEQ ID NO: 19805 - DNA, 410 bp, Glycine max
  unsure at all n locations
agcttgctttcattttcagtcatcaaagtcacctcccctatgccaacaatcttgcttgtgacatggttgcccatcttcaccataccaaaatcctctttttgatatggcaaaaaaaatccttcatgaggagtaacaaggaaaaatactccagagtcaattatccatatacaataatcagatgcaatattaaaataattttcattaccgataaaaaaaacattctcatcatttaatgacagagaagtagtggttccacctttattcttcttctttgggtcaattcaattagcatggatagttccagtcttctgatctttcttcaagaatctaccctcaaacttcttatgggccgactttccgcaatagtagcaactaaagcctttgnggtgagacttggatctttcttgtga

SEQ ID NO: 19806 - DNA, 425 bp, Glycine max
  unsure at all n locations
tgcttctacaactctatttataatatttgctgcaatctttatttcctttcccaagagtgactatagtaagttagaatgacaaatcatgcttcttaccatatccttaagagttttgtttcatctttcagctactacatccatgctaggtgaccacgacatggtgtactatgggacgatttcacattcctctaggtacctagcaaaaggccccggacgttgttcacttgaaccgtcatatctgccatagtattcaccaccacggtcatatctaacactcttgattcttttgttgagttgattttcaacttcaactntaaatgttttgaacacatccagagattgttatatttcatgtataagaaacaagtatgcatatctggagtaattgtctatgaatgatataaaatattgttgaccattccatg

SEQ ID NO: 19807 - DNA, 369 bp, Glycine max
  unsure at all n locations
agctcggacccgggatcctctgagtcacctgccgcatttttcttacttataatcggcctcattgcttaggttcctcacgaagctcgcaaaaaagacgaagccattttataggctacttaggaaaactgagtcattcctatgggatgaggcttcgaaacaagctttcttagcctttaagatagccaattctaagttgaccaaagccaggagcacccctactcctttaccttaagtagcaaaagaggccatcagcttagcccttcgtccagaagatggatagcaccaaatgcccatntattttggtagccatgtcattcatgaatgtgaaaagaaataccaaatgatcgagaaggtgacattggcactcat

SEQ ID NO: 19808 - DNA, 189 bp, Glycine max
cgtctcaggtaccatatcactctgcgacggcggagccatgactgatagcaacttagtgtatctagtgcatgattggaggaaagaggcacatgtccgcatagacccttttatagagatgcaggatactctaaagataccaaatccttcagatctgattcatatactttatacaatcttatgtccgcctaa

SEQ ID NO: 19809 - DNA, 340 bp, Glycine max
  unsure at all n locations
agctntgttaaccctctatcttactttgtcttgtatcgtgactcttcgttgccatcatagagagcggngcagagagaagaaacactctctggcctctcatcttcaagcttcgatggagatgagcgttgcaaggctaaagaaggacgagatccagaggctgaagaaggagatcaattagctccgacgtccggcgacagagctgcatgactcagagacaagcgcgacgctgaagaacctcctcgaagagggagaaagaatggtgacattcctagagacgagcgcgccagcaccaccatcaccatcgctgatggtattcaaaccctaaccctcctcaccctca

SEQ ID NO: 19810 - DNA, 303 bp, Glycine max
  unsure at all n locations
atgatctatggctcctgaatcaagtatccaattccttgaacttgacttgtttacactgcaagcanatggattaaacattacctttgtgagaattactggatccagtgattgtaccaaatcggttcacatgtgaattattgtgaattgagctttgttgctgagacaatgtcatcaaagctctatattgttgtaaagccaatctcattatactattatgtgtatcttgactttgtactggaacaacactatctacattcttcttcgatgcattcatgaagttatgcttgagcactgatgcttata

SEQ ID NO: 19811 - DNA, 89 bp, Glycine max
ccccacacaacaaccaccacccacaattttccacacccaaaagggacggaccccacacaaccacccacaaacgaaacgcacgacggcac

SEQ ID NO: 19812 - DNA, 427 bp, Glycine max
  unsure at all n locations
tattcgagtatttaatactattctttatgtcttatttttgtcattgctgcgtcaaagntaacaatctcaatgggagggtggagccatgattgagtgcttctatgtttaacaagtgcatcattgttggaaagaggtacatgtctgcctaagcgcttctaagataaggtagtgaacttttacgataaaaattctttcatctttttattataaaaaaaatacaatcatatgtatgcctatacaatatctatgcggttcttgctccaatgagttcatttctctatggctgctctatgccatctaacatttgtgggtggccaaatattacacaactcatggatggctgctagtgttgacaatccttaagtaaacactctgcaaatgatttctcgtttacttgttgattcgagttatttaaacactattcttg

SEQ ID NO: 19813 - DNA, 356 bp, Glycine max
agcttttctgactattaacaaacattaaaaaataaacattaagtgataaattaaacaagtacaaagaagtatgtattataattttaatgtacataccaagtgaatggtgtgatcctccaagctaatagaaccacctgtgtgcatacccaccctttttagatgcccttttttttgtctatgcacacttggaacgatacccaggtgcattccaatgtaataatagattgttccagacacgatctccaatcaaatatgacctttgattttcatttcgggcatccataaacatcttagagagtctatgagaggatttcgagttagaagcttcgttaatttcattctcttacagacgtgtc

SEQ ID NO: 19814 - DNA, 457 bp, Glycine max
gcttgctctaagatcgtcggtttggtagtcacctccacatatttgtgagggggatatttgctgggttttttgggctcacttcctttgtggagtacagacccaaaatgagatgacccatatgtctcatttatttaagtggagagaggctatattagagagtgagatacagtgagagagactcatttgagagggaaaaaatttacaaatcattgagagagatagaatgagagagaatatcattgtgatattcgcatacccactagagagcgtttttcagattgcaacttcggatttgttcaccattggatcgggctgatttgaggacaactggttctacgtgcgtgatacttcaaattatctggctggatcgagaaaaagatatctggagagagagataagtgtttcgcattatctgctctatattctaggggtttatcttcttgtctctattgtacca

SEQ ID NO: 19815 - DNA, 276 bp, Glycine max
  unsure at all n locations
agctcgagtactattgattgtttttcccacntatcccttttaatttttttatatctacccaactattcctatttccaaattattaacataaccatccctattactattcttagtgtgaattagagcccccagtctcgaattcacacctttttttttttttgtaactttttgaatacctacattcggaattgaagaacccttaacccgaatttgaaaggactggtttttttttgctttcggaggatcccagtttactatacacattgtctacttttt

SEQ ID NO: 19816 - DNA, 424 bp, Glycine max
  unsure at all n locations
aactgatgcattggtaacttggaacccttttgccttgaatctgaaatctgtcctggcgcagggtttgggtttgtgctcctctgctgaccaccatacagaccttngcccttccatgcagcaacctatagcaattgagcagcctgaagcttatgctgcaaatatttacaatagacctcctcaacctcagtagcaaaatcaaccacagcagaacaattatgacctctccagcaacagatacaaccctggatggaggaatcaccctaatctcagatggtccagccctcagcaacatcaacagcagcctgctccttccttccaaaatgctgctggcccaagcagaccatacattcctccaccaatccaacaacagcaacaaccccagaaacagccaacagttgaggcccctgcacaaccttccctcgaa

SEQ ID NO: 19817 - DNA, 422 bp, Glycine max
  unsure at all n locations
agcttggttcaaggtacttacccgttgaagactgaagaacaatgaagaacgaatgaagaacatcgaagaacggtcgaaaccttcgcgaaattcctcatagaaacgttacagaaatgtttcagaagcgcctcggcttggattttcttcacggaaacaatttttccaagcaaattcgaaagagagagaagtgcctaagggaccgaaccctttttcacttcacttctccccctatttatagaaaattgggggagaagcttgccacccagctcgcccaggcgagcagggttgcttcctccagaagcaacagccttctagaggaatcttctggagggcccaagtgggcctggttgctatttgcacccccatttttactaagtacaccccctggccttttttggtgattcttttntcgtaaagttacg

SEQ ID NO: 19818 - DNA, 438 bp, Glycine max
tgaaggcaaactggatgcgttggtcaacttggtaacccatctggccttgaatcagaaatctgtacctgtcgcaagggtttgtggtttgtgctcctctgctgaccaccatacagacctttgcccttccatgcagcaacctggagcaattgaccagcctgaagcttatgctgcaaatatttacaatagacctcctcaacctcagcagcaaaatcaaccacagcagagcaattatgacctttccagcaacagatacaaccctggatggaggaatcaccctaacctcagatggtccagccctcagcaacaacaacaacagcctgctccttccttccaaaatgctgctggcccaagtagaccatacattcctccaccaatccaacaacaacaacaaccccagaaacaaccaacagttgaggcccctccacaaccttccctcga

SEQ ID NO: 19819 - DNA, 423 bp, Glycine max
  unsure at all n locations
agcttgttttaatttgttaaaagaaaccgaaattgaacaaagtaaagatgaaagccaaaaaacaagaaatgaattaaaaagtctcggatttggaaacttacccgttgaagaatgaagaacggacgaagaacggtaaagaacggaggaaaaccttcacggatttgcttacggaaacctctcggaagctttacggaagcacctcggcttggattttcttcacagaaacaatttttttttacccaaaacagctgaaatgcatagccaggggaatcaggcacccttagaacaacccccttttgcctttntataggaaaaagggggaggaggttgccgcccagctcgcttangcgagctgggttgcttccaccttaagcaagataatgcctagaaacctctagaagggcctagatttgaaaattacta

SEQ ID NO: 19820 - DNA, 459 bp, Glycine max
  unsure at all n locations
gcttgaagtgagaaagtgtggaagagtcagtcttcctactttttttcgttgaccatatagtggtacctggagatatgtcgcgggggtcaagagaccttggggacgtcaggtggggtgttattgcccaaaaccaatcttgaccaatcccgacccaacccatgcatagtcagtcagtgagaacctgtgacgtacctaaacaggcgagctcctggcagtcaaccgataaatgatcaaagaccacaaagcaaggaggcttgtgtggtggctggccagctatggatcttgagtgatatttgggttatggcctctggtaatcgattacaaagggtgtgtaatcgattacaaggcttaagaatggngtcacgaagttgagatggcctctggtaatcgattaccaacgcgtgtaatcgattaccaggcttagatatagagacaatatgttgaggaggcctcttgtaa

SEQ ID NO: 19821 - DNA, 380 bp, Glycine max
  unsure at all n locations
atcttnttattttgttggatttcccctgcacttactttttggtccactttttctttatacaaatatgttcaagggaaatccggcttgctggaaagcgtaccgggtcgtcaagtatttaaaatttaaagcggatgaattcgagtatcaaactcagggaactagtgttagatagggttaaattcagaaataagacattgttgaaagaaacattgataattgatgatttagaacagaattaaactaagtctaggctaaaaaaatagtaaaaatgcaagtaagtaagattgacagcagtatgtaaaggtgttgggtctttctaacaaaccagctgatgtatataaagatgtttctctaatcaatcatgcttnntgtgtttatgt

SEQ ID NO: 19822 - DNA, 446 bp, Glycine max
  unsure at all n locations
ntgtggattcggtcttcgccgatgatttgatagaagtgttttaatttaatcatcctgctttgatgaataagaaaattggggcaaatgaagagggtgagaatgaaagataaacccatgttgcaactaccgttcctacatggccaaacttcccaccagcccaacgatgtcattactcagccaataacaaaccctctccttacccaccacccatttatccacaaagtccatccctaaatcaaccacaaaacccacctaccacacaaccaaacgctaaacaccacctttagcatgaaccataacaccaaccaggaaatgtaatttgtagcgaataagcctctatggttcaccccagatttcggtgtcctatgctagcttgctcccatatctactagataatttaatggtagccataaccccagccaaggttcatcaacctccatttctcc

SEQ ID NO: 19823 - DNA, 393 bp, Glycine max
  unsure at all n locations
agcttgaggagtctgcttcaacccatagaaatccttgagtaacttgtgttgggaagtccaatattgcctgccataattcatgtggtgcaacttataaaattgttggacaacttcacttaatgttatttgattttaagatgaaatctaacatggtataaagccttacaacccatctttgtgtattgcctatttttctacattggtggagtggggatgttgaaaagtcgcacatcgtttgccttaattctgagggtgcaacttatatacttattgggaaactttacttaagactaatcgatgttatgaatcttatgatgaaacctaacaacttgcaacgaagagacttgtcggttgctacttgtttcaaagcttgggtattngtgcatacaaacc

SEQ ID NO: 19824 - DNA, 439 bp, Glycine max
  unsure at all n locations
ntggattgaatcagaattcgatttggatagagaagaggatatggaggttgttgaccttccccacgtgtgttgggaaggtggggaatccatcacattacttttttttctttttcttatgatcggtttcaatttcaattggagtgtccgattgtgattgtgttaatgtgatggattttggtgtggtgagtgtggattntggtttcaggtacgttgggatctganggagggttgtgttgttgtgttgtgttgcgtgtttgtgaaatggaggacatacgatacgggaaaggcgggctgtgaaatgagatcgggatcttccacccggaacaatccaacaccggagtctagtgctgggtggggcttcaaaatgtaatcacacactacaggatagattgattctatgagtaaacagcatgatgtaactntgcgtttaattactcat

SEQ ID NO: 19825 - DNA, 413 bp, Glycine max
agtgggagttgttggaggaagttcagatgaaccagttgtagaagattttgatctagataatttaattttggtggaacttggtgatgatgcacaatttgaggaacaccttgatgatgatggagacggtgatgaaactgatgatatccatgaaaatgatcctattagagaattagacatggttcttgacgtagctcctatgtggagcttgtaggccttggatattcttcatcaatggagtcctttgcttcttgaagatgaatgacagcagaatggagaaggaagatgattggagatgccacttcaaggagaagatgaatcaagaagaagctcaccaccataggaagccatggataagagcttgaaggttggagaaaatgagtggagggagagggagagaaagagcatgaaatttt

SEQ ID NO: 19826 - DNA, 419 bp, Glycine max
  unsure at all n locations
tgaagtagttctcccatctccacctctgtttatcatctcttattccctatctagagaaactattgctccccctgattcaccagctagagaagcagttgatccccctgattccccaattggaaaagctattgatctttcttattcctcatccagagaagctgttgctctctctgattccccagtttttttatctgatagatgaggaggatgctcggactctgttgatctctctgattataactatattagtttcagtacattattttgagtaattctggtttctgattataattatgtacttatactttctgtgattagccactatgcttggtttgaagcatatggaacaatttgacttgattntgatgatattgcagtgaaacacttttatcttttaataagaattggtgttatgaatt

SEQ ID NO: 19827 - DNA, 410 bp, Glycine max
agcttattcttcaaacctattgaaacgatagatcctgaagaaaatggggggaggggggttagcattagagaatagaataacagaattactttgatttaaatcctggcaaccagaagatagcattacctgccaaattggcaattcctatgcagacatttgcaatgtctgatggcactccagcacttttaaaaacagttgaagagaaataaaacacagcatttataccagatagctgttgtaaagcaaatagggttgatccaataaaaacaactgcaaaacgaacttgtgaataaaatataacttttggaaacctaaggaaaccagtgaccagataacaacaatggcaaatacactcacaagtcacaactattccagagacaaaccaggataaatgcatacctttagaatga

SEQ ID NO: 19828 - DNA, 421 bp, Glycine max
tgttgctaatgctggacagatcctcttatgaaacctggtttattggagagtttagattccttatatggactgtatgtgcattctttgttgtggactctcttcaataactaagctctattacatgctcaaattcatgtagttgtggactcaataattgcttatagcatgagaatgatgaggagattgaataactatctgatgattcaccctgtaccttcgataatttttcactctgctgctacaacaaaattataaaaaaaaaaacaaaaagagcttatcaactcctttcacacttcacaggaaaaagagcctgaaacttgcgtaccacaaacaagttctagtcattcccaagtattcattgttatttgatagacctcgtacacaaaacttgaattctttgaacttgtttgacaaatactta

SEQ ID NO: 19829 - DNA, 412 bp, Glycine max
  unsure at all n locations
agcttgtattcgattacacacatactgtaatcgattaccagaggagattttcagaaaatattctcagcagtcacatcttttcatttggttcttgaatggccatcaaaggcctatatatatgtgacttgagagaccttgttatcatgtgggcctttcataccgggcgtcaacttgactgggcacacttagtcggatattgcatgcataaggcattgcgattaaatggtccattgccatatccacaccttgtcactctctttcttcgccattttcaaattcttcttcattctgaaccttatgttccaatcaagagatccttttttaattggtgctgctgtgattgcctcctttggttaccgcanagagcatgatggctcttgngtcanaatgggtgctcaacccgctgatgatg

SEQ ID NO: 19830 - DNA, 442 bp, Glycine max
  unsure at all n locations
tgttatattcatgggcaggataatgatctttgatcaagatattctacacacaattgccaacaacaaagtccacagatcaatgcttctgtcagcctataattaacttgtatttttcagtggaagctatcaattgagcatgagtttgttcgtgcacctggcgaagttaggagatgaactcctcaatggtggtataagaacacacttgactagggaaacttatcaagtcaaagggggccacgagtaatcatgcaataaataacgtggaaaggactagcctggtactatgattatcgacattattgtgagaaaatatatcttgacagagtctaacatcccaagactttanatgatcgccaaccaaaatgcatagcaagttaccaatggaacgattaagcacttcaatgtcactgttagtttgtgtattgtaagcactgctgaagtt

SEQ ID NO: 19831 - DNA, 419 bp, Glycine max
aggggatgggtgtgacagtgatgacatgacaatctcggcaattcagctcgccccgagatcctctgaggcacctgccgcatggagctgtgtcttggcatcagagatgataattggacctgactgagttcataattaattacatcatctctcaacattttcatcgatcttcatattatgtcagaaattcaatacatttcttattttctaaagtcttataaccttctcttccaaaaagtctttgtcaaaacttggctatcatcttttcatttttctcctttgcaagagagcaaggactatcactgaatctttcgtgctctctctccttacaaagatctaggactacccctgatattctttgatctccgttccttaaacaatattgaagacgaccgctaaattcttttattccttacagatcg

SEQ ID NO: 19832 - DNA, 335 bp, Glycine max
actagagagaattccatgctaccttactactaccttgatgtacaacatcactagcttttccattgtatacttcatattcactgcgataaaatgagcagatttggtgagtccatctactatgacccacacagtatcatgcccactactagtcttgggtaaactagatacaaaatccatagatatgctctcccatttgcattccggaatcttcaatggctgcaattctcacgatgggcgctggagctaacctaagcctttgacatgtcaacatcttgctattattcggcacatcttattcatgcctgccaccaaaactttcttaatcttggacatat

SEQ ID NO: 19833 - DNA, 346 bp, Glycine max
agcttggtttgcatcaaccttggccattctaaaatcttcctttaccttatcagtgccctctttaatgtatgcagctggttcagtaatatttgaatccatgccattgatgtttaccccaacatggtttccttcagtgtctgagtcatctttgtaaccattcattgtgtcaaactcaactgcaaagatgtggtttgactcattcccatcattggtggagttaacaaggccaagataatggccagcctcaaccccaggaaactgtgttgagggtgctatggtgaaggcaaggccaaagccaccagaaccagaacttgtggacacaattgagaaaacaaaattggtgctg

SEQ ID NO: 19834 - DNA, 336 bp, Glycine max
tggattgtagaaaagattaattacaaatggaaaacaaagccttgctgttataaactcttcatgtctggacaagagaaccatgtggaagagttatgacttttataataacttacaaccaatttgataaagtcaaaaaccatttgaagagttatatattttgatttattcagaaataatcactggtaatcgaataccatatcagtgtaatcgattatcacaaagctcttatgtaaaacaatgtgactcttcacatttggaattgaattttaacgttcaaagacactgggaatcgattactaaaatattgtatcgactacagctttttgaaataattgg

SEQ ID NO: 19835 - DNA, 403 bp, Glycine max
  unsure at all n locations
ccccccgcaccaccacaccacaaaaactagacgagaacaagactgaacncnnncaaccgtgtgaacgtggacccaaaanccanaanacacnnnccccgccccacgaacaacaacccttaaaccccccccaacaacaggaaccggagcacacaccacacaacccaacaacacagagagcagcgaccgcaccgaacaccacccacgccaaaagaccaacacagacgccacacgaacaaacacgggcggcccaacgccaccgaagcacaacaagcgaaaaaaaccccaaccacaaaaaaacacgcgagacaccagagacgaacccaacacacgcgcgccagcgcacccgacacaccaaaacgcgacacaacaaggccagaaacgcaaaaaaacgccggacacgacg

SEQ ID NO: 19836 - DNA, 414 bp, Glycine max
  unsure at all n locations
cacatactgtaatcgattaccagagatgnttttcagattatattctcaatattcacatctttgtacttgattcttgaatggctgtcaaaggcctatatatgtgtgacttgngacacgaatttgctaagagttcttcacaacaaaaaggtcttatcctcttaaaaagcaaatcatattatcctcttacaaattccttggccaaattacttgtgattcaataaggaattatttgagtgctcaaattgttcaatcaatctctttaaagagagatttcttcttttcttcttcttcattctgaanagggattaagagaccgagggtctcttgttgtgaaagaattctaaacacaaaggaagggttgtccttgtgtgcttagaacttgtaaaaggaatttacaagatagtggaactctca

SEQ ID NO: 19837 - DNA, 391 bp, Glycine max
  unsure at all n locations
agcttccttatgaatanttctaaagaagttagagcttagctacacacacatctctaatagctaagctcacctccttgagatgagaagctagagcttagctacacaccccctataatagctaagctcacccccatgacaaaaaaaagatgaaaatacaaaagaaaagtccttactacagagactactcaaaatgccccgaaatacaaggctaaaaccctatactactagaatggccaatatacaaggcccaaacgaaggataaacctattctaatatttacaaagataagcgggctcatacttagcccattggctcanaatataccctaaggctcatgagaaccctagggccttcccttggatctctagcccaatctacttggagtcttcta

SEQ ID NO: 19838 - DNA, 421 bp, Glycine max
aagtctcacattgtcatgtgctctgcattattgtagcctggttatacagaatcttgtctacaaagtctggttagcgataactcgcctgtgctttttcttccatgctatatgtagcaaagtcattgatccagtcaagcttgatgagttggaaaatgaggccgcaaatatactgtgccagttggagatgtattttccccccgctttctttgacatcatgattcacttgattgtgcatctggtcagagaaatcaaatgttgaggtcctggttatctactgtggatgtacccggttgagcgatacatgaagatcttaaaagggtatacgaagaatctatatcgttcagaagcatctattgttgagaggtacattgcagaataagccattgaattttgttcagaatacttagagaaagctaaacct

SEQ ID NO: 19839 - DNA, 419 bp, Glycine max
  unsure at all n locations
agctttgcttttgtttcatctatgttcactgcttttatgaggttgtatgcatattttttattctttgatggtaataagttaatcgtatatagtatgtgtctgttttggacttttggttagtaatgaattttttttggagctgagttagtggttgtttctttgaggtttgaacctgtgatctttagtaaattaatcaagcttgtcaccactaaaccaatcctagtggcttgaagtagtggttatgtagttggcgataatgtacaatcctttaaatagtttatctttctgtcatgcagtcgtgagtttacccatcgtgtgaagtctgtatctatggcaatgttcacgtcacaagaagttgatgctcttcaaaatgggggtaaccaggtacaatggtggattatctnttctatatttggaat

SEQ ID NO: 19840 - DNA, 411 bp, Glycine max
  unsure at all n locations
attgaaattaatacgattatcaacacttaatttctctggaacatattatatattgcctcattcatgcatactggtacttggtttttccagtactttgggaacaaatctttaatcaaaattcctcactactttatcaactctttccccagttgcatccgtgtgtgtatatatatatatatatatatatatatatatatatataacttacaaaacttgcagctagccaaggtgctataatatttgaaatctatgaattatttcagctggctcatgtaaatttttcttcattgttatgtttgtgtgcgaaaaaagagacagaaagaaacttattcttttattaatataaacaatctatatctttntaaaaaaacaattanataaatttacaattataacttacatagtgtatgc

SEQ ID NO: 19841 - DNA, 428 bp, Glycine max
  unsure at all n locations
agcttctattctntatacaagaatgaagctctgataccagttgttagacaagtggcctcagatatcttaagaaggggggttgaattaagatattgcaaactatttccccaattaaaaattctatttcaatttcaatgcaagttgcaagttcccttaaaaatgaacttttaaataatgattcaaatagaacaatctgaatataaatataaatcaataataaataaacaagtttaagggaagaaaaagtgcaaactcagatttatactggttcggccacacccttgtgcctacgtccagtccccaagcaaccagcttgaaagttccactatcttgtaaaatccttttacaagttctgaacacacaaggacaatccttcctttgtgttcagatttcattacaacaagagaccctcggtctctcaatcccct

SEQ ID NO: 19842 - DNA, 104 bp, Glycine max
gcttctaaactctatacaagaatgaagctctgataccacttgttggacaagtggcttcagatatcttaagaagggggggggggggggtgaacccccccctctcc

SEQ ID NO: 19843 - DNA, 336 bp, Glycine max
gacctgtctcatacagcatcactcaccggcagcgaagcaactgacttcgcccatttatcgcatccctacgaagcctgcaatgaaaactattcatccgcgtcactgtacactggacgacagcctctcgtggtaatgcgaacgggctacgtaagaccggactattacaacatgtcacatgcgcactaacgaagtcaaggccgcgtgaatacggcacctaactgacttggtatctattctccgaggaaccctactctcgactgtgacctacactcatttacctgcctccaaggacttcactcctacatacgacaggatagacgtccctgagagacgacg

SEQ ID NO: 19844 - DNA, 492 bp, Glycine max
agagcttgaaccctgatgaccgatgtataacactaaccttagaagatgtatgcgcttaaaagatggaaaaggatttatcaaggccatttctcttaccaaggagcctagctccggaggataaattaagtgttgagaggactataatttatcgatatcgtggtccattcttatccgatattttgactgcaacggcattgtctgaacctaatccaggaaccaaagactagagataatattttatatacgtgacttctgggtctaaaaatgttcaatttgtgttatgttaatagcgtgtaccatctatgcaaagagcgtgtttcttgagtgcctgtgtgtactttccgtactatgatccttcttccgtttagagtggctttcaccatctgtgaataaaactatgcaactgtagtaccatctactaaatatagacccgactctacgcgcatattatcaagcttaggctactctctccacttgtagatttgcatgccg

SEQ ID NO: 19845 - DNA, 403 bp, Glycine max
  unsure at all n locations
agcttctatttatgctgaaccattttatcaataaacacaagttgagttttattcagaaaattagagtttatctcttttatcttagtgagagtgattctcctaaattcttgagtgattcaagaacaccttggctgtatcaaaggactttcacaacctttgtgtgttgccctcgctggaaagagtgattctttccttcctttcatcatcacccttgttctttcaaaccacaattccagaaaatccacctctgcccagaattatctcgtggccataactcccattntacgcactcaaattaagttattcttgagcctaaattgaatttaaaacgagacctttcacctcgttttggaatcaccttatttggagccctgtncttcagttattgccattctatatttct

SEQ ID NO: 19846 - DNA, 499 bp, Glycine max
  unsure at all n locations
cggtgctttgacccgttgcttgatcccgtcgtatancccgacacactctagaatactcacgctcgcatcctacataccgtgtgaccacattttataatcagattatccgacagctgccgcggntcatttactagagtctctataggcgaggcaccgcctatgacagttcgacttgagacacaaaccatctaagagtcttacaaaccatcagggtcctattctcagccactgcacataatatgcgcctaatacggacatcctggccaaaagacttgggaatcagaattgaatgacatgggcgcatgaatagttcaaagcttctctatatagagagagcccgacttggacattcttgagacaagatatgaccatatagaccgctgggcgcttgcgttgaacaattccaaccccacggcatgttatgccctcggagcgacatcctgtaaaagagattaactatttgggatctctacagaggctgcgttcgactggcgcgagc

SEQ ID NO: 19847 - DNA, 369 bp, Glycine max
agcttcattattatcaatacatctctattaagcctctataaataacattactgtagcttatccaacaggagccttgtcgtgagaaaaatagaacccacaaatacgatttaatttgcaaaatatcatggttaaaagtgcataatatattttcctggtagcaattaattaaggtgcaagtacaatttaaaatgcacaacagtcatgtagtaattcatatttagaatatgtaataattcatatatcctacattcataagacaaaatatagtaagtttttatgaaccatagttaggcatcctacaccgaaacaggcttcttagaaagtgtttatatattttgcaactaatcacatctactcaatttaacatgc

SEQ ID NO: 19848 - DNA, 442 bp, Glycine max
aagcttgaaggtaaactagatgccttggtattctggaacccatctggccatgaatcagaaatctgcacctgtcgccagactctgtgatttatgctcctctgccgaccaccacacagacctttgcccttctgtgcaacaatctgaagcaattgaacagcctgaagcttatgctgcatacatctacaatatacctcctcaaccacagcagcaaaatcagccacaatgaaacaattatgacctctccagcaacaggtacaatcccgggtggaggaatcatcccaaccttagatggtcgaatccttcacaacagtagcaacaagaaccttattttcaaaatgttgcttgtagaagcaaagcttcatgatgaatccagattgattcaaagatgttctgatgataacaaagatgaatgacaaaagctcaaggtcaatcaaagaatgag

SEQ ID NO: 19849 - DNA, 382 bp, Glycine max
agttttctttcaagtcctaaatgacatttcaagctagtattaactcacggtaacctacatctaccacaggagggagacttagccatacagccctcaaagcctcactctttttccactcataacaccacattctcactttccaaccctaggttaactctacctttcatctctaatagtttttccatgagcaacttcagcatataaacatcacaaacatcatcacaaaaaccctaaatagaatgggtatgtctaactcatccagacatggcaatttcaacaagctttcaacaagagtcttcacaaataaccatcatgaagcagaaaactaccaaaactacccatcatatctgccaaaaccccgtacccacgaacattaagagag

SEQ ID NO: 19850 - DNA, 280 bp, Glycine max
atcggcattgtgcccctttagaggtagcaagatgctacatggtttcaccaatgactcggacatatcagcaacaagtgtcttttcagctttagtcaatcgaccaacatatggatgtccaactaaagacttggccaattcatgaatatgaatgcaacacatcaactttaccatccaaccttgtcctccaaccactggtttgccacaaagcttgaagggacacccacatttcctaagtccaggatctcttctaacaaatgcagtcttcctacacctatactcg

SEQ ID NO: 19851 - DNA, 416 bp, Glycine max
tgcttcttttcaatagtctcaccttctccttaagttgtccattctcttctcactcttgttgcgcaaaagcttttgagtctctaacttggattttcagcttgttacattctcctattaacacatgatcttgctcttatgccttcttcaaggcaacatccttctcctctattggctctaatgggttgatattacctagggactgcctcaattctagaaaacattttatatgctagggtaacatgggtgagatactctatcacccctaccaagattgatatggtagaatctaagctggtatgattgttttttagaacaatatcccaattctcaaacaaaataagacgatcaatctcctcactcatagacatcaatatgaggggaccgccaaacatcctggtacgaaccaagctagaatt

SEQ ID NO: 19852 - DNA, 330 bp, Glycine max
acctggagatatgtcgcgggggtcatgagaccttggggacgtcaggtggggtgctattgcccaaaaccaagcttgaccaatcccgacccaacccgggcatagtcggtcagtgagaacctgtgatgtacctaaacaggcgagctcctggcagtcaacagataaaaggataacaagaccacaaagcaaggaggcttgtggtggctggccagctgtgaattttgtgtaatatgtggatggtggcctctggtaatcgattaccaagggtgggtaatcgattacaaggcttataattgatgacaggaggctaaaatggtctctggtaatcgatta

SEQ ID NO: 19853 - DNA, 416 bp, Glycine max
  unsure at all n locations
agctttttattaaaatttcttccttctcctttgttttaatactacagtatatatgttattataatttgatgctgatttgtgtgcaggtaagttctcatggcctgagttggttggggtgcaaggaacggtagcggaggctacaattgagagggagaatccttcggtgaatgctattattgtgcctctaggatccgtggtcacaacggatcttcgaagtgacagggtttgggtttgggttaataaagatggaattgttaatagagttccaaaaattggataggaagtgtttacactanagcacatcaccatatatgttctaataagttatgaatatatagtaatatttaaataaggagttatttttccaattatgttctttgattgcaaaaaatattttatacttttaattatgctct

SEQ ID NO: 19854 - DNA, 253 bp, Glycine max
tctgccattatggcgccttgagagtgtcttatgtgagctttatgcccttatttgatatgctgtttttgtagctgtaaattgtgaccaaattcacatagcagcgaccttaatgtttccttgcagcaacgtttgcccttttgttgatgtgctatctattttagttttagtatctttctaaatagttgggtgcctatatacaggtatattatggaaatgttttgaaaatccattctctagctacaaagttgggcaa

SEQ ID NO: 19855 - DNA, 228 bp, Glycine max
tagcttgctctaaatttacattgatgtttgtatttattggaggaggttgtatgccatttttgttttaagggtagcatttcttggtaaaactaactttccaaatgtttgccttcgcaggaatggccccgaggaagcttgcctcaaagaggtccaagaaggacaaggcggccgaaggaactagttccgctccggagtatgacagtcaccgctttaagagcgctgtacacc

SEQ ID NO: 19856 - DNA, 430 bp, Glycine max
  unsure at all n locations
ntctaagttntctattttccaaaccttgttctttcacagttgacaaaagtgtgctatatctttntattctcttctctttttgccaaaaagaatttgacaaggactaatcgcctgaattctttttgtgtctctcttctcccttttccccaagaacgaaggactaacctcatgaattcttttgtgtctcccttctcccttttcaaggaattcaaaaagacacagtctgagaattcttttgattcttccctttcccttaaacaaaagatttcaaaggactaatcgcctgagatatcntttgtttcccttttacaaagtttcaaaggactaaccgcctgagaactttgtcttaacacattggagggtacattctntgtggtacaagtagagggtacatctacttgggttgttgtaactcagaatagagaggata

SEQ ID NO: 19857 - DNA, 405 bp, Glycine max
  unsure at all n locations
agcttgatatactttcaaaaggtgtagattgtgagtgcacttgacctcccacaaagcaaatgcaaagcacagcaatgtgggatcagtagccccatccttatagctaccatcatcaatcatgctctcccccaacaaagctgcaattatatataaaagcttcaacgtaagattgattttgacaatttctaagaactaaagacaaaaactgaattatgtgaacatgttaacccagacaaatcaataaacaggtggcacttacaactgaagatccttgatcttggagagcagggatttagttgctccctcaatgtgctttntaaacagcttcagtttctcttcgtcaagcttttgacaagaaactgcttcttgtcaaaagcaggttgctcctacctacaaagataatat

SEQ ID NO: 19858 - DNA, 434 bp, Glycine max
  unsure at all n locations
tggcacatgttccagctgccaatccacaaaggaaaagcttatagctagagaggttatcttctgcagcagtgttggagtatctatgattccaagcctacaatttcacaaacaatacatattcacaggtccaaaaactgcagtgtcaagtaaactgaaacaagacattcattagctgtgtgaaggaatccaactccatctttaatgtaagattacaacttacaagtggaaataaatccatagtgacataatttgaaggttccttttctcaacagaactttaatctaaactacaatcaattatcaaaatgccaacctaacaataggtatgaggcatggacaccactaatttctcaattgaaagcagtggtgcagcagctntattggtgcaaataattcatccagcttagtgattgacatatagaggcaatagtaatc

SEQ ID NO: 19859 - DNA, 472 bp, Glycine max
  unsure at all n locations
ggcactcttcgtgtacccgtganccctttgaactccacnncaatccaaccnaccccacgataccttaaggcacccgcagcatgtatcaagcttataaacaaccgacgggggacttttgggatatgtttgtccccatctacgctttaaggtgtacacttcctggtaacaacaactttccacacgtttgcctatccacgattggcccacgagaattttgccttatagaggtccacgaaggacactgcggcctaatgacctcttccgttcaggaggatgactgccaccgttgtaggagcgctgtacccagcagagcttcgaagccattaatggatggttcttctgcgcgagcgtatctgcacttcatggacacagtatacttttacacgaatgatataggccctaccatgacattattggtactccctgctcattcaaatagaaatacactctagtcttgccatgcaggcctcat

SEQ ID NO: 19860 - DNA, 454 bp, Glycine max
tgcttctacacaaagacgagtaaaaaccgacgtagaaaggttctaaacaaccgacgtagaaaggcacttttgtcatggtgacaacattaaagaaattgagaaataaggaaaaatgtctaaattggtttatatatatagtccttcaagatctagagtaatatttattattgtaccattgaatttgagtatcttttttgtatttgtaacttaatttgattgaagtttaattctccttaccttatatatataaaaggtatgattcagtccatcatgcatttgtccgcattttcttaattttcacaagttaaacctgaacttatactattttgtgtaagtgtcttttcccattttcatattttattttttattttcaaaatcgtcataagtgttttgttactattcttgtcaaagttatttaagttgagactgcaaatgattagtgttactaatcatg

SEQ ID NO: 19861 - DNA, 391 bp, Glycine max
  unsure at all n locations
agcttgtattagcatatatattgntctctatacatccaagggtaatcataacaaaaatttgactttagtgcaacttaatcaaaaggaaaatcataacaaaaatctccccatcttttattctcctttgtgcttcaaattcaacatgaatgtacattaatgacgaggatgaaaagcattatatataaccattttcatcaaccaaaaagattattaccaaaaaggttgtacggagagaggttaaggtaaactataaacaaaagttagttagtaagaccatatctnggataatttgttcataatttttttttaaaaaagaaaatactanagtaaaatgaaatatantttttccataagtttctaacttatgcactnttattttatatagaaactc

SEQ ID NO: 19862 - DNA, 457 bp, Glycine max
  unsure at all n locations
tctnccctattntgctataaatagggggaggagtgaagattataagggttcattcttcttggcacttctttctctcttgaaattgctgaggaaaattatttccgtgaagaaaatccaagccgaggcgcttccgtaacgtttccgtaacgtttccgtgagtaattacacaaagattctcgaccgttcttcaacattcatcgtttgttcttcgttttcttcagtcttcaacgggtaagtacctcaaaccgagcttttcaattcattctatgtacccgtggtggtccacattntgtttcatgtatttttattctcgttttcatttgctttttataccccattttgacgtgcttaagccatttatttaagtcatttctcgcttaatctaaaaataaaataaatttccaccgatcgtttgaattgtatcatctgttaatttcggttaaaatgaatttcgacc

SEQ ID NO: 19863 - DNA, 416 bp, Glycine max
agcttgtgttgttatgtgtagtgttgctacttgaagaaagttcttgcttctatctatgggtttctttcttttatgggatatagttttttccgtgtgctcgggtcatgcaaagtgtggcgcatcttgacgtgggagtgtttctaaagagagaatgatgtaagtatatttgggagtgtatttttttttttttttgaaaaaaaaaagagggaataagctaagatgaaaactggatacaataactgccctaattgaatacacattttgtcccgaagcccttcccaagcaatgagtgtgtgtttagatatgtttttgtagaattggttttaaattaacatgattatagataattaattttaagtaaatgtaagtttattgtaacgtaattttttttggataatatatattaaaaaaattaa

SEQ ID NO: 19864 - DNA, 451 bp, Glycine max
  unsure at all n locations
ctcttctcgtccttgtcctcttaagaatgaaacaagtttagtgttgcgattgaaaaatttttactcaatccatttctgttagtaatggaaaaagttgtgtacaatctatctatctgtttcacctttttttttacttgtatacatgtaaaattttaaatcacatcacttcaaatatgttaaattagctcattaaaaatataatttatttgtaagtaaagtccagattgattatttactcttttatccaaattttaatttgaaattcagttttaaatgaaaaaaaaggttattgtcactgactcattttataaaataattctcatccaaatttaaatttttaatttgtaaactttaatctttnttttatcagcctttanactttaatctgaatatatactatagtattttcttttcagcaagagataatatgtaggaataaatacgtcaatgt

SEQ ID NO: 19865 - DNA, 424 bp, Glycine max
  unsure at all n locations
agctttgactccactcacgttagaaaattcagtcattttcttcattagtgctttctttctcttcgtgaaagccaaatcacgatctctcccatttgggatgggctttaagattaattttgggcgtcccatgttctaaagcatatgcacatatatagaaattgatcaataaagcaaaacttggggtcatacgttggggatagagagatcaaatagacaactagttcatgaattgatcgaatgtttcggataagatgttgttctagaaatttaaaataaaaaataattcaacaaaaaagaaaatcatcaaggatcaaagaagaatggttcaagtctaatctctcctctcatcaaggattaaagaattntatagaagaaaaagtaaactgtttttgaataatagcaaaaatgaaagataaaagggaag

SEQ ID NO: 19866 - DNA, 458 bp, Glycine max
  unsure at all n locations
ntgaggatttggtctttgccagtgaaaggatcgatgtggttctgaaaaaatgttaatttagtcatcctgcttggacgaatgagaaaactagggcaaatgaagagggtgagaaagagggagaaacccatgctgtgactgccattcctatacgaccaagtttcccaccaacccaacaatgtcattactcagccaataacaaacctcctccttacccaccgcccagttatccacaaaggccatccctaaatcaaccacaaagcctgtctaccgcacttccaatgacgaagaccacctttagcacaaaccaaaaaacaccaacaaaaaggaattttgcagcaaatagcctgtagggttcaccccanattccgttgtcatatgctaaacatgatcccatatccactcaataattcaatggtagccataaccccaaccaaggttcctcaacctccatttttctg

SEQ ID NO: 19867 - DNA, 425 bp, Glycine max
  unsure at all n locations
agcttccatcaagttttaatcaaagcacaagagcttcaagtaggtgctccctaaacctccattaagtttttgctttaccttctcttctattgttgtttcttcatttttctccatgtatctcctcacatgtcttgtgctaaatgtttttaacatgattctttagagtttccaccgattaaacttcctatagaagctagatttgattttctatggttcaaatttcttgttcttgttcttgaaccataaattgtgttgagtttaggttcctttgagttttgtcttgttattttttgtggctgaaacctaaaccataaaattcttacaaaaatattaaagtataagaaaaccttanaaatctagagtgacttgttcacctattgtagttntgtcatagaagtcatgtctagtcatgaaacttgtcacat

SEQ ID NO: 19868 - DNA, 452 bp, Glycine max
  unsure at all n locations
tatatgatataaactcttatccttatgctttcacaagttatttttcaaaggctattggaatttattttatcatctattattcaatgtccaacacattattattaaacaaacatgaaattgtttggaaaaaccagtacttatgtagtgagtgtctttacacgtacaattaaaaaagacataactaagttacactaatgttttatattctgtttgttaacatccaaatcattttgcttgcatgtgaaagcatctccaagataaatatttgctgatgcaatcctccctaggaagggaccagtcactagagccatgagcaagaggctccaagaggattangctagagttgctgaagaatgccctaagattctcatgaacccagggtagatntctgagcccatgggccaaggttgagtccaattatctttgtacatattagactagaatgtcattat

SEQ ID NO: 19869 - DNA, 417 bp, Glycine max
  unsure at all n locations
agtcttgtttatattcaccccaattccaatgtcttatgctgacttgctcccatatctacttgataattcaatggtagccataaccccaaccaaggttcatcaacctccgtttctccgagaatacgactcgaacgcaacgtgtgcttgtcatggagaagcgtcggggcgttccattgagcattgtaaggccctgaagcgtaaggtgcaaggtctaattgatgcgggctggctgaaatttgaggagaatcacgtgtaaatcctgacattgacaagagatgccacacatggnngaaatttgaaagctgttgttagatgtctccaatgactcatcangattttcaagtntgtaccattattgtaaaccacagttacaatggtaaatgaaatggatatctttgtccctcatcctctcacaaa

SEQ ID NO: 19870 - DNA, 440 bp, Glycine max
tgcaacatcagagaacatgaagaactttctttgcagacatctatagggagcgatgtgaacacacaggtacctatgggaattttgcggtctgctccgagtcaactacactagtttggcactaggtttgatgacatgtcaacgagttacttacagaaatgatccaacaattgaatcagctcggctaagggtctggtttccgattcaaccagccgagccgagccgagtttaataacactgattgggagggttccttacttagtactgaaaatcttgctttcaatttgatagtaggtagaaaagttcttcttcatggagtatgtctcattaatattctcccgcatttcacaaatggaggtagaaaacatacaattacagcttatgttttgaatcagagtgccataaccaggtttatgataagagcatcctcattatccctggcc

SEQ ID NO: 19871 - DNA, 415 bp, Glycine max
  unsure at all n locations
agcttgatgtctaangattagtttgaagaagtttttgaagaagttttggcttttacatgcccaactactttgagtggcatttgtattggttgttatctggattgatgcatcttagtacatttgatatctgctttgcatcatcatagtttgtgagaagaaaattttctatagaggcaaaaactctctcttttaatcgattacatcctcgttgtaatcgattacaataagttgtctgaagcttgtagagttaagtctcgtatcaatttaattgattaccaatatctggtattcgattacattgttgtttgagacaaagaactaattagtcaagagtctctacttcaatcgattaccaagtggattaatcgattacttctttctcgttcagttgttcagaggtgaacaataacactat

SEQ ID NO: 19872 - DNA, 420 bp, Glycine max
  unsure at all n locations
tcaacctttggtgcccatttctgatcctaatcgcgaaatttggcattttctgggtcgtgaattgcgtgtctacgagtgagacttcgaaatttcaggtttgggtggacttctttctctcttaattctcgtgggtatgggattctgggagatatgacgggtagttttgttacgtctctgcttcatggtagttatttgtgaagactcttgttgaaagtttgtcgaaattaccatgtttggatgagttaaacatacccattctgcgttatggtccttatgatgatgcttgtgatgttcatgtgctgaaattgcttatggaaactgttagagatgaagggtagagttaacctanggttagaaagtgagaatgtggtgttgtgagtggaaaaagagcgatgctntgagagttggaatgtaaatctg

SEQ ID NO: 19873 - DNA, 262 bp, Glycine max
  unsure at all n locations
atcttggtcatgagctgaagcatcagaaagaatcttcttctaagttagatgttgcgatggagcttgattgcttaattgaaacccatgactgaaactcagatgctgagccatgataaacttcctctgaccaaaacaaggagggatcctcaaattcaggtaacaacacaatggagctggccttcaaaatgattagtactgattaggagacaaccaacacacttctcctcacaagatggaaggtgannatgtnngttttaaaatt

SEQ ID NO: 19874 - DNA, 414 bp, Glycine max
  unsure at all n locations
agctntacttggagctacgttaagactgaagagggaagagagccttctagtagcaacccttgactcgttcatgggggatccgcagctacgacaacaaatttgtgtcagttggtgtcgtggatgagagagattgaaaactgcaccattgccacgaatgagagagatcgacaaccgctacatcatcacgaacgaggttttttcaatcctgaactctttcgctcaattgtcgtcaacacaccacatcaaatcctagccaccaccatcaaaagcctactatgaacgagggagactgcaactgctccatgaccacaatctacggagaagggttttgaactttgattattataaaatcaaattaaaaattattggtgttttaaaaccatcagtatgtgaaaacntagtaaagtgacacat

SEQ ID NO: 19875 - DNA, 442 bp, Glycine max
  unsure at all n locations
tctaagcctggtggattgtctagtcctccttgaagtaactctcgagaggatttctgaatgtggcggggaccttgngggtgttgccataagcctgtggaaataaaaaaaattcagtttggcaaagtcagttatgtaatacacaataagttgtaaatttaattataaatttatgcattacaattaaaagacatggaatatgtatatggtactttgtgcttacgcagttatgtaggaatgttctcccataaacccttgtcatgatcagtacgatttgcatatacatcatcttcttgttgttcatcattaatcaaaggcatgtctttggagaaaggcggcatgtcactgacatcaagtgttgaaccatcaatatggtgaccgatagaaattgttctcccttgcaaaaccactgaccatctaaagttgtcgggatcttctacataaa

SEQ ID NO: 19876 - DNA, 413 bp, Glycine max
  unsure at all n locations
ttcatgttagcttaatataaattattaaatttattatatataatataataatttataattgaaagatggtataagattattttacaccagcttattttctcttattacaatcataaagtatatttttgctcattntcggttactagttcacagtattaaaagctnttacgtgcctgatccatagaactaaaaaaaaagtcaattcatagatgagaaagaatganagatattatttntcccagagtaaaaaaacgatataaatgaggttaaatgtaatgtatccattcctaattaattaaatcattaaataatattaatacacaagaataactagtaatgacgggtacacttgcttcagtgtttacgcatagcaatgaatgcctagtctctcttcttgactttctccatataca

SEQ ID NO: 19877 - DNA, 396 bp, Glycine max
  unsure at all n locations
ntcctttcttgtaaaagataaaaaagttcacttatataattctttcattcatgcttgaaacaagtaaaataatccaactaagcataaactaatacaagtagaaggataagaaaaaccagtaaatgatcaaaccaaactgtattttattcatattccatgtagtcttagatacatggaaatttgatcacatgaaccccattattctagtccctttntttgacacaagtaaattaacaagaaacaacattgagtgacactacttaattataacaaacaaattaacggaataagtgatgactagtactacttattagttgtagtatgttcctggggtttggaaccagtgcatgtatatttaatttcctttctcataaatctggactttggtgcataagt

SEQ ID NO: 19878 - DNA, 293 bp, Glycine max
  unsure at all n locations
ttgcttctatataagctaaaccattttatcaagaaacacaagttgagttttattcagaaaattagaggttatctcttttatcttagtgagagtgattctcctaagctcttgagtgattcaagaacatcctgactatatcaaaggactttcacaacctttgtgtgttgccctcgccggaaagagtgattctttccttcctttcaccttcaaccttttttctttcaaaccacaattccagaaaatccacttctgcccagaattatcttgtggccatganctctcgtttacgtgct

SEQ ID NO: 19879 - DNA, 130 bp, Glycine max
gtgtcaataagtagttgtagtttctcattatggggaatacttgtacttgggggcatgtcactcggttcagaactttcttgagactcatgctgatcaccatgggggggggggagttgtctgggcccgacat

SEQ ID NO: 19880 - DNA, 400 bp, Glycine max
  unsure at all n locations
tcttgctntgtcccttgctcgtgcctttagccatcatcttactttgatgggtatagctgaaacccaccataggtatacattcttgtctccaactattgttgtctttttattccattagttgataatttgtcttgtctttatttggctgagctctgtgcaaaattaagccgcaatctctccaaaataagccgaacctttgactaataacaacattgagggaatactatacttctttaatctaagattaccccagtatgatagtcttgaacaagttatgtttttgcagggttcgtaaaggaggacatatggctcttgctgcaaaatcttgtgatgatatctntaacnaacctgttttataagacagtgttcaagcacgtctgtggtttagtcctcatttctg

SEQ ID NO: 19881 - DNA, 431 bp, Glycine max
  unsure at all n locations
tggtgattaggatgttntgactgacttctactcatagattcattccagtgctcatggtgatcctcctcatcattaccttctgaagagaaagaagtgatcatcaagtcttaaaagtggattgaaagaatatcaaagatatctttgaggatataacagtgacaaggcgtagtctagaagaacaaatcatatagaaaaatcttcagctaatcatgtaaagacattgtgagtgcattaatagaacaataaatggatgaccatttcacttgcagtgtatcatcaaatactatagtgtatctatattagtctaactcacaccaaggtttaaaatactttgtagtatctacaaactattttcatgccggaagaaaactttncatttgaaaagcagattntgttgcctcatcatatgaaaccttntgcaaaaacattcc

SEQ ID NO: 19882 - DNA, 499 bp, Glycine max
  unsure at all n locations
cgccacacccactcaaaacgagccaaacacaaaacgttcaaactaaaanaaacccccncccgcccaaggatgacacantgaaaccctgaanaccaccaaatccagcgcccccacaagacccaacaagccaccccacaatattacacccatttacacccaccacaacggggaaacggggacgaaacgagcacccacaaccaacactaacacgcaaaaccaaaccaagaagcaccacccacaacaagaccaaaaaccaaccccacacacaacaaaaaccgaaacgaccacccggccaacccacacaaaaaaccaaccccaaacgaaacgcgaaccacacacacaacgaacccaaccacacacaccaccacgccagcgacaacacagacaccaaccgcaaccccacacaacacaacaccacaacgaaccccaaaccaacacaacaccacccccaaccaacccagcaagcacgcaccccagacaacaccaacaccaacaccac

SEQ ID NO: 19883 - DNA, 406 bp, Glycine max
gtgcgtagcccaccatctttccataaaagtatctatacgcgtcttccatcacgatcatcgactccctatccatcattgggggtaccacctgggccgctagatccctccaccttttgggcgtgttctttgtaagatctgtctcactttttgcaaatgttctgtagttgcatcctatcctgaaccatatcaaacttgttctgatactgcctatcaaaggccaccattatgtccttccaagaatggactcggcaagacttccagtcagtgtaccaggtaacagctaccctagtaagactttctgggaatgaatgtatcagcaagtcctctagttctcgtatatccccatctcctgacatacatctttgatggtcttgggaaagagtccactttacttgtcatatcaatc

SEQ ID NO: 19884 - DNA, 424 bp, Glycine max
  unsure at all n locations
agcttgagaaggaacagaattatttttgtatccactctcagctctgtagtttaaaccaaatatccattccaaacaagcacaaagaataaaaaatcattgtaattattaggtctgttgtttttgaggatatcctctccctagttggattgtccttttctatctaacaagcttactattttatctgaaaataaaagcacttcttggtattttactatttagtatttactatattatacaacggaaagaaaagcatcttaaaattattcataaaacttactacaataaacatcatcatcattcaacanaaacattcaaaaatgaacgagtcaacaatgtgaagtttgggaggccaaaatgaaatatgaaaaatgcaattacagcaaacatgcttaaatccaaaagaatctagaacaatactgacatc

SEQ ID NO: 19885 - DNA, 451 bp, Glycine max
  unsure at all n locations
ntgaatcataaaaaaaatactttaaatagtaaaatttttatttaaagtgtttttcaacaaaaagtaaaaagaatatatttttataataattttttataaaaacaaaataaaataataaacactaaattacagtaagtaatatatatatatatatatatatatatatatatacactgcggcatactccttccaaagttgccactggtaatctgattcctgttccatcttctcaatatccactcacccttttgtgctgccactaacaaaacagcacttcaacctcaaattttcaacctttgctcattcatgtcccttcttccttcactgcaaacacccaatgttcctttccatcctaactactagtcattctcgcaaccaggttagtttcatgtctttcacttcccatatctctcttcttttgtgttttttgttccaacaactaagcaaaata

SEQ ID NO: 19886 - DNA, 399 bp, Glycine max
agcttggtttttcttattcgatatttttaatttgcaaaattgaatgttattggagttgcactgtttatcatgcttgtcttgtacttaaaaatatttaacttctgcattttttttattccacagaacttttacatgataggaagggacaagagcaggacatattggaaagtactaaagattgaccgtcttgatccttccgagctaaatttgcgtgaagattccaccacatatacagaaagtgaatgttctgatcttttgagacggatacatgagggtaacaagtccacaggtggactaaaatctgctacaacttgttatggaattgtaggtatgtaaatccataatgtcttagctacctgcctgttgaccaattatgagttactgtctggatatactatt

SEQ ID NO: 19887 - DNA, 301 bp, Glycine max
tggatgggccctgaatattctagctctacagcttgtgctacaagtaacttttggatattgaatgcacgcaaccatatcattagaggtgaagctgcaagtatttttgctttgatatgtgctcttaggatcttaaaactctcatattaaccctgacctttacttattgggacaaaatttggctcaatgatgctctctctttgtcaaaaggcgtcaacaaccaagtaacatgaaatctgctgccgatggaagctctgggtggccagagctgatatataccattggatcctttatactattctct

SEQ ID NO: 19888 - DNA, 417 bp, Glycine max
agctttgctcgtatttgtcaagtgtatggaccacgttgtagccaaggtgctcatcgataatggttccagtttaaacgtgatgcccaagagcactttggagaaattacctttcaatgcttcccacctaaagccaagttccatggtgtttcgtgccttcaacgacacccgccgagaggttaggggagagattgacctccccgtacagataggccctcacacctgtcaagttaccttccaaataatgggcattaaccccccttacagctgcctgttggggcgcccgtggatccactcggtgggagttgttccctctacactccaccaaaagttgaaattcgtagtggaagggcatctggtcatcgtatcaggcgaggaagacatcttggtaagctgcccatcctctatgccttatgtgga

SEQ ID NO: 19889 - DNA, 444 bp, Glycine max
  unsure at all n locations
ctaagcttgacaaaattaccactgctgtcttctaacaagatttaaagggaaatctctctaaagatacatctaataatacccataattataacacatacaaaacactgacagaaacaatgggtatccaattcaagaaggatacaactattaacaaaacaaatattcacaaataataaaagaataacaaatagacacttaaagaactaaaataaacttcccaaatagaaagaagttcctcggcaacggcgccataaacttgttcgacgaccgacaagtgcaccggatcacgcaagtagtataacacggtaagtgaataccgagtatcgaactctcgaggaacttgttttacttggtaaagctgtggttagtaaataagtgttttgggtgaaacttgtgtctggtatgacaagatgcanactaactatcaaaagaaatacgtgagta

SEQ ID NO: 19890 - DNA, 409 bp, Glycine max
  unsure at all n locations
agcttatgttatggatcactgtatggtttcctttaacctcagtctatccataacgcaaagaacaaacatgaagaatgccaacattacattcaaaaatgggtcaaggaatcacaacgaanagtgtacttgggaccttacctaaatcagtaagttgaattgatgttgtagaatatagatattatgtgcattattgttgcctaactaatgtttttcgtcttcaaggcacattggcaacttgttgttctgtgtccacgggacaatattgttgtttggttttgttctttgtgtaagaagcctgatgttaacatcaagacaacaatgaataagttagttntaacattaaaagtcaattgaaatattgcaattgtanggtataaagacaatgattatttgaatatatacgttaacg

SEQ ID NO: 19891 - DNA, 350 bp, Glycine max
  unsure at all n locations
ctcagcttctcccccaatttctataatagggggagaagtgaagtttatnagggttcagccctcctggtaattaaaatcacttanaattagtgagaaaaattggtttcgtgaagaaaatccaagccgaggcgctttcgtaacgtttccgtggatgatttcgcgaaggttttcgaccgttcctcgacgttcttcattcgttcttcgccgttcttcggtcttcaatccggtagttccctagatcgaacttttcaattcattctatgcacccttagtggtcctcatttgttttgcgtgctttcatttacatatcatttacttttcggcccccttttgcatgcttaagtcatttt

SEQ ID NO: 19892 - DNA, 314 bp, Glycine max
agcttatattgattctaaatcattcaaccgaatgccatacatgtactcgagaacaatgactttgtctgcagactataataggaagcaaccagattatataaataagaagaattatggcaaaaagataaacgagtaggaattaacacgaggcgcattgattttgaacccgtagcaaactgaatgcaccagacacttatgcaaccactggaaattgcactacacatgatatataaacacattaataagctaatcagcatataattatggagaaaattcattcttttacttggtatggcaccttgtcgggaaatatg

SEQ ID NO: 19893 - DNA, 363 bp, Glycine max
tcgttgtgatgctagagcttagctactttctcccatgttttaactaagctcacctgcttgagaagctagagcttagctacacacacccctctaataactaagctcacctccttaagaagagaagctagagcttagctacacacccctataatagctaagctcacccccatgactaaatacatgaaaataccaaggaaaaatgctactgcaaagactactcaaaatgctctgaaatacaaggctaaaaccctatactgctagaatggccaaaatacaaggcccacaagaagaaataaagcctattctaatatttacgaagaagagtggagccaaccttgacccatgggctcagaaatctaccct

SEQ ID NO: 19894 - DNA, 417 bp, Glycine max
  unsure at all n locations
agcttgatttaagaaaattattaattaatgtaaggttacaaaataagtagggataattaaggttgattaatgacgatctagatttcatggaattagaaaatgggtaattaagtcacaagagtttaaaatggagggcatttttgtaaatgactatacaactagtttaaaaatagaaatttagtttaattagttggtgacaaattaaagtgcctgattatacaatgtagaataattaaaataagttagagttgtaacaccctgaaaaattacaattcagattgacagagaanactctgtgttgtgtcatctgtgcatgtantgaattaatttaagtatttatatgctnttaatcatagaatnttgtgttatgtatatatgtgtgtgtgtgtgtatgtgtgtggttagttggtttaataa

SEQ ID NO: 19895 - DNA, 433 bp, Glycine max
  unsure at all n locations
tatcacccgtatcagcgattgaagaaggttttaatgggtttcaggaaaatgagagtgcgtctaaaccattagctaggaaagaagtttatgatcaggttaaggacatcgtaactatctttgggaagacccaaaagaagccatcatctgagacaaacatacggaagaaaatgtcaatattcttttatcttccatattggtccgatcttgatgttagacattgtatagacatcatgcatgtggagaaaaatgtgtgtgatagtttaattgacactcttcttaacattaattgacactcttcttaacattatacgaatgttctcatttctcaggggatcattgcagcaatagtaaccacaaaaaaaaaactatgtttgctgataaaaaaatagaaatcaaacagcaattggtttgctttattntttcccatcaatca

SEQ ID NO: 19896 - DNA, 420 bp, Glycine max
  unsure at all n locations
agcttaatattcactaccatataatatgtctggacatataattatatgataaaacttgtctttgagcttaataagtactttgcgctcaaataatcttcgttgttttttttcatttaagtcacccgactatatcctatgtgtgacattctcattaatttcttcgtcatcttgtataattgatcctagatatctaaacttagagacatgtgatgtgagatcttcccccaattttattaaagtttcaattacattttttttctaatttaaggactttaatgaattacactttcttatgcaggagacaatcaatgtagactatcagtatagctntggtcacacattntaaaataaaactagataaaatacactagatcccanacgaatgtatgtaaactntnttgagacccttgatcttattag

SEQ ID NO: 19897 - DNA, 310 bp, Glycine max
aaaatcagttgtgaatttgaggggtgagttttgaatttattcttttgggttaaatttttaaaaagatggtacaaattgaatagtaataaaatgagtcaaccattttatcttatctcgctttactatggcataatggcggtgacgatggtgacagtggcggtggaaaggtgatgctggtgtttaaaagctagagcagcttgacacgacctgaagatctggtcaagtcggggtaactatggatcgaccatgcattaaatctactacaaccgagtacaacctaaccaggtcgtggacacccaagggagaaaat

SEQ ID NO: 19898 - DNA, 415 bp, Glycine max
  unsure at all n locations
agcttctatataactggtctcccattggagagggattagctcttgtagttcctttctagggatctagacaatagatggtgtttcttcttggttgttagccaggacaaagagagcattgtcatgaatggtaggcagagacagattaacagtatagttctgcaatctatatatgatctgatgatgcaaggtagcagaatgggcctcaaatacttgttcaactccagtgatctagctntaaactttcatcctctgtgggagagtgggatctttcaaactgatgttagaatttgggaaaatggtgagaactatacttccaacatggagactagtcaatttggttctgatcatagcattntcatagtgaatgtaattggagtctaatagagagactctggcggttacaagtagtcctctt

SEQ ID NO: 19899 - DNA, 434 bp, Glycine max
  unsure at all n locations
ntacagtccttgactgtatccgagcatagtctcactaatgtgtccactgatctggcacctccactaatagtccatgactattagacgttcttgggcagcacctcaactctctagcacctcaattggtcctatacaacctggctctagataccaaattgtaggaagtaagaaaacaagctaaatattctactcttacacactcatatttgaaggaagaaagagagctatagaattgattntgattcaattgacacacacacaaagcagcgtacatgatctgcattttataggcaagttctcctaaataaactattacataaataaagaaaacccactagactaagtaaaccaaaaagaggctccgactggaaaaaggtgcattgttgatggtcataagttgcaacttactgcagctgtataaaacaactatgcag

SEQ ID NO: 19900 - DNA, 443 bp, Glycine max
  unsure at all n locations
ttattgttttacacaacagcgccgaggataggtagagtcnttgacacttcaccgacaccttctcacaatgatgtctgatcgccatcggaaatggacatacatatgcctgatatatacagagactgcgagagcatcatggaaccatgaagtgccttgtcgtgccttttctgtaagctcaaatgactatcacgtgactacttatggtagtatactaaatcgcataagaaaatatgacgagtcctcatgttcatataccacatgctaagacacacttctgtgaacgaacgatctagacaatattcttcgatgatagacgccgctgggcattagcaagagtaccaggattattctggtgtagatcaggttcacttgctactaggtgtaagcgtgaagcataccttgttttattcgatagctttaacagtgactgaaagatgctgggg

SEQ ID NO: 19901 - DNA, 419 bp, Glycine max
  unsure at all n locations
gggggacatgantactatgcgggctgcatanacgaagtgttttgtccatgaacaaaaggggttctatatgcaaagcttctgctttgcctgaagatataaagggcatataaacaatttatccattatactttcagttagcgaatatccacattctcgacataaatccggatattccttgaagcgtagtaaacagacttccattcggatatgtagctcgaatagctaatgctatactcctatcatgagtccatgaattcagtctctttgcttcactcttacttccggaaccttggaactaaattacggccttgaatattgatttaatccattgaaccttgacatcgctttgaaggtctgtgaacttcaaatgaacaagactcttggcaaagcaaaaatctactgattgcgagcgcgtagcg

SEQ ID NO: 19902 - DNA, 280 bp, Glycine max
agcttccttatgaagattcctaaagaagctagagcttagctacacatacctctctaatagctaagctcacctccttatgatgagaagctagagcttagctacacaccccctataataactaagctcacccctatggcaaaatacatgaaaatagaaaaaaaaaatccctactacaaagactactcaaaatacctcgaaatacaaggctaaaaccctatactactagaatggccaaaatacaaggcccaaacgaaggaaaaacctattctaatatttacaa

SEQ ID NO: 19903 - DNA, 425 bp, Glycine max
tatagaatatataataaaagaaaaatgacaattgaagagtctatacatgtttcctttgatgagtctaatgccattcttccaaggaaggattttttagatgatatttcagattccttagaagatacacatattcatggaaatgactctaaagaaaaagacgaaggaagcaatgaggattctcaagataatggggctagaggaaataatgaacttccaagagaatggaaagcctcaagagatcatcccctcgacaacattattggtgatatatcaaaaggggtaacaactagacattctcttaaagaattatgcaataatatggcttttgtatctatgattgaacctacaaatataaaagaagccatagtagatgataactggataattgccatgcaagaagaactgatatcaattgaagaaataat

SEQ ID NO: 19904 - DNA, 400 bp, Glycine max
  unsure at all n locations
agctnttgtgtgaaaggatgtgactcttcacatttgaatttgaatttcaacgttcaaaggtactggtaatcgattaccaaaacattgtaatcgattacagccttttgaaaataattggaacgttgtaaattcaatttgaaaactttntcaaaacaatnttgctactggtaatcgattacaacaatctggtaatcgattaccagagagtaaaaactctttggtaaaaggttntgtcaaaaactcatgtgctattcaaagttgtgaacaactttntaatacttatcttgattgagtcttctcttcatccttgattcttgagatcttgaaccttgaatcttgattcttggctctagactttcttcttgagtcttgaattcttcttgattcttattttgaactc

SEQ ID NO: 19905 - DNA, 430 bp, Glycine max
  unsure at all n locations
tgtaatgagcttcataacaaagaaagggaaacataggcttttagggctatcaaagggattaattcaaggtaaatccatttggctagaggcttataagaacaaaattgcctaaatcatttccaaatatgcatgtgaattaagaagcatcagcaagaatcaagccaaggctattgtgcaagcaatcattggggcaaaacacaccaaatgattatgatgatggctcaaattctcacaaaggtaaacttatcacttccaaattgagctttcaaaactatcataagcgacttttattttcaaaacaattactcattacttgaacatatcctataattcaaagaanaatatngcaaagtgtacaagcaaacagaattgacctaaaatattaaactagaaacccaacaaactaacaacattaacaaattaacacaac

SEQ ID NO: 19906 - DNA, 348 bp, Glycine max
  unsure at all n locations
agcttgcaaccttagaacatttattgtttccaataagcaattgagcttcaatttccttaaatctctcacatacggataaaagaagttgaattcctcatcgaaagtctctgtagtataattcattatctgcatcactcctaagtcaactcanacttatttatgaaataaatcaagttaaaaccttntaaaaatctatttagttacaaaaacaaaaacagttccaaactatattaaaaaaagccgaaatgatcgacgaaggtttgttaaaactagaaaattagtaaaataaatcttcgaacatatgtgacaagtataggttctgtcaaaaagaatagtataaatacagta

SEQ ID NO: 19907 - DNA, 405 bp, Glycine max
  unsure at all n locations
tgagaatagtacattatagcattaaatcttgattattatcttatgcagatgataaattggttttaaataagataatccccgtacacacacatgataaaagaatagaaaacattgtgctntgtagaagtactaaaaccacaggaaaatatagagaagctaggactaagagaatgaaagccaaagtaccaaagttttgtattataaccctgtatttctttacccttcatttactttttgccattttagtagaacttttgagatatgaggattatttttaacactacactttacagcaacaggtatttcgcagtacaaagtgttgtcctgttctataaggattactgaacacaggaaagcatgagccttaagatcaaatcagcttaatgttttggttagatttgagtg

SEQ ID NO: 19908 - DNA, 372 bp, Glycine max
  unsure at all n locations
agctntacaacttgcttctctacctcacgccgtcactcttgcctgactgcaagaggacaagattaatgaccgccgaaaacactctcggacctcgtttccttccccacaacaaccagcttcagcaccatccactcaaacccaaacacctcgccctaagactcctttcatacagcgtactcacgaagagatgacctatatgcgcgaaaagggcctctgctacaactatgatgagaaatggaacttatcacaccgtattaagggtcgagtcttgttttcattgcagcctctaatgatctctcccactccgacatagctctgctggaagactcaccacccctacctattgaacaccttcaccttttgacccacacc

SEQ ID NO: 19909 - DNA, 404 bp, Glycine max
  unsure at all n locations
agctntgggttcttctattgagatacttgatgcaattagggtttttctctacttgaaattatttttgtgttctatgttgaaggcacaaataccaaacaccaatgtctcccgagtttggcctaattcaagttaaactttgttcttagatgtctcttgttgaacttagcctaaccgaacagcattacaattacagcatgataaaaactaaattaccacactctgtgttcggcagttcgataacctagccctaccctatccagttctaaggatgcagtacattatgcaatactaaagctcctaaccttacacacaaatgggtgatcaagccacgagcatgcataacataagcacagatagaataattgaacacataaaaacaacttcaaatagatagtaataatatt

SEQ ID NO: 19910 - DNA, 471 bp, Glycine max
  unsure at all n locations
tagttgtaaaananattaaagatctttntcttatctttccagggtctactcacacgttccatttggagttctttagtgtcttctaggcttgcacaaggcagataggtcaagtaagcacaaaatctaaaatttaactacaattctcaattaagctcaatcatttgccttagaccaaaaccgagttaaggtgagaaaataagggtcaaagagatttcaattgacctaagaagaatagaaaaatattaaactacaaatactcaatcaaattcccccacactttatcatttgaactcatgggaaaaactaaaagaaagattaagataaagaaatcaaacttagaaaataaccacactaaaagaaggtatgaacaaggtgtcgtaacctaccctcacgacgggatggtgaaggccaacgtagatagaccacagtgttcatctcctagggagaaaacgcgtggagtcgccaccaaca

SEQ ID NO: 19911 - DNA, 446 bp, Glycine max
agcttgaatcttctaccctatttctgacagccagtgggtgagtccagtccaagtggttcctaagaagataggcctcacagtgatcaagaatgaaaaggatgagcttatccccacaagagtgcagaacagttggcgagtctgcattgattataggaggctgaattaggtaaccagaaaagatcattttcccttgcctttcattgatcaaatgcttgagcgcttggcaggtaagtctcattactgctttcttgatggtttttctggttatttacaaattcatattgctcttgaggatctagaaaagaccacattcacctgtccctttggcacttttgcctatatgaggatgccctttagcctatgcaatgcccctggtaccttccagcggtgtatgcttagcattttcagtgactttttagagagtcgcatagaggtggttatggatg

SEQ ID NO: 19912 - DNA, 463 bp, Glycine max
ctaagcttgtgaatgcctgttggatgatatacatacccattcttttatgtttttgtgatgatgtttatatgctgaaattgcctatggaaactgttagagatgaagggtagagttaacctagggttagaaagtgagaatgtggtgttgtgagtggaaaaagagtgaggctttgagagttggaaggctaagtctgaattctgtggtaaatggaggttaaaatgagttaatcctagcttgaaatgtcatttacaacatgtgacaaaggttaggttgtgctatagggaaaaactaatgaccaaagtgaacaaagagccatttctggggcacaattgggtgttgaatagtcaaattttgattcggtggaattttaggtgtaaatacagtatgggcaagtctatattgatgttatggactggtgtgaggtgagagtttgcctcatatctacctcattctaaatctcacc

SEQ ID NO: 19913 - DNA, 443 bp, Glycine max
  unsure at all n locations
agcttctagcttaatgctcttaccttgaattaattcctttgatagcccttttgagccttgtttccctttccttgttttgaagctcactacaagccttaagtgaaaaaccatgatatcaccatatccttaaggaattttggagctttggaattgttttgggaataagtgtggggggtttttgtttcattggataacttgttttgttggctatgcttcatgatgtattttgggccatacttgatgtacactgcatattggttaaatgttggacatgctgaatcaaatgttgtttctcaaaggctatagagtaaaaaaaaaaaaaaattcaaaaaaaaaagagaaaaagaaaagcaataaagttgagtgaataagatcttanatggcacaagaatcatgaaactctttggtatactctctatgtctaaattntatctttacttctt

SEQ ID NO: 19914 - DNA, 434 bp, Glycine max
  unsure at all n locations
tctnccccaattntctataaatagggggagaagtgaagtgnaaaatggttcagccccttaggcacttctctctctttcgaatntgcttggaaaaattgcttccgtgaagaaaatccaagccgaggcacttccgaaacatttccgtgaggaatttcgcgaaggtttcgaccgttcttcgacgttcttccttcgttcttcatcgttcttcgatcttcaacgggtaagtacctcgaaccaagcttttcgattcattctatgtacccgtggtggtccacattgtgtttcgtgtatttttattctcgtttcatttgctttntatacccccttttgacgtgcttaagccattttatttaagtcatttctcgcttaacctaaaaataaaataaatttccaccgatcgtttgaatttattatccgttaacttcngttaaatg

SEQ ID NO: 19915 - DNA, 431 bp, Glycine max
  unsure at all n locations
agccttatagatgatacaagatcatttagatcaaacatgcactgtttcttcacccagatagattntaaagatccttaattatgataganataaaaaaaatccttaattatgatagattntaaagacaatatgatattacactnttagtgcataattatttttctcgaagtaaattaataataataatcttaaaaaataggacttattcaaaaatgtttttttagtttttagttatgaaaaanagaccaaattcaaattaaaaaaaattgaaaaaattgaanatataattaaacttaaagtttataataacacaacagtagtatataacttatantttccctctcgtcttaccaatcttataaatatattttagaaatttttttatcatatcgttaatccgtgtcataaagatccaatgactagtgaccttt

SEQ ID NO: 19916 - DNA, 288 bp, Glycine max
  unsure at all n locations
gtttgagattntctcactggtaatcgattataggattctagtatttgattacatagttatatgtttgaagagttatgacttttcaaaggtttttttttaaaatctcttcaatggttatcaattacaggattctagtaatcgattactgatcgaggccatacccgaatcaaataaacattaaaaatacagtatctaggaagtgatcctaggtcgtctcccgacgagcaagggtcaaacaaacgttcataacagatagtaggaaaatattaacgaattgggggggggggg

SEQ ID NO: 19917 - DNA, 195 bp, Glycine max
agcttgtatgattcttagttgttcgccagatacaccgctatcactgacggaatacacacgtgagcccatttagaggtaatagataagatcatcgcggctagaatggacatgtgtagagatactcacaggatcagatcgcgatttattctgggatatctattgtattgtgatgcttccttaatgatcattaataca

SEQ ID NO: 19918 - DNA, 261 bp, Glycine max
aactaagctggggatggctgcattcgacaaagacggaagtgcccactactttgcttgataaaacaatggctagaccacaacagcgctggaggcggcaacggacaagggactgacaaaaaaattatgtagacatgaacaaacaatagatcatgcgcagagcgtgccaggtgaaccaagagaagcactgaacaggtgttagaccagctacaaacaatgtgcctgagcaaaacgaaaaccaaaaacgtgaccgacacagatgat

SEQ ID NO: 19919 - DNA, 442 bp, Glycine max
  unsure at all n locations
agcttgttaaatactaaaaaaaaagtttaataaatattttaatgataagaaaagaataaaatataaaaaattagaagtcaaacattttaaaaaagtgacttcaatgacatctttaaaaatgtttatttacggaacagtcaactaaaatttttaattattaaaaaaatctagaagctaattaaaatatattttgaaacataacctaactaaatcaacatatttttagaatcttgatttagtttgtatcatatttgaatttctcttaaaattaattttattacttatgttttggttaaatttgagtctaaataagaagcgatcataaatgggctgctcttaaagtattctttatttatatanttacaatagaaacatgaaatagaaataatgttaattggtattatctaaataattatcatcttatcaacatctttataacaaa

SEQ ID NO: 19920 - DNA, 352 bp, Glycine max
gctcattatgttattgttctttcaaagtatgaacaaacactatgattgttcatgatagagcattacagcatataatatattattacatttctgaaacgacatacaacttgtggtgttacgatgggtgcatagccaaggcgatcctttgcttttgagcaatcaaatgttctgctgcaagatatgagtcttattcttgaaggaatgagttgaggcagctccatcccatatgggcctagcaacttatatatgcactccaaccaatgtgcactgggcatgataacaaaagtggtggatctttacccttggcctataagcaacatgacttagattacaaagaaatggcattgacaat

SEQ ID NO: 19921 - DNA, 314 bp, Glycine max
ttgcatgcaagcttctactttagtgcttggcgggctgccttcactttgttgtctcgtacgcgagctttgaccactattcttccttaccgagatgcttcttttcatctcctgctgagcgggcttatagcctataccatacttgccatgatatacttgcggttttataacgctagttatgccgtcgttgtctctgtctaaacccatcccatgttcgtaaccgttccccaacttaactcgggccatcattactgctgcatctgacatactaggttgcccatatatggagttcaccgatgaaatgctgaccacctcaa

SEQ ID NO: 19922 - DNA, 418 bp, Glycine max
agcttagaattattgagatatcatctgtgcgtttcatggacccaggagcggactttgacttcagtttcttaattcttcaattgtatgtttaagtttgaaacaatttttttataaaaaaaaagagggaaaagacatcaagtaacgcaattctccttggaaaaaagtcaagattctgcactaggtctacataattcatataaactattaagttaaatgacaaaatatataaaattatgaagaaacaccataatataataaaaagagtaccacattcatacataccctcatcaacatcaacagcaaccacaagtttctgggataatcgatgatcactgaaacaaggaggcttagcaggacttccatttatagatccattatcaaccttaaccagagtagcatcactctcatcactcctaac

SEQ ID NO: 19923 - DNA, 432 bp, Glycine max
  unsure at all n locations
tgtatcaccacttgacaaacacaatgatctgaaataaagtttatttaaaatgttgtttcatcgattgaactcgtatatgcacaataatgtttaatgagaagggaagagacaganagcaaaacgtaatcatttggattacagtccatggttcaaacttcagagttccagagacaggaacctgaatctacttgcaaaaaataattaaatgaaaactgaataagctcagccaatgttgtacaagaatgaatattataatttatggcaataaactaggattgtgctattttggagctagctttgtctggcaatgtcttttcctttctcagaccaacgatgcatgtgcgatataggagcagaaaaaattattgaaagaatgatgatactagaacgttctatcacttatataccanatcatggcaaggtttgtcacaa

SEQ ID NO: 19924 - DNA, 375 bp, Glycine max
  unsure at all n locations
tctgctttaatgtttatgtcacattagagaatgtcaaataaccatatcanattatggagattgtgatatggtattgtaaatgacatctctggctagagtggctttgattaggatgacactaagtacatgatcacagttgagaataaaaatgcttggaatgaataatgcattgtaagtattcttttatatatttctatctgttattcacaactgattagatttgactttgtttccagtcacataaatcggctaaaccgtttcgattcaaagtgcttcacaactgggatgatatagtggatttgtgcgctaaagatagagccactggtcatggagctaaaactgctatggatatttatgaagcgatgagttgagaaa

SEQ ID NO: 19925 - DNA, 468 bp, Glycine max
  unsure at all n locations
ctataatactcagcttgagccaaagggaaaaagaacttagttattcaatgtactctccttaatanagtgtgttcaatgcaaagttaccactctattccatccaaccttgaggattgataaaaccattatgataagtcttcattaaaattgttcttgaatattgcttccatggtctttgaagataagtcctaaccgggttttgaaccggtctcacatctgaggcagctgtgactcaagaattgcgaattgaaattccagtgttttggtttggatcagttctgccttgtgcagcgatggtgttgactatgttgggagggtttcttgcaaggtgttgcaattctgtaacacaacaacaacaacatgctacaggagatttncatcaacttccctgccacacgcgtttgggtaacaacaaaatgataagtcaactaatagccaggagattacattacactttcacatgcacac

SEQ ID NO: 19926 - DNA, 438 bp, Glycine max
  unsure at all n locations
agcttcccgcctgtgtcaatggcggcacccacgttcaaaagtgaccccccccccccgtaatttgttttaaaataaaccctcttccgtaaatagttttcaaaagcatcccccttctgtaaatttgcctcggtgtgaagatagtctagtattcaagcatagatagcaccataatcattgctgagagaattctaaaaatctcggctaatattaaccaatttttatgtcaaacaaccaatctgacaattttcacaaatattaatcattttcattaatgttaaccaatattattggcaaatgaacaattgtgtgaaaaattaactggattctatacattattagatttatgatttttgttcttaaattaaaataaagactgttctcttaattatatattttttattcttatgattcanaataaataaataaaaacttaagaga

SEQ ID NO: 19927 - DNA, 463 bp, Glycine max
catccaaagtggcattccttgtaccaccaaattcctaactcagtttcctttaaagtcctactaaattagtacaaagtaacatgtaacagtttagtgagtaattcaacattgtacataataagtgcctctgcctgtaaaatttttaaaaacatatacatatctaacatgaacttaatcttcatttcaagatgtgttgagtactatatacttatttatgaaagatgcaaaattcacccatgttaatttggaagggactatagaatgcaagattgtttacaatcactggaggaagtctgcaaagattggttctggatggaagtcttttacaaattcaaaaaatttggaagctagccaggatattatatttgagttcccaaatccaaaatctaactctgttctattctgcatttgtttgtaatttaagtacattatactctatcaatctctataaacttatgtttat

SEQ ID NO: 19928 - DNA, 407 bp, Glycine max
  unsure at all n locations
agctngngatgttctntgttgagcttatnagtggaacagatagatgaagaggctgaatcgttgagaaagtttggataaacataacttgaggaatcagaagctgatgatggaagcgaaagaaagagcggaacttctgggagagctgtgtgtaattgttgactgtcacattctggtttagtgattcactgtttctttggctttgctgcatatctgactntgctaatttgcatgttgctgaatggcgattcaagtcatgttntgagaatttatgatgaagaggcacaagcaatgtccattcgcgcgagctggaaaatgctaatgcagttggggaagccatcctctctacaatacatggacaaagagatcgcttgaaggtatatcttaactgctgccttcactcatcaaca

SEQ ID NO: 19929 - DNA, 478 bp, Glycine max
tctccctttgctgcagtgggtcctctgtagcaggcaaagatgcttttctttccatgtaaatacatgcatgtcattgaaccatcaattaacacacatacataattgaattgcatgatgaaagattaagagacattcaagcatggctatcccacggtgcacatcttgtgggtgtttggagtgaacaagagcccatgataaacgcaggagacagtcttgcatatactcttgagatgattgtttttctgcctccaagacctctctttcacatccctgccagtgcagtgccacacacaacaacaattaattaatcaattgcaatctcaaacacttaaaaccctaacagagaaagagcatatgaatatgaaacatacagctacgacgtcagagtcacaataaggaagatggtccttgccggagaagaactgacccaccgagtccaagatcatccctagcttggcttcaagtttcgccatttcta

SEQ ID NO: 19930 - DNA, 311 bp, Glycine max
  unsure at all n locations
agctncgaatgtattattattctntaagcatgtctgtaacatggtttgtgcagtgctttgaaacttcagaatgggccatatgctntcgaagatatgataaagatgggtaggatgctggagaggagcttctttttcgagcccgaccctgcttnttcagtcgttaacatccaccacattaatggccacacaatactgatcatgagggtgacggcagctctttcagtgactgcatanangtatgtctattcttaaccatgtgtaagactaaatatcagctgatggaaaataaccactcatatggtcaattgtga

SEQ ID NO: 19931 - DNA, 477 bp, Glycine max
  unsure at all n locations
cgtcgatcctaagagtaataaaatcaaatcgctcacaacaacagtttgaatcncctgcttactactgcgctctgcagtggttatatttcccctttcaaaagagacaatgtcgtgtttgtactgatcactttgatcacctttgctgaaccatgagagtttaaatgaagcctgtctcgataataaagaaaataattaaaatcaatttgcttaagtaggagtaaatcagagtatatacattgcaattttagcaatagaaaagaggaatatgtctttgaagtaaaaatggtacaagatgtcttaccacagatttctaagttcaaatacatgggatcaataatacaagatgatggaaaaattaatgaagatgtcacgcaaaggatacaagcgggatggataaaatagagaaaggagtcaacggttatttgtaatcgcgaagtccctaccaatatcanggcaagtttatcgtactactatacg

SEQ ID NO: 19932 - DNA, 445 bp, Glycine max
  unsure at all n locations
agcttggatgctatccattatttntgtaagactatgtattgcattcgaaatattgtgtttacgtgcctttttttgtacactcaaaattctattttgaagtagactaatgtaatgtatcatgcccctaatgaactacaagactganagttgtgtgttctattagactgggatatgcgtttgaaaattgtttttgggattgctcgagggctcctttatatgcatgaagattctaggttgaggattattgatagggacttcaaaacaagcaacattctactaaaattctgattggagaactataccaaaattacctcctaaggagttgtatctaacttttgtccttantttgtatttgtcacactttacataatcataccagacaaatctcttattttgtctacatttcacattnnttgtaatgcaatgggtatatgtgtccataata

SEQ ID NO: 19933 - DNA, 430 bp, Glycine max
  unsure at all n locations
ctaagctntataagcgcgggtctgngagacataggtcaagtgttcgcaatattcgtttattatgttccgagtacatcggatttggtacgaccatgctctcctgatttccagctgggaaattggcgagtggaggaacgccccggtatttacgcgacgagcataatgtaaatctttacggtccttaaagctctatagttgggcctaggctttagagtctttccttctgttaaggctatgtgccctttattgccgattttataatacaaggatctttcttcatctgttcctacgtctctacccatgctcattcatcagcatgtgtacttctttgtctgatacgacagacccaatgacgagttccccgaaggtactaatacctgngacccgcctatcaacttctagcaatatatgaatcacacggatgatgaat

SEQ ID NO: 19934 - DNA, 341 bp, Glycine max
acttgatattttaattttataaataccggaatgtgcacatgtgcatattttggtaccccaaatgctttgagtatgcatgtattgtaaatatagctaaggaagtgcatgtgatgtacgtagcaaatacaccttggaagtacatataaataatttaggtaacggatgtgccttgattgtacatgggtgcatgtttattagttataagaatgtcttgtgcaagtgaacgttcctaaagaagtatgtgcataagtatgctctaaatttacattgatgtttgtagttattggaggaggttgtatgccatatttgttttaagagtatcatttcttggtaaaactaac

SEQ ID NO: 19935 - DNA, 325 bp, Glycine max
tgctgacgagagagtacgacaatgtggatatgatctccatgctattgtaagcgccacaggactaggactatcacttgcagatgatcatcactttttataagatatatctatatcatatacgagttattaaatctatgaggaagaaaatgataatacttgactgcgtagtatatgaagattaatatatactatgggggcggtgggaagtgtacccatgcccgcaccaggattaatcttagttatggaacatctattgcaagctattcaacaatataaaaacaaaaatttattgtacacttaattgacatatgactcgagtaataat

SEQ ID NO: 19936 - DNA, 404 bp, Glycine max
  unsure at all n locations
agcttgagtatttctctctgatagagaagataaatagcttgggaagtctttatcctcaagcttgagtgagccaccgtagtgtagaagcaaatgactttgatgttttgatgatgatcatgatgatttgatgcatatgatgcaagaatacaagccacaacatcaagatgatcactagtattttaggaagggaattcctaattgatttagcaaaaggtttggccaagtaatttgagttaaaaagtgtttttcaagagatttactctctggttatcgattaccagaggatgtaatcaattaccagtggccaanaatggtttacaacagctactaaatatttgaattcaaattttagactgtgtaatcgattacaccatattggtaatcgattaccagcagttaataaa

SEQ ID NO: 19937 - DNA, 391 bp, Glycine max
caggttgagttctgcttaccacccacagactgacggtcaaaccgtgcgttctattcaatccttaaaagaactcttgagagcctgtgtgttagagtagacgggtacttggaatagtttcttacccttgatagagtttacatacaacaatagttttcactccagtataggtatggcaccttacgaggcattgtatggtagaagatgtaagacacctctatgttgggtagattccagtgagagcattgccttacgacctgaggtagttcaccataccattgaaaatgtcaagttgatccaagataggatgacagcagcccaaagtatgcagaacagctactatgatcagagaagagaggatcttgaatttgctataagtgatcatgtatttctg

SEQ ID NO: 19938 - DNA, 348 bp, Glycine max
agcgtgatcttcatcgtccgcgtgtatgatattcactccacaaggtttgaagtagaggagaccttcaaccctataacgcaacgtgacggacaaaagtgggcagttaacttgaatggccgttattgtcaatgcggaagttattctacgcttcactatccatgttcacacattattgcagcttgtggttacgtgagcatgaactactaccaatatatagatgttgtttacatgaatgagcacatcttataagcatactccgcacagtggtggcctcttgggaatgaagcggcaattcctacttctgatgaggcatggacactaatccctgacccaactaagattcatgcg

SEQ ID NO: 19939 - DNA, 444 bp, Glycine max
  unsure at all n locations
caggtagagttcttcttaccacccatagactgagagnctttcctgcgctccattcaatccttagaggacctcttgagagcctgcgtgttaaaatatgggggtagctgggatagtttcttacccttgattctacctacaacaatagctttcactccaatataggcatggcaccttacaaggagctgtatggtaagagatgtaagacacctgtatgttgggtaaataccagtgagaacattgtcttaggacctgaggtggttcagcaaatcactggaaaggtcaagctaatctaagaaagaatgagaacaacccactgtacgttgaagagctaccatgatacgagacgaatggaccttgaattctccgtaggcgaccatgtattcccgatagtcactacatccactgggttggtatggcattgaagtacacatagctcacacctag

SEQ ID NO: 19940 - DNA, 379 bp, Glycine max
agcttcttcgttgtgtcaagcggaagaaccttcttcaccttctttcgctggaacttgcggaagaaccatttcatctttcttccgcaagagcccgcggaagaacaccttcttccgctacaatacccaacgtccactttcacacgcacggaagaaggttcttctcgcggaagaaccttcgtcttcaacctcaagcaccaaacatcacctatgtgcgctatcctacggccatttaagcgattcacactgataggaggttagaacactaacctcgatggcgaaagaagaagggaacgaaagcctatggaggagaagaagggaaccaaatttgaaacgtgctaccaaatgacgaagaaacgtgctacccaatgaaacgtgctac

SEQ ID NO: 19941 - DNA, 412 bp, Glycine max
tagaagagacagttgttgatcaataatgccaaaatactttattataacattgggaaactaaaacatctcttatttaaaagaatgcagatctactatgacgatgattaactacaaaaaatcaagatgaccccaggtaagaaatatatacgatggggagaaaaaaacaacagaaaatatgaatccttctatattctacatgaaaccgattaagagtgcctgcagctattagccgcaaacaacagcaagactaatatatttgatatatagtctatatgcgatagtgaaagtgggaagagcatactataggttatgtgtatatactttttgatgaggactataggttatatatatagaaagagacagcatgcgcgaatatatattggcctccttttatataaagatggtggccaat

SEQ ID NO: 19942 - DNA, 319 bp, Glycine max
agcttgtcgattttgccatgtttgggtgagatagacatacccattctgttttatggtttttgtgatgatgtttgtgatgtttatatgctgaaattgctgatggaaatctgttatagatgaagggtagaactaacccaaggttagaaagtgagaatgtgacgttatgagtggaaaaagagtgagactctgagagttggaaggctaattctgaattctgtggtaaatggatgttagagtgagttaatactagctagaaatgtcatttataacatgtgagaaaggttaagctgagctatagagaaaaacaaatgaccaaagt

SEQ ID NO: 19943 - DNA, 412 bp, Glycine max
ctcaactgaatttacaacattccaattgatttcaaaatggtgtattttattacaatgatatggtaatcgattaccagtgtgtttgaatgttgaaattcatattcaattgcgaagagtcacatcctttcacataagtgctgtatgtaatcgattacaatgatttggcaatcgattaccagggatgtgttttgaatacaaatcactagatgtaactcttccaatggttctcaagtctctctaaaggctataactcatctattggccttcttgacctgacttgacgagtctatataaccaagaccttaacttgcattgtacacacattgattacaatcttatatatcctttgaatctctttgaacctcctcttgaatgtcttcttatcttcctttgccaaagctttctaaagttt

SEQ ID NO: 19944 - DNA, 374 bp, Glycine max
  unsure at all n locations
agcttctaatgtataacaaagtgactctatnttcagggtgaatcattacgctgcttgtcctgaaatgactctgaatgatcacaacttgattgggtttggagaacacacagacccacaaatcatctctctgttaagatccaacaacacttcaggccttcagatttatcttagagatggaaactggatgtcagtcccaccagatgacagatcctttattattaacgctggtgatactcttcatgtacaacataaagcatgctattgacgcatactaatgagttcaatgaagaaattgtcattttctttctccttatgacttacgtatctctatggataagtataaaataataaatatacaaactcctcttttaagt

SEQ ID NO: 19945 - DNA, 447 bp, Glycine max
  unsure at all n locations
tgtaataaaatgttctaactattataggataaagtgtaaatctattttcagcttgagagatgtgtcagaattaccacagtctggaggaaattcagatgaactgcaggtaaatgactcgtatggttgcctttgttctcgtacgaagctctgtacataaaaatttctattacattatttacaccagttattgctaagtcataaagtatctctatcaggaagctcgtggaccagaaataaatgggcaagattttgaaaggcgtaaccacctgcttcaatttctggttctcttccataagtttggcttccttcacgagcaacattgccaaacatcattgcagaanaaggttgtgtgaatatagatagatgacaaattgcttatacgctgtattattatatacaacanaataaaatacacattnttaacactctcattttactatatataac

SEQ ID NO: 19946 - DNA, 374 bp, Glycine max
  unsure at all n locations
tctagcttttcgatatcccattattttgtttcattttcattctttcaaagctgatagtcatatgtcattattaattcaattntgatggaatatttgtgtataggagatgtgtttaggaattaggatgcattcaaatatatattttcatgatttagaccctatttatttcacgattcaaagttttccaaaacacgtttttacagacaattttctcggagtcaaaattttccacattctcgaatccaattatttatgtacattctcgaaaaattttatgtacattcttgaatccaattatttatgcacattctcgaagctgagtcatatctcgaatccaattatttatgtacattctcgaagctgagtcatatctc

SEQ ID NO: 19947 - DNA, 434 bp, Glycine max
  unsure at all n locations
tcatgatgaatcaagattgattcanagaagttntgatgattacatatgtgatgacaaaaagctcataggttaagaacacttcatgataacaaagatgatgatctcaagaatcaaagaatgagttcaagatgttcaagattgaatcaagaacatttcaaggttcaagaggaaatttgatttcaagaatcaagaatcaagattcaaggttcaagcttccaagaatcaagatcaagattcaagactcaagattcaagaatcaagagaagacttaatcaagataagtatgaaaaagttctttcaaaaactgagtagcacatggatttttctcaaaacctgtttaccaaaggggcgtattacctaaccggtaatcagaanatgcagaaccatagaccccaggcccatacaccccaagcctagtaaggtcactgtataaa

SEQ ID NO: 19948 - DNA, 435 bp, Glycine max
  unsure at all n locations
agcttttcatttaccttcacaataagggaaaaatgttattagaactaattaataaatacaaaaaagaactaaaatgacagccataagtatgtacctttgattntttcttcaaattataattatggcgaagtcaatccccctgcaaatgagcgcttcaatagattcttcatttagtttagaacaatactcatcaattaccctacccttagcactaaatgtagactctgaaactactgttgatattggaatagctagtatgtcacccgccatctttgataaaaccttgtattttaggctattgttcctccaccactctaacacactanaataagagttactagtttcaggaatataaacattctccttaagataatcctctaattctgagttcactggaggggtggcttcatttgcacgcacaatgttcattatttg

SEQ ID NO: 19949 - DNA, 446 bp, Glycine max
  unsure at all n locations
cgtgaaataagagtatcaatatatatgtacacatatactctgcttgtgtggaaaaaataaacaanaaatgaacaagattgataagccaacatatctagtataaacaaaatcaccaccacacaatttgtatgctaattataaagaattctaattcctaaggtacacacctaacaaaggaacacatcaattctacaacaaactcgtatcagaacaccaattagttcatcaaacacactcaatccgtaattaaacatgaaaacataattaaacttcataaacaccccaaaataacccaaaaattgatcctctaaggatccctacacatgttcattctaattcccaagcgtgagtaactcatcccttacgtcgatgtagtcgctcacatattctccgctagtaattgtggcgtctctggtgctctctagagctcctactctggttgttct

SEQ ID NO: 19950 - DNA, 450 bp, Glycine max
  unsure at all n locations
agcttgtgatttatctcatcgagtccccacagtggttcccatcacaatactcatcatgtattaactcatcgccttaaatggtcttatagtcatgtgattgtacaattcatagatcacaactcanagcacataacatctcaatgcatatatatcacatacattcggtctcaatcacgatgatataatcccagagtaacatgctatcacacctcatgaatcatatgcactttaattatgaactatacaatacacacaattactcatttgttttcaaaatcattttaactcctcgcacctcanagtgattcaactcatcgggttcccatagtggatcccatcagaatactcgtcgtgcaaaaactcgctgctcttaaagggtcttacaattgtgtgattgcacagttcatagttcacaactcaatatatacaanaatgatgtagctccatgtg

SEQ ID NO: 19951 - DNA, 450 bp, Glycine max
  unsure at all n locations
tgagatgaggaagtgtagaagggtgaaacttcctgctnttattcgttgaccacatagtggtacctggacatatgtcgcggtggtcaggagaccttgtggacgtcaggtggggtgctactgcccaaaaccaagcttgaccaatcccgacccaacccgggcatagtcagtcagtgataacctgtgatgtacctaaacaggcgagctcctggcagtcaatagataaaaggaacaaagaccacaaagcaaggaggcttgtggtggctggccagctgtgaattttgtgtgatatatgggttgtggcctctggtaatcgattaccaagggtgggtaatcgattacaaggcttgaaaatgaagacaggaggctaagatggtctctggtaatcgaataccacggggtgtaatcgattaccangcttgaaaacgaggtcaggaagctaagggagcttct

SEQ ID NO: 19952 - DNA, 442 bp, Glycine max
  unsure at all n locations
agcttaactcatccaatcatggcaagttcaacatgctttcaacaaattgcttcacaaataactatcatgaagcaganaactagcaaaactacccatcatatctcccanaaccccatacccacgaaaatcaagagagaaacaagtccacccaaacctgaaatttcgaagtctcacacgtagacacgcacttcacgactccgaanatgccctcctttcgcgatttggagcagaaatgggcaccaaaggttgaagctntgttggagcttcaatggagaatggaggagaacgaanaagcaacgtgaggaagagggagagagangctttgaaaatgtggggctgagtgaggagagagagangttgcttttggtttanaaannaaaagcttttcctctnttcttattatttatttaagctatgccacatgtctncatttgagtggagc

SEQ ID NO: 19953 - DNA, 474 bp, Glycine max
tggtttgaggtacttacccgttgaagactgaagaaaacgaagaatggactatgaatcttgaagaacggtcgagaatcttcgcgtaattactcacggaaacgttacggaagcgcctcggcttggattttcttcatggaactaattttcctcagcaatttcgagagagagagaagtgcctaaggggttgaacccttttcttcttcacttctccccctatttatagcaaaataggggttgtatatcctcaaataataatccccggacaaaattagggtatgacagttgcccctctttacttacctctcatcggagataagaggaaagcaaagataggacactgatttcgtccgtcctgcccttttccgtgatgacgactctcgtctctactcctttcttttttcttctgcacaaaacaaaatacatacaacaaccagaacaacgaatataatacacatatacacatatacacatact

SEQ ID NO: 19954 - DNA, 434 bp, Glycine max
gctaactatatgcattttgtaacttggtaacccagctggccttgtatcatatatctggtacctgtcgcaagagtctgtggtttatggctctctgctgaccaccatacataccttttgcctttcatggcgcaacctggaacaatagagcaacctgaagcttatgttgcaaacatttacaatagacactctccacctcagctacaaaatctaccgcagcagaacaattatgacctctccagggaccattcgttgttgtgatgcgacccctatttgaccacttggaggtgcttggcacccatcgctatgcgatttgtgatagttcctgacatgccgcgaatctaaagaaacactgtgcacaaaacccgtagattcccgcatgtgcgagatataaagagaagtggtgtgtactctcgaagagtttgcacttacgggat

SEQ ID NO: 19955 - DNA, 473 bp, Glycine max
  unsure at all n locations
gacctatagatactaagctgnagaggatgcttaatggaggaaaagaaagagggagagaaagttagatgtgggagcacaaaattgaaggaagaataagggagagaattngaactttgagttgtgtctcacaagactctcattcatcagttacaacaagtgttacacatgcttctatttatagactaggtagcttccttgagaagatttcttgagaaaacttccttgagaagcttctttgagaaaacttgctatagaagctagagcttagctacacacacccctctcataactaagctcacctccttgagaagcttccttaagaagattcctatagaagctagagcttagctacacacacctctctaatagctaagctcacctccttgagatgagaagcgagagcttagctacacanccctataatagctaagctcacccccatgacataatacatganaatacataataaaagt

SEQ ID NO: 19956 - DNA, 423 bp, Glycine max
  unsure at all n locations
caagcttgagtttatttatgagttttctttgccctttaattcaactcaatggaagcaacgaaagaacttgtatctccaattccatgcgatgatggacaccttgttaccgttcttagtattgatgggggtggcattcggggaatcattccaggaattatacttggcttcctcgaatcagaacttcacgtaatatgctaactatataaataggtacaaattaaaaaaaaaatcattcactagagggcttanactctanagtanataaatttttatatatactttgttgtaagattataattatctttataaaaactntatttattgaggggatttgatcccttccttccaccctaatgctagtattaaagtaactttctagttacgtcgtgcatcaaatatatgctatgatcgtatatataataa

SEQ ID NO: 19957 - DNA, 438 bp, Glycine max
tactcaagctggaactataactttgatcgttctttactcctctcaaacagaatatcttatggacaatcaacaacaacttccatatagtaaaccaaataccatgtgattaacggttagtacatgttcgatttgtcgtttgcacagctccaaatgtccgttcatgcgtttcaaaatgataacaaaataaataaataactacactgcttgattgacaaaaacatgcattacgttgaacctaacattgtttcaaatacaccttatatatgtcaccgaacgattgctaatgatgatccaaatttaagattataagaaataactttgtttatagtaccggaaaaattgagtatgaaactttgacaaacatattacgaaaataatactatatagaaacaataaaataatatatatatttataaatactctaacatttatcttcat

SEQ ID NO: 19958 - DNA, 392 bp, Glycine max
  unsure at all n locations
agcttgaaggtttactagatgcattggttaacttggtaacccagctggccttgaatcataaatcggtacctgtcgcaagagtctgtggtttatgctcctctgctgaccaccatacatacctttgcccttccatgcagcaacctggaacaattgagcagcctgaagcttatgttgcaaacatttacaatagacctcctcaacctcagcaacaaaatcaaccacagcagaacaattatgacctctccaggggaccatccgttgttgggatgcgaccctcattngaccacttcgaggtacttggcacccatcgttaggcaatttgtgaagttccatgacgtgccggaagtcgaaagaaagcattgtagcacgatccgtgaagttccgcgacatgc

SEQ ID NO: 19959 - DNA, 476 bp, Glycine max
  unsure at all n locations
gggagaggatgcttcaatggagganaaganagagggagaganagatagaggggtgttcacaaaattgaaggaagaaaaagggagagaatttgaactttgagttgtgtctcacaagactctcattcatcagttacaacaagtgttacacatgcttctatttatagactaggtagcttccttgagaagatttcttgagaaaacttccttgagaagcttctttgagaaaacttcctatagaagctagagcttagctacacacacccctctcataactaagctcacctccttgagaagcttccttaagaagattcctatagaagctagagcttagctacacacacctctctaatagctaagctcacctccttgagatgagaagcgagagcttagctacacacccctataatagctaagctcacccncatgacaaaatacatgaaaataccaaaaanaagtccctactacaatgactactc

SEQ ID NO: 19960 - DNA, 402 bp, Glycine max
  unsure at all n locations
agcttgatatcttatataaataatatattctcgatcaaaacacatggcgttaccttatacaaaagacataatattaaaaattcaagcacatgtaataacgtaaaataatgtgggaaaatacatatttacaactcacctggtcgatcgttagtttcttgaaactgtaaaatgagatgacctataagaagctagacattagacgtgacactggttgagtcagaagtgtatatctggccctatttattataattnttatctgcccccacatgaaatnttaatggtatttaggtaccgtagatatacatattacctgtaatatatatgcaatctctcaatacttatatngctgttattaacccatttctttgcagatttgaaagatataactctcttccacccact

SEQ ID NO: 19961 - DNA, 470 bp, Glycine max
  unsure at all n locations
tgaccttntcccatggactcaaggttcaacgcaacaggcttatcttccttgngtgaatcaaatgccgtctacagtatgatcatcactctatattaatttcaggtaaagaaaaatggtgccatttggatcgcataaacagcaactaccttataccaagtgagtgtttgattgcaagtattccctagtggactccattgaatagaactgttacttttttcttcgtatatttctaattgctctcccagtaatccaacctgtaataacgtacgtacatgacaccaatgtcctactgtccaattaaatctatacaacctaacagatttgcagtaattaaatgtgcttgagaataatatgcgttagttccacgaggaatacacatatataatatttaattatatataaactcatcataatacaagagcaaagcggacctgatatccncatgtagaattggtcatatcgtaggactc

SEQ ID NO: 19962 - DNA, 433 bp, Glycine max
  unsure at all n locations
agcttcatgctgtttaattgctccaggttgctgcatggaagggcaaaggtctgtatggtggtcagcagaggagcacaaaccacaaacccttgcgacaggtacagatttctgattcaaggccagctgggttaccaagttaaccaatgcatccagtttgccttcaagcttcttagtttcagatgatgcagatgggtttgtagctacctcatgcactcctctaatgactatggcatcatttctggcgctaaactgctgggagttggaggccatcttctcaattaaatttctggcttcagcaggagtcatgtctccaagggctccaccactggcagcatctatcatacttctctccatattactgagtccttcataaaaatattggagaagaagctgttctgaaatctgatggtggnggcaactggcacatagtttc

SEQ ID NO: 19963 - DNA, 454 bp, Glycine max
  unsure at all n locations
tgttccagtggcaaacaaaaggctcaggattcagcaatgtgtttatataggagcaggctgataaactnttagaagcaaccaatttgtggtactcagagcagagagatatctgttggttttcaccaatagaggaagatgttgctatgtggctttttgtctcgactacctctgaccttgattcttgccataatcatgtttcaacttcaagtagttatgatatacatacagctagaagttggaggcttgctcttttgatgaaaaatagcataatttttggaagtcccttggatctaaggtgctatgaagttttttctgaatttgaatatagttcgtcatgtgttgcttaattctgttaagatctttactggttttcacttcacatctagatttaattgggaagattgtaaggaaccattagttatatatcattttgagtgatatggaaggatataac

SEQ ID NO: 19964 - DNA, 321 bp, Glycine max
  unsure at all n locations
agctttcacattctcgtatcttctcatgggacttctatttggtgtatgtacaacactcttgctgcatattatctcgttcttttatgcaggtgtgactgatacatcttttattttcctataacttctttctatttttggttgtttgaataaccggttaaacccggtgaaccacccgtcctcatncgattacccagtttaattcttgttttactggttttagtctggttttctgggagggtggttcaatgttgctattggattggatgcctggttcccggttggaccagttgaaccggtcgatccgatcttgttttgaaaacc

SEQ ID NO: 19965 - DNA, 552 bp, Glycine max
  unsure at all n locations
agagacantttgataccatgcgatgcgactgacgcgacactatacactactcnggctaggaaggcactctgtgagcgtacagaacagggagcttacctatagagtgcaggagctcgagatgcagagctgactgatgaggtgcatatgaagaatgagctgaacacttgagtcatatcggagacactctcatctcactgacgttacaaacaccgcgatgggtcatcgcatgataggtgatagacggacgtatcatcctagataatatatctggccatcactctgacgagactcatggactacaattctggctatagcaactaaaccttaaattccctgaccactgtcacatctaagctcacatcattgagactggtccatgacatgagccctatcctaattagaagctacttacacacaccgttgtaatgggtcatgtcaccttcttgagatgataatcgggagcttatcctcgcacgcacataatggctatactgacccccatggccctatacatcaaatctcgtagtatcagtaccgtactcgatgactgct

SEQ ID NO: 19966 - DNA, 424 bp, Glycine max
  unsure at all n locations
agctttgaagtttgacttggtccttcagttagagggtcatccatcatgtaagtagccccaaaaccatgaatggaccccttatgaggcaaaacagttttcatagcagttgggtgttcccccgttatgttgttatggaaatagaagtggagttgggtgagtttttcttccacgggttctgtggatggatactgttgtgcaaacacttcactagttgcgggtaaggaacttgacatgataacaatgagatggaagccaaagaggagatacacaactgaagccatcttggtactacttttcggcatgttagccaatggttgcgaacaactatatatataggcagaagatatatgtaccttgtggaatactntattaaaaatgattatgtgtaagttattttaagtaaaaatgggattaaataatccat

SEQ ID NO: 19967 - DNA, 440 bp, Glycine max
tgtatgatgtttgtttggctacataatacctaatatgcggtgatctctctatctccaaatgttttgggctttctacttttcttgaagaatataacttgagtccacagtgtttcacgaaccatgttcttttggaaaaattgtatttattcatctgtcttggtgtaggtgaacttttgttggtaccacaatgtttttcataatataattagtatattcaatggatacaccgagcttaatccggtacattatagaattttctatactaacatattgtccaagactaagttcacagtatatatttataaaacaccgcaaagttacccgagatgtgaccacccatgtgaactgtactgaaggtcttcattgttaataaatgattccattgcttgctctaatcagcaccattacactagtttgtctgtgatctgttgatatctata

SEQ ID NO: 19968 - DNA, 349 bp, Glycine max
  unsure at all n locations
agcttcgatttctatgcctaagtcttgttgttggcactttactctagcctctacaattgtccacacactcaagatggcagccatatgtgctcaaattcgttccactaaccaagttgtacaaaaccacacacaaatgccattgaggcatttcactgaacacttggtgggcgcatgtttagacatgaataaatgaggaatggcggcaatgctacatgcccattcatatcagaacccaagatatgcctatggtcattctctacaaccccccaatttaaataacaactatggatatgacatacattgtctcatggattttgcanacatagacaattaaagcactaaaacacat

SEQ ID NO: 19969 - DNA, 370 bp, Glycine max
  unsure at all n locations
agcttctacatatgggactgngaacactctaagggcccttgtcctaatggtataaaatatatgttcatcatggatttatgggatgtaatgaaaaaatattttttggcatttcttgatgaattacacataaatgggagactagataaagtggtcagtagatcttttattgttctgttacctgaaaaaagaaaacctaatgtctatgggggataatatatccctgatagggtgtttgtataaaatgttggcacagatgtttgctaataagttaaaatgggttattgatgatgttatttccacaacccaatctacttttatatcagggaggaaaatgctggatcgggtactcattgctattgattggttcatg

SEQ ID NO: 19970 - DNA, 355 bp, Glycine max
tcaagcttgtccttggtttagacatgattgatacatgatttgggacttgtaggattcaatttgggcaaaattggatgagggaaagtgtgatttcgaaaatctgcactttatgcagaattttgctgtcaaataggtgcaacagaattttggctttgtgcagaaagtgttgtgtaattgctggctgtggaaagagtagtatagattgtgttctggacgttttctagcagattccaacggtcataatgtagatttatgtgctagagacttccagtaaaattttcgagtcgatccaactgttaacgaattggaacgaagagaatattactggcgtatttgaatgttgaaagctgtgata

SEQ ID NO: 19971 - DNA, 404 bp, Glycine max
  unsure at all n locations
tcctcggtgccattcctgcgaaggcaaacatttgtatagttagttttagtgggacattactcttaaagcaaaaatggcatgtaacctcctcccataaatacaaacatcaatgtaaatttagagcaagcttatgcgcatatttccttacaaacgttctcttgcacaagacatttaaccgaaaaaatgcacccatatacaatcaaggcagcttcgttacctagattatttacacgtacctccaagatgtatttgttacttacatcacacacatctctttggctaaattcacatacatgcatactcaaagcantttgnggtaccaaaaattgcacatgtgcacatcttggcatttctaatacctattcatacgcaaacttcatgatgaatcttgactacccacacaa

SEQ ID NO: 19972 - DNA, 435 bp, Glycine max
  unsure at all n locations
agcttacaactcatataatgtcacatcaagaattaatgacacacttattcacatccaaaactcattcacaatttcacatctcataatgttacaatccatcatcacaagttttcacgtatctcacaattcaacacctattctactntgcacttttactcaatctcaatgacaatattataatctcaaggcaacatattattccacaattcatcacatatttcatttataagcattgctcatgaattatacaatacccacgacctaacactcgtatttcaaacacgtttaacatattgcgctataatttaacactggttcctgaataggaaacctacactntctcttanacattgtgcatcanaagttnttctcaagataacactggtcagaatattgtataattcatagctcacaatataattattgtcacataaa

SEQ ID NO: 19973 - DNA, 432 bp, Glycine max
  unsure at all n locations
tcaagaatcaagatcaagatcaagattcanaattcaagattcattattcaagagaagacttaatcaagataagtatgaaaggacttttcaaaaactgagtagcacatggatttttcacaaaacatgtttaccaaagagtttttactctctggtaatcgattaccagattattgtaattgattaccaatagcaaaatggatttgaaaaagttttcaaactgaatttacaacgttccaattgatttcaaaaagttttaattgattacaatgttttggtaatcgattaccagtgcctttgaacgttgaaattcaaattcaaatgtgaagagtcacatcctttcacataaaagccttgtgtaatcgattacactgatttggtaattgattaccagtgaattgtttctgaataaatcanaatatgtaactcttcaaa

SEQ ID NO: 19974 - DNA, 449 bp, Glycine max
  unsure at all n locations
agcttatccattctacccattgaaacgatagatcctgaagaanatggggggaggggggttagcattatagaatagaataacagaattactttgatttaaatcctggcaaccagaagatagcattacctgccaaattggcaattcctatgcagacatttgcaatgtctgatggcactccagcacttttaaaaacagttgaagagaaataaaacacagcatttataccagatagctgttgtaaagcanatagggttgatccaataaaaacaactgctaaacgaacttgtgaataaaaaataacttttggaaacctaaggaaaccagtgaccagataacaacaatggcaaatacactcacaagtcacaactatcccagagacaaaccaggaaaaatgcatacctttagaatgacgaccatgaangcaattcgacagcttcacactatcacta

SEQ ID NO: 19975 - DNA, 455 bp, Glycine max
  unsure at all n locations
tgttgctaatgctggacagatcctcttangaaacctggtaaattgtgagagtggagatttcttatatggactgtatgttcattntttgttgtggactctcttcaataactaagctttattacatgctcaaattcatgtagttgtggactcaataattgcttatagcatgagaatgatgaggagattgaataactatttgatgattcaccctgtaccttcgttaatttttcactttgttgcaacaacaaaattaaaaaaaaaaaaaaaaaaagagcttatcaactcctttcacacttcacaggaaaaagagcctgaaacttgtgtaccacaaacaagttctagtcattcccaagttttcattgttatttgttagtcctcgtacacaaaacttgaattctttgaacttgtttgaacaaatacttattagtacttanatttcctccatttctaaatat

SEQ ID NO: 19976 - DNA, 408 bp, Glycine max
  unsure at all n locations
agctnntgcgttcgatttcttagtgcaattctccattctcaacctttttcggagccccatggattgagttttcgttcatgcgtactccaccttcgagtatggagccatgcgtagtgattgcttagttcaattctccattctcaacccctttttcgcagccccatgaattgcgatttggttcatgtgtcctccaccttcgagtctggagccatgcgtagtgattgcttagtgcaattctccattctccaccctttgtcggagcccatgaattgcgtattcgttcatgtgtcctccaccttcgagtttgaagctctgcgtagtgatttcttagtgcaattctccattctcaagctttatcggagccccatgaattgagttatcgttcatgcctcctccaccttcgagttt

SEQ ID NO: 19977 - DNA, 426 bp, Glycine max
  unsure at all n locations
ntacagcggatgccactctactccaaattcttgaaggatatgttttcaatgaaacataagtatattcaccaagaaaacattatagtggaaggacattgtagtcttgtgattcaaaagatccttccacccaagcataaagaccttgggagtataactatttcttgttcaattggagaagtcactatgggaaaagctcttattgacctgngagccagtataaatttaatgttgctctccatgtgtagaatgttgggagcgttagagatcatgcccactagaatgactctacaattggctgaccgctccattaccagaccatatggagtaattgcagatgtgctggtcaaagggaaacatctcatcttcccggtagacttcgtggtattggatatttgtgaatatactgacattcctgtaatattggga

SEQ ID NO: 19978 - DNA, 376 bp, Glycine max
  unsure at all n locations
agcttgcncacttgtcttattctatatgaagggctctgatttcttgagtagtttgtagaatggctttccctttttggtgagctttgggaagaacctggacagacatgctagcctttcattcagcttcagcttctacacttcttggatgttggttgggttgcgcatgatcagtatggtagtgcatttgttgnggttggcttcaatcccctagtgagtgatcatgaagtcgaggaacatgcctctgtctacccaaacagtacatttatcatggttgaggcacatgtcatattagtgaagtttccacaagacttcttccaggtcagtcacatgttgggctatgctccgagacatgtctatgatgtcgtgcacatatacc

SEQ ID NO: 19979 - DNA, 407 bp, Glycine max
ctgaacatcggtaaacctttcatgtaagcttcttatggagttaatatcttccattatgcatgacagccccctatccattgaatgtctcaggtgttttactgctcttttaactgcaaagattatttatattacagtaggacaagtaccataggcactgcgtgatacatacgataatataatcctgtaagaacagaaaaaacaacccgacatgaagccacatccctaccctacaagacacgcattaactaaaaactagaggcattgttggaatcccatgtgctggccttcataagtctatcccataacaatctccaggcataagataaagctctaggagggattttaatctcccatagttgatggaagcccaggtgctggccttcataaagctgctcagctttaatgac

SEQ ID NO: 19980 - DNA, 432 bp, Glycine max
  unsure at all n locations
agctttgaagaaacaattacaagctatctacgtgaattattctttcatactttntgtaaatacttttaaagatacaaagctctcaaaacaccttgtatactttgagagaaaacactaaaagtgttgagtgttatatctatttgtaagatgattatatattttagttagtgtgaaaacttctaacaaatcttgttgatttgtttagagccagatgtggcttggtaggacaaggagtactgggttttaaatcaaggttgggggtagagcttgcaagtgaaagagtcagaagtggcaataagtaatacttgtaactntgataagttagtggaaacttggtgggtgctaagaattggacttagtctcgaggttgagacaaactagtataaattccttgtgtggtttttgttgttaactaattcataccctaatttc

SEQ ID NO: 19981 - DNA, 472 bp, Glycine max
  unsure at all n locations
ctcctttctgggttgatgacccagtatgggtaggtgacccagaatatgttgtangttgccttttggttattggctctggtagagccagtagaacctcttttccttttgtactggatcttcctcctctgccggaggaactagacaccataggaggcatcgggaattttctgtaaaaattcacgggtgagatagtcaggtagagagttggaagagcccttgatatattctatattaaaatcaaagacacttaaaattgcttgccatcttgcaaaaatctgttttgaggcaaggttttttacatccttctgtanaatgtctttggctgatttgcagtcaacccttactaaaaatttttgatttaataaatcagattgaaatttggaaatgcacaaaacaattgctaaaacttcttttttgacagttgaatactttaattgtgcaggattccagtgttntgaagtatatgcaatga

SEQ ID NO: 19982 - DNA, 420 bp, Glycine max
  unsure at all n locations
agctntgacttatccaatgaagaaaggtgggccatggtactgttttcttctttattntatctatttttttagggggagtttgatttggtttgaaagaaggagtaagataagaagtgagagatgattcactctgattgccatttgtttgagagaggtgctagagaattggtcgcactattaaatgggacaaagggaaatccttggacattttatcatagtcacttggtgagttntaatctaacacactcctacattttataaaacatgtattaatgatggctcaaagttacgtacaagtctgtggctgggtgctatttaatcgttggataactctaaagtgcttttgactacttacaataatttaaggatactcccatacctttgtgaataattactcatttgacattgtttacacatgac

SEQ ID NO: 19983 - DNA, 435 bp, Glycine max
ggtagtcattataagagaaagaacatgtgattagaattatgaatgttatgctagttttttgtcagattgattgtgaagaaatgcattaattgtaacccggtgagagtgtgatccttatttttgagagaaaacggctatcattaagtactgacttttgcatgaatctcttaattatggactgaatgcatgaatttgaggatgatgaaggccatgttttgattgtgatagccacttagccaaaaagctgaccatgtgcatgaatgatttatcccttgcacccagttttgagctgaatgaatgcttgattgattgaaccttgagcctatacagttttatcttctgctactttgtcttacgttgtaggagagcatcatccacagaaaagcttagttcaaggcagatttgtcccaaatttggggagttatatgtcaaaat

SEQ ID NO: 19984 - DNA, 413 bp, Glycine max
  unsure at all n locations
agccctatanatttttatatggcttgaaacaagcactgaggcagtggtacaagaagtttaatgagtttatcagcaactcaggattcaacagatgtgacatgaaccattgctgctatgttaagaaatatactaatagttatgttatccttatcgtgtatgttgatgacatgttgattgcaggatctagtatgacagaaattaacaggttgaagcaacagttggcagaaaactttgaaatgaaggatcttggtccagctaaacaaatccttggtatgagaattcttagaaacagatcagaaagaattttgaagttgtctcatgagaaatatatacacaaagttgcttgacaagttttaccttgaagattctaagaccaggaatacccctttgggatctcattagaagtttcaaag

SEQ ID NO: 19985 - DNA, 399 bp, Glycine max
cggcaaccgtttggtactagaaaacctacttccatgctttatttgtaaaaacatcttatataatcatgcatacaagtgacaacttattcatattctcctctctaatttttctctggcataaaaagcgaacaataaattcaaaagcatataaggagataatatgatatgtataaaaatatgccccttttcttcccagagacaatttcatctcattttataacaacaaagttgcttagtactaaatattatgatcactttggtgtgactactcagggaatcaccacatatgattacatcatagccttgagggagcacgagcaggagcaacaaggcattggaggtcagcagagtccccatatgtcgcctgttagctcccttactggaatgagcagtgcaagc

SEQ ID NO: 19986 - DNA, 435 bp, Glycine max
  unsure at all n locations
agcttatattttatctcactatccggcgtgaatggggttactgctttacatggaaaagggggggttttagaggctcagttttgtgttggacatattgacaatgatgatgcaaatgaggtttcaccagcttctaaaaggaaaaaagtcacagctaacccaaatttcacaaaatgtcaatcggaattgagtgctgtgattgtgccttccaccacatctgaagctcctatgagtttcagtgataaccaagaacatcagagagaagttgcttttgaaagcatgggtatgattattctgtctagtgctcagtcaatgccttattcagaggatattactaanatgcctgagaatgttttggctggnggatcttttgagtctattgatgcanataaggaaaccatgagttctgagcatttggaattgggcattcggatatag

SEQ ID NO: 19987 - DNA, 453 bp, Glycine max
  unsure at all n locations
tctcgctcttgcactttcaagcacgattgtctgtctccaatttgttatggctttcacgcaccttccatagtcatcttgcanacacatgctcgtccctgttatgtttttgttcatatggaagactcaaatatacattgcactctatccaaggcttcctccacgatctctttacactcttccagccatggagaaactcttcacctctcttaataatgactttctcattaaggacctccttattctcctaggttttatatatcattactccttcatatgcttccataacaacatggccatactttgttgatttgctatcaaccttgaaagcatgttgaagaacagtngattacatgaatctgcttgaaggatcgagccaacgataagcaaggcctatagaaaatattaacagtcgattactttaaatatatatgttggactgtttgctaacatata

SEQ ID NO: 19988 - DNA, 397 bp, Glycine max
  unsure at all n locations
agcttcctcatcttttgttggcagtgcaacctacccattttttagtcatgcacattgagggatgcaatatctgtggtgaggcccatgagtcaagcatgtgcatggtccaagatgatgtatccaaagaagtcaactgtatgatcattccacaccatcaagggttccatcaaggacgacctccaggatacaatcaggggggaaaattctctcagggccaaggttggagatcccaccccgggaatagcttcaacaaaaatcatggagtttcatctaatcagcctcccaatcaatggcctgatttatatgagataaccactaagctagaagacactctgaatcagtttatgtaggtttctctatcanatcataagagcactgagtctgccatcagaaatct

SEQ ID NO: 19989 - DNA, 439 bp, Glycine max
  unsure at all n locations
tcaggagacgctgaatcaattcatgcagatattcatgtccaactatatgatcatggagtcctccatcaagaacctggagatacaagtaagacaattagccaaacaaatggctgatagacccaccagcagctntggagccaacatagagaagaacctataggaggaacgcaggggggtgttgactagaagccagatgagagcgcaaggagaaaaagagaaagctaaaggagaatagtctgaggaaggaatgggcagacaaagaagaagagaatgaggaagaagagaagaaggaaaaagagacagattaatagaagaaggtcttaacctctaagaccaaaagccagctagcctgagaggctatgaaagaagagccactatcctctctaaaggagcccctatatcctttagtaccatcaaagaagaataagcatcactactt

SEQ ID NO: 19990 - DNA, 426 bp, Glycine max
  unsure at all n locations
agcttcttattgttccagatggacgtgatgggcgagcattcacccttagcgtgattcatttattatattttaaaagcgaatgagaattaaaatcaattatactacttttaaaatattttatttttttaaagattagtattaattattaatttattagaccatataaattctgattgttttctcanatatcacgtaggccgagacatcaaaagacctgtgtttgaatgaaagacaactcttatacaagccctcgcacaggcaccaattagtgctaccctttntatgggacacaatgggaattttcctgagtgacgcaagtaattctattcagttcacttctagaatggaagatatgcagctcttaattgtncgtttcatattataggaagtacatatcaagacgccaaacccgatatcactaattaa

SEQ ID NO: 19991 - DNA, 463 bp, Glycine max
tactgttagaacttcttcagatccaatctcatgaccaccatagacaaaaagtttccccccgctattattggcacaccaatgtagaacaataatagggagtcttctatcagctgatgataattgaagcttgacaacattgtttgacaatctttcaacttgttggtcagggggaaagtcagcagttgacaaatcccaaaacattatatcaccatctacataacccacaacaaccaccgatccatcattagatgcccaagatacagagcttatctccttatcctcctcttcatggtctaatttatcatcagaaagctgaaccctagagtcatttggataactagtcactatttttctcttcaatttgatgtccttgtggcctctaatgagaacaattcgatcttcagaagcatcccagagtaccatcaaaccattttcgtatgcaattagcagtctgcaaaatgac

SEQ ID NO: 19992 - DNA, 427 bp, Glycine max
taaaccataatacaccatcttcaacccatgcaaaaccactataccgtagtgcatacagcataagcttaaagaatacagacaacacaaatatcatcgtgaatgatgagaagaatatccaaacaaccagccctctcttgccagttgatgggtctttaatatttgttgaatccggctagcttcaaccaattctaacaccgaccacgcaaccacaaagtgcatcctttggttgtactcaaaacagggagacttggcacatgtgaacctctggaacaagtttcattcagcacttctggttttgctgatagcatgtgccaacaacaaggggattgatataccatagcctaagaaatggagtactgggttcatctcatatagctttagaagagttctgcaattctgtaatggaatagtagtaaatcacaaaatg

SEQ ID NO: 19993 - DNA, 449 bp, Glycine max
agctttcaacatgagtcttcacatataaccatcatgaagcagagaactaacaaaactacccttcatatctcccaaaaccccatacccacgaaatttaagagagaaagaagtccacccatacctgaattttcgaagtcccactcgtagccacgcacttcacgaccccgaatatgccctcctttcgcgatttggagcagaaatgatggccaaaggttggagctttgtgtggatcttcaatggagaatgaagaagaagagaatggcaacgtgagggagagagagagctgtctgaaattttgtggcgctgagtgaagagagagagagttgctccttgggtttaaatgacagggtcttctctatttttctattattctattcaagctatgccacatgtcttcatttgagtggagcaagaatgcccactttcccttcttaattgtgactcatact

SEQ ID NO: 19994 - DNA, 465 bp, Glycine max
tctacttatgtggcagggcgggcttccttcaccttcttgtctcctacgctaactttgaccactgttcttccttcccgcgatgcttcttttcacgtccgcctgagtgggcttatagcctaaaccatacttcccacgatttccttgggtatttatcaggctagttatgccgccgttgcttctgcctaaacccatcctgagttcataaccgttccccaacataactcgggccatcattaccgctgcatcggacatacaaggctgcccatagagggagtccacggatgaaatgctgaccacctcgaaagactggagagcagtttctaacgattcttccgcggcttccacattaggcatggaggatgggcagctcaccaagatattttactcgtctgcacgatgaccaagtgcccctccactacgaatttcaacttttggggagtgtataaggcacaactcccactgaat

SEQ ID NO: 19995 - DNA, 324 bp, Glycine max
  unsure at all n locations
ttgcatgcaagctngctgnctacagtttgttgatgcacctatatcactatgggtagtggcggagactgcagttgtttcgcccatgacaatggcgaaccatgcatgcatacatagttgctcctgtcacgctagacctagcctgctaccctacctttgcgcctaccctgctgcaacgccaaacctatcctgctcccctccccctgcgtgcctacagtgcctgaggtgtatcatcattggcactggcgataccctccccacgttagggctgacctatatngccagttgcagtggcaaacatcactggctatctcgccagcgatagtg

SEQ ID NO: 19996 - DNA, 576 bp, Glycine max
  unsure at all n locations
agcctcgtcgtacntcanttccgaagacaccgcacggtacgcatccgctcactacatataannaaannannaagagggnttttgatgcctcctagacngaccnatanatactaaagccggaacaaatagaccgacaagtcgaacaccacaagcaagggctgttctagtattgacgacgagacggagcctgcgaacacgtcgccagacagaagcggcaaccgctagaagatcaccttcagcagaacgcactctatcacacgcagcgaccggacattcggagcgcacgcaactagaaagaccaacgctacacaggcacgccaaacaacacctctctttcaataacaaccacgcgcgcaccagagcgagcgacctacaacccgaagagcacgtccaaccacccgaagacttaacgagcagatgacaatgagctgccgcaagcttgacctgatcatccgagatcgatacgaacaatgaccacacacacccatgggagacaatgcagcaaagactacgcatactcgtgacaacaggcacataccgagaccctggacagaggaagtgaacggacaccacacg

SEQ ID NO: 19997 - DNA, 367 bp, Glycine max
  unsure at all n locations
gccggaggtattaattgatattcaccancanaatgggcacactgaaggaatgattggcacacctgataagaaatagaatgataactaaacttactgaatatacaagcagtttgagaacaacaacttactactaaatggagtaactggaatgaatgtgagatgtagaaaccttcaaagatgtgcacacccatgagacttttgtgacagattatgcagacctcacacccaatgggtattacagaattattcccaaagatacagacaccaaggcatgacaaaatctattatactgatcacaattccctgtcataccgatacagtatgaacaatacggacagacaccggaaccatttataagcttaaagta

SEQ ID NO: 19998 - DNA, 442 bp, Glycine max
  unsure at all n locations
agcttaataaatttcctattgatccacattgtgtatgtatgattgcatggaatgagatgaaatgcaaaattgggaattgattgttagttgtttggatgaacaaacacttacctgaaacacttgtgtgcttgagataaatgttggctttgtgaggaaagaagcttagttaaccttcctggaagcttgacatacttgctaaccattttcatctctaaagagtattattgcatgcttctatcttgagattatgacaaatgctaatttgggggagatgatgatctgtgaaatgtatgcagtcatctcagatattgtggttggtactttctgaacaggtcattaatctaacttagcatagttagctctcttttgcttgngacaagcacaactctaaatttgggggagtttgataattgatgtacataagtagattatgttattaaaa

SEQ ID NO: 19999 - DNA, 474 bp, Glycine max
  unsure at all n locations
tctccctatgacaacccaccattcatctttgctggagaaaaagtcaatatctaaaggatgcatgtggttatacaccaagtttggtcatgaggggtcattgtagaaggacctaaaaatccaatatttgatagtgcacgcccacacttnctacaacatactacttagtagaccatctntgaatgtgatcggngctatagtgttcacccccatttggctatganattccccccaaataaaggatccatcataacagtccacaacgaccagaggaacgttagggaaggttacatggtaagcctcaagattaaccgtttggtaaaaagtgagtcgtgtcgaactgtgcactatgtagaaattatggtagggacctgttatgacttttggcaagcgtaccaattgtcactatagattntacatntataaaagagttcgtctccacagggactcgagttacttaattcattcggataaagg

SEQ ID NO: 20000 - DNA, 334 bp, Glycine max
agcttgatcattacaattatctaatcattccaatccactcaaatcattcaattgctcattcaaatcatactcaaacactcatttcatactaaaaaatccactgcatatcattgtcaatcaattcaatgttcaaacacgctcttggtagaagcaaacaactcatagtgctgaaatttaaataattgaaatttaaaagaactgaaatataaaacctgaaattaatatgactaaacataaatcataaaatatctaagaataaactaaaattctcaagatgcataaatttaaatgtcctgctcatcttgtggctgatccaatgctggagctgctgatg

SEQ ID NO: 20001 - DNA, 463 bp, Glycine max
ctataatactaagctcgtaaagttctccttctttgtttcctgtatacacacaagatccactcttatgctttaggttgagctttctaatagcagcccatttaatccctctgcccagtcctctgcaattataggagagtattatcatgattaataatacatgaagttcatgaagttctccccaattgcatttgtcatggtattgagaagtcacaacatcaccaaactgttttccagttgccatttttgaaagttgggatcccccttttctggctgtttggggtcacccgagaataaggtacaatggtgtgtataaatatgggtacaagactgattctgtcactaatttagagctaaaatcaggaaccaaaatccctataattgttgaactaagaaggaaagaaatatagcacatctattatagctgacaatcagatcgaatgattttgctaattctcgaatcatc

SEQ ID NO: 20002 - DNA, 431 bp, Glycine max
  unsure at all n locations
agtgtttcattctttagttgttttaaaaactgaaattcgtatggcgcgcttagcatgcccatgtgacgtttgagtttaaaacccaagcgcttagcctagcctcacgctaagcccaacttgaagtggtaaagtccagtgagcatctggggcttagcgcagcaggctgcacttagcgctttctgcaacacaaaattatctgcaatatgctcttagcctgatatgtgaggcttagcgtaccatcaagcttcaacttacagagagtagttcatgcttaacgcaacaggcgcgctaagcgcacttccatgaattcaaaacttgtaagagattggcacttagcgcttcttgtcccgctaagcccagcttaagaactcatttacaaaatggatctanggcttatcgtaggatagcgcgcttagcgctgctataataaa

SEQ ID NO: 20003 - DNA, 452 bp, Glycine max
tcgagaattgcccaaactccctctccatttctgatttaggcttttattgtggccttgttggtgcttgtgtgcttagcgcaactctggctcgcttagtgcgcattagtgaatttcggcttagcgctcgtcttttcgcttagcgaatggacttaaatggtgcacttaacgagattagcccttgctcagcgaacatgcatagctcattcttctttcagattcttcctcgcgctcagccaaaggagtgttgcactcagtggatggctcgctaagccaaaagattggcttagcgagcggatgataattagcatttcacagacttgcctaattaacctgaaattgagaggaaatgattgttaaacacacaaaatgggagtactaagtatttattacctatctttaacaaaaagtaattacaacactacaaaataaccataaattggaggaatttgata

SEQ ID NO: 20004 - DNA, 488 bp, Glycine max
  unsure at all n locations
gagggactttgatganctcagacctccanaaccaaaactagtcgtagagaccaggttatctagagagaaaagtagtttttagtcaagagcctaagcaagattggactgatgagacatcgcccaaagaccgtcattatcctctttttgatagggcctacacactcttcccactacatactagtgcactcaccatctttgactgtgaccaggtctatactggtctcccacctcacacactgaaaataccctccaataatcgatccatcataaccgtcctctcagactagagagactgtagggaagggttcttggtaagcccaatactagccgttccgaatacagagacgcgagccatctgtgcacttattagaaactacggatggcaactgcatagactctcagccactccacctaccgtaactatatacatacacttttaagagactcgactcgataagacgcgagtaacctattaactcggatgagcg

SEQ ID NO: 20005 - DNA, 426 bp, Glycine max
  unsure at all n locations
agcttctattttagctgaaccattntatcaataaacacacgttgagttttattcagacaattagagtttatctcttttatcttagtgagagtgattctcctaaattcttgagtgattcaagaacaccttggctgtatcaaaggactttcacaacctttgtgtgttgccctcgctggaaagagtgattctttccttcctttcatcatcacccttgatctttcaaaccacaattccagacgatccacctctgcccagaattatctcgaggccataactcccattttacgcactcaaattaagtgattcttgagcctaaattgaatttcagaacgagacctttcacctcgttttgaatcacctcatttggagccctgtagcttcagatatcggcatttctatatttctgtccacgcaccacttaaccta

SEQ ID NO: 20006 - DNA, 449 bp, Glycine max
  unsure at all n locations
tgccttgccccatgatatatntgagggacttatgatcactatgtttgactaattccttgngataaaggtagtgttgccatgttttcaaagcccgtactaaggcatacaactcctaatcataagttgaatagttaagggtaggaccacttagcttttcactaaaataagcaattggatggccttcttgcatcaacacagccccaatcccaacatttgaagcatcacactcaatttcaaaagaattttgaaagtttggcaacgcgagtatggtggcattagttagcttttgcttaagaacattgaaagcttcttcttgtttctctccccatttgaaaccaacattnttcttgagcacttcattgagaggtgctgccaatgtgctaaaatccttcacaaatcgtctataaaaacttgctaagccatgtgtcgcaacctacccttcggcggga

SEQ ID NO: 20007 - DNA, 440 bp, Glycine max
  unsure at all n locations
agcttccacaatatccaagcaatttaatatccaaacatcatgaactaccctaaaccaagaaaacagggcagaggcagaaaactctgtccaaaacacattccaatagcacagctttccctactcaaataccccagtaacattctcttcgcttcgattcgttaaccattggatcgactcgaanattttactggaggtccctagtacataagtctacattttgaccgttgggatcagctagaaaattttcagaacccaatatgtactacctttcccataaccaataatgcataagcattttctgcacaagaacaaaaattctgctgcacaattcaacaaccaatttctgcataatagggcaaatnttcgaaatccctcttgcccttcatccaatttgctcanattggatcctacaagtcttaaatcatgtatatatcatatct

SEQ ID NO: 20008 - DNA, 446 bp, Glycine max
taagctccttcaactgcacaaggctcttaatatttgaaaagtattcttgtggaacattcacccgacgaagacactgacaaaaacttatcttcttctttttggacaaggtatggcaagctgggggcaagaaaattttcttcccatcagaccttggatgcaactatgatcatatccccatatcagctagatcttgataggtattcaagtcatccttcgtcttgccttgaatgttaaggagcgttccaatcacactgtcacaaaaaattttctccacattcataacatcaatacaatgtctaacgtctagatcagaccagtacagaagatcaaagatgatggacctcttcttccatatgcaactattacttttatccttcttttgggtctttccaaatacagtattcagggtgttgaacccgctgatatacctgctcaccagtcaacag

SEQ ID NO: 20009 - DNA, 376 bp, Glycine max
ttcaagctttggattgttaatcgcaccacgtttcaagaagagtagagggcgccacctttgctgagtggttatattagcattttgttagttgaaataaaggctcaaacttgtgttaaagtggttgttaattggatttgcaccacctataggcttgttctaatttgaagaaattaaggtttaataaggtggaaactctaggcttgtggctgtctcttggctgaccaggagttgtgcatatttacacatgctttgtgtcttaattctagttttgattaggtataatggcaccaccaattgttgatattggtgatcatttcatcttctcactattgtaaccaacttgatgtcattcctatttataggctacacattttct

SEQ ID NO: 20010 - DNA, 427 bp, Glycine max
tcagacaacatgtcataatagattacgatggacctgtaattaattataacaaagagtttttgcctcttgaagaaacttttcttcacactaaccatgatgatgaatgatgcaatatagatatcatatgtactaagatgcaacatacaagataaaaaccaatacaaatgccactcaagggaattaggcatgtaaaagtcaaaacatcttcaaaacttcttcaagcttttccttgaaaggttgattaccatgtggctcatattgctccttctatctctaacaatgtcatcacaataaatggcatggaagtttggaaggtaaagcaacatacacatatgcatcgtactaccactcattatgatatcaatattacacacttattttcctcgtacgtcactatcaccttcatagagtataataatcatgtcta

SEQ ID NO: 20011 - DNA, 361 bp, Glycine max
  unsure at all n locations
ttaagcttgtaatgttaagaaaagagcaacgcacacagtcatataatacggaacaagtattaaaaaaaacatataaatataaaataacaaaacaaatcaaaacaaaaactataagcatataaataaagtgtgtgtgttgctatttaagacaaagaaaagctaagtgtggaaaggcaagtaatagagctggaataaaatgacaaaggttgatctatggatgaatgctttcttagaacctaagcttttgcatactatagaaaccatgaattgattgcagcccaggctcgttacaagcctaaaaaagtccttcagattcagttngtgtgttctcgactatatggcaagagatgaattgaaaaga

SEQ ID NO: 20012 - DNA, 402 bp, Glycine max
  unsure at all n locations
ctgagatggtatctggtcttagaanttaatttgctaagatcctattctgtgcgattggccaacctgaggaatggtgtagtcttgctgctgactacttgcattgtggccccctgcagctcccattcatatacctagggatgcctataggtgttaaccctagaaggaaggtggtgtgggagcctataatcagaaaanttgaagccaaattgaacaaatggaaccacagaagcatctctatggctggcagaattaccttaatcaatgctgtcttgacagctttgcccttgttttatatgtcttntttcagggccccttcagcagtcatcaagaggctcactactatccaaagacaatttctttggggtggaaacttggaaggaaaaaagatagcttggatctcat

SEQ ID NO: 20013 - DNA, 444 bp, Glycine max
  unsure at all n locations
agcttattattgtgacgttgaatganatgcattntgtcaaagttntgttaaagagctacaaattanagtgtggcttanattataatatattatttttttataacagagttgaaagatttgaccgtgcactntatatatccatctttatgagtgaaatttcttcaaatcttanataaatgaaaaaaaaaagagccaatataagctataaattaattaagaaaggaagaaacctctcttcttggaattggatgactactgagttgtgatttgtctttaattacttgcgactatcccatgccaataaactgaaagtgagaaaagagcagattaaggaagaagcaagctaaacatgatngaaggatatggatatggatatggatggcgtactaccattccgtagaaaaccaacatggagtaacgaagcangataatactgagagcatg

SEQ ID NO: 20014 - DNA, 457 bp, Glycine max
  unsure at all n locations
tgagctgctgattntgatgtatatcttgagttaatataaaatctataattatcatctatataataaggatttcgattcaactatggcagaatcaagatatccttttccctcctcttccacattccctaattattgctgacaaacttgatgattcaaattttttgctgtggtgacagcaaattgaaccggcgatatcatctcacatcatcttcagtgttgtgttgtaaatccagcgattatgtgtggaaaccaagtccagcaatctgtggcatgctagacttggtcatccaaactttcatgtactgaaacttgttctacaacactgtgacgtatgtacctcctgttaataaaaatgttgatgtctgtgcttcttgttgcgatggccagtcacatacactcccttcatctcctgccactactacctatggtgctccttcggaatcgattttagtgaccc

SEQ ID NO: 20015 - DNA, 411 bp, Glycine max
  unsure at all n locations
agctttaccattaatttatattgatcaggagtaaaaagggggaaatcttgatctcctcagtctttagtaacaagcaccgtcttttactgtatcgttatctacttttcaatgagtgtgcacttttgtccattaactaaatttcatataagaacaactaagaaatgaatagcaaggttactgagttgaatcctgtgatcctacaatatcaaaactcatcctgcagtggtagtattgcttagaatcatcgtagcgagtatgatgtgattattattacctatcatcacattatcaaagttgttgtaatcaattctaagtctattatatgaatgtntatttgatgtaatccattaaattatcatggtgatatctttatggatgagctattacgccaaagctatattaccttctgaa

SEQ ID NO: 20016 - DNA, 460 bp, Glycine max
  unsure at all n locations
ntgtactttttaatgacctggattggttttggtagtgagatntattgttggtgtggtagttgttgtttacaagggtagagaatttgaagggtgtagattgtttgcctggccagtggccactattgtagtgttgcacatggtgtgcagtttggtttggcttggtttggtttcattggtctcatataattgtgctttttggttgcagctggggccctgacaggagctatagctggtgctctagcagctaaagccactaagagtggtcttctccggggagttacattgggtgccattgccggctctatactctctgtggaggtgttggaagctatccgtgcctattggtgtatggagcaaactggctcacggagtgcatcatctatgtgtggtagtcattctcttcttgatttccttggtctctttgtgagcacaatgatttgtattaactctcataattatg

SEQ ID NO: 20017 - DNA, 394 bp, Glycine max
agcttctcgatctattatgcgcctgaatcggacctccgagttaaaagttatgaccattaaaatttctcaagagcttccgttgattaattccgtgcgtctcgatatattatgtgcctgaatcggacctctgagctaaaagttatgaccatatagaatatctcgagagcttgcgttgttcaatttcatgcgtctcgatatattatttgcctgaatcggacctccgagttaaaagttatgaccatttgaatttcttgagagctctcgttgttcaatttcgagcgtctcgatatattatgttcctgaatcgaacctccgagtgactatttatgaccatctgaatagctcatcagcttccattgttcaatttggagcatctcgatatatgatgcgcctg

SEQ ID NO: 20018 - DNA, 388 bp, Glycine max
  unsure at all n locations
ctcaagaaattcanatggtcctaacttttaactcggaggtccgattgatgtggtttttatatcgacacgctccaaattgaacaatggaagctcttgagcaattcacatggtcataaatagtcagtcggaggtccgattcaggcgcataatttatcgagacgctcgatattgaacaacggaagctctcaagaagttcatatggtcataactattaagtcggaggtccgattcacgcacataatatatctagacgcacgaaattgaacaacggaagctctcgagaaattcaaatggtcaaaacttttaactcggaggtccgattcaggcacattatatatcgagacgctcaaaattgaacaacggaagctctcgagagattcatatggtc

SEQ ID NO: 20019 - DNA, 421 bp, Glycine max
  unsure at all n locations
agctnggatatatctatcttactcagcctaatgtatgagaatgactattacagtcagtgttaagacagttctccctaagatcaataatgctaaagagtttatgggattagtgagagagcgctctcaaacaactgataagtctcttgctgaaacattaatgagtacactgaccaccatgaagtttaatggtttgtgtactatgcatgaacatgtcattgagatgacaaacattacagcaagacttanaaccttccttgatcagtttatttttaacttattaccgtttgagtatggctcattccaaatgagttataataccatgaaacataaacgaaatgtgcatgaattgcacaatatggtagtttaagaaggaacggtgtttaagaatcaagatagtcactgagtccattatgtaagacac

SEQ ID NO: 20020 - DNA, 456 bp, Glycine max
cgtgatagatatgaatgttcaaaaccaatacaagagagagaattttattctttattttattctaatcgaccataaaaagttaaataaaaataaatgtggactttgaaactctgattatcttcgttattattatattagttaaattaaacaattttagtaaggacgtctagctagctcaatagattgatatagtatttaatttctgtggataaaaaaaatctttgtttgatactttaattttattctattctaaaagaaattatttttattaatagcttaattatataattcgtcatttaattataattaaaaattccattgagttcgtcaattattaaaacattaaaatctcttaattgtttaaaacatttccgttattattttttgtccattacagaatcaattatataattgagtcctttattaaattaatgaaattgcacatgtgatcacaca

SEQ ID NO: 20021 - DNA, 192 bp, Glycine max
agctgttacaatatccattctattcaatttcctttgtcatgacaccacgctctaccatgaaacatagagcggaggcagagcactctacacatgtctcattccaattccacagctcttcctactcacatacctcactaacagtacattcgcttcgaatcgacaaccattgcatcggctcgactcataaactga

SEQ ID NO: 20022 - DNA, 241 bp, Glycine max
ctataaatctaagcttcttataagctgaaccattgtatcaagatacacatgttgagttttattcttattattacagtccatctcttttatcttagtgagagtgattctcctaaattcttgagtgatgaaagaacaccctgtctgtatcaaatgactctcacaacctttgtgtgtggacctctgcggatagagtgattctttccttactttcatcctcaaccttgttctttcaaaacacaat

SEQ ID NO: 20023 - DNA, 405 bp, Glycine max
  unsure at all n locations
agctttgagttttntcaaccattgaatcaaaattctaatgtatatgtatatatctatctatatttgtttaccaatgatcgaaattttaatttgacaacaatgattgatttggtactatatgtaaaggaagcttaatactttgtcagccgttggttataaattttaattaataattattgatttcattcaataaatatctagtatacttaaacatttattgttgaatcaaaattctaattctataacaatcattcatatggctattgtaaaaatatttgtagaaaagacatccaatattttatgcaacggaatttttttgtaaaaaagtttacacatttacaacaaacagaattttttactcccttgattgtattttactcccatcgttttataatcaatttaaaa

SEQ ID NO: 20024 - DNA, 467 bp, Glycine max
  unsure at all n locations
tagcgcgaagaagatccacgaagaagcccanagacatgctttgctcaccctctacccacacaaatatataataataataaaaggaaaaataatgcgggattaattaaaagttttaaaacacatttaaataaaaacaattcaaaaagataaaatgtttaaatccacttagtgaaatcataatataacttgttcgaataaatgataaaattgtcttggctcacaacaaggccacccattttaaatggagagaagtcacactaaaacagaaaacatataataactatatcattcatggatttataacatatgaaataaaatgctatgactcgatgttgcatatatcagaatattttcttgtcagaggctaagtctctccatcttcactatagaactcatcatatgctaactcacctgaaacaatatggtaatcaacccaaacacaaacacattgtgagtgagttatcaca

SEQ ID NO: 20025 - DNA, 428 bp, Glycine max
  unsure at all n locations
agcttctagcttaatggacttaccttgacttaattccttttatagcccttttgagccttgtttccctttccttgctttgaagctcactacaagctttaagtgaaaaaccatgatatcaccatatccttaaggaattttggagctttggaactggtttgggaataagtgtgggggtttttgtttcattggataacatgttttgttggtcatgcttcatgatatattatgagccatacttgatgtacattgcatattggttaaatgttggacatgctgaatatgatgttgtttctcaaaggctacagagtaaaacaaaaaagaatcgaaaaagaaaaagaacagcagtagagatgagtgaataagatcttaaatgaccaaagaatgatgagactcttggctctactctntatgtctaaattttatcttta

SEQ ID NO: 20026 - DNA, 465 bp, Glycine max
cttcttggtgggttgatgcactctatctcgtagaatggtatgatcactatcagacatattctcaatcaattcagttgcctcttcaagggttttcaattctatcttccctcctgctgaagcatctaacaactgcttggtttgtggtctcagcccatctataaacatgttcaattgaattggctcagagaatccatgtgtgggagtctttcttaacaaaccccgaaacctctccaatgcttcactcaaggactcatcagggaactggtgaaatgatgaaataacaactttcccttttgcagtctttgactcggggaagtatttcttcagaaatttctcaacaacttcctcccacgtcttcaaatttttgcctttgaatgaatggagccacttcttggcttcccctgccaaagaaaatgagaataaactgagcctgatggcatcatttggcactcctgcaatctttat

SEQ ID NO: 20027 - DNA, 438 bp, Glycine max
  unsure at all n locations
ntcatattcatatatagatcattgcaacttgcaaacttcattacaaccagccaatgatgtgaattcttcagtttgtgtcatgtacacttcctctttcaactcaccattaaggaaagttgttttcacatccatttgccatatctcataatcatagtatgctactatggcaagtagaatccgaatttatttgagcattgccacaggagaaaatgtttcgtcataatctattttttgctgttgacaatatcctttatcaacaaggcgagctttatacgtctcgacctttccatctgctccaatctttttcttgtaaacccatttacaaccagattggtttatatcctttgaagcttcaactaaagtccatactttgtagatcttcattgattctatttcaaattccatggcatttttccatttgttgcaatacgagcttcn

SEQ ID NO: 20028 - DNA, 420 bp, Glycine max
tcaatgcctgctgtattctttgatttctcgtctccatggattggtattaatgaatagcaggctcaagtctaaaatacagtcttccaaacttgtattaagttaaagtccaaagtacaagttctccataagataatttcagcaaggaaagatgcagtaaaaggagaaatggagaatcaagttagcaaatactcaaacatgtttgaattttcgattttttatgagtcagatcaaccggtaatgctaaattcaagaactcatgtgtgtcttaatcacgagctaatttttcttatatataatattgataccaaattgacgataaattactaatttacttgcaaacgaagaaactggtatttcaacctaaaagggacaaataattgacgatagcaatttttataaaatatttaattatcttaaaaa

SEQ ID NO: 20029 - DNA, 408 bp, Glycine max
  unsure at all n locations
agcttctatattatctgttccattntatcaataaacacaagttgagttttattcagaaaattagagtttatctcttttatcttagtgagagtgattctcctaaattcttgagtgattcaagaacaccttggctgtatcaaaggactttcacaacctttgtgtgttgccctcgctggaaagagtgattctttccttcctttcatcatcacccttgntctttcaaaccacaattccagagaatccacctctgcccagaattatctcgtggccataactcccattttacgcactcaaattaagtgattcttgagcctaaattgaatttcataacgagacctttcacctcgttatggaatcacctcatttggagccctgtagcttcagttattgccatttctatatttctgt

SEQ ID NO: 20030 - DNA, 445 bp, Glycine max
  unsure at all n locations
tgccttgccccatgatatatttgagggacttatgatcactatgtatgacaaattccttgngataaaggtagtgttgccatgttttcaaagcccgtactaaggcatacaactcctaatcataagttgaatagttaagggtaggaccacttagcttttcactaaaataagcaattggatggccttcttgcatcaacacagccccaatcccaacatttgaagcatcacactcaatttcaaaagatttttgaaagtttggcaacgcgagtatggnggcattagttagctgttgcttaagaacattgaaagcttcttcttgtttctctccccatttgaaaccaacatttttcttgagcacttcattgagaggtgctgccaatgtgctaaaatccttcacaaatcgtctataaaaacttgctaagccatgtgtcgcaacctacccttctgc

SEQ ID NO: 20031 - DNA, 353 bp, Glycine max
  unsure at all n locations
agcttagcattgttgtgcttagcggcaccatgaaattcagaanattcactaagtatggnggcttagtgagcaaggctcgctcagcccaatggctgccgtaatgaaatgggcttagcccagataggcttgacttagcgcacgactttcaaaaaaaaattggactaagttacccgggcttagcgattcagcctcgcttagccccaagtatctcaacaggaggatgagtgttcatcctcacaagatgagcttgcttagcgcggtaggtgcgcttagcgagttcgtctagaaatgcatatattcaatgaatattgatgaactcgcttagcatagcatgctcgcttagcgagttcatt

SEQ ID NO: 20032 - DNA, 421 bp, Glycine max
  unsure at all n locations
tatagcctttgtgaatctgaggcacaactntgaaatgatatatatctctcatgtaaaggatcctcattcgatgatatataactaanagggactctntcactctcacttgataggtagatagtatattttgattggaatgtgcggcatcgacatgcgttctgcttgatgtaatttttaaaattataatattctttctaatatggctactaatgtacgtttagtggagaataaataactatttcttccattntccgtcctttcttcttagataaaagacttgattgctgaaattgagttgcttgcacaagagtttataaatcgtgagcagcaagttctttctgtgtacatgagtgtntttgaacagtgtgttagtcggtcaacttctcaacaaagttctgttgtttcttcacctgctcataca

SEQ ID NO: 20033 - DNA, 386 bp, Glycine max
  unsure at all n locations
tcaagcttattctctattggacataaggtaatatatatttttgtattccttttgtttttgtcttgcataagctctggctttgttattatttattcatacatatgttggttttgttgactatgaatattgtattatgtgtggcaccactttttgtttctctattaagttntaaccttttccatatcgttggtgattattggatatggctgcaatttaatataaaggcctanagagtgactcaactatgcatgtatcgtgtacattacaaacttggggtgcgtctgaattactttatttttgtatctagaaatgctgttagtcaaactactagagaacttctatcgaaaagctattttatgaaataaatattagctaaacccaagaat

SEQ ID NO: 20034 - DNA, 324 bp, Glycine max
tgaaggcaaactggatgcattggttaacttggtaacccagctggtcttgtgtcataccctaatttcgtccggggacctttgcttgatgacatgcgacctttctttggtccttgtgaggtgcttgacacccatcattatgcagtttgcgaaattccaggacatgcctaaaaaccaaataaatattgatgcacaatccgtaagtctacgtgacacatcggaaatcaaatggaagcatcgttgcataattaagtgaggttccgtaagtcaaagaggggatgattatgtcattctgatggttccgtatcattacggaaagataacaag

SEQ ID NO: 20035 - DNA, 411 bp, Glycine max
  unsure at all n locations
agcttgacctttcccgacccaacccgagcatagtcggtcagtgagaacctgtgatgtacctaagcaggcgagctcctggcagtcaacagataaaaggaaaataagaccacaaagcaaggaggcttgtggtggctggccagctgtgaatnttgtgtaatatgtggattgtggcctctggtaatcgattaccaagggtgggtaatcgattacaaggcttataattgaagacaggaggctaagatggtctctggtaatcgattaccaaggggtgtaatcgattaccaggcttgaaaacgaagtcaggatacttaaggagcctctggtaatcgattaccagcctgtgtaatcgattacacagaggaatgggtcactggtaatcgattaccatgcatgtgtaatcgcatacatagt

SEQ ID NO: 20036 - DNA, 453 bp, Glycine max
  unsure at all n locations
tctatataagctgaaccattntatcaataaacacaagtttagttttattcagaaaattagagtttatctcttttatcttagtgagagtgattctcctaaattcttgagtgattcaagaacaccctggctgtatcaaaggactttcacaacctttgtgtgttgccctcgctggaaagagtgattctttccttcctatcatctccacccttgttctttcaaaccacaattccagaaaatccacctctgcccaaaattatctcgtgaccataactcccatttcacacactcaaattaagtgattcttgatcctaaattgaatttcaaaacgagatctttcacctcgttttggaatcacctcatttggagccctgtagcttccgttattgccatttctatatttctgtccagccaccacttaacctacgttgtaccatcccattcatccattttatg

SEQ ID NO: 20037 - DNA, 434 bp, Glycine max
  unsure at all n locations
agctntgaaatctgaagtttaatattcaaatgatcaaagttcanaaaaaatgcacacacatgacctctatttatagcctaagtgtcacacaaaattggagggtttgaaattgaatttgtggagccaaactttggagccaaaatttcactaattatgattagtgaattttagttatggttcagcccactaatccaagatcaaatataatattctccactaagtgtgcttaggtgtcatgaggcatgaaaagcatgaaggacatgcacaaagtgtgactatatgatgtggcaatgaggtgtagtaagcaaatgctcacctgcccctctaaaatntaattggattgngcttctaccaattcaattaaatttatttccaaccacacacatcaaatatccacttagtgcatgtgaaattacataactacccctaataca

SEQ ID NO: 20038 - DNA, 467 bp, Glycine max
  unsure at all n locations
taataccagcagaagtaaaggcaaacatcatgttatatgtccttatgttttgttggtaatttttaccatcagctgtattttggtcaaacagaagttgatgcagaagtttaagtggattctgtaacaatgaacgttcaactttaccatctccacaacataagctgaaccttgggcttgaactatttttacatttttctattctttcattataccacattttgcattacagtgactacattgcatgagctggtcaccaagatcaaaatactctgaaatggttaaattagatatgagtaaatgatggtaaccattgattatattttgacaggaatatgtaaattatagcatgatagataaaagtatattttggattgactattttaatttgaattntaaactgaagtacttggatcagacatttatcttctgtgttagttgcagagtcattagatgagaattgacaattt

SEQ ID NO: 20039 - DNA, 429 bp, Glycine max
  unsure at all n locations
agcttgtatatttccnctttttatggtncatttggagtaaatcttgtagataagtctccttttatggttaacgttgtctctagaacatttccattggatttaacgatgaaatctgtgcattttcacgtgaaaaagaggctaagttctgaattgcaaaatgtagcagttgggctaagcgcataaccaccgcctaacgcagcttcagcgtgcatagcgcaaaggagaatctggcagagcatcagcatcaaagtcgcgcgctaagcgcgagataagtgagctaagcacagcatgtgccttcagccaggctaagctcgagactggcactaagcccaatttcacttactcacgctaagcatgatcgtggcgctaagcgcagtgttgcaatttcagagcctatttaaagcctgtcttgtgaagaatatggtacac

SEQ ID NO: 20040 - DNA, 470 bp, Glycine max
  unsure at all n locations
tgtagggttaaagtctcacgattgtcacgtgctcatgcaacaatttgtttccgtggctatacgagacatcttgccaaacaaagtcaggttcacgataacttgcctgtgctttttcttccatgctatgtgtagcaaagtgattgatccagtaatgtttgatgagttggaaaacgagaccgcaattatactatgccagttggagatgtattttccccctgctttctttgacatcatgattcacttgattgtgcatctggtcagagaaatcaaatgtcgtggtcctgtttatctacggtggatgtacccggttgagcgatacatgaagatcttaaaagagtatacaaagaatctatatcatccgaaagcatctattgttgagaggtacattgcagaagaagccattgaatnttgttcagaatacttagagacggctaaagctgttgggcttcctgagtgtcngcatgatgaca

SEQ ID NO: 20041 - DNA, 330 bp, Glycine max
  unsure at all n locations
agcttgcttgttcttgtttataattcacgcctgaataaattagaatagctttatgatagtttgaatgtttgatttttcatctaattttagtctattttggtgtagaaataaatgaagaataaagatagatggtgttgggtgccaattcgagacccttttataggaaattttttgaggtagaagggatcagacatgtcaagctcaacgcacacttcangctaaaggaattgtttctcctgcatggtatttgggctcaacgcccactttatgctcaaagcgcagtcacttaatctagtactgctgttgcaagcacgcttaacacgacatgct

SEQ ID NO: 20042 - DNA, 426 bp, Glycine max
  unsure at all n locations
acctataaatactcaagcttgtattccagatctttngaaggctgctctcacttgtctggacaatgtgtttgactctgacggatctcttcgtgccttgagggctaatgtattatctcgtgaatcctgttgcttggttagattatatctttgctgcttcatttgcttttgctgaaatactatgattcactatntttatgtaagaaatgatgtgttgggagcactaatagaactaagcttatgccttctaaaatggtatggtacaatctatggtcaagtggaaaacatgacccatatcttgaagctttcctaggaatccatgtcattattatatgtgataactgataactacatttaatacgtatcctcctcccttaatccatattgctgtagagaatactcacttgntctgctctctgacttctgtat

SEQ ID NO: 20043 - DNA, 375 bp, Glycine max
  unsure at all n locations
agctttcgatgttccggtctgtgagacgacagtcacgtgttcgcgatatgcanagatgatgttccgagtactttggatttggtccgaccatgccctcctgatttccagctgggaaattggcgagtggaggaacgcccctgcatttacgcaacaagcataatgtagacctttacggccctaaaagctctatagttgggcctatgctttagagatttcatttctggaaggctctgtgtctttcgcttttgaatgcatagtacaaggatctttcttcactctagtcctggtctctacccattctcattcatttgcatgttgactatcttttctaatacagcatattcgatgacgagtccccctgaggtactaatacct

SEQ ID NO: 20044 - DNA, 394 bp, Glycine max
  unsure at all n locations
nttcattaaccaagttgacaaatgtgatccctctagtccaattgttatgattaatgaaaatgctagaactagcanaatttcacgtttgtggattcttgctctttagccttaccaacatccaagttcagagctgaatagtatttgatgttatgtttcaccaaaatgtgatttttatagtgctagtgtatgcctatattctatttggatcttatatgagatttggtgcccttaatattctagttgtatgttgaaacacatgattgtaagtttatgttaagcaacctgctagatccccaactttagtttatatttcatcatttcatgttataagtatcttattctgccattactgtgttattaatccatcatgcttcgaataagagagaacctgaca

SEQ ID NO: 20045 - DNA, 368 bp, Glycine max
  unsure at all n locations
agagtgtcttggataagacgcttagagaggacgctttaatggacgacgcgactgagcgaggggggggaggggnannnnnnnnnnnnnnnnccccccccccnncncccccccccccccccnccccncccccccccncccccccccccccccnnccncnccccccccccccccccccncccccccnncccnccnccccctccccccccnccacccccccccccccnccccccctcccccctcccccccccccctccttncccccccctccctcccctccccccctccttccccctcccccccctcctctcccccctcctctcctcctcccccttcccctccnttcccccccccccccctccccccccccg

SEQ ID NO: 20046 - DNA, 465 bp, Glycine max
  unsure at all n locations
tgcttctacagttnttatcgttttttcgcaagattgtttttataccaaatagaagtcgtttaaggtgttggacctttaaacgatcttttgattcttgaaaggagagaatcgttaaggcgcttgaccctttgaaaaatctcttgattttttttaacagagagaatcactaaggcgctggacccttttcgacgatctcttgatttttgaaaagggagaaagttaagttgttgtgttctacttatttatgttattggattttgagagtttaaatatgtgatagaagaattcagcaatgcaacaaaggaagggtccaattntttatgcaattatttgaatatttacttctaatacataaacaattaaaactaataaaatattaaaaaaaagtatgtatcattaatattatggatacgtctagagaaaaaacatataaatctagctaatagtagtgagttagctaattga

SEQ ID NO: 20047 - DNA, 440 bp, Glycine max
  unsure at all n locations
agctttgatgttctgaaacatttaaaatcaaacaacaatcagaaattcatcactttaatactaacacagtgcattatagctaacttacatatgggcctgtttcttgcaacagaagcaatcttttaaaatgttccacaagggtagaagaatgtcttcatacctgcagagcaaatgttatacttgttattacgaatgggaagtattgagtcattgtgtgctgtcttgagctaatttcttttgtgtttatactatctccttgttttttctgccattcaaaggactgaccagtatagtttctatatcatcaaaacataaggtgttttcaaagctcaatgaggcaaccccttgacaattattcatgcgtgattcaacatgcaaagttataacagatgaaggcagcttncacagttaccactaacagcatctagcctgattaagat

SEQ ID NO: 20048 - DNA, 329 bp, Glycine max
ggacctataaaactaagcttgacaatatgtgggtctggttatactgtctactttctgtactctttttcgatgaagcactgaatctcatctcacatgataagacatgcatgaagaccatagactctgtacacactcacatcttaatactgagcacagctacttatgaggagaactacactgagctaccctacctgatatgatgtagacacacttccctgacatcatacatgactttacacaattttaccctactttcaatactacgagtgatacactgatatacatgactacctgcctgtactggaccaagggtcattatacaaagtctt

SEQ ID NO: 20049 - DNA, 425 bp, Glycine max
agcttcggattatgttgaacatcacagtaatgcctcatccattctttgcataaatatgacctctcatctcctcttttttggtacctagtgtttgtggaattttatatatcaattagctattaagaagcagattgcatgtgaagctttctttggaatcattactcattgtaaatgcattcattttattccatgggatatattccataatccccacttatttttgttagtgtgcgcatatcattcagtgtattattaacccttttttctatgcaacttataccgttattatttctaagtaggtcctgttcaattttcaaggtgagttaacaatattgataacgtatttgttaaaattaagcatacatcggaatttagtattaagcatacatttgctggtctctttaaatgtattttacccacagcta

SEQ ID NO: 20050 - DNA, 473 bp, Glycine max
  unsure at all n locations
tgcttanacttgtgatcattctgcacagaacgcaacctatttattattaacaatntcatatcactctcctaaacttacaacatacaaatttaagcaagaattcagataacaaattccactctcctcccttctatttaaccaactcaaaacagttcaaaatccaattgaccactaatcacaaccaatggaactcggattctcgtactatcatttccacaaagacacaaacagctaataaagtcggtattatgtaaagcttgctcgctcgcatagtacctcatcagcaagaattttagagcagttgaagcaaacacaacgcattatagttaagacggtcttcaaaaaaccaatatggaacattggcttagcaagctccaagtgcccaaaatggccagggcactcagccatactcgccgtgcaagtttcacacttcaactgtctgtcaatgggtccaagccgagggtcactcaatc

SEQ ID NO: 20051 - DNA, 351 bp, Glycine max
  unsure at all n locations
agcttgtttcttacagtaatcatggaggtggcatatggcagatatgcctccatctttacaatccatgacttgaaagcacttaccttacacctganaagttttagcccaaatttgaatagcgattgtctctattaatcccctagttacttgccttgcctatcacactcacctatagaatcttaccagcttcaatgataccttaccagctntaataacatagtagaattgatcagccacagcattgaagcaagttgccccaatttttccaccatcagaatccacaacatcaaaagattaatcctaccagcataatagaggtagacattcttggcctatagagttttactactg

SEQ ID NO: 20052 - DNA, 453 bp, Glycine max
  unsure at all n locations
tgagacttaattgctntgttcttcccataagcagtagtcttcagttcactctcacccatctccattacaagcctttcttcttcctgaacacacatggtcattaattcattgatagaccatttatctttatgtgtgttgtaggaaatcttaaatggcccatattcatgtggaagggtgttcaaaatgaaatgcactangaaggactcagacatatcaacctctagtttcttaagttgagctgagatatctcgcattttcatgatgtactcacgcacacctttcacactggtgagccgaagagaagaaaacttcatgatcaaggtgcttgctaaagtcttatctgaagtgatgaactggtcatcaatggccttaagcaagtctcggaccttttcatgctggtcaacagaaccacgtatcccagccgagattttagtcttaatgaacatcacgctg

SEQ ID NO: 20053 - DNA, 371 bp, Glycine max
  unsure at all n locations
agtatctgtgttatagcctccctctttggttgtgctcgcacagttggccctcctccaatatcagggggtggcccaggaaccgttaaaaggaaactactggtcccttaaccgggagttcaagtctcggttaagcatttaaggacagaggaccttaaattctcttaaggtgtagacgtggagcacactgaanatgaggacacgtagccctctaaaggtgagggcgtgcagccctctcaagacgaggatgtgtagtcctatgatggcgaggacatgtaatcctctaaaggtgagggcatgtccccctttgaaaatggnggacatgtagtcctctgatggcgaggacgtgtagtcctctaaaggcgaggacgtgt

SEQ ID NO: 20054 - DNA, 466 bp, Glycine max
  unsure at all n locations
tctttgaganaacttccttgagaagctagagcttagctacacactcccatctaanaactaagctcacctccttgagaagcttccttgagaagctagagcttagctacacacacccctctaataactaagctcacctccttaagaagagaagctagagcttagctacacacccctataatacctaagctcacttccatgacaaaatacatgaaaatacaaaaaaaaatcctactacaaagactactcaaaatgccctgaaatacaagactaaaaccctatactgctagaatggccaaaatacaaggcctaaaagaagaataaaaacctattctaatatttacaaagaagagtggacccaaccttgacccatgggctcaaaaatctaccctaaggttcattagaaccctaaggccttctttatcagctctagcccaatcctcttggagcctcttgctcatggctctgg

SEQ ID NO: 20055 - DNA, 375 bp, Glycine max
  unsure at all n locations
tagcttgagctctcacccaatcttgcaacacaatgttgggtccaaggttatcaaactcgacagtttacgtagactcgtaagagttccatagactcaactcgtagacttatacgagtccacttcatataaaaataataacaaaatatctataaataacataccaattaaacattntaacaatataataaagcagaatagtaaatcataaatttcacaatactgaaataaccaagtctagtaatgcatcactactagataataacttgcagattttatagtagtggtagagcattcccatcaaggatttgatgttattagagaatacgggtttgatgttattagaggtgagagtttttcaattcaggaacaacacac

SEQ ID NO: 20056 - DNA, 437 bp, Glycine max
  unsure at all n locations
ctgaaggtgcgtagcccaccattntccatagtagaatactggttatgtgtctactatcattgtcatcgttnttttgtcattgaggtgccactttgagctgccaggttctccacctttgggcgtattctttgaaagatttatgccccctttttgcacatgttctgtagttgcatcctatccgaagacattatactgacactgcctaacgaaggcaaccactaggtccttccaagaatggactcgggaaggttccaagttagtgtaccaggtaacagctacccagtaagactttcttggaaggaatgtatcagtaattccttatcttttgcgcatgcccccatcttccgataatacatctttagatgcttcttggggcaagtagtccccttgtacttgtcaaagtccagcacctttgactngggaggggtgatgatatt

SEQ ID NO: 20057 - DNA, 438 bp, Glycine max
catatagtttatatgtataaccacatctggcggggtgaccgttctagcacagtccaacatataatcatggggcacgaccagaaccggggatgagaaatgaatgagccatgaaccgagaggatgtctcacaggtagcttatgaagacagaagacactcagtcccattcttagggatgctaggcacacggctgaactgagagaccatgaacctgctaacgggagggcgctattgcctaatcagacaaagatgagctctacgatggaggcttagactagtattgcacatcaagaggcgggacggacgcacggagtgagcgtgactagggctccaacgaatgggacgagaagagattcccccatgcgatgacgataattcatatacaagtgagggcctgaatcgccatttagctggtgacaacatacagcacatatggcaag

SEQ ID NO: 20058 - DNA, 254 bp, Glycine max
  unsure at all n locations
actcaagctcaccaccttgaggacaaggaggattatcaagggccatggaacgatatgtatactcacgangcaccaagggcaacggcgcaggaggaacgacagaccaacaccaagagaagggtgaaacagccaacttacctggaggacgacacgacttgagggcattgccggaagaagaacctacgaaccacgagcccaatacagctcgtcgtacatgaattctcagagcccacacatgcaaaacaacaacgaga

SEQ ID NO: 20059 - DNA, 334 bp, Glycine max
  unsure at all n locations
agcatgcgangttatacgtcgtgtatcagatgaccaatggtccctgctgctgtgctccagatttcataagaatcattggtggataggcagatagataagctagactattatggccttcactcaagaatcatctttcttccactatagacaactttgtctatactatatgtaacaattccagagttaatttttggagagatacctggtgcttggattgacccatctatagagatttgctaattccccttcctcattacaagctcctttccttatctgtatctgacttcaggcacctaaacaactggatcatccctacaaccttcttgatcgtgtt

SEQ ID NO: 20060 - DNA, 394 bp, Glycine max
tcgctctgcgacaaatactcagatctcttcgggaacgtgaactctatcttctatcaccttcgtctacgcgacgccaatcacaacccaacaagttccaacactccgttgaaccaccgcagtcttgtaaagctcgacattgcgaggtcctatcttatctttcaggaggcaccttccctcgaagaaggaatactctatttctctctcgatctcgatcctgccatctaacaacgtacatgtgaaaagatcacaagttggaatgtttagttgagactaaaaccagatcattgcattactactttggaagctataatgcgatgagaaccggagaatgctccacacataagctattggctaccaagatccattactctaatttcagacatattattatgtt

SEQ ID NO: 20061 - DNA, 429 bp, Glycine max
  unsure at all n locations
agcttgnggtgtattntgtctcttactgttctattgccagcttgtttagctattaaacttacctattntttcactttttttttctgactattcattattataatattagtaaataactctagaattttgttgatttgtatatttgtgttatttttcatatttagaccttgtatttgtatcttttgtgttttcatcactcagttccatttcaatatctcagttgcacacttcttttcaaagaatcattatacaagtatatatatttggactctattttccttcgtaaaaaangtttgctgatctttctttatgactaatgtcagaaggtttcatatcaaagtatcgtacatgatgtttcagtagaaactaactggatatttgacatggattctcttggtggcaattatcagtatatgtacaaatatatat

SEQ ID NO: 20062 - DNA, 476 bp, Glycine max
  unsure at all n locations
gcttgttggtccaggttgcaggaccaatacacactcaatntgcttttatccaaccttaccaacaaggttgagtataatcgaaaaataatggaattcttcaagtatgtcattaagggtttaattcttcttaatgtgtatgaaaaaacaaactttgttgagaaaaacaaaatttactagaataatctttatgtctcagaataaattagtctttgaggatcacttaagggatattcttggtgaaaataataaaattaaatccaaccttcaacttcatttgaaccttaattatgtaaaattttcaattattatanctatttatatcatgctatgctcatccatgtgcacacaagtacctaaacactatacactangcttagaattagcctattcttttccaaatttaccgtnttagaatgtacgcgcnctccctatanggaccagctcaacaaaatttggttgcgttgtctatatcaatg

SEQ ID NO: 20063 - DNA, 353 bp, Glycine max
agcttatcatgttaactatattgaagttgtgtttttgtactttctttctcgccaaaacgcagacaccaccaccgtttcctccgttacgtaattaagacaaaacgcacggaaaagtaacattaatgttgattaatgttgtcgtttggcgtcggtttcttcgccattaccaaacgaaaccgcgtttatttcgtctggacgatgagacagtcgcggtgggccccgcgcagtcaaatggccatgttgtcccgggtactgacgtgttagatatgacttttcttttggtgagatgacagcgataaatccgacctgagtggcgtctccgacgcatagatcaagcagttgacggcggagct

SEQ ID NO: 20064 - DNA, 457 bp, Glycine max
cgccgccgccaactccctctccacgcagctgccagagttctgcttcgtcgtccacctcctctgcttcccggaggtccagcccagcctcgagaaacacaccgaagacgtcgatttccaaacctacgataactctcagaacttctccaactacggaacgagtcgacccggcggaaccgactcgttcagaaactacgccaccaccttctccagccgttccgacaacagtttccgccgctacagccgccgatccgccggccacgaggacagcttcgtcctctacggaggctccatcggcgacatctaccagaccttcaacacctatggcacttcctccgctggcggcgccggcgagttcaaacagtacgccaccgaatcaaacttccccgagcttgatttcaccacctactccgacagctccggcgggaggaggcagtcgttctcgagctacggcgagaac

SEQ ID NO: 20065 - DNA, 477 bp, Glycine max
  unsure at all n locations
natcttaacatanaaatgacatgctaatccctctgatttagaactaactcatgcacacgtttagtgtaacacatttatgcacaggggtatgtgtaaaatatcctactatttatgtcaacgtacaaggacatccaacacattctagttaccatacatatatatatatatatatatatatatatatatatatatatatatatatatatatatatatatatatatatatatatatatatatatntctgaaaagaacacacattctcatgctcaaggcactgcgtgaaaattcacacctaatcacattctatatattttgctatcacacactacctacacatatttgaagcacatatcataagatattcattgtgtcactcacatttatttatatgcatatnggagagctatatacgtcgtgcacatacttgcatttaaaaaagggaattacatgccctcatacattcatttatgaagcgn

SEQ ID NO: 20066 - DNA, 412 bp, Glycine max
  unsure at all n locations
agcttagaagttatctanaatggcatatcactaaattggcttcaacacaaagtgagcttgataaattgaagcaagaaaatgaaaaacttgtttcaagttataaagcaaccggttgtgtttgtgcttctacatctcttaatatggattattgcaaatctttgcaagatgagtttgaaaagtttaaaaatgatcacgatgaagaaagtatgaagttgtaaactgagatttcctatcttanagatcatttgaataaaggaaagagtgatcttagtcacttactcagtgtgcaaaagcatactaccaataaaactggtttggggtataatgagcaaattgacttttataagaaaactaagttngcaccctccaaaaaggtgaacccaaacaaagtctccaaaaagaanaacatagt

SEQ ID NO: 20067 - DNA, 463 bp, Glycine max
  unsure at all n locations
ntataacggaggacaactagagcgattgatgaccatcatctactttaatgacccttgagaaggcctagtgtctaactaaggacaataaactaagcgctggttgggaggcaagccaacatattttgtaaaaatggagtcatttttttgtattcattccaaaaaaaacagcccaacagctgcaaatagaaaacaggaggtgcagaaagtaaaggcccagcaggtgaagtcagcaataggagaggtgacaatagcaaaagagaagtgggctacacgaagccacgcgcttagcgcacgtccaggcgctaagcgcccaggtacgttttcaaatttttgaattttaaaattctaagggaaaaccaagggacgcttcccttggtgcgcttagcggccatgtgcgcgctaagcgcgtgaatcataaattacagggcagttttcgaaactgcctgacccctcagtgaccttt

SEQ ID NO: 20068 - DNA, 413 bp, Glycine max
  unsure at all n locations
agcttgtaggattatggngtatccatcacatgtggtactaggtggcggtcgggcgatggtgcaaaacaattctccacatccacaaatcacgtataacccaccatcccatgttgcccacctcaactgagctcacatactcccacgtagcccttatcctcgttcctctcaacgccgggtccccatcaatcctcccaagcttccacaacatccaagtaattcaacatccaagcatcatgaactaacacatccaagaaaacagggcagaggcagaaaactctgcccaaaacacaaaccaacatcacaacttttcacactcaattaccccagtaatattctcttcgttccaattcgttaaccgttggatcgactcanaaattntactggaagtctctagcacataaatctacattatg

SEQ ID NO: 20069 - DNA, 457 bp, Glycine max
  unsure at all n locations
tgctatttganactatagtcattntcattgtcatgtgaaaacacatacacacagcataacaatattatggaaattattttccagaaattactcctaccaaaaggattagtaccagcttattgatcatacaaaaacctatgttccaaatcacccaaaataaaggatggactatctttttttttctaatgaaagttgttgagaatcacgaatttaatgtataatgatatgataggatatgatatctgatttagaggaaactgaatatcctctaattatgtataaccaatactacctgtctatataaacaagcatctgttgtgtattctaacacactgttttagtctactatccctctatattttatactattttacaaaagtaaaccctttgaaacanattangagcaganaananaaacaagagattaacaatacaaaatggagtgcctcttcaaaca

SEQ ID NO: 20070 - DNA, 321 bp, Glycine max
agcctgtcggttgcgattgacgaagggcgcacaagacgacgttagtctctgcatgctatcaggcttttcgtcttacagacagcaaaaaagaatgtttatacggataaccactcgggtttttccgcccgtcagcgtgactcacatgtcagtatgacaaatcttgtgagcgcggaagatgacgtaaatctccgcgtgtcaaagggcttgtcggccgcgattgacgaaagacgtacaagacgtcgttagtctctgcgtgctatcaggctttacgtcttaactgacaccaaaaagaatggttatacggataaccactcgggtatt

SEQ ID NO: 20071 - DNA, 393 bp, Glycine max
  unsure at all n locations
agcttcttttgtttgggatgtgtgctctatcacgcaagattgtatggtcactagcagccatattcttaattaattccatggcttcttcaggggtcttcaattntatttttccccctgcagaagcatctaaaagcttcttggattgtggccttaacccgtcactaaaaatattgagttggattggttctgaaaatccatgagtaggtgtctttcttagtaacccacgaaatctttccaaagcctcactcaaggactcgtctggaaattgatgaaaggatgagatgacagcttttccttcagcagtcttggactctatgaagtatttcttcaagtatttttcaaccacttcattccaagtcttaagactgttaccttataatgaatggagccatc

SEQ ID NO: 20072 - DNA, 468 bp, Glycine max
  unsure at all n locations
ctttattcttagttntgccgaactgatcaaaattcanatgatctatggcnccttcattttatttcttgagcaaactaatgctcagacttggtactttaactaatctttggtcttcttttctatgacagccacaaaatgttccaggaataggtgagttggctcttggtccgctcatgcttggggcttcanatacactgcttaacgctgaccattacggtgtctatttcaaaggaatgcctctcttgaatggaaaggtgggcataccattctcctttatgtggtaattgggtatctggggtacctgaaaacttacggttgagtttgtctaatcaggtattacggaggcatggagatgtatttgagcgtactgctagaggatactatcatgcacatggtcgttcggatgatacgatgaaccttggnggaatcaaggggaaatatttgcctatgtattaattattaaaatag

SEQ ID NO: 20073 - DNA, 447 bp, Glycine max
  unsure at all n locations
ctcatgtcaacgatggagcaaatgctagtgctgttgggaggtttctcaattgctgatttctacccttcaatcaaagtgcttccattgctcacaggaatgaaaagtaaacttgaaagggcgcacagagagaatgacaagatcctacaaaatatggtcaaggatcacaaggaaaatgagaacaagaatggggtgacgcacgaggatattattgatattcttctcanaactcanaagagagatgacttggaaattcccttgactcacaacaacgtcaaagcactcatctgggttagtatgcaattttctttaacattactttaagattcccatgtatacaactatatacgtgcatagatatgaaatttgctgaaataataacttacactttaatatatatagagagagagggagagagagaaaattgagtagcgacttattaataaaata

SEQ ID NO: 20074 - DNA, 464 bp, Glycine max
  unsure at all n locations
tcctcggagccatttcctacaaagacacatccaactaatatttatcatgaaaattattttgcatgaaatacataaccatactattttagttatcccaagtatagcaaccaagaagtcaaccaattcttttgtggtctttattaattgtaggtgttaccatacaactaataaagatcaccactcaatgtgtattattttgaaagaaagaatttgatattctgcaaccatttatgcgtaatgcacccaccttggtgcagcaagtttaaccaaacaaataggccaattcaattcgaacaactttaagcattcatatgacttatgtaattgcatctaaagcaatgtccaaaacctcaagtttagctcacccttggcatttaattntaacaacctaagttgatcattgtcgcgacctgccctccgcgtgggccaagggtgcgtcttccatcanaggaaaacgcgtggag

SEQ ID NO: 20075 - DNA, 382 bp, Glycine max
  unsure at all n locations
agcttgtaaaggcttagagaatatnggctgtatgatcctgtggaggctttagtatagaaagaataccataaagtgcttgatcttagtggaaagcctacaggtgaaggtattggatgtagccagagtggggtgaaccaatataaatcattggtgtttcatttgcttccttactacttattgtttgatgttgcgtgttgaagttttgtttcagaaaaaggtttttataaaattggtttaatatttagaagcaaaacctactttgttctaagagaagagaagatagaaactcatagtcaacaggttttgtatcatttgtgagtatgttctgaagtagtaaccaacaagattacttggaagtattacttgaaaatattcaccaatc

SEQ ID NO: 20076 - DNA, 327 bp, Glycine max
acacctgacatcacctatgcaggaagtgtttgtgcaaaatatcaagccaatcctaagataagtcacttgaatcaagtagagagacatctgaaagatgtatatggcaccagcgactatgggattatgtactgccatcgttcagatccatcgctggtcgggaatcgtgacgctgattgcgctggacgtgcacacgacagaaaaagcacttctggagaacgttcctattggggaaccaatcctatatcatgggtcaacaagaagcagaactgtgtgtcctatctactgcagaagccgagtatattgcagcaggagacactcgacacaact

SEQ ID NO: 20077 - DNA, 413 bp, Glycine max
cgtgcgcacatcgttcacttatatgatatccactccttatgtttgaagtataggataccttcagccacttatcacaacgcggtggacaaaagtgggcagaatacattgaatggacatcacagccaatgcctaacgtattatgtgcttcactatacatgtccacacattattgcagcttatcgagcgtgaactactaccaatatatagatgttggttacacaaatgagcacattttaaaagcttacttcgcacaatgatggtctcttgggaatgaagcggctattcctgcttctgatgacgcatggacacttatccctaacccaactacaattcgtgcgaaaggtcggcctatatcaacaaggataatgaacgacatggattggctcgaaccatctgatcaccgacaaatatgt

SEQ ID NO: 20078 - DNA, 288 bp, Glycine max
agctttattagaacaaaattgcctaaatcatttccaaatatgcatgtgaattaagaagcatcaacaagaattaagccatggctattgtgcaagcaatcaatggggcaaaaacacaccaaaagattatgatgatggatggctcaaattctcacaaaggtaaacttatcactttcaaattgagctttcaaaactatcatgacatgtagaggaaaaataacgattttcaatcacacaatgtcaagagacttttattttcagaacaattacccatttcttgaacatatccta

SEQ ID NO: 20079 - DNA, 432 bp, Glycine max
tgtgaaattcaccctgatcccgatgccatacgccgacttgttgtcggccatgatcaccaaccaaatggcggtggtaaacctagggaagatctaccagtctcccttcccttgatggtacaaccccaacgcaacctatgcttatcatggaggtgtctcggggcattcaatagaacaatgcgtggctttcaaacacaaggtccaaagtttgattgacgcagggtggctgacattcaaagaggacaacctaaatgtgagtacaaaacctcttgccagtcatgggggatccgcagttaatgcggtggaggagtataaaccttgggggctgaagcagatggaagatgtggtaacctctaggaggtttatattagaatcgttgtgcgaagcgggcatgatttgccttgacgggcataagggagattcttgtttgatgca

SEQ ID NO: 20080 - DNA, 374 bp, Glycine max
  unsure at all n locations
agcnttgatgcatcatttggagaggttaatgaaacaacgagatgatgcgctccatgagaggttggatcaaatggagaatagagatcataatgaagaagaaaggaggagaagagggaatgatggtgttcctagacaaaaccgaattgatggtattaaactcaacattcctccatttaaaggaaagaatgatccggaggcctacttggagtgggagatgaaaatagagcatgtattctcatgcaacaactgaggaggacaaaaaggtgaagcttgccgcccacggaatttccgactatgctcttgtgtggtggaacaagctacaaaaggagagagcaagaaatgaagagccaatggttgatacatggacggagatg

SEQ ID NO: 20081 - DNA, 439 bp, Glycine max
  unsure at all n locations
acactataaaactaagcttgagatattaaacaacaatactnttactcgttgtctgattgagtcatgtaatatttcgagacgctcgaaattgaatacggaagctctgagcaaattcaaacgacaataactttttactcggatgtctgattgaatcccataatatatcgacaagctcgaaatagaatcttgatgctctgagcaaattcaaacgacaataactttttactcggatgtctgattgagtcctgtaatatatcgagacgcttgaaattgaatacggaagctctgagcaaattcaaacgacaataactttctactcggatgtctgattgaatcccataatatatcgacacgctcgaaatagaatcttgatgctctgagcacattcaaacgaccataactttttactcggatgtccgattgagtcctgtaatatatc

SEQ ID NO: 20082 - DNA, 366 bp, Glycine max
  unsure at all n locations
agctttttatagtgcagaaaatgttaggtgcaatgcagttgcacacaaaatgctgacttttcgtacaagaatgatgaggtcccacttacacgcatatgttggatagcattccaaggtattatagaatttgggaatacattnttatatttcatcaacattttggtaaccccaaatgtattaaatagggtaaaagccattttcaatctcaataactgatgttcttttatttagagatttaggagttcaaaataagataagaggttnttcgttgtttactacaagtcttagctagaatcacatgaaattcanaattaaatatatcttaccaacatcaaactccaatgttgcaacgttgaagtccaacac

SEQ ID NO: 20083 - DNA, 433 bp, Glycine max
tattgtatagtgtgaaaaaagtatgtatataaaaatgtatttgtatatatcacagatattcaaccaattaaataatcagtaataataattaatataaaatgaaaacaaatatatagaaatgataaaagaatagttattaataaagcaaaagagataaagatagaagatactgacaaaaattaggaaacatgaaaactactattttacgtatttgttgcaattgataccatttctatttgtttaactatattgttgcataatattaatatgttttacatgtacaggacatgctctgctgcttcaagccaactgtggacatgaatcttacatttgaggagatataagtttgtgcatatgtgttcaaccctaatgtcgacccgaggtacgtagctaacagtatagtgatacttgtagataagttttcgttcatata

SEQ ID NO: 20084 - DNA, 389 bp, Glycine max
acttctatagcctatgtaccataggcatcaagctaatctattagagtagacgagtagaatgactccctattctgtagtaattatagttaattatgttagttgacctcaaccaaccttacgttactcgtcagttactactgttagatgtaataactgactagctgaagaataagtactacagatgttactgacttaactagagtaggatgatgttacaactccattcccgaattctgagatcacaccctcttttcattaccgaaataatgttatggcattatagagcacttgattgcatcctgagtaacaaaggctttcgcaaacacatgatgggtgataagaggagtgctgctgttggatactaacaataggttgtgaatatgattagt

SEQ ID NO: 20085 - DNA, 365 bp, Glycine max
  unsure at all n locations
agtttgttggattatggggtacccgtcatatatggtactaggtggcgatcgggcgatggtgcaaatcaactctcccacatccacatatcaaacatgaacccaccatccctagttgcccaccttcaactgagctcacgtactcctacgtagcccttatcctcgttcctctcagcaccgcatctctggttccagtccctcgcgtttctctgcacccgtcggggcccgttttcgatagtaggcaatatatatatatatatcanaacgctcagaatgaaaccctganggtggttcagaggttaggtttgtaaatttttagtggcacgcaaaacgaataattttagactaattaattgagaataatctat

SEQ ID NO: 20086 - DNA, 425 bp, Glycine max
tgtgaagataagcaattatttctttaaaataagtttaaccattgaattatggctcaatatgtttgactgattacccaagccattttggggtagggttgaatatatggcaataattgacacctggtgccttccacattttgaaatatgacagaatcgtaactataagtgtcacaattatcctgtgtagtacgttattttgattggcataaaggaacatgtgatatgatattttttagtatttacatttacttatcactatgtatttctttcaggttaataagaaatgtatgttttaaatttttgcttatatagtgttaactgctaaggaagctaagctatcttatttttatatagatctaaaaattctagcactgatatccagaattcattatggcttgagctgttttttttctttgtctaacagt

SEQ ID NO: 20087 - DNA, 325 bp, Glycine max
  unsure at all n locations
agcttggattatgagtgagatagaagaggtacaggaacagatgaaggctgacatggaggccatgaaggagcagatgacaacgatgatggaagcaatgatgagcatgaggaagatgatggaggttaacaccgctatagttggtgttgcaagcactaatactgaggtggacccgatccacccgtccgatttcaatcgagtgggtcgtccggtctcggatgtagtaggccaaggaggcaaggcagcagaaaatgcatggnggccccattatgttgaagttcagagcaagcattcttttccgccatatggtntgcctcccaattataca

SEQ ID NO: 20088 - DNA, 418 bp, Glycine max
  unsure at all n locations
tatattntacaataaaaatatctgtttgagagatgttttgttgaccttagccaaacaatcaatccacaattatttttcaattattattctaatcgattttttttttgaaatttaaccttttatttcagttatttactcatattcctagtagatcacctttagtgaaataagaggctgatttctcctcttagtgatcatatcgattgattcaaacattcaaaacattcaaattttgaaatcatgttagagtagttgtagctgaattttgttcgactaattgttgattattcatgtgaaaaaaattggcatgtctggtacgaccaatgtaggtgaattgatcaaacaatttgaatcacgaacgaagttttaccaacatatgcatttgcattctcgtaagactactatgcgtgagatgaat

SEQ ID NO: 20089 - DNA, 371 bp, Glycine max
  unsure at all n locations
atctgctcgtcttgctgatatttatcatgcacactnttctgatgatgacctangaacaattagggatcaacttgaaacttatgtgcttcaagtgagaagaaatgcttctttgtccacttgtgaagatgttcaaagtttggctatgaagatggttcagactgagaaacatttggtatttccattggtttataaacttattgagctagctntgatattgccggtgtcgacagcatccgttgaaagagctntttcatcaatgaagattatcaagtctaaattgcgcaataagatcaacgatgtgtggttcaatgacttgatggtatgttacaccgagcgggagatattcaagtcgcttgatgatattgatatta

SEQ ID NO: 20090 - DNA, 432 bp, Glycine max
tgtgaaatcaatggaatccaagattccgtttgactctagtcgttcaattctattcttagaaatgtgacctaagcgtttgtgctataatactcctgagtttgtatcatcaattctaagcttagtaccatgcaatcttgcattaaaggattcaccataggaggctacagtatcaagtaaatgtagattatcattaagcaagagtgaaccagatccaacaatatctgaattaaaagacaacctgaacacattgtttccaaatgaacacaaataacctaatttgtccaaataagaaacagaaaccaaatttcgtctaaatgacggtacaacaaaagtgtctttcacatccaaataaaaaacagtacataataaaaatctaaagtgccctatagctttcacttccaccgatctaccatctccaacatagatcaatct

SEQ ID NO: 20091 - DNA, 409 bp, Glycine max
  unsure at all n locations
agcttttcgattcattctatgtacccgtagtggtccacattgtgtttcgtgcatttttattctcgttttgtttactttttataccccctgttgacgtgcttaagccattttacttaagtcgtttctcgctcaacttaaaagtaaaataaatttccaccgaacgtttgaattgtattatccattaacttcggttaaaataaattccgaccgttcggtcatgccgtaaccacgttggaaatcaaaaagaggtaaaaaataatataataatcaaaaagacatcttttagtaaaataaagcggaaaatcaatcggacgttttctctttgggatttctcattcttaatcgaattgattaataactaaagtgaaactaaggctaanatcaactcgcctagtcaagctcgtccaca

SEQ ID NO: 20092 - DNA, 432 bp, Glycine max
tatgcgcatatttccttacaaacgttctcttgcacttgatattctattaaccgaaaaaaatgcacccatatacaatcaaggcagcttcgtttacctagattatttacacgtacttccaaggtgtatttgttacttacatcacacacctccttggctaaattcacacacatgcatactcaaagcattttggggtaccaaaaattgcacatgtgcacatcttggtatttctaatacctatacatacacaaacttcatgatgaatcttgactatctacacaataaggtgctacattttatgctcttttcaagtttttgctacctaaagccgcatgcaaattcaagtatattttcctttgctgactaaaattgtattcaaattaaaaggtatacattctctggtaatgtatcttctttacataacatgcaacatat

SEQ ID NO: 20093 - DNA, 430 bp, Glycine max
  unsure at all n locations
agttttataatgtagcagttccagggaccatcgacgaacgggcgatcaatacaaaaagaatactcaatccatgggaaaggaatgaaaatcacacactntgcctcaactctgctaaagcaattggatgtacagtggtcaacattggcactcangacttcattgaaggaagggtatgtttgtaggccttctagtttccacccataaaagcagaattattgtgggcatgtacactgcagaaccacaaaatttaagatttaatttaatttataaatgaaatctggtcagatttgattatttctcgatcaaagtaattctcaatcaagttaaccccttttttaaatgattccgaatgctggtaaagtatctntatagcatgctacattnttttacagtcaaagcctntctctattctttntggcaatgctacaca

SEQ ID NO: 20094 - DNA, 429 bp, Glycine max
  unsure at all n locations
tgttgaagtctaaatagatggtgactagacatttngtgattcaaactccatagaaggtatatagcaactatttaattaaaaaacaacctaagaattcatttagttcatatatttcgaggagagctactggtttgtttggagtagtgcattcagatgtgtgtggaccatttatggttccttctcttggtgggaacaatattttgtttcctttgtagatgaatttagcagaatgttgtggatctttcttatcaagtccaagtcaaaaaaattttcaatctttaagaattttaagttacttgttgaaaagcaatctgaaaaaacatattaagatacttatgactgatggtggagttgagttgagtatacctttaaagagtttgaagattattgcaaaggatntggcattcaacatgaagtgatattaatatg

SEQ ID NO: 20095 - DNA, 344 bp, Glycine max
  unsure at all n locations
tttatctttcttgtggggcttctatggtggctggatctttgagcttcaatgaggtcctttaatggtgattttccaccatggagatgcagcggaagacaaaggagaagatgtgagaggaggcaccatccactatggaataagccatggaagaaagagcttcaccaccaagatgagccttggataagaagctcggagaggatgcttcaatggaggaaaagaaagacggagagaaagagagaggggggagcacganattgaacgaagatnaagggagagaagttgaactttgagttgtgtctcacaagactctcattcatcanagttacaacaagtggtacacatgc

SEQ ID NO: 20096 - DNA, 432 bp, Glycine max
tctttaagagtttcatgcagtacaacctgcccactcttcaattatgcaaattgggggatgcaacatctgtggtggggcccatgagttaggtaagtgcatatcccaacacgatgcatccaaagaattcaactacatggctaatccatatcatcaagggttccatcaaggaggacctcttcgatacaatcagggagaaactttttcttaaggccaaggttggagatcccatcctgggaataatttcaataaagatagacaatccatccatttcaccttccaaccaagggcctaatctttatgagaggaccaccaagctagaagacactctgactcaatttatgcaagtttccttgtcaaatcacaagagcacggagttagctatcaagaaattggaggtgcaagtgggccaactacctaagcaactagatgaag

SEQ ID NO: 20097 - DNA, 264 bp, Glycine max
tacattgatgtttgtatttatgggaggagggtgtatgtcatttttggtttaaaaagagtgtcccactggtaaaactaactttccaaatgtttgccttctcacgaaatggccccgaggaagcttgcctcaaagaggtccccgaaagacaaagcagccgaaggaactatttccgctccggagtatgataatcaccgctttatgagtgctgtacaccaacagcgcttcgaggccatcaaggatggtcgtttctccgggagcgacgcg

SEQ ID NO: 20098 - DNA, 429 bp, Glycine max
  unsure at all n locations
actcagcttggcaataagtactcccgcatttatctctgtatgcattgtatgtaggtctcgtcctttgtcacgggaagccggaaggtccatatcaccttcttaattgtacacatggggcactgcgcccccaaatgcacaagtaagaagagataattttccgggctctcgtgtccgtaaaatgcattcatatcatgcaccacataagcatctcttcataacatcataatggacatatcctgcatttgtccgttatcatattccagcctcacattttgcatgagtcatggcatcatcatgcatatgcgttcaacaaactttttgatctgcaaaattgcataccatttgttttcatgtttgctcatccttgcgttntcctctacaaaacataaacaaaaaagggggaagcgtgaaacttcacactacattctt

SEQ ID NO: 20099 - DNA, 236 bp, Glycine max
tatctcttcaaatcattttgaaaaggcacgaactacctatatatatgtgtgtctgatttcaaaaagcaagagagagatattccaagagaacttcattgtcaaatgctctctcaacaacttttgggcacacacttagcaatctattaagagttcatccaacaacttcaatagtaatatccttcttttaaagagagaattcttcttcttcttattaaaagagattgattaacggaccg

SEQ ID NO: 20100 - DNA, 430 bp, Glycine max
tgataaatctatatatggtttaaaacaagcctcccgtttttggtaccttaagtttcatgggataatttcttcatttggttttgatgaaaaccccatggatcaatgcatataccacaaggtcagtgggagtaaaatatgttttctttttttatatgtagatgatattttacttgtagccaatgatcaagttttgctacatgaggtgaaacaatttctctctaagaattttgaaatgaaggatatgggtgatgcatcttatgtcatcgacattaagattcatagagatagatctcgaggtattttgggtctatcacaggaaacttatattaacaaaattctagagagatttcagatgaaagattgttcaccaaatgttgctctcattgtgaagggtgataggtttaatttgaaccaatgtccaaagaatgac

SEQ ID NO: 20101 - DNA, 412 bp, Glycine max
gcccaaaccataacttcgatgatgttgcacaactgcctatcttctatagtggtttgaaacctcaaaccaagatggtcttgattcctcaactagaggcactatgatgtccatgagtccagaggaagctattataatgattgactccgtagcagctagtgattatcaaagtcatcacgatagagctccaactcaaataaaagttataatggagttggacacttagaaaaaaaactcttgacacaacaaattgaggccttaacaaagcagatatgccaacttccacagcaatatcaccaaggtggaccacataaaaaaaattaagctcaccgagttcaacacattttgagatgtgaattctgtggtggtaaccatcataatggccactgttcagcacctagtgatggacaacaag

SEQ ID NO: 20102 - DNA, 433 bp, Glycine max
  unsure at all n locations
atgctgcaaacatttataatagacctcctcaacagtctattcaacaacaacagaataattatgacctttcaagcaataaatacaatccgggttggaggaatcatccaaatctaagatggacaagtcctccacaacaacaacagcctgttgatcgaggccatacccgaatcaaataaacattaaaaatgcagtatctaggaagtgatcctaggtcgtctcccaatgagcaatggtcaaccaaatgttcataacaaatagtaataaaatagtaacgaattgggggggggggaggatntattttaacaatattgtttaaattttgagttgattaatctcatcacgacatagttatctaccttatttgaacatttggttaataatcatatatatatatatatatatatatatatatatatatatatatatatatatg

SEQ ID NO: 20103 - DNA, 376 bp, Glycine max
  unsure at all n locations
agcttttggtatgatctgggacctaaccatggcagaggtctccacagaggccattgtctccctcgcccaatattatgaccagcccgtgatgtgcttcacctttgtggacttgcaattatcacccacagaggaagacgttgaagaaatcctgagatgccctctgggaggaaggaaaccatacctattctcgggattctatccctctttaactagaatttccaagatatgccaaatctcaacgcacgaattaagccacagaaaggaagtcgaaaatggggtggttggagtaccaatgaaatgctaggaagttaaagcaatactcttggangtaaaggcgaatgggccccgttcatggacatcctcgcacttttgatct

SEQ ID NO: 20104 - DNA, 433 bp, Glycine max
  unsure at all n locations
nttcaattcattctatgtacccgtggtggtccacattttgtttcatgtatttttattctcattttcatttactttttatacccccttttgacgtgcttaagccatttatttaagtcatttctcgcttaaactaaaaataaaataaattttccaccgatcgtttggattgtatcatctgttaattttggttaaaatgaattccgaccgttcggtcgtgccgtaaccacgttggaaatcaaaaaagaggtaaaataataatataataataaaaaaataccttttagtaaagtaaagcgaacaatcaatcggacgttttctctttgggatttctcattcttaattgaattgactaataactaaagtgaaatcaaggctaaaatcaaactcacctagtcaagctcgtccacaataataggtttttgaaagtctatca

SEQ ID NO: 20105 - DNA, 341 bp, Glycine max
  unsure at all n locations
agctttatatacaccaacagcaaattttttttcaagcaccacaaactctaactcaaactcaaaagactcaaacagaagagaagaagagaatgcatatttggtagatattctatgtgcaaacagccttatttaaagggaaagggaagaggatggtttcccctattacgtttcaactgttctgaaccttgaaaatatcagtcatgttcaattntttcttcattatttctgcaaatcctatacctgaaccctagcaaagagtacaaagccatgcatgaaccccctatactgaacctaccctcatgcatgttgcactgcacgggttgtatcttgctagtttcact

SEQ ID NO: 20106 - DNA, 408 bp, Glycine max
tccaacacacattggttgtatggacaggtttgttattgtattgacaaaacaccttttttgaggagttgggagaggtggatcggttgaaggatgatccatgatttgcattataggacttttgtggtaaggttgcttacccttgtgtattgcatgagcaatggcaacaaatgaggtatcattgttgttgtcatccctcttgagataactctcaaagtcaagagaagatcatgaagctcttcaaagtcaatcggtttttcatgagtgtgaagagctgtagaaacctccttgtactcagcacttagcccatttaaggtgtgaatgacaatgtctgcatcgtccagtggatcattggtgatggctaattcatcagtcaaagattatattccatggagataatcactcatggat

SEQ ID NO: 20107 - DNA, 393 bp, Glycine max
  unsure at all n locations
agcttgtatggttaaagtctcacgattttcacgtgctcatgcaacaattgttagtcgtggctatacaagacatcttgccaaacaaagtcaggttagccataactcgcctgtgctttttcttccatgctatatgtagcaaagtcattgatcctgtcaagtttgatgagttggaaaatgaggccgcaattatactgtgccagttggagatgtttttccccctgctttctttgacatcatgattcacttgattgtgcatttggtctgagaaatcaaatgttgtgatcctgtttatctacggtggatgtacccggttgagcgatacatanagatcttangagggtatacaaagaatctatatcgtccagaagcatctattgttgagaggtacattac

SEQ ID NO: 20108 - DNA, 434 bp, Glycine max
tcttggatgcttactccagatacaactagattaggatttttgctccaaaggaggcgaagatgacatttatcactaaagataccaacttttgctaaagggctatgccctttcagcctaaaaaatgtagacgctacataccaatgactgatggaccgagtctttaaacaacaaataagacaaaacatcaaggtatatgtggacaacgttggcggtaagtctcgaagcatagtccaacatgtggcagatctgcaagaagtcttcaaggaactttacaagtatgacatgcgcctcaaccctgaaaaatgtactttcggggtaggcagaggcaagttcctcgacttcatgatcactcaccaagggattgaagccaaccctaacaaatgccctaccatactagagatgcacagcccgaccaacatccaagaagtctagaa

SEQ ID NO: 20109 - DNA, 386 bp, Glycine max
  unsure at all n locations
agtttatagtcttcttgatagaggaataacaaagatcctaatccactagtacctgttgataaaatcaaacaaaacaatgtaattataattttaattaaaaaaagacataagttttttcaactttatttttttcatttatgtccttttataattgttctcttatttttaaatttacgtatccattaaataaaaaaaacgtagtaatcaagaactgaaaatagaaaatataaatttttaaataaactaaaaataatgtgtagataaacggataaatcttcaatttctaaataaatggttgaaaataagaattatacctatntaatttattagtaaaaatcattttaattaacttaaaatacattntgtcaactataaatagagaatac

SEQ ID NO: 20110 - DNA, 472 bp, Glycine max
  unsure at all n locations
aggcgcaatgatccgtggattctcaggaccttgaaactaagcttggcattgtataattttctaaaagattattttttattntttatttattttttaatttgtagataaataaaattattaatttttaatttatagtagtatattaaatacaaaagtagatataataaatgtgaatattacttttgagtgttcatttttatattatggatattatttaccatctaattgattttttgtgtttataattaatcaatttaaatgtattttcagtaaaattaaaaaaatttaaatttgttaaaattgtgtgatttattttatcctttcagagttatttattttaacaatattgtttaaattttgagttgattaatctcatcacgacatagttttctaccttatttgaacatttggttaataattatatatatatatatatatatatatatatatatatatatatatatatatatan

SEQ ID NO: 20111 - DNA, 377 bp, Glycine max
  unsure at all n locations
agctttacattatattntagtaatgacccactaacctagaattaaaataacttaatgccattaacctagggaattaaaaaaaaaaacttaatggctgagtgtaactgaaattgtggcaaccaaaagtcacccccaacagccaacaagtcagccaccatttggtctcccaaaaggttgaggcctaggttgccaattgggcccttattacaacttgaactaaacctactaaagccctttaagttgattaacccaaaacatatttttggtcagccaactntacaaggattgggccattatttagacaaactaaacactctaaaattgagacaaagtggtgccatttagtccttctccatttgngccatgatacaactcac

SEQ ID NO: 20112 - DNA, 425 bp, Glycine max
tgtggattaggggttggttgtgcatgtttggcagattttgtagaagcttgtggttaaagggtctgttttgtctttctcataatctttgaaggagcttgtagttaaggggtttgttttttctttttcacaatatttgaagaagcttgtgtttgaggtgcttgtttcctttaattcagctaaccaccttttggttgaattccctaaaccaataataagtgtcattttaagtaattaacatataaaagatgttaactaatgtaaataaagattagagacttaccaagttactttccttattagttgctgcatctttgtcatttttcgtgtgttgagggataagttctttcttagcttgattgaataacatgtactatgttgtcattcctagtgactctgctgtcaagaactgtgttgttattgtggcg

SEQ ID NO: 20113 - DNA, 359 bp, Glycine max
  unsure at all n locations
atctttgagcaaattcaggcgacaatatctttttactcgtatgtctgattgagtcccgtcatataacgagacgctcgaaattgaatgttgaagctctgagccaattcaaacgacaataactttttactcggatgtctgattgaatcctgtcatatatcgagacgctcgaaattgaatgttgaacctctgagcgaattcaaacgacaataactttttactcagatgtctgatatagtctcgtaatatatcgagacgctcgaaattgaatgttgaagctctgagcaaattcaaacgacaataactttntactcggatgtctgattgagtcccgtcatacatcgagacgctcaaaattgaat

SEQ ID NO: 20114 - DNA, 427 bp, Glycine max
  unsure at all n locations
tcaacattcaattttgagcgtctcgtaattttactgtattcaatcagacatccgagtaaaaatttattgtcgtttggattggctcagagattcaacattcaatttcgagcgtctcgatatattacgggcctcaatcagacatccgagtaaaaagttattgtcgtttgaattggttcagagcttcaacattcaatttcgagcgtctcgatatatgaccggactcaatcagacatccgagtaaaaagttattgtcgtttgaattggctcaaagcttcaacattcaattttgagcgtctcgatatattacgggactcaatcagacatccgagtaaaaagttattgtcgtttgaattggctcagagattcaacattcaatntcgagcgtctcgatatattacgggactcattcagacatccgagtaaaaag

SEQ ID NO: 20115 - DNA, 360 bp, Glycine max
  unsure at all n locations
agctttangagatctgaaactcaacttcctcttcctccatggaagtatgctgcgcttggaactttgtactaaataaggctgagaagaagaagcagtagaatcctccctctgtgaacacccaacatcagacttgcgatggctgtaataaacccagtcttcatcattacaatttactctcgcattggaatgaaaaaatcccccagcatttgcagaagccagtgttccataactgaatgacttcctaacactggaatcctccttccccccatctgtttcaccttcctcagaatcatcaagtgactcagaatccaaaggataattgtattcaccatcctcactcctagagcaccttncttcact

SEQ ID NO: 20116 - DNA, 414 bp, Glycine max
  unsure at all n locations
tagccattgcgaattatatgcagtcgaacatatattattatgatctttatctttattctttagtataaacagaaaagatcgactttgatcagtatatgtcctatggcaatctattaaacaatttaattaattaattattcgacagaatacatatctgcaagtttcaatatatattttattcaacccaaaacttatctatatcaggaatatgagtaattatgtttcaacaccataaatatttaaagaaaaaagtaaattagttcgatatagctataactaaatcatagcagattatcaatcaagttacatgtagtagtgtatcctattgaaatgaaactatctttgagagtcttatgagctaagcacgttagaatntggaattagggtatcaggtggcccatgcattccaccact

SEQ ID NO: 20117 - DNA, 419 bp, Glycine max
  unsure at all n locations
agttttttcttgtttctctccccatttgaaaccaacatttttcttgagcacttcattgagaggtgctgccaatgtgctaaaatccttcacaaattgtctataaaaacttgctaagccatgaaaactcctcacctcggtcacggacttangtgtaggccattcttgaatagccctaaccttctcctcatcaacttgcactccttttgaactcacaacaaaaccaagaaacacaacatggttagtacaaaagatgcatttttcaagattggcatacaattgttcttctctaagcacagtcaagacagattntaaatgatcaatatgcaaatcaagtgaagtgttatagataagaatatcatcaaagtacaccacaacgaactttcctatgaactctctcaaatatggttcatagtctcatg

SEQ ID NO: 20118 - DNA, 431 bp, Glycine max
tccatcactgtatttggccagtttcatgattctctatattaagaagaaccgatacatccacagtgacaaaattatggtggaaggcaattgtagtgttgttgttcaacacattcttccacctaagtacaaagaacttggagttgtcatgataccgtgttccattggtaaggttgctgtaggaaaagctctcatagacttgggagctagtatcaacttaatgcctctttccatgtgctggtgacttggagagatagtgataatacatacacgcatgaccctctagttagcttattgctccatcgcaagaccatatggagtgattgaagatgttttggggaaggtgaaacaccttatattcccagctaattttgttgcgatagacatagaagaggacgctgatattcctctcattcttggtcccccattcatgt

SEQ ID NO: 20119 - DNA, 404 bp, Glycine max
  unsure at all n locations
catgttagcttcaacccactgataataggacatagactaaaatacagnggtagtatttttacgaattcaattgatatatgatagtggtcaataaacatatatgatctctaaaagcttacatgttgacattgactattcagtttatacctatataaattatctaattctggtgagggattgatgttgaattaaaaaaaactaacggaagatgtaaaaaatgaaagttctcttagccaataaaagaagtaatccttaatagcatgtagaaatgtgggttttctgtctccgaccgagtntgttttcttctaattggatcagaatattgtaacaaaaattgcattttgtgcacattcatttataatatgtaaataaataaataaattgagtcttgtacacattttcag

SEQ ID NO: 20120 - DNA, 430 bp, Glycine max
tgtccagacactacattgattgaacagtataatacatttcgaagaagaaaataggaaaaagcttagatacagttccttggtttttgatgttgttttccaatcagaattggagtttcactttagaagtccacataatatagatttgcattaaaggattctgtagattattgaaatgaaactccaattctaactgaaaacagcaccaattgcacctaaagaactgtatgcaagttttgtccaaagaaatataccttgaaaccgtgacacaaccgcagatggcaagaagcaaacctcgtagaaggaatcatatccaaccaaaagacaaatcaagtaaatgactccacagacaaccaccactgcagaagtgagaaacggaatgctttcccaccattggctcatcctagtaggaaacccggcctgagtcaattaa

SEQ ID NO: 20121 - DNA, 373 bp, Glycine max
  unsure at all n locations
tctagctttcatcaagtggtatcagagcacaagagcttcaagtaggtgctccttaaacctccattaattttcagctttaccttctcctccatttttgtttcttcattnttctccatgtatctcctcacatgacttgttttgaattttgttaacatgattttttagaatttccaccgattaaacttgctatagaagatagatttgattttctatggttcaaatttcttgctcttgttcttgaaccacgaattgtgttgagtttaagttcctttgagtcttgtcttggctatttttgtgggtgaaacctaaaccatanaattcttacaaaaacattaaagtagaagaaaaacctcaaaatatagagtgacttgtc

SEQ ID NO: 20122 - DNA, 426 bp, Glycine max
  unsure at all n locations
tgaacctcatcgccactactagatgactccacttnctatctttctcctaaagacaacaccaagttaaaatcaatcatcacaattacttgccatcaaagctactacctttgcccataacttttccccttaggtcatagggagcatatacattaatcacctttgttggacaagaggcctcaataacttaagagggggagaaattaagtttcaaaatttcccactaactaacttttaacccttttttaaatgataggctcgaaatgcagaagaagaagcaacaatcaatttaataatgttctttaaacatgcaagacaaaattgattgcaataacataaatgagataagggaagagagaaatgcaaactcaatttatattggttcggccacttcacatgtctatgtccagtcctcaagcaacccacttg

SEQ ID NO: 20123 - DNA, 411 bp, Glycine max
  unsure at all n locations
agcttgtatgattatggggtacccatcacatgtggtactaggtggcggtcgggcgatggtgcaattcaactctccacatccacagatcacacataaacccaccatccccagttgcccaccttcactgagctcacgtactcccacgtagcccttatcttcgttcctctcaacacctggtccccatcaatctctccaagcttccacaacatccaagcaattcaacatcccaaacatcatgaactatcaaaaccaaggaaaacatggcagaggcagaaaactctgcccaacacaaacaaatatcacagcttttctcacttaaaaaccccagtaacattctcctcgttccaattcgttaaccgttggatcgactcanannatttactggaagtctctagcacataagtctacatt

SEQ ID NO: 20124 - DNA, 433 bp, Glycine max
tcaatacagtgacactagtgttgcaacaaaggagctgtcttagtcttttggatgggatacatatgattctttcatgcagcatgatgttcaagaactaaatcgggttctctgtgaaaaacttgaagacaaaatgaaggtatggcaagagatttggaatgtttgttcatgattcttcttgatgagtgatcataccaaatggttgttgtatgttatttttcttcaggaaactgttgttgagggaactatacaaaagttatttgaaggacaccatatgaattacattgaatgcatcaatgtagactacaaatcaactagaaaggagtcattttatggtacttccttatgcattttgaattcaattatatgtttagttcttctttgttatgtaattctaatttagtttttgcatatgcatgttagatcttcagcttga

SEQ ID NO: 20125 - DNA, 305 bp, Glycine max
  unsure at all n locations
agctttctgacctgagcatttgaattgagaaaaagctcattatcttcacggcagaattccccaatagcacgtacatcaacaaggttcccagagtctctaatttgaagaatgtgtatagtttgatagcgaagtgatacaattgccaataggtcatcatacaagaagacccccatattatgggttanattaacgaagtcattactgaagaccttcttgtccaagatctctccatcttccagtctaatttagtaattaatacgtgagaaatgggaacaatacataatctagagtgaacagagtatgat

SEQ ID NO: 20126 - DNA, 432 bp, Glycine max
  unsure at all n locations
tcaacaccaaatcctggacagaatctttgttaagtattaaaggatcaatcttattccataaaccacaactctgccaaacctccaagctacaagcacaagtgatgaaagtattgcatgccaacaattcttcaaggcatctgcacatgaaaaagttttgtggatttatttaatcaccatgattacaagtttttgaagaaaacttcgatacacaagccagaggataacgcagtgaaactcatgtaacaataattagggggcatttgttttaagatattgagcaagattttaaaaaatgtgaacctaaaaatatcacattctgatgtttaatacaagttgtaaaaaataattaatttttagaaatatattctaatgaagaatattcttaaaaataaaatttcataacttanaacaagcatcctcttaacatatcat

SEQ ID NO: 20127 - DNA, 386 bp, Glycine max
  unsure at all n locations
agctttgtttgacatacatgaagaaacaaagaatttctcacgagtggactgtgctcagattctagtattcactttgtccctttagatgatatcttcatcgttaaggataataataaatgacaagatttgactggtaagaattgtgaaggataccattgtggtggtaaatcattgaggttataacatgggtagctatagaactaacgaagattgagtttccaatgaaggaagtaaaatggagctcaaaataggctcatccatgttagagcactttatggactttgatctggaggaagataggaataaagaggggttatggaagcangaggcagatcggaaagcacgacaaggtgttcaatcagagaagaaacatttctattcccact

SEQ ID NO: 20128 - DNA, 429 bp, Glycine max
  unsure at all n locations
tgtgcttcgaccaacccagcctcaatttacgtgccattgtgtaagttcttgcttaaaagtgcaaccttcaatgggaaatgtaacaacaagggtatttctataacaattgatggcactttggtggctccttcagattatagggtcaccgaaaactccggtaactggttggaattcgagcgtgtcaacggagtttcgattcacggcggggcgcttgacggccaaggcactgccttgtgggattgcaagaactccggcaaaggaaactgccccagcggagccacggtatgttaaattaattaatttaactctcatggattgaacattattcgttgacatgcacaatttcttgctcccattattattgttntgatttgatgttggaggtggagttgtggacttggtgattactgagagtttcttagtggggga

SEQ ID NO: 20129 - DNA, 390 bp, Glycine max
  unsure at all n locations
agcttgtactctantgtgtgtgtgtgtgtgtgtgtgtgatatgtgcagtangttaacagcttctaaaagttatgtaaacttaggggcaagaggttaacatttgtaaaggacaagcccttcgtcctctcctctccccaatttcattcactactttataagttggtggaaggacctgctctcatcacaacagcagcagcccaacagtgtaattaaaatagagacagcttggaaggtgggcaggggagataaatttagattttgggaggaccgatggttggaatctgaagcactgctaatggagaaatacccaangctgtaccaaatctcgtgtcaacanaatcaaaccataatgcnagtgatgagtcacttgagtagcggatgggaatggag

SEQ ID NO: 20130 - DNA, 413 bp, Glycine max
  unsure at all n locations
ntgcaacaaatagtggctaatttgagggcgatccaattgtatgaggggacccaacatctagaggcctgcatgcgtgggttgctagttacatgtattgcttgtcgctggagcagacccatcaactgccctaactcttttagactggtgatccctaggctcttgaccttgacttgatagaacctctttttaagcgaaggtgtttgacttgatcccatgttttactaaagtgtgcgaatcaaaacttcaacatctatcatgggtgggatggatgaatgcatgaagaaatgcatatgacacaaatgcaatttatgaatacgggagcccgggaaattgtctccttcttagatacaacgtcttgnggtagcacagtgcccgacgtatgtatttaagaaggtgacacaaaccctccattg

SEQ ID NO: 20131 - DNA, 344 bp, Glycine max
  unsure at all n locations
agcttttttgttatagtcactatttacgtatcaactatgatccatatattttcagcattatctattatattctcttaaaaaaatcccaaataacaataactacacatttattcatattaaaagtgaattgacgtgtttgtagaattaattttgaattaacatggctctatagaattgattgtaagtaaacataagtttgtagtatataatatgattattgtttggaaatttgctaccaaaactgatattgtgggcaattactacaatgacttgagttcaagagtacacattgaacaaatagcatgactaataatacgactcaagttagtgtngattcaaaagct

SEQ ID NO: 20132 - DNA, 412 bp, Glycine max
tacccccactattacccacaaccacccaccaaacctttcttgttaagaaaatgacatcggcagaaatgcacttgagaagagaaaggggcctatgctttacttgtgatgacaagttttcccctagccatcgttgtcctaataagcaatattttgttccacagtgggaagaagaggatgaacctgcattacaaccagatccaccagacgaggttgagacagctggtgaccctagtttgcaagatcatcatttgtcttataatgctttaaaaggctcatcaagtcttggaacaatgaagttacaatgatcaatgcatgtgattgcgattgcagattctacgtcatcacgtgagcctatatatgcccttatacttactatctaccgtctgaagtacctatagaaccattctaattg

SEQ ID NO: 20133 - DNA, 361 bp, Glycine max
  unsure at all n locations
attctttgaagataccgagaaagatagagctgtttgtaattttagtcctttgttctgtttgatactccataataaaatggtatattactattattattatttgttctaataaatcatttactattattattttattttatggcttgcgaaataaaaagaagataggaggtttttctagaggtgaatgatgagaccattccatgcctcttcaattaagtgtttttcattgaatctctatatttttgtcgggtcaataacatatttttgttatcagctggtgatcttattgatgatgagacttggcctncaattgtcctaatcattcatcatgatattgccaataagataccgattcatgctc

SEQ ID NO: 20134 - DNA, 425 bp, Glycine max
tttcgattcattctatgtacccgtagtggtccacattgtgtttcgtgcatttttattctcgttttgtttactttttatacccccctcttaacgtgcttaagccattttacttaagtcatttctcgcttaacttaaaaataaaataaatttccaccgaacgtttgaattgtattatccgttaacttcggttaaaataaattccgaccgttcggtcgtaccgtaaccacgttggaaatcaaaaaaggaggtaaaaaataatataataataaaaaaaacatcttttagcaaaataaagcggaaaatcaatcggacgttttctctttgggatttctcattcttaatcgaattgattaataacgaaagtgaaactagggctaatatcaactcgcctagtcaagctcgtccacaaaaataggcttttgaag

SEQ ID NO: 20135 - DNA, 338 bp, Glycine max
agtttattagttgtgaaatttgtaagacttaattcaccccccccccctcttaagttattgaggccacttgtccaacaaggacactatcttaatgagcttaagcattatctcgatggtaggtatatttctccttgcgaaagagaccacttgttgttgaaagattgaactttcattttctggtttgattcaataatatttgaagatgatgacaacattgatgctctgctctccaagccaattgttaaggagtccatgtttacttggctacaagctaatagcatgttcaatgaaggacaacatctaacatatgtgcaattcataacaaagtttacatatgt

SEQ ID NO: 20136 - DNA, 422 bp, Glycine max
  unsure at all n locations
cgttacagaacttaggaaaaatcagaacaagcttgttgtacatcgttcgcgtgtacgatatccactcgacaaggtttgaagtagaggagaccttcaatcctataacgcaacgtggcggacaaaaatgggcagttaacttgaatggccattattgtcaatgcggaaggtattctgcgcttcactatccatgttcacacattattgcaacttgtggttacgtgagcatgaactactaccaatatatagatgttgtttacaccaatgagcacatgttanaagcatactccgcacagtggtggcctcttgcgaatgaaacggcaattcctccttctgatgaggcatggacactaattcctgacccaactacaattcgtgcgataggtcggtcataatcaacatggataacgaatgagatggattga

SEQ ID NO: 20137 - DNA, 387 bp, Glycine max
  unsure at all n locations
atcttttctctaagcttcttatccaaggcactctcttggtggtgaaacttctccttccatggcttattctttagtagatggctcctcctttcacctcttctcctttatcttctgttacatctccatgatgaaaaatcaccattgaagggcctctttgaagctcaaagatccagcctccatagaaggttctcaagaaagcttccatcagtaaatgtagccattaacttatgcgtaattntaatattttaaaacaataatatgttatttcttccaacaggttaagagcatcattagtgggagtatgtactcaatagcaatgggagataaacatactaaaagaaccccacacttgtgtatcaacaatgttatcacaatatcacataaagc

SEQ ID NO: 20138 - DNA, 414 bp, Glycine max
  unsure at all n locations
tgtaggattatggggtacccatcacatgtggtactatgtggcggtcgggcgatggtgcacaacaagttttccacatccacaaatcgcgcataaatccaccatcccctgttgcccacctccaactgagctcacgtactcccacgtagcccatatcctcgtttttctcaaccccgtgtccccatcaatccttccaagcttccccaacatccaggtaattcatcatccaaatcatcacaaactaaaaaatcaagcaaaatagggcaaaggcagaaaactctgccccaaactcaaaccaaaatcacagctttttctcacttaaagaccccagtaacatttccttcgttccaatttgttaaccggtggattggactcgaaaatntactggaagtctctagtacataagtctacattttg

SEQ ID NO: 20139 - DNA, 409 bp, Glycine max
  unsure at all n locations
agcttttgcttttcactaacataagctcatttaatattcaaggcttgtcaggtttcagaggcttaattcggaactatgatggataatgtaattccctgggagttgatgtcttgatggtttatactttacgacacttcagtcgatgacacttcacttaactttcttgttagttaaaatctttcactaatcagaatccttcgtaagtagtccttttcgatatattcataaccaactatgataccactcttagcacccgactgctttcaggattaatgactgtccttgtaaaccatcaaaagactcttttaacatactttnttctcattcacacactttccagagnactctntatgagattacccatctcataaatatntcaagacaaacacacttaactgtgaaattctta

SEQ ID NO: 20140 - DNA, 430 bp, Glycine max
tgccatttgcattattagagaatctaccgtgagcttttctaaaaaaccactatgaaaaataaattaaacaaataaaaaaaccacaattaaaagagggtatgaataagatatgcatatttttcaatggatcctaacaatgcacaaaaatgagagagatagaaaatggaaaaatgatctcaaggtaacaaacaattcatgagcacttgatcacaaaatgcaaagtggataagtagttaagtcaaaattaagaatgctccatggtgatagaaatttttcaaacaacactcaaccctgtcaaatgtgtatgggtttgtgtttacacttaaacaccacatgtaatgatgtaagctccatttgagcttgtatgcctacgatcttcttcatcaatggattcattgacttcttgaaaggtgaatgtgcgcagaatgga

SEQ ID NO: 20141 - DNA, 386 bp, Glycine max
  unsure at all n locations
agcttctctgagtattccttaaagcttattattgacaaaactttgcacataagtttaatattgaactatttttcaaatcactagacgagagtccatagggcccttaatcacacatagagatagattacctaagtggtaattcgcctatgaaggcccaaggtccatggcccaaaaaggtttgtataaaaaagttgagacccctgggtaaagaccatttctcattcttgcatttactatcctatttattgcttagagtcaaaacttgacttgggcatcaaagtaccttttgttggtacccccctttggaccaaacactanagcaagacgaatagtgtaatgacccgcctcgtcgctacgatatcacttattataaaatgtgacatcat

SEQ ID NO: 20142 - DNA, 420 bp, Glycine max
  unsure at all n locations
ntaccggtatccccattttcagaaaatggaggtgtttattcaagtcactgctatgctcgctgttggcttaatccaacctagccatagtctgttctcttctccgatactcctagttaagaagaaagacggaacctggcattaaagggcactaaaggaaatcacggttaaagattgttttcctatgccaaccattgatgaattactcgacgatttgggccaagcatcatggtttttgaagctcgatttatgccaaggatttcatcagatacgtatggtcaagacttacattcataagacagcttttcaaatgcactagggacattatgagtttaaggtcatgccctttggcctttataatgccccttctacttctcaagcaaccatgaatgatgcgctccaaccatttctgaggaaatatgt

SEQ ID NO: 20143 - DNA, 388 bp, Glycine max
  unsure at all n locations
tctagcttgttcgaagatcctcgagacgtcatacgaggggccaatctttcggaaaagactttcaagaagtttttgaagatttctcttgatgaaaactataacctgcattcttttgagttcaaccattcccacttctgcaccatggggtttgttacctggtgggagaaatattattcgacccgttcagttggagacactactatcatgatctgcagactcgagagtggttntatacaaccaacggtcgagaatatccgctcaaaccttcaagctcgaggtattaaattccttttgactttctanattgatatgtactattggcttctctaatattcttatttcaagcaaaacaatcatgacgaagaanagtggctgaacgtctcgagct

SEQ ID NO: 20144 - DNA, 427 bp, Glycine max
ttcctttgagaatccacgaagcattatttctcttgtttaccaaagttaatgtcgctgattgaatggcagcaaaaagtgacaaaatagctgtactagagtattgacatgggtattttttgctaatctttgcttgtataatgaaccatgaagaccacaggaggcaacctagagtcagaagtatggagcctacaatccatttctctaacttggcagctggaagcgtgcttgtaattttgtttgctatgtgttgagattgtgggttgataaggggcattcctttataaaggaccaataacaaagctccaccaatgcacaccaaagttcccatgactttggctgtaccactcttgctttgcatgttcaccttctctaccctagaaaaatttcaagccaaaggatcaaaagtatttttcttgtattccacaat

SEQ ID NO: 20145 - DNA, 375 bp, Glycine max
  unsure at all n locations
agctttatggagattcatgcatcagggaacaatttcactttaaaagtgggtcccaattggcttcctaattttcagcttttccatttggatgtgagatcatggcagttaggtcccagctttccatcgtggattaagtcacaaaacaaacttgaatatttagacatgtctaacgcagggattattgattctattcccacacagatgtgggaagcacttcctcaggttttgtatttaaacctctctcataatcacatccatggtgagagtgggactacattaaagaatccaatatctatccccgttattgatctaagctcanatcacttgtgtggtaaataccctatctttcaagtgatgtgtctcagttagatcttt

SEQ ID NO: 20146 - DNA, 428 bp, Glycine max
tagagagattcccgatctgagagggtactgctccgtctgcaacagctctcaggtcaagatacaccaaatttgagagattcccaatctgaggaggaatcttccccatgaatccagtatgagagaggttgaggtgagtcaaggaagtcattgtcccaaggaaagaaggaattgacataccttctccaaggtattcattggcgctcaagtccaagtaattcaaatgctttaaatcagccaaacaaggacttatctctccaccaaagctccatctcctataagcttcccaatcatcattgaaaatagaatctgaagagttgaggtgaagctgaagaagatgggaagtaaggttgtggcagaggactccataccagtggcaacagttggtattattatgattccaagaccaaagcctattggaaggatctatg

SEQ ID NO: 20147 - DNA, 375 bp, Glycine max
  unsure at all n locations
agcttgtctggttcttccattaattggagtccccaccattgtttctgctccaactctttgctctttgttgtctaggaagagcacatcaccctcaaaattttgaatcctcaacatgataaaaagactatatttttaagcatggtggtgcaatgaaactgaagaacaagagcaacccatgatttanaatgagctggagattggaaaaatggatatagaaatgagaaaaaaacaaaatggtaccttcaaatttgaaggaagtggtggtgtggatgtgagtgataatggtggccagttctggtttttggtgaccattttgaagcacaagcacttatgtagagaagcatatgagagagagagagagagactatgactaat

SEQ ID NO: 20148 - DNA, 444 bp, Glycine max
cgaccttagaaactcagctatgcattgaagttggatctttgccttcagtttttacacgtgcctacaattgatatggtcatacatccatcaaatatctctaattaaaatgaaattatgcggttcattacagaaaataaaatatttactttttatatgagaaaatcaaatgctgatattatgaatacatatataataaactagagtaacacccgtgctatgtagaagtaggggaagaaaaaagtttcaaatagttgctccatacttttaattaaagagagtgtagagtaataaaaaaaaaattggtgtgtaggccaatacgatttttatttttttacagatatcaaccataaataaatgtatgtaattaattaagctagcaacatttgtctggttcaaagtagtcctgaacattaaattcttctacaattattggtgtacatttat

SEQ ID NO: 20149 - DNA, 292 bp, Glycine max
tgagtatttttcccttcacttttttgctttccattttataaatttgtcatattcttgataaaatttgcagcttcatcatttaggccaagcactgtcaaatctatggaatcttatggacacatcatacagtgagcgacaatctttttcccatggtaatcaattgttgtcactctcatctgcagaagtaacagatccgggaagtcttactctagaaatagtccagcaggtaggtatctaacttaaatgatccatagaaaatatcggaaactcaaatatttaaaaagtctacaac

SEQ ID NO: 20150 - DNA, 429 bp, Glycine max
tatgtgaagtgaccaaatgaagaatgaaaatgagttgttcgatggtgcatgtgggggttttgtgctgcctatagatgcaggaatcgtagttaaatgggttttaagctactgaagtgaactatgtggatatggcttcttgtgcattagaaatagccaagtaaaattctgaagaactacttactaccttggtattgagattgaggggttgttctgttcccagcttccttcttccttccgttatcaattattttattcaactctatcgcaccttgctaaaattcttaagcttaggctgttgaatttccttttgttcaattatagaaagagaaggaaaatatattgatttgactcctgagaaacaggggttgtaccggatcaagaaaaatgttttggaatcggatggttgtttgttgtgcctaattgtctata

SEQ ID NO: 20151 - DNA, 365 bp, Glycine max
  unsure at all n locations
agtcttatcttatcatttagtaaaaaaaaaaaaagttggggacagtgtgtttcttttatctgtcaactttctcccgttttctcaattaaaatgggtttaatgatgacccacgttatggaaacaaattattgttctcacatanaatttgtatccattcgcttaatcaacaacatcatcgctaaagagcttaaattggtgggcatcaagaaccaatttccttatagaagagaatgcgcccattattccaacacccgtgaagaccaccataattgaggtgttaatccaataagtgaaggatgaatttggaggcttgtatgtcatgttgtacataagcataggcagaacgaaatccaaagggatgaaac

SEQ ID NO: 20152 - DNA, 434 bp, Glycine max
  unsure at all n locations
ntccaagatggccaagttcaagcctaacgatgggttatttattgaaaggtgcaatacaattctgtgtatgacattcaaattttactatgttagtaggtaagattaaggattgggcagtgttgtcatggactatcgaaaagatttccaagtaacaagaagcatccgatgatgttcgatagaattcatatattgttgttgctttagaaatatatttgttatttaattccaattatattttgaccaatttcattttacgtttttaacaaaactctttataattntagtctgctataatatacgaatcattgtagagtaatatcttaaaattttaatgattaactaagatcagtgtattatgcatttcaattaatataaaaacttgtatatctcatagtatataaaaacttgcatacttcataggaaatatttgataa

SEQ ID NO: 20153 - DNA, 414 bp, Glycine max
  unsure at all n locations
agcttatcatgtataaactatntaaaatcgtaaggaataactttttataagattgaactgaaaataaataaattttggtggataaaaatcgtaacaaattgtgaaatcgtaaactcaatgaacaaagagggactaaaagtaacttttcgaaaatttgagggactaataaaaataattttttttgagaactaaaaaatacttaccgaaatttgaaagattaaaaatatatttaagccttaaatcaatcttataaaatcagcttgtaagatgaaagatgtcccacacttatatacactaattngactatatctctagacaatgtgatctcgaacacaacctctcatgtcaaagataggatatctcgtgcgtgaagtttgcacgattggaagttatgggtagtgtgatagatgtccg

SEQ ID NO: 20154 - DNA, 438 bp, Glycine max
actcagcttccttaggaaccttgaaggatatatatatttctttgcttggttccttgtattacaacatactttcatttccatttgatttgcaccactccacctttcacacagtaggtaaaacctttggagtccatggctcccatcgagattacattcttcttaagctatagaacatgaaaacattggttaaagttataacaattccatcatgcattttgatttgtaagaacctatgccaactaccttgcaagcggcattgtatccattagagcaataccactaaattattctcataggtcttgaactagcttttgtgtggacacatatgatatgaacaacctgagtcatccattatccaaaatactgttgttgttgatcaacaatcgagagtaccaaattagttttttgatgaggaattgttggatcaagtggcctcag

SEQ ID NO: 20155 - DNA, 309 bp, Glycine max
  unsure at all n locations
agcttgtctcatttagatccaggaaagacaaggcggttgaaggaaccagttctgctcccgaatatgacagccatcattttatgagcattgaccaccagcaacgcttcgaagccatcaaaggatggtcattccttcgggagagacatgtccagctcanggacgacgagtatactgacttccaggaagagatagttcgccggcggtgggcatcgctggttacccccatggccaagttcgacccagacgtagtcctcgagttttatgccaatgctnggcctacagaggagggtgtgcgagatatgcgttctt

SEQ ID NO: 20156 - DNA, 423 bp, Glycine max
  unsure at all n locations
ntgtgtaatcgattacccttatttggtaatcgattactcagtgactgtttatgataaatcaaaagatgtaactcttcaaaaaggtttttgactttttcaaattggttttaagtttttctaaaagttataactcttctaaatggtcttcttgaccagacatgaagagtctataaaagaaaggctttgttttgcatttcaatgatcaaaaacacttattcatacaatcctttacaagccttgaatctctttgaacttcttattcttccttgtaccaaaagctttctgaagttttctggttttctaaaccttgaaaacttgtgctattcatcttttcattctcttctccctttgccaaaaagaattcgccaaggactaaccgcctgaatctnttttgtgtctctcttctcccttttccaaaagaac

SEQ ID NO: 20157 - DNA, 390 bp, Glycine max
  unsure at all n locations
atttttttatgtgtctagctactatataaaataacaacatctatatggttattttttaaaaagaaaaatagtgaaaataaaaatatgaatcggtgaaattaaagaaaaagtatagtaatatggagaattgagttgatgatgatgacctgcatgagcatagaaccatgcagggccgagtgcttgaatgtgcctaaagtagcgtgcggtgatggctcccattggtaacaaaatgccccacgatatggcgttaacggtgccatggatcactctcaacgtcgtgagatccgtgtgctgtggagccgacgaacccgacaatacgtcanaggtaacaatggaagacagatcggtggaagtagttggatgaatggtgggagagtagccctgaacgta

SEQ ID NO: 20158 - DNA, 424 bp, Glycine max
tgtgttggaccgtaatatatctactcctaagaaatttatccaaaataattattattttaattttttttaatgtaatattaattatttttttcacttatacttttatatatttaataatcaactataaaatttaaaaataaattaatgatgtaagattaattttataaaattattatttttttcattttttttattattttttcttaatttatataaaataacttaggatgataattattttaggatgaaatatgattaaacaaaatctatctcagtaaatgggttaacagtccgagcaagaataaaaatattaaaaaatatgaaaattataaaaaacaaaatatagccaaaacctacgtgcaagagagtgacatggggttgcaagataataaatgactgatgtatcaattatttgtttacttaa

SEQ ID NO: 20159 - DNA, 311 bp, Glycine max
  unsure at all n locations
agcttccaaaatatccaaaaaattcaattccaattatcatgaaaccaccctaaaccaagaaaacagagtagaggcagaaaactctgcccaagactcattcaaattccacagttttccctactcaaataccccagtaacattctcttagttccgattcgttaaccattggatcaccttgaaacgtttactggaggttcctagtacataaatctacattntgaccgttgggatctactagaaaatatctagaacacgagatatactnacctttccgtgactggtgctgcacaagcattntttctgcacatttg

SEQ ID NO: 20160 - DNA, 401 bp, Glycine max
tgtaccagccactaaaccttcaatttcaagtgtaggtcttttctaatttcttgaccttcctcctacgagagaccaacttcaactcagtatgttcctgtaaataattataattaattagataaattaaaattgtatataaaatttaaatatgttataattaaagaaataactacctctcttgcccacactttggctaccacatgattaacatatgatgtcaacactaatgtatcttggggcccacctggaaaaccctatgaatcatcacctacattctttgtaattggatcatgaggatcctcatgagtctcatcagcagcatcatcgatatgcccattatcctcgacaatagttgcagttgttcattatctacgtgtcgacactatcaatcttcgacgctg

SEQ ID NO: 20161 - DNA, 268 bp, Glycine max
tatctcttcaaatcattttgaaaaggcacgaactacctatatatatgggggtctgatttccaaaagcaagagagagatattcccagagaacttcattgtcaaatgctctctcaacaacttttgggcgaacacttgccaatctattaagagttcatccaagaacttcaaatgtaatatccttcttttaaagagagaattcttcttcttcttattaaaagagattgattaatggaccgagagtctcttaagttgtaaggattcctgaaca

SEQ ID NO: 20162 - DNA, 431 bp, Glycine max
tgataaatctatatatggtttaaaacaagcctcctgtctgtggtaccttaagtttcatgggataatttcttcatttggttttgatgaaaaccccatggatcaatgcatataccacaaggtcagtgggagtaaaatatgttttctttttttatatgtagatgatattttacttgtagccaatgatcaagttttgctacatgaggtgaaacaatttctctctaagaattttgaaatgaaggatatgggtgatgcatcttatgtcatcgacattaagattcatagagatagatctcgaggtattttgggtctatcacaggaaacttatattaacaaaattctagagagatttcagatgaaagattgttcaccaaatgttgctctcattgtgaagggtgataggtttaatttgaaccaatgtccaaagaatgact

SEQ ID NO: 20163 - DNA, 410 bp, Glycine max
  unsure at all n locations
agctttatagcataaacgagattntgcaagaaattaaaattgcaaaaagagtttgatcctattttaattaatgacatataatgtttattgtataatagaacctaaaatgttaattacttaatttatgtttggactggcgttcatttggagtgttgttcattatgtgcacgacagtgtgtgctctcatacggatccaacggtcgattgtaaaagacacttccaaaatactttttgaaatctgattttgagaacttcaagcaaactcaatcatgtccttattagttaaacaaagacacttattaattaaataaaaagtaaagcaatttcatttattatatctaattccgtattaactacttatcgnaagtacatcaccacaacagacatgcacatatgtacacagtaattaa

SEQ ID NO: 20164 - DNA, 430 bp, Glycine max
  unsure at all n locations
nttgcccaatatagctttgaaattntctcccccttgttcacaaccaagttacccttggtgagttttcactttccagaaccatggtggttatcataaccagcatcatcaagtacctgcacagagatcaaattaaagcgaacatctagagcatgtttcactcctctaagtagcaactgtattcccatgttggtttgcaaacaaacatcaccaacaccaatcaccttggacacgtcatcattacccatcttcaagactccaaaatcacctggagtgtaagatgtgaagaactccttcctgactgtaacatgcaatgtagtaccactatcaattatccacatattcttatcagatacaagattaagcgaatcagggtcatggagaataacaagatcatcactggtagcagtagtcacacagtcatcatcatgat

SEQ ID NO: 20165 - DNA, 428 bp, Glycine max
  unsure at all n locations
agcttgtttctacaaataaagggcgagtctggggtaagaatgaatgaaaaaggtgaagattattctatggatgaatactctcctagaacctaagattttgaatcctagagaaaccatgaattatttgcagcctaacccctttacaagcctagaaagtccttcggattcattttgtgttcatggctgtatgatatgagaagaaatgcaaaggttggaacttgtgttggttgtttatgatggaataagcctaaacacttgagcttgagtgaaacaatggctgtgaggttttggttgatgatccttccttgatttttgtcatgcttactagcttatttcagctgtgattctaatgcttatgctcctatctttgaaaattgcatgcttgtgagaagtaattgatntaagcattccatggtattcagttcata

SEQ ID NO: 20166 - DNA, 426 bp, Glycine max
tggactcaaagagaaacttagaatggctctagagtattagtaaaaaaactataaaataaagactcaacaaacctctagctttggcacttgttttcacagtaattttcaattgaaatttcggaactaagattggtataacataggcaccaattatagaataaattttgagccaaaacaacaagcgcacttccctttcactttttttttcctggatactgatttttctgccaacttgtgtgatttttagtattttttcctgttatccaaatcacttggttctttttttataacttttttccagatgtctagcaaattcagtaaaactttcagctcaaaattcgaagtaaccaattctcagtaatttttacaagtttgtatgtccaagctgccagcaccaacgatttttttttaagcatggtatattga

SEQ ID NO: 20167 - DNA, 369 bp, Glycine max
  unsure at all n locations
agcttcgtgcttaaatatgtatggcaaaacttcattactgttgttcaagacatagaagtgagcttgtaacaaatcttctacacttggagtgatcacctgcagtcctcttgaacccttaccacccactctgtcatcatgccgacactcangaagcccaacaactttagccttctctaagtattctgaacaaaattcaatggcttcttctgcaatgtacctctcaacaatagatgcttccggacgatatagattctttgtatacccttttaagatcttcatgtatcgctcaaccgggtacatccaccgtagataaacaggaccacaacatttgatttctcttgaccagatgcacatcaagtgaatcatgat

SEQ ID NO: 20168 - DNA, 421 bp, Glycine max
  unsure at all n locations
tccattgttgagtttttgcttcccttttcatgctttatttcactccccacaagtaagtgcaatttcccttggttatttggctctccattgatgtgttttggtgctttagttgctcattttttgcaaaattcgtgaagcaatttgcatctaaatccatgcttgttttgtggagttgaggatttgaatgagaaggccttaggcctatgttgtattctgaagcaatggggcatgccacattgcccccattctcttgcaatttatgtccaaacatgtgcccatcaagtgctcggtgaaatgccccaatgatatatgaatatgattttgcaaaattgggatggtggggctgttttgtgtatgtagagacagcataggaaagtcgaaatagatgcccaaatgcaatcccaagcttangaacccaaac

SEQ ID NO: 20169 - DNA, 360 bp, Glycine max
  unsure at all n locations
agctttgcgaaaagcttgccgctagagctgacccatcaactgccctaactccttaaggccggtgacatctatgcccttaatcttgacttgatagaatctttttccgatttgatttgtccccatgatttacctaaaatggggtgaatcaaggctcttatatgaatgatgcaatgcacatgcatggaacgaaaagaagaaaaacaagtggtagtttacatatacgagaccgaaaaagatccatctttntaatactacgctctangcattgcggcgccctaacgtatgcattacanagtgacgcgttactctaaagagacaagatatcactagatatacagcacaactataatttatgtgcta

SEQ ID NO: 20170 - DNA, 425 bp, Glycine max
tgtatgagtactgggaaagattcaaaaaattgtgtgctagctgtcctcaccaccagatttctgagcaactccttcttcaatatttctatgagggacttagcaacatggagaagagtatgattgatgctgctagtggtggagctcttggtgatatgacccctgctgaggctaggaatttgattaagaagatggattccaactcccaacaattcagtgcaagaaatgatgctattgtccttagaggagtccatgaggtggccacggattcatcttcatctactgaaaataaaaagcttgagggaaaacttgatgccttggttaatctagtaacttagcttgccatgaatcagaaatctgcacctgttgcaagagtctgtggtctatgttcttctgcagatcaccatacagatctttgtccttctttg

SEQ ID NO: 20171 - DNA, 424 bp, Glycine max
  unsure at all n locations
agcttatgataatgaagttgttacaaattttatcttgaatgaaactgtgccaaaaatagatgtcatgaagttgttacaatatataatgcacttaataaccttgcaaataaacttcagataatcttaatctttggaaatgtattgatattaggacaaatggtcatcacatatgcaacaaacatatagccatcctaatttactcagttacatgaagctngttatgttcaaaatatcacacatgcaaattgatgacaccttatagataatagccttagaagttgattatcatgactcanaattaagggtttcaccattacactatcatatcatttaaccacaacagagaatttaatacaaagtcacactaaacttgagttacatcacatctacttatggcactaagtataaacattgcatgaagtat

SEQ ID NO: 20172 - DNA, 467 bp, Glycine max
  unsure at all n locations
gcgatggccnttgaagacctcagtcataccngcgacactataaaatactcacgcttgaggaacaatgggcctaccctacacctgagatgngtgattcaaatgtgtccaatgccccacggatgttttattggaaattaaaatccttcnaaaaaaacaatatataaattcgcccaataagggccaaaatgaagtgccacaggtgctctaaaaggtgaaggagcatttgtcagccccaaaggggtgaccaaaaactcctatatggccctggggtgccgaaaagtggtttggttaaattaagccccttcatcttaaatatttggtgacctcctataggcgcactttttaaaacaccaggcccttcctattattcatctactcctcaatggtggggtgggggttaatccttaccgactcgcggtcttatttgaccattcccccaacagcctgtctcctcctcttttaccacg

SEQ ID NO: 20173 - DNA, 318 bp, Glycine max
agcttgtgttttcaacccttatcactgctttatgtaaagctagagaagtcacttctgattctaggacactggagagtcttcaccccgccattaatttggcatatgtgaagaagaactattggaatcttgatgatctaatagtgactttcagagggcctatgaaggccaacgggaagaaatcgaagactctcccatcttttgaggttccctctaccacatcagcaccaacttcttcttacctaggtacttctgctcatcaccaacttctttagattttcttttacactaagatgctcatgccatgatgcaagcctacct

SEQ ID NO: 20174 - DNA, 434 bp, Glycine max
  unsure at all n locations
ccgctntttggagtagaaacatgggaccaacacattttattttttaaagtcgtatctagtcaagatctgagagaccatacaagtttcctagcggtttctaattatatgggccattaagtctatcatatgctgacaatagccgagaagcccatgaatttcttcggggccggagtaggtgtctgccattgccttggccttggctaataatcgaggaagttcttgactcccgttcaaggtaagagcaaaccggtccatccacatggttgcctcttggtgtaaagagtcgatcacccttcctctagcctcttttttcgcgtatactagggcatactcgtccgcgaccctatgctcgtgggccgtggctagacttaactcttcttggtacttggcaatgatagctagcatgttggtctccgtctcgcataaacgctgag

SEQ ID NO: 20175 - DNA, 193 bp, Glycine max
catggcggtgcaaagctgacagtctctgtctggagagagaaagagatacgcggggaatgttgctcgctttgaggatggagttccgcgcgatctcggttcttcatgtgcgcacacgtggcaagttgcccttccccacgctgagattgaattctcactgtgtacatgtatcatagggtccctcacaccttgccaa

SEQ ID NO: 20176 - DNA, 566 bp, Glycine max
  unsure at all n locations
tgtacacgcgatacacgtatggtatggtaattacgattatcgcgatatataagagaantgtgacgacacacanacccacaagaggagggcattgatgacctcgatagacacgcccgctannacaaanaanaccccagcatgcatgaaaagtggcaaagcaaacaaacactttcttctaacaggcatcaccagccgaagtgagagaaaacaaacacttgcaatgaacattcacggcaatgggcaaaagccagaacataatgataacgacttacagggagcaaaataagtgaactgaccgctgctgatgattagaaatcggcatataagatggataccagcgcgcaacaattcactgcacgcaatgaagcaagaatacctagatgagacctcgaggagtggacggaatagtcgaaacgccacacaactaaggagctgagagaaaacgtgatggacatgctaagaaagacaccgaacatgaaatgaatcacataccatataccagaaccacagacgaagcaccataagactaaacacatcaccaaaagagcgacgccgtgctacaagac

SEQ ID NO: 20177 - DNA, 170 bp, Glycine max
  unsure at all n locations
ggtggttatggctcgccaatggaggtggtggtgctgaagcgttgangaggtaaaggctgaaaggttgcggaacgagatatctcatggatacacatattgcttaggcaatgcctggacgtccactgatgagacaggaatagtaacggtgacagataggaactgatctacgt

SEQ ID NO: 20178 - DNA, 504 bp, Glycine max
  unsure at all n locations
ggaatcacagcagcaacaantatgtaatagaacaaacaaccnccccagggattgaacttgaacaccaccaaanaccaactccagaactcaaagcttttatagacacaccaaatctttggagcaaagcaggatacaatcaggacattcctcctcctgaaactcctatcgaccactcgctatcataagaggagaatcaccgccctttcaatttatgcaatctatactggggcatacccgataccctattttataagacaggaccaaacttccgaagttatgcaagaaattcctctcttagcattactaggaacacagtaatagaaattggccatcacaaagccttcgtagcaaccttagcatggacaatacgtctatatgtacaataaaagcgcacactcggaatcatagaaacaaaattactcaactgtacaacaatacgaccgcagaatcagaagcgtcatacctaacacacgaagacctctcctcaactgcatacacaaaccn

SEQ ID NO: 20179 - DNA, 391 bp, Glycine max
  unsure at all n locations
tggtgagctctgatatcgcacttggaaggggaatatctatcaatacgaccttataaaatatcacatgaagcccaaaacacattatgtcatattatcaggaggttttaaggaatacctggatccgtagagagctngatcaactcgcagcggaatctaagagtaggcacagacaatttggattaatgaccttgctcaaccaagtcacattcttctcttatgagaccttcgctttctcttcagatggtgagaggacgaattgcttattgagtttgtgtattggggaccataaccatatcttatgtggtaaacctattatggtaccattatcccttagtggaccacactgattctcgctcattaagttcatatccattcttctggcagtctaatg

SEQ ID NO: 20180 - DNA, 434 bp, Glycine max
cgtaggattatggggtacccatcacatgtggtactaggtgtcggtcgggcgatggtgcacatcaagttttccacatccacaaagcgcgcataaacccaccatcccctgttgcccacctccaactgagctcacgtagcccatatcctcgtttctctcaacaccgggtccccatcaatcctctcaagcttccacaacatccaagcaaaacaacattcaaacagcacaagctatcacagccaagcaaaacagagcaaaggcagaaaactctgccacaacaccaaccaaatcacagcttttctcacttaaagaccccagtaacaattcctacgatccaattcgttaaccgctggatcgactccaaaattttactggaagtatatagtacatgagcctacattgtgaccgttgggatctactagcaaacatccagaact

SEQ ID NO: 20181 - DNA, 568 bp, Glycine max
  unsure at all n locations
cccccctcacccngcagaggatcggacacagccacggccccacgatacaaccccacnncccaacaacagagcggtnngnttgatgccatgaacctcacggcgaataaactcggcccgcgggaacctcaagagtccacccgcaggcgcgcaatcttttttacaacgctccatacacactcgagacatcgtctcaaagatcccaacgggcacgtaacggaaaaagagcctctaaacttgcacacccaagtctgagaagagccaacagtgaacaaacgctgggcatccacactattgaggcagccccacgtagcacgctctagagagcctatataaaggctctctccacaagcttcctcgtggctaccatgagaagccatctcaagaggactcactgacaagatagaccctaactatccacacccctctatcaactaaaataactaccctaagaagtatgaccgatgacaaaacgcacccaataaccgaccatccaacataatccctatcaggcgcatccattatacatgaaactgangcacacagccatctcacggtgcgccggaccgcc

SEQ ID NO: 20182 - DNA, 386 bp, Glycine max
tatagcaggtccacatgctcgccgattgtttgtctgacatatacaatggctcaaactaatacgaggatacacatactccatcacaagtgctgcatcgtcaatgtcaaatatgatgctcacaacatgtcgttgttaacatagagataccagagtggcattaccatgaactcataaatgacatggactgttccagatgctgcatgatgaacatctacactactcatgcacataactagtaaaacgtacataatgtactcataccataactatactagcaaatcctaatgcacataacatcatatcgattgtaagaatcgtataattgttcctgactgtcctgtgtctgaacgcactactatctacacaaaagagctacagagaccatc

SEQ ID NO: 20183 - DNA, 575 bp, Glycine max
  unsure at all n locations
gagatgcnnntttaatncccgtaaggancancngacacntatataaaatcacncgcgtcgtacacctatgagctatattgtgtgtggagaagatttatcgataatcaagcgttatatcccacctaggaacaatgaggcgtgtactaccatcccgctatttcatcccttccgcactatccgacctcgcatagtcacatgcgtaggaaccatacacctattaaatgcgtacgatgtatgaggaactctccacatggataccacgttctcatcatatacaagactatcatcattgctnagacattaactatcaggctcatgacctgtccagttactcgataaggaccactactctttgagaagacgaaatgcctaataccataatagatctcgaccctcaaaccgagtgaggcgcggctccctacaccgaattgttcaaacctaagagatggctcgaacatctcactatcattatctgactcagaaacagacacacgcaagactaacaagtatgctctattgatagctccaaacaaacatgtctgaatcagctaatattgactgcgtctagtataacg

SEQ ID NO: 20184 - DNA, 377 bp, Glycine max
atgcttctttcactaatttataactggagaatatatttatgtttaacaaaactagttcataagttatataaaagtttactaatttttgaaaatttattacaatgacttattcaattataatagttgattaaaattgggaattgaagtagtgtaagataataaaaatggacatatatttttacataaattctagagtaaaatatgtttttagtccttaaaaaaatttacaaatttgattttagtcattaaacaatcttatttttgtccccctaatatagaaataataatgtcacaatatatactatcaagatcgaagatagagtatttccaatttagaggagcaaatacagacaaaagaatttagatgactctaaatc

SEQ ID NO: 20185 - DNA, 233 bp, Glycine max
ccactatctgcacgccaagactatatctccatccacagacggaactcaaaaaccccaacggcggagaagcgcggaaatgaattccagaccatgagtccaaatgtaaagacaagccaacggcaaaaaaggccaacatcgtaacaacatagggacagatctgagcgtatgctggaaaagagaaagaacagagcgagggataagacatccactacaaacataaactgaagaagccc

SEQ ID NO: 20186 - DNA, 574 bp, Glycine max
  unsure at all n locations
cgaccccgccacacgcaacagcgtaacggcggactacgcgaacaacaagagaacttcccnccncancnacaggagggtnannttgaagccgtngaacacccaaggcgaanacgagcacggcacccggagatccacnagagacgaccggcaagcacgcaagcttagcatgaaaggaggcgcgaagcgccaacaacaagctaacctgaagaacaccgcacaggagcacagcacacgaaaaggcgcgaagcctgaaacactcaccgcaacgcgaagctagatgcacgcgaaacctcgcatctcaagcaaagcgcagaatgcagaaagacaataggtgaagcagaaccactacccaagaggctagggaaagatacacagatgtcatagagcccaagaagccttcggcacagaggaacgcgacggacgaccacacacaacctgaagagaacaatgaggaaccgcgagacacaccactangacgaagaggcgacagacaatggagacagccacatcgacgatagcaacgcgaaggacgccacgccgaccgcgcagaacccgaagacagaacaccaaaccg

SEQ ID NO: 20187 - DNA, 523 bp, Glycine max
  unsure at all n locations
acgccccagcgagaaaagaacgacggaaggaaaaacacacacccagagacttgagccctgaccccccnaanaaaaacaacaccgaaaaaccaagaaaccaccgcaaccntaatttcagaccagaaagggaaaccaggggcggagcaaaaaggacccacaaacagagcaggggaacacagacacggcccacggaacacacacagccgcgggagacgaacccacagaagaaacgcacggcacaaacgccacagccgccgcaaacagaaagggccgcatccaaatacaaacacccgaacaaaaaacgcgaaagaaccgccgaagagcaccacagatcgagccaacgacaaaagccgcggcaaaaacaaagcccaaaaaagcacggcgaacactcggcggacagacagaaggagcacgcgcagacaccgacagcgaccaccaataagcagaccaaggacacacgaccctaagaagggacaaacggcacaagaacccgacgcacgaacacaacgagacaagcaggaat

SEQ ID NO: 20188 - DNA, 449 bp, Glycine max
  unsure at all n locations
attcagctcggacccgggatcctctgagtcacctgcggctgcaatttttttttgggtagatgaagatgtaaaggaggatgaggatgtagaagaggaagagaaatgtagggatgagactcagaagcaacttgaagaggcaagaaaagaaaatcataaactacataagaagcttgatgttaagagaagaaaaagatcgattctgctttgtgtcgtacgactgtgtttggtaatcacattattctcctgtgttgtgcgcgtgtggaactaagtagggagttccataatgtgaggatataccaagggaaggaagtctattggattacgatttaaaaaaaaattataaaaaaaattgtgttatttaatcagaatttttaaatgttataaataacgtctgtgatattcaattacaatntttaagattttctacagaagacataaatccgatgata

SEQ ID NO: 20189 - DNA, 432 bp, Glycine max
  unsure at all n locations
tcgtgacgaactatttatggaaaaacttcattgtngttatttagtatatacaaatgagtttgttgcaatttctctaacatgcaaccctcgtgaaccctttcctcccactctctcatcatgctgagacttgggaagcccaaaaggttccaccttttcaatgtactttaaacaaaatttaatagcttcttttgcaatgtacctttcaacaatggatgcttcaagatggtatatattcttcgtatacccttttaagatcttcatttatcgctcaaccggacacatccatcgtaaataaataggatcacacaattgaacttcccttaccagatgaacaattaagtgaaccatgatgtccaaaaatgaaggaggaaaatacatctccagctaacataagataatagcagtctcattttccaagtcatctaactttat

SEQ ID NO: 20190 - DNA, 402 bp, Glycine max
ttgcttgttaaatatgtctatcgcatttccctcgtggtgtaaaatgttacattgttctgctgaataattgcaaaaaggggctatgttatttgtccagtttttattttctgaatgtcttttggggttgataataatgcttagaatttacgttttggatctaattcaatccgaaagttaacttgtgaggacctattttttggctatatcgctagttaatacagaaatctcaacacactcttcttatgttagaaataaatttgatcaagtactatgactatgagtattcaagaccgaaacatagaaatgaccaatgcaatttagtaggaaaacctcttatgcgtctgaagttaatttctaatgtaatacaatgtttcaattcaacattggaataccataattgat

SEQ ID NO: 20191 - DNA, 425 bp, Glycine max
  unsure at all n locations
ttcaacgccggccacttcatatatcnttcccattgctaccaagagtgtacaatgatcacgttgcacatacaaccccatagtcggtatcacattagcaacacgttcttcccttgacaatgaggtcacaacagtttcagcattggtctcctctgggctcacacgtgcacctaattggtgtatatctatatctgcctcagttgggggagagtactgcgatcccctttgggataactccgttttgatggcctccttcaactcctatttcattctctctagactccattttgttttcttcttccagctcattcctccattcttcctcaagggttccaattatctcagccacctgttgttgggtgatggatgtggacgagttgctggaaccacatgatgcccttccatattattgactaattgtgacacta

SEQ ID NO: 20192 - DNA, 374 bp, Glycine max
  unsure at all n locations
tctagcttgcctcanagagatccagganagacaaggcggttgaaggaaccagttctgctcccgaatatgacagccatcattttaggagcattgaccaccagcaacgcttcgaagccatcaaaggatggtcattccttcgggagagacatgtccagctcagggacgacgagtatactgacttccaggaagagatagttcgccggcggtgggcatcgctggttacccccatggccaagttcgacccagacgtagtcctcgagttttatgccaatgcttggcctacagaggagggtgtgcgagatatgcgttcttgggtgaggggtcagtggatccctttcgatgcggatgccctcagccagttcttgggataccct

SEQ ID NO: 20193 - DNA, 419 bp, Glycine max
ttgtgtaatcgattacccttatttggtaatcgtttatcagtgactgtctatgataaatcaaaagatgtaactcttcaaaaaggtttttgactttttcaaattggttttaagtttttctaaaagttataactcttctaaatggtcttcttgaccagacatgaagagtctataaaagaaaggctttgttttgcatttcaatgatcaaaaacacttattcatacaatcctttacaagccttgaatctctttgaacttcttattcttccttgtaccaaaagctatctgaagttgtctgggtttctaaaccttgaaaacttgtgctattcatcttttcattctcttctccctttgccaaaaagaattcgccaaggactaaccgcctgaatctcttttgtgtctctcttctcccttttccaaaag

SEQ ID NO: 20194 - DNA, 282 bp, Glycine max
  unsure at all n locations
cgagaatggttatatatctagcacaagaattgagccacattctaattgattggttctatatattcatcacaacaatagaacctgactcaaatatttntttaacaaatcttcttaatatatctctagaagctagagcagtgataataagggagatgcatcaatacatgacatcaagatagatagcaaccgtgatgttgaataattctacaaagttcactaatgtgataggactntgattgtgatccctactaanaaccaagcttaacanaaggaaactttctc

SEQ ID NO: 20195 - DNA, 430 bp, Glycine max
  unsure at all n locations
tcaagccaaggccagactcttgtgcatccagaggcttctttgaaaaaatgccaaactcccttcaaaaaatctaatttcaagcttaaataggtgggttggtccgtgctcgcgtgcttagcacaaatcttaatcgcttagcgcgcataagtggattttggcttagcgcacttctctcgcttagcggatgagctgaaggggtgcacttgatgacctggagcggtgcgctcagcgaacctgacagctcatcttcttctggattcttcctcgcacttagccactgagtgtcgcacttaatgaatgctcgctaagccagcagattggcttagcgagaaggtgaaaacaacacttttgccaatttgcctaattaacctgaaattgagagtaatttattattaaacacaaaaaataaaagtatanaatttctattacc

SEQ ID NO: 20196 - DNA, 362 bp, Glycine max
  unsure at all n locations
tctgggagaccaatgtcaagtggtcgcgatatgcgaagatgatgttccgagtactttggatttggtacgaccatgcccttctgatttccaactgggaaattggcgagtggaagaacgccccggcatttacgcaacgagcataatgtaaacctttacggttttaaaagctctatagttgggcctaggctttagagtttttcctttggttaaggctntgtgtcttttggttttgaatntataatacaaggatctttcttcatctgttcctatgtctctacccattctcattcattngcatgtntacttctttntctgaaacggcagatccgatgacgagntccccgaaggtactaatacctggg

SEQ ID NO: 20197 - DNA, 433 bp, Glycine max
taaagtatgcccgagtcattcatccctatgagatgttgttgaagtattggcgatcagaattgccattccttggattatagggttgaaccaagctcatgcttttacaaaaaggttcatcaagtcaagttgaaatatggaagtaaccgtcttgcaaaattggggcaaaagatgaatcgagtcacatcactgcttcgtctactgccaaacatatttaggattattgatgtccttgttacttccagtttcaccttgacaaagatgtcatggaccatgttgaaaatctaaattgattcaaccccatatcttgcgtaaaaattcgcaatacttcaactgtacatcattcgcatgcatccatgcttttcattggttgcattgctcgttgcattctttccttgaaaaataaaataaaatgaacttaatcattgttataaaa

SEQ ID NO: 20198 - DNA, 323 bp, Glycine max
  unsure at all n locations
atcatcaaaacattcagcttgatcctttgtctacattatgttgacaccagagccatcgccaactaattactaatcagtaccatgataaggattgttacagtgtagatttttgcacaatagtccatgatccagttattttgcaacggaataaggtgtggtcttggcatgatgagtactangtccacttggacattntggatagccatgaagtttatagcaaaccatggcagtgttccctagtttctcatagtattgacaaactaacatttttgttatgcctcgaaatatggatctgccatatgttgaagtggtttgttaacatt

SEQ ID NO: 20199 - DNA, 427 bp, Glycine max
  unsure at all n locations
tatgttaatgggtcttaagaggaaagctcactaacattcttaaacttacttattaaacatgctcatgaaaactattttttctcaattaaaataaatcccttttattttcctacaacaataacccaaactaatatttatttatttatttatttatttgcaatatataatatattgtgagaaaattacattagcactccctcaaatattgacttattacacagacaccccattcataaaattgcatttcttttgcacccccttcgtgtctttgttaacttatgctacttaaaagtgaaaggtcaaaattaaccttctcacttaaccagcactcaacacaccttntgtttattgtttatgaaatttgaaaacaacaaatgtgctctactagggtttgatagcgagggggagcatgttgctcatgttgttg

SEQ ID NO: 20200 - DNA, 397 bp, Glycine max
  unsure at all n locations
agctttatacttgagattgaatagtttacaatctccgtccagatctagaagtcatagacaaccaacttaagaagaaaaagaggaaaaggagtattcatatggaacaagtcatggaagaaggcgaagaggtgaaccaagaatagataatcatttggggagcattaagatgacaatccctacatttcaaggcaaaaacaatcctgagttgtatttagagtgggagtgaaaggttgaacatgtgtttgattgccataattattctgaggaaaaaaagatttaactagttgttgttgaattccttgattatgctagtatttggtgggatcaacttgtgactaatangcacagaaatggtgaaaggcctattagtagatgggaggagatgaagactgtcatg

SEQ ID NO: 20201 - DNA, 421 bp, Glycine max
actcagctttttggaaacttcttgaaagctgagctagctttcacactcctctcataactaagctcacctccttgagaagcttccttaagaagattcgtaaagaagctagagcttagctacacatacctctctaatagctaagctcacctccttgagatgagaagctagagcttagctacacaccccctataatagctaagctcacccccatgacaaaaaacatgaaaataaaaaaaaaaagtccttattacaaagacaactcaaaatgccccgaaatacaaggctaaaaccctatactactagaatggccaaaatacaaggccttgacgaaggaaaaacctattctaatatttacaaagataagcgggctcatacttagcccatgggctcgaaatctaccctaaggctcatgagaacccta

SEQ ID NO: 20202 - DNA, 73 bp, Glycine max
tgacgaacactatattaaagcatgctataccctgagagctacgcacctatgacacggacctaagtgtaagcca

SEQ ID NO: 20203 - DNA, 411 bp, Glycine max
tggtggcacttgaaatatcatcagcagcagatgctaccttatcaaagacaaacaaaggtagttaccgattcttcttcattgctatcattgattgttacttttgtcttcatgacatctgttcccactccaaatgaacaagatttagtcgaaatatttatcatcccatgttacaagccttatcatatgctctatcttaagttaaatgtttttctaatgtgttttaactaaaaaaacaaatgagaatgaaaatcgtctaccgattgtctttttataaaaacaaaaagaatggaatggtttggtctaataaatattggagagacataaaacatgaaaaaaaacgtaatttttaagagaaacagtgctctgcttctcaacatggatgaacaacatattatataattagacaaatgc

SEQ ID NO: 20204 - DNA, 397 bp, Glycine max
  unsure at all n locations
attttgtatctacatagagtagaagatagatcattgatccatcctccaccttgttgtgataaacacaacaatcatagagacttctcttgaatccttggctggtgataaagctatcaaacctcatgtaccattgccttggagattgtttcaaaccatacaaggacctttgcagttgacaaacatacctttcttttacttgaacttcaaacccttcacgctgtttcattagaatattttcttccaatcttccatggagaaaagcagtcttgacatcaagttgttcaagttccagatcttggtttgccactatagcaagcagaaccctgatggatgtatgcctaaccataagagaaaaaatntcgttgaaatctatntcttctttctagctgaatccctt

SEQ ID NO: 20205 - DNA, 438 bp, Glycine max
gacctataaaactcagcttatgtctgaatatatgctctacttgagtgtttgttgaactattgtacataactcgtgaaatgaaatccatgtttaggttgatttgtttcctgaatatttacctaaatagattgattctaattccataaacttatttactgtacaattatcattgaaatacagcacacgttattcagtccaatcaatggagtgatttttggtttttctagttcatagtcatagcagacccatgcattagcgccccctaacccacatatactaaagggataaattgatttgggccattttgttcttttattaagtgaatggttagtgctaggtgggttaaaaacaaggctaggtagggttaacccttaggccaaaacccacatcgataactctacataaaaggagacaatagatttgagaaataagaacaca

SEQ ID NO: 20206 - DNA, 381 bp, Glycine max
  unsure at all n locations
agcttgtattgtaagaaatgacaagaaactacggaatccgaaatagaatcaatgaagatcaacaaagtatgggctttagttgaagcttcaaaggatataaaaccaattggttgtaaatgagcttacaagaaaaggattggagcaaattggaaggttgaaacctacaaagctcatcttgttgccaagggatatgtcaaaagtaaggtatagattatgacaaaacttttctcccgtggcaatgctcanatcaattcggattctttttgctatagtagcatattatgatcatganatatgaaatggatatggaaaatggttttacttaatggtgagctaaaataatgtgtatatgacacaacctganggatcacaccttgtctg

SEQ ID NO: 20207 - DNA, 430 bp, Glycine max
tgcagggttaattcaggattatggtagcgcagaactatttgaggtatgtatgtaattctcatagactttaatttttatgcggtgtaaaaaattttacattgtcaatcaatcagaaatcatcatcagtgtgatttttaacatagttattgtaaaagtaaacaaatttgtcatattgtgattgaataacagtgtaaagagtgcataaactgtttactcattcttataattttacaactttatctgcatgagctaattatgtagcttgaaattgggggcatgagaactataagatagtatactaggagtggatttataaatttctttgatttaaactataattttagagtcattttgctatcaagttgttgtactgcactgattaacttatgaacttatggctgcattccattgtttctgcaatgtgtgattt

SEQ ID NO: 20208 - DNA, 332 bp, Glycine max
ttctttttacatggagtcttacacaagttgcaggaatgcaacggactcaacggtttcttaactgcagtaaccaactactcagtggcttaactaaccgcccctaggttcatacaaagtgtgacctaactatacatgcatgcagtcacgtgcctatacgtactcctccaggtgccttggtctcgtgatactccttcatggtcgtggctcgtgtgttgcaagatgtggagcttcattcatgttgctgctgctaacatcatccacccctgagaaaaccaccttgtgctcaagatggtgggcattgcaaacatctgtccatttctcccatgtcgagt

SEQ ID NO: 20209 - DNA, 424 bp, Glycine max
tgtgtcacgattcactgtgacagtcaaagtgtcattttcttagaaaatcaccaaatgtaccatgagaggacaaagcacatagatgtgaaactacacttcatcatagatgtgattgaatctgagaaggtgaaggtggagaaggtttcaacaaaagaaaacctggctgatatgttcacaaagtccctctctagtgtcaagttcaagcactgcctggacttgatcaattttgaagatgcctaaagcagattggtagaagtgcagccctaaatcacaaggtagacacttgctgatttggagtcaaggtggagatttgtggtgtgtgactcaaaatcacattggctcaagtgagaaggttttaaagtggtgttgtcataactgtgttcagtcattataattgaattaggtttcacaccaatgtatagtc

SEQ ID NO: 20210 - DNA, 412 bp, Glycine max
  unsure at all n locations
atctttatacagtttatctttcttacacttgagttttggaagaccaattactaagtctttcctaattagatgatttaaatgatgcatattaatgtgtgcagtcctacaatgccacaaccatgaatcatctattttactcaccaagcaacttagttcatgaaaaacatgcttgctcattcaacatatagatgttacctattctcttaccaatgtggataacttaatcagatatggcttcacttataaggcatcaatttctattaaattcaatcttgaaatctttatcacacagttgactaatgctaagaagattatgctgtagtccatccatatataacatattatntatctngaatttgcgttgattccttatatntgcttctcccatttatctctctttggtaattgctac

SEQ ID NO: 20211 - DNA, 430 bp, Glycine max
acagcttcattaagaggcttcctctagaagcttcctcgtgacttcttcgagaagctttctcaagaggcttctttgagaagctacatccttatctatccacccctctattaactaaattaacttccttaaaaattattacggatgaaaataacgcaacaaataatcaaacatcaaacataattactaataatatatatatatatatatatatatatatatatatatatatatatcaaggtgttacaactctcccacccttttagaaatttcgtgctcaaaatttaccttactcaaacaaggatgggtgagcttctcgcatctgactttctaattcccacgtggcatcttctcctgatgcacctccccatatcaccttgaccaacggaatctctttccctcttaggtgtggtgtacgcctatcctcgatcct

SEQ ID NO: 20212 - DNA, 417 bp, Glycine max
  unsure at all n locations
agcttaatgatggaatacttaattgttggtgatgaacaaaagcgcaaaacggaatcaaaaaatgcaaaaaatgattaccctaaggctgcaaactcgtaaatcccgagggtattgcttttgaatggggggtaaagatgtttttgaatgcaaaagcgttcccctccctcgtttttatattttggtgcaagggttgctcgcgggcgagctcanctcgcccaggtgagctaacctgccattgttttttttgttttttttttacgggaaacataaccatggccccctctctatacacgttaacgtttgcctactcgaacctacttaagttagaattaggcatcgattacttatttaaaacaaacaatagtaataatcactgtgaattccaggatactggttgcctgcatgacgtctctgttg

SEQ ID NO: 20213 - DNA, 426 bp, Glycine max
  unsure at all n locations
tgcctatctgatgcagcagtaatgatggcccgagtttgttggggaacggttacgaacccggaatgggtttaggcaaagacaacggcggtataactagcctgataaatgccaaaggaaatcgtgggaagtatgggttaggctataagcccactcaggcagatataaagagaagcatcgcgggaaggaagagcggtagtcaaaactcgcggttgagacaagaaggtgaaggaagcccaccctgccacataagtaggagctntataagcgcgggtctgggagacgaaggtcaagtggtcgcgatatacgaagatgatgttccgagtacattggatttggtacgaccatgtcctcctgatttccagctgggaaattggcaagtgaaggaacgctccggcatttacgcaaagagcataatgtaaaccttta

SEQ ID NO: 20214 - DNA, 368 bp, Glycine max
tcttcttcgtgcttaaatatgtatggcaaaacttcattactgttgttcaagacatagaagtgagcttgtaacaaatcttctacacttggagtgatcacctgcagtcctcttgaacccttaccacccactctgtcatcatgccgacactcaggaagcccaacaactttagccttctctaagtattctgaacaaaattcaatggcttcttctgcaatgtacctctcaacaatagatgcttccggacgatatagattctttgtatacccttttaagatcttcatgtatcgctcaaccgggtacatccaccgtagataacaggaccacaacatttgatttctctgacagatgcacatcaagtgaatcatgat

SEQ ID NO: 20215 - DNA, 420 bp, Glycine max
  unsure at all n locations
tccattgttgagttnttgcttcccttttcatgctttatttcactccccacaagtaagtgcaatttcccttggttatttggctctccattgatgtgttttggtgctttagttgctcattttttgcaaaattcgtgaagcaatttgcatctaaatccatgcttgttttgtggagttgaggatttgaatgagaaggccttaggcctatgttgtattctgaagcaatggggcatgccacattgcccccattctcttgcaatttatgtccaaacatgtgcccatcaagtgctcggtgaaatgccccaatgatatatgaatatgattttgcaaaattgggatggtggggctgttttgtgtatgtagagacagcataggaaagtcgaaatagatgcccaaatgcaatcccaagcttaggaacccaaa

SEQ ID NO: 20216 - DNA, 327 bp, Glycine max
agcttggcgtgcaaaatacaccttattatcacatctccggagtacagagttcagactgccactgcagttctgatgggggtaggaaaattgatgaacaaaatgaattacaaacaaatattcaagaaaaaaaaaaggatagcacgtacagattagtttattagacattgtaaaacaaaagctataaaagaaaacactttaagtatcaaaaagggacacattaagtatcaaaaagggacaaagatgaaggaaacacttaggttttaaaactttgaagttgtttgtagcctacaaaaatgcattgatttgataagagtgttcaagttatta

SEQ ID NO: 20217 - DNA, 431 bp, Glycine max
  unsure at all n locations
tttatccncagcctcaatggaagctgggtataatttttacaaaggtggcagggcaagtcgaacctgtaaaaaaataaagtgtttggtaaagaaaaaaaaatgggtatttcatttcataccacatttacacaatgctacattgtaacaagtcttacaggaattttttcagcaagaagctttcgtattccatgagctctagactccacctttacatccactcctgaaacatattcaggataaagcaccagaagctccatgatatttgtaagatacggatttaaaaatccaccaagcttgtccacaactgcctccaaagtgatgagaacataaaaatgggattcatttgaggctgataaaacatcaatggtttcgggtttcatatcagccaatactcgacgagatgacttcatcacattgtccataatcttggg

SEQ ID NO: 20218 - DNA, 362 bp, Glycine max
tctgaagagagtgacgaggctcaagccctataggcatatcttgtaagagcctgtgttgtctgcgagaatttcacgtccatatgcacatacaaactctgctgaagagtatgatgaactaccgtatgtcaatatgtccaccgatgaacccttggaatgagacaccatcaagggccgtagggaacaacacgacctaagcgaattttcggggggctttatcaggcaacaatagtgagctcaagctcccaagaggtgaaaggaatcatcacgggtcaaaggcatgatcttgatcgacgagctgcaggtttgccttaggtcgaatagacatttgtcccaacacctaagcgagattgaagggaatatgt

SEQ ID NO: 20219 - DNA, 308 bp, Glycine max
  unsure at all n locations
tttttttatttggcttgatgaattcttaaaagaaattaattgaaaccaatgacgattaacttcaactggaagtcaagaaaaatggtcaaaaaggaaaacttacgctatttatttgaaaaaagccgtaacccgaaatttgtatggaccaaaactgctatgcccaaaatacaataaatgatagggaaaatgcattntttttatatatatataatgacattggggccaactaacttcttttttatgaattaattttattaaaaaatgatgtggattgaccactttattaatactcannatgaaacattact

SEQ ID NO: 20220 - DNA, 430 bp, Glycine max
tgtccacaaaaataggtttttgaagtttgtaatttaattttctcactaagtaaaatggatcattttcaaggtccaacgccttaaaatgatcacctcttaaagtaaaaaagaatcacttgataagaaagaactacgtaggtctgatttcctcatcgcaattgaggaatacgtaggagcaaagggaaacacccttgtcaaccacaaaaagagaaaaatataaaaagggtataaaagatataaagacataaaaagggaacataaaaatcaaagtcatgtttgcacattcgatcaaaggctgccgtcccttgggacggacgtgtggggtgctaataccttccccgtgcgtaaatacaactcccgaacctttcacttaaaagttcgtagatcgcgtcttttccggtttttccgacgttttcctcacataaacgtt

SEQ ID NO: 20221 - DNA, 386 bp, Glycine max
  unsure at all n locations
agcttgtcggatttggtcttcaccggcaaaaggatcgaagtgggtctaaaaagaggcaaatttggtcatcctgctttgatgaanattggggcaagtgaagagggtgagaatgatggagaaacccatgttgtgactaccattcctatatggccaagtttcccaccaacccaacaatgtcattactcagccaataacaacccatctccttacccaccacccagttatccacaaaggccatccctaaataaaactacaaaacccacctaccacacgaccaatgctaaacaccactnttagcacgaaccgaagcaccaaccaacagggaattttgcagcanacagcctgtagaattcacctcacattctggtgtcatatgctaaatggta

SEQ ID NO: 20222 - DNA, 431 bp, Glycine max
  unsure at all n locations
tctcaaggaggtgagcttagttatgagaggggtgtgtgttctaagctctagcttctcaaggaagttttctcaaagaagcttctcaaggaagttttctcaagaaagtttctcaaggaagctacctagtctataaatagaagcatgtgtaacacttgttgtaactttgatgaatgaaagtcttatgagacacacttcaaagttctacttctccccctcttttattccttcaatttcgtgctcccccctctctctttctctccctctttcttttcctccattgaagcatccttccaagcttcttatccaaggctcatcctggtggtgaagctccttcttccattgcttattccctagtggatggcgcctcccctctcctcttctcctttgccttccgctgcatcntccatggtgaaaatgaccattgaaggacc

SEQ ID NO: 20223 - DNA, 361 bp, Glycine max
  unsure at all n locations
agcttttatccactgatcataggacatagactaaaatacagtggtagtatttttaagaattcaattgatatatgatagcgggcaataaacatatatgatttctaaaagcttacatgttgacattgactattcagtttatacctatataaattatctaattctggtgagggattgatgttgaattaacaaaaactaacggaagatgtaaaaaatgaaagtctcttagccaaaacagaagtatccttatagcatgtagaaatgtgggtttctgctccgaccgagtttgtttcttctaattggtcaaaatatttaacaaaattgcatttgtgccancatttatatatgaaaaaaataataaatt

SEQ ID NO: 20224 - DNA, 432 bp, Glycine max
tgtccagacactacattgattgaacagtataatacaattttaagaagaaaataggaaaaagcttagatacagttccttggtttttgatgttgttttccaatcagaattggagtttcactttagaagtccacataatatagatttgcattaaaggattctgtagattattgaaatgaaactccaattctaactgaaaacagcaccaattgcacctaaagaactgtatgcaagttttgtccaaagaaatataccttgaaaccgtgacacaaccgcagatggcaagaagcaaacctcgtagaaggaatcatatccaaccaaaagacaaatcaagtaaatgactccacagacaaccaccactgcagaagtgagaaacggaatgctttcccaccattggctcatcctagtaggaaacccggcctgagtcaattaagc

SEQ ID NO: 20225 - DNA, 341 bp, Glycine max
agcttttctgaatgaaagtggcgtttttggaattttaacaatactttcttattattctatggatctgtttcgaattctgattgttaatttgtagttcttattgctgtgggaaactgtgaataggtttttgcttttaaatccgtcggtgactaggtgggggggtaaacgaacatcctgttgcggagttatacgattaaaccgcacttgctgctcttgttctgattctggattttacatgtttctaatttttattttatcgaggttaatgtccgctttagaactgattataacggttacaacataatataacggttctgaattatgtccgcaatatttttggt

SEQ ID NO: 20226 - DNA, 433 bp, Glycine max
  unsure at all n locations
ctgattntgtgaggaagataacggttcacttactatctatctttattacattcaaataacacatatatacatacagcaagaagaggagagagacagcttaacaagacaagacatattgttgtcttctaccataagctaagcaggaaattaggtaagataaaaaaaatagaaaatacacataattctaacactccccctcaagttggagcatataaatcgtatgcaccaagcttggagcatataaactgaatcttaggcctccttaaggacttagtcaaaatatcagctggctgatcattaaaattaatgaactcagtgacaatttctttggacagtagcttctctcggataaagtgacagtcaatctctatgtgcttggtcctcttatggaagactggatttgaagcaatgtgaatagcagcctgattatcac

SEQ ID NO: 20227 - DNA, 346 bp, Glycine max
  unsure at all n locations
atcttatgagagagtcaaagatcaaattgagaggaaaaataaaagttatgctaaacaagccaacaaagggagaaagaaggttgtcttcaaacccggagattgggtttgggtgcacatgagaaaagaaaggtttccggaacaaaggaaaacaaagcttcaaccaaggggagatggaccatttcaagtgcttgaaagaatcaatgacaacgcttacaaagttgagctgcccggtgagtataatgttagttccaccttcaatgtctctgatttatctctntntgatgcagaatggagaatccgattgaggacaaatccttctcaagagggagagaatgatgangacatg

SEQ ID NO: 20228 - DNA, 491 bp, Glycine max
  unsure at all n locations
ggaccgatgcaccaagcgcgaggaaggataaaaagaggaaagacctcaaaccaaccccccccacggagcttttgaactagagaancgcgcacaaaaaaacccgcgcggacaaaacaggggacgaaccgcaactaatttcccccacgaaacagcggcggggggagggcgcaccacctaatacagagacccccgcaaaagaaaaagagacaccccggggaaaaaaaacacagcgagggcgacaccccacggcccaagggaggacctcgagaaccagagggaaccccccggcaaccgacaaagggaaaaaaaaaaacgggcggaacagagaccgacccggaaaggaacgccgacaaaacaagggtggggcgaacgaaaaagggggcccccccggaacaagagaggggggacaaaccccgcggcggaaaacccccgcacagaactcaaaaggaaaaagggggcctccgggagcaacagggaccacacaagaggcg

SEQ ID NO: 20229 - DNA, 405 bp, Glycine max
  unsure at all n locations
agctttctatataaatgaccaataattataacagaattttatcttttcaatatcatttgacttacgaagttaggacacccaatatccaagtgatctcaattcacaagttactttttattttaagcagtatgcaaggcacaaaggaactgagatttctccacgccaaattaaatatcagggaagccttaaaaaataaccccattattacattgtctaagctgtgagatatacataagtggaatggtgactctagcataatcaattgaggatcatattttctgcaacttggaacattgctcaaggatgatagctatgatttcacatgcatagtagcttagcattcaaagaaaattntcattatctgctagctaggcagtaagtgaagttgagaaagatatcactact

SEQ ID NO: 20230 - DNA, 427 bp, Glycine max
aactcagcttcagtggagagagatctcattgttctaacccttgtattagtgtaagggagattgacaaagaaattggaagaaattttataaaggatcttatggtgaatgatattgttgaaagatacctgggaatcacccagattctgtatgatctcctaatagataattatgtagttaatgctgtactattttatgatagtgagtaatgtgtggaacatgcagaataggcaggaatcaatcataacttctgtctattatggacatctatttccactgttgtaccttagactaagcgaaatctatatgtacagagaactacaatcaattagaaataattcctcacattttgtcctctcctttattatataaatgcctatccttgatccattgtggggtgacttacatagccatgcttcaggcccacata

SEQ ID NO: 20231 - DNA, 408 bp, Glycine max
  unsure at all n locations
atctataagtagctttcgggagaaaaagagcatgccaacaagcttagatgtaatatttgggagaaaaagagaataccagtccaattcctgtgccaaatacaagtctcccaagcaccaatacaggaaaattaggagctaatgctgttacaagggctccaacaagataaactactgcagatccaatcagctcctttcttctacctaaaaaatcaaatttgtcacaccagtttcacccgggaaggaaatagcaaaaatgatagctgacaaaaggggaaattacctaagaagtcagcaacattgaaggccaacacagagccaattaaggcaccatacaatgatccactagtctgcanaagacagtanatgccatttgcccagtttatattncagatcaatatatatatggag

SEQ ID NO: 20232 - DNA, 417 bp, Glycine max
tgtacatatgaaagtcatctccatattctgaagaattatgatgatgaagttacatacaaaggagaaaaaaaggtatctccacgcaataaacaataggagagattaacaaatgttatcatcacaagtcaaggctaaaagattcaaacttttaatagtattatggaaagatcgagcatagaacaaagaagatagttatatgagaggcacatatacaaaattattttcagtaaaagtcaaagatatttgacattacagttgtcaccaattacatcattgaactggatgaaattccacaagccaagaatgttcagattagtaggtaaggaaacctaaggcagtattgagtatacattgtaaatgggttggattattggatattagtggaaccttattatgaatattacacattgtactcac

SEQ ID NO: 20233 - DNA, 388 bp, Glycine max
  unsure at all n locations
agctttctttagcagcttctatgagaagctaacgttttaactactaacaccctttntaataactaaacccacctccttgaaaataattacggataaaaataacacaacaaatataatcaaacatcaagcataattactaaatatatatagatatatatatatcagggtgttacactaagcgcgagatcagtgtgctaagtgcagtagttgtcttcaaccaggctcagcacacgactagtgctaagctcaaatccactcactcgcgctaagcgcgagggtggcgctaagcgcaacatcgtgaattcaaagcctatttaaagtctgtcttgtgcaaaattanggtacaagttgtataataaccagtgcacaaaatttcacagcacaccac

SEQ ID NO: 20234 - DNA, 403 bp, Glycine max
  unsure at all n locations
tccttttaatgcgtcacatttaaagccgagctcgattttggtgcgagcctttgatggtactcggtgggaagtaatgggggaaatcgacattcccattcagataggcccccacacttgcaatgtggtgtttcaagtaatggatataaatcctgcctatagctgcctcttgggaagaccgtagattcatgccctgngagtggtcccttcaacgcttcaccagaaattgaagttcgcagtgggtggacttttagtgatagtgtcgggtgaagaggacatgttagtgagttgcccttcctccgcaccatacgtagaagcggtggaagaatcattggaaacgactttccaatcctttgaggtggtgagctgcgcctcggtggaaccaagtccgtcgctaccttctctc

SEQ ID NO: 20235 - DNA, 321 bp, Glycine max
agctttcatgcttatgagaagaacagtgacctaggcatgggagaggtctgcacagaggccattgtctccctcgcccaatattatgaccagccgttgaagtgcttcacctttggggacttccaattatcacccacggtggaagagtttgaagaaatcctgtgatgccctctgggaggaaagaaaccatacctcctctcgggattctatacctctttagctacaatttccaagatagtccgaatctcaacgcaggaattataccacagaaaggaagtcgaaaatggggtggttggagtaccaaggaaatgcttggaagtaaaa

SEQ ID NO: 20236 - DNA, 404 bp, Glycine max
cgcggttcaattcattctatgtacccgcggcggaccttattttgctacatgtattaatatacacaggtcattcactttttatacccccttttgacgtgcttaagccatttatttaagtcatttctcgcttaaactaaaaataaaataaattttccaccgatcgtgtggattgtatcatctgttaattttggttaaaatgaattccgaccgttcggtcgtgccgaaaccacgttggaaatcaaaaaagaggtaaaataataatataataataaaaaaataccttttagtaaagtaaagcgaaaaatcaatcggacgttttctctttgggatttctcattcttaattgaattgactaatagctaaagtgaaatcaatgctaagatcaaactcacctagtcaagctc

SEQ ID NO: 20237 - DNA, 373 bp, Glycine max
ttatctttaagttaaattaaacttaccattgttatcgatttctaaaaagtaaggtatttatttatggaattggtccaaggggccaaccgtgtgaccttgattgcatcaaaagtacatccgcgcatgcctcaaccacagtttccacggaccttgttccatagttccttctcgccattagaactagtattatcatacaaaattaattaaacatttaaatatatttttagttcagaaatatggttgtttaatctcttaaataaaagttattttttaaattctacaattgatcaatatattattttagccctttcatcagacacttgttgtaaaagagtctgtaatatttatagcttaatctttaatactgttctag

SEQ ID NO: 20238 - DNA, 429 bp, Glycine max
  unsure at all n locations
tcanagaataaagacaacaacatggtctaaagttgttctcattgataagattatgcggtctgccaaagcacaaattaaattacacaaactaataaataattacccttccattctaatcatgaacaatttttcatcttttagctttggccactgcttttggcacggttaaggttgtgtctaacataatttttacattagatagtattttcatatcatctggtgcatctgttataaaataataatcgtcctattatacatgaataataataataaataaatataagagaatataattttataaaattaattttatatcatcattaatttatttataaattttgttgtccaatattaatattataaaagatataagcaaaaaaataattaatattacactgaaaaattaaaataataattattntgaaataa

SEQ ID NO: 20239 - DNA, 282 bp, Glycine max
  unsure at all n locations
atcttatttcctaaatttcaattgaaaattaatgtgaaaacaagttccaaagctagaggtttgttgagtctttnttttagttttttttttactctactctagagccattctaagtttctctttaagttctagcttgcttctatgtccttttcattgctttaattgttgaataatccttgaaaaattgtcttgttaaaactccattggtttagctntaatttaattnttttggtctttggttattgcttgtctctttgttttcttgtttgtgagttgtcatat

SEQ ID NO: 20240 - DNA, 430 bp, Glycine max
  unsure at all n locations
taacaaaaggcatgcgaagagggtggaattcttatatcaattcccttatgttatcaaacataaaaagggaaaaggtaatattgtagccggtgctctttctcggcgtcatgcattactttctatgcttgaaacaaaattgattggtcttgaatgtttgaaaagcatgtatgaaaatgatgaaacttttggagaaatttttaaaaatcgtgaaaaattttcagaaaatggtttctttagacatgaaggctttcttttcaaagaaaacaaattgtgtgtgcctaaatgttctactacaaatttgcttgtttgtgaagcacatgaaggaggtttaatggggcattttggggtccaaaagactctagaaacattacaagaacattnttattggcctcatatganaaaggatgtgcagaaantttgtgaacattgc

SEQ ID NO: 20241 - DNA, 243 bp, Glycine max
cagcttttttcgaggtacttacccggtgaagatcgaagaacgatgaagaacgaatgaagaacgtcgaagaacggttgaaatctttgcgaaattcctcaccgaaaacgttaccgaaacgtttcggaagcgcctcggcttaaattttcttcacggaaacaatttttccaagccaattcgaaagagagagaagtgcctaaggggctgaccccttccttcttgccttcctcccctatttatagcaaa

SEQ ID NO: 20242 - DNA, 363 bp, Glycine max
tcatgatgaatcaagattgattcagagagtttcgatgttttcaaagatgatgacaaaaagctctaaagtcatgagcacttcatgatacaaacgatgatgatctcacgactcaatacatgagttcaagattgaatcatcaacactccatggctcacatggaaatttgatttcaagagtcaacaattaagtttcaagactcaagttccatgaatcaatatcaagattcaagaatcaagagaagacttaatcggcatatgtattagaaagttctttcatgaactgattagcacatgaatttttctcaaaaccttataccatgactttctagtctctggtaatcgattacatgatcatcgcaatcga

SEQ ID NO: 20243 - DNA, 414 bp, Glycine max
tgccgctttttatgtctagtgattctagagagaaaaaggtccaagttccagagagttttgagaagatttgctgggtgaagatctaccgaaacccaagcttgaaacggaagccgttttgagagctcgagaagaagttgtgagtggttgtgagaacctaaaagtgaaagaaacattcttcccacttttaattttgcaatctttcatcttgctcttttctttggtggaaaggaggctttccggttatggaaagctcaaatcctctgttggatcttccttggaggtacttgatgtaaatatcttactatctatctaatgatgttttatgtggtctttgtgctatcagactttcattctagtatgcctttaccctgatcatatagatgcatgctttgtagggtcattcaacagtgaaag

SEQ ID NO: 20244 - DNA, 417 bp, Glycine max
  unsure at all n locations
nttaaattcaaatttggaaattgcaaattgtttcagatttcaatttagccactggtaattgattacatcctctggtaatcgattaccagagaggaaatagcatagttttgaaaagataattgttcttaaaatttttttgtaaaatatttcctttagccaaacctgtgcagcatcaattaaggaattctttctaagatcctatcaactaagtatatcgttcttcttgcatttctgaattcttgacttgaatcgcgcttatctttggcatcatcaaaacttcatatcatatatgcttctacaatctccccttttttgatgatgacaataatctaaaatcaagataaacgatacaccattgataatgcgtgctcacaacccttacacccccttaagattgaaatttatgcctaagttctc

SEQ ID NO: 20245 - DNA, 291 bp, Glycine max
  unsure at all n locations
agcttgtcaangatgtgagcttaangatgagacgggcgtgtgtaactaaactctaacttatcaaggaagttttctcaaagaatcttctcaaggaagctttctcaacaaagcttctcaaggaagctacctaatctatacatagaagcatgcgtaacactcggtgcatctttgatgaatgagagtcttgtgagacatacttcanagttgcacttctatccctcttttattcctgtactttgacgctcccgcctctctgtttgtctccctctgtcttttactacattgaagcat

SEQ ID NO: 20246 - DNA, 416 bp, Glycine max
  unsure at all n locations
gcttgtccgggaacagttatgcatgagttcatagatgtgtgctttcttgcgtccttccgaacagagtccaataagtatgacaacattaacatgagaagttctactgatacactattagaaaatatgttttctacatcggttatttatgactttcaacatcggcttttcagccgatgttgaaagtaccgacgttgatagtattatcgttaacatcggcttttgagaaaccgatgttaacgtaaaattaccaacatcggttatataaataaccgatgttgctaatatgaattacacccagacaatgtatattaatgttgaaagttaacatcggttcttactgaaaaccgatgttgttatcaagaanttttctttatataatgtctgtgtagacaaccgatgttaacgaatgtgtgact

SEQ ID NO: 20247 - DNA, 365 bp, Glycine max
  unsure at all n locations
agcttctatcacacttcagaaatcttctcaaagatcccaacggtcagatcatggaaaagtgtcttgtgaagttgcaaaccaaatttagagaagatccaacggttaacgaaggttgggaagcgtttttaccgaggcagcttcatgtagctttctctagaagcttcattaagaggcttcctccagaagcttcattaagaggcttatagcacagtccagacatcttctaaaagatcccaacggtcatatcatggacaagtgtcttgtggagttgcagaccanatttcgagaagatccaacggttaacgaacgctgggcattcgttttacagaggcagcttcatgtagctttctctagaagcttcatta

SEQ ID NO: 20248 - DNA, 416 bp, Glycine max
tgggaggattgatagggacccagtgttgagagaaatgatgatatgggctacgtgggagtacgtgagctcagttggaggtgggcaacagggaatggtgggtttatacatgatttgtggatgtggaaaactttttgtgcaccatcgcccgaccgccacctagtaccacatgtgatgggtaccccatattcctacaagcttgagatgaggaagtgtagaagggtgaaacttcctgcttttattcgttgaccacagagtggtacctggagatatgtcgcggggatcaggagaccttggggacgtcaggtggggtgctattgcccaaaaccaagcttgaccaatcccaacccaacccgggcatagccagtcagtgagaacctgtgatgtacctaagcaggcgagctcttgcagtcaacaga

SEQ ID NO: 20249 - DNA, 372 bp, Glycine max
  unsure at all n locations
agctttttggttttaaataaaaaggggtttctcttttctattattttatttaagcaatgccacatgtctccatttgagtggagcaaaaagggcctactttccctttttgactgtgacccatactcagtcacaaaagtgagaaaaatctgacctttgaaatgctaaaatcctgcctcggtttgcatgttgtttctctggttccagttcctcgtgtttctctgcgtccgtcagggtcagttttcgaaagtacgcaatatatatatcagaacgctcagaataaaaccccgagcgtggttcagaggttggtttcgttaaattntaagtcgcacgcacaacgatgattttaaactaattaattaagaattaacccat

SEQ ID NO: 20250 - DNA, 414 bp, Glycine max
  unsure at all n locations
ntgtggatttagtcttcgccgggaaaaggatcgtttctggtctgaaaagaggcaaatttgatcaccctactttgataagtgagaaaactagggcaaatgaagagggtgagaatgaaggagaaacccatgttgtgactgccattcctatacggccaagtttcccaccaacccaacaatgtcattactcaaccaataccaacccttctccttacccaccacccagttatccacaaaggccatccttaaatcaaccacaaaacccacctaccacaaaaaaatgcccaaacaccacccttagcgaaaaccaaaaaggaattttgcagcaaaaagcctgcaggattcaccccaaattccgatgtcatatgctaacttgatcccatatctactcgataattcaatggtatccataacccc

SEQ ID NO: 20251 - DNA, 412 bp, Glycine max
  unsure at all n locations
agcttatccgacctcccattaacagcgcctacatagaaaagtattgcatgccaaggcaagcacaacagcagggtcaggcacaaccgcagatgcaccattggcacctctacgacaaccaccatctctagagtccatctctgctcacatgcggaggatggagctccagatgcacgcatatatgcagcatgtgatcgactagcaggcagccaatcatatgggtcaggtgcagctaaataagagcttttaccgatacaccttgcatcaacagagccaagatatcatccctttcccgtggcctacccccaaccagttcagggccacagttgcatggcctggagataggcccgattntcaaacagggccaggactcgcatggacccccagagataaagatggagcacaggatgatgat

SEQ ID NO: 20252 - DNA, 351 bp, Glycine max
actgagggggctcacttctatcctaaatcagctcctcattactacggcccttttaaggtgttggagaaagtcggagcaacggcctacagactttctgaatctgcaaggatacattcggttttccatgtgtcactatcgaaaaaagctgtacgtgattacaatgttgaggagacacttcccttcccttggagttggttagtgacaatgcaacaagtatggaaccagaggcacatctataattagctccgcctctggagcattaagcaccatctttttcctagaaattctatatacctggtttctagtctggtattttcgctttcatggaccacacagtcaatgctacattta

SEQ ID NO: 20253 - DNA, 358 bp, Glycine max
agctttatggcaatttgatggctacatgagcacttaacacacaccacttagcagccaagactattagtatggacgactaaaattaagagacgataaagcttttaaatagtggaagaaactgaactataaaaaatacacggaggaccaacaattcattgaaaccataaaaatctaagctcagacccaaatcatgattaaaaaaaagtacatgctacgttgagttaagagtattccagaacaagcttaacaaataacaaagatggagcacattttaattattctttataataatggattccttttctttttctttttaatattgatgcatttcttatagtttataggaagtaagtgtaat

SEQ ID NO: 20254 - DNA, 421 bp, Glycine max
  unsure at all n locations
taacgtgtagtcgtgaattatgtaaaaaattccatttagtgactntctctagactccaacttttgggtggctctcacggatcaatgtctacttaccaagtcaaatacattttacccttcctcttggatgctagactgattctcatatgagttaattactgtcactaattccaactcttcaaaccttaatttacgactaggttgcgtttcacagaattagtagtatcttgtttaattctacatgtgaacactacttgtgaaattctaaccacgtgaagacattgaatggtagctagaataagcatccttaattaatcacttgatataattaatatgatgttgaaaagttaatcctgctcgaggcaaccttgatatcaacccttatgaataacattgattgaccgactcttttttttatatat

SEQ ID NO: 20255 - DNA, 264 bp, Glycine max
agcttgtgcatcctgtaccctgatgaggatgacgcatatgttcttataactggactcatccatttgcattacaacattcatggccttgcaggagaatacccgcgcaaacatttgaaggaatctcatattgtgagctccaccatgaagcccccacatgtccatgatgatcacatatatctgaacgctgttactcactcattagaaggagtggcacccgactggatgtattaccatgctacgatgaccgtcaccagctgcgatgac

SEQ ID NO: 20256 - DNA, 232 bp, Glycine max
tgatgacttggagactacaacaggcgatcgagctatatttctagaggaagcccaaatcgggacctgactgtatctagagctgtgggaggtatcatatgcatatgaagccctgctgagacagacatctacagactagtggattaaggaacgcgacaggatacaacttattttcacgaacctgtgaatgtcctaagaaactatactgctcttcagggtctcttcattgatggga

SEQ ID NO: 20257 - DNA, 370 bp, Glycine max
ttagcttgcacactcaaagggacatctcacctatatctttatgaaaaactatcatgtacatctgtccattacacaaaaataacaccatctaagcaaacttaactgagtagagactagttctctccttcttccataccaatatgtcctcctcactcagaatcaaattaatacttctaaagtcatgacctttttttatctaagcaaattattatatttatttctcctaatgatatagagatttctccattcccatctccacaatcaatttccctccctccggtcacctaaacctaacaccctggcttttatggctactacaaggttgtataatctagtatacttcctatatgtgaaaataaagcactttcac

SEQ ID NO: 20258 - DNA, 430 bp, Glycine max
  unsure at all n locations
tattgcttggaaaccaacactagataagatactctgtttnttgaatttatctcacaagaataccatcaatgacaatgaagtattgtgtgtgggatgtgttttgactgtaaatatacttggcacttgttctttgaatgcaatttttttctctagagtttggtgcggttactttagctggtggggtattcattttgcacaatataatgactctccttcgaacttctcacaattcgtgggtttgccaagttgcaatgattagaatgagttaccgtgataacaatttggtttgtagtgttttgggcaaaatggaggactcgtagttttcttgtttttaaaactataagaatgagttttgatcaaattgtttaacagtcaagatacacctttgtcaattaattagtactatatgtgattnttttntactgtccct

SEQ ID NO: 20259 - DNA, 340 bp, Glycine max
  unsure at all n locations
agcttttgaatgtgaagaacttcaattaaagttctaacaacatcattatgcattttttatttgtacagaacctataccgacaaacttataaggagcattgttatccatgagaaccttaccaccaaaattcttctcatatgtcacaaaccaatgcctatgttgacacatatgataagagcaacttgagtctagtacccactgtttagaatgttgttatagttgttcaccaacagccagaaccaaattgctttttgatgaggaattattctaaacaagagcatcaatagaatctttctttgctttctttggatagtcttgccttcaatgatntgattctttg

SEQ ID NO: 20260 - DNA, 426 bp, Glycine max
  unsure at all n locations
ntgagtctaaagaaaaagtcagtttctcaactctatctgaaagtgtcagaacatttagcctgaagacttctagtttctgagtaacgagagcatcatgcagaaaataataacagagaaacttcgggtgatgggtgcttagaggatagtcagaatagatgcattgcttcaaaattgtgtcaatccagcagtcatattgaagtctttctcgatgaatctaatattccttttaatgatactttgatgcctcaagatacatttggaggtgaaaattcttagcaactacaggttgagtcaattccacatgttgcacttccagatggaatccagcataagatttctggaagtaaactctggtctaaaacatgaaacagatctataactcanagatcaaaatggcttacaacggcaaattgctagtgttaaagc

SEQ ID NO: 20261 - DNA, 352 bp, Glycine max
  unsure at all n locations
tagctttgaagttctagtcattatttacgtttcaactttgttccatatattttcggcattttctattttattctcttaaaaaaatcccaaataacaataactacacatttattcatattaaaagtgaattgaggtgtttgtagaattaattttgaattaacatggttctatagaattgattgtaagtaaacataagtttgtagtatataatatgattattgtttggaaatttgctaccaaaactggatttgtgggcaattactaaaatgactngagttcaagagtacacattgaacaaatagcatgactaataatacgactcaagttagtgttgattcanaagctatttcta

SEQ ID NO: 20262 - DNA, 406 bp, Glycine max
  unsure at all n locations
tacccgcactattacccacaaccacccaccatatttatcaatgttaagaaaatgacatcggcagaaatgcacttgagaagagaaaggggcctatgctttacttgtgatgacaagttttcccctagccatcgttgtcctaataagcaatattttgttccacagtgggaagaagaggatgaacctgcattacaaccagatccaccagacgaggttgagacagctggtgaccctagtttgcaagatcatcatttgtcttataatgctttaaaaggctcatcaagtcttggaacaatgaagtttcaaggatcaataaatggattgngagtgcagattctactagataatgggagttcagataatttcctccagcctagactatctcaatgcctgaagttacctatagaac

SEQ ID NO: 20263 - DNA, 392 bp, Glycine max
agcttgttcttaaattcagttaagagcaacgcagagctcacattatctgcttcaactcctaaacaatccaaaatttttggcttctggttttatgtcaatacatcaaaatcttatgttttacttgtgtcatcatgtaatgcttcctctactattgattccataaaacagaaaaaaaaacactaaaaaatgaaacctaatatcatcaacaacataaaccaaaatttttggctgctggttttgtgcccattccccacatttgatcttcgatgatccaatctacaaatctcccccccgccccccataaaaatgaataaaagacagaaaataaaagatacttcagaaaccagttcagaaagaaaaaagcgctaaatgtaatatccaatcgaaaaatt

SEQ ID NO: 20264 - DNA, 436 bp, Glycine max
  unsure at all n locations
tganatgaggaagtgtggaaaggtgagacttcctacttttattcgttgaccacagagtgatacctggagatatgtcgcgggggtcaggagaccttggtgacgtcaggtggggtgctattgcccaaaaccaagcttgaccaatcccgacccaacccgggcatagtcagtcagtgagaacctgtgatgtacctaaacaggcgagctcttggcagtcaaccgataaaagaacaaagaccacaaagcaaggaggcttatgtggtggctggccagctgtgaatcttgagtgatatatgggatatggcctctggtaatcgattaccaagggtgggtaatcgattacaaggcttataaacgagatcaggaagctaagagggcttatggtaatcgattacaaaggggcgtaatcgattaccaggcttanaaatatgactggaat

SEQ ID NO: 20265 - DNA, 395 bp, Glycine max
agcttgaaggtaaactagatgccttggttaacctggtaacccaactggccatgaataaaaaatctgcacctgtcgccagactctgtggtttatgctcctctactgaccaccacacagacctttgcccttctatgcaacaatctgaagcaattgaacagcttgaagcttatgcttcaaacatctacaatagacctcctcaacctcagcatcaaaatcagtcacaacagaacaattatgacctctccagcaacaggtacaatcccgggtggaggaatcatcccaaccttagatggtcaaatccttcacaacaatagccttattttcagaatgctactggcccaagcagaccatacgttcctccaccaatccagcagcaacaacaacaacaacaacag

SEQ ID NO: 20266 - DNA, 422 bp, Glycine max
tcatagcttagcaagtgctcagtttcctgccaatgtaccccagaaagttgataagcacttcttcacagtgggccttggcacaactccctgccctcaaaatcaaacttgtcaaggacccaccaatgcaacaaaatttgcagcatcagtgaacaatgtctcttttatacaaccaaccactgcacttcttcaagcccacttctttggtcaatccaatggagtttactccccttactttcctattagtccattggttccatttaactatacaggcactccaccaaacaataccatggtgagcaatgggacaaaggttgtggttcttcccttcaacacaagtgtagaactagtgatgcaggacaccagcattcttggtgctgaaagtcaccctctccatttgcatggctttaacttctttgttgttg

SEQ ID NO: 20267 - DNA, 376 bp, Glycine max
agcttctacattcaattttgagcgtctcgtaatattacgggactcaatcagacatccgagtaaaaatttattgtcgtttggattggctcagagattcaacattcaatttcgagcgtctccatatattacgggactcattcagacatccgagtaaaaagctattgcagtttgaattagcttagagcttcaacaatcaatttcgagcgtctcgatatatcacgagactcaatcagacatccgagtaaaaagttattgtcgtttgaattggctcagagcttccacattcaatctcgagcgtgtcgatatattacaggcgtcaatcacacatccgagtaaaaagttattgtctgttgaatttgctcagagctttaacatt

SEQ ID NO: 20268 - DNA, 443 bp, Glycine max
  unsure at all n locations
ctgagccaattcaaacgacatattctttntactcggatgtctgattgagtcctgtaatataacgagacgctcgaaattgaatattgaacctctgaggaaattcaaacgacaataacttttttctcggatgtttgattgagactcgtattatatcgagacgctcgaaattgaatgttgaagctctgagctaattcaaacgacaataacgttttactcggatgtctgaatgagtcccgtaatatatcgagacgctcgaaattgaatgttgaatctctgagccaatccaaacgacaataaatttttactcggatgtctgattgaggcccgtaatatatcgagacgctcgaaattgaatgtggaagctctgagcaaattcaaacgacaataactttttactcggatgtctgattgaatcctgtcatatatcgagacgctcganattg

SEQ ID NO: 20269 - DNA, 391 bp, Glycine max
agcttgttcgcattatatcactaaaaaggattttaaggtccaatacctcagtttttctcaccaagaaaaaaatggatcattttaaggtccaacgccttaaaaggaccaccttccaagtaaaaagaatcgcttgattcgctcttttgaaagaactacgtaggtctgatttcctcttcgatggagggtacgtaggagcaagagccccgcttttgtcgacctcaaaaattaaaaagaaataaaagtttaaatacataatttcacacaattctaatttaaggctgttatcctttgggataaatgtgagaggtgctaataccttcctcaaacgtaaatacaactctcgaatctggaatattcttcatgaccagtttccttcggttttttcgacgtt

SEQ ID NO: 20270 - DNA, 443 bp, Glycine max
tgttgctcgtatggtgttgtttccattgttgccttggtttagtgtatgtctttatgttctacatttggattcagattgcacgtatttgatttttttgttaaaataaggattacgggtaacaagtttattattaaacttatttatgtgcaatacttaaattgcacttaaggacttcaattgatatctttaaagacttaagttaaaccagttggaaatagacatgtttgagatcatattgcatacaatttccatgttgctcattcatattgatatatatcattgagtgtattgacgaaagccatggcgattccattattgcatgtaattttcaagtgaacgtctaaagataaataacatacaaatgtgtgcctaaggaattgtgatacaattgttacactactagaaaaatgcaatttcacgaaagaaattagcgaccaatgtat

SEQ ID NO: 20271 - DNA, 388 bp, Glycine max
agcttataaacaatgtgagttgactctaacttatcgaataactcatccatagttggaagatggaattaagccttcattataggagtattcatggctcaatagtccatgcacatttgccaggaccattcttcttcctatgaagaaacacttattaagaatagggacatgtagggctaaatccaaccattggccaagaaattcgagaccttatccttaatttctaatttctgggcatgaggatatctgtatgggcgaaccttgaccaaagcagcattatggaaaagagggaaggaatggttcatggatcgtgctagcatgatgtgagtgggttcctcaaataggaatatgtattccataggcatctaatgaagaatgatgtaattcatgg

SEQ ID NO: 20272 - DNA, 441 bp, Glycine max
tggcattctcaatggtggaaggacctccgaaagctatatcttcagcctgagttcaatcttattcattagcagatggtatggaaggtacggggaggggaaaaaaattaaattctggaaagataaatggttaggggatgattgtaaacttgaacagcaatataatcagttgttcttgattagtggtcagcagaatagtaccatctcgaacatgggaagcttctctcaaggcaattggtgttggggcttaaagtggagaaggaatctatttgattatgagcaacatatagctatggcatttatggaagcaattactgatatacaaatccaacctcatatgcaggatattatggtctggatagctgatcccagtggtgtatattccactaagtcagcctacagattattgatgaccagcaatcaaattccagaggccaacatctt

SEQ ID NO: 20273 - DNA, 257 bp, Glycine max
acatgaccggctatgtgcgttctactatacatagtgaacagataacgcgcataaatccagtaggcactacgtcgcctgctagtatcgcttctttaacgacttgagctggacgccgaatcacttgaaggtcactagaccaaaacttaggttacaattggctttggacttggtcgaatatagctcggccatgttgtgtatgccatactcacacctttgtgtggatgagcagaagtgaacattacaggtgatggcggtgc

SEQ ID NO: 20274 - DNA, 319 bp, Glycine max
tgaaccagtgccggtgagagtgcgaacttaatctgtgagtgcacggctggcattgagtagtagtctttgcgtcaatctctgaatactacaatgaaatgtatgaaggtgcacatgatgaacgccatgattggatatataagctgttatacgctctatacgactaacttctgtataaaaatcattatccaaaccttgtatagttccccaatttatggttactctggagtaaattttgccaataaatcttgtttttgttggacaagcggcctcccatatcttaagaaggaggggggggggcgcataaaatgatcccgctcta

SEQ ID NO: 20275 - DNA, 376 bp, Glycine max
agcttgtttcctttacaattggagtcatgactaatgaacatgtacttctcacttttgtcatccaacttgtttgtatctcatttggcatgtgcacatgaccaatgcttccaaacacttttagatgtgaaatgacgggcttacttccattccatgcttcttgtggtgattatcctcatacactctttgatggagactggttagaaaggtaaactgcacaagccactgcttctgcccagaactcctttggaagtcttatgtggatcaagaggcctcaaaatacttatgaagggggggtcgaattaattattcctaaacctatactaataaagaaatcactcttctaacgcttttacttacgtttgtgagagaatattga

SEQ ID NO: 20276 - DNA, 410 bp, Glycine max
tcatgaattgtaattagaaagttctttttcactctctcatataatatattggatcattaaaatagtcgattctcttaaaatgttgatgagtgtataatatgtggattaaacttaatacccgtatgtgcaattaatggctccacacaaaatctaaagttcgctaacgagcataatcatcctaacaagaaatccatagtgacagtgacgacttaatgtataatttattccatttttggatgtaccaggttccaaatattactttcaatgcaactactttatctcctcaattagtggcaaccccgctggtcgcctcttgcccctggctcgttcaaatgtaacattgatgtagcgtttatagcatatcagcacacctgcaccccgggattgggtttatgcctttgtgatgctga

SEQ ID NO: 20277 - DNA, 380 bp, Glycine max
tagctttcatcaagtggtaatcagagcacaagagcttcaagtaggtgctccttaaacctacattaattgtttttctttaccttctcttccattgttgtttcttcatttttctccatgtatctcctcacatgtcttgttctaaatgtcgttaacatgattctttaaagtttccagcgattaaacttgctatagaagttacatttgattttatatggatcaaatttcttgttcttgttcttgaaccatgaattgtgttgagtctaggttccttcgagttttgtcttgtaattatttgaggctgaaacctaaaccataaaattcttacaaaaatattaaagttgaagaaaacctcataaatctatagtgacttgttcacctat

SEQ ID NO: 20278 - DNA, 436 bp, Glycine max
tgaatcggacctcagtgtgaaatgttatgaccattttaatttcacgagagcttccgttgttcattttcgaacgtctctatatgtgatgcgccttaatctaacatccgtgtgaaaagttatgaccatttgaatttctcaagagcttacgttgttcaattatgagcctctcgacatattatgcgcccgaatcggacatccgtttaaaaagttaagaccatttgtatttctcgaaagcttccttggttcaattccgagcatctcgacatattatttgcccgaatctgaccttcgtgtgaaaagttatgaccatttgaatttctcgagagcttccaatgtttaatttcgagcgactcgatatattataagcatgaatcggaccttagtgtaaaaagttatgaccatttgaatttctcaagagcttccgttgatcaatttt

SEQ ID NO: 20279 - DNA, 302 bp, Glycine max
cctgcttgcttttataataatggactcgacattcatgttctttacctaaggaattcttaccaatacaaatatggatcattttagaggcggatgctcttaatggaccacctttccgctaataagaatcgctgcgattagctcttttgatttagactaccatgtatgatgtctcttcttggacggaccgtaggagcaatagccctgattgggtgcactctcagcaattagcatagacataaaagttacctttcgttatatcgcacaaatctgatctaaggctgctatcctttgctataaatgcg

SEQ ID NO: 20280 - DNA, 403 bp, Glycine max
tgtgcagtgttggtggtgttactgatctacattgttgattattaacagtgactgccacatacgggtaaaatgtatacggatccgcaagctactaacttcataaattatagactgagagctcgacatgggtttcaacgagaggcctatgatttgtcgcgccaaatggactcaccatatgtggagtattcaccactctctaattactgtaagttctatgaacctattatcctatgataccccaatgttccttattaagaatactatttctaagcatataccttagcatctcacacatggaacttagccacataccgtcacatctaacatatggaccataatcacatacactgctatctcataggtagaacatagccacatactttaacatctgactgatggacca

SEQ ID NO: 20281 - DNA, 292 bp, Glycine max
gggtgaaacttcctgcttttattcgatgaccgtaaagtggtacctgtagatatgtaccgggggtcaccagaccttgtggacgtcaggtggggtgctattgcccaaaaccaagcttgaccaatcccgacccaatccgggcatagacagacaatgagaacctgcgatgtttctaagcacgcgagcttctggcatacaacagatggatggaacatagaccacggtgcaacgatgcttgtgcggtggttggccacctatgaacttgattgatatatcggatatgggctctggtaat

SEQ ID NO: 20282 - DNA, 450 bp, Glycine max
gacactatgaaactaagcttacaagtaagcttccatcaagtggtattagatctcaattatcttaagtaggctctccttaaacctccattaattgtcagctttaccttctcctccattgatgtttcttcattgttctccatgtatctgctcacatgtcttgtgctaaattatgttaacatgattctttagaatttacaccgattaaacttgctatagaagctagatttgactttctatggttcaaatatcttagtcttgttcttgaaccatgaattgtgctgagtttaagttcctttgagttttgtcttgcaattttattggctgaaacctaaaccatataattcttacaaaaacattaaagtcgaaaaaaacctcaaaaatctagagtgactcgttcacctattgtatttctgtcaaagaagtcatgtctagtcatgacactcgtcacat

SEQ ID NO: 20283 - DNA, 460 bp, Glycine max
  unsure at all n locations
gagaacgtganccgaggccttgatgcctctaacacactgggcgaangcacctcggacccggagatcctataaagtcgacctgtatgcattttagcttttctactactggggtgtcttcccaaacctcaaatgtattgcacggctacacaatcaactaggagattccattattaaaagacagaattactctcaaatctgcacctttcctagatgttaattaacccgccgtaacaccactttcttttaaaatatagggtgttaataactgcacaagactattgacggccaacacttctcttatattgacttggatttttaatcaacacctttctcgtcccaaattcaaaattgattcgcaaatgtgttgggaaaataccattagattgggcgcaatttgcgcccaataaacataatcggcctttttctcctcttttcctcttacgacatgtcgaacaatact

SEQ ID NO: 20284 - DNA, 185 bp, Glycine max
taaggatctcaaacaaaggctgataggctggagcagagatactgtaggtgacttgcgctttaaggttaagcagctgcagcaaaagctgaatgaattggaagattccatgcctcaccaaccttctaaccagcaagtccttcagttgaagaatattcaggctaagctatggcaataggctaagttgc

SEQ ID NO: 20285 - DNA, 368 bp, Glycine max
agcttcagtattcaatttcgagcgtctcaatatattacgggactcaatcagacatccgagtaaaatgttatcttcggttgaattagctctgaggctcacaattcaatttcgagcgtctagatatattacgggactcaatcagacatccgaacagaaagttattgtcgcttgaattatctcagaacttcataattcaatatcgatcgtctcaatatatttcgggactcaatcatacatctgagtaaaaaagttattgtcgtttgaatttgctgagagcttaaacattcaattacaagcgtgtcgatctattacgggactcaatcagacattcgagttagaagtgattgtccgtcgaatttgctcggagc

SEQ ID NO: 20286 - DNA, 430 bp, Glycine max
tctagtcatccataaacctcctcattggtacggtccagcaaacgttgcatctgtgcattcatcgcatccagtaacagacgttgacctccgtccaactgatgatactcgtcaccaccaccacctgctccagccataattcaacaggaaaaaaaatgtgcaataaaaattattaaggttttaggacctcacaacactctactcacgtgtttaactcttagatggtagtacactcgtgtttaatgctctcaatataggcttttgtgtaatgtattccctcttgccttttaccactcatgtttcctcttaagttcctggatggaccaaattagacacacaaggtaatataaaataaaaggaaagacaatataatgatcacaaacagatttgatttgggataacaacttggactttgatttggataataatatat

SEQ ID NO: 20287 - DNA, 393 bp, Glycine max
agcttttaagataccgagaaagatagagctgtttgtaattttagtcctttgttctgtttgatactccataataaaatggtatattactattattattatttgttctaataaatcatttactattattattttattttatggtttgcgaaataaaaagaagataggaggtttttctagaggtgaatgatgagaccattccatgcctcttcaattaagtgtttttcattgaatctctatatttttgtcgggtcaataacatatttttgttatcagctggtgatcttattgatgatgagaattggcctccaattttcctaatcattcatcatgatattgccaataagataccgattcatgctcaaaggctgcaatatttggcctttgcaagttggt

SEQ ID NO: 20288 - DNA, 451 bp, Glycine max
  unsure at all n locations
ctttcgattcattctatgtacccgtagtggtccacattgtgtttcgtgcatttttattctcgttttgtttactttttatacccccctcttaacgtgcttaagccattttacttaagtcatttctcgcttaacttaaaaataaaataaatttccaccgaacgtttgaattgtattatccgttaacttcggttaaaataaattccgaccgttcggtcgtaccgtaaccacgttggaaatcaaaaaaggaggtaaaaaataatataataataaaaaaaacatcttttagcaaaataaagcggaaaatcaatcggacgttttctctttgggatttctcattcttaatcgaattgattaataacgaaagtgaaactagggctaaaatcaactcgcctagtcaagctcgtccacaaaaataggctnttgaagttggtcatttcaatntctcactaag

SEQ ID NO: 20289 - DNA, 389 bp, Glycine max
agcttggcattgaacataacttttctgcacctagaacccctcaacaaaatggagttgttgaaagaaaaaataggtctttggaagaaattgctagaaccttattaaatgatactcctcttccaaaatatttttgggctgaagccgataatactgcatgctatatcatgaatagggctttaataagacccattttaaagaaaactccatatgaactattcaatggtaggaaaccaaacatctcgcatcttcatgtttttggttgcaagtgttttgtattaaacaatggaaaaagaaaacttaggaaagtttgatgctaagtaagatgaaggaattttccttggttattctttgcatagtaaagcttatagaatatataataagataacaat

SEQ ID NO: 20290 - DNA, 441 bp, Glycine max
  unsure at all n locations
ntggaatgaatttgttttctagcaaaacaaattattatacctatagttcataaggctaaatggaccaatctaagttttgtgcttttatttgttttttgcttagctagtctcttcttaagtaatctcccttgtttttcttgaacaataggtggcagaacgtaacaatgatcctcaattggcagacttcattgagagcgagttcttgtatgagcaggtaaaacttgcagttgaattcatagtatggttggatttcataagatataagactccttgaccattgtatgtaatacaatactctgaactctttacgtcctanaataattgttgtcttttacacggatcaagaaaataataataaataaatgaatgaaatagtaattntacacaagtaaccttacattatcattaatttatttctaaattctataattggttctcaat

SEQ ID NO: 20291 - DNA, 393 bp, Glycine max
agcttataaggtgttgtccaatcgggtgcctggatgatgggggtggtagtcaacgctcttttgaggcaatcaaaagcctctttgcatctgtcattaaagtcaaactccacctccttttgcaacaagttggacagtggaagggctacttttctaaaatcccttataaagcgcctgtagaattctgcatgaccaagaaaagatcacacctctcgcacacaagaggggtaaggcaattgtgaaataacagaaatttttgcaggatctacttcaatacccttattggaaataatgtggcctaaaactataccttgctcaaccataaaatgacatttttcaaaatttagaacaaggttagtttcaatgcatctattcaaaactttttccaaactattc

SEQ ID NO: 20292 - DNA, 444 bp, Glycine max
  unsure at all n locations
tgcttctacaatctcccnctttntgatgatgacaacttctgaaatctagaaacacacacacacacacactttttcctagtcgatcactcacataaatttccattctcccccattggttttgaatttatgcttctcttaaaaataagttgattactcatgtgagttcttgatttaatccctatttctctccccctttggcatcaacaaaaagccaacgtgtgtaacaaatttgaagcatacaaatacaactaagcatccatacaatattcatgggataatttaaaccaaattatgaagcaagaatcatgaagcaagaacaatgaatagatcaaatataaaatccacatagagaaaagcatatagaaatcaagcaagataataaattatcctcacattataatagaagcatatgtgcataaataacacataagtcataagtcatca

SEQ ID NO: 20293 - DNA, 295 bp, Glycine max
ctgaacacggatgatagtccagaggaaagcccttccaccaaatatgcaacttcctattcaagaaacaagaaaatattcaatttagtgaaaaaatgaattatagataatttatttaataaatgggttccaaacaatttgagtgagtacgagatatgtttccatattgatgttaaatattggttcacgcataattaactctgcatgacaacttaatcagacattctaactagctatttttagtacaattttcttattcaaactattttctttattcacaggatctaaacttgagata

SEQ ID NO: 20294 - DNA, 379 bp, Glycine max
ttgggcttacaagctcccgagggtgccctattgtgagctacattttatttacgcaaatacccttacgaagcccccaaattaaggacttatcataatttgaaacccttatgctctctcagaaccctgaaacaacgtcaaagatatcaaaataaggctcacgggtctattcaaacacatcattattactcttggctcaccaggggtgcaagggataaattcattataagttggctttaaatgccgaacgactaaaatacaaagaaacatggccggagaacatatccaccttatgcagataatctagcagtctaagagtgatgcagactacgaattaaagcgacgcctctattataagttacacaaacaccgggacaagata

SEQ ID NO: 20295 - DNA, 382 bp, Glycine max
tgatatggtctacaccgatgaaaggatcatagtgagtctataatgaggctaatctgatcatcatactttgataaatgccaaaaaaaaatggggctaatacatagggtgaggatgaaggagaagcccgtgctgagactgccattcctatacagcgaagttttccaccgacccagaaatgacattactcagccaataccctaccttgttcttactcaccgcccagtaatccacaaaggccatccctaaaacaaccacaaaggctgtcttccgtacttgcaatgacgaacatcacctttatcacacaccaagagcaccatcctatagatgaatcttgccgcgagaaagcctgtagaattcaccccatttccagtgtcatatgctg

SEQ ID NO: 20296 - DNA, 472 bp, Glycine max
  unsure at all n locations
agaatcttttttgaacctgagacntgcgagcacgtgacactatnnaagacgtctgcctgcnaggatgtgataaaggatcactcacgagctgttactctttgtaatncctatactgacgcgttataacattgactggccattacatgaccatggcaagacaggaaaaactcttacatcacccagcatagaacgctggcttctggtccccctttactgccctatggtaatcgcttggatgacagtaccactcttgcttaacaatgttctttaaacaaatattgtggacggaacgtgctgagcattttttcttcgcaaaagacggtatacctatcggatagcggccctgacatcctgtatgcatgatgccttcatgaacccactcggaatcggtattgacgatcgacttatgattttgaacttgctgactttgattttgcctgagcttggcatatcaaataacttggaagcttcg

SEQ ID NO: 20297 - DNA, 392 bp, Glycine max
tgcttgtttgattatggggtacccatcacatgtggtactaggtggcggtcgggcgatggtgcacaacaagtttttccacattcacaatgcgcgcataaacccaccatcccctgttgcccacctgcaactgagctcgcgtactcccacgtagcccatatcctcgtttctctcaacaccgggtccccatcaatcctctcaagcttccacaacatccaagcaaaacaacattcaaacagcacaagctatcacagccaagcaaaacagagcaaaggcagaaaactctgctcaacacatcaaccaaaatcacagtttttctcacgtaaagaccacagtaacaattctttcgatccaattcgttaaccgttggatcgactccaaaatcttactggaag

SEQ ID NO: 20298 - DNA, 109 bp, Glycine max
cgcatccagacaagaagcattcaacacgcgctgacgcgataaagaagaagtggaccaaaaagtaattgcaggggaaatccaacagggcctaagtggaggggtgagaagc

SEQ ID NO: 20299 - DNA, 386 bp, Glycine max
tagcttgtgttgagctctaggagtcgttataggcatgaaatagtcatctacacgaggagtgttcttccccttttgagacttggcagaaacggatgattttggagttcttcttaaatcctcaactattcttacaaggtcttcattaaaggtattactttcctcaaattgttcttgcatttttcttttcttgattttgtcattttgttcaagtacttgtttcatttgatgttggacattaacaagaaccttcttgcaaagcctcaacttggcctttttgtccaaccaagtgagccttgaacctattaataccacctcccttaacctatttttcacaatataaatacacatcattgtcacttttgtataaccttcatcaatttgtttac

SEQ ID NO: 20300 - DNA, 439 bp, Glycine max
  unsure at all n locations
ntaacctcatcgtctctcacagtctttagatttgggagctcttccagtccttttgttcggactctcagccacttatgatagccgccgatgatcccattactgcttcccctaagctctctgtcctttcttcacgccgcatcccatgccttgcgaactccttggagtaccctcgcgttgtggtcactgaaacctcgtgcgatgaaaggcgtgatgctttcgtctgatggcactcctctcatgggacatccttcgcatgaagatagaatcctgattcttccttccttctagcgagggaaccatttaacagacgcccctccatgctagccaagagttggtgcacaacaaacaattcttgcgccgctcttttcacatccccggtcgaatgtgtcatacatggccaaaatggcgacgatcgggctttcctttccatgatgaaacg

SEQ ID NO: 20301 - DNA, 382 bp, Glycine max
agctttttagtttccaagtgccaattcgtcctcttctttagtccagtcttcttctggcttcaattcatcagcgggctttccttctgtgtccagcatcttgggatgttcccagcctttgatgacagctttccaggttctgctatccagtgatttgaggaaggccaccattcttgctttccagtattcatagttgcttccatcaagaattggtggactgttcactggtcctccttctttctccatgttcatcagaatttatctccccacatctcactctgtgattgcgagtgttggctctgataccaattgaaattctgataccatgggacagatgtcgtacaggatgtcacgacatcacgcttcagaacatgcagcatatgtg

SEQ ID NO: 20302 - DNA, 438 bp, Glycine max
tgcatgattcacattctccccctttctcaagcaaattcttaattctttttgacatcatcaaaatcttcatgatttacattctccccctttttgatgatgacaaccacctgtaggttaggagcaacaacaaagaaaaaatatctatttgaatataatttactcccccttggttttgcaatgattgcttatatgagacagttgaagatttcatatttttcatatgtaaacaaattgtctcataaagaataaataatttttcttactattttatcttttatctttctctccccctttgtcaacatcaaaaacaaatcatgaatagagaggagaaagatgttaccacttgttgattacatacatatattttatcttttatcttgttgattgcaatgtatgagaatgaagtgataccaaaaggcattataacaatcatttaat

SEQ ID NO: 20303 - DNA, 516 bp, Glycine max
  unsure at all n locations
acacagccagccccacccgactacacaaanacaaccannnnnnnnnnnnnnnnaaaaagggggngtggagcgtagncatcgaacacncnaaccnnacaagcganccnnaaagcccgcccgcaggcaggcaancaatttatgacatacacgcccaangaaccaccgacctcaggagcacgcacgcaagagatgaacacgctagaacgaaacacgcccaacatacacacagaagagccgaggaccacgaaggcccaaggaaagacccaacaccaaacgacgaccaaaccaaacgacacccaagaagacaagccacaaggagacaagagaggagaagcacacaacaacacccacgggagcaaaaacaagaggacgcaacagcggacaaaagaagaacaacaggaagcaagccagcgaacacacacgacaccaagaaaacgacaaacccggaaaaaccaacaagacagaacccgggaccaccaagacgcagacaaaagaacacaaagcacaagacgggcg

SEQ ID NO: 20304 - DNA, 378 bp, Glycine max
agctttttatctaaggaacattcttggtggtgaagctccttcttccatggcttattccctagtggatggcgtctaccatctcctcttcttctttgccttacgctgcatctccatggtggaaaatcaccattgaaggacctcattgaagctcaaagattcagcctccatagaagctccacaagcaagcttccatcaatgaataacatgattctttacaatttccaccgagtaatcttgctatagaagctacatttgattctctatggttcaaatttcttgttcttgttcttgatcttgaaccatgaattgtgttgagtacacgttcctttgagttttgacttgttattttttgcggctgaaacctacaccataaaatta

SEQ ID NO: 20305 - DNA, 343 bp, Glycine max
  unsure at all n locations
aaatgaggaataccttttgcatttacgcgtctacatcgataggcaaatctgttactgatattcctcacaaatgttaagacccacgtactttctgtgtaccttgcgttattgggaacaacattgttaagaatgccatgctagatttatgagcatgagtgagtgccatgcctttgtctattntcaattatatatcctatggaccttggcaatctacatatggcctaattcatgtggcaaatagaatagttgcttaccctacagctttcatataggatgtactgatgagggttggtgaacttatttaccctgttgattattatgtgcatgatattgaagaatgatt

SEQ ID NO: 20306 - DNA, 367 bp, Glycine max
tcttgcttgtacattgcacaatgttggtgttcggatgaccttatgacttatgcatgctgcattcttgtggatcttgcattcacattacattattggtgacattcttttcattactggaaagcttatattgttattactggggaagcagcacacatttatggccatcgtccgtgatagaaaggaatcataatggatggataagataatatcataaggagccatcccacttcttgaaccatataattgatcatatggctgggctaaccctcctggggatgcattcatggttacaggccctgagtattttacaacaaggcgtaaggatccatctggtgaatatatgctcaaacctctccgttttgattgg

SEQ ID NO: 20307 - DNA, 430 bp, Glycine max
  unsure at all n locations
tggggttggttgttttttttataaaaaatgtccgacaacttttagattcttttgacaaaaatgccttactcttttatctctcagatttatagcacctgtgaactttgactggattgagaatttggctaggtcttgttggacgtgtaacgtgtgacattgagcctagattataataaatggaaaccaagtagcttcctgtcaaattcaaactcgttgatgaaaaactatggccacattaattaagactgtttacaagggcttttgatttttagaagctgatagttgaagttgttaagagaatctaagcttgctcagattctgcaaatcctgtgacaaaacaacagcaagaggtgacgaaagaaatagtcaatagtgaaggattccgctgatgggaaggaagacaaangtgtttgactcggaactagaaagt

SEQ ID NO: 20308 - DNA, 394 bp, Glycine max
agcttctagtcgtccatagacctcctctgtggtacggtctagcaaacgttgcatctgtgcattcatcgcatccactaacagacgttgagcgccgtccaactgatggtactcgtcaccaccaccacctgctccagccataattcaacaggaaaaaaaaaatgtgcaataaaaattattaaggtttcaggacctcacaacactctactcacgtctcttagatggtagtacactcgtgtttaatgctctcaataggcttttgtgtaatgtattccctcttgccttttaccactcgtgtttcctcttaagttcctggatggaccaaattagacacacaaggtaatataaaataaaaggaaagacaatataatgatcacaaacagatttgatttgggat

SEQ ID NO: 20309 - DNA, 387 bp, Glycine max
  unsure at all n locations
tcgccggatgatgccgatcgaacatttcccaagcgacatcatccaattgttcttcagggattgaatagaataaacaatggccggtgtcggtcactatatggccccgactgatatccttcagccgacattgcgcaatttcttttacaaacgctggccgaaaatgtttttttacggtagaggaagttttttgtttttgggttccctaaaaaaattgcaatgtaggtcgggtagggtttttccgtgcgaagctcaacctganggttgtgcttcgggcgacactgacatgttctcatttagtcggccaaaaaaccgttacccaaccccgggaggaaaaaaaccatctttcacaaaaatggatggaaaaaaaaatgatacctgacgtcggcg

SEQ ID NO: 20310 - DNA, 387 bp, Glycine max
agcttattctttttggccttgcaagcgaaggagctcatcacaaccaacacgcttacactgcagcaagatgtttgtacctggtaattggttcagttagctttttatatcagaaaatattaattgttaattttgttagtttttattaagagggaatcaaactcgagcctttttttgtctttacttcctttttaacctctcaatcaattttatattccgaattggtttggttacttaattaatactttgtggttcttcctcttccccactatgtatttcattgcatgtatagtgtatacaacttagcaattacgtaacgtaatatatatgtactgtgttgtgttatactgggatgtaggatttggagaagcatcaccagaagcaaaggct

SEQ ID NO: 20311 - DNA, 445 bp, Glycine max
tgatctgctatagggttaccatcagattcggatgcattatgctgatatccccaagattgctttcagaacccaccacgtccattacgagtttaacgtattgttgtttgggttgtgcaacgcaccgtcgtccttccaagccaccatgaacctgctttttcgatcgtatctccgccacttcatcatcgtcttcttcgacgatatcctcatatacagttcttctttcgaggctcacctgagccatttggaaactgcttttcaggtgctgcttgacaatcattctgttttgaaattgtctaaatgtttctttgtgcagcctcaggtggagtaccttggacacatggtttcttgacgaggagtggaacctgtggcttctaaagtcgcagccattcatcaatggcatgttcctcattccatcaaagtcgttcgcatctttctaggcctcgca

SEQ ID NO: 20312 - DNA, 389 bp, Glycine max
agcttcttagtttcagatgatgcagatgggtttgtagctacctcatgcactcctctaatgactatggcatcatttctggcgctaaactgctaggagttggaagccatcttctctattaaatttctggcttcagcaggagtcatgtctccaagggctccatcactggtagaatctatcatacttctctccatattactgagtccttcataaaaatattggagaagaagctgttctgaaatctgatggtgggggcaactggcacatagtttcttaaatctctcccagtactcatacaggctctctccactgagttgtctaatacctgagatatatttcctaatggttgtggtcctggaagcacggataatgttttctaagaatactctctt

SEQ ID NO: 20313 - DNA, 438 bp, Glycine max
tcaagaataatgacatcatccaattatttatttcccgaagggaattctataaataggcctcctatttttaatggcgtgggttaccattattggaaaacccgcatgcaaatttttatagaggtaatagatctgaatatctgggaagcaatagaaattgggccctacattcccactatggtggcaggaaatacaaccatagaaaaacctagggaagaatcgagtgaggaagaaaagagattagttcattacaatttaaaagccaaaaatataattacatctgctttaggaatggatgagtactttagggtatcaaattgtaaaagtgcaaaagatatgtgggataccctacaattaacacatgaaggtacaacagatgtaaaaagatctaggataaatacattgactcgtgaatatgaattatttagaatgaatccaaat

SEQ ID NO: 20314 - DNA, 389 bp, Glycine max
agcttgtatatattgtttgtgaaggacaaaagtgacttagtgataaagaatacttgggtcttaatcttaggggaagattaagtgtagtgccaggagtgacctatagagtactcattgtagctagaagtggcatagagaatacttgattgtaatcaaagaattaattagtgaaatccttcaaagtttgaaggaaaactggacgtagcccaagagttgggatgaaccaatataaaacttgtgttttctttactgcttctatataactagttcttttccatatgttactcctacactactctatccaagttttgtgaactgattttctaagcacataatgatttcaaaccccttggacgaaacccaacgtctattaatatctatttgagaaa

SEQ ID NO: 20315 - DNA, 431 bp, Glycine max
  unsure at all n locations
ntacagaaataagacacaaactatcttgcacaaaaacattccttcatttattcttgtaaaactttctataattctttgtataaacactaagctctcaaaacatctttgtaaaccttgagagaaaagactaaaagtactgagaaatatatatgtttgcaatatgatatgatattagtctgtgtgaaaacctccaacaaatcttattgatttgtctagaaccaacagtggctaaggttgaggaaccttggctggggttatagctaacactgaattatcgagtagatatgggagcaagttagcataggacaccgaaattggggtgaattctataggctttttcgttggaatattccctccctggttggcatcttggtttgtgttaagggtggtgtttggcattggatgtgcggcaggcaggctctgtggttgat

SEQ ID NO: 20316 - DNA, 394 bp, Glycine max
agcttctagagcatgtatctttacttgacaactatcatgagttgacagcttgtagaaccattctgaggtattctttttgaggttcccattttgaggaacctttctaatgagcattctgaaggatcattacaatagttattatgatgtttgctgagaaaaaaattcatacttgatagattctgttgatgaagttcatgttgataaacctttatgaagtagtacaacttcatcaaacttgacacttcttcatagctgcaaacatttataagtagattgcttcaaaaacactaagtgaagattcaattgttggtgtgatagtgttttgtccatagttagacagtgtagtatcttcagacttctattatgatgcttctcatcaaagcatgaatcgtat

SEQ ID NO: 20317 - DNA, 444 bp, Glycine max
taatacaccgccactacatctaataaatgaaaaattattaatttaatgcatactatgctactcatgtaacaatgaatttgagattcatattaccttgtaaccaatgaatacgatggtgtccgattaactcttgctgcaatgaagggcatacgataccatgcccaagattgcaacaatgacgcacagccacccatggttttggcatcaaggttagtggctctacacaattctttgtacaatgttgctagacaagcagagccccaactatatcacctgactcagttgagatcagcaaacacaatgagatacatcaaatgaacccaatttctcatcttgttcggcattaaaaccccaccaattagccgcaaaatgtaagctttacaattctcttctaactgttgttgtgttggttctgagggaagtgcaacatattatcttgcaatc

SEQ ID NO: 20318 - DNA, 382 bp, Glycine max
ttgctttacatcccgatcaagagctcggaaaagggatgctaatactgctgcactcctactgtaatgacttgcctcaatcaaattcgataatcaaatgatatacataaaatgaactctcgcacctgatgtatctggcatcaaacagtcgcctatcagcatcatgatatgagctatagcatgttttgcaatgacaacatcaccagcattaactggaagttgctgacaattttgctgcgaccaacttagataaatcattttaccctttacatacttaccatgtggagtgtgccttatttatgcttgacgagcaacacgtacatcaccggcgatgatactagttatcaacagtccatcaatcctcaggcccaactgtatggtcaca

SEQ ID NO: 20319 - DNA, 439 bp, Glycine max
tattaaagaatacatttatgctggatttagaggtcttattgcaaaataaattatcataaatatcatattgggccttaaaaaaagcttatagccttaaataagtttgattcgcctcttataaagggtaaagtctatctatttttatctttttgtctcatgtatgagtaacaatgattttaatattatattttacataaagtttgttttctcattggcccattaaccgattaaactatttaatgccaaattatacttttttgaaatctttaatatgaaataagttaaataaactaatagattaaacttaacttccaaaaagatgtaatcaaatttgtgtacttagttgccatggaattcaatgaattcctttgaaacttggttgcgaggtttgagggctctaaaacgaaaccagaaatgcaggaaggcttacacagacaat

SEQ ID NO: 20320 - DNA, 385 bp, Glycine max
agcttgctcaaaacaaaatctaacattccgatccactcaattcatacaatttctcattcaactcaatcacaacacttcatttcatacgaaatcaaaccactgaatatcatattcaatcagttcactgttcaaacatgcttttgtacaagctacaaacactaaaacaacataaatttaaaagtctggaatttaaaagactaataaagcataaactaaataactgataaaataaaactgttcataatttgcaaaaaattttaaaaaaaaactatgcaaaatttaaaactcttggtcatcctactgctggtcttctgcatgctcgttcagatccagcactagagcagctggtggatcctgtgaaatgggatgctcttgctccaatgct

SEQ ID NO: 20321 - DNA, 439 bp, Glycine max
tgtaggattatggcgtacccatcacatgtggtactaggtggcggtcgggcgatggtgcacaacaagttttccacatgcacaatgcgcgcataaacccaccatcccctgttgcccacctccaactgagctcacgtactcccacgtagcccatatgctcgtttctctcaacaccgggtccccatcaatcctcccaagcttccacaacatccaagcaaaacaacattcaaacagcacaagctatcacagccaagcaaaacagagcaaaggcagaaaactttgccaaaacaccaaccaaatcacaacttttctcacttaaagaccccagtaacaattccttcgatccaattcgttaaccgttggatcgactccaaaattttactggaagtctatagtacatgaacctacattgtgaccgttgggatctactagcaaacatcca

SEQ ID NO: 20322 - DNA, 397 bp, Glycine max
ttgcttctatgctgcaccaacgactatgtattattaacttagcatatctacactttaacatatagcatgaaatgaagagcctgctagatctgactacctataagcgaactttacattttatatataaatataatgaactattccttgattcaatacacgctagcaggacaccgacagatgctttgaaagtctcataccgatatacatgttccaggatagtgacaaccattcgtgctcaacgacgcgttctaccttccttaggtatatgcagcagcacatgatcatgtataatcttatatatgacaattgctagttatatatgttgagggaaatcttccttaagatgtaatttctattggtagacgtccgggatatcaagaaaatgtaatcaaaaaat

SEQ ID NO: 20323 - DNA, 439 bp, Glycine max
ttgataaatatttatatgaaatatattcacttaaaatgctatatatttagggtaataatggatggagacattatacgtttttgttactaaagattttatttaactaaatttaaattgttcgtataaacaatttaaactaattatatgatgtattgtattaattaatatttaataatactgcattaatagaatatatatatatatatatatatatatatatatatatatatatatatatatatatatatatatatatatatatatatatatatatatatatatatatatatatatttacgcatataaatatatatagaattttttgtttttagtatttcgtatattccacaactagataggatctctatagataatgagatatgtatatggcattatatatataacattgatgatagatatgttctctaccgatgtcttt

SEQ ID NO: 20324 - DNA, 390 bp, Glycine max
  unsure at all n locations
atgtctttatttgtgtgggacggcgggctctcttcgacttgttgtattcgacgctaactcttaccgtaagattacttgccgcgacgctagtgatcatgtgcgtactgattggctctttacctggactatacatcccacgattgtcatgggtgtataacatgctggaaatgtcgacaatgtgtatgactactgcacgcctgccgtgattagcgatgaaccagcatacaacgtgccgtcttatactggcactagacaaacagcgctgtcccatgagggactcctacgctgatatgtccaccacctgtgaactagatgtatatcagcacataatcgattctaacgccgttggaccataccgcacggctgatagtctctcttccagaatattcn

SEQ ID NO: 20325 - DNA, 409 bp, Glycine max
ggttcgaggtacttacccgttgaagatcgaagatcgatgaagaacgaatgaagaacgtcgaagaacggttgtttcctttgcgagattcctcacggaaaacgttacggaaacgtttcggaagcgcctcggcttagattttcttcacggaaacaatttttccaagcaaatttgaaagagagagaagtgcctaaggggctggaccccttccttcttcatttcctcccctatttatagcaaaataggggaggtggttgccgcccagctcgcccaggcgagctcagctcgcccaggcgagcagggttgcttcctccagaagcaaccgccttctggaggaatcttctggagggcccaagtgggcctgggtgctatttgcacccccattgttactaagtacacccccctctgcctt

SEQ ID NO: 20326 - DNA, 392 bp, Glycine max
tagcttatcacttttacattaaaaaatatatatttttcttttctagttgatatcattacatatgtgcgttgttgaaatttaaatatgccattctactgtttatggaaaaatatggagaaattaacgaggaaattaagtcaaaagatgggtaaaataagggaaaagtgcaatgcagtcgcaaggttggaatttatactgtgccataagcccataaccataagagtaatcatatttcaatattccaacggctgctacatctttttttccgaaggctgctacatcttattattgacacttattacttttcgagtttaataattatttgttgacaatataaaataatcatcacttaaataaactattattgatataattaattctaaataattatt

SEQ ID NO: 20327 - DNA, 432 bp, Glycine max
  unsure at all n locations
tctgtggttttttatcagcaaagataaatatattcatatatatgaaaagagtaccagaggtactttaatacagctgtttggtttctgagatttggttcctaaacagattagattaaatctagaaaggagccaaaaccaggcacctattacacttttagtatgtagcttaaaccagaattgcatcatctactaatacataaaccttgctccaagattactaggagagataatctgtttggttgaaaagttgcacatgggcgtctctagtgcttacttatgtggtgtattttgttagttggttgttctggtgtctgtaactcttgagggctacaacatctcacaccttgtgaccgttgttcaacttctcttttataaaaataccatcccaattntctctatgaatttgaataagattcatacaataatagcatc

SEQ ID NO: 20328 - DNA, 378 bp, Glycine max
agctttaacgtaaaccaaaacaccaaccaagaaatgaattttgcagcgagaaagccttagaattcaccccaattccagtgtcctatgctgacttgctcccatatctacttgataattcaatggtagccataaccctaaccaaggttcatcaacctccatttgtccgagaatactactcgaacgcaacgtgtgcttgtcatggagaagccccggggcattccattgagcattgtaggggcctgaagcgtaaggtgcaaggtctaattgatgcgggctggctgaaatttgaggagaatcgcatgtaaatcctgacattaacaagagatgccacacatggtgcaattttgaaagttgttgttagatgtctctgatgactca

SEQ ID NO: 20329 - DNA, 431 bp, Glycine max
tcacatctcgtattcgcgtcattctgatcttagtataaaggtaaccgatctacaatgtataaatgaggattcatgtcatgagtaatgtttgtaagagttcagtgtaatgatgaaaaccagaaaggtaaagtgaacaaatcttgtgcaactatgatcaaataatggtccatccgttatacaagcatatctagacctatttgttttgggatatacagtttactgaccatgagattctagttttggacctatggttttcaggttgaagtaagcatgtagctgtgtcaatatatgctgaaaagacttccactggatctttcccgatttcccttattattatttgttgtggaatttcttgaatgcattaatgtcaagtatcctgtcccaaataataaattcatattctctgttcattatgcttggcaggcgagggg

SEQ ID NO: 20330 - DNA, 372 bp, Glycine max
agcttgtcacccagctcgcccaggcaagccaggttgcatcttccaaaagcaactgccttctggaggaacatcctggaaggcctagtgggcctggtttctatttttacccttttttagtaaatacacccccatttgctttttttggtgattatttttctgtaatgttacaaaactttacgaatttcgtaacgatacttgttttattttcgtaaggttacggaacctttcgggtcatgtaattactccttttttagctttcggaatgttacggaaactcacggattgcgtaacaatacttccttttgatttccggcatgttatggaatttcacggattgcgtaacaatgcttccttttgatttccggcatgtct

SEQ ID NO: 20331 - DNA, 429 bp, Glycine max
  unsure at all n locations
ttgngacaagcctataccaaggctcaaataaacttgaaagttctagacaactttcccaaggtgtggaagacaacaagcacccaaaatgctagagacctaaagaacctttcctaggatgaactgttgggggttcttagagtccatgaagccaacctttcgaatagatatcatatgtgtcataccctaatttcgtccggggttcattatttgatgatatacaacctttgattggccgcttcgagatactgggcaccctttgttttacaatatgtgaagtcccgagacgtgccaaaaaatcaaaaggaagcaggcttacgcgatccatgaaaattccgtaatgtgacagaaatcgaaatgaggtgtttatcgcaatccgtgagttttcgaaacttcttcgaaagctaaaaaagagtaaattcataatctgtg

SEQ ID NO: 20332 - DNA, 387 bp, Glycine max
agctttacaacagattttagtaatgacccactaacctagaattaaaataacttaatgccattaacctagggaattaaaaaaaaaaacttaatggctgagtgtaactgaaattgtggcaaccaaaagtcacccccaacagccaacaagtcagccaccatttggtctcccaaaaggttgaggcctaggttgccaattgggcccttattacaacttgaactaaacctactaaagccctttaagttgattaacccaaaacatatttttggtcagccaactttacaaggattgggccattatttagacaaactaaacactctaaaattgagacaaagtggtgccatttagtcctcctccatttgggccatgatacaactcacaaccttggac

SEQ ID NO: 20333 - DNA, 442 bp, Glycine max
tgtggattacgggttggttgtgcatgtttggcagactttgaagaagcttgtggttaaagggtctgttttgtctttctcataatctttgaaggagcttgtagttaaggggtttgttttttctttttcacaatatttgaagaagcttgtgtttgaggtgcttgtttcctttaattcagctaaccaccttttggttgaattccctaaaccaataataagtgtcattttaagtaattaacatataaaagatgttaactaatgtaaataaagattagagacttaccaagttactttccttattagttgctgcatctttgtcattcttcgtgtgttgagggataagttctttcttagcttgattgaataacatgtactatgttgtcattcctagtgactctgctgtcaagaactgtgttgttattgtggcgtccctaaattaatgact

SEQ ID NO: 20334 - DNA, 391 bp, Glycine max
agcttcttgcttgaaaataagatgacttataggagtaattttcttcccatacaagtacttggatggaagtatattttcaagtaaatccaccatgtaatattcttgtttactactacttcataacctactcataaaaaactattgaatctattgactaacaatttttatttttcacttttctttgtcaagagtatgttgttaggtctggatgatcattcatacctatattaggttttgatgattaacaaagaatataagtggttgatatattaatgatgagtttacgacaagtggatatgatcaatgttattaacgagcttaactgttacgacaagaaaaaaatactttgtttattattaactagcatctaacgcgctaatatcaagagcat

SEQ ID NO: 20335 - DNA, 445 bp, Glycine max
  unsure at all n locations
tgcatgtccaagtttcttgtgccatacccagggatttcctttgatagataatagacatgttacatcttgatttgatagttcactaggattaatcttataaagttttcttttcctcttagcagtaaaaatttgggtcccattttcgtgttggatgacacacccacctttgctgaaggaaacatcaagtccaatctcacataattgacttatgctaagcagattgtatttaagtcctttaacaaatagtacattctcaatgggaggatagggatcaatacttatctttcctactctttctatcttccctccgaaaatgattgctccaccatgcatgagggtcagacattggaatatacatttttctcatgtcatgtgatgtgagcagccactgtccaggttccatgattggtgtgtttntgttgtggttgaatatatccgcaacaag

SEQ ID NO: 20336 - DNA, 393 bp, Glycine max
agctttatgcttgcttcttaatctttttctttcttggtcgggttttagccctttattccagaaaaaaaaaaatacaatatttgaaagagaaagattcgttacaaacaccaactaaaatataaaatatgttgcttaacttgctttacttttaacctgctgatgtctttgaagatagaaaaaaaaatgaatattcacgactcaaatgaagtaaagaaaaagaaaacagaatataatggatagaacattatatattttgtacgtgcagtaaagggggcgaataaacacaaaattgaagaaagtagcaagagaggggcgggtggtgcacaatcgaaatcttgaagaggaaaaatacattatattcgtgcatatgcttattagatagggggggatact

SEQ ID NO: 20337 - DNA, 440 bp, Glycine max
  unsure at all n locations
ctgttgtctctaattntaaactttcaaagttatcagatacttgagtagaaatttctaaagaattatctatcttttcttcatgtttcccttgaagttgtttataatcttttgaaacactattgaagtcctttctcaaattttgataagctatggacaaagtggatgagttggagagaagttcttgatattctaattgaagagtttcaaggttgtttatatttacctcttcatctgattctgaattagatccttctgatgtagtgtctactatcaaacataggtaggctttttcttcttcttcttttttcttcattggatggtgtgttgtccatctctttccatgtgcttatcaataatttcttgttctttggtttgaagtactttttcttgtcagttattttatcaagatctggacattctgacttgaaatgtcctagttt

SEQ ID NO: 20338 - DNA, 392 bp, Glycine max
agctttattctatctgcaatgtttaacaacttaaaggaccaatgtctgattctccccactatcttctccacaagaggcaggtaatgatggacattgagtttcttgcaagacaaaggaacccccaaatatcggacaggcagagatccctcttcaaaccttgtgatcttctttataactcgaatgatgtcacaattcaagccaccacaaaacaccttacactttgttggattaatctgtagtcctgtagacttacaaaagaaactgaaagcctttagaatcatctctatagacttctcatcacctctacaaagaagaagaacatcatctgcaaagggcaaatgagtaatcctcaatcgctcacattggctgtgattattaaagttaggatctct

SEQ ID NO: 20339 - DNA, 440 bp, Glycine max
tgtaagacaaaatacgagatggaggcgagcaaggacaaaatggcgttgtcgagaaggtcatggtgatgctccttgatggtcatcacgccagtttttgcagtgctgcctccagactcgacgacatcactattaaccaacagatagaagatgccacaataatgttattgttgttgtagattcgcatctccttttagtgcatgacaccgaggcatgcacttctcgacggtcctcaacaatggcgatgttgctgcaattttgtagatctacctttttcgaactgttgttttagggaggatgagaggtgaaggtggagcaatcattgagtgagggcaacatgaataaacaatgtataccacaactaggattttttaaagggtgaaactgaagtggtcttccatgtgtccatatttacttctaatgatcttctgctaccttctcac

SEQ ID NO: 20340 - DNA, 399 bp, Glycine max
  unsure at all n locations
agctttgatgatatggtcttcaccgacgaaaggatcaaagtgggtctgaaaagaggcaaatctgatcatcttgctttgataaatgcaaaaaaaaaaaagttggggcaaataaagagggtgaggatgaaggagaagcccgtgctgtgactgccattcctatacagccaagtttcccatcaacccaacgatgtcattactcagccaataaccaaccttctccttacccaccgcccagttatccacaaaggccatccctaaaataaccacaaagtctatcgtccgcacttccaatgacgaacatcacctttagcacaaaccaagagcaccaaccaagaaatgaattntggagcgagaaagcctgtagaattcaccccaattccagtgtcctatgctgacttg

SEQ ID NO: 20341 - DNA, 443 bp, Glycine max
taaagtatgcccgagtcattcatccctatgagatgttgttgaagtattggcgatcagaattgccattccttggattatagggttgaaccaagctcatgcttttacaaaaaggttcatcaagtcaagttgaaatatggaagtaaccgtcttgcaaaattggggcaaaagatgaatcgagtcacatcactgcttcgtctactgccaaacacatttaggattattgatgtccttgttacttccagtttcaccttgacaaagatgtcgtggaccatgttgaaaatctaaattgattcaaccccatatcctgcgtaaaaattcgcaatcttcaactgtacatcattcgcatacatccatgcttttcattggttgcattgctcattgcattctttccttgaaaaagaaaataaaaataaataaataaataaaataaaataaaaatgatc

SEQ ID NO: 20342 - DNA, 371 bp, Glycine max
ttgcttgacacccagatcacccatacgagcaaggttgcttccttcagaagcaccagacttctggatggcccaagtgggcctggttgctatttgcaccccccattcttactaagtacaccctctgccttttttaggagataatttattcacaaagttacggaaacttatgattttcgttacgatacttgttttctttccataatgtgacggaaccttgctgattacataatcatccactttctgacttactgaatgttacggaacctaactaattgtgcaacgatgcttacatttaactatctgagtgtcacggatacctacagatagtgcataatattttcttttattttccggcacgatccagaattcac

SEQ ID NO: 20343 - DNA, 434 bp, Glycine max
tagagaatactaagtcgaagttttgaaggtttttaatgctggtttggatgttgcttccagaggcaagcaaagaatattgagtggaatttgtagaggtttaaaatatagggtgtagaagcttgtagatgattcaaaagaaagaattccaaaattgtgtgcttgatcttaatggaaaaatcctgccagtgtaggtattggatgtagccaaggttagggtgtgtgttgtatctttatttactgttctcatttagttgtagcagttacatatttattcttaactttgaaaaacctttgtttcacaaaagctttactcttatatttcatcaaaagatttttacaaagtagatataatgttcagaagcaacatgcaccttgtaaaagaaaagtgaaaatcaaaatatgtgagataacataattggtgatatgaagagtag

SEQ ID NO: 20344 - DNA, 387 bp, Glycine max
ttgcttgtagaggatgcttcaatggaggaaaagaaagatgatgagaaagagagagggggggagcatgaaattgaaggaataaaaagggagagaagttgaaatttgagttgtgtctcacaagactctcattcatcaaagttgcaacatgtgctacacatgcttctatttataaattaggtagcttccttgagaaactttcttgagaaaactttcttgacaagcttctttgagaaaactttcttgagaagctagagcttagctacacacacccctctcataactaagctcacctccttgagaagcttccttaagaagattcctatagaagctagagcttagctacacatacctctctaatagctaagctcacctccttgagatgagaag

SEQ ID NO: 20345 - DNA, 440 bp, Glycine max
  unsure at all n locations
ctttgattntgacttgatagaaccttttcttaatcagaggtgtttgatttgatcccatgtttaataaaatgaaaagttctgtttgaatcaatactctgatatcctatcatggaggaaataggatgaattcatgaagggatgcttatgttgtgcatgacacaaatacattttacggacatgagagcccggaagatcgtcttttcttacttgcaacatttggcagcacagtgccccatgtatgcatttaagaagacaatacagaccttccgacttcctgtgacaaaatgacgagaccaaatgcaatgcatgcgcgacaacacaatacaaacataaacgcataaaaacgcatggttgatagcacagaagaggaacgtacaagcatgtcaatatcatcaaacaattatacaacagagatgcacatgagcatgacactaaaaata

SEQ ID NO: 20346 - DNA, 363 bp, Glycine max
ttgcttttcccccaattttctaaaaatagggggagatgtgaagtagaaaagggttcagccccttatgcacttctctctctctcgaaatagctgaggaaaattagttctgtgaagaaaatctaagccgaggcacttccataacgttaccgtgacgattccgtgagttattacgcgaagattctcgaccgttcttcaagattcatcgttcgttcttcgttttcttcagtcttgaacgggcaagtacctcaaaccgagcttttcaattcattctatgtacccgtggtggtccacattttgtttcatgtgttgtgtattctcgtttccatttaccttatatgcccccttcagacgtgcctaagccat

SEQ ID NO: 20347 - DNA, 434 bp, Glycine max
  unsure at all n locations
tctcccncaattttctataaatagggggagaagtgaagtataaaagggttcagccccttaggcacttctctctctttcgaatttgcttaggaaaattgtttccgtgaagaaaatccaagccgaggcgcttccgtaacgtttccgtaacgtttccgtgagtgatttcgcgaaggttttcatccgttcttcgttcttcaacgggtaagtttgcgaatccgagactttcaattcatttcttgttttttttaatctttcatctttatttcgttcattttcgatttcttttcttccgtctttaacgcgcttttaccgtttatttaagccgttttctcacctaataaatgataaaatgaatttcaaccgatcatttgtgttgtaatctcatttaatcacttttaaaacgaaatctaaccgaccgttcacgctataacctc

SEQ ID NO: 20348 - DNA, 391 bp, Glycine max
agctttgagccaatatcttgactcaccgtaaaccttgacccagggtgagaatgtcaatccttaccctcggaagcaaaaaaaagaagagaaggaaaatttccaatcaaaggaaaaaagagaggaaaggaaattcccaatcaaagagtgggagaaagcaaaaagaaaagaaagaaaattcctaatcaaagaatgggagaaagaaaaaaagagagaaggagaagaaggaaagaaagctcctgatcaacgatcgaaagaaaacagaagaaatgtgcagagaggtctttggaccagacaatatctgaacaatacggaattgtcaccaaatgaacaaaagaaagaaaaggaaaccataacctaaaagtggtcttctccctttgattaccaaccaaaa

SEQ ID NO: 20349 - DNA, 439 bp, Glycine max
  unsure at all n locations
tgcccagagaatgagtccacggaggaaatgcttaccacctcaaaagactggaaagcggtttctaatgactcctctgcggcttccacataaggcatagaggacgggcagctcaccaagaggtcttcctcgcctgacacgatgaccaaatgcccctccactacgaatttcaacttttggtggagtgtagagggaacaactcccactgagctgatccacgggcgccccaacagacagctgtagggggggttaatatccattatttggaaggtgacttgacaggtgtgagggcctatttgtactgggagatcgatctctcccctaacctctcggcgggtgccgtcaaaggcatgaaccaccattgaactcggctntaagtgggaagcattgaatggtaatttctccaaagtgctcttaggcatcatgtttaaactggaaccat

SEQ ID NO: 20350 - DNA, 385 bp, Glycine max
agcttctcttggactttaagcaagcagctaactcgtcttttaagaccatgctatgtgctcgtgattggtctctctctttcccttcgaagcttgagctcattgttgctgccccacaaagctccacgaaatttgtcacgaccatgctcttccttgcgagccctcttggtttcttgttcaagggctcttgcggtagctgcattttcttcttgtaacccagcacactctttccgaacgtctgtatcgaccaacttgaatttttctttggcaagtcttgcttttcctagttcggtttttagagctcggacttcttcatcctcttctggagcttcgaagttctcttcgtcgataatctttaacttggagagccaatctaaccctcatgtac

SEQ ID NO: 20351 - DNA, 446 bp, Glycine max
  unsure at all n locations
ctcagctatgctgcnacattataatagaccccctcagaagcatttccaacaacagcagaataattatgatctttcaagcaacagatacaatccaggttggaggaatcatccaaatttgagatggacaagtcctccacaacaacaacagcctgtccctaccttccagaatgttgttggtccaagcaagccatatgttcctcctccaatgcaataacagtagcagaagtcacaacaaagacaacaagcaactgaggctcctcctcaaccttccttagaagagttagtgaggcaaataaccatccaaaatatgcaatttcaataagagacaagagcctccattcagagtctgacaaattagatggagcaaatggctactcagttaaaccaagctcagttccaaaattctgacaaattgccttcacagactgtgcaaaatccgaaaaatg

SEQ ID NO: 20352 - DNA, 377 bp, Glycine max
agctttatgccattcggaataggggctcgtgtctgtgttggacaacacttagccatgacagaactgaaggtgattttgtctctcattctgttgaagtttcacttctctctctcattaagttactgccattcacctgccttccgtttggttatagaacctggccagggagttgttcttaagatgacaagaatttaagcaacaatgtaacagatgaatgatgaaaacatgcaggtaatgggatggttgatatagtcataagacatcatttctctagctgatgaatgctaataagtctttttttttatccaaattagataataatattttttttttatgacaggaagatattctcatacttcgaagttatgagacgaaga

SEQ ID NO: 20353 - DNA, 431 bp, Glycine max
  unsure at all n locations
tgttcttctccaccacgtngaagaccgtgacatctctctttttcttttccatcgccaccttacctaggtacgttttgtcaaagctttgttgttctattgaatacttaggtcagcttggggaactcatggttaacccaaggaccttttttggtttctactgcaaggattggggaacttgtagtgacctgaggtacgtttgttgtcgcggtcactggtgctgaaaggctctcattttgattgaggcaagtcgtgctcactttgtagttctttgaatgcttaatgtctgttgtaaaactagggtagcatagtgtattgtagtgtagtgttcttcattctgtttgaggtagcgtagttaacttgtatgttcattctgtttcatgtacattgttacaaactgcattctacggaataatagttaactcgtatgaact

SEQ ID NO: 20354 - DNA, 392 bp, Glycine max
  unsure at all n locations
agcttattagtgggaaattttgtaagacttaattcaccccccccccctcttaagttattgaggccacttgtccaacaaggacactatcttaatgagcttaagcattatctcgatggtaggtatatttctccttgtgaaagagaccacttgttgttgaaagattgtactttcattttctggtttgattcaataatatttgaagatgatgacaacattgatgctttgctctccaagccaattgttaaggagtccatgtttacttggctacaagctaatagcattttcaatgaaggaaaacatctaacatatgtgcaattcataacaaagtttacatatgtagccaaggatagatgttggaagccacgcanaggaggttatacaattgacaggct

SEQ ID NO: 20355 - DNA, 441 bp, Glycine max
tgttacagaacttaggaaaaatcaagaacaagcttgttcgcacatcgttcgcgtgttcgatatccactcgacaaggtttgaagtagaggagaccttcaatcctataacgcaacgtggcggacaaaaatgggcagttaacttgaatggccattattgtcaatgcggaaggtattctgcgcttcactatccatgttcacacattattgcagcttgtggttacgtgagcatgaactactaccaatatatagatgttgattacaccaatgagcacatcttataagcatactccgcacagtggtggcctcttgggaatgaaacggcaattactgcttctgatgaggcatggacactaatccctgacccaactacaattcgtgcgaaaggtcggtcaaaatcaacaaggataaggaatgatatggattgagtcaaaccatctgacca

SEQ ID NO: 20356 - DNA, 390 bp, Glycine max
agctttatatgatatcaaacgaaattttttgcaacctaacatgtttattgttaacattataaacatctttgttaattaaatgacaattatttaagcagtaatatatatttgtttattacattttgtttgcacccaagccattgcacaatgctttctattttcaatgtgtagttgggtgtataggataagtgtttttagtgcttccagactagccgtttagtagcttgttgccaacctaagaatttttgtagccttgtacacaaccttattcacaagaacacaattcaggtgatagagttagatggaaaattataataattttttaactataaatataaataaatatttgtgccccacatctagattcaattattgtgaatggagtaagct

SEQ ID NO: 20357 - DNA, 451 bp, Glycine max
cgctttctttctaatcaatctgtctattgactaacatttctaattgcaatctcacaaacttgttctttctttgtctatcatacatatttgctcaaactcatgataaaacaaaatcttcatttcaaccatgtattcaatccataatcaccatttcaaactcttatcaaactgcattttcaaagaatcaagttaaactgttctttatgcatcaggactttcaaaatgtttccaaaacaaaaagtatgctataaaccatattcacatgccacaaaccataatagttcatacgtactaaaaccatacaaccactatactacacaaacataataattaaaatgtactaagaatgatataattataataataattaggacatgtaatcaaatcttgtcattcatctcgatcctgctcctcatcatcgaaatgtaacactggcgttgatgcaatccta

SEQ ID NO: 20358 - DNA, 392 bp, Glycine max
agcttcttgccattttaatgtctgcagttcacaataaagacaagtagatgaagacataacaagtaaattcttgaataatactaatacactacaatctattgcagttttgattttacctttgattcatcattagcttctttggcagcagaagcaaattcttgaatcgaagtatttagtggatgtagagtaatctgcttgtctaacaagtagctcagtatgttattgtagacctgtccaaagtacgggaagattatagactcagtaatgatataggaacacttccaagttccaacgaagccataacagtgcaacattaaaattgaataattgataaatatttattcaattcaccccacattttactctctttgcctctgccaaatatttagcct

SEQ ID NO: 20359 - DNA, 428 bp, Glycine max
gaccttcacactgcgcttacatgtccaggcctggactgtctggtccaaaatggttagacaatgggtgatttttatgccatgcaatacgatttgacagactccaaaatctgcattgaagaagagctaaaccctatcagcacatatgcaccagagatatactgctatatatctatacgcaatgataatgttattccacattttggagtaaattaaagtgaaagactatacatacacgataagaatgatcaagaaggcagaatgatttgcttccacatgctattggggatgctaaacgaagagacataccataaaaaggacaatgaaatgtacaatgcgtgattgtatgttgcgtatactccataatacgagtgatcgacaggcccgtagcaataatcattatcccgcactttttcgtgagtgtccaacga

SEQ ID NO: 20360 - DNA, 398 bp, Glycine max
agcttttgtccactttagaaccacttgaatccgttcaaaggttcaacgccttaaacggtctttttacttttaaacgattaaaatgaacctttagaagtctaacatcaaacttatgtgtaattttctttcatcaaagaactatgtaggtctgagtttctcatcgcaattgaggatacataggagcaagagccccgctattgtcgaccccaaaaagataaaaaacataaaaaatggaaaataaaagaaacttggtgtcatgattttgcacacttgattaaacgctgttgtcccttgtgacggacgcgtggggtgctaataccttccccatgtataaaaaactcttgaacctttatttcttataatttgtagacccatttttggattttctaacattttcg

SEQ ID NO: 20361 - DNA, 429 bp, Glycine max
  unsure at all n locations
tgtccttggtttagacatgattggtacatgatttgggacttgtagttattaatttgggcaaaattggatgagggaaagagtggttttcgaaatctgcactgtatgcagaattttgctgttgaaatgtgcagcaaaattttgtataagtgcagaaaaaagcttgtgtatggctggttgtaaaaagggtattacatatggggttctggaaattatctaagagatcccagcggtcaaaatgtagacttatgtactanagacttccagtaagattttcgagtcgatccaacggttaacgaattctaacgatggacatgttactggggtatttgtatgtgaaaagctgtgattgtgggttgtgttctgggcagagtattctgcctttgccctgttttgcttggttttgttagaccatgatgattggatgtggaa

SEQ ID NO: 20362 - DNA, 374 bp, Glycine max
tagcttgtatcagctgttacatgataccaaatggaaattgcaagcactacaaaaaaaagcagaatgacttgccatgcaacttgggacattagcacaatgatagtcattaactagataagtgctaacactaatccagctaattcggatggtatgtctgtgtctacagcactttgatccgtatatggctataatcatcaacacaagaatggttgaaatcttattacagctgataataatcaaaagatagcactaatctatcacttaaagatctaacagtgaaactgaccctactcgtaattcggcttgaaggtgtggtgtcaaaaaatgaaacatgtgcccttaatacaatccttcctagtatgaagagggtgcca

SEQ ID NO: 20363 - DNA, 415 bp, Glycine max
cgagttcaactgtccaactctcttccataatattctcgttttgaaataatgggcaaaatattcactttgtttcttaaaagtgccaaccgaggtatggtcatgggttggccttttggctcctcatgacatcctattagagtatacttactccgtctagtattgttactttgtgtattctgttatttgttgtttgtaagctgtcagtgagctgacatggagttacagctaagctgttactgagctgctctttacttacagctctaactatgtcagtaacaaattgggatagttaacacgccagctctctatatatagaggtgacactatgctcttgaacttgtctttctctttcttgaccagagagaaatcagagtctatcacactctattaccgtatcacacagcttggttgcgat

SEQ ID NO: 20364 - DNA, 365 bp, Glycine max
agctttatacctatgcttctccttcttctccttgaaaagggccaggagagacacaccagaaaccttcacgaccttgaacctgactccaggaatatcacccacggcatgaccttttcgtccaaatccagctatcatgacttcattctacaaccatcaaccacataacattaggataagcatatcagcaccaacataacagcaaaataaagtaaatatgattgatgaatcacttacattctcttcaatataatttaagcaaccgtcatttggcacaaatgcagcaatcttcttccatttttgatgagttgaccctggcacattttcaatggcagagttgggctgcttacctcataccactggcatag

SEQ ID NO: 20365 - DNA, 437 bp, Glycine max
ggcatgcatggattacttattacttattaggtgaatgtatttttatccatccctttgatccggctcagttagaagtagattttaacatgtttgagttttgaaattagatttgtatttttaagcaggttcaaattatattttaggtcattattttgggtacatttttttaaacaaatatttcaggtcattttaattcactttagtatttaattgcactgtaaaacaatttttcacactgttatccaataaccactttttaaattattttagttaataaatttataatacatgataataagtcataattagatgattgtttaaaatttttctatattattaatgtataacatttttttcatttttatatgtttcttttaatataagttttatcaacgatagcgtatcttatcttaatcttgatatacaatagcaacaag

SEQ ID NO: 20366 - DNA, 388 bp, Glycine max
ttgcttgtaactaaataggttttctgccaatgtacacataccttggtccttgtatgacccttaacaaagtaatatggattaaatctccgtaataatctttcggatcaaattacctaagattgtaatcatcctaaaacccataggtccaaatgccaataagatttgtatatataggattgagattctcaatttaaaggtctattgttcattcatttattacttatatttatggctttgagccgaaactttacttaagtatcagtataccttttgtaggtacctcatccttcggagcgagtgtttcaatgagtactactacggaatgatgcactgaagttaacgacatgtctaagagcaaagcatcaagttatctttaggcattaacatt

SEQ ID NO: 20367 - DNA, 434 bp, Glycine max
ctttcaaccgttctttgtcgttcgtcgttcgttcttcgtcgttcttcggtcttcaaccggtaagttcccgaaatcgaacttttcaaattaacttttattttcatttcatttactttccgtaccccctttcgacgtgctttagtcatttactttagtcattttctcgcctaatcaaaaaataaaataaatttccaccgatcatttgatttgtaatatccgttaatttctgttaaaatgaaatctgaccgttcggtcatgccgtaaccacgttggaaaccaaaaagaggtaaactaataatataataataaaaaaatatcttttagtaaaataaagcaaaaaaaaacaatcggacgtttctctttgagatttctctttcttaatcgaattgactaataactaaagtgaaactaaggctaacatcaactcgcaaagt

SEQ ID NO: 20368 - DNA, 469 bp, Glycine max
  unsure at all n locations
agtganatgagactgagactgagacctcgagnnccannaccangggctctgtgaacctctagagccgagcctgacagcctgcttgccttttgccatttcgcccagacaagcagggtggcttccttcattatccacagtccaatcgaggaatcttcagtgcggcccaaatgggccatgttgccatatgcacccctattgattactaagtgcaccatatctgccaccattttgctgcgatactttattcgcaaagacactggaccttacccattattcaactatacctgctatctttccagaatgttacagtaccgtgaggatgacataatcatatccctacataatgtacggaatgttacattaccttcctaatagtgccaccaagtcttgcttagatcatccgcgagatactgaacccaaatgaatgtgcactacttatgtcagagatatcagcctgtccacaatgacc

SEQ ID NO: 20369 - DNA, 388 bp, Glycine max
gcctcatagaggtccaggaatgacaaggcggttgtagttatctgttctctcccggagcacgacagtcaccgcttgaggatcgtgtacaccacagcgcttcgaagccatcaagggatggtcgattctccgggagcgacgcagtccacgcttcagggacagacgacgtatactagacttttccatgagcgagatacgggcgccaagcggtgggcaccactggttactcctatggccaagtatgatccaaaactagtccttgaattttatgccaatgcttggcctacataggagggcgtgcgtgacatgagatactgggttatgggctatcggattccattcgatgccgacgctatcaaccagttcctgggatatccgaaggtgatggaag

SEQ ID NO: 20370 - DNA, 295 bp, Glycine max
ggggaaatgatgaggattcttttgataggccaaggtacaaaaaagtctaaggttgtgtttcaatggggtcttttatcgtgggaacccaatgttgatatctggagcaaaacaaatttgggtgtcaaggtgtctgtcttcgtccaaactcctatatcactccattatgaacgcatgacaatgatgatttgacaaccacatgcaaaattagtcatggctacagccaggtgggcactcaagcatcccatatatggcattgtgatactacggctgtgaatctacacatacagaccctttg

SEQ ID NO: 20371 - DNA, 431 bp, Glycine max
ctttctgtgtggagtgatgaactctgtcgcgcattatggcttgatcattggctgacatattctcaattagctcagttgcctctagaggggtcttcagctttatttttccccttgctgaagcatcttgatggaagcttgcttctggggcttctatggaggctggatctttgagcttcaatgaggtcctttaatggtgattttccaccatggagatgcagtggaagaaaaatgacaagaggtgagaggaggcgccatccactagggaataagccatggaagaaggagcttcaccaccaagatgagccttggataagaagcttggagaggatgtctcaatggacgaaaagaacgaatgagagaaagagaaagggggggagcacgacattgaaggaagacaaagggagagaagtcgaactttgagttgtgtctca

SEQ ID NO: 20372 - DNA, 375 bp, Glycine max
ttgcgtgttagcttgttcttcatgccccagtgatgccacattgcgattttatgcatggcatggatgcctgggtactataactttgatgacttatgaaggtgcgacacctatctgacttagagagagatgcacatgcgctgcttatttcttacactcattttcttattgcgaggctaatatccaatcaccatccattggacagattgatgcatactctttaactggagttgatgatggcttgtgttatgcttttatgatcaactaacctgatttgcttcttcatatacactagtgtgctcttggagacgatgccgtatatcgactgatcatcatgctcctttatgctgattaccttgaaaagttcatcatttctca

SEQ ID NO: 20373 - DNA, 413 bp, Glycine max
ctggaaaccggagtggtcatgacatcgactatggaacttattctcagtatggtggtataaccatgggcaaatcaactctgtatatcgctctcattagtcttcatatcgataggagaaattccacaaggttatcataacgattgaatcgttcatttaaataataaattaacacagcagacatgataaaacttacctgtgtgtaagtaataaaatatagtgattaaaactatatcttacactgtcactataatgatatcaaatatcaagagacttaaacattgcatattttatgggaacaaaaataatggtattgtcctactctgatttgaaattgacttggtgaacttctaaaaccatgtatgagttggaggtactataatacatgaaatccacttagacgctaccaaccattt

SEQ ID NO: 20374 - DNA, 465 bp, Glycine max
  unsure at all n locations
cgtgggcttgagcttgactgacgccatcgaaatcagggcaatggatcttggacccggagatgctctcaggcgacctgtttgctgtcatcctttgaggcgcacgtagttataagatatgtaagtgataccatggctcttacatcgtgtagagtatcctgaaggaaccgttttcatggatgtaatctctatcctcgacaggggagtgctcaattataccatccatatgtatcgtagacttcgataagaagcacctgcgtgtactactatagagagaacttatgcacaatgcttactattcatctaaatgatgggaggcgttacactagatgtaactttgattaatgacagtcttgtagactcttgtactagctcaacacctttgacttttcgtacatgataacacgctcccacctgctctattcttccacactaactctactacattgagcctccttgactgagtcn

SEQ ID NO: 20375 - DNA, 421 bp, Glycine max
  unsure at all n locations
ntgaccaaatcccagcaacagttgtttccttatagacttgtctcaacaccttgtcttcgaaactgagaataattgcactgtgtgccttctgcagtagtgctttcttatccccatcacccatcatcttttcgagtttggcttttccatcaagtgcttctaccaagccatcttcaatcgccatagtccaaaattattttgccctgtgaacttttcaacctcacacttggccgagcccatttcttgaatcgaactcaaaatcgctccatgctcaccgcaccaatttgttgtgccaagatcagattttaattcacaaaagaatgagtttcttgtatgaacaagaataagctaaatgcaggaaaaaagatgaacagaaaaactacactgtgctcatagcaatcacttttcatatctctgcaaaaaa

SEQ ID NO: 20376 - DNA, 390 bp, Glycine max
agcttattccgaggacagtttattatcatgcacagcctgcaagagttggctcataacaggccaatcatacctatagagcattttcttgagcaagtagcctggcctgaagctcaacttccattggtgagacccaacgaggctgcccctcctgagcccacacctacacaggttgatccagagccagcagacccataatctccagtgatgaatccaccttcttctcctgagcttgaagtggttcccccatctccacctctgattatcatctccgatttcccatctagagaaactgctgctccccctgattcaccagctggagaagtagctgatccccctgatttcctagttggaggagctgctgatctttctgattcctcatccaaagaagtt

SEQ ID NO: 20377 - DNA, 444 bp, Glycine max
  unsure at all n locations
tctggtgggacatcttgatgcaatcctccctaggaagggaccaatcactagaaccatgagcaagaggctccaagaagattgggctagagctgctgaagaaggccctagggttctcatgaaccttagggtagatttctgagcccatgggccaaggttgggtccaattatctttgtacatattagactaggatgtcattatatttggtccttgtatatagggctccatattgtaggtagggtaccctagaaatataggatttttcagcccttgtattttttgggcacctagactagtttttatattaggggtagttntgtaatttcacatgcactaagtggatatttgatgtgtgtggttggaaataaatttaattgaattggtagaagcccaatccaattaaatnttagagggggaggtgagcatttgcttactacaccccattg

SEQ ID NO: 20378 - DNA, 421 bp, Glycine max
ctcggacccgggatccttaagcacctgcagctgcagcttttggttctcacccaccatcttttcatagtagagtaccgataatgtgtctaccatcacgattatcgtctccctttccattattgggggtaccacctgtgccgccagatccctccaccttttgggcgtgttctttgaatgatccgtccccctttttgcacatgttctgtagatgcatcctatacggaaccatatcaaaattgtactgatactgcctaacaaaggcaaccattatgtccttccaagaatggactcgggaaggttccaagttagtgtaccaggtaacagctgccccagtaagactttcttggaaggaatgtatcagcaattcctcatcttttgcgtgttcccccatcttctgacgatacatctttagatggttctt

SEQ ID NO: 20379 - DNA, 445 bp, Glycine max
  unsure at all n locations
tataacatgattntgtgttncacatcccctggagcatattttgacttatcattcaacaaagacaagggaccaccaacttacagaattcaaggtcaatcttgccatctaatagggagtttattaccaatgccaggaaaacctcctaaattttctcacttgtatatctatggtacagagaataaaatccaaaatagaattggaggcttaaggtaaactataattcttataacagatactaaagtcataataataaattgattgttcttaggttatattaacttacaagtttaataatgcagatttgggaaccaacttgatccaaagattgttgccaagttaaaagatatgttttaccatcataatgtctttgctaaatctttcggaatggcaaaggaaatatttgagaagataaaatcacatgatctgaaattgcaatagatatctc

SEQ ID NO: 20380 - DNA, 393 bp, Glycine max
agctttttcttcttatctcatggaggtgagcttagctattagagaggtatgtgtagctaagctctagcttctttaggaatcttctgaaggaagcttctcaaggaggtaagcttagttatgagaggggtgtgtttagctaagctctagcttctcaaggaagttttctcaaagaagcttctcaaggaagttttctcacgaaagcttctccaggaagctacctagtctataaatagaagcatgtgtaacacttgttgtaactttgatgaatgagagtcttgagagacacaactcaaagttcaactcctctccctttttcttccttcaatttcgtgctcccccctctctctatctccccctctttcttttcctccattgaagcatcctctccaaggc

SEQ ID NO: 20381 - DNA, 444 bp, Glycine max
gcttcttcgaagggcatggttatttccagtttgttgaaaatatctaagattctcgccttatgacgcttcttctccttcttggaaggtaccacgggatatggtacttccgaaccttcattcacagctttttctcttttcttctctctagcttattcacttctactcctctcttcattcttatttttttcatatttttcattttctttttctttttcttggtcatttaattcttttttcttcactattatttgtttttctttttcctgattgctttcacctctcacatcatctttcttttcatcagtacatttcttttcagcagctttcttcttggatacaacactatactcatcctacgcctccataaacctcttattccttgtcatcacagctttgcattcctccttgggattcttttctatattcaccacaaaactattggat

SEQ ID NO: 20382 - DNA, 382 bp, Glycine max
agctttattgttttatatctctttgatgcaacatatataatacttttcttttttttatgaatgttaaacaattattattttttatgctgctagtgattttggagcacaaattgtgcccccaaaaagaattttgaagatgcttccaaaactctttgatcatcaagatcaaaatgttcgtgcatcctctaaagggttgactcttgaactttgccgttggattggtaaagatagtgtaaaatcaattgtgtttgagacaatgagagacacaatggtaagctaaactagttgtctatttttgttgttgatttgatttgttatgttctcctccatatccaaatcttagagtacctttcttcccatttctgtatagaaaagagctaaa

SEQ ID NO: 20383 - DNA, 442 bp, Glycine max
  unsure at all n locations
ggctcagagaaggagtccacggaggaaatgcttaccaccttatatgtctggaaagcggnttctaatgactcctctgcggactctacataaggcatagaggatggacaactcaccaagatgtcttcctcgcctgacacgatgaccagatgcccttccactacgaatttcaacttttggtggagtgtagagggaacaactcccactgagtggatccacggacgtcccaacagacagttgtagggggggttaatatccattatttggaaagtgacttgacaggtgtgagggcctatctgtactgcgagatcgatctctcccctaacctctaggcgggtgccgtcgaaggcacgaaccaccattgaactcggctctaagtgggaagcattgaatggtagtttctccaaagtgctcttaggcatcacgtttaaactggaaccattat

SEQ ID NO: 20384 - DNA, 384 bp, Glycine max
ttatcttttatccaaatggacttaccttgaattaattcctttgatagcccctttgagcctatgttcccctttctttgttttgaagctcattataagccttaagtgaaaaaccatgatatcaccttacccttaagtaattttggagctttggaattgttttaagctgggaataagtgtggggggtatgtttcattgcaagatatgattcttggccatgcttgatgtatctgtatattgcctatttcttgctttaatcttcaaattcgatcttcaaaaaaaaaattaattgctgcaaattcgtactattcataaaaaaaaagaaagaaaagaagtgaagttgaataaatgtggtcttgttatgaagacttgatttgggagccttga

SEQ ID NO: 20385 - DNA, 439 bp, Glycine max
tgcttgtggagcttctatggaggctggatcttttagcttcaatgaggtccttcaatggtgatttttcaccatggagatgcagcgaaaggcaaaggagaagaggataggggaggcaccatccactagggaataagccaaggaagaaggagcttcaccaccaagaattgccttggataagaagcttgaagaggatgctttaatgaaggaaaagaaagagagaaggggggagcacgaaattgaaggaataaaagaaggaaagaagtggaactttgaagtgtatctcataagactttcattcatcaaagttacaacaagtgttacacatgcttctatttatagactaggtagcttccatgagaagctctcttaagaaaacttccttgagaagtttctttgagaaaacttccttgagaagctagagtttagctacacacaccca

SEQ ID NO: 20386 - DNA, 365 bp, Glycine max
tttgcttttatcttggcacaacaccatgttgaacaaatgatcattcatcactaatacaaaataaaaagaaaaaaataatctaacggcatgcttagagttagaagtacgaattttacccaattgtttttttcacacaagttgatgatttcaccaaagcaacggaaaataaccaaaaacataaatggatttgtttcgaatgcacatataatttacactagcattcaaaacaactagttcaaaagtcattttgacagagaaaagaaaataaaattacactaacactgcatcaaaattaaaccataaataaaggcttaactactgtgtagtccctggatctagggaccctattttttttaatccctaaa

SEQ ID NO: 20387 - DNA, 437 bp, Glycine max
  unsure at all n locations
tcacaaaagtttatatggcttgaaacaagcaccgttgctgtgatacaaaatgtncaatgagtttatgagcaactcaggattcaaaagatgtgacatggaccattgctgctatgttaagaaatatactaatagttatgttatcattgtcgtgtatgttgatgacatgttgattgcaggatctagtatgacagatattaacaagttgaagtagcagtgggcagaaaactttgaaatgaaggatcttggtccagctaaacaaatccttggtatgagaattcttagaaacagatcagaatgaatcttaaagctatctcaagagaaatatatacacanattgcttgacaggttctaccttggagattctaagaccaggaatacccctttgggatctcatttgaagttttcaaagaagcaatctttgcagacagatgaagaaa

SEQ ID NO: 20388 - DNA, 389 bp, Glycine max
ttagcttttttattagacctcgatcggtcgtccttactggccgacgccgactgtcatttttttcgatcaatatcggtgaataatattttttttgccgaagtgggctaatgttttcctggccgaataaatcggaacatgccagtttcgggcaaaacgaaacatcggttgagctcacacgaaaaaacctagccgacctacattgtaagttttttatgcaacaccgaaacaagaaaacttcccctgccgtaagaaaaaacattatcggccagcgagcgttttttttttaaaaaaaaattgcgcaatgtcggctgaaaaatatcagtcggggccatttcacgaccgatgtcggctattgagttttctattcaatccctgaatgaaatttgaat

SEQ ID NO: 20389 - DNA, 436 bp, Glycine max
ttcactcggatgtccgatgcacgcgcatcatatatcgagttgtctcgaaattgaacaacggaagctctcgagaaattgaaatgatcataacttttcactcagatgtccgattcagacgcataatatatcgagacgctcgaaattgaactacggaagctctcgagaaatttaaatgattatgaattctcactcggatgtccaattgaggaacatcagatatcgagacgctcgaaattgaacaacggaacctctcatgaaattcagatggtcataacttttcacacggagatccgattcaagcacatcacatatggagacgttcgatattgaaccacggaagatctcgagaaattcaaatggtcataacttttcactcggatgtccgattcacgcgcatgatatatcgagacgctcaaaattgtacaacggaagctct

SEQ ID NO: 20390 - DNA, 370 bp, Glycine max
tcacctatgtacaatgtagacactgataatatggttaaataaatgattacgttttttaatttattatttttgatcgatttaatcttttattattttcaatctaattcgatcctctaattaaaaaaaaaagatattctcatcctccatgttgataatttgtccataaagaataattagaagacttcgaactaaaataataaatgtgagggggaaaaataatgtaacctttgatttcgtgtgactggggtaaaaaataaagactatataaactacccgctgcatcaattccctccgctctgataataaagccactcgccgctctctgtaccctcctctctctatcttagcgtatgtcttattacaacttatc

SEQ ID NO: 20391 - DNA, 438 bp, Glycine max
ttaatgttgtgactaacaaggtgcataacagagaatgggatttggtaaagtttacacacaacatatatgtatcttctattttaatttcagaaataacctttgattgtggagcagttatacttggctaatcaagagaaattccacaaagtggctgacaaaaattactggaaagctattggggagatcattcctcgagaggttcccaacattgagaagaaaagaagcaaagtggatcacgagaataagccatcaatcacagtcgtccaaggcccatagcctggctaacccacagatctttctaggatgaggcagatattgttgaagctgaaacatacaccaccagctcacatgattccccctcctactgcacctgctaaagacgccatagatgggaacgatggaaaagacggaatagaaacagcatctaaagccaatgga

SEQ ID NO: 20392 - DNA, 328 bp, Glycine max
tagcttgcagcaaattcaaacagcaataactattttctcggattttggattgagtctcgtcatatatcgagacgctcgaaattaaaaatggtagacccgatcaaattcaaacgacaatgactatttacactgatgtctgattgagtcctatcatatattgagatgcgcaaaattaaaaatggaagctccctgcatattcatacgacaataactttttatacttggatctgcgattgagtaccttaatatatcgagaggctcgaaatttgtaatcgaaagctccgatcaaattcaaacaacgataagtattgactcggatgtgcgattg

SEQ ID NO: 20393 - DNA, 431 bp, Glycine max
tatgaagaagtggtgttgatacattgtgtgatcaaacggatatggatttgactttcacaagcaccactactagaaaatgtagatttaacattgtcaagttaacattggtttttgataaaaccgatgttaacataaacactatgacataattgtaaataatgtgtatactttaacatcgtttttgttttggaaaaccaatgttaacgtatgataagttaacatcagtttcttccagaaaaccaatgttaacgttaacatcatctggttaacatcacttttctttttattggaaaccaatgttgaacctacatttagaaatattagaacgcaagccttattttccttgttttctcttcttctccgtctaagctttgtctttgtgagtctatccctctctacaaccttatcgccattgtgacacctcgccacta

SEQ ID NO: 20394 - DNA, 376 bp, Glycine max
  unsure at all n locations
agcttttagttgcttggacaacaacttattttgggccaacaaggcatcttgagatgaaagctctaataaactctttttggtaggaatatgaactctatcatgcaaaattgcatggtcactggcaaccatattttcaattaagtccatggcttcttcaagtgtcttcacggccataacccattaatgaagatgttcaactatataggctctgaaaaagctacagtgggagttttctgtagcaagctatagaatctttcttatgcctcactcaaagattcatcgagaaactgatggaatgaagaaactacaacttttccctctacaattttagactctgggagatatttntctagacacttctcaacaacttcatact

SEQ ID NO: 20395 - DNA, 424 bp, Glycine max
  unsure at all n locations
taagggaagaagatgaaccaattcaaaatcagttctgcatatttctagttgggtacaacttttggctcgttgaggtagtattcaatttcataaaatgttgtatctagagcattttgggtgggtcacacgtttgttgactcgctgggctaaatgttctgtctgggatgtgattttggctggctaggctttaatctagttgtttatatgatgattatttaaattttccttaaactcttcctttctttttttttatgattcaaatgactttaaaatatttttgcaaatatattatacttatttgtatgatgattatgtcattcttgacctgtttatattatgttaatgtgattgcattgttgaagtgatgatataggtatatgttntacttattgtagtgagaaatacccttaacgttctattgatg

SEQ ID NO: 20396 - DNA, 391 bp, Glycine max
agcttgcaaattcgtgttccagccagacttatttcatgttccatatcaacaaggcaggatgactcttaaaagttaaaacagaactatacacacgcattggcctagtttcaaatcaaacttctctggcacaatagaaaaaagttaagatgcataaattaattttaatttacaagtttgatttattttaacttctaattttctttttttttttctggtaagtgtttattgagaactttatagtaacttgactgcagtcatagatatacaaagagaccctatccatataatactcatttcaatagcattcaaattttgacataaggaaattcaaaagggaatgaaaactcactaagtgttaaagaagaaaatgcttcctccatccttagtagca

SEQ ID NO: 20397 - DNA, 275 bp, Glycine max
  unsure at all n locations
ctgtaactcagtgttaagtattgtttctttcaatgtatgatttgtcacacacatggttggcanacgccacaaccancatctaaactacaataggttgattcaacattgttaacttaacattgcattctgataaccacccagtaaacattaacactatgacgtaaatggtacaaatgtgcatactttaacatcttctttgttttggacaaccaatgctaacgcatgataagttaacatcagtttttacagaaacccaatgttagcgccaacatcat

SEQ ID NO: 20398 - DNA, 389 bp, Glycine max
agcttatgcttttctttatattgtcacacagatttcatattcttaatggctgctgttttttcagacacttcctatttttcttgatggccttgttactgcatggggcgctatcctaatttctgtgacattaattcttttgtttggtgaggtgagaaagttctgtccttatatgattttaagtataatacattcatgtcacagattaagtgcttgtgttgattgtttagaggttggaacctggaacaaaaatctggtggcacagcacccgttttgtttggttcacgttttttccatttgtgaaagacattttttgttaattagaatcaattccagttgaagtgggaaccactagcttctcattcctctaatgttatgtttggcaataaaaa
